United States Patent Application Publication US 2005/0118625 A1 - sequence listing, part 6

SEQ ID NO: 32740 - DNA, 25 bp, Probe Sequence
ctattaccagctcatgaagacagcc

SEQ ID NO: 32741 - DNA, 25 bp, Probe Sequence
cctattaccagctcatgaagacagc

SEQ ID NO: 32742 - DNA, 25 bp, Probe Sequence
aaccaagtgttacaagccccagaat

SEQ ID NO: 32743 - DNA, 25 bp, Probe Sequence
ctcatgaagacagccctcaaggaag

SEQ ID NO: 32744 - DNA, 25 bp, Probe Sequence
tattaccagctcatgaagacagccc

SEQ ID NO: 32745 - DNA, 25 bp, Probe Sequence
ttgagtgtatgaatggaatgatgat

SEQ ID NO: 32746 - DNA, 25 bp, Probe Sequence
gaattaactccacaccatagtatgc

SEQ ID NO: 32747 - DNA, 25 bp, Probe Sequence
tgagtgtatgaatggaatgatgatc

SEQ ID NO: 32748 - DNA, 25 bp, Probe Sequence
gatcactgtgctataatgtactgaa

SEQ ID NO: 32749 - DNA, 25 bp, Probe Sequence
ggaattaactccacaccatagtatg

SEQ ID NO: 32750 - DNA, 25 bp, Probe Sequence
tcaactaatgcgacttatggtagcc

SEQ ID NO: 32751 - DNA, 25 bp, Probe Sequence
gtcaactaatgcgacttatggtagc

SEQ ID NO: 32752 - DNA, 25 bp, Probe Sequence
gcagcagttatttgagtgtatgaat

SEQ ID NO: 32753 - DNA, 25 bp, Probe Sequence
tgagtgaatggtttgaaatgaagac

SEQ ID NO: 32754 - DNA, 25 bp, Probe Sequence
ctgagtgaatggtttgaaatgaaga

SEQ ID NO: 32755 - DNA, 25 bp, Probe Sequence
tgtggttctcaaatataggcattct

SEQ ID NO: 32756 - DNA, 25 bp, Probe Sequence
gtgtggttctcaaatataggcattc

SEQ ID NO: 32757 - DNA, 25 bp, Probe Sequence
aattaaccaaggtgttaggtgtgac

SEQ ID NO: 32758 - DNA, 25 bp, Probe Sequence
attagagaaaggttgggacagaaag

SEQ ID NO: 32759 - DNA, 25 bp, Probe Sequence
gtggttctcaaatataggcattctg

SEQ ID NO: 32760 - DNA, 25 bp, Probe Sequence
cagaagggctatggattagtttgaa

SEQ ID NO: 32761 - DNA, 25 bp, Probe Sequence
gaagcagcagttatttgagtgtatg

SEQ ID NO: 32762 - DNA, 25 bp, Probe Sequence
agaagcagcagttatttgagtgtat

SEQ ID NO: 32763 - DNA, 25 bp, Probe Sequence
gcagttatttgagtgtatgaatgga

SEQ ID NO: 32764 - DNA, 25 bp, Probe Sequence
agcagttatttgagtgtatgaatgg

SEQ ID NO: 32765 - DNA, 25 bp, Probe Sequence
tgctttgccttatttccacatttaa

SEQ ID NO: 32766 - DNA, 25 bp, Probe Sequence
gcagtgtagtctcaattatatctga

SEQ ID NO: 32767 - DNA, 25 bp, Probe Sequence
agcagtgtagtctcaattatatctg

SEQ ID NO: 32768 - DNA, 25 bp, Probe Sequence
actgagtgaatggtttgaaatgaag

SEQ ID NO: 32769 - DNA, 25 bp, Probe Sequence
tagcatagattgagaacagttgaac

SEQ ID NO: 32770 - DNA, 25 bp, Probe Sequence
ggatgtgtgagaataatgtgttcat

SEQ ID NO: 32771 - DNA, 25 bp, Probe Sequence
ttagcatagattgagaacagttgaa

SEQ ID NO: 32772 - DNA, 25 bp, Probe Sequence
cggatgtgtgagaataatgtgttca

SEQ ID NO: 32773 - DNA, 25 bp, Probe Sequence
agcatagattgagaacagttgaact

SEQ ID NO: 32774 - DNA, 25 bp, Probe Sequence
gcatagattgagaacagttgaactc

SEQ ID NO: 32775 - DNA, 25 bp, Probe Sequence
catagattgagaacagttgaactct

SEQ ID NO: 32776 - DNA, 25 bp, Probe Sequence
tagcagaaactaactccgtaatgaa

SEQ ID NO: 32777 - DNA, 25 bp, Probe Sequence
tcctcattcctaaataacttgcctt

SEQ ID NO: 32778 - DNA, 25 bp, Probe Sequence
cagaaactaactccgtaatgaatgg

SEQ ID NO: 32779 - DNA, 25 bp, Probe Sequence
gcagaaactaactccgtaatgaatg

SEQ ID NO: 32780 - DNA, 25 bp, Probe Sequence
agcagaaactaactccgtaatgaat

SEQ ID NO: 32781 - DNA, 25 bp, Probe Sequence
ctcctcattcctaaataacttgcct

SEQ ID NO: 32782 - DNA, 25 bp, Probe Sequence
aactaactccgtaatgaatggaatt

SEQ ID NO: 32783 - DNA, 25 bp, Probe Sequence
aaataacttgccttacatatcagcc

SEQ ID NO: 32784 - DNA, 25 bp, Probe Sequence
agattgagaacagttgaactcttaa

SEQ ID NO: 32785 - DNA, 25 bp, Probe Sequence
attagtgcctcggaaatgtagaatt

SEQ ID NO: 32786 - DNA, 25 bp, Probe Sequence
aattagtgcctcggaaatgtagaat

SEQ ID NO: 32787 - DNA, 25 bp, Probe Sequence
aaattagtgcctcggaaatgtagaa

SEQ ID NO: 32788 - DNA, 25 bp, Probe Sequence
aataacttgccttacatatcagccc

SEQ ID NO: 32789 - DNA, 25 bp, Probe Sequence
tatggaatacctggtactaacgtag

SEQ ID NO: 32790 - DNA, 25 bp, Probe Sequence
cctcctcattcctaaataacttgcc

SEQ ID NO: 32791 - DNA, 25 bp, Probe Sequence
ccctcctcattcctaaataacttgc

SEQ ID NO: 32792 - DNA, 25 bp, Probe Sequence
gccctcctcattcctaaataacttg

SEQ ID NO: 32793 - DNA, 25 bp, Probe Sequence
cttcacctcggcaacaattacttac

SEQ ID NO: 32794 - DNA, 25 bp, Probe Sequence
acttcacctcggcaacaattactta

SEQ ID NO: 32795 - DNA, 25 bp, Probe Sequence
cattagacgtggaactatctgatga

SEQ ID NO: 32796 - DNA, 25 bp, Probe Sequence
aagagggtggaagatgaaatgaaag

SEQ ID NO: 32797 - DNA, 25 bp, Probe Sequence
gaagagggtggaagatgaaatgaaa

SEQ ID NO: 32798 - DNA, 25 bp, Probe Sequence
tagacgtggaactatctgatgattc

SEQ ID NO: 32799 - DNA, 25 bp, Probe Sequence
gaactatctgatgattccttccctc

SEQ ID NO: 32800 - DNA, 25 bp, Probe Sequence
ttagacgtggaactatctgatgatt

SEQ ID NO: 32801 - DNA, 25 bp, Probe Sequence
ccagactccaaagggtatcttaaat

SEQ ID NO: 32802 - DNA, 25 bp, Probe Sequence
agactccaaagggtatcttaaatgc

SEQ ID NO: 32803 - DNA, 25 bp, Probe Sequence
attagacgtggaactatctgatgat

SEQ ID NO: 32804 - DNA, 25 bp, Probe Sequence
tttccagactccaaagggtatctta

SEQ ID NO: 32805 - DNA, 25 bp, Probe Sequence
tccagactccaaagggtatcttaaa

SEQ ID NO: 32806 - DNA, 25 bp, Probe Sequence
ttccagactccaaagggtatcttaa

SEQ ID NO: 32807 - DNA, 25 bp, Probe Sequence
aactatctgatgattccttccctcc

SEQ ID NO: 32808 - DNA, 25 bp, Probe Sequence
cagactccaaagggtatcttaaatg

SEQ ID NO: 32809 - DNA, 25 bp, Probe Sequence
gaccttgcagtacaacatctacaat

SEQ ID NO: 32810 - DNA, 25 bp, Probe Sequence
aacttcacctcggcaacaattactt

SEQ ID NO: 32811 - DNA, 25 bp, Probe Sequence
ttcaacttcacctcggcaacaatta

SEQ ID NO: 32812 - DNA, 25 bp, Probe Sequence
gcattagacgtggaactatctgatg

SEQ ID NO: 32813 - DNA, 25 bp, Probe Sequence
agaagagggtggaagatgaaatgaa

SEQ ID NO: 32814 - DNA, 25 bp, Probe Sequence
tctcaaggctggttatttcaacttc

SEQ ID NO: 32815 - DNA, 25 bp, Probe Sequence
ctctcaaggctggttatttcaactt

SEQ ID NO: 32816 - DNA, 25 bp, Probe Sequence
accttgcagtacaacatctacaatg

SEQ ID NO: 32817 - DNA, 25 bp, Probe Sequence
ctccacttgtctatctctatcctga

SEQ ID NO: 32818 - DNA, 25 bp, Probe Sequence
tctccacttgtctatctctatcctg

SEQ ID NO: 32819 - DNA, 25 bp, Probe Sequence
gtctccacttgtctatctctatcct

SEQ ID NO: 32820 - DNA, 25 bp, Probe Sequence
tgttgtctccacttgtctatctcta

SEQ ID NO: 32821 - DNA, 25 bp, Probe Sequence
tgtctccacttgtctatctctatcc

SEQ ID NO: 32822 - DNA, 25 bp, Probe Sequence
gttgtctccacttgtctatctctat

SEQ ID NO: 32823 - DNA, 25 bp, Probe Sequence
tatcctgttgtctccacttgtctat

SEQ ID NO: 32824 - DNA, 25 bp, Probe Sequence
atatcctgttgtctccacttgtcta

SEQ ID NO: 32825 - DNA, 25 bp, Probe Sequence
ttgtctccacttgtctatctctatc

SEQ ID NO: 32826 - DNA, 25 bp, Probe Sequence
aatatcctgttgtctccacttgtct

SEQ ID NO: 32827 - DNA, 25 bp, Probe Sequence
ctgttgtctccacttgtctatctct

SEQ ID NO: 32828 - DNA, 25 bp, Probe Sequence
gatgctaccaatatcctgttgtctc

SEQ ID NO: 32829 - DNA, 25 bp, Probe Sequence
taccaatatcctgttgtctccactt

SEQ ID NO: 32830 - DNA, 25 bp, Probe Sequence
atcctgttgtctccacttgtctatc

SEQ ID NO: 32831 - DNA, 25 bp, Probe Sequence
caatatcctgttgtctccacttgtc

SEQ ID NO: 32832 - DNA, 25 bp, Probe Sequence
ctaccaatatcctgttgtctccact

SEQ ID NO: 32833 - DNA, 25 bp, Probe Sequence
tccacttgtctatctctatcctgac

SEQ ID NO: 32834 - DNA, 25 bp, Probe Sequence
cctgttgtctccacttgtctatctc

SEQ ID NO: 32835 - DNA, 25 bp, Probe Sequence
atgctaccaatatcctgttgtctcc

SEQ ID NO: 32836 - DNA, 25 bp, Probe Sequence
tcctgttgtctccacttgtctatct

SEQ ID NO: 32837 - DNA, 25 bp, Probe Sequence
aatagagaaatgagtgaatgtgggt

SEQ ID NO: 32838 - DNA, 25 bp, Probe Sequence
tctatctctatcctgacattcccaa

SEQ ID NO: 32839 - DNA, 25 bp, Probe Sequence
ctatctctatcctgacattcccaag

SEQ ID NO: 32840 - DNA, 25 bp, Probe Sequence
ccaatatcctgttgtctccacttgt

SEQ ID NO: 32841 - DNA, 25 bp, Probe Sequence
aaagattgggtctaggatatggtgg

SEQ ID NO: 32842 - DNA, 25 bp, Probe Sequence
ctctgaattagtccttgcttggctg

SEQ ID NO: 32843 - DNA, 25 bp, Probe Sequence
ctgctctgaattagtccttgcttgg

SEQ ID NO: 32844 - DNA, 25 bp, Probe Sequence
tctttgcttgcctctctgtttgtaa

SEQ ID NO: 32845 - DNA, 25 bp, Probe Sequence
ttctttgcttgcctctctgtttgta

SEQ ID NO: 32846 - DNA, 25 bp, Probe Sequence
gaagattgagagcccaaggtttaaa

SEQ ID NO: 32847 - DNA, 25 bp, Probe Sequence
ggaagattgagagcccaaggtttaa

SEQ ID NO: 32848 - DNA, 25 bp, Probe Sequence
ctttgcttgcctctctgtttgtaac

SEQ ID NO: 32849 - DNA, 25 bp, Probe Sequence
gctgctctgaattagtccttgcttg

SEQ ID NO: 32850 - DNA, 25 bp, Probe Sequence
ttgcctctctgtttgtaaccttgtc

SEQ ID NO: 32851 - DNA, 25 bp, Probe Sequence
cttgcctctctgtttgtaaccttgt

SEQ ID NO: 32852 - DNA, 25 bp, Probe Sequence
aagattgggtctaggatatggtggg

SEQ ID NO: 32853 - DNA, 25 bp, Probe Sequence
ctgagctgctctgaattagtccttg

SEQ ID NO: 32854 - DNA, 25 bp, Probe Sequence
tctgagctgctctgaattagtcctt

SEQ ID NO: 32855 - DNA, 25 bp, Probe Sequence
ttctgagctgctctgaattagtcct

SEQ ID NO: 32856 - DNA, 25 bp, Probe Sequence
gtttctgagctgctctgaattagtc

SEQ ID NO: 32857 - DNA, 25 bp, Probe Sequence
caaagaggtagaaaagattgggtct

SEQ ID NO: 32858 - DNA, 25 bp, Probe Sequence
acaaagaggtagaaaagattgggtc

SEQ ID NO: 32859 - DNA, 25 bp, Probe Sequence
gacaaagaggtagaaaagattgggt

SEQ ID NO: 32860 - DNA, 25 bp, Probe Sequence
gaattagtccttgcttggctgcttg

SEQ ID NO: 32861 - DNA, 25 bp, Probe Sequence
aaaagattgggtctaggatatggtg

SEQ ID NO: 32862 - DNA, 25 bp, Probe Sequence
gaaaagattgggtctaggatatggt

SEQ ID NO: 32863 - DNA, 25 bp, Probe Sequence
agaaaagattgggtctaggatatgg

SEQ ID NO: 32864 - DNA, 25 bp, Probe Sequence
ttaaacttcttctctgaagggaggt

SEQ ID NO: 32865 - DNA, 25 bp, Probe Sequence
gctaaggaagatggtataggtgaag

SEQ ID NO: 32866 - DNA, 25 bp, Probe Sequence
ctaaggaagatggtataggtgaagg

SEQ ID NO: 32867 - DNA, 25 bp, Probe Sequence
taaggaagatggtataggtgaaggc

SEQ ID NO: 32868 - DNA, 25 bp, Probe Sequence
ggctaaggaagatggtataggtgaa

SEQ ID NO: 32869 - DNA, 25 bp, Probe Sequence
tggctaaggaagatggtataggtga

SEQ ID NO: 32870 - DNA, 25 bp, Probe Sequence
gtggctaaggaagatggtataggtg

SEQ ID NO: 32871 - DNA, 25 bp, Probe Sequence
gatgccagaactgtaggttataagg

SEQ ID NO: 32872 - DNA, 25 bp, Probe Sequence
ggatgccagaactgtaggttataag

SEQ ID NO: 32873 - DNA, 25 bp, Probe Sequence
agtttgttctttggtattgatgtgg

SEQ ID NO: 32874 - DNA, 25 bp, Probe Sequence
tttcttgtttctgtctcttgctttc

SEQ ID NO: 32875 - DNA, 25 bp, Probe Sequence
tttggtttcttgtttctgtctcttg

SEQ ID NO: 32876 - DNA, 25 bp, Probe Sequence
gtttggtttcttgtttctgtctctt

SEQ ID NO: 32877 - DNA, 25 bp, Probe Sequence
ctcatccttgggtccttcattatta

SEQ ID NO: 32878 - DNA, 25 bp, Probe Sequence
gtttcttgtttctgtctcttgcttt

SEQ ID NO: 32879 - DNA, 25 bp, Probe Sequence
tttgaggtttggtttcttgtttctg

SEQ ID NO: 32880 - DNA, 25 bp, Probe Sequence
gtttgttctttggtattgatgtggg

SEQ ID NO: 32881 - DNA, 25 bp, Probe Sequence
tcatccttgggtccttcattattat

SEQ ID NO: 32882 - DNA, 25 bp, Probe Sequence
aaagtaatctgaatttcccaagtgc

SEQ ID NO: 32883 - DNA, 25 bp, Probe Sequence
gggctaatctttgaagtttgttctt

SEQ ID NO: 32884 - DNA, 25 bp, Probe Sequence
tttgttctttggtattgatgtgggt

SEQ ID NO: 32885 - DNA, 25 bp, Probe Sequence
ttcttgtttctgtctcttgctttca

SEQ ID NO: 32886 - DNA, 25 bp, Probe Sequence
agggctaatctttgaagtttgttct

SEQ ID NO: 32887 - DNA, 25 bp, Probe Sequence
taatctgaatttcccaagtgcctac

SEQ ID NO: 32888 - DNA, 25 bp, Probe Sequence
gtaatctgaatttcccaagtgccta

SEQ ID NO: 32889 - DNA, 25 bp, Probe Sequence
aattacagcaagactgtcagcctcc

SEQ ID NO: 32890 - DNA, 25 bp, Probe Sequence
cggttgtaaacaaacagtacacatg

SEQ ID NO: 32891 - DNA, 25 bp, Probe Sequence
gtaaacaaacagtacacatgtcatt

SEQ ID NO: 32892 - DNA, 25 bp, Probe Sequence
ccggttgtaaacaaacagtacacat

SEQ ID NO: 32893 - DNA, 25 bp, Probe Sequence
ggttgtaaacaaacagtacacatgt

SEQ ID NO: 32894 - DNA, 25 bp, Probe Sequence
ttgtaaacaaacagtacacatgtca

SEQ ID NO: 32895 - DNA, 25 bp, Probe Sequence
tgtaaacaaacagtacacatgtcat

SEQ ID NO: 32896 - DNA, 25 bp, Probe Sequence
gttgtaaacaaacagtacacatgtc

SEQ ID NO: 32897 - DNA, 25 bp, Probe Sequence
taaacaaacagtacacatgtcattt

SEQ ID NO: 32898 - DNA, 25 bp, Probe Sequence
aaacaaacagtacacatgtcatttt

SEQ ID NO: 32899 - DNA, 25 bp, Probe Sequence
aacaaacagtacacatgtcattttg

SEQ ID NO: 32900 - DNA, 25 bp, Probe Sequence
caaacagtacacatgtcattttgtg

SEQ ID NO: 32901 - DNA, 25 bp, Probe Sequence
gagccaatgatgatctgaattactg

SEQ ID NO: 32902 - DNA, 25 bp, Probe Sequence
ataggagccaatgatgatctgaatt

SEQ ID NO: 32903 - DNA, 25 bp, Probe Sequence
aataggagccaatgatgatctgaat

SEQ ID NO: 32904 - DNA, 25 bp, Probe Sequence
caatgatgatctgaattactggtcc

SEQ ID NO: 32905 - DNA, 25 bp, Probe Sequence
aatgatgatctgaattactggtccg

SEQ ID NO: 32906 - DNA, 25 bp, Probe Sequence
ggagccaatgatgatctgaattact

SEQ ID NO: 32907 - DNA, 25 bp, Probe Sequence
aggagccaatgatgatctgaattac

SEQ ID NO: 32908 - DNA, 25 bp, Probe Sequence
taggagccaatgatgatctgaatta

SEQ ID NO: 32909 - DNA, 25 bp, Probe Sequence
atgatgatctgaattactggtccga

SEQ ID NO: 32910 - DNA, 25 bp, Probe Sequence
gatgatctgaattactggtccgact

SEQ ID NO: 32911 - DNA, 25 bp, Probe Sequence
cattgtatgatgtgttgtgatagct

SEQ ID NO: 32912 - DNA, 25 bp, Probe Sequence
atgatctgaattactggtccgactg

SEQ ID NO: 32913 - DNA, 25 bp, Probe Sequence
tgatgatctgaattactggtccgac

SEQ ID NO: 32914 - DNA, 25 bp, Probe Sequence
agaagaaataggagccaatgatgat

SEQ ID NO: 32915 - DNA, 25 bp, Probe Sequence
cagaagaaataggagccaatgatga

SEQ ID NO: 32916 - DNA, 25 bp, Probe Sequence
atctgaattactggtccgactggta

SEQ ID NO: 32917 - DNA, 25 bp, Probe Sequence
ccaatgatgatctgaattactggtc

SEQ ID NO: 32918 - DNA, 25 bp, Probe Sequence
aatgggcaatgacaggtaaattaag

SEQ ID NO: 32919 - DNA, 25 bp, Probe Sequence
caatgggcaatgacaggtaaattaa

SEQ ID NO: 32920 - DNA, 25 bp, Probe Sequence
atgggcaatgacaggtaaattaaga

SEQ ID NO: 32921 - DNA, 25 bp, Probe Sequence
agccaatgatgatctgaattactgg

SEQ ID NO: 32922 - DNA, 25 bp, Probe Sequence
cactgtatttgtatctctgaagcat

SEQ ID NO: 32923 - DNA, 25 bp, Probe Sequence
gccaatgatgatctgaattactggt

SEQ ID NO: 32924 - DNA, 25 bp, Probe Sequence
ggcaatgacaggtaaattaagacat

SEQ ID NO: 32925 - DNA, 25 bp, Probe Sequence
taagactaatgctcagaacctaacc

SEQ ID NO: 32926 - DNA, 25 bp, Probe Sequence
ctgtaatgaaccgctgaatatgaag

SEQ ID NO: 32927 - DNA, 25 bp, Probe Sequence
ctaatgctcagaacctaaccactac

SEQ ID NO: 32928 - DNA, 25 bp, Probe Sequence
actgtaatgaaccgctgaatatgaa

SEQ ID NO: 32929 - DNA, 25 bp, Probe Sequence
actaatgctcagaacctaaccacta

SEQ ID NO: 32930 - DNA, 25 bp, Probe Sequence
tcagaacctaaccactaccttacag

SEQ ID NO: 32931 - DNA, 25 bp, Probe Sequence
ctcagaacctaaccactaccttaca

SEQ ID NO: 32932 - DNA, 25 bp, Probe Sequence
cactgtaatgaaccgctgaatatga

SEQ ID NO: 32933 - DNA, 25 bp, Probe Sequence
ctaagactaatgctcagaacctaac

SEQ ID NO: 32934 - DNA, 25 bp, Probe Sequence
tacactgtaatgaaccgctgaatat

SEQ ID NO: 32935 - DNA, 25 bp, Probe Sequence
atacactgtaatgaaccgctgaata

SEQ ID NO: 32936 - DNA, 25 bp, Probe Sequence
tatacactgtaatgaaccgctgaat

SEQ ID NO: 32937 - DNA, 25 bp, Probe Sequence
aagactaatgctcagaacctaacca

SEQ ID NO: 32938 - DNA, 25 bp, Probe Sequence
ttatacactgtaatgaaccgctgaa

SEQ ID NO: 32939 - DNA, 25 bp, Probe Sequence
acactgtaatgaaccgctgaatatg

SEQ ID NO: 32940 - DNA, 25 bp, Probe Sequence
tctaagactaatgctcagaacctaa

SEQ ID NO: 32941 - DNA, 25 bp, Probe Sequence
taatgctcagaacctaaccactacc

SEQ ID NO: 32942 - DNA, 25 bp, Probe Sequence
gactaatgctcagaacctaaccact

SEQ ID NO: 32943 - DNA, 25 bp, Probe Sequence
agactaatgctcagaacctaaccac

SEQ ID NO: 32944 - DNA, 25 bp, Probe Sequence
cagaacctaaccactaccttacagt

SEQ ID NO: 32945 - DNA, 25 bp, Probe Sequence
gctcagaacctaaccactaccttac

SEQ ID NO: 32946 - DNA, 25 bp, Probe Sequence
tgctcagaacctaaccactacctta

SEQ ID NO: 32947 - DNA, 25 bp, Probe Sequence
tatattgataacagcactgactagg

SEQ ID NO: 32948 - DNA, 25 bp, Probe Sequence
agcatttggcatttatttgtgagaa

SEQ ID NO: 32949 - DNA, 25 bp, Probe Sequence
gtacacttatagaatgaagaaggca

SEQ ID NO: 32950 - DNA, 25 bp, Probe Sequence
tacacttatagaatgaagaaggcaa

SEQ ID NO: 32951 - DNA, 25 bp, Probe Sequence
cgggtctaatcgtgtaggaataaag

SEQ ID NO: 32952 - DNA, 25 bp, Probe Sequence
tattcctttcctccaatgaaccaaa

SEQ ID NO: 32953 - DNA, 25 bp, Probe Sequence
gggtctaatcgtgtaggaataaagc

SEQ ID NO: 32954 - DNA, 25 bp, Probe Sequence
ctattcctttcctccaatgaaccaa

SEQ ID NO: 32955 - DNA, 25 bp, Probe Sequence
gttgtatttaagtgatcgtgtgagt

SEQ ID NO: 32956 - DNA, 25 bp, Probe Sequence
cagttgtatttaagtgatcgtgtga

SEQ ID NO: 32957 - DNA, 25 bp, Probe Sequence
tatttaagtgatcgtgtgagtcgtc

SEQ ID NO: 32958 - DNA, 25 bp, Probe Sequence
ttgtatttaagtgatcgtgtgagtc

SEQ ID NO: 32959 - DNA, 25 bp, Probe Sequence
agttgtatttaagtgatcgtgtgag

SEQ ID NO: 32960 - DNA, 25 bp, Probe Sequence
attcctttcctccaatgaaccaaac

SEQ ID NO: 32961 - DNA, 25 bp, Probe Sequence
acacttatagaatgaagaaggcaaa

SEQ ID NO: 32962 - DNA, 25 bp, Probe Sequence
gtatttaagtgatcgtgtgagtcgt

SEQ ID NO: 32963 - DNA, 25 bp, Probe Sequence
tgtatttaagtgatcgtgtgagtcg

SEQ ID NO: 32964 - DNA, 25 bp, Probe Sequence
cggttcaccacagttgtatttaagt

SEQ ID NO: 32965 - DNA, 25 bp, Probe Sequence
gcgaaacacgatattgtactaacat

SEQ ID NO: 32966 - DNA, 25 bp, Probe Sequence
acagttgtatttaagtgatcgtgtg

SEQ ID NO: 32967 - DNA, 25 bp, Probe Sequence
ggttcaccacagttgtatttaagtg

SEQ ID NO: 32968 - DNA, 25 bp, Probe Sequence
ttacatttggagaacccgtactcta

SEQ ID NO: 32969 - DNA, 25 bp, Probe Sequence
ggtctaatcgtgtaggaataaagct

SEQ ID NO: 32970 - DNA, 25 bp, Probe Sequence
tctaatcgtgtaggaataaagctgt

SEQ ID NO: 32971 - DNA, 25 bp, Probe Sequence
gtctaatcgtgtaggaataaagctg

SEQ ID NO: 32972 - DNA, 25 bp, Probe Sequence
tacatttggagaacccgtactctag

SEQ ID NO: 32973 - DNA, 25 bp, Probe Sequence
gaatggatgatgaaggagatgatga

SEQ ID NO: 32974 - DNA, 25 bp, Probe Sequence
tgtattgattagcctgtatgtagca

SEQ ID NO: 32975 - DNA, 25 bp, Probe Sequence
ccactgtattgattagcctgtatgt

SEQ ID NO: 32976 - DNA, 25 bp, Probe Sequence
accactgtattgattagcctgtatg

SEQ ID NO: 32977 - DNA, 25 bp, Probe Sequence
aatggatgatgaaggagatgatgac

SEQ ID NO: 32978 - DNA, 25 bp, Probe Sequence
ctgtattgattagcctgtatgtagc

SEQ ID NO: 32979 - DNA, 25 bp, Probe Sequence
agattcgcaagaccttcaatatcaa

SEQ ID NO: 32980 - DNA, 25 bp, Probe Sequence
ggaatggatgatgaaggagatgatg

SEQ ID NO: 32981 - DNA, 25 bp, Probe Sequence
taccactgtattgattagcctgtat

SEQ ID NO: 32982 - DNA, 25 bp, Probe Sequence
gagattcgcaagaccttcaatatca

SEQ ID NO: 32983 - DNA, 25 bp, Probe Sequence
gtaccactgtattgattagcctgta

SEQ ID NO: 32984 - DNA, 25 bp, Probe Sequence
attgcctagagactcagttactacc

SEQ ID NO: 32985 - DNA, 25 bp, Probe Sequence
tattgcctagagactcagttactac

SEQ ID NO: 32986 - DNA, 25 bp, Probe Sequence
ggagattcgcaagaccttcaatatc

SEQ ID NO: 32987 - DNA, 25 bp, Probe Sequence
cactgtattgattagcctgtatgta

SEQ ID NO: 32988 - DNA, 25 bp, Probe Sequence
atggatgatgaaggagatgatgacc

SEQ ID NO: 32989 - DNA, 25 bp, Probe Sequence
ctgacactgtaacactgtaaggatt

SEQ ID NO: 32990 - DNA, 25 bp, Probe Sequence
gacactgtaacactgtaaggattgt

SEQ ID NO: 32991 - DNA, 25 bp, Probe Sequence
tgacactgtaacactgtaaggattg

SEQ ID NO: 32992 - DNA, 25 bp, Probe Sequence
actgtattgattagcctgtatgtag

SEQ ID NO: 32993 - DNA, 25 bp, Probe Sequence
aaggagtaccactgtattgattagc

SEQ ID NO: 32994 - DNA, 25 bp, Probe Sequence
gagtaccactgtattgattagcctg

SEQ ID NO: 32995 - DNA, 25 bp, Probe Sequence
gtattgattagcctgtatgtagcag

SEQ ID NO: 32996 - DNA, 25 bp, Probe Sequence
atattgcctagagactcagttacta

SEQ ID NO: 32997 - DNA, 25 bp, Probe Sequence
tcccaatattcaaagctgctaaatg

SEQ ID NO: 32998 - DNA, 25 bp, Probe Sequence
gattcccaatattcaaagctgctaa

SEQ ID NO: 32999 - DNA, 25 bp, Probe Sequence
agattcccaatattcaaagctgcta

SEQ ID NO: 33000 - DNA, 25 bp, Probe Sequence
ttcccaatattcaaagctgctaaat

SEQ ID NO: 33001 - DNA, 25 bp, Probe Sequence
attcccaatattcaaagctgctaaa

SEQ ID NO: 33002 - DNA, 25 bp, Probe Sequence
gagattcccaatattcaaagctgct

SEQ ID NO: 33003 - DNA, 25 bp, Probe Sequence
aaaggagattcccaatattcaaagc

SEQ ID NO: 33004 - DNA, 25 bp, Probe Sequence
aaggagattcccaatattcaaagct

SEQ ID NO: 33005 - DNA, 25 bp, Probe Sequence
aggagattcccaatattcaaagctg

SEQ ID NO: 33006 - DNA, 25 bp, Probe Sequence
ggagattcccaatattcaaagctgc

SEQ ID NO: 33007 - DNA, 25 bp, Probe Sequence
aaaaggagattcccaatattcaaag

SEQ ID NO: 33008 - DNA, 25 bp, Probe Sequence
cactggtgtgataaaccccatttca

SEQ ID NO: 33009 - DNA, 25 bp, Probe Sequence
tcactggtgtgataaaccccatttc

SEQ ID NO: 33010 - DNA, 25 bp, Probe Sequence
actggtgtgataaaccccatttcac

SEQ ID NO: 33011 - DNA, 25 bp, Probe Sequence
acagtgccaagaatgacaagatatt

SEQ ID NO: 33012 - DNA, 25 bp, Probe Sequence
aacagtgccaagaatgacaagatat

SEQ ID NO: 33013 - DNA, 25 bp, Probe Sequence
cagtgccaagaatgacaagatatta

SEQ ID NO: 33014 - DNA, 25 bp, Probe Sequence
agtgccaagaatgacaagatattaa

SEQ ID NO: 33015 - DNA, 25 bp, Probe Sequence
agctcattaccagtaggacataatt

SEQ ID NO: 33016 - DNA, 25 bp, Probe Sequence
aagctcattaccagtaggacataat

SEQ ID NO: 33017 - DNA, 25 bp, Probe Sequence
ctgtgctatcctacgaaatcatttg

SEQ ID NO: 33018 - DNA, 25 bp, Probe Sequence
aaacagtgccaagaatgacaagata

SEQ ID NO: 33019 - DNA, 25 bp, Probe Sequence
gtgctatcctacgaaatcatttgtt

SEQ ID NO: 33020 - DNA, 25 bp, Probe Sequence
actgtgctatcctacgaaatcattt

SEQ ID NO: 33021 - DNA, 25 bp, Probe Sequence
cttgagaacttactaaaggcacttc

SEQ ID NO: 33022 - DNA, 25 bp, Probe Sequence
tgtgctatcctacgaaatcatttgt

SEQ ID NO: 33023 - DNA, 25 bp, Probe Sequence
ttagaaacagtgccaagaatgacaa

SEQ ID NO: 33024 - DNA, 25 bp, Probe Sequence
tttagaaacagtgccaagaatgaca

SEQ ID NO: 33025 - DNA, 25 bp, Probe Sequence
taagttgtgtttattcctggagtga

SEQ ID NO: 33026 - DNA, 25 bp, Probe Sequence
ctttagaaacagtgccaagaatgac

SEQ ID NO: 33027 - DNA, 25 bp, Probe Sequence
ttgagaacttactaaaggcacttcc

SEQ ID NO: 33028 - DNA, 25 bp, Probe Sequence
ctaagttgtgtttattcctggagtg

SEQ ID NO: 33029 - DNA, 25 bp, Probe Sequence
tctaagttgtgtttattcctggagt

SEQ ID NO: 33030 - DNA, 25 bp, Probe Sequence
tgctatcctacgaaatcatttgttt

SEQ ID NO: 33031 - DNA, 25 bp, Probe Sequence
cactgtgctatcctacgaaatcatt

SEQ ID NO: 33032 - DNA, 25 bp, Probe Sequence
tagaaacagtgccaagaatgacaag

SEQ ID NO: 33033 - DNA, 25 bp, Probe Sequence
gcttgagaacttactaaaggcactt

SEQ ID NO: 33034 - DNA, 25 bp, Probe Sequence
aagttgtgtttattcctggagtgac

SEQ ID NO: 33035 - DNA, 25 bp, Probe Sequence
tattgcctccattctcctctctcta

SEQ ID NO: 33036 - DNA, 25 bp, Probe Sequence
attgcctccattctcctctctctat

SEQ ID NO: 33037 - DNA, 25 bp, Probe Sequence
attctcctcctattgcctccattct

SEQ ID NO: 33038 - DNA, 25 bp, Probe Sequence
cattctcctcctattgcctccattc

SEQ ID NO: 33039 - DNA, 25 bp, Probe Sequence
cagcaaatcctcttcccttattcta

SEQ ID NO: 33040 - DNA, 25 bp, Probe Sequence
ttgcctccattctcctctctctatc

SEQ ID NO: 33041 - DNA, 25 bp, Probe Sequence
ctattgcctccattctcctctctct

SEQ ID NO: 33042 - DNA, 25 bp, Probe Sequence
agcaaatcctcttcccttattctaa

SEQ ID NO: 33043 - DNA, 25 bp, Probe Sequence
gtgtgaactctttctttggtattcc

SEQ ID NO: 33044 - DNA, 25 bp, Probe Sequence
ggtgtgaactctttctttggtattc

SEQ ID NO: 33045 - DNA, 25 bp, Probe Sequence
attctcctctctctatccctgaaat

SEQ ID NO: 33046 - DNA, 25 bp, Probe Sequence
tggtgtgaactctttctttggtatt

SEQ ID NO: 33047 - DNA, 25 bp, Probe Sequence
ttctcctctctctatccctgaaatc

SEQ ID NO: 33048 - DNA, 25 bp, Probe Sequence
gcaaatcctcttcccttattctaaa

SEQ ID NO: 33049 - DNA, 25 bp, Probe Sequence
cattctcctctctctatccctgaaa

SEQ ID NO: 33050 - DNA, 25 bp, Probe Sequence
ctggtgtgaactctttctttggtat

SEQ ID NO: 33051 - DNA, 25 bp, Probe Sequence
aaatcctcttcccttattctaaagc

SEQ ID NO: 33052 - DNA, 25 bp, Probe Sequence
ttctcctcctattgcctccattctc

SEQ ID NO: 33053 - DNA, 25 bp, Probe Sequence
tctcctctctctatccctgaaatcc

SEQ ID NO: 33054 - DNA, 25 bp, Probe Sequence
ccagcaaatcctcttcccttattct

SEQ ID NO: 33055 - DNA, 25 bp, Probe Sequence
ctcctctctctatccctgaaatcca

SEQ ID NO: 33056 - DNA, 25 bp, Probe Sequence
cctattgcctccattctcctctctc

SEQ ID NO: 33057 - DNA, 25 bp, Probe Sequence
ctcctattgcctccattctcctctc

SEQ ID NO: 33058 - DNA, 25 bp, Probe Sequence
ccattctcctctctctatccctgaa

SEQ ID NO: 33059 - DNA, 25 bp, Probe Sequence
gattcaagagtattctcacttctgg

SEQ ID NO: 33060 - DNA, 25 bp, Probe Sequence
gaatgtagtgtcagaggatactgtg

SEQ ID NO: 33061 - DNA, 25 bp, Probe Sequence
aactggaatgtagtgtcagaggata

SEQ ID NO: 33062 - DNA, 25 bp, Probe Sequence
ctggaatgtagtgtcagaggatact

SEQ ID NO: 33063 - DNA, 25 bp, Probe Sequence
atgtccattcaagcagtcattctct

SEQ ID NO: 33064 - DNA, 25 bp, Probe Sequence
ggaatgtagtgtcagaggatactgt

SEQ ID NO: 33065 - DNA, 25 bp, Probe Sequence
tggaatgtagtgtcagaggatactg

SEQ ID NO: 33066 - DNA, 25 bp, Probe Sequence
actggaatgtagtgtcagaggatac

SEQ ID NO: 33067 - DNA, 25 bp, Probe Sequence
aatgtagtgtcagaggatactgtgg

SEQ ID NO: 33068 - DNA, 25 bp, Probe Sequence
agattcaagagtattctcacttctg

SEQ ID NO: 33069 - DNA, 25 bp, Probe Sequence
agaccaaggaataacattctgtagt

SEQ ID NO: 33070 - DNA, 25 bp, Probe Sequence
aagtgttaatgctgcaagtaatctc

SEQ ID NO: 33071 - DNA, 25 bp, Probe Sequence
gaagtgttaatgctgcaagtaatct

SEQ ID NO: 33072 - DNA, 25 bp, Probe Sequence
agaagtgttaatgctgcaagtaatc

SEQ ID NO: 33073 - DNA, 25 bp, Probe Sequence
agtgttaatgctgcaagtaatctct

SEQ ID NO: 33074 - DNA, 25 bp, Probe Sequence
aagaagtgttaatgctgcaagtaat

SEQ ID NO: 33075 - DNA, 25 bp, Probe Sequence
cacaaggacaagaacaaagtatgag

SEQ ID NO: 33076 - DNA, 25 bp, Probe Sequence
ttgactaccttatctggtgttaaga

SEQ ID NO: 33077 - DNA, 25 bp, Probe Sequence
tcaagattcaagagtattctcactt

SEQ ID NO: 33078 - DNA, 25 bp, Probe Sequence
ttcaagattcaagagtattctcact

SEQ ID NO: 33079 - DNA, 25 bp, Probe Sequence
accaaggaataacattctgtagttc

SEQ ID NO: 33080 - DNA, 25 bp, Probe Sequence
gaccaaggaataacattctgtagtt

SEQ ID NO: 33081 - DNA, 25 bp, Probe Sequence
gtgttaatgctgcaagtaatctctt

SEQ ID NO: 33082 - DNA, 25 bp, Probe Sequence
ctcacttctcactgtaaacattagc

SEQ ID NO: 33083 - DNA, 25 bp, Probe Sequence
cagaatgaaaggcaagaaaggtatt

SEQ ID NO: 33084 - DNA, 25 bp, Probe Sequence
ccagaatgaaaggcaagaaaggtat

SEQ ID NO: 33085 - DNA, 25 bp, Probe Sequence
atgaaaggcaagaaaggtattgttg

SEQ ID NO: 33086 - DNA, 25 bp, Probe Sequence
gaatgaaaggcaagaaaggtattgt

SEQ ID NO: 33087 - DNA, 25 bp, Probe Sequence
agaatgaaaggcaagaaaggtattg

SEQ ID NO: 33088 - DNA, 25 bp, Probe Sequence
aatgaaaggcaagaaaggtattgtt

SEQ ID NO: 33089 - DNA, 25 bp, Probe Sequence
agatccagaatgaaaggcaagaaag

SEQ ID NO: 33090 - DNA, 25 bp, Probe Sequence
gagatccagaatgaaaggcaagaaa

SEQ ID NO: 33091 - DNA, 25 bp, Probe Sequence
tccagaatgaaaggcaagaaaggta

SEQ ID NO: 33092 - DNA, 25 bp, Probe Sequence
atccagaatgaaaggcaagaaaggt

SEQ ID NO: 33093 - DNA, 25 bp, Probe Sequence
gatccagaatgaaaggcaagaaagg

SEQ ID NO: 33094 - DNA, 25 bp, Probe Sequence
ggagatccagaatgaaaggcaagaa

SEQ ID NO: 33095 - DNA, 25 bp, Probe Sequence
caagaaaggtattgttgcagcatct

SEQ ID NO: 33096 - DNA, 25 bp, Probe Sequence
aagaaaggtattgttgcagcatctg

SEQ ID NO: 33097 - DNA, 25 bp, Probe Sequence
gggagatccagaatgaaaggcaaga

SEQ ID NO: 33098 - DNA, 25 bp, Probe Sequence
agaaaggtattgttgcagcatctgg

SEQ ID NO: 33099 - DNA, 25 bp, Probe Sequence
tcctgtttagcaataacggctggag

SEQ ID NO: 33100 - DNA, 25 bp, Probe Sequence
gaaaggtattgttgcagcatctggc

SEQ ID NO: 33101 - DNA, 25 bp, Probe Sequence
gtcctgtttagcaataacggctgga

SEQ ID NO: 33102 - DNA, 25 bp, Probe Sequence
tgaaaggcaagaaaggtattgttgc

SEQ ID NO: 33103 - DNA, 25 bp, Probe Sequence
aaaggcaagaaaggtattgttgcag

SEQ ID NO: 33104 - DNA, 25 bp, Probe Sequence
gaaaggcaagaaaggtattgttgca

SEQ ID NO: 33105 - DNA, 25 bp, Probe Sequence
gcaagaaaggtattgttgcagcatc

SEQ ID NO: 33106 - DNA, 25 bp, Probe Sequence
aaggcaagaaaggtattgttgcagc

SEQ ID NO: 33107 - DNA, 25 bp, Probe Sequence
ggcaagaaaggtattgttgcagcat

SEQ ID NO: 33108 - DNA, 25 bp, Probe Sequence
acactgaattgaagaattgttggtt

SEQ ID NO: 33109 - DNA, 25 bp, Probe Sequence
cacactgaattgaagaattgttggt

SEQ ID NO: 33110 - DNA, 25 bp, Probe Sequence
gattattcatggaacaggaagaagc

SEQ ID NO: 33111 - DNA, 25 bp, Probe Sequence
aggattattcatggaacaggaagaa

SEQ ID NO: 33112 - DNA, 25 bp, Probe Sequence
aaggattattcatggaacaggaaga

SEQ ID NO: 33113 - DNA, 25 bp, Probe Sequence
ggattattcatggaacaggaagaag

SEQ ID NO: 33114 - DNA, 25 bp, Probe Sequence
gaaggattattcatggaacaggaag

SEQ ID NO: 33115 - DNA, 25 bp, Probe Sequence
tctcattgccattggaatagaatat

SEQ ID NO: 33116 - DNA, 25 bp, Probe Sequence
gcacactgaattgaagaattgttgg

SEQ ID NO: 33117 - DNA, 25 bp, Probe Sequence
attattcatggaacaggaagaagcg

SEQ ID NO: 33118 - DNA, 25 bp, Probe Sequence
ttcaagtggaattagttggttatcc

SEQ ID NO: 33119 - DNA, 25 bp, Probe Sequence
tattcatggaacaggaagaagcgta

SEQ ID NO: 33120 - DNA, 25 bp, Probe Sequence
gaatcagaatcaaaccagtgtaagg

SEQ ID NO: 33121 - DNA, 25 bp, Probe Sequence
ggaatcagaatcaaaccagtgtaag

SEQ ID NO: 33122 - DNA, 25 bp, Probe Sequence
attagggaatcagaatcaaaccagt

SEQ ID NO: 33123 - DNA, 25 bp, Probe Sequence
aacaggaagaagcgtaaagactatc

SEQ ID NO: 33124 - DNA, 25 bp, Probe Sequence
gaacaggaagaagcgtaaagactat

SEQ ID NO: 33125 - DNA, 25 bp, Probe Sequence
ctagatgtagcttgtgcagatgtag

SEQ ID NO: 33126 - DNA, 25 bp, Probe Sequence
ttagggaatcagaatcaaaccagtg

SEQ ID NO: 33127 - DNA, 25 bp, Probe Sequence
catttgttgtgtgactgagtaaaga

SEQ ID NO: 33128 - DNA, 25 bp, Probe Sequence
gggaatcagaatcaaaccagtgtaa

SEQ ID NO: 33129 - DNA, 25 bp, Probe Sequence
tttgttgtgtgactgagtaaagaat

SEQ ID NO: 33130 - DNA, 25 bp, Probe Sequence
atttgttgtgtgactgagtaaagaa

SEQ ID NO: 33131 - DNA, 25 bp, Probe Sequence
atttaggcttcatacggaaagtgtt

SEQ ID NO: 33132 - DNA, 25 bp, Probe Sequence
gtcttgcctcttgtcattgtctgtc

SEQ ID NO: 33133 - DNA, 25 bp, Probe Sequence
ctgtcttgcctcttgtcattgtctg

SEQ ID NO: 33134 - DNA, 25 bp, Probe Sequence
tgtcttgcctcttgtcattgtctgt

SEQ ID NO: 33135 - DNA, 25 bp, Probe Sequence
gattacagaagctgcatcctgagac

SEQ ID NO: 33136 - DNA, 25 bp, Probe Sequence
gctcttctttgaaatgaggtcatta

SEQ ID NO: 33137 - DNA, 25 bp, Probe Sequence
caaggttggcatggattacagaagc

SEQ ID NO: 33138 - DNA, 25 bp, Probe Sequence
gcaaggttggcatggattacagaag

SEQ ID NO: 33139 - DNA, 25 bp, Probe Sequence
tcttgcctcttgtcattgtctgtcc

SEQ ID NO: 33140 - DNA, 25 bp, Probe Sequence
ggctcttctttgaaatgaggtcatt

SEQ ID NO: 33141 - DNA, 25 bp, Probe Sequence
cggctcttctttgaaatgaggtcat

SEQ ID NO: 33142 - DNA, 25 bp, Probe Sequence
gagacggctcttctttgaaatgagg

SEQ ID NO: 33143 - DNA, 25 bp, Probe Sequence
ggagacggctcttctttgaaatgag

SEQ ID NO: 33144 - DNA, 25 bp, Probe Sequence
agcaaggttggcatggattacagaa

SEQ ID NO: 33145 - DNA, 25 bp, Probe Sequence
gaacagcaaggttggcatggattac

SEQ ID NO: 33146 - DNA, 25 bp, Probe Sequence
caggagacggctcttctttgaaatg

SEQ ID NO: 33147 - DNA, 25 bp, Probe Sequence
aaggttggcatggattacagaagct

SEQ ID NO: 33148 - DNA, 25 bp, Probe Sequence
aggagacggctcttctttgaaatga

SEQ ID NO: 33149 - DNA, 25 bp, Probe Sequence
tcaggagacggctcttctttgaaat

SEQ ID NO: 33150 - DNA, 25 bp, Probe Sequence
gacggctcttctttgaaatgaggtc

SEQ ID NO: 33151 - DNA, 25 bp, Probe Sequence
agacggctcttctttgaaatgaggt

SEQ ID NO: 33152 - DNA, 25 bp, Probe Sequence
ctcttctttgaaatgaggtcattaa

SEQ ID NO: 33153 - DNA, 25 bp, Probe Sequence
tgaacagcaaggttggcatggatta

SEQ ID NO: 33154 - DNA, 25 bp, Probe Sequence
attacagaagctgcatcctgagacc

SEQ ID NO: 33155 - DNA, 25 bp, Probe Sequence
acggctcttctttgaaatgaggtca

SEQ ID NO: 33156 - DNA, 25 bp, Probe Sequence
atgcttctactgtgacacttatctc

SEQ ID NO: 33157 - DNA, 25 bp, Probe Sequence
actgtgtctgaatcatgtctgtatc

SEQ ID NO: 33158 - DNA, 25 bp, Probe Sequence
catgcttctactgtgacacttatct

SEQ ID NO: 33159 - DNA, 25 bp, Probe Sequence
tgcttctactgtgacacttatctca

SEQ ID NO: 33160 - DNA, 25 bp, Probe Sequence
ctgtgtctgaatcatgtctgtatcc

SEQ ID NO: 33161 - DNA, 25 bp, Probe Sequence
ttcatgcttctactgtgacacttat

SEQ ID NO: 33162 - DNA, 25 bp, Probe Sequence
tcatgcttctactgtgacacttatc

SEQ ID NO: 33163 - DNA, 25 bp, Probe Sequence
gttcatgcttctactgtgacactta

SEQ ID NO: 33164 - DNA, 25 bp, Probe Sequence
aatagttgtctgtgcttccttggtt

SEQ ID NO: 33165 - DNA, 25 bp, Probe Sequence
gactgtgtctgaatcatgtctgtat

SEQ ID NO: 33166 - DNA, 25 bp, Probe Sequence
atagttgtctgtgcttccttggttc

SEQ ID NO: 33167 - DNA, 25 bp, Probe Sequence
agaaatagttgtctgtgcttccttg

SEQ ID NO: 33168 - DNA, 25 bp, Probe Sequence
cttccttggttcatgcttctactgt

SEQ ID NO: 33169 - DNA, 25 bp, Probe Sequence
ttccttggttcatgcttctactgtg

SEQ ID NO: 33170 - DNA, 25 bp, Probe Sequence
ttataattagtcgggcatgagtctg

SEQ ID NO: 33171 - DNA, 25 bp, Probe Sequence
tttataattagtcgggcatgagtct

SEQ ID NO: 33172 - DNA, 25 bp, Probe Sequence
tataattagtcgggcatgagtctgt

SEQ ID NO: 33173 - DNA, 25 bp, Probe Sequence
gaaatagttgtctgtgcttccttgg

SEQ ID NO: 33174 - DNA, 25 bp, Probe Sequence
ggttcatgcttctactgtgacactt

SEQ ID NO: 33175 - DNA, 25 bp, Probe Sequence
cttggttcatgcttctactgtgaca

SEQ ID NO: 33176 - DNA, 25 bp, Probe Sequence
aaatagttgtctgtgcttccttggt

SEQ ID NO: 33177 - DNA, 25 bp, Probe Sequence
ataattagtcgggcatgagtctgtt

SEQ ID NO: 33178 - DNA, 25 bp, Probe Sequence
ttggttcatgcttctactgtgacac

SEQ ID NO: 33179 - DNA, 25 bp, Probe Sequence
tgtgtctgaatcatgtctgtatccc

SEQ ID NO: 33180 - DNA, 25 bp, Probe Sequence
agaagtcaaccagaccaccttatac

SEQ ID NO: 33181 - DNA, 25 bp, Probe Sequence
cagaagtcaaccagaccaccttata

SEQ ID NO: 33182 - DNA, 25 bp, Probe Sequence
gaagtcaaccagaccaccttatacc

SEQ ID NO: 33183 - DNA, 25 bp, Probe Sequence
aagtcaaccagaccaccttatacca

SEQ ID NO: 33184 - DNA, 25 bp, Probe Sequence
agtcaaccagaccaccttataccag

SEQ ID NO: 33185 - DNA, 25 bp, Probe Sequence
ccagaagtcaaccagaccaccttat

SEQ ID NO: 33186 - DNA, 25 bp, Probe Sequence
atcctgttgttgctgtggctgatag

SEQ ID NO: 33187 - DNA, 25 bp, Probe Sequence
gtcaaccagaccaccttataccagc

SEQ ID NO: 33188 - DNA, 25 bp, Probe Sequence
accagaagtcaaccagaccacctta

SEQ ID NO: 33189 - DNA, 25 bp, Probe Sequence
gaggagtttctcattgctggaaaac

SEQ ID NO: 33190 - DNA, 25 bp, Probe Sequence
cgaggagtttctcattgctggaaaa

SEQ ID NO: 33191 - DNA, 25 bp, Probe Sequence
ggagtttctcattgctggaaaactg

SEQ ID NO: 33192 - DNA, 25 bp, Probe Sequence
aggagtttctcattgctggaaaact

SEQ ID NO: 33193 - DNA, 25 bp, Probe Sequence
aggaatgcacagtgtttccctgttt

SEQ ID NO: 33194 - DNA, 25 bp, Probe Sequence
gagtttctcattgctggaaaactgc

SEQ ID NO: 33195 - DNA, 25 bp, Probe Sequence
agtttctcattgctggaaaactgca

SEQ ID NO: 33196 - DNA, 25 bp, Probe Sequence
atccagtatgagatcaagcagataa

SEQ ID NO: 33197 - DNA, 25 bp, Probe Sequence
caagcagataaagatgttcaaaggg

SEQ ID NO: 33198 - DNA, 25 bp, Probe Sequence
tcaagcagataaagatgttcaaagg

SEQ ID NO: 33199 - DNA, 25 bp, Probe Sequence
aagaaggaatatctcattgcaggaa

SEQ ID NO: 33200 - DNA, 25 bp, Probe Sequence
acatttatggcaaccctatcaagag

SEQ ID NO: 33201 - DNA, 25 bp, Probe Sequence
gacatttatggcaaccctatcaaga

SEQ ID NO: 33202 - DNA, 25 bp, Probe Sequence
gttggaggaaagaaggaatatctca

SEQ ID NO: 33203 - DNA, 25 bp, Probe Sequence
aaacgacatttatggcaaccctatc

SEQ ID NO: 33204 - DNA, 25 bp, Probe Sequence
gaaacgacatttatggcaaccctat

SEQ ID NO: 33205 - DNA, 25 bp, Probe Sequence
gaggaaagaaggaatatctcattgc

SEQ ID NO: 33206 - DNA, 25 bp, Probe Sequence
aagcagataaagatgttcaaagggc

SEQ ID NO: 33207 - DNA, 25 bp, Probe Sequence
tccagtatgagatcaagcagataaa

SEQ ID NO: 33208 - DNA, 25 bp, Probe Sequence
tggaggaaagaaggaatatctcatt

SEQ ID NO: 33209 - DNA, 25 bp, Probe Sequence
ttggaggaaagaaggaatatctcat

SEQ ID NO: 33210 - DNA, 25 bp, Probe Sequence
ccagtatgagatcaagcagataaag

SEQ ID NO: 33211 - DNA, 25 bp, Probe Sequence
ggaggaaagaaggaatatctcattg

SEQ ID NO: 33212 - DNA, 25 bp, Probe Sequence
cgttggaggaaagaaggaatatctc

SEQ ID NO: 33213 - DNA, 25 bp, Probe Sequence
gtggactctggaaacgacatttatg

SEQ ID NO: 33214 - DNA, 25 bp, Probe Sequence
gagatcaagcagataaagatgttca

SEQ ID NO: 33215 - DNA, 25 bp, Probe Sequence
tgagatcaagcagataaagatgttc

SEQ ID NO: 33216 - DNA, 25 bp, Probe Sequence
agtggactctggaaacgacatttat

SEQ ID NO: 33217 - DNA, 25 bp, Probe Sequence
cgacatttatggcaaccctatcaag

SEQ ID NO: 33218 - DNA, 25 bp, Probe Sequence
atcaagcagataaagatgttcaaag

SEQ ID NO: 33219 - DNA, 25 bp, Probe Sequence
aagtggactctggaaacgacattta

SEQ ID NO: 33220 - DNA, 25 bp, Probe Sequence
tgagatggtatatccttgcgatgta

SEQ ID NO: 33221 - DNA, 25 bp, Probe Sequence
atgagatggtatatccttgcgatgt

SEQ ID NO: 33222 - DNA, 25 bp, Probe Sequence
gagatggtatatccttgcgatgtac

SEQ ID NO: 33223 - DNA, 25 bp, Probe Sequence
ctaataagaagtgccaagtggacag

SEQ ID NO: 33224 - DNA, 25 bp, Probe Sequence
tacacatgagatggtatatccttgc

SEQ ID NO: 33225 - DNA, 25 bp, Probe Sequence
gcattatgtctgtatgaagcatgtt

SEQ ID NO: 33226 - DNA, 25 bp, Probe Sequence
tcagcattatgtctgtatgaagcat

SEQ ID NO: 33227 - DNA, 25 bp, Probe Sequence
agcattatgtctgtatgaagcatgt

SEQ ID NO: 33228 - DNA, 25 bp, Probe Sequence
taataagaagtgccaagtggacagt

SEQ ID NO: 33229 - DNA, 25 bp, Probe Sequence
ctcagcattatgtctgtatgaagca

SEQ ID NO: 33230 - DNA, 25 bp, Probe Sequence
catgagatggtatatccttgcgatg

SEQ ID NO: 33231 - DNA, 25 bp, Probe Sequence
attatgtctgtatgaagcatgttga

SEQ ID NO: 33232 - DNA, 25 bp, Probe Sequence
cattatgtctgtatgaagcatgttg

SEQ ID NO: 33233 - DNA, 25 bp, Probe Sequence
acatgagatggtatatccttgcgat

SEQ ID NO: 33234 - DNA, 25 bp, Probe Sequence
cagcattatgtctgtatgaagcatg

SEQ ID NO: 33235 - DNA, 25 bp, Probe Sequence
ttatgtctgtatgaagcatgttgac

SEQ ID NO: 33236 - DNA, 25 bp, Probe Sequence
ggctcagcattatgtctgtatgaag

SEQ ID NO: 33237 - DNA, 25 bp, Probe Sequence
tatgtctgtatgaagcatgttgacg

SEQ ID NO: 33238 - DNA, 25 bp, Probe Sequence
aggctcagcattatgtctgtatgaa

SEQ ID NO: 33239 - DNA, 25 bp, Probe Sequence
cacatgagatggtatatccttgcga

SEQ ID NO: 33240 - DNA, 25 bp, Probe Sequence
gtgtttcttctggcttagtctgttt

SEQ ID NO: 33241 - DNA, 25 bp, Probe Sequence
aataagaagtgccaagtggacagtc

SEQ ID NO: 33242 - DNA, 25 bp, Probe Sequence
acacatgagatggtatatccttgcg

SEQ ID NO: 33243 - DNA, 25 bp, Probe Sequence
gctaataagaagtgccaagtggaca

SEQ ID NO: 33244 - DNA, 25 bp, Probe Sequence
tattaccacagacatactaaccagc

SEQ ID NO: 33245 - DNA, 25 bp, Probe Sequence
aacttcaccatattaccacagacat

SEQ ID NO: 33246 - DNA, 25 bp, Probe Sequence
tatcgtcactgcttaacttcacata

SEQ ID NO: 33247 - DNA, 25 bp, Probe Sequence
taacttcaccatattaccacagaca

SEQ ID NO: 33248 - DNA, 25 bp, Probe Sequence
atcgtcactgcttaacttcacatat

SEQ ID NO: 33249 - DNA, 25 bp, Probe Sequence
cgtcactgcttaacttcacatattg

SEQ ID NO: 33250 - DNA, 25 bp, Probe Sequence
tcgtcactgcttaacttcacatatt

SEQ ID NO: 33251 - DNA, 25 bp, Probe Sequence
ttatcgtcactgcttaacttcacat

SEQ ID NO: 33252 - DNA, 25 bp, Probe Sequence
ttcaccatattaccacagacatact

SEQ ID NO: 33253 - DNA, 25 bp, Probe Sequence
acttcaccatattaccacagacata

SEQ ID NO: 33254 - DNA, 25 bp, Probe Sequence
cttcaccatattaccacagacatac

SEQ ID NO: 33255 - DNA, 25 bp, Probe Sequence
ctaacttcaccatattaccacagac

SEQ ID NO: 33256 - DNA, 25 bp, Probe Sequence
tctctaacttcaccatattaccaca

SEQ ID NO: 33257 - DNA, 25 bp, Probe Sequence
gctcattctccttgtgttactaagt

SEQ ID NO: 33258 - DNA, 25 bp, Probe Sequence
ctctaacttcaccatattaccacag

SEQ ID NO: 33259 - DNA, 25 bp, Probe Sequence
attaccacagacatactaaccagca

SEQ ID NO: 33260 - DNA, 25 bp, Probe Sequence
ccatattaccacagacatactaacc

SEQ ID NO: 33261 - DNA, 25 bp, Probe Sequence
tcaccatattaccacagacatacta

SEQ ID NO: 33262 - DNA, 25 bp, Probe Sequence
tctaacttcaccatattaccacaga

SEQ ID NO: 33263 - DNA, 25 bp, Probe Sequence
tctgttaatcattaggtgtgactga

SEQ ID NO: 33264 - DNA, 25 bp, Probe Sequence
gtcactgcttaacttcacatattga

SEQ ID NO: 33265 - DNA, 25 bp, Probe Sequence
ttgtattctctcctgtacctcttga

SEQ ID NO: 33266 - DNA, 25 bp, Probe Sequence
ctcattctccttgtgttactaagtt

SEQ ID NO: 33267 - DNA, 25 bp, Probe Sequence
ctgttaatcattaggtgtgactgaa

SEQ ID NO: 33268 - DNA, 25 bp, Probe Sequence
tgagcataatcattccttggagtta

SEQ ID NO: 33269 - DNA, 25 bp, Probe Sequence
gagcataatcattccttggagttat

SEQ ID NO: 33270 - DNA, 25 bp, Probe Sequence
tgtattatcagaccaggaggcattg

SEQ ID NO: 33271 - DNA, 25 bp, Probe Sequence
gatactgtattatcagaccaggagg

SEQ ID NO: 33272 - DNA, 25 bp, Probe Sequence
gagaactattggactctaattgctt

SEQ ID NO: 33273 - DNA, 25 bp, Probe Sequence
tgagatactgtattatcagaccagg

SEQ ID NO: 33274 - DNA, 25 bp, Probe Sequence
atactgtattatcagaccaggaggc

SEQ ID NO: 33275 - DNA, 25 bp, Probe Sequence
gagatactgtattatcagaccagga

SEQ ID NO: 33276 - DNA, 25 bp, Probe Sequence
agatactgtattatcagaccaggag

SEQ ID NO: 33277 - DNA, 25 bp, Probe Sequence
ctgtattatcagaccaggaggcatt

SEQ ID NO: 33278 - DNA, 25 bp, Probe Sequence
gcataatcattccttggagttatac

SEQ ID NO: 33279 - DNA, 25 bp, Probe Sequence
agcataatcattccttggagttata

SEQ ID NO: 33280 - DNA, 25 bp, Probe Sequence
tactgtattatcagaccaggaggca

SEQ ID NO: 33281 - DNA, 25 bp, Probe Sequence
agagaaatggaagtttgagtaaccc

SEQ ID NO: 33282 - DNA, 25 bp, Probe Sequence
ttggactctaattgctttgaactag

SEQ ID NO: 33283 - DNA, 25 bp, Probe Sequence
gaggcattgctgtgaaagataattt

SEQ ID NO: 33284 - DNA, 25 bp, Probe Sequence
aagtttgagtaacccacagaacatc

SEQ ID NO: 33285 - DNA, 25 bp, Probe Sequence
gaagtttgagtaacccacagaacat

SEQ ID NO: 33286 - DNA, 25 bp, Probe Sequence
attggactctaattgctttgaacta

SEQ ID NO: 33287 - DNA, 25 bp, Probe Sequence
tattggactctaattgctttgaact

SEQ ID NO: 33288 - DNA, 25 bp, Probe Sequence
actattggactctaattgctttgaa

SEQ ID NO: 33289 - DNA, 25 bp, Probe Sequence
aactattggactctaattgctttga

SEQ ID NO: 33290 - DNA, 25 bp, Probe Sequence
gctttgtacgccttaatgttcattt

SEQ ID NO: 33291 - DNA, 25 bp, Probe Sequence
atgagcataatcattccttggagtt

SEQ ID NO: 33292 - DNA, 25 bp, Probe Sequence
attgcctactaagtaatgactgtca

SEQ ID NO: 33293 - DNA, 25 bp, Probe Sequence
tattgcctactaagtaatgactgtc

SEQ ID NO: 33294 - DNA, 25 bp, Probe Sequence
ttgatggacctctgaatctctttag

SEQ ID NO: 33295 - DNA, 25 bp, Probe Sequence
cttcctggtcttatcatggacaatt

SEQ ID NO: 33296 - DNA, 25 bp, Probe Sequence
tgattaacacatgctcacaaccatc

SEQ ID NO: 33297 - DNA, 25 bp, Probe Sequence
ctgattaacacatgctcacaaccat

SEQ ID NO: 33298 - DNA, 25 bp, Probe Sequence
tttgatggacctctgaatctcttta

SEQ ID NO: 33299 - DNA, 25 bp, Probe Sequence
gtttgatggacctctgaatctcttt

SEQ ID NO: 33300 - DNA, 25 bp, Probe Sequence
acgtcttgcctataagctaatatca

SEQ ID NO: 33301 - DNA, 25 bp, Probe Sequence
cgtcttgcctataagctaatatcat

SEQ ID NO: 33302 - DNA, 25 bp, Probe Sequence
aacctgattaacacatgctcacaac

SEQ ID NO: 33303 - DNA, 25 bp, Probe Sequence
ttattgcctactaagtaatgactgt

SEQ ID NO: 33304 - DNA, 25 bp, Probe Sequence
gatgtttgatggacctctgaatctc

SEQ ID NO: 33305 - DNA, 25 bp, Probe Sequence
atgtcattccaaagttattgcctac

SEQ ID NO: 33306 - DNA, 25 bp, Probe Sequence
gattaacacatgctcacaaccatcc

SEQ ID NO: 33307 - DNA, 25 bp, Probe Sequence
gatgtcattccaaagttattgccta

SEQ ID NO: 33308 - DNA, 25 bp, Probe Sequence
atgtttgatggacctctgaatctct

SEQ ID NO: 33309 - DNA, 25 bp, Probe Sequence
tgaaagcagcattgaaataatttgt

SEQ ID NO: 33310 - DNA, 25 bp, Probe Sequence
tgtcattccaaagttattgcctact

SEQ ID NO: 33311 - DNA, 25 bp, Probe Sequence
gttattgcctactaagtaatgactg

SEQ ID NO: 33312 - DNA, 25 bp, Probe Sequence
tgtttgatggacctctgaatctctt

SEQ ID NO: 33313 - DNA, 25 bp, Probe Sequence
gtgatgtttgatggacctctgaatc

SEQ ID NO: 33314 - DNA, 25 bp, Probe Sequence
tgatgtttgatggacctctgaatct

SEQ ID NO: 33315 - DNA, 25 bp, Probe Sequence
agttattgcctactaagtaatgact

SEQ ID NO: 33316 - DNA, 25 bp, Probe Sequence
ttgccagatggtgataacagtgtaa

SEQ ID NO: 33317 - DNA, 25 bp, Probe Sequence
tgccagatggtgataacagtgtaag

SEQ ID NO: 33318 - DNA, 25 bp, Probe Sequence
ttcagcacacaacttacatttcttt

SEQ ID NO: 33319 - DNA, 25 bp, Probe Sequence
tttcagcacacaacttacatttctt

SEQ ID NO: 33320 - DNA, 25 bp, Probe Sequence
tttagatgtgaaatataagcctgcg

SEQ ID NO: 33321 - DNA, 25 bp, Probe Sequence
atgttcatactttccctcttgtttg

SEQ ID NO: 33322 - DNA, 25 bp, Probe Sequence
aagggactactgatgttctgtgata

SEQ ID NO: 33323 - DNA, 25 bp, Probe Sequence
gatgttcatactttccctcttgttt

SEQ ID NO: 33324 - DNA, 25 bp, Probe Sequence
ttagatgtgaaatataagcctgcgg

SEQ ID NO: 33325 - DNA, 25 bp, Probe Sequence
taaatggtgtcggaattgttgtatt

SEQ ID NO: 33326 - DNA, 25 bp, Probe Sequence
ttaaatggtgtcggaattgttgtat

SEQ ID NO: 33327 - DNA, 25 bp, Probe Sequence
attaaatggtgtcggaattgttgta

SEQ ID NO: 33328 - DNA, 25 bp, Probe Sequence
tattaaatggtgtcggaattgttgt

SEQ ID NO: 33329 - DNA, 25 bp, Probe Sequence
gtttcagcacacaacttacatttct

SEQ ID NO: 33330 - DNA, 25 bp, Probe Sequence
agggactactgatgttctgtgatac

SEQ ID NO: 33331 - DNA, 25 bp, Probe Sequence
tcagcacacaacttacatttctttg

SEQ ID NO: 33332 - DNA, 25 bp, Probe Sequence
aagccctacatttctattcagagta

SEQ ID NO: 33333 - DNA, 25 bp, Probe Sequence
taagccctacatttctattcagagt

SEQ ID NO: 33334 - DNA, 25 bp, Probe Sequence
tgatgttcatactttccctcttgtt

SEQ ID NO: 33335 - DNA, 25 bp, Probe Sequence
tgttcatactttccctcttgtttga

SEQ ID NO: 33336 - DNA, 25 bp, Probe Sequence
gttgccagatggtgataacagtgta

SEQ ID NO: 33337 - DNA, 25 bp, Probe Sequence
cacacaacttacatttctttgcctc

SEQ ID NO: 33338 - DNA, 25 bp, Probe Sequence
ggtttcagcacacaacttacatttc

SEQ ID NO: 33339 - DNA, 25 bp, Probe Sequence
gctaagccctacatttctattcaga

SEQ ID NO: 33340 - DNA, 25 bp, Probe Sequence
ctacacggacaagattgacaggtat

SEQ ID NO: 33341 - DNA, 25 bp, Probe Sequence
tacacggacaagattgacaggtatg

SEQ ID NO: 33342 - DNA, 25 bp, Probe Sequence
catcttaataaagtgtgagcagcaa

SEQ ID NO: 33343 - DNA, 25 bp, Probe Sequence
atcttaataaagtgtgagcagcaaa

SEQ ID NO: 33344 - DNA, 25 bp, Probe Sequence
gcatcttaataaagtgtgagcagca

SEQ ID NO: 33345 - DNA, 25 bp, Probe Sequence
ctggtgcatcttaataaagtgtgag

SEQ ID NO: 33346 - DNA, 25 bp, Probe Sequence
ctcctggtgcatcttaataaagtgt

SEQ ID NO: 33347 - DNA, 25 bp, Probe Sequence
cctggtgcatcttaataaagtgtga

SEQ ID NO: 33348 - DNA, 25 bp, Probe Sequence
tcctggtgcatcttaataaagtgtg

SEQ ID NO: 33349 - DNA, 25 bp, Probe Sequence
tggtgcatcttaataaagtgtgagc

SEQ ID NO: 33350 - DNA, 25 bp, Probe Sequence
cctacacggacaagattgacaggta

SEQ ID NO: 33351 - DNA, 25 bp, Probe Sequence
gctcctggtgcatcttaataaagtg

SEQ ID NO: 33352 - DNA, 25 bp, Probe Sequence
tcttaataaagtgtgagcagcaaaa

SEQ ID NO: 33353 - DNA, 25 bp, Probe Sequence
caagtacctcatgttcgccttcaac

SEQ ID NO: 33354 - DNA, 25 bp, Probe Sequence
tcaagtacctcatgttcgccttcaa

SEQ ID NO: 33355 - DNA, 25 bp, Probe Sequence
cgtattctccaaagcagtgttcaca

SEQ ID NO: 33356 - DNA, 25 bp, Probe Sequence
gtattctccaaagcagtgttcacac

SEQ ID NO: 33357 - DNA, 25 bp, Probe Sequence
atttacgtattctccaaagcagtgt

SEQ ID NO: 33358 - DNA, 25 bp, Probe Sequence
tatttacgtattctccaaagcagtg

SEQ ID NO: 33359 - DNA, 25 bp, Probe Sequence
tttacgtattctccaaagcagtgtt

SEQ ID NO: 33360 - DNA, 25 bp, Probe Sequence
ggctcctggtgcatcttaataaagt

SEQ ID NO: 33361 - DNA, 25 bp, Probe Sequence
ttacgtattctccaaagcagtgttc

SEQ ID NO: 33362 - DNA, 25 bp, Probe Sequence
atatttacgtattctccaaagcagt

SEQ ID NO: 33363 - DNA, 25 bp, Probe Sequence
acacggacaagattgacaggtatgc

SEQ ID NO: 33364 - DNA, 25 bp, Probe Sequence
ttgtaaatgccaagaaagatgttgt

SEQ ID NO: 33365 - DNA, 25 bp, Probe Sequence
ccaagaagattgtaaatgccaagaa

SEQ ID NO: 33366 - DNA, 25 bp, Probe Sequence
gtaaatgccaagaaagatgttgtga

SEQ ID NO: 33367 - DNA, 25 bp, Probe Sequence
taaatgccaagaaagatgttgtgaa

SEQ ID NO: 33368 - DNA, 25 bp, Probe Sequence
cagaagcccaagaagattgtaaatg

SEQ ID NO: 33369 - DNA, 25 bp, Probe Sequence
tgtaaatgccaagaaagatgttgtg

SEQ ID NO: 33370 - DNA, 25 bp, Probe Sequence
agattgtaaatgccaagaaagatgt

SEQ ID NO: 33371 - DNA, 25 bp, Probe Sequence
aaatgccaagaaagatgttgtgaac

SEQ ID NO: 33372 - DNA, 25 bp, Probe Sequence
agaagattgtaaatgccaagaaaga

SEQ ID NO: 33373 - DNA, 25 bp, Probe Sequence
attgtaaatgccaagaaagatgttg

SEQ ID NO: 33374 - DNA, 25 bp, Probe Sequence
ccagaagcccaagaagattgtaaat

SEQ ID NO: 33375 - DNA, 25 bp, Probe Sequence
gattgtaaatgccaagaaagatgtt

SEQ ID NO: 33376 - DNA, 25 bp, Probe Sequence
caagaagattgtaaatgccaagaaa

SEQ ID NO: 33377 - DNA, 25 bp, Probe Sequence
cccaagaagattgtaaatgccaaga

SEQ ID NO: 33378 - DNA, 25 bp, Probe Sequence
aagattgtaaatgccaagaaagatg

SEQ ID NO: 33379 - DNA, 25 bp, Probe Sequence
aagaagattgtaaatgccaagaaag

SEQ ID NO: 33380 - DNA, 25 bp, Probe Sequence
agaagcccaagaagattgtaaatgc

SEQ ID NO: 33381 - DNA, 25 bp, Probe Sequence
gaagattgtaaatgccaagaaagat

SEQ ID NO: 33382 - DNA, 25 bp, Probe Sequence
ctacaagaactgggagactgagatc

SEQ ID NO: 33383 - DNA, 25 bp, Probe Sequence
tacaagaactgggagactgagatca

SEQ ID NO: 33384 - DNA, 25 bp, Probe Sequence
gaagcccaagaagattgtaaatgcc

SEQ ID NO: 33385 - DNA, 25 bp, Probe Sequence
cctacaagaactgggagactgagat

SEQ ID NO: 33386 - DNA, 25 bp, Probe Sequence
gcccaagaagattgtaaatgccaag

SEQ ID NO: 33387 - DNA, 25 bp, Probe Sequence
cccagaagcccaagaagattgtaaa

SEQ ID NO: 33388 - DNA, 25 bp, Probe Sequence
cagaatgttgaaggattgaagagtt

SEQ ID NO: 33389 - DNA, 25 bp, Probe Sequence
tgaaggattgaagagttctaagcat

SEQ ID NO: 33390 - DNA, 25 bp, Probe Sequence
ttgaaggattgaagagttctaagca

SEQ ID NO: 33391 - DNA, 25 bp, Probe Sequence
gttgaaggattgaagagttctaagc

SEQ ID NO: 33392 - DNA, 25 bp, Probe Sequence
agaatgttgaaggattgaagagttc

SEQ ID NO: 33393 - DNA, 25 bp, Probe Sequence
gaatgttgaaggattgaagagttct

SEQ ID NO: 33394 - DNA, 25 bp, Probe Sequence
aatacaagccttacattgccttatg

SEQ ID NO: 33395 - DNA, 25 bp, Probe Sequence
tcagaatgttgaaggattgaagagt

SEQ ID NO: 33396 - DNA, 25 bp, Probe Sequence
ccatcagaatgttgaaggattgaag

SEQ ID NO: 33397 - DNA, 25 bp, Probe Sequence
tgttgaaggattgaagagttctaag

SEQ ID NO: 33398 - DNA, 25 bp, Probe Sequence
catcagaatgttgaaggattgaaga

SEQ ID NO: 33399 - DNA, 25 bp, Probe Sequence
atcagaatgttgaaggattgaagag

SEQ ID NO: 33400 - DNA, 25 bp, Probe Sequence
gaaggattgaagagttctaagcata

SEQ ID NO: 33401 - DNA, 25 bp, Probe Sequence
atgttgaaggattgaagagttctaa

SEQ ID NO: 33402 - DNA, 25 bp, Probe Sequence
aatgttgaaggattgaagagttcta

SEQ ID NO: 33403 - DNA, 25 bp, Probe Sequence
atacaagccttacattgccttatgc

SEQ ID NO: 33404 - DNA, 25 bp, Probe Sequence
aaggattgaagagttctaagcataa

SEQ ID NO: 33405 - DNA, 25 bp, Probe Sequence
gccttacattgccttatgctttatt

SEQ ID NO: 33406 - DNA, 25 bp, Probe Sequence
gggtaatttgtcaataaagcattcc

SEQ ID NO: 33407 - DNA, 25 bp, Probe Sequence
gaaatacaagccttacattgcctta

SEQ ID NO: 33408 - DNA, 25 bp, Probe Sequence
aaatacaagccttacattgccttat

SEQ ID NO: 33409 - DNA, 25 bp, Probe Sequence
tctcttcctgttactaaatagtcgc

SEQ ID NO: 33410 - DNA, 25 bp, Probe Sequence
tgaaatacaagccttacattgcctt

SEQ ID NO: 33411 - DNA, 25 bp, Probe Sequence
ctcttcctgttactaaatagtcgca

SEQ ID NO: 33412 - DNA, 25 bp, Probe Sequence
gaggagtattccaccaaagaagata

SEQ ID NO: 33413 - DNA, 25 bp, Probe Sequence
aggagtattccaccaaagaagataa

SEQ ID NO: 33414 - DNA, 25 bp, Probe Sequence
ggagtattccaccaaagaagataaa

SEQ ID NO: 33415 - DNA, 25 bp, Probe Sequence
ggaggagtattccaccaaagaagat

SEQ ID NO: 33416 - DNA, 25 bp, Probe Sequence
gagtattccaccaaagaagataaat

SEQ ID NO: 33417 - DNA, 25 bp, Probe Sequence
gaggaggagtattccaccaaagaag

SEQ ID NO: 33418 - DNA, 25 bp, Probe Sequence
cccaacccaataaaactgatgttac

SEQ ID NO: 33419 - DNA, 25 bp, Probe Sequence
ccaacccaataaaactgatgttact

SEQ ID NO: 33420 - DNA, 25 bp, Probe Sequence
aggaggagtattccaccaaagaaga

SEQ ID NO: 33421 - DNA, 25 bp, Probe Sequence
agaggaggagtattccaccaaagaa

SEQ ID NO: 33422 - DNA, 25 bp, Probe Sequence
cccaataaaactgatgttactagcc

SEQ ID NO: 33423 - DNA, 25 bp, Probe Sequence
ccccaacccaataaaactgatgtta

SEQ ID NO: 33424 - DNA, 25 bp, Probe Sequence
acccaataaaactgatgttactagc

SEQ ID NO: 33425 - DNA, 25 bp, Probe Sequence
ccaataaaactgatgttactagcct

SEQ ID NO: 33426 - DNA, 25 bp, Probe Sequence
cagaggaggagtattccaccaaaga

SEQ ID NO: 33427 - DNA, 25 bp, Probe Sequence
tcagaggaggagtattccaccaaag

SEQ ID NO: 33428 - DNA, 25 bp, Probe Sequence
ctcagaggaggagtattccaccaaa

SEQ ID NO: 33429 - DNA, 25 bp, Probe Sequence
ataaaactgatgttactagcctctc

SEQ ID NO: 33430 - DNA, 25 bp, Probe Sequence
caataaaactgatgttactagcctc

SEQ ID NO: 33431 - DNA, 25 bp, Probe Sequence
aataaaactgatgttactagcctct

SEQ ID NO: 33432 - DNA, 25 bp, Probe Sequence
atcgatgacctagaagagaccttgg

SEQ ID NO: 33433 - DNA, 25 bp, Probe Sequence
caacccaataaaactgatgttacta

SEQ ID NO: 33434 - DNA, 25 bp, Probe Sequence
accccaacccaataaaactgatgtt

SEQ ID NO: 33435 - DNA, 25 bp, Probe Sequence
aacccaataaaactgatgttactag

SEQ ID NO: 33436 - DNA, 25 bp, Probe Sequence
gagcatcagaatgaactctatgaat

SEQ ID NO: 33437 - DNA, 25 bp, Probe Sequence
gcatcagaatgaactctatgaatac

SEQ ID NO: 33438 - DNA, 25 bp, Probe Sequence
tttgggaaactactaaatggactga

SEQ ID NO: 33439 - DNA, 25 bp, Probe Sequence
agcatcagaatgaactctatgaata

SEQ ID NO: 33440 - DNA, 25 bp, Probe Sequence
ttgggaaactactaaatggactgat

SEQ ID NO: 33441 - DNA, 25 bp, Probe Sequence
cttgaggttcagagcatcagaatga

SEQ ID NO: 33442 - DNA, 25 bp, Probe Sequence
tcttgaggttcagagcatcagaatg

SEQ ID NO: 33443 - DNA, 25 bp, Probe Sequence
cctcccgattattgcgtattctaaa

SEQ ID NO: 33444 - DNA, 25 bp, Probe Sequence
agacttaatgaaattgttgatgcgg

SEQ ID NO: 33445 - DNA, 25 bp, Probe Sequence
actgatgaagttacttggatggacc

SEQ ID NO: 33446 - DNA, 25 bp, Probe Sequence
atcctcccgattattgcgtattcta

SEQ ID NO: 33447 - DNA, 25 bp, Probe Sequence
tatcctcccgattattgcgtattct

SEQ ID NO: 33448 - DNA, 25 bp, Probe Sequence
gtatcctcccgattattgcgtattc

SEQ ID NO: 33449 - DNA, 25 bp, Probe Sequence
aagacttaatgaaattgttgatgcg

SEQ ID NO: 33450 - DNA, 25 bp, Probe Sequence
tgcttcaataaatcttcatcttggg

SEQ ID NO: 33451 - DNA, 25 bp, Probe Sequence
tcctcccgattattgcgtattctaa

SEQ ID NO: 33452 - DNA, 25 bp, Probe Sequence
aaccaagatcacagtacaccatatg

SEQ ID NO: 33453 - DNA, 25 bp, Probe Sequence
aaaccaagatcacagtacaccatat

SEQ ID NO: 33454 - DNA, 25 bp, Probe Sequence
atgtatcctcccgattattgcgtat

SEQ ID NO: 33455 - DNA, 25 bp, Probe Sequence
gggaaactactaaatggactgatct

SEQ ID NO: 33456 - DNA, 25 bp, Probe Sequence
tgggaaactactaaatggactgatc

SEQ ID NO: 33457 - DNA, 25 bp, Probe Sequence
actaaatggactgatctctttgaca

SEQ ID NO: 33458 - DNA, 25 bp, Probe Sequence
aactaacagaacttcatttccagaa

SEQ ID NO: 33459 - DNA, 25 bp, Probe Sequence
aaactaacagaacttcatttccaga

SEQ ID NO: 33460 - DNA, 25 bp, Probe Sequence
agaagaggatgaggaagatgatgat

SEQ ID NO: 33461 - DNA, 25 bp, Probe Sequence
gaagaagaggatgaggaagatgatg

SEQ ID NO: 33462 - DNA, 25 bp, Probe Sequence
gatgaagaagaggatgaggaagatg

SEQ ID NO: 33463 - DNA, 25 bp, Probe Sequence
gatgatgaagaagaggatgaggaag

SEQ ID NO: 33464 - DNA, 25 bp, Probe Sequence
aagaagaggatgaggaagatgatga

SEQ ID NO: 33465 - DNA, 25 bp, Probe Sequence
tgaagaagaggatgaggaagatgat

SEQ ID NO: 33466 - DNA, 25 bp, Probe Sequence
atgaagaagaggatgaggaagatga

SEQ ID NO: 33467 - DNA, 25 bp, Probe Sequence
tgatgaagaagaggatgaggaagat

SEQ ID NO: 33468 - DNA, 25 bp, Probe Sequence
atgatgaagaagaggatgaggaaga

SEQ ID NO: 33469 - DNA, 25 bp, Probe Sequence
cagtgatgatgaagaagaggatgag

SEQ ID NO: 33470 - DNA, 25 bp, Probe Sequence
tgatgatgaagaagaggatgaggaa

SEQ ID NO: 33471 - DNA, 25 bp, Probe Sequence
gtgatgatgaagaagaggatgagga

SEQ ID NO: 33472 - DNA, 25 bp, Probe Sequence
agtgatgatgaagaagaggatgagg

SEQ ID NO: 33473 - DNA, 25 bp, Probe Sequence
cagtaggacagaaggtaacattgat

SEQ ID NO: 33474 - DNA, 25 bp, Probe Sequence
taggacagaaggtaacattgatgac

SEQ ID NO: 33475 - DNA, 25 bp, Probe Sequence
gtaggacagaaggtaacattgatga

SEQ ID NO: 33476 - DNA, 25 bp, Probe Sequence
agtaggacagaaggtaacattgatg

SEQ ID NO: 33477 - DNA, 25 bp, Probe Sequence
ggacagaaggtaacattgatgactc

SEQ ID NO: 33478 - DNA, 25 bp, Probe Sequence
aggacagaaggtaacattgatgact

SEQ ID NO: 33479 - DNA, 25 bp, Probe Sequence
gacagaaggtaacattgatgactcg

SEQ ID NO: 33480 - DNA, 25 bp, Probe Sequence
aagaagcctacaagaagtacatcaa

SEQ ID NO: 33481 - DNA, 25 bp, Probe Sequence
tcagtaggacagaaggtaacattga

SEQ ID NO: 33482 - DNA, 25 bp, Probe Sequence
gtcagtaggacagaaggtaacattg

SEQ ID NO: 33483 - DNA, 25 bp, Probe Sequence
taatcactggtgtcgatattgtcat

SEQ ID NO: 33484 - DNA, 25 bp, Probe Sequence
agaaggtaacattgatgactcgctc

SEQ ID NO: 33485 - DNA, 25 bp, Probe Sequence
gtaatcactggtgtcgatattgtca

SEQ ID NO: 33486 - DNA, 25 bp, Probe Sequence
ggtcagtaggacagaaggtaacatt

SEQ ID NO: 33487 - DNA, 25 bp, Probe Sequence
gaagaacagagaccagaaagagtaa

SEQ ID NO: 33488 - DNA, 25 bp, Probe Sequence
aatcactggtgtcgatattgtcatg

SEQ ID NO: 33489 - DNA, 25 bp, Probe Sequence
cagaaggtaacattgatgactcgct

SEQ ID NO: 33490 - DNA, 25 bp, Probe Sequence
aagaacagagaccagaaagagtaaa

SEQ ID NO: 33491 - DNA, 25 bp, Probe Sequence
aaacttgaagaacagagaccagaaa

SEQ ID NO: 33492 - DNA, 25 bp, Probe Sequence
agtaatcactggtgtcgatattgtc

SEQ ID NO: 33493 - DNA, 25 bp, Probe Sequence
tgaagaacagagaccagaaagagta

SEQ ID NO: 33494 - DNA, 25 bp, Probe Sequence
gatggtcagtaggacagaaggtaac

SEQ ID NO: 33495 - DNA, 25 bp, Probe Sequence
agatggtcagtaggacagaaggtaa

SEQ ID NO: 33496 - DNA, 25 bp, Probe Sequence
aagatggtcagtaggacagaaggta

SEQ ID NO: 33497 - DNA, 25 bp, Probe Sequence
cttaggttccagtcttctcatcatc

SEQ ID NO: 33498 - DNA, 25 bp, Probe Sequence
cttcttaggttccagtcttctcatc

SEQ ID NO: 33499 - DNA, 25 bp, Probe Sequence
tcttaggttccagtcttctcatcat

SEQ ID NO: 33500 - DNA, 25 bp, Probe Sequence
ttcttaggttccagtcttctcatca

SEQ ID NO: 33501 - DNA, 25 bp, Probe Sequence
cgacgaattaaggaagatgaagatg

SEQ ID NO: 33502 - DNA, 25 bp, Probe Sequence
atccaactgacattactagcctaga

SEQ ID NO: 33503 - DNA, 25 bp, Probe Sequence
catccaactgacattactagcctag

SEQ ID NO: 33504 - DNA, 25 bp, Probe Sequence
ttaggttccagtcttctcatcatcc

SEQ ID NO: 33505 - DNA, 25 bp, Probe Sequence
ttctcatcatccaactgacattact

SEQ ID NO: 33506 - DNA, 25 bp, Probe Sequence
gacgaattaaggaagatgaagatga

SEQ ID NO: 33507 - DNA, 25 bp, Probe Sequence
cttctcatcatccaactgacattac

SEQ ID NO: 33508 - DNA, 25 bp, Probe Sequence
tcttctcatcatccaactgacatta

SEQ ID NO: 33509 - DNA, 25 bp, Probe Sequence
acttcttaggttccagtcttctcat

SEQ ID NO: 33510 - DNA, 25 bp, Probe Sequence
tctcatcatccaactgacattacta

SEQ ID NO: 33511 - DNA, 25 bp, Probe Sequence
aacttcttaggttccagtcttctca

SEQ ID NO: 33512 - DNA, 25 bp, Probe Sequence
tccaactgacattactagcctagac

SEQ ID NO: 33513 - DNA, 25 bp, Probe Sequence
tcatcatccaactgacattactagc

SEQ ID NO: 33514 - DNA, 25 bp, Probe Sequence
caactgacattactagcctagacca

SEQ ID NO: 33515 - DNA, 25 bp, Probe Sequence
tcatccaactgacattactagccta

SEQ ID NO: 33516 - DNA, 25 bp, Probe Sequence
acgaattaaggaagatgaagatgat

SEQ ID NO: 33517 - DNA, 25 bp, Probe Sequence
cagaacctgtggatgaatactgtat

SEQ ID NO: 33518 - DNA, 25 bp, Probe Sequence
catcatccaactgacattactagcc

SEQ ID NO: 33519 - DNA, 25 bp, Probe Sequence
ctcatcatccaactgacattactag

SEQ ID NO: 33520 - DNA, 25 bp, Probe Sequence
gtcttctcatcatccaactgacatt

SEQ ID NO: 33521 - DNA, 25 bp, Probe Sequence
atagatgagaccatgatccacaatg

SEQ ID NO: 33522 - DNA, 25 bp, Probe Sequence
gatagatgagaccatgatccacaat

SEQ ID NO: 33523 - DNA, 25 bp, Probe Sequence
ttaagaagacagccagtaacagcaa

SEQ ID NO: 33524 - DNA, 25 bp, Probe Sequence
taagaagacagccagtaacagcaag

SEQ ID NO: 33525 - DNA, 25 bp, Probe Sequence
cgatagatgagaccatgatccacaa

SEQ ID NO: 33526 - DNA, 25 bp, Probe Sequence
atacaatttggacttctggaggaaa

SEQ ID NO: 33527 - DNA, 25 bp, Probe Sequence
aatacaatttggacttctggaggaa

SEQ ID NO: 33528 - DNA, 25 bp, Probe Sequence
agtttaagaagacagccagtaacag

SEQ ID NO: 33529 - DNA, 25 bp, Probe Sequence
cagtttaagaagacagccagtaaca

SEQ ID NO: 33530 - DNA, 25 bp, Probe Sequence
aaatacaatttggacttctggagga

SEQ ID NO: 33531 - DNA, 25 bp, Probe Sequence
aagtcacctttgatacaaccaagtc

SEQ ID NO: 33532 - DNA, 25 bp, Probe Sequence
gaagtcacctttgatacaaccaagt

SEQ ID NO: 33533 - DNA, 25 bp, Probe Sequence
gtactcgtatgccaagaggatgatc

SEQ ID NO: 33534 - DNA, 25 bp, Probe Sequence
ggaagtcacctttgatacaaccaag

SEQ ID NO: 33535 - DNA, 25 bp, Probe Sequence
tttaagaagacagccagtaacagca

SEQ ID NO: 33536 - DNA, 25 bp, Probe Sequence
gtttaagaagacagccagtaacagc

SEQ ID NO: 33537 - DNA, 25 bp, Probe Sequence
gcagtttaagaagacagccagtaac

SEQ ID NO: 33538 - DNA, 25 bp, Probe Sequence
ctacccgatagatgagaccatgatc

SEQ ID NO: 33539 - DNA, 25 bp, Probe Sequence
ccgatagatgagaccatgatccaca

SEQ ID NO: 33540 - DNA, 25 bp, Probe Sequence
actgggtgtttgtctcctctaaaga

SEQ ID NO: 33541 - DNA, 25 bp, Probe Sequence
agtcacctttgatacaaccaagtcg

SEQ ID NO: 33542 - DNA, 25 bp, Probe Sequence
gggaagtcacctttgatacaaccaa

SEQ ID NO: 33543 - DNA, 25 bp, Probe Sequence
tactcgtatgccaagaggatgatcg

SEQ ID NO: 33544 - DNA, 25 bp, Probe Sequence
ggtactcgtatgccaagaggatgat

SEQ ID NO: 33545 - DNA, 25 bp, Probe Sequence
agagtctgtattcctgatatgccta

SEQ ID NO: 33546 - DNA, 25 bp, Probe Sequence
gagtctgtattcctgatatgcctat

SEQ ID NO: 33547 - DNA, 25 bp, Probe Sequence
aagagtctgtattcctgatatgcct

SEQ ID NO: 33548 - DNA, 25 bp, Probe Sequence
caagagtctgtattcctgatatgcc

SEQ ID NO: 33549 - DNA, 25 bp, Probe Sequence
tccacaagagagatgatactgactt

SEQ ID NO: 33550 - DNA, 25 bp, Probe Sequence
actgtgagttctgatgtcttagtga

SEQ ID NO: 33551 - DNA, 25 bp, Probe Sequence
gtatctgtgttacaatcgttctgtg

SEQ ID NO: 33552 - DNA, 25 bp, Probe Sequence
acaagagtctgtattcctgatatgc

SEQ ID NO: 33553 - DNA, 25 bp, Probe Sequence
tatctgtgttacaatcgttctgtgt

SEQ ID NO: 33554 - DNA, 25 bp, Probe Sequence
gaggtatctgtgttacaatcgttct

SEQ ID NO: 33555 - DNA, 25 bp, Probe Sequence
agtctgtattcctgatatgcctata

SEQ ID NO: 33556 - DNA, 25 bp, Probe Sequence
aggtatctgtgttacaatcgttctg

SEQ ID NO: 33557 - DNA, 25 bp, Probe Sequence
tgaggtatctgtgttacaatcgttc

SEQ ID NO: 33558 - DNA, 25 bp, Probe Sequence
ctgaggtatctgtgttacaatcgtt

SEQ ID NO: 33559 - DNA, 25 bp, Probe Sequence
ctccacaagagagatgatactgact

SEQ ID NO: 33560 - DNA, 25 bp, Probe Sequence
gtgagttctgatgtcttagtgactt

SEQ ID NO: 33561 - DNA, 25 bp, Probe Sequence
atctgtgttacaatcgttctgtgtt

SEQ ID NO: 33562 - DNA, 25 bp, Probe Sequence
ggtatctgtgttacaatcgttctgt

SEQ ID NO: 33563 - DNA, 25 bp, Probe Sequence
ctgtgagttctgatgtcttagtgac

SEQ ID NO: 33564 - DNA, 25 bp, Probe Sequence
cagatacttgtgaacatgccttata

SEQ ID NO: 33565 - DNA, 25 bp, Probe Sequence
tcagatacttgtgaacatgccttat

SEQ ID NO: 33566 - DNA, 25 bp, Probe Sequence
agttctgatgtcttagtgacttagt

SEQ ID NO: 33567 - DNA, 25 bp, Probe Sequence
tgagttctgatgtcttagtgactta

SEQ ID NO: 33568 - DNA, 25 bp, Probe Sequence
tgtgagttctgatgtcttagtgact

SEQ ID NO: 33569 - DNA, 25 bp, Probe Sequence
cgtgatattccttgaagtagatgtg

SEQ ID NO: 33570 - DNA, 25 bp, Probe Sequence
gtgatattccttgaagtagatgtgg

SEQ ID NO: 33571 - DNA, 25 bp, Probe Sequence
cttgaagtagatgtggatgactgtc

SEQ ID NO: 33572 - DNA, 25 bp, Probe Sequence
atatgaagacataaccagttgccat

SEQ ID NO: 33573 - DNA, 25 bp, Probe Sequence
aatatgaagacataaccagttgcca

SEQ ID NO: 33574 - DNA, 25 bp, Probe Sequence
tatgaagacataaccagttgccatc

SEQ ID NO: 33575 - DNA, 25 bp, Probe Sequence
attccttgaagtagatgtggatgac

SEQ ID NO: 33576 - DNA, 25 bp, Probe Sequence
atgaagacataaccagttgccatct

SEQ ID NO: 33577 - DNA, 25 bp, Probe Sequence
ccttgaagtagatgtggatgactgt

SEQ ID NO: 33578 - DNA, 25 bp, Probe Sequence
cttgtagtagttgacttctcagcca

SEQ ID NO: 33579 - DNA, 25 bp, Probe Sequence
acttgtagtagttgacttctcagcc

SEQ ID NO: 33580 - DNA, 25 bp, Probe Sequence
tattccttgaagtagatgtggatga

SEQ ID NO: 33581 - DNA, 25 bp, Probe Sequence
tgatattccttgaagtagatgtgga

SEQ ID NO: 33582 - DNA, 25 bp, Probe Sequence
ttgtagtagttgacttctcagccac

SEQ ID NO: 33583 - DNA, 25 bp, Probe Sequence
ttccttgaagtagatgtggatgact

SEQ ID NO: 33584 - DNA, 25 bp, Probe Sequence
ttgaagtagatgtggatgactgtca

SEQ ID NO: 33585 - DNA, 25 bp, Probe Sequence
acgtgatattccttgaagtagatgt

SEQ ID NO: 33586 - DNA, 25 bp, Probe Sequence
ttccaacgtgatattccttgaagta

SEQ ID NO: 33587 - DNA, 25 bp, Probe Sequence
agtattccaacgtgatattccttga

SEQ ID NO: 33588 - DNA, 25 bp, Probe Sequence
ctgcgtgacaataaacattatgcta

SEQ ID NO: 33589 - DNA, 25 bp, Probe Sequence
ccatctgcgtgacaataaacattat

SEQ ID NO: 33590 - DNA, 25 bp, Probe Sequence
ccaacgtgatattccttgaagtaga

SEQ ID NO: 33591 - DNA, 25 bp, Probe Sequence
tccaacgtgatattccttgaagtag

SEQ ID NO: 33592 - DNA, 25 bp, Probe Sequence
tccttgaagtagatgtggatgactg

SEQ ID NO: 33593 - DNA, 25 bp, Probe Sequence
tgtccatgctctattccttcttcat

SEQ ID NO: 33594 - DNA, 25 bp, Probe Sequence
actataaccaagagtggacattgtg

SEQ ID NO: 33595 - DNA, 25 bp, Probe Sequence
tactataaccaagagtggacattgt

SEQ ID NO: 33596 - DNA, 25 bp, Probe Sequence
ttgagaaggatgatgacagcaactt

SEQ ID NO: 33597 - DNA, 25 bp, Probe Sequence
ctataaccaagagtggacattgtgg

SEQ ID NO: 33598 - DNA, 25 bp, Probe Sequence
gtgtccatgctctattccttcttca

SEQ ID NO: 33599 - DNA, 25 bp, Probe Sequence
cattgactttgagaaggatgatgac

SEQ ID NO: 33600 - DNA, 25 bp, Probe Sequence
attgactttgagaaggatgatgaca

SEQ ID NO: 33601 - DNA, 25 bp, Probe Sequence
gtactataaccaagagtggacattg

SEQ ID NO: 33602 - DNA, 25 bp, Probe Sequence
ttgactttgagaaggatgatgacag

SEQ ID NO: 33603 - DNA, 25 bp, Probe Sequence
ccattgactttgagaaggatgatga

SEQ ID NO: 33604 - DNA, 25 bp, Probe Sequence
cctacaagaatggtttcctcaactt

SEQ ID NO: 33605 - DNA, 25 bp, Probe Sequence
aagacagagcacaaattagagatca

SEQ ID NO: 33606 - DNA, 25 bp, Probe Sequence
agacagagcacaaattagagatcac

SEQ ID NO: 33607 - DNA, 25 bp, Probe Sequence
ctcctacaagaatggtttcctcaac

SEQ ID NO: 33608 - DNA, 25 bp, Probe Sequence
taccttgtttgaaacctgaatccta

SEQ ID NO: 33609 - DNA, 25 bp, Probe Sequence
atgctctattccttcttcatgccag

SEQ ID NO: 33610 - DNA, 25 bp, Probe Sequence
actcctacaagaatggtttcctcaa

SEQ ID NO: 33611 - DNA, 25 bp, Probe Sequence
accttgtttgaaacctgaatcctaa

SEQ ID NO: 33612 - DNA, 25 bp, Probe Sequence
cagagcacaaattagagatcaccat

SEQ ID NO: 33613 - DNA, 25 bp, Probe Sequence
ccttgtttgaaacctgaatcctaat

SEQ ID NO: 33614 - DNA, 25 bp, Probe Sequence
ttctaccttgtttgaaacctgaatc

SEQ ID NO: 33615 - DNA, 25 bp, Probe Sequence
cttctaccttgtttgaaacctgaat

SEQ ID NO: 33616 - DNA, 25 bp, Probe Sequence
cccattgactttgagaaggatgatg

SEQ ID NO: 33617 - DNA, 25 bp, Probe Sequence
ccattctaacatccatacagtctct

SEQ ID NO: 33618 - DNA, 25 bp, Probe Sequence
tccattctaacatccatacagtctc

SEQ ID NO: 33619 - DNA, 25 bp, Probe Sequence
ttccattctaacatccatacagtct

SEQ ID NO: 33620 - DNA, 25 bp, Probe Sequence
tcttccattctaacatccatacagt

SEQ ID NO: 33621 - DNA, 25 bp, Probe Sequence
cttccattctaacatccatacagtc

SEQ ID NO: 33622 - DNA, 25 bp, Probe Sequence
gtcttccattctaacatccatacag

SEQ ID NO: 33623 - DNA, 25 bp, Probe Sequence
caacctatgatgtgtcttccattct

SEQ ID NO: 33624 - DNA, 25 bp, Probe Sequence
acctatgatgtgtcttccattctaa

SEQ ID NO: 33625 - DNA, 25 bp, Probe Sequence
aacctatgatgtgtcttccattcta

SEQ ID NO: 33626 - DNA, 25 bp, Probe Sequence
cctatgatgtgtcttccattctaac

SEQ ID NO: 33627 - DNA, 25 bp, Probe Sequence
gttatacaagaggtgcttatgctta

SEQ ID NO: 33628 - DNA, 25 bp, Probe Sequence
ccaacctatgatgtgtcttccattc

SEQ ID NO: 33629 - DNA, 25 bp, Probe Sequence
ttatacaagaggtgcttatgcttag

SEQ ID NO: 33630 - DNA, 25 bp, Probe Sequence
attgtagtaactgacacatcctctc

SEQ ID NO: 33631 - DNA, 25 bp, Probe Sequence
tgttatacaagaggtgcttatgctt

SEQ ID NO: 33632 - DNA, 25 bp, Probe Sequence
ttgtctaatgttctattgtcacctt

SEQ ID NO: 33633 - DNA, 25 bp, Probe Sequence
tccaacctatgatgtgtcttccatt

SEQ ID NO: 33634 - DNA, 25 bp, Probe Sequence
tgtagtaactgacacatcctctctt

SEQ ID NO: 33635 - DNA, 25 bp, Probe Sequence
ttgtagtaactgacacatcctctct

SEQ ID NO: 33636 - DNA, 25 bp, Probe Sequence
aattgtagtaactgacacatcctct

SEQ ID NO: 33637 - DNA, 25 bp, Probe Sequence
tgtcttccattctaacatccataca

SEQ ID NO: 33638 - DNA, 25 bp, Probe Sequence
tgtgtcttccattctaacatccata

SEQ ID NO: 33639 - DNA, 25 bp, Probe Sequence
gtgtcttccattctaacatccatac

SEQ ID NO: 33640 - DNA, 25 bp, Probe Sequence
cattctaacatccatacagtctctg

SEQ ID NO: 33641 - DNA, 25 bp, Probe Sequence
cacctgtgtagtctctctagtagtt

SEQ ID NO: 33642 - DNA, 25 bp, Probe Sequence
attacagtatggcaatatctacagc

SEQ ID NO: 33643 - DNA, 25 bp, Probe Sequence
acctgtgtagtctctctagtagtta

SEQ ID NO: 33644 - DNA, 25 bp, Probe Sequence
cgcactatataattcgcacacatta

SEQ ID NO: 33645 - DNA, 25 bp, Probe Sequence
aaccacctgtgtagtctctctagta

SEQ ID NO: 33646 - DNA, 25 bp, Probe Sequence
ggattacagtatggcaatatctaca

SEQ ID NO: 33647 - DNA, 25 bp, Probe Sequence
tggattacagtatggcaatatctac

SEQ ID NO: 33648 - DNA, 25 bp, Probe Sequence
cctgtgtagtctctctagtagttaa

SEQ ID NO: 33649 - DNA, 25 bp, Probe Sequence
attccgcactatataattcgcacac

SEQ ID NO: 33650 - DNA, 25 bp, Probe Sequence
ccgcactatataattcgcacacatt

SEQ ID NO: 33651 - DNA, 25 bp, Probe Sequence
ccacctgtgtagtctctctagtagt

SEQ ID NO: 33652 - DNA, 25 bp, Probe Sequence
accacctgtgtagtctctctagtag

SEQ ID NO: 33653 - DNA, 25 bp, Probe Sequence
aagtctctagctctccatctattga

SEQ ID NO: 33654 - DNA, 25 bp, Probe Sequence
aattccgcactatataattcgcaca

SEQ ID NO: 33655 - DNA, 25 bp, Probe Sequence
cagtatggcaatatctacagcttct

SEQ ID NO: 33656 - DNA, 25 bp, Probe Sequence
agtctctagctctccatctattgat

SEQ ID NO: 33657 - DNA, 25 bp, Probe Sequence
acagtatggcaatatctacagcttc

SEQ ID NO: 33658 - DNA, 25 bp, Probe Sequence
tacagtatggcaatatctacagctt

SEQ ID NO: 33659 - DNA, 25 bp, Probe Sequence
ttacagtatggcaatatctacagct

SEQ ID NO: 33660 - DNA, 25 bp, Probe Sequence
ttgaaccacctgtgtagtctctcta

SEQ ID NO: 33661 - DNA, 25 bp, Probe Sequence
tgagttgcttcttcttgtggagatt

SEQ ID NO: 33662 - DNA, 25 bp, Probe Sequence
ggttaataagtctctagctctccat

SEQ ID NO: 33663 - DNA, 25 bp, Probe Sequence
aattctgttgaaccacctgtgtagt

SEQ ID NO: 33664 - DNA, 25 bp, Probe Sequence
tggcaatatctacagcttctattca

SEQ ID NO: 33665 - DNA, 25 bp, Probe Sequence
tattctagcagcatccattcttgtt

SEQ ID NO: 33666 - DNA, 25 bp, Probe Sequence
ttattctagcagcatccattcttgt

SEQ ID NO: 33667 - DNA, 25 bp, Probe Sequence
gatacagcattattctagcagcatc

SEQ ID NO: 33668 - DNA, 25 bp, Probe Sequence
attattctagcagcatccattcttg

SEQ ID NO: 33669 - DNA, 25 bp, Probe Sequence
cattattctagcagcatccattctt

SEQ ID NO: 33670 - DNA, 25 bp, Probe Sequence
atacagcattattctagcagcatcc

SEQ ID NO: 33671 - DNA, 25 bp, Probe Sequence
ggatacagcattattctagcagcat

SEQ ID NO: 33672 - DNA, 25 bp, Probe Sequence
aaggatacagcattattctagcagc

SEQ ID NO: 33673 - DNA, 25 bp, Probe Sequence
aagtagttacaagagaacagttgcc

SEQ ID NO: 33674 - DNA, 25 bp, Probe Sequence
gcattattctagcagcatccattct

SEQ ID NO: 33675 - DNA, 25 bp, Probe Sequence
agcattattctagcagcatccattc

SEQ ID NO: 33676 - DNA, 25 bp, Probe Sequence
acagacagagataagtacaacagaa

SEQ ID NO: 33677 - DNA, 25 bp, Probe Sequence
aacagacagagataagtacaacaga

SEQ ID NO: 33678 - DNA, 25 bp, Probe Sequence
cagcattattctagcagcatccatt

SEQ ID NO: 33679 - DNA, 25 bp, Probe Sequence
gatattctaagatcacagtggtcgc

SEQ ID NO: 33680 - DNA, 25 bp, Probe Sequence
aggatacagcattattctagcagca

SEQ ID NO: 33681 - DNA, 25 bp, Probe Sequence
cataactgatgtggctggagaattg

SEQ ID NO: 33682 - DNA, 25 bp, Probe Sequence
tacagcattattctagcagcatcca

SEQ ID NO: 33683 - DNA, 25 bp, Probe Sequence
aaggaatgacctgttcttgttctac

SEQ ID NO: 33684 - DNA, 25 bp, Probe Sequence
gtggctggagaattggtattgaatt

SEQ ID NO: 33685 - DNA, 25 bp, Probe Sequence
cagacagagataagtacaacagaat

SEQ ID NO: 33686 - DNA, 25 bp, Probe Sequence
attcattcacatgctcatctgagaa

SEQ ID NO: 33687 - DNA, 25 bp, Probe Sequence
tgtcttcactctaacttggttatga

SEQ ID NO: 33688 - DNA, 25 bp, Probe Sequence
cacatgctcatctgagaagacttaa

SEQ ID NO: 33689 - DNA, 25 bp, Probe Sequence
gtctgtgttgctgtttaggtaaata

SEQ ID NO: 33690 - DNA, 25 bp, Probe Sequence
tgtctgtgttgctgtttaggtaaat

SEQ ID NO: 33691 - DNA, 25 bp, Probe Sequence
tttgtctgtgttgctgtttaggtaa

SEQ ID NO: 33692 - DNA, 25 bp, Probe Sequence
ttgtctgtgttgctgtttaggtaaa

SEQ ID NO: 33693 - DNA, 25 bp, Probe Sequence
tctgtgttgctgtttaggtaaataa

SEQ ID NO: 33694 - DNA, 25 bp, Probe Sequence
ctgtgttgctgtttaggtaaataaa

SEQ ID NO: 33695 - DNA, 25 bp, Probe Sequence
tttatatggcgttttgtctgtgttg

SEQ ID NO: 33696 - DNA, 25 bp, Probe Sequence
gtttatatggcgttttgtctgtgtt

SEQ ID NO: 33697 - DNA, 25 bp, Probe Sequence
ttttgtctgtgttgctgtttaggta

SEQ ID NO: 33698 - DNA, 25 bp, Probe Sequence
tgtttatatggcgttttgtctgtgt

SEQ ID NO: 33699 - DNA, 25 bp, Probe Sequence
atcgtcagaaggaagggattggttt

SEQ ID NO: 33700 - DNA, 25 bp, Probe Sequence
gttttgtctgtgttgctgtttaggt

SEQ ID NO: 33701 - DNA, 25 bp, Probe Sequence
ctgaggatctgtgtttggtgaaaag

SEQ ID NO: 33702 - DNA, 25 bp, Probe Sequence
ttatatggcgttttgtctgtgttgc

SEQ ID NO: 33703 - DNA, 25 bp, Probe Sequence
catcgtcagaaggaagggattggtt

SEQ ID NO: 33704 - DNA, 25 bp, Probe Sequence
cgttttgtctgtgttgctgtttagg

SEQ ID NO: 33705 - DNA, 25 bp, Probe Sequence
tcgtcagaaggaagggattggtttg

SEQ ID NO: 33706 - DNA, 25 bp, Probe Sequence
tatatggcgttttgtctgtgttgct

SEQ ID NO: 33707 - DNA, 25 bp, Probe Sequence
aggatctgtgtttggtgaaaaggag

SEQ ID NO: 33708 - DNA, 25 bp, Probe Sequence
gaggatctgtgtttggtgaaaagga

SEQ ID NO: 33709 - DNA, 25 bp, Probe Sequence
tgtgttgctgtttaggtaaataaac

SEQ ID NO: 33710 - DNA, 25 bp, Probe Sequence
tgaggatctgtgtttggtgaaaagg

SEQ ID NO: 33711 - DNA, 25 bp, Probe Sequence
cctgaggatctgtgtttggtgaaaa

SEQ ID NO: 33712 - DNA, 25 bp, Probe Sequence
ccctgaggatctgtgtttggtgaaa

SEQ ID NO: 33713 - DNA, 25 bp, Probe Sequence
gtctgtgttgctgtttaggtaaata

SEQ ID NO: 33714 - DNA, 25 bp, Probe Sequence
tgtctgtgttgctgtttaggtaaat

SEQ ID NO: 33715 - DNA, 25 bp, Probe Sequence
tttgtctgtgttgctgtttaggtaa

SEQ ID NO: 33716 - DNA, 25 bp, Probe Sequence
ttgtctgtgttgctgtttaggtaaa

SEQ ID NO: 33717 - DNA, 25 bp, Probe Sequence
tctgtgttgctgtttaggtaaataa

SEQ ID NO: 33718 - DNA, 25 bp, Probe Sequence
ctgtgttgctgtttaggtaaataaa

SEQ ID NO: 33719 - DNA, 25 bp, Probe Sequence
tttatatggcgttttgtctgtgttg

SEQ ID NO: 33720 - DNA, 25 bp, Probe Sequence
gtttatatggcgttttgtctgtgtt

SEQ ID NO: 33721 - DNA, 25 bp, Probe Sequence
ttttgtctgtgttgctgtttaggta

SEQ ID NO: 33722 - DNA, 25 bp, Probe Sequence
tgtttatatggcgttttgtctgtgt

SEQ ID NO: 33723 - DNA, 25 bp, Probe Sequence
atcgtcagaaggaagggattggttt

SEQ ID NO: 33724 - DNA, 25 bp, Probe Sequence
gttttgtctgtgttgctgtttaggt

SEQ ID NO: 33725 - DNA, 25 bp, Probe Sequence
ctgaggatctgtgtttggtgaaaag

SEQ ID NO: 33726 - DNA, 25 bp, Probe Sequence
ttatatggcgttttgtctgtgttgc

SEQ ID NO: 33727 - DNA, 25 bp, Probe Sequence
catcgtcagaaggaagggattggtt

SEQ ID NO: 33728 - DNA, 25 bp, Probe Sequence
cgttttgtctgtgttgctgtttagg

SEQ ID NO: 33729 - DNA, 25 bp, Probe Sequence
tcgtcagaaggaagggattggtttg

SEQ ID NO: 33730 - DNA, 25 bp, Probe Sequence
tatatggcgttttgtctgtgttgct

SEQ ID NO: 33731 - DNA, 25 bp, Probe Sequence
aggatctgtgtttggtgaaaaggag

SEQ ID NO: 33732 - DNA, 25 bp, Probe Sequence
gaggatctgtgtttggtgaaaagga

SEQ ID NO: 33733 - DNA, 25 bp, Probe Sequence
tgtgttgctgtttaggtaaataaac

SEQ ID NO: 33734 - DNA, 25 bp, Probe Sequence
tgaggatctgtgtttggtgaaaagg

SEQ ID NO: 33735 - DNA, 25 bp, Probe Sequence
cctgaggatctgtgtttggtgaaaa

SEQ ID NO: 33736 - DNA, 25 bp, Probe Sequence
ccctgaggatctgtgtttggtgaaa

SEQ ID NO: 33737 - DNA, 25 bp, Probe Sequence
ttgtaggattggaattagcaggact

SEQ ID NO: 33738 - DNA, 25 bp, Probe Sequence
tgtaggattggaattagcaggactc

SEQ ID NO: 33739 - DNA, 25 bp, Probe Sequence
tagatcctgtggagaagatgactta

SEQ ID NO: 33740 - DNA, 25 bp, Probe Sequence
cttgaagctcactcagtaatatcct

SEQ ID NO: 33741 - DNA, 25 bp, Probe Sequence
acttgaagctcactcagtaatatcc

SEQ ID NO: 33742 - DNA, 25 bp, Probe Sequence
agatcctgtggagaagatgacttaa

SEQ ID NO: 33743 - DNA, 25 bp, Probe Sequence
ccacttgaagctcactcagtaatat

SEQ ID NO: 33744 - DNA, 25 bp, Probe Sequence
ttgaagctcactcagtaatatcctt

SEQ ID NO: 33745 - DNA, 25 bp, Probe Sequence
gtaggattggaattagcaggactcg

SEQ ID NO: 33746 - DNA, 25 bp, Probe Sequence
cacttgaagctcactcagtaatatc

SEQ ID NO: 33747 - DNA, 25 bp, Probe Sequence
ctagatcctgtggagaagatgactt

SEQ ID NO: 33748 - DNA, 25 bp, Probe Sequence
ctttgtaggattggaattagcagga

SEQ ID NO: 33749 - DNA, 25 bp, Probe Sequence
atttgttcttgttgcttctctggat

SEQ ID NO: 33750 - DNA, 25 bp, Probe Sequence
tggagaagatgacttaaactttgct

SEQ ID NO: 33751 - DNA, 25 bp, Probe Sequence
gtggagaagatgacttaaactttgc

SEQ ID NO: 33752 - DNA, 25 bp, Probe Sequence
cctgtggagaagatgacttaaactt

SEQ ID NO: 33753 - DNA, 25 bp, Probe Sequence
ggagaagatgacttaaactttgctt

SEQ ID NO: 33754 - DNA, 25 bp, Probe Sequence
tccacttgaagctcactcagtaata

SEQ ID NO: 33755 - DNA, 25 bp, Probe Sequence
tttgtaggattggaattagcaggac

SEQ ID NO: 33756 - DNA, 25 bp, Probe Sequence
tgtggagaagatgacttaaactttg

SEQ ID NO: 33757 - DNA, 25 bp, Probe Sequence
ctgtggagaagatgacttaaacttt

SEQ ID NO: 33758 - DNA, 25 bp, Probe Sequence
gctcactcagtaatatcctttcaat

SEQ ID NO: 33759 - DNA, 25 bp, Probe Sequence
tttatttcactcacactccagtttg

SEQ ID NO: 33760 - DNA, 25 bp, Probe Sequence
gactagatcctgtggagaagatgac

SEQ ID NO: 33761 - DNA, 25 bp, Probe Sequence
aacataacagtattccataagcagc

SEQ ID NO: 33762 - DNA, 25 bp, Probe Sequence
cataacagtattccataagcagcct

SEQ ID NO: 33763 - DNA, 25 bp, Probe Sequence
acataacagtattccataagcagcc

SEQ ID NO: 33764 - DNA, 25 bp, Probe Sequence
ataacagtattccataagcagcctt

SEQ ID NO: 33765 - DNA, 25 bp, Probe Sequence
gcttgttagagtagatgtgaaggtt

SEQ ID NO: 33766 - DNA, 25 bp, Probe Sequence
aagaccgcatgaagatacttgtaag

SEQ ID NO: 33767 - DNA, 25 bp, Probe Sequence
ggcttgttagagtagatgtgaaggt

SEQ ID NO: 33768 - DNA, 25 bp, Probe Sequence
tgaagatacttgtaagcacacatga

SEQ ID NO: 33769 - DNA, 25 bp, Probe Sequence
agatacttgtaagcacacatgatcc

SEQ ID NO: 33770 - DNA, 25 bp, Probe Sequence
atgaagatacttgtaagcacacatg

SEQ ID NO: 33771 - DNA, 25 bp, Probe Sequence
catgaagatacttgtaagcacacat

SEQ ID NO: 33772 - DNA, 25 bp, Probe Sequence
aagatacttgtaagcacacatgatc

SEQ ID NO: 33773 - DNA, 25 bp, Probe Sequence
gaagatacttgtaagcacacatgat

SEQ ID NO: 33774 - DNA, 25 bp, Probe Sequence
gcatgaagatacttgtaagcacaca

SEQ ID NO: 33775 - DNA, 25 bp, Probe Sequence
taacagtattccataagcagccttt

SEQ ID NO: 33776 - DNA, 25 bp, Probe Sequence
ttaaacagggctttcatttggtcat

SEQ ID NO: 33777 - DNA, 25 bp, Probe Sequence
tgaagcagcaactatcaagtctgaa

SEQ ID NO: 33778 - DNA, 25 bp, Probe Sequence
taaacagggctttcatttggtcatc

SEQ ID NO: 33779 - DNA, 25 bp, Probe Sequence
taacataacagtattccataagcag

SEQ ID NO: 33780 - DNA, 25 bp, Probe Sequence
ttgttagagtagatgtgaaggtttc

SEQ ID NO: 33781 - DNA, 25 bp, Probe Sequence
cttgttagagtagatgtgaaggttt

SEQ ID NO: 33782 - DNA, 25 bp, Probe Sequence
aaagaccgcatgaagatacttgtaa

SEQ ID NO: 33783 - DNA, 25 bp, Probe Sequence
aaagaatagtcaccagggttactca

SEQ ID NO: 33784 - DNA, 25 bp, Probe Sequence
cgcatgaagatacttgtaagcacac

SEQ ID NO: 33785 - DNA, 25 bp, Probe Sequence
tcttcattcctcctggttattggtt

SEQ ID NO: 33786 - DNA, 25 bp, Probe Sequence
agtcttcattcctcctggttattgg

SEQ ID NO: 33787 - DNA, 25 bp, Probe Sequence
gtcttcattcctcctggttattggt

SEQ ID NO: 33788 - DNA, 25 bp, Probe Sequence
cagtcttcattcctcctggttattg

SEQ ID NO: 33789 - DNA, 25 bp, Probe Sequence
atacttgtgctctgctgagaatgta

SEQ ID NO: 33790 - DNA, 25 bp, Probe Sequence
acagtcttcattcctcctggttatt

SEQ ID NO: 33791 - DNA, 25 bp, Probe Sequence
gacagtcttcattcctcctggttat

SEQ ID NO: 33792 - DNA, 25 bp, Probe Sequence
ttgatacttgtgctctgctgagaat

SEQ ID NO: 33793 - DNA, 25 bp, Probe Sequence
acctaaagtgtagagattgccattt

SEQ ID NO: 33794 - DNA, 25 bp, Probe Sequence
cctggttattggtttgtttgtcatt

SEQ ID NO: 33795 - DNA, 25 bp, Probe Sequence
attcctcctggttattggtttgttt

SEQ ID NO: 33796 - DNA, 25 bp, Probe Sequence
cttcattcctcctggttattggttt

SEQ ID NO: 33797 - DNA, 25 bp, Probe Sequence
tcctggttattggtttgtttgtcat

SEQ ID NO: 33798 - DNA, 25 bp, Probe Sequence
tcaatgagaagagggagacaaatat

SEQ ID NO: 33799 - DNA, 25 bp, Probe Sequence
atgtatggtctggttaaagttcctt

SEQ ID NO: 33800 - DNA, 25 bp, Probe Sequence
atgaggacagaagcatctctacaga

SEQ ID NO: 33801 - DNA, 25 bp, Probe Sequence
ttcattcctcctggttattggtttg

SEQ ID NO: 33802 - DNA, 25 bp, Probe Sequence
ttcaatgagaagagggagacaaata

SEQ ID NO: 33803 - DNA, 25 bp, Probe Sequence
gttcaatgagaagagggagacaaat

SEQ ID NO: 33804 - DNA, 25 bp, Probe Sequence
gggagacaaatataaagatgaggac

SEQ ID NO: 33805 - DNA, 25 bp, Probe Sequence
agggagacaaatataaagatgagga

SEQ ID NO: 33806 - DNA, 25 bp, Probe Sequence
cattcctcctggttattggtttgtt

SEQ ID NO: 33807 - DNA, 25 bp, Probe Sequence
gagggagacaaatataaagatgagg

SEQ ID NO: 33808 - DNA, 25 bp, Probe Sequence
ctcctggttattggtttgtttgtca

SEQ ID NO: 33809 - DNA, 25 bp, Probe Sequence
ataagacaccttcacttagcagttc

SEQ ID NO: 33810 - DNA, 25 bp, Probe Sequence
tataagacaccttcacttagcagtt

SEQ ID NO: 33811 - DNA, 25 bp, Probe Sequence
taagacaccttcacttagcagttct

SEQ ID NO: 33812 - DNA, 25 bp, Probe Sequence
ttataagacaccttcacttagcagt

SEQ ID NO: 33813 - DNA, 25 bp, Probe Sequence
gcgaagaacaaactgaatggtaaat

SEQ ID NO: 33814 - DNA, 25 bp, Probe Sequence
aagaacaaactgaatggtaaatggt

SEQ ID NO: 33815 - DNA, 25 bp, Probe Sequence
cgaagaacaaactgaatggtaaatg

SEQ ID NO: 33816 - DNA, 25 bp, Probe Sequence
tatgcgaagaacaaactgaatggta

SEQ ID NO: 33817 - DNA, 25 bp, Probe Sequence
gaagaacaaactgaatggtaaatgg

SEQ ID NO: 33818 - DNA, 25 bp, Probe Sequence
atatgcgaagaacaaactgaatggt

SEQ ID NO: 33819 - DNA, 25 bp, Probe Sequence
agaacaaactgaatggtaaatggta

SEQ ID NO: 33820 - DNA, 25 bp, Probe Sequence
atgcgaagaacaaactgaatggtaa

SEQ ID NO: 33821 - DNA, 25 bp, Probe Sequence
aagacaccttcacttagcagttctg

SEQ ID NO: 33822 - DNA, 25 bp, Probe Sequence
tggtattactttgatgatagcaacg

SEQ ID NO: 33823 - DNA, 25 bp, Probe Sequence
tgcgaagaacaaactgaatggtaaa

SEQ ID NO: 33824 - DNA, 25 bp, Probe Sequence
cttcacttagcagttctggttcctc

SEQ ID NO: 33825 - DNA, 25 bp, Probe Sequence
cttagcagttctggttcctctgatg

SEQ ID NO: 33826 - DNA, 25 bp, Probe Sequence
ctacaacagatactggagggataag

SEQ ID NO: 33827 - DNA, 25 bp, Probe Sequence
gaggatcagatagtgactaaagcag

SEQ ID NO: 33828 - DNA, 25 bp, Probe Sequence
tgaggatcagatagtgactaaagca

SEQ ID NO: 33829 - DNA, 25 bp, Probe Sequence
gaacaaactgaatggtaaatggtat

SEQ ID NO: 33830 - DNA, 25 bp, Probe Sequence
cctacaacagatactggagggataa

SEQ ID NO: 33831 - DNA, 25 bp, Probe Sequence
ttcacttagcagttctggttcctct

SEQ ID NO: 33832 - DNA, 25 bp, Probe Sequence
tacaacagatactggagggataagc

SEQ ID NO: 33833 - DNA, 25 bp, Probe Sequence
gatctgctccaagtacatctatgac

SEQ ID NO: 33834 - DNA, 25 bp, Probe Sequence
atctgctccaagtacatctatgacc

SEQ ID NO: 33835 - DNA, 25 bp, Probe Sequence
ctatgcgagatgtggtctttaacta

SEQ ID NO: 33836 - DNA, 25 bp, Probe Sequence
tatgcgagatgtggtctttaactac

SEQ ID NO: 33837 - DNA, 25 bp, Probe Sequence
ctccaagtacatctatgaccagtgc

SEQ ID NO: 33838 - DNA, 25 bp, Probe Sequence
gctccaagtacatctatgaccagtg

SEQ ID NO: 33839 - DNA, 25 bp, Probe Sequence
tctgctccaagtacatctatgacca

SEQ ID NO: 33840 - DNA, 25 bp, Probe Sequence
gattgagaaggaacgtgatgtgatc

SEQ ID NO: 33841 - DNA, 25 bp, Probe Sequence
tctatgcgagatgtggtctttaact

SEQ ID NO: 33842 - DNA, 25 bp, Probe Sequence
tgctccaagtacatctatgaccagt

SEQ ID NO: 33843 - DNA, 25 bp, Probe Sequence
ctgctccaagtacatctatgaccag

SEQ ID NO: 33844 - DNA, 25 bp, Probe Sequence
agattgagaaggaacgtgatgtgat

SEQ ID NO: 33845 - DNA, 25 bp, Probe Sequence
agaaatgccctggtatctcatctag

SEQ ID NO: 33846 - DNA, 25 bp, Probe Sequence
cagaaatgccctggtatctcatcta

SEQ ID NO: 33847 - DNA, 25 bp, Probe Sequence
cagattgagaaggaacgtgatgtga

SEQ ID NO: 33848 - DNA, 25 bp, Probe Sequence
gagtacctcagcacacattacaagg

SEQ ID NO: 33849 - DNA, 25 bp, Probe Sequence
cgagtacctcagcacacattacaag

SEQ ID NO: 33850 - DNA, 25 bp, Probe Sequence
tccaagtacatctatgaccagtgcc

SEQ ID NO: 33851 - DNA, 25 bp, Probe Sequence
atctatgcgagatgtggtctttaac

SEQ ID NO: 33852 - DNA, 25 bp, Probe Sequence
tttgagactgagaagaataatgggg

SEQ ID NO: 33853 - DNA, 25 bp, Probe Sequence
ctcagaaatgccctggtatctcatc

SEQ ID NO: 33854 - DNA, 25 bp, Probe Sequence
acagattgagaaggaacgtgatgtg

SEQ ID NO: 33855 - DNA, 25 bp, Probe Sequence
gaagactcacagattgagaaggaac

SEQ ID NO: 33856 - DNA, 25 bp, Probe Sequence
ccgttttgagactgagaagaataat

SEQ ID NO: 33857 - DNA, 25 bp, Probe Sequence
gatacctaatgtcagtggagtcttc

SEQ ID NO: 33858 - DNA, 25 bp, Probe Sequence
atacctaatgtcagtggagtcttct

SEQ ID NO: 33859 - DNA, 25 bp, Probe Sequence
agtgacatcagaggagttacattac

SEQ ID NO: 33860 - DNA, 25 bp, Probe Sequence
aagtgacatcagaggagttacatta

SEQ ID NO: 33861 - DNA, 25 bp, Probe Sequence
ttgatattctaatggagttcctgct

SEQ ID NO: 33862 - DNA, 25 bp, Probe Sequence
gttgatattctaatggagttcctgc

SEQ ID NO: 33863 - DNA, 25 bp, Probe Sequence
ggatacctaatgtcagtggagtctt

SEQ ID NO: 33864 - DNA, 25 bp, Probe Sequence
gaggagttacattacttcgttcaga

SEQ ID NO: 33865 - DNA, 25 bp, Probe Sequence
agaggagttacattacttcgttcag

SEQ ID NO: 33866 - DNA, 25 bp, Probe Sequence
tcagaggagttacattacttcgttc

SEQ ID NO: 33867 - DNA, 25 bp, Probe Sequence
catcagaggagttacattacttcgt

SEQ ID NO: 33868 - DNA, 25 bp, Probe Sequence
acatcagaggagttacattacttcg

SEQ ID NO: 33869 - DNA, 25 bp, Probe Sequence
gtgacatcagaggagttacattact

SEQ ID NO: 33870 - DNA, 25 bp, Probe Sequence
cagtagatatgaggacttcagcaat

SEQ ID NO: 33871 - DNA, 25 bp, Probe Sequence
aggagttacattacttcgttcagaa

SEQ ID NO: 33872 - DNA, 25 bp, Probe Sequence
cagaggagttacattacttcgttca

SEQ ID NO: 33873 - DNA, 25 bp, Probe Sequence
atcagaggagttacattacttcgtt

SEQ ID NO: 33874 - DNA, 25 bp, Probe Sequence
tgttgatgagttgtaatactgatgc

SEQ ID NO: 33875 - DNA, 25 bp, Probe Sequence
ggtgatgttgatattctaatggagt

SEQ ID NO: 33876 - DNA, 25 bp, Probe Sequence
tgacatcagaggagttacattactt

SEQ ID NO: 33877 - DNA, 25 bp, Probe Sequence
agtagatatgaggacttcagcaatt

SEQ ID NO: 33878 - DNA, 25 bp, Probe Sequence
gatattctaatggagttcctgctca

SEQ ID NO: 33879 - DNA, 25 bp, Probe Sequence
tgatattctaatggagttcctgctc

SEQ ID NO: 33880 - DNA, 25 bp, Probe Sequence
tattctaatggagttcctgctcaat

SEQ ID NO: 33881 - DNA, 25 bp, Probe Sequence
tcctacttctactccttacttgcta

SEQ ID NO: 33882 - DNA, 25 bp, Probe Sequence
acatctcctacttctactccttact

SEQ ID NO: 33883 - DNA, 25 bp, Probe Sequence
ctcctacttctactccttacttgct

SEQ ID NO: 33884 - DNA, 25 bp, Probe Sequence
tctcctacttctactccttacttgc

SEQ ID NO: 33885 - DNA, 25 bp, Probe Sequence
tctacatctcctacttctactcctt

SEQ ID NO: 33886 - DNA, 25 bp, Probe Sequence
ttctacatctcctacttctactcct

SEQ ID NO: 33887 - DNA, 25 bp, Probe Sequence
gctactggatattattggtctctct

SEQ ID NO: 33888 - DNA, 25 bp, Probe Sequence
cttctacatctcctacttctactcc

SEQ ID NO: 33889 - DNA, 25 bp, Probe Sequence
ccttctacatctcctacttctactc

SEQ ID NO: 33890 - DNA, 25 bp, Probe Sequence
cctacttctactccttacttgctat

SEQ ID NO: 33891 - DNA, 25 bp, Probe Sequence
gcatagtggcattacaattagtagt

SEQ ID NO: 33892 - DNA, 25 bp, Probe Sequence
gaagaagtgtcaattagagttggtg

SEQ ID NO: 33893 - DNA, 25 bp, Probe Sequence
atctcctacttctactccttacttg

SEQ ID NO: 33894 - DNA, 25 bp, Probe Sequence
catctcctacttctactccttactt

SEQ ID NO: 33895 - DNA, 25 bp, Probe Sequence
tgaagaagtgtcaattagagttggt

SEQ ID NO: 33896 - DNA, 25 bp, Probe Sequence
gaagtgtcaattagagttggtggaa

SEQ ID NO: 33897 - DNA, 25 bp, Probe Sequence
aagaagtgtcaattagagttggtgg

SEQ ID NO: 33898 - DNA, 25 bp, Probe Sequence
atagtggcattacaattagtagtgg

SEQ ID NO: 33899 - DNA, 25 bp, Probe Sequence
atgaagaagtgtcaattagagttgg

SEQ ID NO: 33900 - DNA, 25 bp, Probe Sequence
ctggatattattggtctctctaggt

SEQ ID NO: 33901 - DNA, 25 bp, Probe Sequence
actggatattattggtctctctagg

SEQ ID NO: 33902 - DNA, 25 bp, Probe Sequence
tacatctcctacttctactccttac

SEQ ID NO: 33903 - DNA, 25 bp, Probe Sequence
agaagtgtcaattagagttggtgga

SEQ ID NO: 33904 - DNA, 25 bp, Probe Sequence
tggatattattggtctctctaggtt

SEQ ID NO: 33905 - DNA, 25 bp, Probe Sequence
gacttattccttcttgtgttgtgtt

SEQ ID NO: 33906 - DNA, 25 bp, Probe Sequence
ttggaagtgtctgtgtgattgtaat

SEQ ID NO: 33907 - DNA, 25 bp, Probe Sequence
attggacttctgttgtattctcacc

SEQ ID NO: 33908 - DNA, 25 bp, Probe Sequence
aattggacttctgttgtattctcac

SEQ ID NO: 33909 - DNA, 25 bp, Probe Sequence
gacttctgttgtattctcaccactc

SEQ ID NO: 33910 - DNA, 25 bp, Probe Sequence
caagtggaagcggataatatgtagg

SEQ ID NO: 33911 - DNA, 25 bp, Probe Sequence
cttggaagtgtctgtgtgattgtaa

SEQ ID NO: 33912 - DNA, 25 bp, Probe Sequence
ttctgttgtattctcaccactcaat

SEQ ID NO: 33913 - DNA, 25 bp, Probe Sequence
tctgttgtattctcaccactcaatt

SEQ ID NO: 33914 - DNA, 25 bp, Probe Sequence
cttctgttgtattctcaccactcaa

SEQ ID NO: 33915 - DNA, 25 bp, Probe Sequence
acttctgttgtattctcaccactca

SEQ ID NO: 33916 - DNA, 25 bp, Probe Sequence
tggaagtgtctgtgtgattgtaatc

SEQ ID NO: 33917 - DNA, 25 bp, Probe Sequence
gcaagtggaagcggataatatgtag

SEQ ID NO: 33918 - DNA, 25 bp, Probe Sequence
gaatagcagccaagtatcagattga

SEQ ID NO: 33919 - DNA, 25 bp, Probe Sequence
aatagcagccaagtatcagattgac

SEQ ID NO: 33920 - DNA, 25 bp, Probe Sequence
ggaatagcagccaagtatcagattg

SEQ ID NO: 33921 - DNA, 25 bp, Probe Sequence
ggacttctgttgtattctcaccact

SEQ ID NO: 33922 - DNA, 25 bp, Probe Sequence
aagtggaagcggataatatgtaggc

SEQ ID NO: 33923 - DNA, 25 bp, Probe Sequence
gtggatgtgatgaagccaataattc

SEQ ID NO: 33924 - DNA, 25 bp, Probe Sequence
ggaagcggataatatgtaggcactt

SEQ ID NO: 33925 - DNA, 25 bp, Probe Sequence
ggacttattccttcttgtgttgtgt

SEQ ID NO: 33926 - DNA, 25 bp, Probe Sequence
cggaatagcagccaagtatcagatt

SEQ ID NO: 33927 - DNA, 25 bp, Probe Sequence
ctccatttaccagaaagtgaacaag

SEQ ID NO: 33928 - DNA, 25 bp, Probe Sequence
ccatttaccagaaagtgaacaagaa

SEQ ID NO: 33929 - DNA, 25 bp, Probe Sequence
gtccaatgtgtattcctccatcata

SEQ ID NO: 33930 - DNA, 25 bp, Probe Sequence
tccaatgtgtattcctccatcatat

SEQ ID NO: 33931 - DNA, 25 bp, Probe Sequence
ttgactgttaccattgaatgagatg

SEQ ID NO: 33932 - DNA, 25 bp, Probe Sequence
ggttcatctaatacagacactggta

SEQ ID NO: 33933 - DNA, 25 bp, Probe Sequence
ggatcagtggatattaagatgaggt

SEQ ID NO: 33934 - DNA, 25 bp, Probe Sequence
tggatcagtggatattaagatgagg

SEQ ID NO: 33935 - DNA, 25 bp, Probe Sequence
cagtggatattaagatgaggttaca

SEQ ID NO: 33936 - DNA, 25 bp, Probe Sequence
attgactgttaccattgaatgagat

SEQ ID NO: 33937 - DNA, 25 bp, Probe Sequence
tgaatgagatggatcagtggatatt

SEQ ID NO: 33938 - DNA, 25 bp, Probe Sequence
ttgaatgagatggatcagtggatat

SEQ ID NO: 33939 - DNA, 25 bp, Probe Sequence
attgaatgagatggatcagtggata

SEQ ID NO: 33940 - DNA, 25 bp, Probe Sequence
cattgaatgagatggatcagtggat

SEQ ID NO: 33941 - DNA, 25 bp, Probe Sequence
cttacactctctgctctggtagatg

SEQ ID NO: 33942 - DNA, 25 bp, Probe Sequence
tgagatggatcagtggatattaaga

SEQ ID NO: 33943 - DNA, 25 bp, Probe Sequence
aatacaagtggtgtgagtatggtct

SEQ ID NO: 33944 - DNA, 25 bp, Probe Sequence
agtcaacaactctagcttaattgga

SEQ ID NO: 33945 - DNA, 25 bp, Probe Sequence
cgtccaatgtgtattcctccatcat

SEQ ID NO: 33946 - DNA, 25 bp, Probe Sequence
acccaccaataatgaaatagacctt

SEQ ID NO: 33947 - DNA, 25 bp, Probe Sequence
ttggttgtgatgttgactttgattt

SEQ ID NO: 33948 - DNA, 25 bp, Probe Sequence
gttcatctaatacagacactggtaa

SEQ ID NO: 33949 - DNA, 25 bp, Probe Sequence
tcagtggatattaagatgaggttac

SEQ ID NO: 33950 - DNA, 25 bp, Probe Sequence
cttggttgtgatgttgactttgatt

SEQ ID NO: 33951 - DNA, 25 bp, Probe Sequence
agatggatcagtggatattaagatg

SEQ ID NO: 33952 - DNA, 25 bp, Probe Sequence
gctacccaccaataatgaaatagac

SEQ ID NO: 33953 - DNA, 25 bp, Probe Sequence
aataccaagacctgctcaatgttaa

SEQ ID NO: 33954 - DNA, 25 bp, Probe Sequence
gaataccaagacctgctcaatgtta

SEQ ID NO: 33955 - DNA, 25 bp, Probe Sequence
ataccaagacctgctcaatgttaag

SEQ ID NO: 33956 - DNA, 25 bp, Probe Sequence
tagagatggacaggttatcaacgaa

SEQ ID NO: 33957 - DNA, 25 bp, Probe Sequence
gacattcctgattaagacggttgaa

SEQ ID NO: 33958 - DNA, 25 bp, Probe Sequence
taacaaccgacactcctacaagatt

SEQ ID NO: 33959 - DNA, 25 bp, Probe Sequence
aactagagatggacaggttatcaac

SEQ ID NO: 33960 - DNA, 25 bp, Probe Sequence
ttaacaaccgacactcctacaagat

SEQ ID NO: 33961 - DNA, 25 bp, Probe Sequence
taccaagacctgctcaatgttaaga

SEQ ID NO: 33962 - DNA, 25 bp, Probe Sequence
tagttcttaacaaccgacactccta

SEQ ID NO: 33963 - DNA, 25 bp, Probe Sequence
ttcttaacaaccgacactcctacaa

SEQ ID NO: 33964 - DNA, 25 bp, Probe Sequence
gctgctaactaccaagacactattg

SEQ ID NO: 33965 - DNA, 25 bp, Probe Sequence
caagacctgctcaatgttaagatgg

SEQ ID NO: 33966 - DNA, 25 bp, Probe Sequence
ccaagacctgctcaatgttaagatg

SEQ ID NO: 33967 - DNA, 25 bp, Probe Sequence
ctctagttcttaacaaccgacactc

SEQ ID NO: 33968 - DNA, 25 bp, Probe Sequence
ctagagatggacaggttatcaacga

SEQ ID NO: 33969 - DNA, 25 bp, Probe Sequence
accaagacctgctcaatgttaagat

SEQ ID NO: 33970 - DNA, 25 bp, Probe Sequence
actagagatggacaggttatcaacg

SEQ ID NO: 33971 - DNA, 25 bp, Probe Sequence
cttaacaaccgacactcctacaaga

SEQ ID NO: 33972 - DNA, 25 bp, Probe Sequence
tcttaacaaccgacactcctacaag

SEQ ID NO: 33973 - DNA, 25 bp, Probe Sequence
agttcttaacaaccgacactcctac

SEQ ID NO: 33974 - DNA, 25 bp, Probe Sequence
gttcttaacaaccgacactcctaca

SEQ ID NO: 33975 - DNA, 25 bp, Probe Sequence
ctagttcttaacaaccgacactcct

SEQ ID NO: 33976 - DNA, 25 bp, Probe Sequence
tctagttcttaacaaccgacactcc

SEQ ID NO: 33977 - DNA, 25 bp, Probe Sequence
gagggagttaagccataggaatttg

SEQ ID NO: 33978 - DNA, 25 bp, Probe Sequence
agagggagttaagccataggaattt

SEQ ID NO: 33979 - DNA, 25 bp, Probe Sequence
ataggaatttggctgtggagtaaga

SEQ ID NO: 33980 - DNA, 25 bp, Probe Sequence
cataggaatttggctgtggagtaag

SEQ ID NO: 33981 - DNA, 25 bp, Probe Sequence
ctgttaaatcctcccacatttcttg

SEQ ID NO: 33982 - DNA, 25 bp, Probe Sequence
cagagggagttaagccataggaatt

SEQ ID NO: 33983 - DNA, 25 bp, Probe Sequence
taggaatttggctgtggagtaagag

SEQ ID NO: 33984 - DNA, 25 bp, Probe Sequence
gctgttaaatcctcccacatttctt

SEQ ID NO: 33985 - DNA, 25 bp, Probe Sequence
atgctgttaaatcctcccacatttc

SEQ ID NO: 33986 - DNA, 25 bp, Probe Sequence
ctacaatgctgttaaatcctcccac

SEQ ID NO: 33987 - DNA, 25 bp, Probe Sequence
gttaaatcctcccacatttcttgga

SEQ ID NO: 33988 - DNA, 25 bp, Probe Sequence
tacaatgctgttaaatcctcccaca

SEQ ID NO: 33989 - DNA, 25 bp, Probe Sequence
tgttaaatcctcccacatttcttgg

SEQ ID NO: 33990 - DNA, 25 bp, Probe Sequence
tgctgttaaatcctcccacatttct

SEQ ID NO: 33991 - DNA, 25 bp, Probe Sequence
aatgctgttaaatcctcccacattt

SEQ ID NO: 33992 - DNA, 25 bp, Probe Sequence
acaatgctgttaaatcctcccacat

SEQ ID NO: 33993 - DNA, 25 bp, Probe Sequence
cactattttagattcctggcattcg

SEQ ID NO: 33994 - DNA, 25 bp, Probe Sequence
aacccgtcactattttagattcctg

SEQ ID NO: 33995 - DNA, 25 bp, Probe Sequence
agggagttaagccataggaatttgg

SEQ ID NO: 33996 - DNA, 25 bp, Probe Sequence
gtcactattttagattcctggcatt

SEQ ID NO: 33997 - DNA, 25 bp, Probe Sequence
cgtcactattttagattcctggcat

SEQ ID NO: 33998 - DNA, 25 bp, Probe Sequence
gaacccgtcactattttagattcct

SEQ ID NO: 33999 - DNA, 25 bp, Probe Sequence
caatgctgttaaatcctcccacatt

SEQ ID NO: 34000 - DNA, 25 bp, Probe Sequence
tcactattttagattcctggcattc

SEQ ID NO: 34001 - DNA, 25 bp, Probe Sequence
tcttcaggaatatgtggctaatctc

SEQ ID NO: 34002 - DNA, 25 bp, Probe Sequence
ttcttcaggaatatgtggctaatct

SEQ ID NO: 34003 - DNA, 25 bp, Probe Sequence
cattgtctgaagttagcacctcttg

SEQ ID NO: 34004 - DNA, 25 bp, Probe Sequence
cctcacctacaagatgctcaagtaa

SEQ ID NO: 34005 - DNA, 25 bp, Probe Sequence
cttcaggaatatgtggctaatctcc

SEQ ID NO: 34006 - DNA, 25 bp, Probe Sequence
tatagtgctgcattgtctgaagtta

SEQ ID NO: 34007 - DNA, 25 bp, Probe Sequence
gattatagtgctgcattgtctgaag

SEQ ID NO: 34008 - DNA, 25 bp, Probe Sequence
attatagtgctgcattgtctgaagt

SEQ ID NO: 34009 - DNA, 25 bp, Probe Sequence
ttatagtgctgcattgtctgaagtt

SEQ ID NO: 34010 - DNA, 25 bp, Probe Sequence
attgtctgaagttagcacctcttgg

SEQ ID NO: 34011 - DNA, 25 bp, Probe Sequence
tttggaagagagagaaatagcccta

SEQ ID NO: 34012 - DNA, 25 bp, Probe Sequence
tcacctacaagatgctcaagtaaag

SEQ ID NO: 34013 - DNA, 25 bp, Probe Sequence
ctcacctacaagatgctcaagtaaa

SEQ ID NO: 34014 - DNA, 25 bp, Probe Sequence
cttcacatactgctggtttaacaat

SEQ ID NO: 34015 - DNA, 25 bp, Probe Sequence
aagttagcacctcttggactgaatc

SEQ ID NO: 34016 - DNA, 25 bp, Probe Sequence
gaagttagcacctcttggactgaat

SEQ ID NO: 34017 - DNA, 25 bp, Probe Sequence
atagtgctgcattgtctgaagttag

SEQ ID NO: 34018 - DNA, 25 bp, Probe Sequence
tgagattccagaagaaatgtgtgat

SEQ ID NO: 34019 - DNA, 25 bp, Probe Sequence
atgagattccagaagaaatgtgtga

SEQ ID NO: 34020 - DNA, 25 bp, Probe Sequence
tctttcttcaggaatatgtggctaa

SEQ ID NO: 34021 - DNA, 25 bp, Probe Sequence
aatctttcttcaggaatatgtggct

SEQ ID NO: 34022 - DNA, 25 bp, Probe Sequence
acttcacatactgctggtttaacaa

SEQ ID NO: 34023 - DNA, 25 bp, Probe Sequence
atatcatcccattgtaaagcgactt

SEQ ID NO: 34024 - DNA, 25 bp, Probe Sequence
aaatctttcttcaggaatatgtggc

SEQ ID NO: 34025 - DNA, 25 bp, Probe Sequence
tcaacatatatcccttgtgcgataa

SEQ ID NO: 34026 - DNA, 25 bp, Probe Sequence
ctcaacatatatcccttgtgcgata

SEQ ID NO: 34027 - DNA, 25 bp, Probe Sequence
caacatatatcccttgtgcgataaa

SEQ ID NO: 34028 - DNA, 25 bp, Probe Sequence
tgatctgtccagtgtcactctgtac

SEQ ID NO: 34029 - DNA, 25 bp, Probe Sequence
gatctgtccagtgtcactctgtacc

SEQ ID NO: 34030 - DNA, 25 bp, Probe Sequence
tgtttctcgtgctttgtgatctgtc

SEQ ID NO: 34031 - DNA, 25 bp, Probe Sequence
aacatatatcccttgtgcgataaaa

SEQ ID NO: 34032 - DNA, 25 bp, Probe Sequence
gtttctcgtgctttgtgatctgtcc

SEQ ID NO: 34033 - DNA, 25 bp, Probe Sequence
tttctcgtgctttgtgatctgtcca

SEQ ID NO: 34034 - DNA, 25 bp, Probe Sequence
gtgatctgtccagtgtcactctgta

SEQ ID NO: 34035 - DNA, 25 bp, Probe Sequence
ttctcgtgctttgtgatctgtccag

SEQ ID NO: 34036 - DNA, 25 bp, Probe Sequence
ttgtgatctgtccagtgtcactctg

SEQ ID NO: 34037 - DNA, 25 bp, Probe Sequence
ctttgtgatctgtccagtgtcactc

SEQ ID NO: 34038 - DNA, 25 bp, Probe Sequence
tttgtgatctgtccagtgtcactct

SEQ ID NO: 34039 - DNA, 25 bp, Probe Sequence
tgtgatctgtccagtgtcactctgt

SEQ ID NO: 34040 - DNA, 25 bp, Probe Sequence
gctttgtgatctgtccagtgtcact

SEQ ID NO: 34041 - DNA, 25 bp, Probe Sequence
gatactcttatagcctgccttcaat

SEQ ID NO: 34042 - DNA, 25 bp, Probe Sequence
cttgatactcttatagcctgccttc

SEQ ID NO: 34043 - DNA, 25 bp, Probe Sequence
tcttgatactcttatagcctgcctt

SEQ ID NO: 34044 - DNA, 25 bp, Probe Sequence
ttcttgatactcttatagcctgcct

SEQ ID NO: 34045 - DNA, 25 bp, Probe Sequence
atactcttatagcctgccttcaatt

SEQ ID NO: 34046 - DNA, 25 bp, Probe Sequence
ttctgtatgttctattgtgcctagt

SEQ ID NO: 34047 - DNA, 25 bp, Probe Sequence
tctgtatgttctattgtgcctagta

SEQ ID NO: 34048 - DNA, 25 bp, Probe Sequence
tcttgtcaccaaccattcttacttg

SEQ ID NO: 34049 - DNA, 25 bp, Probe Sequence
gtcttgtcaccaaccattcttactt

SEQ ID NO: 34050 - DNA, 25 bp, Probe Sequence
tgatactcttatagcctgccttcaa

SEQ ID NO: 34051 - DNA, 25 bp, Probe Sequence
ttgatactcttatagcctgccttca

SEQ ID NO: 34052 - DNA, 25 bp, Probe Sequence
ctgtatgttctattgtgcctagtac

SEQ ID NO: 34053 - DNA, 25 bp, Probe Sequence
ctgtcttgtcaccaaccattcttac

SEQ ID NO: 34054 - DNA, 25 bp, Probe Sequence
tctgtcttgtcaccaaccattctta

SEQ ID NO: 34055 - DNA, 25 bp, Probe Sequence
ttgcttggtattcattacttcatgt

SEQ ID NO: 34056 - DNA, 25 bp, Probe Sequence
tgtcttgtcaccaaccattcttact

SEQ ID NO: 34057 - DNA, 25 bp, Probe Sequence
tcatgtatatcaagcacagcagtaa

SEQ ID NO: 34058 - DNA, 25 bp, Probe Sequence
ttcatgtatatcaagcacagcagta

SEQ ID NO: 34059 - DNA, 25 bp, Probe Sequence
tacttcatgtatatcaagcacagca

SEQ ID NO: 34060 - DNA, 25 bp, Probe Sequence
gttctattgtgcctagtacactgta

SEQ ID NO: 34061 - DNA, 25 bp, Probe Sequence
atgttctattgtgcctagtacactg

SEQ ID NO: 34062 - DNA, 25 bp, Probe Sequence
ttacttcatgtatatcaagcacagc

SEQ ID NO: 34063 - DNA, 25 bp, Probe Sequence
tgcttggtattcattacttcatgta

SEQ ID NO: 34064 - DNA, 25 bp, Probe Sequence
ttctattgtgcctagtacactgtaa

SEQ ID NO: 34065 - DNA, 25 bp, Probe Sequence
ctcctagaatcttatgtgctgtgaa

SEQ ID NO: 34066 - DNA, 25 bp, Probe Sequence
tcctagaatcttatgtgctgtgaat

SEQ ID NO: 34067 - DNA, 25 bp, Probe Sequence
atcttatgtgctgtgaataataggc

SEQ ID NO: 34068 - DNA, 25 bp, Probe Sequence
atctgtctcctagaatcttatgtgc

SEQ ID NO: 34069 - DNA, 25 bp, Probe Sequence
ctgtctcctagaatcttatgtgctg

SEQ ID NO: 34070 - DNA, 25 bp, Probe Sequence
tctgtctcctagaatcttatgtgct

SEQ ID NO: 34071 - DNA, 25 bp, Probe Sequence
tctcctagaatcttatgtgctgtga

SEQ ID NO: 34072 - DNA, 25 bp, Probe Sequence
gtctcctagaatcttatgtgctgtg

SEQ ID NO: 34073 - DNA, 25 bp, Probe Sequence
tgtctcctagaatcttatgtgctgt

SEQ ID NO: 34074 - DNA, 25 bp, Probe Sequence
cctagaatcttatgtgctgtgaata

SEQ ID NO: 34075 - DNA, 25 bp, Probe Sequence
aatctgtctcctagaatcttatgtg

SEQ ID NO: 34076 - DNA, 25 bp, Probe Sequence
aattgtagcatatttaagggaggca

SEQ ID NO: 34077 - DNA, 25 bp, Probe Sequence
aatacaagacggaactctgtcacaa

SEQ ID NO: 34078 - DNA, 25 bp, Probe Sequence
tagcatatttaagggaggcaatgaa

SEQ ID NO: 34079 - DNA, 25 bp, Probe Sequence
gtagcatatttaagggaggcaatga

SEQ ID NO: 34080 - DNA, 25 bp, Probe Sequence
tgtagcatatttaagggaggcaatg

SEQ ID NO: 34081 - DNA, 25 bp, Probe Sequence
ttgtagcatatttaagggaggcaat

SEQ ID NO: 34082 - DNA, 25 bp, Probe Sequence
attgtagcatatttaagggaggcaa

SEQ ID NO: 34083 - DNA, 25 bp, Probe Sequence
atcttcaatcgcatctctgtttctg

SEQ ID NO: 34084 - DNA, 25 bp, Probe Sequence
catcttcaatcgcatctctgtttct

SEQ ID NO: 34085 - DNA, 25 bp, Probe Sequence
aatcttatgtgctgtgaataatagg

SEQ ID NO: 34086 - DNA, 25 bp, Probe Sequence
atacaagacggaactctgtcacaag

SEQ ID NO: 34087 - DNA, 25 bp, Probe Sequence
cccaaatctgtctcctagaatctta

SEQ ID NO: 34088 - DNA, 25 bp, Probe Sequence
agcatatttaagggaggcaatgaac

SEQ ID NO: 34089 - DNA, 25 bp, Probe Sequence
ataatgatggtcttggattgtctga

SEQ ID NO: 34090 - DNA, 25 bp, Probe Sequence
tggtagaggtgttatgtataatgct

SEQ ID NO: 34091 - DNA, 25 bp, Probe Sequence
tataatgatggtcttggattgtctg

SEQ ID NO: 34092 - DNA, 25 bp, Probe Sequence
gtataatgatggtcttggattgtct

SEQ ID NO: 34093 - DNA, 25 bp, Probe Sequence
agtataatgatggtcttggattgtc

SEQ ID NO: 34094 - DNA, 25 bp, Probe Sequence
ttggtagaggtgttatgtataatgc

SEQ ID NO: 34095 - DNA, 25 bp, Probe Sequence
ctacatagaacatacagttgagtgg

SEQ ID NO: 34096 - DNA, 25 bp, Probe Sequence
cctacatagaacatacagttgagtg

SEQ ID NO: 34097 - DNA, 25 bp, Probe Sequence
ggtagaggtgttatgtataatgctt

SEQ ID NO: 34098 - DNA, 25 bp, Probe Sequence
caagacaagtgaagtcaactgttac

SEQ ID NO: 34099 - DNA, 25 bp, Probe Sequence
acatcaagtaacatctgtatcaggc

SEQ ID NO: 34100 - DNA, 25 bp, Probe Sequence
taatgatggtcttggattgtctgac

SEQ ID NO: 34101 - DNA, 25 bp, Probe Sequence
aagacaagtgaagtcaactgttacc

SEQ ID NO: 34102 - DNA, 25 bp, Probe Sequence
aacatcaagtaacatctgtatcagg

SEQ ID NO: 34103 - DNA, 25 bp, Probe Sequence
ggaagagttgagtcagaccagtaag

SEQ ID NO: 34104 - DNA, 25 bp, Probe Sequence
aaccaattctggaagtgtctatgaa

SEQ ID NO: 34105 - DNA, 25 bp, Probe Sequence
ccaattctggaagtgtctatgaact

SEQ ID NO: 34106 - DNA, 25 bp, Probe Sequence
gcaagacaagtgaagtcaactgtta

SEQ ID NO: 34107 - DNA, 25 bp, Probe Sequence
accaattctggaagtgtctatgaac

SEQ ID NO: 34108 - DNA, 25 bp, Probe Sequence
tagtataatgatggtcttggattgt

SEQ ID NO: 34109 - DNA, 25 bp, Probe Sequence
aatagggattgatgaatgggaagag

SEQ ID NO: 34110 - DNA, 25 bp, Probe Sequence
gaatagggattgatgaatgggaaga

SEQ ID NO: 34111 - DNA, 25 bp, Probe Sequence
tgaatagggattgatgaatgggaag

SEQ ID NO: 34112 - DNA, 25 bp, Probe Sequence
gtgaatagggattgatgaatgggaa

SEQ ID NO: 34113 - DNA, 25 bp, Probe Sequence
agtcacatctcatatcacatcagag

SEQ ID NO: 34114 - DNA, 25 bp, Probe Sequence
cagagaatacatacaggagagaagc

SEQ ID NO: 34115 - DNA, 25 bp, Probe Sequence
catatcacatcagaggacacataca

SEQ ID NO: 34116 - DNA, 25 bp, Probe Sequence
atatcacatcagaggacacatacag

SEQ ID NO: 34117 - DNA, 25 bp, Probe Sequence
tcatatcacatcagaggacacatac

SEQ ID NO: 34118 - DNA, 25 bp, Probe Sequence
gaagtcaagtctcatcaatcatcag

SEQ ID NO: 34119 - DNA, 25 bp, Probe Sequence
gaagtcacaccttataccacatcaa

SEQ ID NO: 34120 - DNA, 25 bp, Probe Sequence
agccttatagagtagaacattcaca

SEQ ID NO: 34121 - DNA, 25 bp, Probe Sequence
agagaatacatacaggagagaagcc

SEQ ID NO: 34122 - DNA, 25 bp, Probe Sequence
tcagagaatacatacaggagagaag

SEQ ID NO: 34123 - DNA, 25 bp, Probe Sequence
catcagagaatacatacaggagaga

SEQ ID NO: 34124 - DNA, 25 bp, Probe Sequence
gtcagaagtcacatctcatatcaca

SEQ ID NO: 34125 - DNA, 25 bp, Probe Sequence
aagtcaagtctcatcaatcatcaga

SEQ ID NO: 34126 - DNA, 25 bp, Probe Sequence
agaagtcaagtctcatcaatcatca

SEQ ID NO: 34127 - DNA, 25 bp, Probe Sequence
accatagacaagccttatagagtag

SEQ ID NO: 34128 - DNA, 25 bp, Probe Sequence
tgctcttaggaatgaagttctatga

SEQ ID NO: 34129 - DNA, 25 bp, Probe Sequence
ccttatagagtagaacattcacagc

SEQ ID NO: 34130 - DNA, 25 bp, Probe Sequence
gccttatagagtagaacattcacag

SEQ ID NO: 34131 - DNA, 25 bp, Probe Sequence
tcagaagtcacatctcatatcacat

SEQ ID NO: 34132 - DNA, 25 bp, Probe Sequence
agacaagccttatagagtagaacat

SEQ ID NO: 34133 - DNA, 25 bp, Probe Sequence
ccatagacaagccttatagagtaga

SEQ ID NO: 34134 - DNA, 25 bp, Probe Sequence
tatcacatcagaggacacatacagg

SEQ ID NO: 34135 - DNA, 25 bp, Probe Sequence
aattctaagtggttgacagatgttc

SEQ ID NO: 34136 - DNA, 25 bp, Probe Sequence
caattctaagtggttgacagatgtt

SEQ ID NO: 34137 - DNA, 25 bp, Probe Sequence
ccagtcttcaatccttactaaccat

SEQ ID NO: 34138 - DNA, 25 bp, Probe Sequence
aaccagtcttcaatccttactaacc

SEQ ID NO: 34139 - DNA, 25 bp, Probe Sequence
accagtcttcaatccttactaacca

SEQ ID NO: 34140 - DNA, 25 bp, Probe Sequence
acataagataattcacactggagag

SEQ ID NO: 34141 - DNA, 25 bp, Probe Sequence
cataagataattcacactggagaga

SEQ ID NO: 34142 - DNA, 25 bp, Probe Sequence
attcatactatcacacctgtaatcc

SEQ ID NO: 34143 - DNA, 25 bp, Probe Sequence
aacataagataattcacactggaga

SEQ ID NO: 34144 - DNA, 25 bp, Probe Sequence
taaccagtcttcaatccttactaac

SEQ ID NO: 34145 - DNA, 25 bp, Probe Sequence
cagtcttcaatccttactaaccata

SEQ ID NO: 34146 - DNA, 25 bp, Probe Sequence
aagcatttatatcatcctcaaccct

SEQ ID NO: 34147 - DNA, 25 bp, Probe Sequence
ggcaaagcatttatatcatcctcaa

SEQ ID NO: 34148 - DNA, 25 bp, Probe Sequence
gtggcaaagcatttatatcatcctc

SEQ ID NO: 34149 - DNA, 25 bp, Probe Sequence
tggcaaagcatttatatcatcctca

SEQ ID NO: 34150 - DNA, 25 bp, Probe Sequence
tcaaccctaaatggacataagagaa

SEQ ID NO: 34151 - DNA, 25 bp, Probe Sequence
tactatcacacctgtaatcccacta

SEQ ID NO: 34152 - DNA, 25 bp, Probe Sequence
ctaactagacataagaggttgcaca

SEQ ID NO: 34153 - DNA, 25 bp, Probe Sequence
tgtggcaaagcatttatatcatcct

SEQ ID NO: 34154 - DNA, 25 bp, Probe Sequence
cctttaaccagtcttcaatccttac

SEQ ID NO: 34155 - DNA, 25 bp, Probe Sequence
gcctttaaccagtcttcaatcctta

SEQ ID NO: 34156 - DNA, 25 bp, Probe Sequence
taactagacataagaggttgcacac

SEQ ID NO: 34157 - DNA, 25 bp, Probe Sequence
atgtggcaaagcatttatatcatcc

SEQ ID NO: 34158 - DNA, 25 bp, Probe Sequence
ttcatactatcacacctgtaatccc

SEQ ID NO: 34159 - DNA, 25 bp, Probe Sequence
aaagcatttatatcatcctcaaccc

SEQ ID NO: 34160 - DNA, 25 bp, Probe Sequence
atactatcacacctgtaatcccact

SEQ ID NO: 34161 - DNA, 25 bp, Probe Sequence
ggcggataacatcttatactactct

SEQ ID NO: 34162 - DNA, 25 bp, Probe Sequence
gaatccagaacatcttgctcttgat

SEQ ID NO: 34163 - DNA, 25 bp, Probe Sequence
ccagtcaattacgcctaagatcatt

SEQ ID NO: 34164 - DNA, 25 bp, Probe Sequence
tactactcttgtattctcatggcac

SEQ ID NO: 34165 - DNA, 25 bp, Probe Sequence
tactcttgtattctcatggcaccta

SEQ ID NO: 34166 - DNA, 25 bp, Probe Sequence
aatccagaacatcttgctcttgatc

SEQ ID NO: 34167 - DNA, 25 bp, Probe Sequence
ctcagagttaagcatacatggcaat

SEQ ID NO: 34168 - DNA, 25 bp, Probe Sequence
agaatccagaacatcttgctcttga

SEQ ID NO: 34169 - DNA, 25 bp, Probe Sequence
accagtcaattacgcctaagatcat

SEQ ID NO: 34170 - DNA, 25 bp, Probe Sequence
tcagagttaagcatacatggcaatg

SEQ ID NO: 34171 - DNA, 25 bp, Probe Sequence
gcggataacatcttatactactctt

SEQ ID NO: 34172 - DNA, 25 bp, Probe Sequence
ctgttataagagactgttccaacgg

SEQ ID NO: 34173 - DNA, 25 bp, Probe Sequence
cctgttataagagactgttccaacg

SEQ ID NO: 34174 - DNA, 25 bp, Probe Sequence
aaccagtcaattacgcctaagatca

SEQ ID NO: 34175 - DNA, 25 bp, Probe Sequence
ctcttgtattctcatggcacctagt

SEQ ID NO: 34176 - DNA, 25 bp, Probe Sequence
actcttgtattctcatggcacctag

SEQ ID NO: 34177 - DNA, 25 bp, Probe Sequence
ctactcttgtattctcatggcacct

SEQ ID NO: 34178 - DNA, 25 bp, Probe Sequence
actactcttgtattctcatggcacc

SEQ ID NO: 34179 - DNA, 25 bp, Probe Sequence
cctcatcatcacagtttaacacaag

SEQ ID NO: 34180 - DNA, 25 bp, Probe Sequence
atactactcttgtattctcatggca

SEQ ID NO: 34181 - DNA, 25 bp, Probe Sequence
ctcatcatcacagtttaacacaagc

SEQ ID NO: 34182 - DNA, 25 bp, Probe Sequence
gggcggataacatcttatactactc

SEQ ID NO: 34183 - DNA, 25 bp, Probe Sequence
gagggcggataacatcttatactac

SEQ ID NO: 34184 - DNA, 25 bp, Probe Sequence
agggcggataacatcttatactact

SEQ ID NO: 34185 - DNA, 25 bp, Probe Sequence
gccacagtagatgtccacataataa

SEQ ID NO: 34186 - DNA, 25 bp, Probe Sequence
tgccacagtagatgtccacataata

SEQ ID NO: 34187 - DNA, 25 bp, Probe Sequence
atgccacagtagatgtccacataat

SEQ ID NO: 34188 - DNA, 25 bp, Probe Sequence
catgccacagtagatgtccacataa

SEQ ID NO: 34189 - DNA, 25 bp, Probe Sequence
ccacagtagatgtccacataataaa

SEQ ID NO: 34190 - DNA, 25 bp, Probe Sequence
cacagtagatgtccacataataaaa

SEQ ID NO: 34191 - DNA, 25 bp, Probe Sequence
cctgaaaggtttgtacagatgcatg

SEQ ID NO: 34192 - DNA, 25 bp, Probe Sequence
aattcatagttaccaatgcaataaa

SEQ ID NO: 34193 - DNA, 25 bp, Probe Sequence
aaattcatagttaccaatgcaataa

SEQ ID NO: 34194 - DNA, 25 bp, Probe Sequence
actgcctgaaaggtttgtacagatg

SEQ ID NO: 34195 - DNA, 25 bp, Probe Sequence
cactgcctgaaaggtttgtacagat

SEQ ID NO: 34196 - DNA, 25 bp, Probe Sequence
acagtagatgtccacataataaaat

SEQ ID NO: 34197 - DNA, 25 bp, Probe Sequence
gcctgaaaggtttgtacagatgcat

SEQ ID NO: 34198 - DNA, 25 bp, Probe Sequence
gtagatgtccacataataaaattca

SEQ ID NO: 34199 - DNA, 25 bp, Probe Sequence
cagtagatgtccacataataaaatt

SEQ ID NO: 34200 - DNA, 25 bp, Probe Sequence
ctgcctgaaaggtttgtacagatgc

SEQ ID NO: 34201 - DNA, 25 bp, Probe Sequence
attcatagttaccaatgcaataaaa

SEQ ID NO: 34202 - DNA, 25 bp, Probe Sequence
aaaattcatagttaccaatgcaata

SEQ ID NO: 34203 - DNA, 25 bp, Probe Sequence
taaaattcatagttaccaatgcaat

SEQ ID NO: 34204 - DNA, 25 bp, Probe Sequence
ataaaattcatagttaccaatgcaa

SEQ ID NO: 34205 - DNA, 25 bp, Probe Sequence
aataaaattcatagttaccaatgca

SEQ ID NO: 34206 - DNA, 25 bp, Probe Sequence
ccactgcctgaaaggtttgtacaga

SEQ ID NO: 34207 - DNA, 25 bp, Probe Sequence
tgcctgaaaggtttgtacagatgca

SEQ ID NO: 34208 - DNA, 25 bp, Probe Sequence
ggaagtggaagtataagtgaatgat

SEQ ID NO: 34209 - DNA, 25 bp, Probe Sequence
ttgccatgattaagagagaatgctt

SEQ ID NO: 34210 - DNA, 25 bp, Probe Sequence
gttgccatgattaagagagaatgct

SEQ ID NO: 34211 - DNA, 25 bp, Probe Sequence
atacatgaagtagtgtctgccatac

SEQ ID NO: 34212 - DNA, 25 bp, Probe Sequence
aatacatgaagtagtgtctgccata

SEQ ID NO: 34213 - DNA, 25 bp, Probe Sequence
tacatgaagtagtgtctgccataca

SEQ ID NO: 34214 - DNA, 25 bp, Probe Sequence
gggaagtggaagtataagtgaatga

SEQ ID NO: 34215 - DNA, 25 bp, Probe Sequence
agggaagtggaagtataagtgaatg

SEQ ID NO: 34216 - DNA, 25 bp, Probe Sequence
aatgctttctattggagtttcagga

SEQ ID NO: 34217 - DNA, 25 bp, Probe Sequence
aaagggaagtggaagtataagtgaa

SEQ ID NO: 34218 - DNA, 25 bp, Probe Sequence
ccgttgccatgattaagagagaatg

SEQ ID NO: 34219 - DNA, 25 bp, Probe Sequence
aagggaagtggaagtataagtgaat

SEQ ID NO: 34220 - DNA, 25 bp, Probe Sequence
gaatgctttctattggagtttcagg

SEQ ID NO: 34221 - DNA, 25 bp, Probe Sequence
atgctttctattggagtttcaggaa

SEQ ID NO: 34222 - DNA, 25 bp, Probe Sequence
caggcatttaagaatatggcaaaga

SEQ ID NO: 34223 - DNA, 25 bp, Probe Sequence
acatgaagtagtgtctgccatacat

SEQ ID NO: 34224 - DNA, 25 bp, Probe Sequence
taaagggaagtggaagtataagtga

SEQ ID NO: 34225 - DNA, 25 bp, Probe Sequence
ggcatttaagaatatggcaaagaac

SEQ ID NO: 34226 - DNA, 25 bp, Probe Sequence
aggcatttaagaatatggcaaagaa

SEQ ID NO: 34227 - DNA, 25 bp, Probe Sequence
acttggctaaagaatctcaatctct

SEQ ID NO: 34228 - DNA, 25 bp, Probe Sequence
atctggtaaatatctactgtttgcc

SEQ ID NO: 34229 - DNA, 25 bp, Probe Sequence
caacttggctaaagaatctcaatct

SEQ ID NO: 34230 - DNA, 25 bp, Probe Sequence
tcaacttggctaaagaatctcaatc

SEQ ID NO: 34231 - DNA, 25 bp, Probe Sequence
ctcaacttggctaaagaatctcaat

SEQ ID NO: 34232 - DNA, 25 bp, Probe Sequence
ttggcttctctgtatctattgactg

SEQ ID NO: 34233 - DNA, 25 bp, Probe Sequence
atcttctacagttcttcaagcctag

SEQ ID NO: 34234 - DNA, 25 bp, Probe Sequence
aatcattggtgttcatcaagaagat

SEQ ID NO: 34235 - DNA, 25 bp, Probe Sequence
gatcttctacagttcttcaagccta

SEQ ID NO: 34236 - DNA, 25 bp, Probe Sequence
gttcttcaagcctagacaacctaag

SEQ ID NO: 34237 - DNA, 25 bp, Probe Sequence
ctacagttcttcaagcctagacaac

SEQ ID NO: 34238 - DNA, 25 bp, Probe Sequence
agttcttcaagcctagacaacctaa

SEQ ID NO: 34239 - DNA, 25 bp, Probe Sequence
tggcttctctgtatctattgactgc

SEQ ID NO: 34240 - DNA, 25 bp, Probe Sequence
aataacactatatccagacaagcat

SEQ ID NO: 34241 - DNA, 25 bp, Probe Sequence
ataacactatatccagacaagcatg

SEQ ID NO: 34242 - DNA, 25 bp, Probe Sequence
cagttcttcaagcctagacaaccta

SEQ ID NO: 34243 - DNA, 25 bp, Probe Sequence
cttctacagttcttcaagcctagac

SEQ ID NO: 34244 - DNA, 25 bp, Probe Sequence
tcttctacagttcttcaagcctaga

SEQ ID NO: 34245 - DNA, 25 bp, Probe Sequence
aagagaatgagatgcttgtcacagt

SEQ ID NO: 34246 - DNA, 25 bp, Probe Sequence
tacagttcttcaagcctagacaacc

SEQ ID NO: 34247 - DNA, 25 bp, Probe Sequence
tctacagttcttcaagcctagacaa

SEQ ID NO: 34248 - DNA, 25 bp, Probe Sequence
ttctacagttcttcaagcctagaca

SEQ ID NO: 34249 - DNA, 25 bp, Probe Sequence
caggagaaggagtttgagaagttta

SEQ ID NO: 34250 - DNA, 25 bp, Probe Sequence
ttcaagtctcaaggttatagggatg

SEQ ID NO: 34251 - DNA, 25 bp, Probe Sequence
tttggcttctctgtatctattgact

SEQ ID NO: 34252 - DNA, 25 bp, Probe Sequence
gtttggcttctctgtatctattgac

SEQ ID NO: 34253 - DNA, 25 bp, Probe Sequence
agtttggcttctctgtatctattga

SEQ ID NO: 34254 - DNA, 25 bp, Probe Sequence
aggagaaggagtttgagaagtttaa

SEQ ID NO: 34255 - DNA, 25 bp, Probe Sequence
tttcaagtctcaaggttatagggat

SEQ ID NO: 34256 - DNA, 25 bp, Probe Sequence
gaccactcctgaatgagacttaatt

SEQ ID NO: 34257 - DNA, 25 bp, Probe Sequence
gtagactatggaatgtcagtgttca

SEQ ID NO: 34258 - DNA, 25 bp, Probe Sequence
tgtagactatggaatgtcagtgttc

SEQ ID NO: 34259 - DNA, 25 bp, Probe Sequence
agttgtagactatggaatgtcagtg

SEQ ID NO: 34260 - DNA, 25 bp, Probe Sequence
tagactatggaatgtcagtgttcag

SEQ ID NO: 34261 - DNA, 25 bp, Probe Sequence
ttgtagactatggaatgtcagtgtt

SEQ ID NO: 34262 - DNA, 25 bp, Probe Sequence
gttgtagactatggaatgtcagtgt

SEQ ID NO: 34263 - DNA, 25 bp, Probe Sequence
catagattcttgagctgttgtggtt

SEQ ID NO: 34264 - DNA, 25 bp, Probe Sequence
agggaaaggtaaatacaagtgaaca

SEQ ID NO: 34265 - DNA, 25 bp, Probe Sequence
taaggtcatagattcttgagctgtt

SEQ ID NO: 34266 - DNA, 25 bp, Probe Sequence
caaacagtatgatggaacagtgaaa

SEQ ID NO: 34267 - DNA, 25 bp, Probe Sequence
aacagtatgatggaacagtgaaagt

SEQ ID NO: 34268 - DNA, 25 bp, Probe Sequence
aaacagtatgatggaacagtgaaag

SEQ ID NO: 34269 - DNA, 25 bp, Probe Sequence
ataaggtcatagattcttgagctgt

SEQ ID NO: 34270 - DNA, 25 bp, Probe Sequence
gggaaaggtaaatacaagtgaacaa

SEQ ID NO: 34271 - DNA, 25 bp, Probe Sequence
ttcagagtttggttaatcagtgttg

SEQ ID NO: 34272 - DNA, 25 bp, Probe Sequence
aaggtcatagattcttgagctgttg

SEQ ID NO: 34273 - DNA, 25 bp, Probe Sequence
tcttgatagttactcagacactagg

SEQ ID NO: 34274 - DNA, 25 bp, Probe Sequence
acagtatgatggaacagtgaaagtc

SEQ ID NO: 34275 - DNA, 25 bp, Probe Sequence
ctttcagagtttggttaatcagtgt

SEQ ID NO: 34276 - DNA, 25 bp, Probe Sequence
gctttcagagtttggttaatcagtg

SEQ ID NO: 34277 - DNA, 25 bp, Probe Sequence
cttggctttcagagtttggttaatc

SEQ ID NO: 34278 - DNA, 25 bp, Probe Sequence
tagttgtagactatggaatgtcagt

SEQ ID NO: 34279 - DNA, 25 bp, Probe Sequence
tgttatgtgaatttgagtttgctgt

SEQ ID NO: 34280 - DNA, 25 bp, Probe Sequence
ccactgtatctaggcaacatagtat

SEQ ID NO: 34281 - DNA, 25 bp, Probe Sequence
tgacaacagttacataattcactct

SEQ ID NO: 34282 - DNA, 25 bp, Probe Sequence
cagctctaatacattccaactcgta

SEQ ID NO: 34283 - DNA, 25 bp, Probe Sequence
tgctgagatacatacagaattactg

SEQ ID NO: 34284 - DNA, 25 bp, Probe Sequence
actgctgagatacatacagaattac

SEQ ID NO: 34285 - DNA, 25 bp, Probe Sequence
acaacagttacataattcactctga

SEQ ID NO: 34286 - DNA, 25 bp, Probe Sequence
ctaatacattccaactcgtatagca

SEQ ID NO: 34287 - DNA, 25 bp, Probe Sequence
aatacattccaactcgtatagcatg

SEQ ID NO: 34288 - DNA, 25 bp, Probe Sequence
ctgctgagatacatacagaattact

SEQ ID NO: 34289 - DNA, 25 bp, Probe Sequence
gacaacagttacataattcactctg

SEQ ID NO: 34290 - DNA, 25 bp, Probe Sequence
ttgacaacagttacataattcactc

SEQ ID NO: 34291 - DNA, 25 bp, Probe Sequence
cactgtatctaggcaacatagtatt

SEQ ID NO: 34292 - DNA, 25 bp, Probe Sequence
tctaatacattccaactcgtatagc

SEQ ID NO: 34293 - DNA, 25 bp, Probe Sequence
gctctaatacattccaactcgtata

SEQ ID NO: 34294 - DNA, 25 bp, Probe Sequence
caacagttacataattcactctgag

SEQ ID NO: 34295 - DNA, 25 bp, Probe Sequence
ctgtatctaggcaacatagtattca

SEQ ID NO: 34296 - DNA, 25 bp, Probe Sequence
actgtatctaggcaacatagtattc

SEQ ID NO: 34297 - DNA, 25 bp, Probe Sequence
agctctaatacattccaactcgtat

SEQ ID NO: 34298 - DNA, 25 bp, Probe Sequence
taatacattccaactcgtatagcat

SEQ ID NO: 34299 - DNA, 25 bp, Probe Sequence
atactgctgagatacatacagaatt

SEQ ID NO: 34300 - DNA, 25 bp, Probe Sequence
aatactgctgagatacatacagaat

SEQ ID NO: 34301 - DNA, 25 bp, Probe Sequence
catgttagcccttcctccaattata

SEQ ID NO: 34302 - DNA, 25 bp, Probe Sequence
aacagttacataattcactctgagt

SEQ ID NO: 34303 - DNA, 25 bp, Probe Sequence
attgacaacagttacataattcact

SEQ ID NO: 34304 - DNA, 25 bp, Probe Sequence
accactgattgccttgttattacta

SEQ ID NO: 34305 - DNA, 25 bp, Probe Sequence
aaccactgattgccttgttattact

SEQ ID NO: 34306 - DNA, 25 bp, Probe Sequence
ccactgattgccttgttattactag

SEQ ID NO: 34307 - DNA, 25 bp, Probe Sequence
caatgatgcctagtgagtatgtgtc

SEQ ID NO: 34308 - DNA, 25 bp, Probe Sequence
ccaacaatgatgcctagtgagtatg

SEQ ID NO: 34309 - DNA, 25 bp, Probe Sequence
accaacaatgatgcctagtgagtat

SEQ ID NO: 34310 - DNA, 25 bp, Probe Sequence
aacaatgatgcctagtgagtatgtg

SEQ ID NO: 34311 - DNA, 25 bp, Probe Sequence
caacaatgatgcctagtgagtatgt

SEQ ID NO: 34312 - DNA, 25 bp, Probe Sequence
aaccaacaatgatgcctagtgagta

SEQ ID NO: 34313 - DNA, 25 bp, Probe Sequence
tctgtattgaggagaaggatgtata

SEQ ID NO: 34314 - DNA, 25 bp, Probe Sequence
gtctcacactgatgatacctcacat

SEQ ID NO: 34315 - DNA, 25 bp, Probe Sequence
actgattgccttgttattactaggt

SEQ ID NO: 34316 - DNA, 25 bp, Probe Sequence
cactgattgccttgttattactagg

SEQ ID NO: 34317 - DNA, 25 bp, Probe Sequence
agctaagatagatggtgttgattcc

SEQ ID NO: 34318 - DNA, 25 bp, Probe Sequence
gctaagctaagatagatggtgttga

SEQ ID NO: 34319 - DNA, 25 bp, Probe Sequence
ctgctaagctaagatagatggtgtt

SEQ ID NO: 34320 - DNA, 25 bp, Probe Sequence
aatgatgcctagtgagtatgtgtcc

SEQ ID NO: 34321 - DNA, 25 bp, Probe Sequence
tgctaagctaagatagatggtgttg

SEQ ID NO: 34322 - DNA, 25 bp, Probe Sequence
taaccactgattgccttgttattac

SEQ ID NO: 34323 - DNA, 25 bp, Probe Sequence
atacctgctaagctaagatagatgg

SEQ ID NO: 34324 - DNA, 25 bp, Probe Sequence
ctgtattgaggagaaggatgtataa

SEQ ID NO: 34325 - DNA, 25 bp, Probe Sequence
cttgtctcacactgatgatacctca

SEQ ID NO: 34326 - DNA, 25 bp, Probe Sequence
gctaagatagatggtgttgattcca

SEQ ID NO: 34327 - DNA, 25 bp, Probe Sequence
ctgattgccttgttattactaggtt

SEQ ID NO: 34328 - DNA, 25 bp, Probe Sequence
gctacatctacttctaccagagagt

SEQ ID NO: 34329 - DNA, 25 bp, Probe Sequence
ggctacatctacttctaccagagag

SEQ ID NO: 34330 - DNA, 25 bp, Probe Sequence
ctacatctacttctaccagagagtg

SEQ ID NO: 34331 - DNA, 25 bp, Probe Sequence
tcatccagatcaagaagttcacctt

SEQ ID NO: 34332 - DNA, 25 bp, Probe Sequence
tacatctacttctaccagagagtgg

SEQ ID NO: 34333 - DNA, 25 bp, Probe Sequence
gtcatccagatcaagaagttcacct

SEQ ID NO: 34334 - DNA, 25 bp, Probe Sequence
atctacaatgaccagaaagtgtgtg

SEQ ID NO: 34335 - DNA, 25 bp, Probe Sequence
gatctacaatgaccagaaagtgtgt

SEQ ID NO: 34336 - DNA, 25 bp, Probe Sequence
tgatctacaatgaccagaaagtgtg

SEQ ID NO: 34337 - DNA, 25 bp, Probe Sequence
gtgatctacaatgaccagaaagtgt

SEQ ID NO: 34338 - DNA, 25 bp, Probe Sequence
tatcagctctttgccttcattagtc

SEQ ID NO: 34339 - DNA, 25 bp, Probe Sequence
agtatcagctctttgccttcattag

SEQ ID NO: 34340 - DNA, 25 bp, Probe Sequence
tggtcatccagatcaagaagttcac

SEQ ID NO: 34341 - DNA, 25 bp, Probe Sequence
gggctacatctacttctaccagaga

SEQ ID NO: 34342 - DNA, 25 bp, Probe Sequence
aagtatcagctctttgccttcatta

SEQ ID NO: 34343 - DNA, 25 bp, Probe Sequence
gtatcagctctttgccttcattagt

SEQ ID NO: 34344 - DNA, 25 bp, Probe Sequence
ctctttgccttcattagtcacatgg

SEQ ID NO: 34345 - DNA, 25 bp, Probe Sequence
gaacaatagtttagaacgggctgtg

SEQ ID NO: 34346 - DNA, 25 bp, Probe Sequence
acatctacttctaccagagagtggc

SEQ ID NO: 34347 - DNA, 25 bp, Probe Sequence
catccagatcaagaagttcaccttc

SEQ ID NO: 34348 - DNA, 25 bp, Probe Sequence
ctgtctcttccttgtccttctctgg

SEQ ID NO: 34349 - DNA, 25 bp, Probe Sequence
cctgtctcttccttgtccttctctg

SEQ ID NO: 34350 - DNA, 25 bp, Probe Sequence
ggtcatccagatcaagaagttcacc

SEQ ID NO: 34351 - DNA, 25 bp, Probe Sequence
gctctttgccttcattagtcacatg

SEQ ID NO: 34352 - DNA, 25 bp, Probe Sequence
aataaagccaaccttcaaagaactt

SEQ ID NO: 34353 - DNA, 25 bp, Probe Sequence
aaataaagccaaccttcaaagaact

SEQ ID NO: 34354 - DNA, 25 bp, Probe Sequence
ataaagccaaccttcaaagaacttg

SEQ ID NO: 34355 - DNA, 25 bp, Probe Sequence
aaaataaagccaaccttcaaagaac

SEQ ID NO: 34356 - DNA, 25 bp, Probe Sequence
taaagccaaccttcaaagaacttga

SEQ ID NO: 34357 - DNA, 25 bp, Probe Sequence
taaaataaagccaaccttcaaagaa

SEQ ID NO: 34358 - DNA, 25 bp, Probe Sequence
ataaaataaagccaaccttcaaaga

SEQ ID NO: 34359 - DNA, 25 bp, Probe Sequence
gaacttgaagctttgtaggtgagat

SEQ ID NO: 34360 - DNA, 25 bp, Probe Sequence
aagaacttgaagctttgtaggtgag

SEQ ID NO: 34361 - DNA, 25 bp, Probe Sequence
agaacttgaagctttgtaggtgaga

SEQ ID NO: 34362 - DNA, 25 bp, Probe Sequence
aataaaataaagccaaccttcaaag

SEQ ID NO: 34363 - DNA, 25 bp, Probe Sequence
aaataaaataaagccaaccttcaaa

SEQ ID NO: 34364 - DNA, 25 bp, Probe Sequence
aaagaacttgaagctttgtaggtga

SEQ ID NO: 34365 - DNA, 25 bp, Probe Sequence
taaataaaataaagccaaccttcaa

SEQ ID NO: 34366 - DNA, 25 bp, Probe Sequence
ataaataaaataaagccaaccttca

SEQ ID NO: 34367 - DNA, 25 bp, Probe Sequence
aaagccaaccttcaaagaacttgaa

SEQ ID NO: 34368 - DNA, 25 bp, Probe Sequence
ggtcttcctactgctctactacttc

SEQ ID NO: 34369 - DNA, 25 bp, Probe Sequence
gtcttcctactgctctactacttcg

SEQ ID NO: 34370 - DNA, 25 bp, Probe Sequence
tggtcttcctactgctctactactt

SEQ ID NO: 34371 - DNA, 25 bp, Probe Sequence
ctggtcttcctactgctctactact

SEQ ID NO: 34372 - DNA, 25 bp, Probe Sequence
tcttcctactgctctactacttcgg

SEQ ID NO: 34373 - DNA, 25 bp, Probe Sequence
tgtaatttattgttgcgttcctctg

SEQ ID NO: 34374 - DNA, 25 bp, Probe Sequence
tgatgtaatttattgttgcgttcct

SEQ ID NO: 34375 - DNA, 25 bp, Probe Sequence
gtaatttattgttgcgttcctctgg

SEQ ID NO: 34376 - DNA, 25 bp, Probe Sequence
atgtaatttattgttgcgttcctct

SEQ ID NO: 34377 - DNA, 25 bp, Probe Sequence
gatgtaatttattgttgcgttcctc

SEQ ID NO: 34378 - DNA, 25 bp, Probe Sequence
atgatgtaatttattgttgcgttcc

SEQ ID NO: 34379 - DNA, 25 bp, Probe Sequence
catcatcttcctctccatgtgctac

SEQ ID NO: 34380 - DNA, 25 bp, Probe Sequence
gctggtcttcctactgctctactac

SEQ ID NO: 34381 - DNA, 25 bp, Probe Sequence
taatttattgttgcgttcctctgga

SEQ ID NO: 34382 - DNA, 25 bp, Probe Sequence
atcatcttcctctccatgtgctaca

SEQ ID NO: 34383 - DNA, 25 bp, Probe Sequence
cttcctactgctctactacttcggc

SEQ ID NO: 34384 - DNA, 25 bp, Probe Sequence
aatgatgtaatttattgttgcgttc

SEQ ID NO: 34385 - DNA, 25 bp, Probe Sequence
catcttcctctccatgtgctacaac

SEQ ID NO: 34386 - DNA, 25 bp, Probe Sequence
tcatcttcctctccatgtgctacaa

SEQ ID NO: 34387 - DNA, 25 bp, Probe Sequence
ccatcatcttcctctccatgtgcta

SEQ ID NO: 34388 - DNA, 25 bp, Probe Sequence
ctctggaagctgtgactggaataaa

SEQ ID NO: 34389 - DNA, 25 bp, Probe Sequence
cagccggagtttatttaatgatgta

SEQ ID NO: 34390 - DNA, 25 bp, Probe Sequence
tctggaagctgtgactggaataaac

SEQ ID NO: 34391 - DNA, 25 bp, Probe Sequence
cctctggaagctgtgactggaataa

SEQ ID NO: 34392 - DNA, 25 bp, Probe Sequence
aatcctaagatcctgcttgttgtaa

SEQ ID NO: 34393 - DNA, 25 bp, Probe Sequence
taagatcctgcttgttgtaagactc

SEQ ID NO: 34394 - DNA, 25 bp, Probe Sequence
ctaagatcctgcttgttgtaagact

SEQ ID NO: 34395 - DNA, 25 bp, Probe Sequence
atcctaagatcctgcttgttgtaag

SEQ ID NO: 34396 - DNA, 25 bp, Probe Sequence
caatcctaagatcctgcttgttgta

SEQ ID NO: 34397 - DNA, 25 bp, Probe Sequence
cctaagatcctgcttgttgtaagac

SEQ ID NO: 34398 - DNA, 25 bp, Probe Sequence
tcctaagatcctgcttgttgtaaga

SEQ ID NO: 34399 - DNA, 25 bp, Probe Sequence
atcaactatcatgcttcggatgtct

SEQ ID NO: 34400 - DNA, 25 bp, Probe Sequence
tcaactatcatgcttcggatgtctt

SEQ ID NO: 34401 - DNA, 25 bp, Probe Sequence
tgtaagactccgtttaatttccaga

SEQ ID NO: 34402 - DNA, 25 bp, Probe Sequence
gttgtaagactccgtttaatttcca

SEQ ID NO: 34403 - DNA, 25 bp, Probe Sequence
tgttgtaagactccgtttaatttcc

SEQ ID NO: 34404 - DNA, 25 bp, Probe Sequence
caactatcatgcttcggatgtcttg

SEQ ID NO: 34405 - DNA, 25 bp, Probe Sequence
ttgtaagactccgtttaatttccag

SEQ ID NO: 34406 - DNA, 25 bp, Probe Sequence
gcttgttgtaagactccgtttaatt

SEQ ID NO: 34407 - DNA, 25 bp, Probe Sequence
gtaagactccgtttaatttccagaa

SEQ ID NO: 34408 - DNA, 25 bp, Probe Sequence
aagatcctgcttgttgtaagactcc

SEQ ID NO: 34409 - DNA, 25 bp, Probe Sequence
tgcttgttgtaagactccgtttaat

SEQ ID NO: 34410 - DNA, 25 bp, Probe Sequence
taagactccgtttaatttccagaag

SEQ ID NO: 34411 - DNA, 25 bp, Probe Sequence
aagactccgtttaatttccagaagc

SEQ ID NO: 34412 - DNA, 25 bp, Probe Sequence
ctgcttgttgtaagactccgtttaa

SEQ ID NO: 34413 - DNA, 25 bp, Probe Sequence
ggcagtggatttcatcaactatcat

SEQ ID NO: 34414 - DNA, 25 bp, Probe Sequence
gtggatttcatcaactatcatgctt

SEQ ID NO: 34415 - DNA, 25 bp, Probe Sequence
gatttcatcaactatcatgcttcgg

SEQ ID NO: 34416 - DNA, 25 bp, Probe Sequence
ctttacatgccctctcccttttata

SEQ ID NO: 34417 - DNA, 25 bp, Probe Sequence
tttacatgccctctcccttttataa

SEQ ID NO: 34418 - DNA, 25 bp, Probe Sequence
cctttacatgccctctcccttttat

SEQ ID NO: 34419 - DNA, 25 bp, Probe Sequence
ttacatgccctctcccttttataaa

SEQ ID NO: 34420 - DNA, 25 bp, Probe Sequence
ccctttacatgccctctccctttta

SEQ ID NO: 34421 - DNA, 25 bp, Probe Sequence
ccataaacttgagtctattgccttg

SEQ ID NO: 34422 - DNA, 25 bp, Probe Sequence
cataaacttgagtctattgccttgc

SEQ ID NO: 34423 - DNA, 25 bp, Probe Sequence
ataaacttgagtctattgccttgcc

SEQ ID NO: 34424 - DNA, 25 bp, Probe Sequence
gccataaacttgagtctattgcctt

SEQ ID NO: 34425 - DNA, 25 bp, Probe Sequence
taaacttgagtctattgccttgcct

SEQ ID NO: 34426 - DNA, 25 bp, Probe Sequence
aaacttgagtctattgccttgcctt

SEQ ID NO: 34427 - DNA, 25 bp, Probe Sequence
ctttaagttgataactccctctgga

SEQ ID NO: 34428 - DNA, 25 bp, Probe Sequence
aaatattcgacaggccataaacttg

SEQ ID NO: 34429 - DNA, 25 bp, Probe Sequence
aatattcgacaggccataaacttga

SEQ ID NO: 34430 - DNA, 25 bp, Probe Sequence
acaggccataaacttgagtctattg

SEQ ID NO: 34431 - DNA, 25 bp, Probe Sequence
gtaaatattcgacaggccataaact

SEQ ID NO: 34432 - DNA, 25 bp, Probe Sequence
agtaaatattcgacaggccataaac

SEQ ID NO: 34433 - DNA, 25 bp, Probe Sequence
atattcgacaggccataaacttgag

SEQ ID NO: 34434 - DNA, 25 bp, Probe Sequence
gagtaaatattcgacaggccataaa

SEQ ID NO: 34435 - DNA, 25 bp, Probe Sequence
taagatgaaagacatcccaaagagg

SEQ ID NO: 34436 - DNA, 25 bp, Probe Sequence
taaatattcgacaggccataaactt

SEQ ID NO: 34437 - DNA, 25 bp, Probe Sequence
cagaaataagatgaaagacatccca

SEQ ID NO: 34438 - DNA, 25 bp, Probe Sequence
ataagatgaaagacatcccaaagag

SEQ ID NO: 34439 - DNA, 25 bp, Probe Sequence
caggccataaacttgagtctattgc

SEQ ID NO: 34440 - DNA, 25 bp, Probe Sequence
gacaggccataaacttgagtctatt

SEQ ID NO: 34441 - DNA, 25 bp, Probe Sequence
tattcgacaggccataaacttgagt

SEQ ID NO: 34442 - DNA, 25 bp, Probe Sequence
aataagatgaaagacatcccaaaga

SEQ ID NO: 34443 - DNA, 25 bp, Probe Sequence
agaaataagatgaaagacatcccaa

SEQ ID NO: 34444 - DNA, 25 bp, Probe Sequence
gaaataagatgaaagacatcccaaa

SEQ ID NO: 34445 - DNA, 25 bp, Probe Sequence
cttaaagcgtcagggaagaacaaac

SEQ ID NO: 34446 - DNA, 25 bp, Probe Sequence
ttaaagcgtcagggaagaacaaaca

SEQ ID NO: 34447 - DNA, 25 bp, Probe Sequence
taaagcgtcagggaagaacaaacac

SEQ ID NO: 34448 - DNA, 25 bp, Probe Sequence
ccttaaagcgtcagggaagaacaaa

SEQ ID NO: 34449 - DNA, 25 bp, Probe Sequence
gtcagggaagaacaaacacttcaag

SEQ ID NO: 34450 - DNA, 25 bp, Probe Sequence
tcagggaagaacaaacacttcaagg

SEQ ID NO: 34451 - DNA, 25 bp, Probe Sequence
agggaagaacaaacacttcaaggtg

SEQ ID NO: 34452 - DNA, 25 bp, Probe Sequence
cagggaagaacaaacacttcaaggt

SEQ ID NO: 34453 - DNA, 25 bp, Probe Sequence
aaagcgtcagggaagaacaaacact

SEQ ID NO: 34454 - DNA, 25 bp, Probe Sequence
aagcgtcagggaagaacaaacactt

SEQ ID NO: 34455 - DNA, 25 bp, Probe Sequence
cgtcagggaagaacaaacacttcaa

SEQ ID NO: 34456 - DNA, 25 bp, Probe Sequence
gaagaacaaacacttcaaggtgcag

SEQ ID NO: 34457 - DNA, 25 bp, Probe Sequence
aagaacaaacacttcaaggtgcagc

SEQ ID NO: 34458 - DNA, 25 bp, Probe Sequence
ggaagaacaaacacttcaaggtgca

SEQ ID NO: 34459 - DNA, 25 bp, Probe Sequence
gggaagaacaaacacttcaaggtgc

SEQ ID NO: 34460 - DNA, 25 bp, Probe Sequence
gaacaaacacttcaaggtgcagctc

SEQ ID NO: 34461 - DNA, 25 bp, Probe Sequence
ggagaccatggaggtgattgagaag

SEQ ID NO: 34462 - DNA, 25 bp, Probe Sequence
gagaccatggaggtgattgagaagc

SEQ ID NO: 34463 - DNA, 25 bp, Probe Sequence
aattactccagactctcctatccag

SEQ ID NO: 34464 - DNA, 25 bp, Probe Sequence
taattactccagactctcctatcca

SEQ ID NO: 34465 - DNA, 25 bp, Probe Sequence
ttctgactagacttgtgatatgcgt

SEQ ID NO: 34466 - DNA, 25 bp, Probe Sequence
ccttataattactccagactctcct

SEQ ID NO: 34467 - DNA, 25 bp, Probe Sequence
tccttataattactccagactctcc

SEQ ID NO: 34468 - DNA, 25 bp, Probe Sequence
ataattactccagactctcctatcc

SEQ ID NO: 34469 - DNA, 25 bp, Probe Sequence
actagacttgtgatatgcgtgtgtt

SEQ ID NO: 34470 - DNA, 25 bp, Probe Sequence
attactccagactctcctatccagc

SEQ ID NO: 34471 - DNA, 25 bp, Probe Sequence
ctgactagacttgtgatatgcgtgt

SEQ ID NO: 34472 - DNA, 25 bp, Probe Sequence
tctgactagacttgtgatatgcgtg

SEQ ID NO: 34473 - DNA, 25 bp, Probe Sequence
agttcaggtctaatcaggtttcttt

SEQ ID NO: 34474 - DNA, 25 bp, Probe Sequence
cttgtgatatgcgtgtgtttatgta

SEQ ID NO: 34475 - DNA, 25 bp, Probe Sequence
tagacttgtgatatgcgtgtgttta

SEQ ID NO: 34476 - DNA, 25 bp, Probe Sequence
caggaggtattcttggaatgtgaag

SEQ ID NO: 34477 - DNA, 25 bp, Probe Sequence
gactagacttgtgatatgcgtgtgt

SEQ ID NO: 34478 - DNA, 25 bp, Probe Sequence
tgactagacttgtgatatgcgtgtg

SEQ ID NO: 34479 - DNA, 25 bp, Probe Sequence
attgctgtttacctctttgctgata

SEQ ID NO: 34480 - DNA, 25 bp, Probe Sequence
gacttgtgatatgcgtgtgtttatg

SEQ ID NO: 34481 - DNA, 25 bp, Probe Sequence
agacttgtgatatgcgtgtgtttat

SEQ ID NO: 34482 - DNA, 25 bp, Probe Sequence
ttgctgtttacctctttgctgataa

SEQ ID NO: 34483 - DNA, 25 bp, Probe Sequence
tagttcaggtctaatcaggtttctt

SEQ ID NO: 34484 - DNA, 25 bp, Probe Sequence
tttgttatgttctgttattgaccca

SEQ ID NO: 34485 - DNA, 25 bp, Probe Sequence
acaggaggtattcttggaatgtgaa

SEQ ID NO: 34486 - DNA, 25 bp, Probe Sequence
gctgtttacctctttgctgataaat

SEQ ID NO: 34487 - DNA, 25 bp, Probe Sequence
actcttgtgtctactgttgattgtt

SEQ ID NO: 34488 - DNA, 25 bp, Probe Sequence
actatatgtggtattcggaacttgt

SEQ ID NO: 34489 - DNA, 25 bp, Probe Sequence
tacctatgtcctaatcttcaacctg

SEQ ID NO: 34490 - DNA, 25 bp, Probe Sequence
tgtaattcttattgagcagccattg

SEQ ID NO: 34491 - DNA, 25 bp, Probe Sequence
aacttgtaattcttattgagcagcc

SEQ ID NO: 34492 - DNA, 25 bp, Probe Sequence
cttgtaattcttattgagcagccat

SEQ ID NO: 34493 - DNA, 25 bp, Probe Sequence
ttgtaattcttattgagcagccatt

SEQ ID NO: 34494 - DNA, 25 bp, Probe Sequence
acttgtaattcttattgagcagcca

SEQ ID NO: 34495 - DNA, 25 bp, Probe Sequence
cacaagattcaagttactcgtaagc

SEQ ID NO: 34496 - DNA, 25 bp, Probe Sequence
caagattcaagttactcgtaagcaa

SEQ ID NO: 34497 - DNA, 25 bp, Probe Sequence
acaagattcaagttactcgtaagca

SEQ ID NO: 34498 - DNA, 25 bp, Probe Sequence
tgtggtattcggaacttgtaattct

SEQ ID NO: 34499 - DNA, 25 bp, Probe Sequence
cggaacttgtaattcttattgagca

SEQ ID NO: 34500 - DNA, 25 bp, Probe Sequence
tcggaacttgtaattcttattgagc

SEQ ID NO: 34501 - DNA, 25 bp, Probe Sequence
atgtggtattcggaacttgtaattc

SEQ ID NO: 34502 - DNA, 25 bp, Probe Sequence
gtggtattcggaacttgtaattctt

SEQ ID NO: 34503 - DNA, 25 bp, Probe Sequence
aactatatgtggtattcggaacttg

SEQ ID NO: 34504 - DNA, 25 bp, Probe Sequence
ttacctatgtcctaatcttcaacct

SEQ ID NO: 34505 - DNA, 25 bp, Probe Sequence
acacaagattcaagttactcgtaag

SEQ ID NO: 34506 - DNA, 25 bp, Probe Sequence
tgtctaactatatgtggtattcgga

SEQ ID NO: 34507 - DNA, 25 bp, Probe Sequence
gtgtctaactatatgtggtattcgg

SEQ ID NO: 34508 - DNA, 25 bp, Probe Sequence
ggtgtctaactatatgtggtattcg

SEQ ID NO: 34509 - DNA, 25 bp, Probe Sequence
ctcttgatgtcaccttcagtatctt

SEQ ID NO: 34510 - DNA, 25 bp, Probe Sequence
cctatgtcctaatcttcaacctgag

SEQ ID NO: 34511 - DNA, 25 bp, Probe Sequence
ctgctatatcaaggtgaagattgtg

SEQ ID NO: 34512 - DNA, 25 bp, Probe Sequence
tgctatatcaaggtgaagattgtgg

SEQ ID NO: 34513 - DNA, 25 bp, Probe Sequence
cctgctatatcaaggtgaagattgt

SEQ ID NO: 34514 - DNA, 25 bp, Probe Sequence
caatagtgataatctgatgctgaag

SEQ ID NO: 34515 - DNA, 25 bp, Probe Sequence
aactatggcatctacactgtcactg

SEQ ID NO: 34516 - DNA, 25 bp, Probe Sequence
caactatggcatctacactgtcact

SEQ ID NO: 34517 - DNA, 25 bp, Probe Sequence
ttcaactgtgtagagaggcaagtag

SEQ ID NO: 34518 - DNA, 25 bp, Probe Sequence
cttcaactgtgtagagaggcaagta

SEQ ID NO: 34519 - DNA, 25 bp, Probe Sequence
aatagtgataatctgatgctgaaga

SEQ ID NO: 34520 - DNA, 25 bp, Probe Sequence
gcctgctatatcaaggtgaagattg

SEQ ID NO: 34521 - DNA, 25 bp, Probe Sequence
ctatgagctggactgaagactatct

SEQ ID NO: 34522 - DNA, 25 bp, Probe Sequence
acctctgcaatagtgataatctgat

SEQ ID NO: 34523 - DNA, 25 bp, Probe Sequence
tatgagctggactgaagactatctg

SEQ ID NO: 34524 - DNA, 25 bp, Probe Sequence
cctctgcaatagtgataatctgatg

SEQ ID NO: 34525 - DNA, 25 bp, Probe Sequence
cctatgagctggactgaagactatc

SEQ ID NO: 34526 - DNA, 25 bp, Probe Sequence
tttcgtgaatttgcttgtttgtttc

SEQ ID NO: 34527 - DNA, 25 bp, Probe Sequence
actgtcacttggttaatttaagcac

SEQ ID NO: 34528 - DNA, 25 bp, Probe Sequence
ctgtcacttggttaatttaagcact

SEQ ID NO: 34529 - DNA, 25 bp, Probe Sequence
cgtgaatttgcttgtttgtttcttc

SEQ ID NO: 34530 - DNA, 25 bp, Probe Sequence
tgtcacttggttaatttaagcactt

SEQ ID NO: 34531 - DNA, 25 bp, Probe Sequence
actatggcatctacactgtcactga

SEQ ID NO: 34532 - DNA, 25 bp, Probe Sequence
acaactatggcatctacactgtcac

SEQ ID NO: 34533 - DNA, 25 bp, Probe Sequence
cacaactatggcatctacactgtca

SEQ ID NO: 34534 - DNA, 25 bp, Probe Sequence
tcgtgaatttgcttgtttgtttctt

SEQ ID NO: 34535 - DNA, 25 bp, Probe Sequence
tggctaattgtcctatgatgctatt

SEQ ID NO: 34536 - DNA, 25 bp, Probe Sequence
aatggctaattgtcctatgatgcta

SEQ ID NO: 34537 - DNA, 25 bp, Probe Sequence
atggctaattgtcctatgatgctat

SEQ ID NO: 34538 - DNA, 25 bp, Probe Sequence
tatgaagcagccactgtatgatatt

SEQ ID NO: 34539 - DNA, 25 bp, Probe Sequence
ttatgaagcagccactgtatgatat

SEQ ID NO: 34540 - DNA, 25 bp, Probe Sequence
ggctaattgtcctatgatgctatta

SEQ ID NO: 34541 - DNA, 25 bp, Probe Sequence
aagaatattaagtgtggacagacct

SEQ ID NO: 34542 - DNA, 25 bp, Probe Sequence
ttggatacttatctactgtccgaag

SEQ ID NO: 34543 - DNA, 25 bp, Probe Sequence
agaatattaagtgtggacagaccta

SEQ ID NO: 34544 - DNA, 25 bp, Probe Sequence
tggatacttatctactgtccgaagg

SEQ ID NO: 34545 - DNA, 25 bp, Probe Sequence
aatgacctaagatcaacaatgaagt

SEQ ID NO: 34546 - DNA, 25 bp, Probe Sequence
tcaatgacctaagatcaacaatgaa

SEQ ID NO: 34547 - DNA, 25 bp, Probe Sequence
caatgacctaagatcaacaatgaag

SEQ ID NO: 34548 - DNA, 25 bp, Probe Sequence
atcaatgacctaagatcaacaatga

SEQ ID NO: 34549 - DNA, 25 bp, Probe Sequence
taatctacatatcttcccacagcag

SEQ ID NO: 34550 - DNA, 25 bp, Probe Sequence
tattccttcactatttcgcttcctg

SEQ ID NO: 34551 - DNA, 25 bp, Probe Sequence
gtattccttcactatttcgcttcct

SEQ ID NO: 34552 - DNA, 25 bp, Probe Sequence
aggagcttaattgatctcacttgtt

SEQ ID NO: 34553 - DNA, 25 bp, Probe Sequence
aaggagcttaattgatctcacttgt

SEQ ID NO: 34554 - DNA, 25 bp, Probe Sequence
taagtgtggacagacctatttcaaa

SEQ ID NO: 34555 - DNA, 25 bp, Probe Sequence
ttaagtgtggacagacctatttcaa

SEQ ID NO: 34556 - DNA, 25 bp, Probe Sequence
tcaattcttcctgccctgttattaa

SEQ ID NO: 34557 - DNA, 25 bp, Probe Sequence
attaagtgtggacagacctatttca

SEQ ID NO: 34558 - DNA, 25 bp, Probe Sequence
ttaatctacatatcttcccacagca

SEQ ID NO: 34559 - DNA, 25 bp, Probe Sequence
cctcagtgtagtggaagtgataatc

SEQ ID NO: 34560 - DNA, 25 bp, Probe Sequence
gagtgacttattctaagcctcatct

SEQ ID NO: 34561 - DNA, 25 bp, Probe Sequence
ggagtgacttattctaagcctcatc

SEQ ID NO: 34562 - DNA, 25 bp, Probe Sequence
tggagtgacttattctaagcctcat

SEQ ID NO: 34563 - DNA, 25 bp, Probe Sequence
cagtgtagtggaagtgataatcctt

SEQ ID NO: 34564 - DNA, 25 bp, Probe Sequence
ctcagtgtagtggaagtgataatcc

SEQ ID NO: 34565 - DNA, 25 bp, Probe Sequence
tcagtgtagtggaagtgataatcct

SEQ ID NO: 34566 - DNA, 25 bp, Probe Sequence
agtgacttattctaagcctcatcta

SEQ ID NO: 34567 - DNA, 25 bp, Probe Sequence
ctggagtgacttattctaagcctca

SEQ ID NO: 34568 - DNA, 25 bp, Probe Sequence
actggagtgacttattctaagcctc

SEQ ID NO: 34569 - DNA, 25 bp, Probe Sequence
gcctcagtgtagtggaagtgataat

SEQ ID NO: 34570 - DNA, 25 bp, Probe Sequence
agtgtagtggaagtgataatcctta

SEQ ID NO: 34571 - DNA, 25 bp, Probe Sequence
gacttattctaagcctcatctatcc

SEQ ID NO: 34572 - DNA, 25 bp, Probe Sequence
ttcatattctctgtagcctttgtca

SEQ ID NO: 34573 - DNA, 25 bp, Probe Sequence
taccaagtgctacagaaaccataag

SEQ ID NO: 34574 - DNA, 25 bp, Probe Sequence
tcttcatattctctgtagcctttgt

SEQ ID NO: 34575 - DNA, 25 bp, Probe Sequence
tcatattctctgtagcctttgtcaa

SEQ ID NO: 34576 - DNA, 25 bp, Probe Sequence
ccaagtgctacagaaaccataagat

SEQ ID NO: 34577 - DNA, 25 bp, Probe Sequence
cttcatattctctgtagcctttgtc

SEQ ID NO: 34578 - DNA, 25 bp, Probe Sequence
atattctctgtagcctttgtcaagt

SEQ ID NO: 34579 - DNA, 25 bp, Probe Sequence
tattctctgtagcctttgtcaagtg

SEQ ID NO: 34580 - DNA, 25 bp, Probe Sequence
catattctctgtagcctttgtcaag

SEQ ID NO: 34581 - DNA, 25 bp, Probe Sequence
gtgacttattctaagcctcatctat

SEQ ID NO: 34582 - DNA, 25 bp, Probe Sequence
gtgtagtggaagtgataatccttaa

SEQ ID NO: 34583 - DNA, 25 bp, Probe Sequence
acactacttctacagatgattatgc

SEQ ID NO: 34584 - DNA, 25 bp, Probe Sequence
tgaatgtactgtaatgcttgtatgt

SEQ ID NO: 34585 - DNA, 25 bp, Probe Sequence
tatcaggaacacagaggttggattc

SEQ ID NO: 34586 - DNA, 25 bp, Probe Sequence
ccacactacttctacagatgattat

SEQ ID NO: 34587 - DNA, 25 bp, Probe Sequence
caatgtatcaggaacacagaggttg

SEQ ID NO: 34588 - DNA, 25 bp, Probe Sequence
gtatcaggaacacagaggttggatt

SEQ ID NO: 34589 - DNA, 25 bp, Probe Sequence
tacttctacagatgattatgcagca

SEQ ID NO: 34590 - DNA, 25 bp, Probe Sequence
tacccacactacttctacagatgat

SEQ ID NO: 34591 - DNA, 25 bp, Probe Sequence
tttacccacactacttctacagatg

SEQ ID NO: 34592 - DNA, 25 bp, Probe Sequence
gtttacccacactacttctacagat

SEQ ID NO: 34593 - DNA, 25 bp, Probe Sequence
ctacttctacagatgattatgcagc

SEQ ID NO: 34594 - DNA, 25 bp, Probe Sequence
ttacccacactacttctacagatga

SEQ ID NO: 34595 - DNA, 25 bp, Probe Sequence
acttctacagatgattatgcagcat

SEQ ID NO: 34596 - DNA, 25 bp, Probe Sequence
cccacactacttctacagatgatta

SEQ ID NO: 34597 - DNA, 25 bp, Probe Sequence
cttctacagatgattatgcagcatt

SEQ ID NO: 34598 - DNA, 25 bp, Probe Sequence
atgaatgtactgtaatgcttgtatg

SEQ ID NO: 34599 - DNA, 25 bp, Probe Sequence
acccacactacttctacagatgatt

SEQ ID NO: 34600 - DNA, 25 bp, Probe Sequence
ggaaccagtggaatctttaatcttg

SEQ ID NO: 34601 - DNA, 25 bp, Probe Sequence
tggaaccagtggaatctttaatctt

SEQ ID NO: 34602 - DNA, 25 bp, Probe Sequence
ttggaaccagtggaatctttaatct

SEQ ID NO: 34603 - DNA, 25 bp, Probe Sequence
attctgctacagtcaggacttactc

SEQ ID NO: 34604 - DNA, 25 bp, Probe Sequence
gattctgctacagtcaggacttact

SEQ ID NO: 34605 - DNA, 25 bp, Probe Sequence
tttggaaccagtggaatctttaatc

SEQ ID NO: 34606 - DNA, 25 bp, Probe Sequence
aatgtatcaggaacacagaggttgg

SEQ ID NO: 34607 - DNA, 25 bp, Probe Sequence
gaagttggagcaatgaatgtagaat

SEQ ID NO: 34608 - DNA, 25 bp, Probe Sequence
agaagttggagcaatgaatgtagaa

SEQ ID NO: 34609 - DNA, 25 bp, Probe Sequence
aagagaagttggagcaatgaatgta

SEQ ID NO: 34610 - DNA, 25 bp, Probe Sequence
gagaagttggagcaatgaatgtaga

SEQ ID NO: 34611 - DNA, 25 bp, Probe Sequence
agagaagttggagcaatgaatgtag

SEQ ID NO: 34612 - DNA, 25 bp, Probe Sequence
ttggagcaatgaatgtagaataagg

SEQ ID NO: 34613 - DNA, 25 bp, Probe Sequence
gagaagagaagttggagcaatgaat

SEQ ID NO: 34614 - DNA, 25 bp, Probe Sequence
agaagagaagttggagcaatgaatg

SEQ ID NO: 34615 - DNA, 25 bp, Probe Sequence
agttggagcaatgaatgtagaataa

SEQ ID NO: 34616 - DNA, 25 bp, Probe Sequence
aagttggagcaatgaatgtagaata

SEQ ID NO: 34617 - DNA, 25 bp, Probe Sequence
gaagagaagttggagcaatgaatgt

SEQ ID NO: 34618 - DNA, 25 bp, Probe Sequence
gttggagcaatgaatgtagaataag

SEQ ID NO: 34619 - DNA, 25 bp, Probe Sequence
agagaagagaagttggagcaatgaa

SEQ ID NO: 34620 - DNA, 25 bp, Probe Sequence
aagagaagagaagttggagcaatga

SEQ ID NO: 34621 - DNA, 25 bp, Probe Sequence
gagcaatgaatgtagaataagggtc

SEQ ID NO: 34622 - DNA, 25 bp, Probe Sequence
ggagcaatgaatgtagaataagggt

SEQ ID NO: 34623 - DNA, 25 bp, Probe Sequence
tggagcaatgaatgtagaataaggg

SEQ ID NO: 34624 - DNA, 25 bp, Probe Sequence
agcaatgaatgtagaataagggtct

SEQ ID NO: 34625 - DNA, 25 bp, Probe Sequence
aaagagaagagaagttggagcaatg

SEQ ID NO: 34626 - DNA, 25 bp, Probe Sequence
gcaatgaatgtagaataagggtcta

SEQ ID NO: 34627 - DNA, 25 bp, Probe Sequence
aaaagagaagagaagttggagcaat

SEQ ID NO: 34628 - DNA, 25 bp, Probe Sequence
ctttgcccataagaaaatccctgag

SEQ ID NO: 34629 - DNA, 25 bp, Probe Sequence
agaataagggtctagaaagtcctcc

SEQ ID NO: 34630 - DNA, 25 bp, Probe Sequence
caatgaatgtagaataagggtctag

SEQ ID NO: 34631 - DNA, 25 bp, Probe Sequence
ggttctaggtcccaattctactgca

SEQ ID NO: 34632 - DNA, 25 bp, Probe Sequence
cggttctaggtcccaattctactgc

SEQ ID NO: 34633 - DNA, 25 bp, Probe Sequence
ccggttctaggtcccaattctactg

SEQ ID NO: 34634 - DNA, 25 bp, Probe Sequence
cccggttctaggtcccaattctact

SEQ ID NO: 34635 - DNA, 25 bp, Probe Sequence
cagaattcagctaccccggttctag

SEQ ID NO: 34636 - DNA, 25 bp, Probe Sequence
atggtagcacctcctaacagattaa

SEQ ID NO: 34637 - DNA, 25 bp, Probe Sequence
agcacctcctaacagattaaataga

SEQ ID NO: 34638 - DNA, 25 bp, Probe Sequence
aaacaataaagaccaatgacccagg

SEQ ID NO: 34639 - DNA, 25 bp, Probe Sequence
tgaaatatatgctggaggtggaaat

SEQ ID NO: 34640 - DNA, 25 bp, Probe Sequence
aaatatatgctggaggtggaaattg

SEQ ID NO: 34641 - DNA, 25 bp, Probe Sequence
ctgaaatatatgctggaggtggaaa

SEQ ID NO: 34642 - DNA, 25 bp, Probe Sequence
catggtagcacctcctaacagatta

SEQ ID NO: 34643 - DNA, 25 bp, Probe Sequence
gcacctcctaacagattaaatagat

SEQ ID NO: 34644 - DNA, 25 bp, Probe Sequence
aatatatgctggaggtggaaattgg

SEQ ID NO: 34645 - DNA, 25 bp, Probe Sequence
gaaatatatgctggaggtggaaatt

SEQ ID NO: 34646 - DNA, 25 bp, Probe Sequence
cagatacttgttcccaggaccttaa

SEQ ID NO: 34647 - DNA, 25 bp, Probe Sequence
aacaataaagaccaatgacccagga

SEQ ID NO: 34648 - DNA, 25 bp, Probe Sequence
gtagcacctcctaacagattaaata

SEQ ID NO: 34649 - DNA, 25 bp, Probe Sequence
atacttgttcccaggaccttaactc

SEQ ID NO: 34650 - DNA, 25 bp, Probe Sequence
gatacttgttcccaggaccttaact

SEQ ID NO: 34651 - DNA, 25 bp, Probe Sequence
agatacttgttcccaggaccttaac

SEQ ID NO: 34652 - DNA, 25 bp, Probe Sequence
caataaagaccaatgacccaggagt

SEQ ID NO: 34653 - DNA, 25 bp, Probe Sequence
acaataaagaccaatgacccaggag

SEQ ID NO: 34654 - DNA, 25 bp, Probe Sequence
tagcacctcctaacagattaaatag

SEQ ID NO: 34655 - DNA, 25 bp, Probe Sequence
ggtagcacctcctaacagattaaat

SEQ ID NO: 34656 - DNA, 25 bp, Probe Sequence
tggtagcacctcctaacagattaaa

SEQ ID NO: 34657 - DNA, 25 bp, Probe Sequence
aataaagaccaatgacccaggagtc

SEQ ID NO: 34658 - DNA, 25 bp, Probe Sequence
tacttgttcccaggaccttaactca

SEQ ID NO: 34659 - DNA, 25 bp, Probe Sequence
aaaacaataaagaccaatgacccag

SEQ ID NO: 34660 - DNA, 25 bp, Probe Sequence
accaaagaaacatccaagcaataaa

SEQ ID NO: 34661 - DNA, 25 bp, Probe Sequence
caccaaagaaacatccaagcaataa

SEQ ID NO: 34662 - DNA, 25 bp, Probe Sequence
ccaaagaaacatccaagcaataaag

SEQ ID NO: 34663 - DNA, 25 bp, Probe Sequence
aaagaaacatccaagcaataaagtg

SEQ ID NO: 34664 - DNA, 25 bp, Probe Sequence
caaagaaacatccaagcaataaagt

SEQ ID NO: 34665 - DNA, 25 bp, Probe Sequence
taaccaacaccaaagaaacatccaa

SEQ ID NO: 34666 - DNA, 25 bp, Probe Sequence
cttaaccaacaccaaagaaacatcc

SEQ ID NO: 34667 - DNA, 25 bp, Probe Sequence
ccttaaccaacaccaaagaaacatc

SEQ ID NO: 34668 - DNA, 25 bp, Probe Sequence
acaccaaagaaacatccaagcaata

SEQ ID NO: 34669 - DNA, 25 bp, Probe Sequence
ttaaccaacaccaaagaaacatcca

SEQ ID NO: 34670 - DNA, 25 bp, Probe Sequence
caagcaataaagtggaagactaacc

SEQ ID NO: 34671 - DNA, 25 bp, Probe Sequence
caaccttaaccaacaccaaagaaac

SEQ ID NO: 34672 - DNA, 25 bp, Probe Sequence
accttaaccaacaccaaagaaacat

SEQ ID NO: 34673 - DNA, 25 bp, Probe Sequence
aaccttaaccaacaccaaagaaaca

SEQ ID NO: 34674 - DNA, 25 bp, Probe Sequence
acaaccttaaccaacaccaaagaaa

SEQ ID NO: 34675 - DNA, 25 bp, Probe Sequence
aacaccaaagaaacatccaagcaat

SEQ ID NO: 34676 - DNA, 25 bp, Probe Sequence
cacaaccttaaccaacaccaaagaa

SEQ ID NO: 34677 - DNA, 25 bp, Probe Sequence
aaccaacaccaaagaaacatccaag

SEQ ID NO: 34678 - DNA, 25 bp, Probe Sequence
gcaataaagtggaagactaaccaag

SEQ ID NO: 34679 - DNA, 25 bp, Probe Sequence
ccaagcaataaagtggaagactaac

SEQ ID NO: 34680 - DNA, 25 bp, Probe Sequence
agcaataaagtggaagactaaccaa

SEQ ID NO: 34681 - DNA, 25 bp, Probe Sequence
aagcaataaagtggaagactaacca

SEQ ID NO: 34682 - DNA, 25 bp, Probe Sequence
aagaaacatccaagcaataaagtgg

SEQ ID NO: 34683 - DNA, 25 bp, Probe Sequence
aaagtggaagactaaccaagatttg

SEQ ID NO: 34684 - DNA, 25 bp, Probe Sequence
ccaaagtcatcaagaaagtcatcat

SEQ ID NO: 34685 - DNA, 25 bp, Probe Sequence
aaagtcatcaagaaagtcatcatcc

SEQ ID NO: 34686 - DNA, 25 bp, Probe Sequence
aagtcatcaagaaagtcatcatccc

SEQ ID NO: 34687 - DNA, 25 bp, Probe Sequence
caaagtcatcaagaaagtcatcatc

SEQ ID NO: 34688 - DNA, 25 bp, Probe Sequence
gccaaagtcatcaagaaagtcatca

SEQ ID NO: 34689 - DNA, 25 bp, Probe Sequence
caaaggtgtggtgacagataaattc

SEQ ID NO: 34690 - DNA, 25 bp, Probe Sequence
atcaaaggtgtggtgacagataaat

SEQ ID NO: 34691 - DNA, 25 bp, Probe Sequence
tcaaaggtgtggtgacagataaatt

SEQ ID NO: 34692 - DNA, 25 bp, Probe Sequence
ctacgccaaagtcatcaagaaagtc

SEQ ID NO: 34693 - DNA, 25 bp, Probe Sequence
catcaaaggtgtggtgacagataaa

SEQ ID NO: 34694 - DNA, 25 bp, Probe Sequence
aaaggtgtggtgacagataaattcg

SEQ ID NO: 34695 - DNA, 25 bp, Probe Sequence
cgccaaagtcatcaagaaagtcatc

SEQ ID NO: 34696 - DNA, 25 bp, Probe Sequence
tacgccaaagtcatcaagaaagtca

SEQ ID NO: 34697 - DNA, 25 bp, Probe Sequence
acgccaaagtcatcaagaaagtcat

SEQ ID NO: 34698 - DNA, 25 bp, Probe Sequence
cgctgccattttattaaagtgtttt

SEQ ID NO: 34699 - DNA, 25 bp, Probe Sequence
ccgctgccattttattaaagtgttt

SEQ ID NO: 34700 - DNA, 25 bp, Probe Sequence
aaggtgtggtgacagataaattcgg

SEQ ID NO: 34701 - DNA, 25 bp, Probe Sequence
gatgggacccaagaactttattcat

SEQ ID NO: 34702 - DNA, 25 bp, Probe Sequence
gctgccattttattaaagtgttttg

SEQ ID NO: 34703 - DNA, 25 bp, Probe Sequence
gcatcaaaggtgtggtgacagataa

SEQ ID NO: 34704 - DNA, 25 bp, Probe Sequence
atgggacccaagaactttattcatg

SEQ ID NO: 34705 - DNA, 25 bp, Probe Sequence
agataaattcggcaagccagtcaaa

SEQ ID NO: 34706 - DNA, 25 bp, Probe Sequence
gctacgccaaagtcatcaagaaagt

SEQ ID NO: 34707 - DNA, 25 bp, Probe Sequence
tgtggtgacagataaattcggcaag

SEQ ID NO: 34708 - DNA, 25 bp, Probe Sequence
atactgagataatctgaggcatgga

SEQ ID NO: 34709 - DNA, 25 bp, Probe Sequence
tatactgagataatctgaggcatgg

SEQ ID NO: 34710 - DNA, 25 bp, Probe Sequence
tactgagataatctgaggcatggag

SEQ ID NO: 34711 - DNA, 25 bp, Probe Sequence
ctgagataatctgaggcatggagag

SEQ ID NO: 34712 - DNA, 25 bp, Probe Sequence
gtgtatactgagataatctgaggca

SEQ ID NO: 34713 - DNA, 25 bp, Probe Sequence
tgtgtatactgagataatctgaggc

SEQ ID NO: 34714 - DNA, 25 bp, Probe Sequence
tggtattaagtcgttgcctttattt

SEQ ID NO: 34715 - DNA, 25 bp, Probe Sequence
ttggtattaagtcgttgcctttatt

SEQ ID NO: 34716 - DNA, 25 bp, Probe Sequence
tttggtattaagtcgttgcctttat

SEQ ID NO: 34717 - DNA, 25 bp, Probe Sequence
ggtattaagtcgttgcctttatttg

SEQ ID NO: 34718 - DNA, 25 bp, Probe Sequence
agtgattagcttactaaggaactga

SEQ ID NO: 34719 - DNA, 25 bp, Probe Sequence
actgagataatctgaggcatggaga

SEQ ID NO: 34720 - DNA, 25 bp, Probe Sequence
gcctcggaagaataaagagaatgta

SEQ ID NO: 34721 - DNA, 25 bp, Probe Sequence
tgtatactgagataatctgaggcat

SEQ ID NO: 34722 - DNA, 25 bp, Probe Sequence
agggagaggtacagtgtttatattt

SEQ ID NO: 34723 - DNA, 25 bp, Probe Sequence
tctagggagaggtacagtgtttata

SEQ ID NO: 34724 - DNA, 25 bp, Probe Sequence
gtattaagtcgttgcctttatttgt

SEQ ID NO: 34725 - DNA, 25 bp, Probe Sequence
gtgattagcttactaaggaactgaa

SEQ ID NO: 34726 - DNA, 25 bp, Probe Sequence
cctcggaagaataaagagaatgtag

SEQ ID NO: 34727 - DNA, 25 bp, Probe Sequence
gtatactgagataatctgaggcatg

SEQ ID NO: 34728 - DNA, 25 bp, Probe Sequence
ctagggagaggtacagtgtttatat

SEQ ID NO: 34729 - DNA, 25 bp, Probe Sequence
tcggaagaataaagagaatgtagtt

SEQ ID NO: 34730 - DNA, 25 bp, Probe Sequence
cgtagtgattagcttactaaggaac

SEQ ID NO: 34731 - DNA, 25 bp, Probe Sequence
tcgtagtgattagcttactaaggaa

SEQ ID NO: 34732 - DNA, 25 bp, Probe Sequence
cagcctgtatgtagagaagattgac

SEQ ID NO: 34733 - DNA, 25 bp, Probe Sequence
agcctgtatgtagagaagattgacg

SEQ ID NO: 34734 - DNA, 25 bp, Probe Sequence
gacagcctgtatgtagagaagattg

SEQ ID NO: 34735 - DNA, 25 bp, Probe Sequence
agacagcctgtatgtagagaagatt

SEQ ID NO: 34736 - DNA, 25 bp, Probe Sequence
acagcctgtatgtagagaagattga

SEQ ID NO: 34737 - DNA, 25 bp, Probe Sequence
ctgtatgtagagaagattgacgtgg

SEQ ID NO: 34738 - DNA, 25 bp, Probe Sequence
cctgtatgtagagaagattgacgtg

SEQ ID NO: 34739 - DNA, 25 bp, Probe Sequence
cagacagcctgtatgtagagaagat

SEQ ID NO: 34740 - DNA, 25 bp, Probe Sequence
gcctgtatgtagagaagattgacgt

SEQ ID NO: 34741 - DNA, 25 bp, Probe Sequence
catcacccatttacccatctctcag

SEQ ID NO: 34742 - DNA, 25 bp, Probe Sequence
catccatcacccatttacccatctc

SEQ ID NO: 34743 - DNA, 25 bp, Probe Sequence
gagtcatctgctgtctcttcagtct

SEQ ID NO: 34744 - DNA, 25 bp, Probe Sequence
atccatcacccatttacccatctct

SEQ ID NO: 34745 - DNA, 25 bp, Probe Sequence
agtcatctgctgtctcttcagtctg

SEQ ID NO: 34746 - DNA, 25 bp, Probe Sequence
tgagtcatctgctgtctcttcagtc

SEQ ID NO: 34747 - DNA, 25 bp, Probe Sequence
cactgagtcatctgctgtctcttca

SEQ ID NO: 34748 - DNA, 25 bp, Probe Sequence
tgtatgtagagaagattgacgtggg

SEQ ID NO: 34749 - DNA, 25 bp, Probe Sequence
tccatttcctgtaaatcgctgaaag

SEQ ID NO: 34750 - DNA, 25 bp, Probe Sequence
ctccatttcctgtaaatcgctgaaa

SEQ ID NO: 34751 - DNA, 25 bp, Probe Sequence
atcacccatttacccatctctcagg

SEQ ID NO: 34752 - DNA, 25 bp, Probe Sequence
tccatcacccatttacccatctctc

SEQ ID NO: 34753 - DNA, 25 bp, Probe Sequence
gtctcttcagtctgctccatccatc

SEQ ID NO: 34754 - DNA, 25 bp, Probe Sequence
gcagacagcctgtatgtagagaaga

SEQ ID NO: 34755 - DNA, 25 bp, Probe Sequence
ccttcttccaccactgagtcatctg

SEQ ID NO: 34756 - DNA, 25 bp, Probe Sequence
caagtacaagtatgaggacaaggac

SEQ ID NO: 34757 - DNA, 25 bp, Probe Sequence
aagtacaagtatgaggacaaggacg

SEQ ID NO: 34758 - DNA, 25 bp, Probe Sequence
tggcaagtacaagtatgaggacaag

SEQ ID NO: 34759 - DNA, 25 bp, Probe Sequence
ctggcaagtacaagtatgaggacaa

SEQ ID NO: 34760 - DNA, 25 bp, Probe Sequence
cttgctccctattcactttacactg

SEQ ID NO: 34761 - DNA, 25 bp, Probe Sequence
ttgctccctattcactttacactgt

SEQ ID NO: 34762 - DNA, 25 bp, Probe Sequence
gactggcaagtacaagtatgaggac

SEQ ID NO: 34763 - DNA, 25 bp, Probe Sequence
ctgactggcaagtacaagtatgagg

SEQ ID NO: 34764 - DNA, 25 bp, Probe Sequence
ccttgctccctattcactttacact

SEQ ID NO: 34765 - DNA, 25 bp, Probe Sequence
ctcttctacctacacacacctgacc

SEQ ID NO: 34766 - DNA, 25 bp, Probe Sequence
cctcttctacctacacacacctgac

SEQ ID NO: 34767 - DNA, 25 bp, Probe Sequence
gacctcttctacctacacacacctg

SEQ ID NO: 34768 - DNA, 25 bp, Probe Sequence
tgactggcaagtacaagtatgagga

SEQ ID NO: 34769 - DNA, 25 bp, Probe Sequence
ttggactgaggttctatgcctacaa

SEQ ID NO: 34770 - DNA, 25 bp, Probe Sequence
aagtggacctcttctacctacacac

SEQ ID NO: 34771 - DNA, 25 bp, Probe Sequence
caagtggacctcttctacctacaca

SEQ ID NO: 34772 - DNA, 25 bp, Probe Sequence
agtacaagtatgaggacaaggacgg

SEQ ID NO: 34773 - DNA, 25 bp, Probe Sequence
actggcaagtacaagtatgaggaca

SEQ ID NO: 34774 - DNA, 25 bp, Probe Sequence
gctgactggcaagtacaagtatgag

SEQ ID NO: 34775 - DNA, 25 bp, Probe Sequence
acctcttctacctacacacacctga

SEQ ID NO: 34776 - DNA, 25 bp, Probe Sequence
cttctacctacacacacctgaccac

SEQ ID NO: 34777 - DNA, 25 bp, Probe Sequence
tcttctacctacacacacctgacca

SEQ ID NO: 34778 - DNA, 25 bp, Probe Sequence
ctgccttgctccctattcactttac

SEQ ID NO: 34779 - DNA, 25 bp, Probe Sequence
tggactgaggttctatgcctacaac

SEQ ID NO: 34780 - DNA, 25 bp, Probe Sequence
tattctctatgtagtgccaagtagg

SEQ ID NO: 34781 - DNA, 25 bp, Probe Sequence
agtattctctatgtagtgccaagta

SEQ ID NO: 34782 - DNA, 25 bp, Probe Sequence
tagtattctctatgtagtgccaagt

SEQ ID NO: 34783 - DNA, 25 bp, Probe Sequence
agtcatatccacttcttccacaatg

SEQ ID NO: 34784 - DNA, 25 bp, Probe Sequence
catatccacttcttccacaatgacc

SEQ ID NO: 34785 - DNA, 25 bp, Probe Sequence
gtattctctatgtagtgccaagtag

SEQ ID NO: 34786 - DNA, 25 bp, Probe Sequence
atatccacttcttccacaatgacca

SEQ ID NO: 34787 - DNA, 25 bp, Probe Sequence
ttagtattctctatgtagtgccaag

SEQ ID NO: 34788 - DNA, 25 bp, Probe Sequence
tatccacttcttccacaatgaccac

SEQ ID NO: 34789 - DNA, 25 bp, Probe Sequence
ccacatggtaattctaagacttgtt

SEQ ID NO: 34790 - DNA, 25 bp, Probe Sequence
agatggactacttcacaaatggtta

SEQ ID NO: 34791 - DNA, 25 bp, Probe Sequence
tacttcagatacgtcatccagaatg

SEQ ID NO: 34792 - DNA, 25 bp, Probe Sequence
caaagatggactacttcacaaatgg

SEQ ID NO: 34793 - DNA, 25 bp, Probe Sequence
aagatggactacttcacaaatggtt

SEQ ID NO: 34794 - DNA, 25 bp, Probe Sequence
aaagatggactacttcacaaatggt

SEQ ID NO: 34795 - DNA, 25 bp, Probe Sequence
ttacttcagatacgtcatccagaat

SEQ ID NO: 34796 - DNA, 25 bp, Probe Sequence
gcaaagatggactacttcacaaatg

SEQ ID NO: 34797 - DNA, 25 bp, Probe Sequence
gatggactacttcacaaatggttat

SEQ ID NO: 34798 - DNA, 25 bp, Probe Sequence
cacatggtaattctaagacttgttc

SEQ ID NO: 34799 - DNA, 25 bp, Probe Sequence
acatggtaattctaagacttgttct

SEQ ID NO: 34800 - DNA, 25 bp, Probe Sequence
aagctcactcatgttcttattgcag

SEQ ID NO: 34801 - DNA, 25 bp, Probe Sequence
accacatggtaattctaagacttgt

SEQ ID NO: 34802 - DNA, 25 bp, Probe Sequence
tcatatccacttcttccacaatgac

SEQ ID NO: 34803 - DNA, 25 bp, Probe Sequence
gtcatatccacttcttccacaatga

SEQ ID NO: 34804 - DNA, 25 bp, Probe Sequence
ataggtgtgtgagactactaagagg

SEQ ID NO: 34805 - DNA, 25 bp, Probe Sequence
cttgaataataagcaggatgttggc

SEQ ID NO: 34806 - DNA, 25 bp, Probe Sequence
tataggtgtgtgagactactaagag

SEQ ID NO: 34807 - DNA, 25 bp, Probe Sequence
gctacagagtatcttcaactaatgg

SEQ ID NO: 34808 - DNA, 25 bp, Probe Sequence
acagagtatcttcaactaatggtgt

SEQ ID NO: 34809 - DNA, 25 bp, Probe Sequence
agatgttagactcatggtgtgttac

SEQ ID NO: 34810 - DNA, 25 bp, Probe Sequence
aagatgtatataggtgtgtgagact

SEQ ID NO: 34811 - DNA, 25 bp, Probe Sequence
ccttgaataataagcaggatgttgg

SEQ ID NO: 34812 - DNA, 25 bp, Probe Sequence
gagtatcttcaactaatggtgtacg

SEQ ID NO: 34813 - DNA, 25 bp, Probe Sequence
ttgaattgttacatcatgctggaac

SEQ ID NO: 34814 - DNA, 25 bp, Probe Sequence
gccttgaataataagcaggatgttg

SEQ ID NO: 34815 - DNA, 25 bp, Probe Sequence
atataggtgtgtgagactactaaga

SEQ ID NO: 34816 - DNA, 25 bp, Probe Sequence
gagatgttagactcatggtgtgtta

SEQ ID NO: 34817 - DNA, 25 bp, Probe Sequence
gatgttagactcatggtgtgttaca

SEQ ID NO: 34818 - DNA, 25 bp, Probe Sequence
atgtatataggtgtgtgagactact

SEQ ID NO: 34819 - DNA, 25 bp, Probe Sequence
agtatccatgctcttgaccttgtag

SEQ ID NO: 34820 - DNA, 25 bp, Probe Sequence
cagagtatcttcaactaatggtgta

SEQ ID NO: 34821 - DNA, 25 bp, Probe Sequence
tacagagtatcttcaactaatggtg

SEQ ID NO: 34822 - DNA, 25 bp, Probe Sequence
gatgtatataggtgtgtgagactac

SEQ ID NO: 34823 - DNA, 25 bp, Probe Sequence
gaattgttacatcatgctggaacct

SEQ ID NO: 34824 - DNA, 25 bp, Probe Sequence
agatgtatataggtgtgtgagacta

SEQ ID NO: 34825 - DNA, 25 bp, Probe Sequence
taggtgtgtgagactactaagaggc

SEQ ID NO: 34826 - DNA, 25 bp, Probe Sequence
aattgttacatcatgctggaacctg

SEQ ID NO: 34827 - DNA, 25 bp, Probe Sequence
gtatccatgctcttgaccttgtaga

SEQ ID NO: 34828 - DNA, 25 bp, Probe Sequence
gtgtagtttgtgctgtaaagagttg

SEQ ID NO: 34829 - DNA, 25 bp, Probe Sequence
tgtgtagtttgtgctgtaaagagtt

SEQ ID NO: 34830 - DNA, 25 bp, Probe Sequence
ctgtgtagtttgtgctgtaaagagt

SEQ ID NO: 34831 - DNA, 25 bp, Probe Sequence
ttatggcaacaagaacaactttgag

SEQ ID NO: 34832 - DNA, 25 bp, Probe Sequence
caacaagaacaactttgaggaagag

SEQ ID NO: 34833 - DNA, 25 bp, Probe Sequence
tagtttgtgctgtaaagagttgctt

SEQ ID NO: 34834 - DNA, 25 bp, Probe Sequence
gttatggcaacaagaacaactttga

SEQ ID NO: 34835 - DNA, 25 bp, Probe Sequence
cttcaagaaccagagaaaggacttc

SEQ ID NO: 34836 - DNA, 25 bp, Probe Sequence
gtagtttgtgctgtaaagagttgct

SEQ ID NO: 34837 - DNA, 25 bp, Probe Sequence
cctgtgtagtttgtgctgtaaagag

SEQ ID NO: 34838 - DNA, 25 bp, Probe Sequence
ttacctatggtggttgttatggcaa

SEQ ID NO: 34839 - DNA, 25 bp, Probe Sequence
tgtagtttgtgctgtaaagagttgc

SEQ ID NO: 34840 - DNA, 25 bp, Probe Sequence
tcttcaagaaccagagaaaggactt

SEQ ID NO: 34841 - DNA, 25 bp, Probe Sequence
aacaagaacaactttgaggaagagc

SEQ ID NO: 34842 - DNA, 25 bp, Probe Sequence
tatggcaacaagaacaactttgagg

SEQ ID NO: 34843 - DNA, 25 bp, Probe Sequence
gcaacaagaacaactttgaggaaga

SEQ ID NO: 34844 - DNA, 25 bp, Probe Sequence
cataggagtttggaggaagttggag

SEQ ID NO: 34845 - DNA, 25 bp, Probe Sequence
ttccctgtgtagtttgtgctgtaaa

SEQ ID NO: 34846 - DNA, 25 bp, Probe Sequence
agaagtaccagactagatggacctg

SEQ ID NO: 34847 - DNA, 25 bp, Probe Sequence
cagaagtaccagactagatggacct

SEQ ID NO: 34848 - DNA, 25 bp, Probe Sequence
caagaacaactttgaggaagagcag

SEQ ID NO: 34849 - DNA, 25 bp, Probe Sequence
ttcaagaaccagagaaaggacttcc

SEQ ID NO: 34850 - DNA, 25 bp, Probe Sequence
ataggagtttggaggaagttggagt

SEQ ID NO: 34851 - DNA, 25 bp, Probe Sequence
tactgcttcttcaagaaccagagaa

SEQ ID NO: 34852 - DNA, 25 bp, Probe Sequence
agcgatggttacattgaatactaca

SEQ ID NO: 34853 - DNA, 25 bp, Probe Sequence
cagcgatggttacattgaatactac

SEQ ID NO: 34854 - DNA, 25 bp, Probe Sequence
gcgatggttacattgaatactacat

SEQ ID NO: 34855 - DNA, 25 bp, Probe Sequence
gcagcgatggttacattgaatacta

SEQ ID NO: 34856 - DNA, 25 bp, Probe Sequence
ctgactgacattgccaagtattcaa

SEQ ID NO: 34857 - DNA, 25 bp, Probe Sequence
ttagttgctgtatatgtatcggatt

SEQ ID NO: 34858 - DNA, 25 bp, Probe Sequence
attagttgctgtatatgtatcggat

SEQ ID NO: 34859 - DNA, 25 bp, Probe Sequence
ctgacattgccaagtattcaatagg

SEQ ID NO: 34860 - DNA, 25 bp, Probe Sequence
tattagttgctgtatatgtatcgga

SEQ ID NO: 34861 - DNA, 25 bp, Probe Sequence
actgacattgccaagtattcaatag

SEQ ID NO: 34862 - DNA, 25 bp, Probe Sequence
gactgacattgccaagtattcaata

SEQ ID NO: 34863 - DNA, 25 bp, Probe Sequence
gttgctgtatatgtatcggatttct

SEQ ID NO: 34864 - DNA, 25 bp, Probe Sequence
agttgctgtatatgtatcggatttc

SEQ ID NO: 34865 - DNA, 25 bp, Probe Sequence
gctgtatatgtatcggatttcttca

SEQ ID NO: 34866 - DNA, 25 bp, Probe Sequence
tgctgtatatgtatcggatttcttc

SEQ ID NO: 34867 - DNA, 25 bp, Probe Sequence
tgactgacattgccaagtattcaat

SEQ ID NO: 34868 - DNA, 25 bp, Probe Sequence
gaatcactatccgagcaatcaccag

SEQ ID NO: 34869 - DNA, 25 bp, Probe Sequence
tcttgttgccgtatccatttatgtg

SEQ ID NO: 34870 - DNA, 25 bp, Probe Sequence
gtcttgttgccgtatccatttatgt

SEQ ID NO: 34871 - DNA, 25 bp, Probe Sequence
ctgtttgtggcactttatcttcaag

SEQ ID NO: 34872 - DNA, 25 bp, Probe Sequence
ttgctgtatatgtatcggatttctt

SEQ ID NO: 34873 - DNA, 25 bp, Probe Sequence
ttctgattataaacaccactggagc

SEQ ID NO: 34874 - DNA, 25 bp, Probe Sequence
cgatggttacattgaatactacata

SEQ ID NO: 34875 - DNA, 25 bp, Probe Sequence
ggtcttgttgccgtatccatttatg

SEQ ID NO: 34876 - DNA, 25 bp, Probe Sequence
gacgaacagtctgagtattctgata

SEQ ID NO: 34877 - DNA, 25 bp, Probe Sequence
acgaacagtctgagtattctgatat

SEQ ID NO: 34878 - DNA, 25 bp, Probe Sequence
atgggaaaggaaagaagagaatgaa

SEQ ID NO: 34879 - DNA, 25 bp, Probe Sequence
aaataaaggcagagagagagagaga

SEQ ID NO: 34880 - DNA, 25 bp, Probe Sequence
caaataaaggcagagagagagagag

SEQ ID NO: 34881 - DNA, 25 bp, Probe Sequence
ggaaaggaaagaagagaatgaagac

SEQ ID NO: 34882 - DNA, 25 bp, Probe Sequence
gggaaaggaaagaagagaatgaaga

SEQ ID NO: 34883 - DNA, 25 bp, Probe Sequence
gatgggaaaggaaagaagagaatga

SEQ ID NO: 34884 - DNA, 25 bp, Probe Sequence
ttagcaataaggagaggagtccaag

SEQ ID NO: 34885 - DNA, 25 bp, Probe Sequence
tgggaaaggaaagaagagaatgaag

SEQ ID NO: 34886 - DNA, 25 bp, Probe Sequence
gacaaataaaggcagagagagagag

SEQ ID NO: 34887 - DNA, 25 bp, Probe Sequence
tacctttgtcttctttccatctgtg

SEQ ID NO: 34888 - DNA, 25 bp, Probe Sequence
aataaaggcagagagagagagagag

SEQ ID NO: 34889 - DNA, 25 bp, Probe Sequence
acaaataaaggcagagagagagaga

SEQ ID NO: 34890 - DNA, 25 bp, Probe Sequence
ggaggagtgtcatttctatgtgtaa

SEQ ID NO: 34891 - DNA, 25 bp, Probe Sequence
aatatcgcttagaatgcaggagaag

SEQ ID NO: 34892 - DNA, 25 bp, Probe Sequence
caaacaaagcaactgggtcattaaa

SEQ ID NO: 34893 - DNA, 25 bp, Probe Sequence
aggaaagaagagaatgaagactact

SEQ ID NO: 34894 - DNA, 25 bp, Probe Sequence
gaaaggaaagaagagaatgaagact

SEQ ID NO: 34895 - DNA, 25 bp, Probe Sequence
ggatgggaaaggaaagaagagaatg

SEQ ID NO: 34896 - DNA, 25 bp, Probe Sequence
ctatgtgtaatttctgagccattgt

SEQ ID NO: 34897 - DNA, 25 bp, Probe Sequence
aattctgcacttacacgtactcaag

SEQ ID NO: 34898 - DNA, 25 bp, Probe Sequence
ataaaggcagagagagagagagaga

SEQ ID NO: 34899 - DNA, 25 bp, Probe Sequence
ttcaaacaaagcaactgggtcatta

SEQ ID NO: 34900 - DNA, 25 bp, Probe Sequence
gattatacagtgatggtcttcaagc

SEQ ID NO: 34901 - DNA, 25 bp, Probe Sequence
attatacagtgatggtcttcaagcc

SEQ ID NO: 34902 - DNA, 25 bp, Probe Sequence
cgattatacagtgatggtcttcaag

SEQ ID NO: 34903 - DNA, 25 bp, Probe Sequence
ggctgtgtgactaagatatatggaa

SEQ ID NO: 34904 - DNA, 25 bp, Probe Sequence
tggctgtgtgactaagatatatgga

SEQ ID NO: 34905 - DNA, 25 bp, Probe Sequence
gtggctgtgtgactaagatatatgg

SEQ ID NO: 34906 - DNA, 25 bp, Probe Sequence
gaagatgaagtacagtgttctaggt

SEQ ID NO: 34907 - DNA, 25 bp, Probe Sequence
tgaagatgaagtacagtgttctagg

SEQ ID NO: 34908 - DNA, 25 bp, Probe Sequence
aagatgaagtacagtgttctaggtt

SEQ ID NO: 34909 - DNA, 25 bp, Probe Sequence
gctgtgtgactaagatatatggaag

SEQ ID NO: 34910 - DNA, 25 bp, Probe Sequence
cgtggctgtgtgactaagatatatg

SEQ ID NO: 34911 - DNA, 25 bp, Probe Sequence
gtgtgactaagatatatggaagagc

SEQ ID NO: 34912 - DNA, 25 bp, Probe Sequence
ttgaagatgaagtacagtgttctag

SEQ ID NO: 34913 - DNA, 25 bp, Probe Sequence
tgtgactaagatatatggaagagct

SEQ ID NO: 34914 - DNA, 25 bp, Probe Sequence
tcagttggtggatatgtgtgatagc

SEQ ID NO: 34915 - DNA, 25 bp, Probe Sequence
taattattgctgagacctccactgg

SEQ ID NO: 34916 - DNA, 25 bp, Probe Sequence
acagaaataacctttacaccagaga

SEQ ID NO: 34917 - DNA, 25 bp, Probe Sequence
gctcaacagaaataacctttacacc

SEQ ID NO: 34918 - DNA, 25 bp, Probe Sequence
ggctcaacagaaataacctttacac

SEQ ID NO: 34919 - DNA, 25 bp, Probe Sequence
gaaaggtggaactaatgctgaaatg

SEQ ID NO: 34920 - DNA, 25 bp, Probe Sequence
tcgattatacagtgatggtcttcaa

SEQ ID NO: 34921 - DNA, 25 bp, Probe Sequence
tggctcaacagaaataacctttaca

SEQ ID NO: 34922 - DNA, 25 bp, Probe Sequence
tggtggatatgtgtgatagctgatt

SEQ ID NO: 34923 - DNA, 25 bp, Probe Sequence
ttggtggatatgtgtgatagctgat

SEQ ID NO: 34924 - DNA, 25 bp, Probe Sequence
aagttgttctggttgattgcttgtt

SEQ ID NO: 34925 - DNA, 25 bp, Probe Sequence
ctgattatacttctgagctgctacc

SEQ ID NO: 34926 - DNA, 25 bp, Probe Sequence
gattatacttctgagctgctaccac

SEQ ID NO: 34927 - DNA, 25 bp, Probe Sequence
gctcagatgaagaggtgaattgaac

SEQ ID NO: 34928 - DNA, 25 bp, Probe Sequence
agttgttctggttgattgcttgttg

SEQ ID NO: 34929 - DNA, 25 bp, Probe Sequence
tgattatacttctgagctgctacca

SEQ ID NO: 34930 - DNA, 25 bp, Probe Sequence
ttatacttctgagctgctaccacat

SEQ ID NO: 34931 - DNA, 25 bp, Probe Sequence
attatacttctgagctgctaccaca

SEQ ID NO: 34932 - DNA, 25 bp, Probe Sequence
taaagttgttctggttgattgcttg

SEQ ID NO: 34933 - DNA, 25 bp, Probe Sequence
ttaaagttgttctggttgattgctt

SEQ ID NO: 34934 - DNA, 25 bp, Probe Sequence
tatacttctgagctgctaccacatg

SEQ ID NO: 34935 - DNA, 25 bp, Probe Sequence
gcccattcatttgctgattatactt

SEQ ID NO: 34936 - DNA, 25 bp, Probe Sequence
aaggctcagatgaagaggtgaattg

SEQ ID NO: 34937 - DNA, 25 bp, Probe Sequence
caaggctcagatgaagaggtgaatt

SEQ ID NO: 34938 - DNA, 25 bp, Probe Sequence
ggctcagatgaagaggtgaattgaa

SEQ ID NO: 34939 - DNA, 25 bp, Probe Sequence
aaagttgttctggttgattgcttgt

SEQ ID NO: 34940 - DNA, 25 bp, Probe Sequence
cccattcatttgctgattatacttc

SEQ ID NO: 34941 - DNA, 25 bp, Probe Sequence
tttaaagttgttctggttgattgct

SEQ ID NO: 34942 - DNA, 25 bp, Probe Sequence
gtttaaagttgttctggttgattgc

SEQ ID NO: 34943 - DNA, 25 bp, Probe Sequence
gtctgtttaaagttgttctggttga

SEQ ID NO: 34944 - DNA, 25 bp, Probe Sequence
aaaggtctgtttaaagttgttctgg

SEQ ID NO: 34945 - DNA, 25 bp, Probe Sequence
ggtctgtttaaagttgttctggttg

SEQ ID NO: 34946 - DNA, 25 bp, Probe Sequence
aggtctgtttaaagttgttctggtt

SEQ ID NO: 34947 - DNA, 25 bp, Probe Sequence
aaggtctgtttaaagttgttctggt

SEQ ID NO: 34948 - DNA, 25 bp, Probe Sequence
tacacttgctggtctaggtattaac

SEQ ID NO: 34949 - DNA, 25 bp, Probe Sequence
gtacacttgctggtctaggtattaa

SEQ ID NO: 34950 - DNA, 25 bp, Probe Sequence
agtacacttgctggtctaggtatta

SEQ ID NO: 34951 - DNA, 25 bp, Probe Sequence
gtcttgagtcacactgagatagtca

SEQ ID NO: 34952 - DNA, 25 bp, Probe Sequence
ggtcttgagtcacactgagatagtc

SEQ ID NO: 34953 - DNA, 25 bp, Probe Sequence
tggtcttgagtcacactgagatagt

SEQ ID NO: 34954 - DNA, 25 bp, Probe Sequence
cagtacacttgctggtctaggtatt

SEQ ID NO: 34955 - DNA, 25 bp, Probe Sequence
gttgtgtgtgactctaataaacgga

SEQ ID NO: 34956 - DNA, 25 bp, Probe Sequence
cagttgtgtgtgactctaataaacg

SEQ ID NO: 34957 - DNA, 25 bp, Probe Sequence
gtggtcttgagtcacactgagatag

SEQ ID NO: 34958 - DNA, 25 bp, Probe Sequence
aaacttgtaaacctgtgaatggacc

SEQ ID NO: 34959 - DNA, 25 bp, Probe Sequence
agttgtgtgtgactctaataaacgg

SEQ ID NO: 34960 - DNA, 25 bp, Probe Sequence
tcagttgtgtgtgactctaataaac

SEQ ID NO: 34961 - DNA, 25 bp, Probe Sequence
acacttgctggtctaggtattaacc

SEQ ID NO: 34962 - DNA, 25 bp, Probe Sequence
ttgtgtgtgactctaataaacggag

SEQ ID NO: 34963 - DNA, 25 bp, Probe Sequence
actctaataaacggagcctaccttt

SEQ ID NO: 34964 - DNA, 25 bp, Probe Sequence
tttgctaagaatatgtatgaactgc

SEQ ID NO: 34965 - DNA, 25 bp, Probe Sequence
gactctaataaacggagcctacctt

SEQ ID NO: 34966 - DNA, 25 bp, Probe Sequence
tcagaagtgaaggagaaatgggttt

SEQ ID NO: 34967 - DNA, 25 bp, Probe Sequence
tgtgactctaataaacggagcctac

SEQ ID NO: 34968 - DNA, 25 bp, Probe Sequence
gtgtgactctaataaacggagccta

SEQ ID NO: 34969 - DNA, 25 bp, Probe Sequence
aggactcagaagtgaaggagaaatg

SEQ ID NO: 34970 - DNA, 25 bp, Probe Sequence
caggactcagaagtgaaggagaaat

SEQ ID NO: 34971 - DNA, 25 bp, Probe Sequence
ctcaacagcaacatcaatgaccttt

SEQ ID NO: 34972 - DNA, 25 bp, Probe Sequence
tatcaagaagaaggacaaggaactg

SEQ ID NO: 34973 - DNA, 25 bp, Probe Sequence
ttatcaagaagaaggacaaggaact

SEQ ID NO: 34974 - DNA, 25 bp, Probe Sequence
acattatcaagaagaaggacaagga

SEQ ID NO: 34975 - DNA, 25 bp, Probe Sequence
aacattatcaagaagaaggacaagg

SEQ ID NO: 34976 - DNA, 25 bp, Probe Sequence
attatcaagaagaaggacaaggaac

SEQ ID NO: 34977 - DNA, 25 bp, Probe Sequence
cattatcaagaagaaggacaaggaa

SEQ ID NO: 34978 - DNA, 25 bp, Probe Sequence
caagaagaaggacaaggaactgaag

SEQ ID NO: 34979 - DNA, 25 bp, Probe Sequence
aggctcttcaagaatacaacaacta

SEQ ID NO: 34980 - DNA, 25 bp, Probe Sequence
aagaagaaggacaaggaactgaagt

SEQ ID NO: 34981 - DNA, 25 bp, Probe Sequence
cacatactatggctcattcgttacc

SEQ ID NO: 34982 - DNA, 25 bp, Probe Sequence
ggctcttcaagaatacaacaactaa

SEQ ID NO: 34983 - DNA, 25 bp, Probe Sequence
caggctcttcaagaatacaacaact

SEQ ID NO: 34984 - DNA, 25 bp, Probe Sequence
ttgaagaagtgccgattgtaattaa

SEQ ID NO: 34985 - DNA, 25 bp, Probe Sequence
atcaagaagaaggacaaggaactga

SEQ ID NO: 34986 - DNA, 25 bp, Probe Sequence
tcaagaagaaggacaaggaactgaa

SEQ ID NO: 34987 - DNA, 25 bp, Probe Sequence
ttaacatgaactcttgaagtcacac

SEQ ID NO: 34988 - DNA, 25 bp, Probe Sequence
taacatgaactcttgaagtcacacc

SEQ ID NO: 34989 - DNA, 25 bp, Probe Sequence
gaagaatctacagttgctgatggac

SEQ ID NO: 34990 - DNA, 25 bp, Probe Sequence
gctcttcaagaatacaacaactaag

SEQ ID NO: 34991 - DNA, 25 bp, Probe Sequence
agaagaaggacaaggaactgaagtt

SEQ ID NO: 34992 - DNA, 25 bp, Probe Sequence
gaagaaggacaaggaactgaagttg

SEQ ID NO: 34993 - DNA, 25 bp, Probe Sequence
acaacacatacatgaggaatactag

SEQ ID NO: 34994 - DNA, 25 bp, Probe Sequence
tatcagtccacatactatggctcat

SEQ ID NO: 34995 - DNA, 25 bp, Probe Sequence
ccaggctcttcaagaatacaacaac

SEQ ID NO: 34996 - DNA, 25 bp, Probe Sequence
cattacgcagattaagtataaccgc

SEQ ID NO: 34997 - DNA, 25 bp, Probe Sequence
ccattacgcagattaagtataaccg

SEQ ID NO: 34998 - DNA, 25 bp, Probe Sequence
cggtccattacgcagattaagtata

SEQ ID NO: 34999 - DNA, 25 bp, Probe Sequence
tatcgtcaatgtatggtactctgtg

SEQ ID NO: 35000 - DNA, 25 bp, Probe Sequence
ctatcgtcaatgtatggtactctgt

SEQ ID NO: 35001 - DNA, 25 bp, Probe Sequence
cctatcgtcaatgtatggtactctg

SEQ ID NO: 35002 - DNA, 25 bp, Probe Sequence
tccattacgcagattaagtataacc

SEQ ID NO: 35003 - DNA, 25 bp, Probe Sequence
ggtccattacgcagattaagtataa

SEQ ID NO: 35004 - DNA, 25 bp, Probe Sequence
aatgtatggtactctgtgaatggtg

SEQ ID NO: 35005 - DNA, 25 bp, Probe Sequence
caatgtatggtactctgtgaatggt

SEQ ID NO: 35006 - DNA, 25 bp, Probe Sequence
atgtatggtactctgtgaatggtga

SEQ ID NO: 35007 - DNA, 25 bp, Probe Sequence
tcaatgtatggtactctgtgaatgg

SEQ ID NO: 35008 - DNA, 25 bp, Probe Sequence
ctccacaactcttgaacatcagaag

SEQ ID NO: 35009 - DNA, 25 bp, Probe Sequence
gtcaatgtatggtactctgtgaatg

SEQ ID NO: 35010 - DNA, 25 bp, Probe Sequence
cgtcaatgtatggtactctgtgaat

SEQ ID NO: 35011 - DNA, 25 bp, Probe Sequence
gtccattacgcagattaagtataac

SEQ ID NO: 35012 - DNA, 25 bp, Probe Sequence
atcgtcaatgtatggtactctgtga

SEQ ID NO: 35013 - DNA, 25 bp, Probe Sequence
agaggtgttggtgaatgttaaggag

SEQ ID NO: 35014 - DNA, 25 bp, Probe Sequence
gagaggtgttggtgaatgttaagga

SEQ ID NO: 35015 - DNA, 25 bp, Probe Sequence
actccacaactcttgaacatcagaa

SEQ ID NO: 35016 - DNA, 25 bp, Probe Sequence
tcgtcaatgtatggtactctgtgaa

SEQ ID NO: 35017 - DNA, 25 bp, Probe Sequence
gtatggtactctgtgaatggtgaga

SEQ ID NO: 35018 - DNA, 25 bp, Probe Sequence
tggagaggtgttggtgaatgttaag

SEQ ID NO: 35019 - DNA, 25 bp, Probe Sequence
ctggagaggtgttggtgaatgttaa

SEQ ID NO: 35020 - DNA, 25 bp, Probe Sequence
ttcagagataccgacttgttcctta

SEQ ID NO: 35021 - DNA, 25 bp, Probe Sequence
ctgagttgaattgagattgatgtgt

SEQ ID NO: 35022 - DNA, 25 bp, Probe Sequence
actgagttgaattgagattgatgtg

SEQ ID NO: 35023 - DNA, 25 bp, Probe Sequence
tgagttgaattgagattgatgtgtt

SEQ ID NO: 35024 - DNA, 25 bp, Probe Sequence
gttcttatactgaatgccgactctg

SEQ ID NO: 35025 - DNA, 25 bp, Probe Sequence
tcagagataccgacttgttccttac

SEQ ID NO: 35026 - DNA, 25 bp, Probe Sequence
tcacttggttcttatactgaatgcc

SEQ ID NO: 35027 - DNA, 25 bp, Probe Sequence
cttggttcttatactgaatgccgac

SEQ ID NO: 35028 - DNA, 25 bp, Probe Sequence
cattcatatctggagtctctgacag

SEQ ID NO: 35029 - DNA, 25 bp, Probe Sequence
gaatggaatgagattaatgctgctt

SEQ ID NO: 35030 - DNA, 25 bp, Probe Sequence
aactgagttgaattgagattgatgt

SEQ ID NO: 35031 - DNA, 25 bp, Probe Sequence
aatggaatgagattaatgctgcttg

SEQ ID NO: 35032 - DNA, 25 bp, Probe Sequence
gtggaatggaatgagattaatgctg

SEQ ID NO: 35033 - DNA, 25 bp, Probe Sequence
ttggttcttatactgaatgccgact

SEQ ID NO: 35034 - DNA, 25 bp, Probe Sequence
acttggttcttatactgaatgccga

SEQ ID NO: 35035 - DNA, 25 bp, Probe Sequence
cacttggttcttatactgaatgccg

SEQ ID NO: 35036 - DNA, 25 bp, Probe Sequence
gctcagtatcagagagaatacagtg

SEQ ID NO: 35037 - DNA, 25 bp, Probe Sequence
ggttcttatactgaatgccgactct

SEQ ID NO: 35038 - DNA, 25 bp, Probe Sequence
tcaagttcatgctgacgaatcttaa

SEQ ID NO: 35039 - DNA, 25 bp, Probe Sequence
ctcagtatcagagagaatacagtga

SEQ ID NO: 35040 - DNA, 25 bp, Probe Sequence
ctcaagttcatgctgacgaatctta

SEQ ID NO: 35041 - DNA, 25 bp, Probe Sequence
tggttcttatactgaatgccgactc

SEQ ID NO: 35042 - DNA, 25 bp, Probe Sequence
ggaatggaatgagattaatgctgct

SEQ ID NO: 35043 - DNA, 25 bp, Probe Sequence
cgtggaatggaatgagattaatgct

SEQ ID NO: 35044 - DNA, 25 bp, Probe Sequence
gctctactatggagatcaacagtta

SEQ ID NO: 35045 - DNA, 25 bp, Probe Sequence
tctactatggagatcaacagttact

SEQ ID NO: 35046 - DNA, 25 bp, Probe Sequence
ttcgctctactatggagatcaacag

SEQ ID NO: 35047 - DNA, 25 bp, Probe Sequence
tacatccgagtttatcctgagagaa

SEQ ID NO: 35048 - DNA, 25 bp, Probe Sequence
cgctctactatggagatcaacagtt

SEQ ID NO: 35049 - DNA, 25 bp, Probe Sequence
gttcgctctactatggagatcaaca

SEQ ID NO: 35050 - DNA, 25 bp, Probe Sequence
ctacatccgagtttatcctgagaga

SEQ ID NO: 35051 - DNA, 25 bp, Probe Sequence
ctctactatggagatcaacagttac

SEQ ID NO: 35052 - DNA, 25 bp, Probe Sequence
ttgtgctcagaatctacattccaga

SEQ ID NO: 35053 - DNA, 25 bp, Probe Sequence
ttcctacatccgagtttatcctgag

SEQ ID NO: 35054 - DNA, 25 bp, Probe Sequence
cttcctacatccgagtttatcctga

SEQ ID NO: 35055 - DNA, 25 bp, Probe Sequence
acatccgagtttatcctgagagaag

SEQ ID NO: 35056 - DNA, 25 bp, Probe Sequence
ctactatggagatcaacagttactg

SEQ ID NO: 35057 - DNA, 25 bp, Probe Sequence
cctacatccgagtttatcctgagag

SEQ ID NO: 35058 - DNA, 25 bp, Probe Sequence
cagattgaggatttagtgtcttagg

SEQ ID NO: 35059 - DNA, 25 bp, Probe Sequence
ccagattgaggatttagtgtcttag

SEQ ID NO: 35060 - DNA, 25 bp, Probe Sequence
ggttcgctctactatggagatcaac

SEQ ID NO: 35061 - DNA, 25 bp, Probe Sequence
agattgaggatttagtgtcttagga

SEQ ID NO: 35062 - DNA, 25 bp, Probe Sequence
tgtgctcagaatctacattccagat

SEQ ID NO: 35063 - DNA, 25 bp, Probe Sequence
tcgctctactatggagatcaacagt

SEQ ID NO: 35064 - DNA, 25 bp, Probe Sequence
gattgaggatttagtgtcttaggaa

SEQ ID NO: 35065 - DNA, 25 bp, Probe Sequence
tcctacatccgagtttatcctgaga

SEQ ID NO: 35066 - DNA, 25 bp, Probe Sequence
acttcctacatccgagtttatcctg

SEQ ID NO: 35067 - DNA, 25 bp, Probe Sequence
attgaggatttagtgtcttaggaaa

SEQ ID NO: 35068 - DNA, 25 bp, Probe Sequence
aaacttgtgtgggtgctttagtaaa

SEQ ID NO: 35069 - DNA, 25 bp, Probe Sequence
gaaacttgtgtgggtgctttagtaa

SEQ ID NO: 35070 - DNA, 25 bp, Probe Sequence
agaaacttgtgtgggtgctttagta

SEQ ID NO: 35071 - DNA, 25 bp, Probe Sequence
aacttgtgtgggtgctttagtaaaa

SEQ ID NO: 35072 - DNA, 25 bp, Probe Sequence
cagaaacttgtgtgggtgctttagt

SEQ ID NO: 35073 - DNA, 25 bp, Probe Sequence
acagaaacttgtgtgggtgctttag

SEQ ID NO: 35074 - DNA, 25 bp, Probe Sequence
ctagctacacctggaagtttcagaa

SEQ ID NO: 35075 - DNA, 25 bp, Probe Sequence
tagctacacctggaagtttcagaac

SEQ ID NO: 35076 - DNA, 25 bp, Probe Sequence
ggcttggatcagtaagtctggttcc

SEQ ID NO: 35077 - DNA, 25 bp, Probe Sequence
ctacacctggaagtttcagaaccca

SEQ ID NO: 35078 - DNA, 25 bp, Probe Sequence
gtttgtacattgcacagaaacttgt

SEQ ID NO: 35079 - DNA, 25 bp, Probe Sequence
tgtttgtacattgcacagaaacttg

SEQ ID NO: 35080 - DNA, 25 bp, Probe Sequence
gtgtttgtacattgcacagaaactt

SEQ ID NO: 35081 - DNA, 25 bp, Probe Sequence
tacacctggaagtttcagaacccac

SEQ ID NO: 35082 - DNA, 25 bp, Probe Sequence
ctggaagggtgggaggtatgtctag

SEQ ID NO: 35083 - DNA, 25 bp, Probe Sequence
cttggatcagtaagtctggttcccg

SEQ ID NO: 35084 - DNA, 25 bp, Probe Sequence
ctggaagtttcagaacccactttgg

SEQ ID NO: 35085 - DNA, 25 bp, Probe Sequence
cctggaagtttcagaacccactttg

SEQ ID NO: 35086 - DNA, 25 bp, Probe Sequence
cctagctacacctggaagtttcaga

SEQ ID NO: 35087 - DNA, 25 bp, Probe Sequence
agctacacctggaagtttcagaacc

SEQ ID NO: 35088 - DNA, 25 bp, Probe Sequence
gggcttggatcagtaagtctggttc

SEQ ID NO: 35089 - DNA, 25 bp, Probe Sequence
acctggaagtttcagaacccacttt

SEQ ID NO: 35090 - DNA, 25 bp, Probe Sequence
gcttggatcagtaagtctggttccc

SEQ ID NO: 35091 - DNA, 25 bp, Probe Sequence
ccctagctacacctggaagtttcag

SEQ ID NO: 35092 - DNA, 25 bp, Probe Sequence
aatcttacatagaggtcactgagga

SEQ ID NO: 35093 - DNA, 25 bp, Probe Sequence
atcttacatagaggtcactgaggag

SEQ ID NO: 35094 - DNA, 25 bp, Probe Sequence
tggcagttgttatctacagaatcat

SEQ ID NO: 35095 - DNA, 25 bp, Probe Sequence
gttggcagttgttatctacagaatc

SEQ ID NO: 35096 - DNA, 25 bp, Probe Sequence
ttggcagttgttatctacagaatca

SEQ ID NO: 35097 - DNA, 25 bp, Probe Sequence
tgttggcagttgttatctacagaat

SEQ ID NO: 35098 - DNA, 25 bp, Probe Sequence
ttcctcagttcaagatagagaagaa

SEQ ID NO: 35099 - DNA, 25 bp, Probe Sequence
atgacatcatcttattcagtggcaa

SEQ ID NO: 35100 - DNA, 25 bp, Probe Sequence
tcctcagttcaagatagagaagaat

SEQ ID NO: 35101 - DNA, 25 bp, Probe Sequence
gcgaatgacctctaagtatgttgag

SEQ ID NO: 35102 - DNA, 25 bp, Probe Sequence
actctacagttatcgcagatattct

SEQ ID NO: 35103 - DNA, 25 bp, Probe Sequence
ttcttcctaacattggtcagcagat

SEQ ID NO: 35104 - DNA, 25 bp, Probe Sequence
ggtcgtctgtatatatcaaggatga

SEQ ID NO: 35105 - DNA, 25 bp, Probe Sequence
ttgttatcaggaaggatgacatcat

SEQ ID NO: 35106 - DNA, 25 bp, Probe Sequence
ggcgaatgacctctaagtatgttga

SEQ ID NO: 35107 - DNA, 25 bp, Probe Sequence
ctacagttatcgcagatattctagc

SEQ ID NO: 35108 - DNA, 25 bp, Probe Sequence
ggcagttgttatctacagaatcata

SEQ ID NO: 35109 - DNA, 25 bp, Probe Sequence
cctcagttcaagatagagaagaatt

SEQ ID NO: 35110 - DNA, 25 bp, Probe Sequence
tcttacatagaggtcactgaggagg

SEQ ID NO: 35111 - DNA, 25 bp, Probe Sequence
ttcagaatctaatggaatggaccaa

SEQ ID NO: 35112 - DNA, 25 bp, Probe Sequence
atcgcagatattctagcttcattgt

SEQ ID NO: 35113 - DNA, 25 bp, Probe Sequence
agaatctaatggaatggaccaatcc

SEQ ID NO: 35114 - DNA, 25 bp, Probe Sequence
tcagaatctaatggaatggaccaat

SEQ ID NO: 35115 - DNA, 25 bp, Probe Sequence
tcgcagatattctagcttcattgta

SEQ ID NO: 35116 - DNA, 25 bp, Probe Sequence
ctttccaaacaaatgatacaaccct

SEQ ID NO: 35117 - DNA, 25 bp, Probe Sequence
tttccaaacaaatgatacaaccctg

SEQ ID NO: 35118 - DNA, 25 bp, Probe Sequence
actttccaaacaaatgatacaaccc

SEQ ID NO: 35119 - DNA, 25 bp, Probe Sequence
ttccaaacaaatgatacaaccctga

SEQ ID NO: 35120 - DNA, 25 bp, Probe Sequence
cagtaacctttggaaacatcagaag

SEQ ID NO: 35121 - DNA, 25 bp, Probe Sequence
acagactgagatttgaaggaaacat

SEQ ID NO: 35122 - DNA, 25 bp, Probe Sequence
tacagactgagatttgaaggaaaca

SEQ ID NO: 35123 - DNA, 25 bp, Probe Sequence
aaacaaatgatacaaccctgaccaa

SEQ ID NO: 35124 - DNA, 25 bp, Probe Sequence
aacaaatgatacaaccctgaccaag

SEQ ID NO: 35125 - DNA, 25 bp, Probe Sequence
tccaaacaaatgatacaaccctgac

SEQ ID NO: 35126 - DNA, 25 bp, Probe Sequence
aacatcagaagctactctccattga

SEQ ID NO: 35127 - DNA, 25 bp, Probe Sequence
taaatatgtattacccgtctgaagc

SEQ ID NO: 35128 - DNA, 25 bp, Probe Sequence
gtacagactgagatttgaaggaaac

SEQ ID NO: 35129 - DNA, 25 bp, Probe Sequence
caaacaaatgatacaaccctgacca

SEQ ID NO: 35130 - DNA, 25 bp, Probe Sequence
agtaacctttggaaacatcagaagc

SEQ ID NO: 35131 - DNA, 25 bp, Probe Sequence
cagactgagatttgaaggaaacatg

SEQ ID NO: 35132 - DNA, 25 bp, Probe Sequence
catcttcatcggtactccaaggttc

SEQ ID NO: 35133 - DNA, 25 bp, Probe Sequence
tactttccaaacaaatgatacaacc

SEQ ID NO: 35134 - DNA, 25 bp, Probe Sequence
acatcagaagctactctccattgac

SEQ ID NO: 35135 - DNA, 25 bp, Probe Sequence
atcttcatcggtactccaaggttct

SEQ ID NO: 35136 - DNA, 25 bp, Probe Sequence
agtacagactgagatttgaaggaaa

SEQ ID NO: 35137 - DNA, 25 bp, Probe Sequence
ccaaacaaatgatacaaccctgacc

SEQ ID NO: 35138 - DNA, 25 bp, Probe Sequence
agactgagatttgaaggaaacatgc

SEQ ID NO: 35139 - DNA, 25 bp, Probe Sequence
aaatatgtattacccgtctgaagct

SEQ ID NO: 35140 - DNA, 25 bp, Probe Sequence
agcaataaagaggtgtccttgtaaa

SEQ ID NO: 35141 - DNA, 25 bp, Probe Sequence
ctcagtatggagtcaccaagttcag

SEQ ID NO: 35142 - DNA, 25 bp, Probe Sequence
cagcaataaagaggtgtccttgtaa

SEQ ID NO: 35143 - DNA, 25 bp, Probe Sequence
caagttcagtgatctcacagaggag

SEQ ID NO: 35144 - DNA, 25 bp, Probe Sequence
cagtatggagtcaccaagttcagtg

SEQ ID NO: 35145 - DNA, 25 bp, Probe Sequence
acagcaataaagaggtgtccttgta

SEQ ID NO: 35146 - DNA, 25 bp, Probe Sequence
tcagtatggagtcaccaagttcagt

SEQ ID NO: 35147 - DNA, 25 bp, Probe Sequence
caccaagttcagtgatctcacagag

SEQ ID NO: 35148 - DNA, 25 bp, Probe Sequence
ctgtccgtctttgtcaataacatgg

SEQ ID NO: 35149 - DNA, 25 bp, Probe Sequence
cctgtccgtctttgtcaataacatg

SEQ ID NO: 35150 - DNA, 25 bp, Probe Sequence
gtccgtctttgtcaataacatggtg

SEQ ID NO: 35151 - DNA, 25 bp, Probe Sequence
aagttcagtgatctcacagaggagg

SEQ ID NO: 35152 - DNA, 25 bp, Probe Sequence
tgtccgtctttgtcaataacatggt

SEQ ID NO: 35153 - DNA, 25 bp, Probe Sequence
gtctttgtcaataacatggtgcgag

SEQ ID NO: 35154 - DNA, 25 bp, Probe Sequence
ccaagttcagtgatctcacagagga

SEQ ID NO: 35155 - DNA, 25 bp, Probe Sequence
cggacatatgagtcaaaggaagaag

SEQ ID NO: 35156 - DNA, 25 bp, Probe Sequence
cagtgatctcacagaggaggagttc

SEQ ID NO: 35157 - DNA, 25 bp, Probe Sequence
gttcagtgatctcacagaggaggag

SEQ ID NO: 35158 - DNA, 25 bp, Probe Sequence
gacatatgagtcaaaggaagaagcc

SEQ ID NO: 35159 - DNA, 25 bp, Probe Sequence
ggacatatgagtcaaaggaagaagc

SEQ ID NO: 35160 - DNA, 25 bp, Probe Sequence
accaagttcagtgatctcacagagg

SEQ ID NO: 35161 - DNA, 25 bp, Probe Sequence
gcctgtccgtctttgtcaataacat

SEQ ID NO: 35162 - DNA, 25 bp, Probe Sequence
gcaataaagaggtgtccttgtaaaa

SEQ ID NO: 35163 - DNA, 25 bp, Probe Sequence
acatatgagtcaaaggaagaagccc

SEQ ID NO: 35164 - DNA, 25 bp, Probe Sequence
tgaattagaaagagagagcaaggtc

SEQ ID NO: 35165 - DNA, 25 bp, Probe Sequence
agtgaattagaaagagagagcaagg

SEQ ID NO: 35166 - DNA, 25 bp, Probe Sequence
gtgaattagaaagagagagcaaggt

SEQ ID NO: 35167 - DNA, 25 bp, Probe Sequence
attagaaagagagagcaaggtcgta

SEQ ID NO: 35168 - DNA, 25 bp, Probe Sequence
cgaagtgaattagaaagagagagca

SEQ ID NO: 35169 - DNA, 25 bp, Probe Sequence
tgcgaagtgaattagaaagagagag

SEQ ID NO: 35170 - DNA, 25 bp, Probe Sequence
ctgcgaagtgaattagaaagagaga

SEQ ID NO: 35171 - DNA, 25 bp, Probe Sequence
ttacgaaatcagggtcaagacaaat

SEQ ID NO: 35172 - DNA, 25 bp, Probe Sequence
tgaatggctgcgaagtgaattagaa

SEQ ID NO: 35173 - DNA, 25 bp, Probe Sequence
ttgaatggctgcgaagtgaattaga

SEQ ID NO: 35174 - DNA, 25 bp, Probe Sequence
tacgaaatcagggtcaagacaaatc

SEQ ID NO: 35175 - DNA, 25 bp, Probe Sequence
gaattagaaagagagagcaaggtcg

SEQ ID NO: 35176 - DNA, 25 bp, Probe Sequence
aagtgaattagaaagagagagcaag

SEQ ID NO: 35177 - DNA, 25 bp, Probe Sequence
gaagtgaattagaaagagagagcaa

SEQ ID NO: 35178 - DNA, 25 bp, Probe Sequence
gaagatacagtgactttgaatggct

SEQ ID NO: 35179 - DNA, 25 bp, Probe Sequence
agaagatacagtgactttgaatggc

SEQ ID NO: 35180 - DNA, 25 bp, Probe Sequence
aagaagatacagtgactttgaatgg

SEQ ID NO: 35181 - DNA, 25 bp, Probe Sequence
ttagaaagagagagcaaggtcgtag

SEQ ID NO: 35182 - DNA, 25 bp, Probe Sequence
cttacgaaatcagggtcaagacaaa

SEQ ID NO: 35183 - DNA, 25 bp, Probe Sequence
aattagaaagagagagcaaggtcgt

SEQ ID NO: 35184 - DNA, 25 bp, Probe Sequence
gcgaagtgaattagaaagagagagc

SEQ ID NO: 35185 - DNA, 25 bp, Probe Sequence
gctgcgaagtgaattagaaagagag

SEQ ID NO: 35186 - DNA, 25 bp, Probe Sequence
aatggctgcgaagtgaattagaaag

SEQ ID NO: 35187 - DNA, 25 bp, Probe Sequence
gaatggctgcgaagtgaattagaaa

SEQ ID NO: 35188 - DNA, 25 bp, Probe Sequence
aatagcttccgccagtacaagtatg

SEQ ID NO: 35189 - DNA, 25 bp, Probe Sequence
caatagcttccgccagtacaagtat

SEQ ID NO: 35190 - DNA, 25 bp, Probe Sequence
gggaaataaatgagtgtctgtttca

SEQ ID NO: 35191 - DNA, 25 bp, Probe Sequence
atagcttccgccagtacaagtatga

SEQ ID NO: 35192 - DNA, 25 bp, Probe Sequence
gaaataaatgagtgtctgtttcagc

SEQ ID NO: 35193 - DNA, 25 bp, Probe Sequence
ctgctcaatctcttccagaccttct

SEQ ID NO: 35194 - DNA, 25 bp, Probe Sequence
cagtccttcttcctctacttgctcc

SEQ ID NO: 35195 - DNA, 25 bp, Probe Sequence
ccagtccttcttcctctacttgctc

SEQ ID NO: 35196 - DNA, 25 bp, Probe Sequence
tcaatagcttccgccagtacaagta

SEQ ID NO: 35197 - DNA, 25 bp, Probe Sequence
tggggaaataaatgagtgtctgttt

SEQ ID NO: 35198 - DNA, 25 bp, Probe Sequence
ggaaataaatgagtgtctgtttcag

SEQ ID NO: 35199 - DNA, 25 bp, Probe Sequence
ctggggaaataaatgagtgtctgtt

SEQ ID NO: 35200 - DNA, 25 bp, Probe Sequence
cttctggggaaataaatgagtgtct

SEQ ID NO: 35201 - DNA, 25 bp, Probe Sequence
ttctggggaaataaatgagtgtctg

SEQ ID NO: 35202 - DNA, 25 bp, Probe Sequence
catcaatagcttccgccagtacaag

SEQ ID NO: 35203 - DNA, 25 bp, Probe Sequence
tctggggaaataaatgagtgtctgt

SEQ ID NO: 35204 - DNA, 25 bp, Probe Sequence
ccttctggggaaataaatgagtgtc

SEQ ID NO: 35205 - DNA, 25 bp, Probe Sequence
caccagtccttcttcctctacttgc

SEQ ID NO: 35206 - DNA, 25 bp, Probe Sequence
gcaccagtccttcttcctctacttg

SEQ ID NO: 35207 - DNA, 25 bp, Probe Sequence
atcaatagcttccgccagtacaagt

SEQ ID NO: 35208 - DNA, 25 bp, Probe Sequence
gaagcctaccacgatgtcaatgtca

SEQ ID NO: 35209 - DNA, 25 bp, Probe Sequence
accagtccttcttcctctacttgct

SEQ ID NO: 35210 - DNA, 25 bp, Probe Sequence
cctgctcaatctcttccagaccttc

SEQ ID NO: 35211 - DNA, 25 bp, Probe Sequence
caaccttgacctgctcaatctcttc

SEQ ID NO: 35212 - DNA, 25 bp, Probe Sequence
atgatgtgttctgtggattcttact

SEQ ID NO: 35213 - DNA, 25 bp, Probe Sequence
tggaatgctatggattatgctgtaa

SEQ ID NO: 35214 - DNA, 25 bp, Probe Sequence
atcattccaacttccttctaccatc

SEQ ID NO: 35215 - DNA, 25 bp, Probe Sequence
gatgtgttctgtggattcttactct

SEQ ID NO: 35216 - DNA, 25 bp, Probe Sequence
gtgttctgtggattcttactctgta

SEQ ID NO: 35217 - DNA, 25 bp, Probe Sequence
ggaatgctatggattatgctgtaag

SEQ ID NO: 35218 - DNA, 25 bp, Probe Sequence
atgtgttctgtggattcttactctg

SEQ ID NO: 35219 - DNA, 25 bp, Probe Sequence
tgatgtgttctgtggattcttactc

SEQ ID NO: 35220 - DNA, 25 bp, Probe Sequence
cattccaacttccttctaccatcaa

SEQ ID NO: 35221 - DNA, 25 bp, Probe Sequence
gtggaatgctatggattatgctgta

SEQ ID NO: 35222 - DNA, 25 bp, Probe Sequence
caccaatctcataataggctccatc

SEQ ID NO: 35223 - DNA, 25 bp, Probe Sequence
attccaacttccttctaccatcaag

SEQ ID NO: 35224 - DNA, 25 bp, Probe Sequence
gatgctgtgaacgagtgtgatatta

SEQ ID NO: 35225 - DNA, 25 bp, Probe Sequence
gaatgctatggattatgctgtaaga

SEQ ID NO: 35226 - DNA, 25 bp, Probe Sequence
atgctgtgaacgagtgtgatattac

SEQ ID NO: 35227 - DNA, 25 bp, Probe Sequence
atgtggaatgctatggattatgctg

SEQ ID NO: 35228 - DNA, 25 bp, Probe Sequence
ctagtgccaccaatctcataatagg

SEQ ID NO: 35229 - DNA, 25 bp, Probe Sequence
cctagtgccaccaatctcataatag

SEQ ID NO: 35230 - DNA, 25 bp, Probe Sequence
tcattccaacttccttctaccatca

SEQ ID NO: 35231 - DNA, 25 bp, Probe Sequence
tcctagtgccaccaatctcataata

SEQ ID NO: 35232 - DNA, 25 bp, Probe Sequence
tgtgaacgagtgtgatattactgaa

SEQ ID NO: 35233 - DNA, 25 bp, Probe Sequence
ctgtgaacgagtgtgatattactga

SEQ ID NO: 35234 - DNA, 25 bp, Probe Sequence
gatcattccaacttccttctaccat

SEQ ID NO: 35235 - DNA, 25 bp, Probe Sequence
tgttctgtggattcttactctgtac

SEQ ID NO: 35236 - DNA, 25 bp, Probe Sequence
gaacatatctgacattggtgaagtg

SEQ ID NO: 35237 - DNA, 25 bp, Probe Sequence
acatatctgacattggtgaagtgaa

SEQ ID NO: 35238 - DNA, 25 bp, Probe Sequence
aacatatctgacattggtgaagtga

SEQ ID NO: 35239 - DNA, 25 bp, Probe Sequence
tgaacatatctgacattggtgaagt

SEQ ID NO: 35240 - DNA, 25 bp, Probe Sequence
ctaaggctcattcatcaggttaaga

SEQ ID NO: 35241 - DNA, 25 bp, Probe Sequence
actaaggctcattcatcaggttaag

SEQ ID NO: 35242 - DNA, 25 bp, Probe Sequence
tcagtgtccagaagatagatatgtg

SEQ ID NO: 35243 - DNA, 25 bp, Probe Sequence
cagtgtccagaagatagatatgtgc

SEQ ID NO: 35244 - DNA, 25 bp, Probe Sequence
aaggatgaacatatctgacattggt

SEQ ID NO: 35245 - DNA, 25 bp, Probe Sequence
taaggctcattcatcaggttaagaa

SEQ ID NO: 35246 - DNA, 25 bp, Probe Sequence
ggatgaacatatctgacattggtga

SEQ ID NO: 35247 - DNA, 25 bp, Probe Sequence
aggatgaacatatctgacattggtg

SEQ ID NO: 35248 - DNA, 25 bp, Probe Sequence
aactaaggctcattcatcaggttaa

SEQ ID NO: 35249 - DNA, 25 bp, Probe Sequence
tctcatcagtgtccagaagatagat

SEQ ID NO: 35250 - DNA, 25 bp, Probe Sequence
ctcatcagtgtccagaagatagata

SEQ ID NO: 35251 - DNA, 25 bp, Probe Sequence
atgaacatatctgacattggtgaag

SEQ ID NO: 35252 - DNA, 25 bp, Probe Sequence
gatgaacatatctgacattggtgaa

SEQ ID NO: 35253 - DNA, 25 bp, Probe Sequence
gagttcaatgtgagaatgtgagaga

SEQ ID NO: 35254 - DNA, 25 bp, Probe Sequence
agagttcaatgtgagaatgtgagag

SEQ ID NO: 35255 - DNA, 25 bp, Probe Sequence
gagagttcaatgtgagaatgtgaga

SEQ ID NO: 35256 - DNA, 25 bp, Probe Sequence
atcagtgtccagaagatagatatgt

SEQ ID NO: 35257 - DNA, 25 bp, Probe Sequence
agttcaatgtgagaatgtgagagac

SEQ ID NO: 35258 - DNA, 25 bp, Probe Sequence
catccataagaagtgtgtcagtctg

SEQ ID NO: 35259 - DNA, 25 bp, Probe Sequence
tcatcagtgtccagaagatagatat

SEQ ID NO: 35260 - DNA, 25 bp, Probe Sequence
gcctattcttacttactctacagtg

SEQ ID NO: 35261 - DNA, 25 bp, Probe Sequence
agcctattcttacttactctacagt

SEQ ID NO: 35262 - DNA, 25 bp, Probe Sequence
ggattcctagcctattcttacttac

SEQ ID NO: 35263 - DNA, 25 bp, Probe Sequence
ttcctagcctattcttacttactct

SEQ ID NO: 35264 - DNA, 25 bp, Probe Sequence
ggaaggattaaatgtgatgggaaag

SEQ ID NO: 35265 - DNA, 25 bp, Probe Sequence
atggaaggattaaatgtgatgggaa

SEQ ID NO: 35266 - DNA, 25 bp, Probe Sequence
tgaagaaggataagagaaatgggaa

SEQ ID NO: 35267 - DNA, 25 bp, Probe Sequence
tggaaggattaaatgtgatgggaaa

SEQ ID NO: 35268 - DNA, 25 bp, Probe Sequence
aggattaaatgtgatgggaaagttg

SEQ ID NO: 35269 - DNA, 25 bp, Probe Sequence
atgaagaaggataagagaaatggga

SEQ ID NO: 35270 - DNA, 25 bp, Probe Sequence
aagaagatgaagaaggataagagaa

SEQ ID NO: 35271 - DNA, 25 bp, Probe Sequence
ttacctgtcactattgtgccttctt

SEQ ID NO: 35272 - DNA, 25 bp, Probe Sequence
gaaggattaaatgtgatgggaaagt

SEQ ID NO: 35273 - DNA, 25 bp, Probe Sequence
cctagcctattcttacttactctac

SEQ ID NO: 35274 - DNA, 25 bp, Probe Sequence
gatgaagaaggataagagaaatggg

SEQ ID NO: 35275 - DNA, 25 bp, Probe Sequence
ggattaaatgtgatgggaaagttgc

SEQ ID NO: 35276 - DNA, 25 bp, Probe Sequence
cctaagaacaacatggaaggattaa

SEQ ID NO: 35277 - DNA, 25 bp, Probe Sequence
taaatgtgatgggaaagttgcgtta

SEQ ID NO: 35278 - DNA, 25 bp, Probe Sequence
tcctagcctattcttacttactcta

SEQ ID NO: 35279 - DNA, 25 bp, Probe Sequence
ctgatattggtgaggtgaaagatgg

SEQ ID NO: 35280 - DNA, 25 bp, Probe Sequence
aagttgcgttacctgtcactattgt

SEQ ID NO: 35281 - DNA, 25 bp, Probe Sequence
gattaaatgtgatgggaaagttgcg

SEQ ID NO: 35282 - DNA, 25 bp, Probe Sequence
aaggattaaatgtgatgggaaagtt

SEQ ID NO: 35283 - DNA, 25 bp, Probe Sequence
tacctgtcactattgtgccttcttc

SEQ ID NO: 35284 - DNA, 25 bp, Probe Sequence
tactctgggagacaatagatgtgaa

SEQ ID NO: 35285 - DNA, 25 bp, Probe Sequence
ctctgggagacaatagatgtgaatg

SEQ ID NO: 35286 - DNA, 25 bp, Probe Sequence
ctactctgggagacaatagatgtga

SEQ ID NO: 35287 - DNA, 25 bp, Probe Sequence
gacaatagatgtgaatgggactgag

SEQ ID NO: 35288 - DNA, 25 bp, Probe Sequence
gagacaatagatgtgaatgggactg

SEQ ID NO: 35289 - DNA, 25 bp, Probe Sequence
actctgggagacaatagatgtgaat

SEQ ID NO: 35290 - DNA, 25 bp, Probe Sequence
agacaatagatgtgaatgggactga

SEQ ID NO: 35291 - DNA, 25 bp, Probe Sequence
gtcttattggtcctggtgatgcttg

SEQ ID NO: 35292 - DNA, 25 bp, Probe Sequence
tctactctgggagacaatagatgtg

SEQ ID NO: 35293 - DNA, 25 bp, Probe Sequence
ggagacaatagatgtgaatgggact

SEQ ID NO: 35294 - DNA, 25 bp, Probe Sequence
tctgggagacaatagatgtgaatgg

SEQ ID NO: 35295 - DNA, 25 bp, Probe Sequence
acaatagatgtgaatgggactgagc

SEQ ID NO: 35296 - DNA, 25 bp, Probe Sequence
gggagacaatagatgtgaatgggac

SEQ ID NO: 35297 - DNA, 25 bp, Probe Sequence
ctgggagacaatagatgtgaatggg

SEQ ID NO: 35298 - DNA, 25 bp, Probe Sequence
aatagatgtgaatgggactgagctg

SEQ ID NO: 35299 - DNA, 25 bp, Probe Sequence
caatagatgtgaatgggactgagct

SEQ ID NO: 35300 - DNA, 25 bp, Probe Sequence
gggatctactctgggagacaataga

SEQ ID NO: 35301 - DNA, 25 bp, Probe Sequence
tgggagacaatagatgtgaatggga

SEQ ID NO: 35302 - DNA, 25 bp, Probe Sequence
tcttattggtcctggtgatgcttgg

SEQ ID NO: 35303 - DNA, 25 bp, Probe Sequence
ggtcttattggtcctggtgatgctt

SEQ ID NO: 35304 - DNA, 25 bp, Probe Sequence
cctggtcttattggtcctggtgatg

SEQ ID NO: 35305 - DNA, 25 bp, Probe Sequence
tcctggtcttattggtcctggtgat

SEQ ID NO: 35306 - DNA, 25 bp, Probe Sequence
cttattggtcctggtgatgcttggt

SEQ ID NO: 35307 - DNA, 25 bp, Probe Sequence
ctttgcctccagacagctaatactc

SEQ ID NO: 35308 - DNA, 25 bp, Probe Sequence
tagaatcttgtctgtcactcactac

SEQ ID NO: 35309 - DNA, 25 bp, Probe Sequence
ttactatggcagatatggtatggat

SEQ ID NO: 35310 - DNA, 25 bp, Probe Sequence
ttattcagtcatcggtgaggttaat

SEQ ID NO: 35311 - DNA, 25 bp, Probe Sequence
tattcagtcatcggtgaggttaatg

SEQ ID NO: 35312 - DNA, 25 bp, Probe Sequence
cttattcagtcatcggtgaggttaa

SEQ ID NO: 35313 - DNA, 25 bp, Probe Sequence
atgacattcgttcacaatagcacta

SEQ ID NO: 35314 - DNA, 25 bp, Probe Sequence
taagtcttattcagtcatcggtgag

SEQ ID NO: 35315 - DNA, 25 bp, Probe Sequence
tgacattcgttcacaatagcactat

SEQ ID NO: 35316 - DNA, 25 bp, Probe Sequence
tatggcagatatggtatggatcgta

SEQ ID NO: 35317 - DNA, 25 bp, Probe Sequence
ctagaatcttgtctgtcactcacta

SEQ ID NO: 35318 - DNA, 25 bp, Probe Sequence
tcttattcagtcatcggtgaggtta

SEQ ID NO: 35319 - DNA, 25 bp, Probe Sequence
cacaagaaccacaattaagatgtca

SEQ ID NO: 35320 - DNA, 25 bp, Probe Sequence
gaatcttgtctgtcactcactacat

SEQ ID NO: 35321 - DNA, 25 bp, Probe Sequence
tactatggcagatatggtatggatc

SEQ ID NO: 35322 - DNA, 25 bp, Probe Sequence
gacattcgttcacaatagcactatt

SEQ ID NO: 35323 - DNA, 25 bp, Probe Sequence
atggcagatatggtatggatcgtaa

SEQ ID NO: 35324 - DNA, 25 bp, Probe Sequence
gcacaagaaccacaattaagatgtc

SEQ ID NO: 35325 - DNA, 25 bp, Probe Sequence
acaagaaccacaattaagatgtcat

SEQ ID NO: 35326 - DNA, 25 bp, Probe Sequence
agaatcttgtctgtcactcactaca

SEQ ID NO: 35327 - DNA, 25 bp, Probe Sequence
ctatggcagatatggtatggatcgt

SEQ ID NO: 35328 - DNA, 25 bp, Probe Sequence
actatggcagatatggtatggatcg

SEQ ID NO: 35329 - DNA, 25 bp, Probe Sequence
ataagtcttattcagtcatcggtga

SEQ ID NO: 35330 - DNA, 25 bp, Probe Sequence
tgtcactcactacatgaataagcaa

SEQ ID NO: 35331 - DNA, 25 bp, Probe Sequence
tctgtcactcactacatgaataagc

SEQ ID NO: 35332 - DNA, 25 bp, Probe Sequence
acttggatgacactattgatgatga

SEQ ID NO: 35333 - DNA, 25 bp, Probe Sequence
agaacttggatgacactattgatga

SEQ ID NO: 35334 - DNA, 25 bp, Probe Sequence
gcctccatattatacacctaaccag

SEQ ID NO: 35335 - DNA, 25 bp, Probe Sequence
tggatgacactattgatgatgagaa

SEQ ID NO: 35336 - DNA, 25 bp, Probe Sequence
ttggatgacactattgatgatgaga

SEQ ID NO: 35337 - DNA, 25 bp, Probe Sequence
cttggatgacactattgatgatgag

SEQ ID NO: 35338 - DNA, 25 bp, Probe Sequence
aacttggatgacactattgatgatg

SEQ ID NO: 35339 - DNA, 25 bp, Probe Sequence
cctccatattatacacctaaccagt

SEQ ID NO: 35340 - DNA, 25 bp, Probe Sequence
aagaacttggatgacactattgatg

SEQ ID NO: 35341 - DNA, 25 bp, Probe Sequence
gaacttggatgacactattgatgat

SEQ ID NO: 35342 - DNA, 25 bp, Probe Sequence
ctacattaagaacttggatgacact

SEQ ID NO: 35343 - DNA, 25 bp, Probe Sequence
tctacattaagaacttggatgacac

SEQ ID NO: 35344 - DNA, 25 bp, Probe Sequence
ctctacattaagaacttggatgaca

SEQ ID NO: 35345 - DNA, 25 bp, Probe Sequence
ttaagaacttggatgacactattga

SEQ ID NO: 35346 - DNA, 25 bp, Probe Sequence
tctctacattaagaacttggatgac

SEQ ID NO: 35347 - DNA, 25 bp, Probe Sequence
taagaacttggatgacactattgat

SEQ ID NO: 35348 - DNA, 25 bp, Probe Sequence
acattaagaacttggatgacactat

SEQ ID NO: 35349 - DNA, 25 bp, Probe Sequence
ctaaggtaatgctggaggatggaag

SEQ ID NO: 35350 - DNA, 25 bp, Probe Sequence
ctccatattatacacctaaccagtt

SEQ ID NO: 35351 - DNA, 25 bp, Probe Sequence
taaggtaatgctggaggatggaaga

SEQ ID NO: 35352 - DNA, 25 bp, Probe Sequence
gtgaatctctacattaagaacttgg

SEQ ID NO: 35353 - DNA, 25 bp, Probe Sequence
ggtgaatctctacattaagaacttg

SEQ ID NO: 35354 - DNA, 25 bp, Probe Sequence
tacattaagaacttggatgacacta

SEQ ID NO: 35355 - DNA, 25 bp, Probe Sequence
ggtcaattatgaagcacctagaatt

SEQ ID NO: 35356 - DNA, 25 bp, Probe Sequence
ggacaattatctatatgccacctga

SEQ ID NO: 35357 - DNA, 25 bp, Probe Sequence
ctactgacatccaaggagaagaatt

SEQ ID NO: 35358 - DNA, 25 bp, Probe Sequence
actactgacatccaaggagaagaat

SEQ ID NO: 35359 - DNA, 25 bp, Probe Sequence
ttactagacactactgacatccaag

SEQ ID NO: 35360 - DNA, 25 bp, Probe Sequence
tactagacactactgacatccaagg

SEQ ID NO: 35361 - DNA, 25 bp, Probe Sequence
gacaattatctatatgccacctgaa

SEQ ID NO: 35362 - DNA, 25 bp, Probe Sequence
aactgaatatcctgatgttgcttgg

SEQ ID NO: 35363 - DNA, 25 bp, Probe Sequence
attactagacactactgacatccaa

SEQ ID NO: 35364 - DNA, 25 bp, Probe Sequence
aattactagacactactgacatcca

SEQ ID NO: 35365 - DNA, 25 bp, Probe Sequence
agacaattactagacactactgaca

SEQ ID NO: 35366 - DNA, 25 bp, Probe Sequence
caattactagacactactgacatcc

SEQ ID NO: 35367 - DNA, 25 bp, Probe Sequence
cactactgacatccaaggagaagaa

SEQ ID NO: 35368 - DNA, 25 bp, Probe Sequence
ctagacactactgacatccaaggag

SEQ ID NO: 35369 - DNA, 25 bp, Probe Sequence
tggaattatctctgaacatacctgt

SEQ ID NO: 35370 - DNA, 25 bp, Probe Sequence
tagacactactgacatccaaggaga

SEQ ID NO: 35371 - DNA, 25 bp, Probe Sequence
atggaattatctctgaacatacctg

SEQ ID NO: 35372 - DNA, 25 bp, Probe Sequence
actagacactactgacatccaagga

SEQ ID NO: 35373 - DNA, 25 bp, Probe Sequence
acaattactagacactactgacatc

SEQ ID NO: 35374 - DNA, 25 bp, Probe Sequence
gacaattactagacactactgacat

SEQ ID NO: 35375 - DNA, 25 bp, Probe Sequence
gacactactgacatccaaggagaag

SEQ ID NO: 35376 - DNA, 25 bp, Probe Sequence
cagacaattactagacactactgac

SEQ ID NO: 35377 - DNA, 25 bp, Probe Sequence
gtcagacaattactagacactactg

SEQ ID NO: 35378 - DNA, 25 bp, Probe Sequence
agtcagacaattactagacactact

SEQ ID NO: 35379 - DNA, 25 bp, Probe Sequence
aatggaattatctctgaacatacct

SEQ ID NO: 35380 - DNA, 25 bp, Probe Sequence
ataatatctgtgaggtgctgatgag

SEQ ID NO: 35381 - DNA, 25 bp, Probe Sequence
ttgccaggacgaattgagataatat

SEQ ID NO: 35382 - DNA, 25 bp, Probe Sequence
gataatatctgtgaggtgctgatga

SEQ ID NO: 35383 - DNA, 25 bp, Probe Sequence
tgccaggacgaattgagataatatc

SEQ ID NO: 35384 - DNA, 25 bp, Probe Sequence
taatatctgtgaggtgctgatgagt

SEQ ID NO: 35385 - DNA, 25 bp, Probe Sequence
gttgccaggacgaattgagataata

SEQ ID NO: 35386 - DNA, 25 bp, Probe Sequence
gcagtcctcttattcctaaggtaat

SEQ ID NO: 35387 - DNA, 25 bp, Probe Sequence
agcagtcctcttattcctaaggtaa

SEQ ID NO: 35388 - DNA, 25 bp, Probe Sequence
aagcagtcctcttattcctaaggta

SEQ ID NO: 35389 - DNA, 25 bp, Probe Sequence
aatatctgtgaggtgctgatgagtg

SEQ ID NO: 35390 - DNA, 25 bp, Probe Sequence
gtcctcttattcctaaggtaatcct

SEQ ID NO: 35391 - DNA, 25 bp, Probe Sequence
agtcctcttattcctaaggtaatcc

SEQ ID NO: 35392 - DNA, 25 bp, Probe Sequence
cagtcctcttattcctaaggtaatc

SEQ ID NO: 35393 - DNA, 25 bp, Probe Sequence
attgacacacagcactctctaaatc

SEQ ID NO: 35394 - DNA, 25 bp, Probe Sequence
gattgacacacagcactctctaaat

SEQ ID NO: 35395 - DNA, 25 bp, Probe Sequence
tatctgtgaggtgctgatgagtgat

SEQ ID NO: 35396 - DNA, 25 bp, Probe Sequence
atatctgtgaggtgctgatgagtga

SEQ ID NO: 35397 - DNA, 25 bp, Probe Sequence
cacagcactctctaaatcttccttg

SEQ ID NO: 35398 - DNA, 25 bp, Probe Sequence
gacacacagcactctctaaatcttc

SEQ ID NO: 35399 - DNA, 25 bp, Probe Sequence
ggttgccaggacgaattgagataat

SEQ ID NO: 35400 - DNA, 25 bp, Probe Sequence
acacagcactctctaaatcttcctt

SEQ ID NO: 35401 - DNA, 25 bp, Probe Sequence
agataatatctgtgaggtgctgatg

SEQ ID NO: 35402 - DNA, 25 bp, Probe Sequence
ttgagataatatctgtgaggtgctg

SEQ ID NO: 35403 - DNA, 25 bp, Probe Sequence
gagataatatctgtgaggtgctgat

SEQ ID NO: 35404 - DNA, 25 bp, Probe Sequence
ataactcatggtgtggctaatctac

SEQ ID NO: 35405 - DNA, 25 bp, Probe Sequence
ggatataactcatggtgtggctaat

SEQ ID NO: 35406 - DNA, 25 bp, Probe Sequence
taggatataactcatggtgtggcta

SEQ ID NO: 35407 - DNA, 25 bp, Probe Sequence
atataactcatggtgtggctaatct

SEQ ID NO: 35408 - DNA, 25 bp, Probe Sequence
aggatataactcatggtgtggctaa

SEQ ID NO: 35409 - DNA, 25 bp, Probe Sequence
ttaggatataactcatggtgtggct

SEQ ID NO: 35410 - DNA, 25 bp, Probe Sequence
gatataactcatggtgtggctaatc

SEQ ID NO: 35411 - DNA, 25 bp, Probe Sequence
tataactcatggtgtggctaatcta

SEQ ID NO: 35412 - DNA, 25 bp, Probe Sequence
actagaactgtgtacttgattgatt

SEQ ID NO: 35413 - DNA, 25 bp, Probe Sequence
tcactagaactgtgtacttgattga

SEQ ID NO: 35414 - DNA, 25 bp, Probe Sequence
taactcatggtgtggctaatctaca

SEQ ID NO: 35415 - DNA, 25 bp, Probe Sequence
ttcactagaactgtgtacttgattg

SEQ ID NO: 35416 - DNA, 25 bp, Probe Sequence
tggttaggatataactcatggtgtg

SEQ ID NO: 35417 - DNA, 25 bp, Probe Sequence
ggttaggatataactcatggtgtgg

SEQ ID NO: 35418 - DNA, 25 bp, Probe Sequence
cactagaactgtgtacttgattgat

SEQ ID NO: 35419 - DNA, 25 bp, Probe Sequence
actcatggtgtggctaatctacatt

SEQ ID NO: 35420 - DNA, 25 bp, Probe Sequence
aactcatggtgtggctaatctacat

SEQ ID NO: 35421 - DNA, 25 bp, Probe Sequence
gttaggatataactcatggtgtggc

SEQ ID NO: 35422 - DNA, 25 bp, Probe Sequence
atggttaggatataactcatggtgt

SEQ ID NO: 35423 - DNA, 25 bp, Probe Sequence
cttctctgtaatctcagcttctcag

SEQ ID NO: 35424 - DNA, 25 bp, Probe Sequence
cacttctctgtaatctcagcttctc

SEQ ID NO: 35425 - DNA, 25 bp, Probe Sequence
acttctctgtaatctcagcttctca

SEQ ID NO: 35426 - DNA, 25 bp, Probe Sequence
tttaactatccagtcaactttcagc

SEQ ID NO: 35427 - DNA, 25 bp, Probe Sequence
tggtgtggctaatctacatttatca

SEQ ID NO: 35428 - DNA, 25 bp, Probe Sequence
ttcaccacattgtattacagagaca

SEQ ID NO: 35429 - DNA, 25 bp, Probe Sequence
tcaccacattgtattacagagacag

SEQ ID NO: 35430 - DNA, 25 bp, Probe Sequence
ttgcttctgttgtccactgattaat

SEQ ID NO: 35431 - DNA, 25 bp, Probe Sequence
aaggtggaagatgtcctgaattaag

SEQ ID NO: 35432 - DNA, 25 bp, Probe Sequence
caaggtggaagatgtcctgaattaa

SEQ ID NO: 35433 - DNA, 25 bp, Probe Sequence
ggtggaagatgtcctgaattaagac

SEQ ID NO: 35434 - DNA, 25 bp, Probe Sequence
aggtggaagatgtcctgaattaaga

SEQ ID NO: 35435 - DNA, 25 bp, Probe Sequence
caccacattgtattacagagacagc

SEQ ID NO: 35436 - DNA, 25 bp, Probe Sequence
gtggaagatgtcctgaattaagacg

SEQ ID NO: 35437 - DNA, 25 bp, Probe Sequence
aattggtggtaatgcagaagagaat

SEQ ID NO: 35438 - DNA, 25 bp, Probe Sequence
acaaggtggaagatgtcctgaatta

SEQ ID NO: 35439 - DNA, 25 bp, Probe Sequence
ttgattggtgaaattggtggtaatg

SEQ ID NO: 35440 - DNA, 25 bp, Probe Sequence
catattgattggtgaaattggtggt

SEQ ID NO: 35441 - DNA, 25 bp, Probe Sequence
attgattggtgaaattggtggtaat

SEQ ID NO: 35442 - DNA, 25 bp, Probe Sequence
gaagcaacataattcaggtccaaat

SEQ ID NO: 35443 - DNA, 25 bp, Probe Sequence
attggtggtaatgcagaagagaatg

SEQ ID NO: 35444 - DNA, 25 bp, Probe Sequence
tttgcttctgttgtccactgattaa

SEQ ID NO: 35445 - DNA, 25 bp, Probe Sequence
tagtgtccttcattgctggtttaac

SEQ ID NO: 35446 - DNA, 25 bp, Probe Sequence
gtagtgtccttcattgctggtttaa

SEQ ID NO: 35447 - DNA, 25 bp, Probe Sequence
tattgattggtgaaattggtggtaa

SEQ ID NO: 35448 - DNA, 25 bp, Probe Sequence
atattgattggtgaaattggtggta

SEQ ID NO: 35449 - DNA, 25 bp, Probe Sequence
aaagaggaagatgctatgaaagaaa

SEQ ID NO: 35450 - DNA, 25 bp, Probe Sequence
tcatattgattggtgaaattggtgg

SEQ ID NO: 35451 - DNA, 25 bp, Probe Sequence
gtttgcttctgttgtccactgatta

SEQ ID NO: 35452 - DNA, 25 bp, Probe Sequence
agttatcttctttctttcgtcgcag

SEQ ID NO: 35453 - DNA, 25 bp, Probe Sequence
cagttatcttctttctttcgtcgca

SEQ ID NO: 35454 - DNA, 25 bp, Probe Sequence
gttatcttctttctttcgtcgcagc

SEQ ID NO: 35455 - DNA, 25 bp, Probe Sequence
gcagttatcttctttctttcgtcgc

SEQ ID NO: 35456 - DNA, 25 bp, Probe Sequence
atgcagttatcttctttctttcgtc

SEQ ID NO: 35457 - DNA, 25 bp, Probe Sequence
aatgcagttatcttctttctttcgt

SEQ ID NO: 35458 - DNA, 25 bp, Probe Sequence
tgcagttatcttctttctttcgtcg

SEQ ID NO: 35459 - DNA, 25 bp, Probe Sequence
taatgcagttatcttctttctttcg

SEQ ID NO: 35460 - DNA, 25 bp, Probe Sequence
ttatcttctttctttcgtcgcagcc

SEQ ID NO: 35461 - DNA, 25 bp, Probe Sequence
tatcttctttctttcgtcgcagcca

SEQ ID NO: 35462 - DNA, 25 bp, Probe Sequence
ataatgcagttatcttctttctttc

SEQ ID NO: 35463 - DNA, 25 bp, Probe Sequence
gtaggttagatgctattaagaaggc

SEQ ID NO: 35464 - DNA, 25 bp, Probe Sequence
ggtaggttagatgctattaagaagg

SEQ ID NO: 35465 - DNA, 25 bp, Probe Sequence
tgaattaggtgtactgtactgaaga

SEQ ID NO: 35466 - DNA, 25 bp, Probe Sequence
aattaggtgtactgtactgaagaac

SEQ ID NO: 35467 - DNA, 25 bp, Probe Sequence
attaggtgtactgtactgaagaaca

SEQ ID NO: 35468 - DNA, 25 bp, Probe Sequence
atgaattaggtgtactgtactgaag

SEQ ID NO: 35469 - DNA, 25 bp, Probe Sequence
gaattaggtgtactgtactgaagaa

SEQ ID NO: 35470 - DNA, 25 bp, Probe Sequence
gcctgacaatatgaattaggtgtac

SEQ ID NO: 35471 - DNA, 25 bp, Probe Sequence
tcatgtaagatggcaactgtattaa

SEQ ID NO: 35472 - DNA, 25 bp, Probe Sequence
atcatgtaagatggcaactgtatta

SEQ ID NO: 35473 - DNA, 25 bp, Probe Sequence
agaaggcacttaatagtacatcatg

SEQ ID NO: 35474 - DNA, 25 bp, Probe Sequence
gaaggcacttaatagtacatcatgt

SEQ ID NO: 35475 - DNA, 25 bp, Probe Sequence
agaaagaaaggaaagaaggagatga

SEQ ID NO: 35476 - DNA, 25 bp, Probe Sequence
cacactttgatttccttaatagccc

SEQ ID NO: 35477 - DNA, 25 bp, Probe Sequence
acagaagggtaggttagatgctatt

SEQ ID NO: 35478 - DNA, 25 bp, Probe Sequence
acactttgatttccttaatagccca

SEQ ID NO: 35479 - DNA, 25 bp, Probe Sequence
ccgcacactttgatttccttaatag

SEQ ID NO: 35480 - DNA, 25 bp, Probe Sequence
cagaagggtaggttagatgctatta

SEQ ID NO: 35481 - DNA, 25 bp, Probe Sequence
cactttgatttccttaatagcccat

SEQ ID NO: 35482 - DNA, 25 bp, Probe Sequence
gcacactttgatttccttaatagcc

SEQ ID NO: 35483 - DNA, 25 bp, Probe Sequence
atatgtggtttggatgtgtgcttta

SEQ ID NO: 35484 - DNA, 25 bp, Probe Sequence
tatatgtggtttggatgtgtgcttt

SEQ ID NO: 35485 - DNA, 25 bp, Probe Sequence
gaaagaaaggaaagaaggagatgaa

SEQ ID NO: 35486 - DNA, 25 bp, Probe Sequence
aagaaagaaaggaaagaaggagatg

SEQ ID NO: 35487 - DNA, 25 bp, Probe Sequence
gttgaattatactattggcgaggtt

SEQ ID NO: 35488 - DNA, 25 bp, Probe Sequence
tgaattatactattggcgaggttcc

SEQ ID NO: 35489 - DNA, 25 bp, Probe Sequence
ttgatattgtctctggaactcgcta

SEQ ID NO: 35490 - DNA, 25 bp, Probe Sequence
ttgaattatactattggcgaggttc

SEQ ID NO: 35491 - DNA, 25 bp, Probe Sequence
agttgaattatactattggcgaggt

SEQ ID NO: 35492 - DNA, 25 bp, Probe Sequence
cagttgaattatactattggcgagg

SEQ ID NO: 35493 - DNA, 25 bp, Probe Sequence
acagttgaattatactattggcgag

SEQ ID NO: 35494 - DNA, 25 bp, Probe Sequence
gacagttgaattatactattggcga

SEQ ID NO: 35495 - DNA, 25 bp, Probe Sequence
agacagttgaattatactattggcg

SEQ ID NO: 35496 - DNA, 25 bp, Probe Sequence
tgatattgtctctggaactcgctac

SEQ ID NO: 35497 - DNA, 25 bp, Probe Sequence
tattatggatgctgatctctcacac

SEQ ID NO: 35498 - DNA, 25 bp, Probe Sequence
ttattatggatgctgatctctcaca

SEQ ID NO: 35499 - DNA, 25 bp, Probe Sequence
gaattatactattggcgaggttcca

SEQ ID NO: 35500 - DNA, 25 bp, Probe Sequence
gatattgtctctggaactcgctaca

SEQ ID NO: 35501 - DNA, 25 bp, Probe Sequence
attattatggatgctgatctctcac

SEQ ID NO: 35502 - DNA, 25 bp, Probe Sequence
cattattatggatgctgatctctca

SEQ ID NO: 35503 - DNA, 25 bp, Probe Sequence
tcattattatggatgctgatctctc

SEQ ID NO: 35504 - DNA, 25 bp, Probe Sequence
aagaagcctggttactgatttgtat

SEQ ID NO: 35505 - DNA, 25 bp, Probe Sequence
aaagaagcctggttactgatttgta

SEQ ID NO: 35506 - DNA, 25 bp, Probe Sequence
tgccacaggaaactacatcattatt

SEQ ID NO: 35507 - DNA, 25 bp, Probe Sequence
atgaaagaagcctggttactgattt

SEQ ID NO: 35508 - DNA, 25 bp, Probe Sequence
agaagcctggttactgatttgtata

SEQ ID NO: 35509 - DNA, 25 bp, Probe Sequence
acaggaagtttcagattataccgaa

SEQ ID NO: 35510 - DNA, 25 bp, Probe Sequence
atgccacaggaaactacatcattat

SEQ ID NO: 35511 - DNA, 25 bp, Probe Sequence
aagattgctattgtcgtactcacct

SEQ ID NO: 35512 - DNA, 25 bp, Probe Sequence
agattgctattgtcgtactcacctc

SEQ ID NO: 35513 - DNA, 25 bp, Probe Sequence
gtgctaaagaaagatgaagacctct

SEQ ID NO: 35514 - DNA, 25 bp, Probe Sequence
tctggtgctaaagaaagatgaagac

SEQ ID NO: 35515 - DNA, 25 bp, Probe Sequence
gaaagttctagtggcttgaggtatc

SEQ ID NO: 35516 - DNA, 25 bp, Probe Sequence
cctcaactctatagctctaactggc

SEQ ID NO: 35517 - DNA, 25 bp, Probe Sequence
gcctcaactctatagctctaactgg

SEQ ID NO: 35518 - DNA, 25 bp, Probe Sequence
gattgctattgtcgtactcacctcc

SEQ ID NO: 35519 - DNA, 25 bp, Probe Sequence
aaagattgctattgtcgtactcacc

SEQ ID NO: 35520 - DNA, 25 bp, Probe Sequence
agaaagttctagtggcttgaggtat

SEQ ID NO: 35521 - DNA, 25 bp, Probe Sequence
cgcctcaactctatagctctaactg

SEQ ID NO: 35522 - DNA, 25 bp, Probe Sequence
aagaaagttctagtggcttgaggta

SEQ ID NO: 35523 - DNA, 25 bp, Probe Sequence
aaagttctagtggcttgaggtatcc

SEQ ID NO: 35524 - DNA, 25 bp, Probe Sequence
tttagatcaataaagtcagtggctt

SEQ ID NO: 35525 - DNA, 25 bp, Probe Sequence
aagtggaagaaagttctagtggctt

SEQ ID NO: 35526 - DNA, 25 bp, Probe Sequence
ctcaactctatagctctaactggct

SEQ ID NO: 35527 - DNA, 25 bp, Probe Sequence
ggtgctaaagaaagatgaagacctc

SEQ ID NO: 35528 - DNA, 25 bp, Probe Sequence
gaagaaagttctagtggcttgaggt

SEQ ID NO: 35529 - DNA, 25 bp, Probe Sequence
tggaagaaagttctagtggcttgag

SEQ ID NO: 35530 - DNA, 25 bp, Probe Sequence
gaagtggaagaaagttctagtggct

SEQ ID NO: 35531 - DNA, 25 bp, Probe Sequence
aagttctagtggcttgaggtatccg

SEQ ID NO: 35532 - DNA, 25 bp, Probe Sequence
atcaataaagtcagtggctttcaaa

SEQ ID NO: 35533 - DNA, 25 bp, Probe Sequence
gattaagcctgatcaagatgacaac

SEQ ID NO: 35534 - DNA, 25 bp, Probe Sequence
ctggtgctaaagaaagatgaagacc

SEQ ID NO: 35535 - DNA, 25 bp, Probe Sequence
cgtggaattgagactaataacttgg

SEQ ID NO: 35536 - DNA, 25 bp, Probe Sequence
taccaaccagaccaggacttaataa

SEQ ID NO: 35537 - DNA, 25 bp, Probe Sequence
ctaccaaccagaccaggacttaata

SEQ ID NO: 35538 - DNA, 25 bp, Probe Sequence
tactcagtgaagaatgacaagaaca

SEQ ID NO: 35539 - DNA, 25 bp, Probe Sequence
actcagtgaagaatgacaagaacaa

SEQ ID NO: 35540 - DNA, 25 bp, Probe Sequence
ctactcagtgaagaatgacaagaac

SEQ ID NO: 35541 - DNA, 25 bp, Probe Sequence
tctactcagtgaagaatgacaagaa

SEQ ID NO: 35542 - DNA, 25 bp, Probe Sequence
atctactcagtgaagaatgacaaga

SEQ ID NO: 35543 - DNA, 25 bp, Probe Sequence
catctactcagtgaagaatgacaag

SEQ ID NO: 35544 - DNA, 25 bp, Probe Sequence
gtggaattgagactaataacttgga

SEQ ID NO: 35545 - DNA, 25 bp, Probe Sequence
tggaattgagactaataacttggat

SEQ ID NO: 35546 - DNA, 25 bp, Probe Sequence
ggaattgagactaataacttggatg

SEQ ID NO: 35547 - DNA, 25 bp, Probe Sequence
ggagacgtggaattgagactaataa

SEQ ID NO: 35548 - DNA, 25 bp, Probe Sequence
agacgtggaattgagactaataact

SEQ ID NO: 35549 - DNA, 25 bp, Probe Sequence
gagacgtggaattgagactaataac

SEQ ID NO: 35550 - DNA, 25 bp, Probe Sequence
aggagacgtggaattgagactaata

SEQ ID NO: 35551 - DNA, 25 bp, Probe Sequence
taggagacgtggaattgagactaat

SEQ ID NO: 35552 - DNA, 25 bp, Probe Sequence
acgtggaattgagactaataacttg

SEQ ID NO: 35553 - DNA, 25 bp, Probe Sequence
gacgtggaattgagactaataactt

SEQ ID NO: 35554 - DNA, 25 bp, Probe Sequence
ctaggagacgtggaattgagactaa

SEQ ID NO: 35555 - DNA, 25 bp, Probe Sequence
ctcagtgaagaatgacaagaacaaa

SEQ ID NO: 35556 - DNA, 25 bp, Probe Sequence
gaattgagactaataacttggatgt

SEQ ID NO: 35557 - DNA, 25 bp, Probe Sequence
tcatctactcagtgaagaatgacaa

SEQ ID NO: 35558 - DNA, 25 bp, Probe Sequence
actaggagacgtggaattgagacta

SEQ ID NO: 35559 - DNA, 25 bp, Probe Sequence
tgatgatgatatagaattgtggctt

SEQ ID NO: 35560 - DNA, 25 bp, Probe Sequence
cacatccaagacaggcaataatgag

SEQ ID NO: 35561 - DNA, 25 bp, Probe Sequence
atgatgatgatatagaattgtggct

SEQ ID NO: 35562 - DNA, 25 bp, Probe Sequence
tagcattctctgtctcctctctctc

SEQ ID NO: 35563 - DNA, 25 bp, Probe Sequence
gatgatgatgatatagaattgtggc

SEQ ID NO: 35564 - DNA, 25 bp, Probe Sequence
aagacaggcaataatgagcagagtt

SEQ ID NO: 35565 - DNA, 25 bp, Probe Sequence
tattagctgtagcattctctgtctc

SEQ ID NO: 35566 - DNA, 25 bp, Probe Sequence
ttattagctgtagcattctctgtct

SEQ ID NO: 35567 - DNA, 25 bp, Probe Sequence
gtagcattctctgtctcctctctct

SEQ ID NO: 35568 - DNA, 25 bp, Probe Sequence
agttgcctttgtatctctgtatgaa

SEQ ID NO: 35569 - DNA, 25 bp, Probe Sequence
tgtagcattctctgtctcctctctc

SEQ ID NO: 35570 - DNA, 25 bp, Probe Sequence
ctgtagcattctctgtctcctctct

SEQ ID NO: 35571 - DNA, 25 bp, Probe Sequence
gttgcctttgtatctctgtatgaaa

SEQ ID NO: 35572 - DNA, 25 bp, Probe Sequence
tagttgcctttgtatctctgtatga

SEQ ID NO: 35573 - DNA, 25 bp, Probe Sequence
cattctctgtctcctctctctcctc

SEQ ID NO: 35574 - DNA, 25 bp, Probe Sequence
aggcaataatgagcagagtttacag

SEQ ID NO: 35575 - DNA, 25 bp, Probe Sequence
gacaggcaataatgagcagagttta

SEQ ID NO: 35576 - DNA, 25 bp, Probe Sequence
attagctgtagcattctctgtctcc

SEQ ID NO: 35577 - DNA, 25 bp, Probe Sequence
caggcaataatgagcagagtttaca

SEQ ID NO: 35578 - DNA, 25 bp, Probe Sequence
acaggcaataatgagcagagtttac

SEQ ID NO: 35579 - DNA, 25 bp, Probe Sequence
caagacaggcaataatgagcagagt

SEQ ID NO: 35580 - DNA, 25 bp, Probe Sequence
atccaagacaggcaataatgagcag

SEQ ID NO: 35581 - DNA, 25 bp, Probe Sequence
ccacatccaagacaggcaataatga

SEQ ID NO: 35582 - DNA, 25 bp, Probe Sequence
ttgcctttgtatctctgtatgaaat

SEQ ID NO: 35583 - DNA, 25 bp, Probe Sequence
aattgatgatgaatacgaggtggac

SEQ ID NO: 35584 - DNA, 25 bp, Probe Sequence
tgagagagaaggatatgaagatgaa

SEQ ID NO: 35585 - DNA, 25 bp, Probe Sequence
attgatgatgaatacgaggtggact

SEQ ID NO: 35586 - DNA, 25 bp, Probe Sequence
atgagagagaaggatatgaagatga

SEQ ID NO: 35587 - DNA, 25 bp, Probe Sequence
ttgatgatgaatacgaggtggactg

SEQ ID NO: 35588 - DNA, 25 bp, Probe Sequence
acatgagagagaaggatatgaagat

SEQ ID NO: 35589 - DNA, 25 bp, Probe Sequence
catgagagagaaggatatgaagatg

SEQ ID NO: 35590 - DNA, 25 bp, Probe Sequence
tacatgagagagaaggatatgaaga

SEQ ID NO: 35591 - DNA, 25 bp, Probe Sequence
gaaattgatgatgaatacgaggtgg

SEQ ID NO: 35592 - DNA, 25 bp, Probe Sequence
aaattgatgatgaatacgaggtgga

SEQ ID NO: 35593 - DNA, 25 bp, Probe Sequence
tgaaattgatgatgaatacgaggtg

SEQ ID NO: 35594 - DNA, 25 bp, Probe Sequence
atgaaattgatgatgaatacgaggt

SEQ ID NO: 35595 - DNA, 25 bp, Probe Sequence
ccagaaatacatgagagagaaggat

SEQ ID NO: 35596 - DNA, 25 bp, Probe Sequence
atcccagaaatacatgagagagaag

SEQ ID NO: 35597 - DNA, 25 bp, Probe Sequence
gatgaaattgatgatgaatacgagg

SEQ ID NO: 35598 - DNA, 25 bp, Probe Sequence
atacatgagagagaaggatatgaag

SEQ ID NO: 35599 - DNA, 25 bp, Probe Sequence
catcccagaaatacatgagagagaa

SEQ ID NO: 35600 - DNA, 25 bp, Probe Sequence
gacatcccagaaatacatgagagag

SEQ ID NO: 35601 - DNA, 25 bp, Probe Sequence
acatcccagaaatacatgagagaga

SEQ ID NO: 35602 - DNA, 25 bp, Probe Sequence
cccagaaatacatgagagagaagga

SEQ ID NO: 35603 - DNA, 25 bp, Probe Sequence
tcccagaaatacatgagagagaagg

SEQ ID NO: 35604 - DNA, 25 bp, Probe Sequence
atgatgaatacgaggtggactggag

SEQ ID NO: 35605 - DNA, 25 bp, Probe Sequence
gatgatgaatacgaggtggactgga

SEQ ID NO: 35606 - DNA, 25 bp, Probe Sequence
gagagagaaggatatgaagatgaaa

SEQ ID NO: 35607 - DNA, 25 bp, Probe Sequence
cactgagattaagaagattcctggt

SEQ ID NO: 35608 - DNA, 25 bp, Probe Sequence
tggtcactgagattaagaagattcc

SEQ ID NO: 35609 - DNA, 25 bp, Probe Sequence
tcactgagattaagaagattcctgg

SEQ ID NO: 35610 - DNA, 25 bp, Probe Sequence
ggtcactgagattaagaagattcct

SEQ ID NO: 35611 - DNA, 25 bp, Probe Sequence
agagtaatatgtgctgaagaacctt

SEQ ID NO: 35612 - DNA, 25 bp, Probe Sequence
aagatggtcactgagattaagaaga

SEQ ID NO: 35613 - DNA, 25 bp, Probe Sequence
gtcactgagattaagaagattcctg

SEQ ID NO: 35614 - DNA, 25 bp, Probe Sequence
agatggtcactgagattaagaagat

SEQ ID NO: 35615 - DNA, 25 bp, Probe Sequence
actgagattaagaagattcctggta

SEQ ID NO: 35616 - DNA, 25 bp, Probe Sequence
atggtcactgagattaagaagattc

SEQ ID NO: 35617 - DNA, 25 bp, Probe Sequence
gatggtcactgagattaagaagatt

SEQ ID NO: 35618 - DNA, 25 bp, Probe Sequence
aagaacctcctacagatgttactcc

SEQ ID NO: 35619 - DNA, 25 bp, Probe Sequence
gagtaatatgtgctgaagaacctta

SEQ ID NO: 35620 - DNA, 25 bp, Probe Sequence
cagagtaatatgtgctgaagaacct

SEQ ID NO: 35621 - DNA, 25 bp, Probe Sequence
atatgaccacaagtcctgaagagaa

SEQ ID NO: 35622 - DNA, 25 bp, Probe Sequence
aatatgaccacaagtcctgaagaga

SEQ ID NO: 35623 - DNA, 25 bp, Probe Sequence
agtaatatgtgctgaagaaccttat

SEQ ID NO: 35624 - DNA, 25 bp, Probe Sequence
ctgagattaagaagattcctggtat

SEQ ID NO: 35625 - DNA, 25 bp, Probe Sequence
accaatatcagatgaagatagaacc

SEQ ID NO: 35626 - DNA, 25 bp, Probe Sequence
aacaacaaccctaccaatatcagat

SEQ ID NO: 35627 - DNA, 25 bp, Probe Sequence
ataccctattacagagagtcaaagc

SEQ ID NO: 35628 - DNA, 25 bp, Probe Sequence
tgttaagattgccaatgaagtaatt

SEQ ID NO: 35629 - DNA, 25 bp, Probe Sequence
ttgaaccaagaacaagtcattgctg

SEQ ID NO: 35630 - DNA, 25 bp, Probe Sequence
tgagattaagaagattcctggtatt

SEQ ID NO: 35631 - DNA, 25 bp, Probe Sequence
gctgattagtggagagtgcttatta

SEQ ID NO: 35632 - DNA, 25 bp, Probe Sequence
gatactatattgctgcgtcctatgt

SEQ ID NO: 35633 - DNA, 25 bp, Probe Sequence
agatactatattgctgcgtcctatg

SEQ ID NO: 35634 - DNA, 25 bp, Probe Sequence
gaagatactatattgctgcgtccta

SEQ ID NO: 35635 - DNA, 25 bp, Probe Sequence
tatggaagatactatattgctgcgt

SEQ ID NO: 35636 - DNA, 25 bp, Probe Sequence
atggaagatactatattgctgcgtc

SEQ ID NO: 35637 - DNA, 25 bp, Probe Sequence
aagatactatattgctgcgtcctat

SEQ ID NO: 35638 - DNA, 25 bp, Probe Sequence
tactatattgctgcgtcctatgtaa

SEQ ID NO: 35639 - DNA, 25 bp, Probe Sequence
ctatggaagatactatattgctgcg

SEQ ID NO: 35640 - DNA, 25 bp, Probe Sequence
atactatattgctgcgtcctatgta

SEQ ID NO: 35641 - DNA, 25 bp, Probe Sequence
gcaagattaggaagtcacagattct

SEQ ID NO: 35642 - DNA, 25 bp, Probe Sequence
cctggctctgattcttcattatgta

SEQ ID NO: 35643 - DNA, 25 bp, Probe Sequence
ttagtggagagtgcttattaactgc

SEQ ID NO: 35644 - DNA, 25 bp, Probe Sequence
ggcaagattaggaagtcacagattc

SEQ ID NO: 35645 - DNA, 25 bp, Probe Sequence
atggcaagattaggaagtcacagat

SEQ ID NO: 35646 - DNA, 25 bp, Probe Sequence
tgattagtggagagtgcttattaac

SEQ ID NO: 35647 - DNA, 25 bp, Probe Sequence
tgctgattagtggagagtgcttatt

SEQ ID NO: 35648 - DNA, 25 bp, Probe Sequence
tggcaagattaggaagtcacagatt

SEQ ID NO: 35649 - DNA, 25 bp, Probe Sequence
actatggaagatactatattgctgc

SEQ ID NO: 35650 - DNA, 25 bp, Probe Sequence
ggctctgattcttcattatgtatgt

SEQ ID NO: 35651 - DNA, 25 bp, Probe Sequence
tggctctgattcttcattatgtatg

SEQ ID NO: 35652 - DNA, 25 bp, Probe Sequence
ctgattagtggagagtgcttattaa

SEQ ID NO: 35653 - DNA, 25 bp, Probe Sequence
cctactgagttgttgctgtcattag

SEQ ID NO: 35654 - DNA, 25 bp, Probe Sequence
ctgctgattagtggagagtgcttat

SEQ ID NO: 35655 - DNA, 25 bp, Probe Sequence
tattcagaactatgtggtgtcagag

SEQ ID NO: 35656 - DNA, 25 bp, Probe Sequence
ttattcagaactatgtggtgtcaga

SEQ ID NO: 35657 - DNA, 25 bp, Probe Sequence
attcagaactatgtggtgtcagagg

SEQ ID NO: 35658 - DNA, 25 bp, Probe Sequence
catgtatgattggaacagcagagtt

SEQ ID NO: 35659 - DNA, 25 bp, Probe Sequence
cctctcctacacataagaaaccaaa

SEQ ID NO: 35660 - DNA, 25 bp, Probe Sequence
atcctctcctacacataagaaacca

SEQ ID NO: 35661 - DNA, 25 bp, Probe Sequence
gcacactctgagaaagaaacttatc

SEQ ID NO: 35662 - DNA, 25 bp, Probe Sequence
agcacactctgagaaagaaacttat

SEQ ID NO: 35663 - DNA, 25 bp, Probe Sequence
tttattcagaactatgtggtgtcag

SEQ ID NO: 35664 - DNA, 25 bp, Probe Sequence
tcctctcctacacataagaaaccaa

SEQ ID NO: 35665 - DNA, 25 bp, Probe Sequence
cacactctgagaaagaaacttatcc

SEQ ID NO: 35666 - DNA, 25 bp, Probe Sequence
tatcctctcctacacataagaaacc

SEQ ID NO: 35667 - DNA, 25 bp, Probe Sequence
aaagaaacttatcctctcctacaca

SEQ ID NO: 35668 - DNA, 25 bp, Probe Sequence
acactctgagaaagaaacttatcct

SEQ ID NO: 35669 - DNA, 25 bp, Probe Sequence
gtatgattggaacagcagagtttct

SEQ ID NO: 35670 - DNA, 25 bp, Probe Sequence
aagaaacttatcctctcctacacat

SEQ ID NO: 35671 - DNA, 25 bp, Probe Sequence
gaaagaaacttatcctctcctacac

SEQ ID NO: 35672 - DNA, 25 bp, Probe Sequence
agaaagaaacttatcctctcctaca

SEQ ID NO: 35673 - DNA, 25 bp, Probe Sequence
atgtatgattggaacagcagagttt

SEQ ID NO: 35674 - DNA, 25 bp, Probe Sequence
cactctgagaaagaaacttatcctc

SEQ ID NO: 35675 - DNA, 25 bp, Probe Sequence
actctgagaaagaaacttatcctct

SEQ ID NO: 35676 - DNA, 25 bp, Probe Sequence
agaaacttatcctctcctacacata

SEQ ID NO: 35677 - DNA, 25 bp, Probe Sequence
cagcacactctgagaaagaaactta

SEQ ID NO: 35678 - DNA, 25 bp, Probe Sequence
tgtatgattggaacagcagagtttc

SEQ ID NO: 35679 - DNA, 25 bp, Probe Sequence
ggaccattagatacaacacctgaag

SEQ ID NO: 35680 - DNA, 25 bp, Probe Sequence
ccattagatacaacacctgaaggaa

SEQ ID NO: 35681 - DNA, 25 bp, Probe Sequence
cattagatacaacacctgaaggaag

SEQ ID NO: 35682 - DNA, 25 bp, Probe Sequence
gaccattagatacaacacctgaagg

SEQ ID NO: 35683 - DNA, 25 bp, Probe Sequence
accattagatacaacacctgaagga

SEQ ID NO: 35684 - DNA, 25 bp, Probe Sequence
tggaccattagatacaacacctgaa

SEQ ID NO: 35685 - DNA, 25 bp, Probe Sequence
ctggaccattagatacaacacctga

SEQ ID NO: 35686 - DNA, 25 bp, Probe Sequence
attagatacaacacctgaaggaagg

SEQ ID NO: 35687 - DNA, 25 bp, Probe Sequence
actggaccattagatacaacacctg

SEQ ID NO: 35688 - DNA, 25 bp, Probe Sequence
cactggaccattagatacaacacct

SEQ ID NO: 35689 - DNA, 25 bp, Probe Sequence
cgaaggcaggttattagaagagtcc

SEQ ID NO: 35690 - DNA, 25 bp, Probe Sequence
ttagatacaacacctgaaggaaggc

SEQ ID NO: 35691 - DNA, 25 bp, Probe Sequence
gcgaaggcaggttattagaagagtc

SEQ ID NO: 35692 - DNA, 25 bp, Probe Sequence
tattagaagagtcccatgaaaggtg

SEQ ID NO: 35693 - DNA, 25 bp, Probe Sequence
caggttattagaagagtcccatgaa

SEQ ID NO: 35694 - DNA, 25 bp, Probe Sequence
ttattagaagagtcccatgaaaggt

SEQ ID NO: 35695 - DNA, 25 bp, Probe Sequence
aggttattagaagagtcccatgaaa

SEQ ID NO: 35696 - DNA, 25 bp, Probe Sequence
gcactggaccattagatacaacacc

SEQ ID NO: 35697 - DNA, 25 bp, Probe Sequence
ggcactggaccattagatacaacac

SEQ ID NO: 35698 - DNA, 25 bp, Probe Sequence
gttattagaagagtcccatgaaagg

SEQ ID NO: 35699 - DNA, 25 bp, Probe Sequence
ggttattagaagagtcccatgaaag

SEQ ID NO: 35700 - DNA, 25 bp, Probe Sequence
gaaggcaggttattagaagagtccc

SEQ ID NO: 35701 - DNA, 25 bp, Probe Sequence
gcaggttattagaagagtcccatga

SEQ ID NO: 35702 - DNA, 25 bp, Probe Sequence
aggcaggttattagaagagtcccat

SEQ ID NO: 35703 - DNA, 25 bp, Probe Sequence
gatgaagagaaggcacacagagatt

SEQ ID NO: 35704 - DNA, 25 bp, Probe Sequence
atgaagagaaggcacacagagattc

SEQ ID NO: 35705 - DNA, 25 bp, Probe Sequence
tacacacacagcctatatcaaacat

SEQ ID NO: 35706 - DNA, 25 bp, Probe Sequence
ccatgcagaacaccaatattaacac

SEQ ID NO: 35707 - DNA, 25 bp, Probe Sequence
caccatgcagaacaccaatattaac

SEQ ID NO: 35708 - DNA, 25 bp, Probe Sequence
ctacacacacagcctatatcaaaca

SEQ ID NO: 35709 - DNA, 25 bp, Probe Sequence
accatgcagaacaccaatattaaca

SEQ ID NO: 35710 - DNA, 25 bp, Probe Sequence
catgcagaacaccaatattaacacg

SEQ ID NO: 35711 - DNA, 25 bp, Probe Sequence
cctacacacacagcctatatcaaac

SEQ ID NO: 35712 - DNA, 25 bp, Probe Sequence
ccaccatgcagaacaccaatattaa

SEQ ID NO: 35713 - DNA, 25 bp, Probe Sequence
taggatgaagagaaggcacacagag

SEQ ID NO: 35714 - DNA, 25 bp, Probe Sequence
tgcctacacacacagcctatatcaa

SEQ ID NO: 35715 - DNA, 25 bp, Probe Sequence
tccaccatgcagaacaccaatatta

SEQ ID NO: 35716 - DNA, 25 bp, Probe Sequence
acacacacagcctatatcaaacatg

SEQ ID NO: 35717 - DNA, 25 bp, Probe Sequence
atgcagaacaccaatattaacacgc

SEQ ID NO: 35718 - DNA, 25 bp, Probe Sequence
gtaggatgaagagaaggcacacaga

SEQ ID NO: 35719 - DNA, 25 bp, Probe Sequence
gcctacacacacagcctatatcaaa

SEQ ID NO: 35720 - DNA, 25 bp, Probe Sequence
gttcctgaatacaagcctatgcgtg

SEQ ID NO: 35721 - DNA, 25 bp, Probe Sequence
aattgttcctgaatacaagcctatg

SEQ ID NO: 35722 - DNA, 25 bp, Probe Sequence
tcctgaatacaagcctatgcgtgaa

SEQ ID NO: 35723 - DNA, 25 bp, Probe Sequence
ggatgaagagaaggcacacagagat

SEQ ID NO: 35724 - DNA, 25 bp, Probe Sequence
ttcctgaatacaagcctatgcgtga

SEQ ID NO: 35725 - DNA, 25 bp, Probe Sequence
cagaacaccaatattaacacgctgc

SEQ ID NO: 35726 - DNA, 25 bp, Probe Sequence
gcagaacaccaatattaacacgctg

SEQ ID NO: 35727 - DNA, 25 bp, Probe Sequence
ggatggagatacagacaaggatagc

SEQ ID NO: 35728 - DNA, 25 bp, Probe Sequence
cattgatgaccagagttacaagcac

SEQ ID NO: 35729 - DNA, 25 bp, Probe Sequence
gatggagatacagacaaggatagct

SEQ ID NO: 35730 - DNA, 25 bp, Probe Sequence
attagggatggagatacagacaagg

SEQ ID NO: 35731 - DNA, 25 bp, Probe Sequence
tattagggatggagatacagacaag

SEQ ID NO: 35732 - DNA, 25 bp, Probe Sequence
ctattagggatggagatacagacaa

SEQ ID NO: 35733 - DNA, 25 bp, Probe Sequence
gggatggagatacagacaaggatag

SEQ ID NO: 35734 - DNA, 25 bp, Probe Sequence
agggatggagatacagacaaggata

SEQ ID NO: 35735 - DNA, 25 bp, Probe Sequence
tagggatggagatacagacaaggat

SEQ ID NO: 35736 - DNA, 25 bp, Probe Sequence
attgatgaccagagttacaagcacc

SEQ ID NO: 35737 - DNA, 25 bp, Probe Sequence
ttagggatggagatacagacaagga

SEQ ID NO: 35738 - DNA, 25 bp, Probe Sequence
atggcattgatgaccagagttacaa

SEQ ID NO: 35739 - DNA, 25 bp, Probe Sequence
atggagatacagacaaggatagcta

SEQ ID NO: 35740 - DNA, 25 bp, Probe Sequence
gcattgatgaccagagttacaagca

SEQ ID NO: 35741 - DNA, 25 bp, Probe Sequence
cctattagggatggagatacagaca

SEQ ID NO: 35742 - DNA, 25 bp, Probe Sequence
acctattagggatggagatacagac

SEQ ID NO: 35743 - DNA, 25 bp, Probe Sequence
gatggcattgatgaccagagttaca

SEQ ID NO: 35744 - DNA, 25 bp, Probe Sequence
tacctattagggatggagatacaga

SEQ ID NO: 35745 - DNA, 25 bp, Probe Sequence
gtacctattagggatggagatacag

SEQ ID NO: 35746 - DNA, 25 bp, Probe Sequence
tgatgaccagagttacaagcacctt

SEQ ID NO: 35747 - DNA, 25 bp, Probe Sequence
tggcattgatgaccagagttacaag

SEQ ID NO: 35748 - DNA, 25 bp, Probe Sequence
ttgatgaccagagttacaagcacct

SEQ ID NO: 35749 - DNA, 25 bp, Probe Sequence
gatgaccagagttacaagcaccttt

SEQ ID NO: 35750 - DNA, 25 bp, Probe Sequence
ggatggcattgatgaccagagttac

SEQ ID NO: 35751 - DNA, 25 bp, Probe Sequence
catatcaacattagaactccagtcc

SEQ ID NO: 35752 - DNA, 25 bp, Probe Sequence
gtggtagtagaggattaggttgtct

SEQ ID NO: 35753 - DNA, 25 bp, Probe Sequence
ggtggtagtagaggattaggttgtc

SEQ ID NO: 35754 - DNA, 25 bp, Probe Sequence
tcatatcaacattagaactccagtc

SEQ ID NO: 35755 - DNA, 25 bp, Probe Sequence
gactaagagtaactgtgtgatctgt

SEQ ID NO: 35756 - DNA, 25 bp, Probe Sequence
agactaagagtaactgtgtgatctg

SEQ ID NO: 35757 - DNA, 25 bp, Probe Sequence
actaagagtaactgtgtgatctgtt

SEQ ID NO: 35758 - DNA, 25 bp, Probe Sequence
aactaatctgtcaggttcactggta

SEQ ID NO: 35759 - DNA, 25 bp, Probe Sequence
cagactaagagtaactgtgtgatct

SEQ ID NO: 35760 - DNA, 25 bp, Probe Sequence
tggtagtagaggattaggttgtcta

SEQ ID NO: 35761 - DNA, 25 bp, Probe Sequence
ttcatatcaacattagaactccagt

SEQ ID NO: 35762 - DNA, 25 bp, Probe Sequence
tgaacttgactgtcatacctctatt

SEQ ID NO: 35763 - DNA, 25 bp, Probe Sequence
taatactccaacaggaatggtagtc

SEQ ID NO: 35764 - DNA, 25 bp, Probe Sequence
atctgtcaggttcactggtacataa

SEQ ID NO: 35765 - DNA, 25 bp, Probe Sequence
aatctgtcaggttcactggtacata

SEQ ID NO: 35766 - DNA, 25 bp, Probe Sequence
taatctgtcaggttcactggtacat

SEQ ID NO: 35767 - DNA, 25 bp, Probe Sequence
agagtaactgtgtgatctgttaagg

SEQ ID NO: 35768 - DNA, 25 bp, Probe Sequence
attgcgagggtaagattcatagtag

SEQ ID NO: 35769 - DNA, 25 bp, Probe Sequence
cctttcttagttatttgctccttgc

SEQ ID NO: 35770 - DNA, 25 bp, Probe Sequence
aatactccaacaggaatggtagtca

SEQ ID NO: 35771 - DNA, 25 bp, Probe Sequence
ataatactccaacaggaatggtagt

SEQ ID NO: 35772 - DNA, 25 bp, Probe Sequence
ggaatggtagtcacactgtcttgaa

SEQ ID NO: 35773 - DNA, 25 bp, Probe Sequence
ttaacgaccctgctaatatcctttc

SEQ ID NO: 35774 - DNA, 25 bp, Probe Sequence
atatcaacattagaactccagtccc

SEQ ID NO: 35775 - DNA, 25 bp, Probe Sequence
tctatgaagaagcaagagaagtgtt

SEQ ID NO: 35776 - DNA, 25 bp, Probe Sequence
aatctgtgtctatgaagaagcaaga

SEQ ID NO: 35777 - DNA, 25 bp, Probe Sequence
atctgtgtctatgaagaagcaagag

SEQ ID NO: 35778 - DNA, 25 bp, Probe Sequence
gtctatgaagaagcaagagaagtgt

SEQ ID NO: 35779 - DNA, 25 bp, Probe Sequence
tgtctatgaagaagcaagagaagtg

SEQ ID NO: 35780 - DNA, 25 bp, Probe Sequence
gtgtctatgaagaagcaagagaagt

SEQ ID NO: 35781 - DNA, 25 bp, Probe Sequence
tgtgtctatgaagaagcaagagaag

SEQ ID NO: 35782 - DNA, 25 bp, Probe Sequence
ctgtgtctatgaagaagcaagagaa

SEQ ID NO: 35783 - DNA, 25 bp, Probe Sequence
tctgtgtctatgaagaagcaagaga

SEQ ID NO: 35784 - DNA, 25 bp, Probe Sequence
aagacttctgtggtggtgttataat

SEQ ID NO: 35785 - DNA, 25 bp, Probe Sequence
acttctgtggtggtgttataatacg

SEQ ID NO: 35786 - DNA, 25 bp, Probe Sequence
gacttctgtggtggtgttataatac

SEQ ID NO: 35787 - DNA, 25 bp, Probe Sequence
agacttctgtggtggtgttataata

SEQ ID NO: 35788 - DNA, 25 bp, Probe Sequence
cttctgtggtggtgttataatacgg

SEQ ID NO: 35789 - DNA, 25 bp, Probe Sequence
ctatgaagaagcaagagaagtgttt

SEQ ID NO: 35790 - DNA, 25 bp, Probe Sequence
agaaatctgtgtctatgaagaagca

SEQ ID NO: 35791 - DNA, 25 bp, Probe Sequence
gaaatctgtgtctatgaagaagcaa

SEQ ID NO: 35792 - DNA, 25 bp, Probe Sequence
tccctggaactctttatctcaatag

SEQ ID NO: 35793 - DNA, 25 bp, Probe Sequence
ccctggaactctttatctcaataga

SEQ ID NO: 35794 - DNA, 25 bp, Probe Sequence
gaagaagcaagagaagtgtttgaaa

SEQ ID NO: 35795 - DNA, 25 bp, Probe Sequence
aaatctgtgtctatgaagaagcaag

SEQ ID NO: 35796 - DNA, 25 bp, Probe Sequence
tatgaagaagcaagagaagtgtttg

SEQ ID NO: 35797 - DNA, 25 bp, Probe Sequence
aagaaatctgtgtctatgaagaagc

SEQ ID NO: 35798 - DNA, 25 bp, Probe Sequence
atgaagaagcaagagaagtgtttga

SEQ ID NO: 35799 - DNA, 25 bp, Probe Sequence
caaataaaattgatttactgtctgc

SEQ ID NO: 35800 - DNA, 25 bp, Probe Sequence
acatccagtaatagaatctcatcca

SEQ ID NO: 35801 - DNA, 25 bp, Probe Sequence
catccagtaatagaatctcatccag

SEQ ID NO: 35802 - DNA, 25 bp, Probe Sequence
atccagtaatagaatctcatccaga

SEQ ID NO: 35803 - DNA, 25 bp, Probe Sequence
aacatccagtaatagaatctcatcc

SEQ ID NO: 35804 - DNA, 25 bp, Probe Sequence
gttgtagagtaagcaagcaccttaa

SEQ ID NO: 35805 - DNA, 25 bp, Probe Sequence
agttgtagagtaagcaagcacctta

SEQ ID NO: 35806 - DNA, 25 bp, Probe Sequence
cgatccttagctgaagaatatggtt

SEQ ID NO: 35807 - DNA, 25 bp, Probe Sequence
atccaggagtatctaactatcaagt

SEQ ID NO: 35808 - DNA, 25 bp, Probe Sequence
gatgtcgatccttagctgaagaata

SEQ ID NO: 35809 - DNA, 25 bp, Probe Sequence
tgtcgatccttagctgaagaatatg

SEQ ID NO: 35810 - DNA, 25 bp, Probe Sequence
atgtcgatccttagctgaagaatat

SEQ ID NO: 35811 - DNA, 25 bp, Probe Sequence
gtcgatccttagctgaagaatatgg

SEQ ID NO: 35812 - DNA, 25 bp, Probe Sequence
taatgttacgggctgttgatagatt

SEQ ID NO: 35813 - DNA, 25 bp, Probe Sequence
acacagcactaaatacaactcagat

SEQ ID NO: 35814 - DNA, 25 bp, Probe Sequence
gaacacagcactaaatacaactcag

SEQ ID NO: 35815 - DNA, 25 bp, Probe Sequence
agtgaaacaaatggacgaataccta

SEQ ID NO: 35816 - DNA, 25 bp, Probe Sequence
tagtgaaacaaatggacgaatacct

SEQ ID NO: 35817 - DNA, 25 bp, Probe Sequence
cagtggtatagtgaaacaaatggac

SEQ ID NO: 35818 - DNA, 25 bp, Probe Sequence
acagtggtatagtgaaacaaatgga

SEQ ID NO: 35819 - DNA, 25 bp, Probe Sequence
tatcaccaaacagactccatcattt

SEQ ID NO: 35820 - DNA, 25 bp, Probe Sequence
atatcaccaaacagactccatcatt

SEQ ID NO: 35821 - DNA, 25 bp, Probe Sequence
aatatcaccaaacagactccatcat

SEQ ID NO: 35822 - DNA, 25 bp, Probe Sequence
gcataaatatcaccaaacagactcc

SEQ ID NO: 35823 - DNA, 25 bp, Probe Sequence
aaatatcaccaaacagactccatca

SEQ ID NO: 35824 - DNA, 25 bp, Probe Sequence
ctgttgacatactcattgcctactt

SEQ ID NO: 35825 - DNA, 25 bp, Probe Sequence
catcagagtggatataccgttgtat

SEQ ID NO: 35826 - DNA, 25 bp, Probe Sequence
ctagatgttctgttgccagtatcaa

SEQ ID NO: 35827 - DNA, 25 bp, Probe Sequence
atcagagtggatataccgttgtatt

SEQ ID NO: 35828 - DNA, 25 bp, Probe Sequence
tcagagtggatataccgttgtatta

SEQ ID NO: 35829 - DNA, 25 bp, Probe Sequence
atactcattgcctactttaacacct

SEQ ID NO: 35830 - DNA, 25 bp, Probe Sequence
catactcattgcctactttaacacc

SEQ ID NO: 35831 - DNA, 25 bp, Probe Sequence
tactcattgcctactttaacacctg

SEQ ID NO: 35832 - DNA, 25 bp, Probe Sequence
cctactttaacacctgtcagagaaa

SEQ ID NO: 35833 - DNA, 25 bp, Probe Sequence
ccatcagagtggatataccgttgta

SEQ ID NO: 35834 - DNA, 25 bp, Probe Sequence
acatactcattgcctactttaacac

SEQ ID NO: 35835 - DNA, 25 bp, Probe Sequence
cagagtggatataccgttgtattaa

SEQ ID NO: 35836 - DNA, 25 bp, Probe Sequence
tactttaacacctgtcagagaaacg

SEQ ID NO: 35837 - DNA, 25 bp, Probe Sequence
ctactttaacacctgtcagagaaac

SEQ ID NO: 35838 - DNA, 25 bp, Probe Sequence
gacatactcattgcctactttaaca

SEQ ID NO: 35839 - DNA, 25 bp, Probe Sequence
acatacgactctatttcctacagtg

SEQ ID NO: 35840 - DNA, 25 bp, Probe Sequence
gcagaaggacatacgactctatttc

SEQ ID NO: 35841 - DNA, 25 bp, Probe Sequence
gctgttgacatactcattgcctact

SEQ ID NO: 35842 - DNA, 25 bp, Probe Sequence
tgttgacatactcattgcctacttt

SEQ ID NO: 35843 - DNA, 25 bp, Probe Sequence
gacatacgactctatttcctacagt

SEQ ID NO: 35844 - DNA, 25 bp, Probe Sequence
catacgactctatttcctacagtgc

SEQ ID NO: 35845 - DNA, 25 bp, Probe Sequence
gaagattccaacagaaacagataga

SEQ ID NO: 35846 - DNA, 25 bp, Probe Sequence
aaccaacttgtaatcaaaggaagat

SEQ ID NO: 35847 - DNA, 25 bp, Probe Sequence
ctcattgcctactttaacacctgtc

SEQ ID NO: 35848 - DNA, 25 bp, Probe Sequence
caggaacctattcacaacagataca

SEQ ID NO: 35849 - DNA, 25 bp, Probe Sequence
acaggaacctattcacaacagatac

SEQ ID NO: 35850 - DNA, 25 bp, Probe Sequence
cacaggaacctattcacaacagata

SEQ ID NO: 35851 - DNA, 25 bp, Probe Sequence
aggaacctattcacaacagatacaa

SEQ ID NO: 35852 - DNA, 25 bp, Probe Sequence
aagacttcactaatcctctctatgg

SEQ ID NO: 35853 - DNA, 25 bp, Probe Sequence
tgtaatagtgaacaacagagaggaa

SEQ ID NO: 35854 - DNA, 25 bp, Probe Sequence
cattcctctgtaatagtgaacaaca

SEQ ID NO: 35855 - DNA, 25 bp, Probe Sequence
acattcctctgtaatagtgaacaac

SEQ ID NO: 35856 - DNA, 25 bp, Probe Sequence
gaacattcctctgtaatagtgaaca

SEQ ID NO: 35857 - DNA, 25 bp, Probe Sequence
actgtgtcactgtggtcttacataa

SEQ ID NO: 35858 - DNA, 25 bp, Probe Sequence
aacattcctctgtaatagtgaacaa

SEQ ID NO: 35859 - DNA, 25 bp, Probe Sequence
tggaagacttcactaatcctctcta

SEQ ID NO: 35860 - DNA, 25 bp, Probe Sequence
gaagacttcactaatcctctctatg

SEQ ID NO: 35861 - DNA, 25 bp, Probe Sequence
ccacaggaacctattcacaacagat

SEQ ID NO: 35862 - DNA, 25 bp, Probe Sequence
ggtgggatattacataaggtggaat

SEQ ID NO: 35863 - DNA, 25 bp, Probe Sequence
gactgtgtcactgtggtcttacata

SEQ ID NO: 35864 - DNA, 25 bp, Probe Sequence
ctggaagacttcactaatcctctct

SEQ ID NO: 35865 - DNA, 25 bp, Probe Sequence
ttgtggagaaagaatggctaagttt

SEQ ID NO: 35866 - DNA, 25 bp, Probe Sequence
cggaacattcctctgtaatagtgaa

SEQ ID NO: 35867 - DNA, 25 bp, Probe Sequence
ttcggaacattcctctgtaatagtg

SEQ ID NO: 35868 - DNA, 25 bp, Probe Sequence
ggaagacttcactaatcctctctat

SEQ ID NO: 35869 - DNA, 25 bp, Probe Sequence
attcggaacattcctctgtaatagt

SEQ ID NO: 35870 - DNA, 25 bp, Probe Sequence
actacagagagagatttctaaccga

SEQ ID NO: 35871 - DNA, 25 bp, Probe Sequence
agaggaactacagagagagatttct

SEQ ID NO: 35872 - DNA, 25 bp, Probe Sequence
tcaataaagaccagtgaagaccaaa

SEQ ID NO: 35873 - DNA, 25 bp, Probe Sequence
caataaagaccagtgaagaccaaaa

SEQ ID NO: 35874 - DNA, 25 bp, Probe Sequence
attcaataaagaccagtgaagacca

SEQ ID NO: 35875 - DNA, 25 bp, Probe Sequence
ttcaataaagaccagtgaagaccaa

SEQ ID NO: 35876 - DNA, 25 bp, Probe Sequence
aataagtgtcctaagtcagtggttc

SEQ ID NO: 35877 - DNA, 25 bp, Probe Sequence
cctgaagttctgtgatagaccttaa

SEQ ID NO: 35878 - DNA, 25 bp, Probe Sequence
ataagtgtcctaagtcagtggttcc

SEQ ID NO: 35879 - DNA, 25 bp, Probe Sequence
gcctgaagttctgtgatagacctta

SEQ ID NO: 35880 - DNA, 25 bp, Probe Sequence
aaataagtgtcctaagtcagtggtt

SEQ ID NO: 35881 - DNA, 25 bp, Probe Sequence
taaataagtgtcctaagtcagtggt

SEQ ID NO: 35882 - DNA, 25 bp, Probe Sequence
gggtaggaaagtagatagacagaaa

SEQ ID NO: 35883 - DNA, 25 bp, Probe Sequence
gggaatacctgggaagtttgttaaa

SEQ ID NO: 35884 - DNA, 25 bp, Probe Sequence
cgatattcttactaaactctgaggc

SEQ ID NO: 35885 - DNA, 25 bp, Probe Sequence
ttaaataagtgtcctaagtcagtgg

SEQ ID NO: 35886 - DNA, 25 bp, Probe Sequence
ctgaagttctgtgatagaccttaaa

SEQ ID NO: 35887 - DNA, 25 bp, Probe Sequence
gtatcaaatcactactagaccgttt

SEQ ID NO: 35888 - DNA, 25 bp, Probe Sequence
tcactactagaccgtttaatttgtt

SEQ ID NO: 35889 - DNA, 25 bp, Probe Sequence
atcactactagaccgtttaatttgt

SEQ ID NO: 35890 - DNA, 25 bp, Probe Sequence
aatcacttgaacctgggagttagag

SEQ ID NO: 35891 - DNA, 25 bp, Probe Sequence
gaatcacttgaacctgggagttaga

SEQ ID NO: 35892 - DNA, 25 bp, Probe Sequence
agaatcacttgaacctgggagttag

SEQ ID NO: 35893 - DNA, 25 bp, Probe Sequence
gagaatcacttgaacctgggagtta

SEQ ID NO: 35894 - DNA, 25 bp, Probe Sequence
tcaaatcactactagaccgtttaat

SEQ ID NO: 35895 - DNA, 25 bp, Probe Sequence
atcaaatcactactagaccgtttaa

SEQ ID NO: 35896 - DNA, 25 bp, Probe Sequence
ctgaggtcaggagttcaagatcaac

SEQ ID NO: 35897 - DNA, 25 bp, Probe Sequence
tgaagttctgtgatagaccttaaat

SEQ ID NO: 35898 - DNA, 25 bp, Probe Sequence
cgggaatacctgggaagtttgttaa

SEQ ID NO: 35899 - DNA, 25 bp, Probe Sequence
tgtgatagaccttaaataagtgtcc

SEQ ID NO: 35900 - DNA, 25 bp, Probe Sequence
taattcctattaagtacagccgcaa

SEQ ID NO: 35901 - DNA, 25 bp, Probe Sequence
aattcctattaagtacagccgcaag

SEQ ID NO: 35902 - DNA, 25 bp, Probe Sequence
tagatgctgaagaatgtggttgcta

SEQ ID NO: 35903 - DNA, 25 bp, Probe Sequence
attcctattaagtacagccgcaaga

SEQ ID NO: 35904 - DNA, 25 bp, Probe Sequence
ttggtagatgctgaagaatgtggtt

SEQ ID NO: 35905 - DNA, 25 bp, Probe Sequence
ttcctattaagtacagccgcaagaa

SEQ ID NO: 35906 - DNA, 25 bp, Probe Sequence
agatgctgaagaatgtggttgctaa

SEQ ID NO: 35907 - DNA, 25 bp, Probe Sequence
aattagccaagtgtggtaatgttca

SEQ ID NO: 35908 - DNA, 25 bp, Probe Sequence
gaaataccaccctaccactaacaaa

SEQ ID NO: 35909 - DNA, 25 bp, Probe Sequence
taagaaataccaccctaccactaac

SEQ ID NO: 35910 - DNA, 25 bp, Probe Sequence
cctaagaaataccaccctaccacta

SEQ ID NO: 35911 - DNA, 25 bp, Probe Sequence
ctaagaaataccaccctaccactaa

SEQ ID NO: 35912 - DNA, 25 bp, Probe Sequence
agaaataccaccctaccactaacaa

SEQ ID NO: 35913 - DNA, 25 bp, Probe Sequence
aagaaataccaccctaccactaaca

SEQ ID NO: 35914 - DNA, 25 bp, Probe Sequence
tggtagatgctgaagaatgtggttg

SEQ ID NO: 35915 - DNA, 25 bp, Probe Sequence
attagccaagtgtggtaatgttcac

SEQ ID NO: 35916 - DNA, 25 bp, Probe Sequence
attcctaagaaataccaccctacca

SEQ ID NO: 35917 - DNA, 25 bp, Probe Sequence
aattcctaagaaataccaccctacc

SEQ ID NO: 35918 - DNA, 25 bp, Probe Sequence
tggttgctaaacaaagaatgctaaa

SEQ ID NO: 35919 - DNA, 25 bp, Probe Sequence
gtggttgctaaacaaagaatgctaa

SEQ ID NO: 35920 - DNA, 25 bp, Probe Sequence
ggttgctaaacaaagaatgctaaag

SEQ ID NO: 35921 - DNA, 25 bp, Probe Sequence
aacagaagtgcgtaccagaagtatg

SEQ ID NO: 35922 - DNA, 25 bp, Probe Sequence
caacagaagtgcgtaccagaagtat

SEQ ID NO: 35923 - DNA, 25 bp, Probe Sequence
cacgagaattgcttgaacaaggtag

SEQ ID NO: 35924 - DNA, 25 bp, Probe Sequence
aagtataggcattgtacctgacatt

SEQ ID NO: 35925 - DNA, 25 bp, Probe Sequence
agtataggcattgtacctgacattg

SEQ ID NO: 35926 - DNA, 25 bp, Probe Sequence
ctaagtataggcattgtacctgaca

SEQ ID NO: 35927 - DNA, 25 bp, Probe Sequence
actaagtataggcattgtacctgac

SEQ ID NO: 35928 - DNA, 25 bp, Probe Sequence
gactaagtataggcattgtacctga

SEQ ID NO: 35929 - DNA, 25 bp, Probe Sequence
agactaagtataggcattgtacctg

SEQ ID NO: 35930 - DNA, 25 bp, Probe Sequence
taagtataggcattgtacctgacat

SEQ ID NO: 35931 - DNA, 25 bp, Probe Sequence
aagactaagtataggcattgtacct

SEQ ID NO: 35932 - DNA, 25 bp, Probe Sequence
ggtaggagcagtgaagtaaattcta

SEQ ID NO: 35933 - DNA, 25 bp, Probe Sequence
agcagtgaagtaaattctatggagt

SEQ ID NO: 35934 - DNA, 25 bp, Probe Sequence
ggagcagtgaagtaaattctatgga

SEQ ID NO: 35935 - DNA, 25 bp, Probe Sequence
aggagcagtgaagtaaattctatgg

SEQ ID NO: 35936 - DNA, 25 bp, Probe Sequence
taagactaagtataggcattgtacc

SEQ ID NO: 35937 - DNA, 25 bp, Probe Sequence
gagcagtgaagtaaattctatggag

SEQ ID NO: 35938 - DNA, 25 bp, Probe Sequence
tatttgaagaatcagtggtaggagc

SEQ ID NO: 35939 - DNA, 25 bp, Probe Sequence
gcttatttgaagaatcagtggtagg

SEQ ID NO: 35940 - DNA, 25 bp, Probe Sequence
tttgcttatttgaagaatcagtggt

SEQ ID NO: 35941 - DNA, 25 bp, Probe Sequence
tgttaatgtgtagagttctcctttc

SEQ ID NO: 35942 - DNA, 25 bp, Probe Sequence
atcagtggtaggagcagtgaagtaa

SEQ ID NO: 35943 - DNA, 25 bp, Probe Sequence
aatcagtggtaggagcagtgaagta

SEQ ID NO: 35944 - DNA, 25 bp, Probe Sequence
taatgtgtagagttctcctttctcg

SEQ ID NO: 35945 - DNA, 25 bp, Probe Sequence
tgcttatttgaagaatcagtggtag

SEQ ID NO: 35946 - DNA, 25 bp, Probe Sequence
gccttctgtactttgcttatttgaa

SEQ ID NO: 35947 - DNA, 25 bp, Probe Sequence
agtggtaggagcagtgaagtaaatt

SEQ ID NO: 35948 - DNA, 25 bp, Probe Sequence
ttgtgattgagatggagaataatgc

SEQ ID NO: 35949 - DNA, 25 bp, Probe Sequence
tgtgattgagatggagaataatgcc

SEQ ID NO: 35950 - DNA, 25 bp, Probe Sequence
actacgagcaacgaataataacctg

SEQ ID NO: 35951 - DNA, 25 bp, Probe Sequence
cactacgagcaacgaataataacct

SEQ ID NO: 35952 - DNA, 25 bp, Probe Sequence
ctacgagcaacgaataataacctgg

SEQ ID NO: 35953 - DNA, 25 bp, Probe Sequence
tacgagcaacgaataataacctgga

SEQ ID NO: 35954 - DNA, 25 bp, Probe Sequence
agtcaaggatggatctggaacatat

SEQ ID NO: 35955 - DNA, 25 bp, Probe Sequence
cttcaactggatcattgttcacatg

SEQ ID NO: 35956 - DNA, 25 bp, Probe Sequence
gcactacgagcaacgaataataacc

SEQ ID NO: 35957 - DNA, 25 bp, Probe Sequence
ggcactacgagcaacgaataataac

SEQ ID NO: 35958 - DNA, 25 bp, Probe Sequence
gagtcaaggatggatctggaacata

SEQ ID NO: 35959 - DNA, 25 bp, Probe Sequence
aggcactacgagcaacgaataataa

SEQ ID NO: 35960 - DNA, 25 bp, Probe Sequence
ccttcaactggatcattgttcacat

SEQ ID NO: 35961 - DNA, 25 bp, Probe Sequence
acgagcaacgaataataacctggaa

SEQ ID NO: 35962 - DNA, 25 bp, Probe Sequence
ctggatcattgttcacatggaagag

SEQ ID NO: 35963 - DNA, 25 bp, Probe Sequence
aactggatcattgttcacatggaag

SEQ ID NO: 35964 - DNA, 25 bp, Probe Sequence
tgattgagatggagaataatgccaa

SEQ ID NO: 35965 - DNA, 25 bp, Probe Sequence
ctagagtcaaggatggatctggaac

SEQ ID NO: 35966 - DNA, 25 bp, Probe Sequence
gtgattgagatggagaataatgcca

SEQ ID NO: 35967 - DNA, 25 bp, Probe Sequence
caactggatcattgttcacatggaa

SEQ ID NO: 35968 - DNA, 25 bp, Probe Sequence
ttcaactggatcattgttcacatgg

SEQ ID NO: 35969 - DNA, 25 bp, Probe Sequence
aaggaagatgggtgatttacaatga

SEQ ID NO: 35970 - DNA, 25 bp, Probe Sequence
gaaggaagatgggtgatttacaatg

SEQ ID NO: 35971 - DNA, 25 bp, Probe Sequence
gaataataacctggaaagagcactg

SEQ ID NO: 35972 - DNA, 25 bp, Probe Sequence
ataaactcgtaaccctgtccttcaa

SEQ ID NO: 35973 - DNA, 25 bp, Probe Sequence
aataaactcgtaaccctgtccttca

SEQ ID NO: 35974 - DNA, 25 bp, Probe Sequence
taaactcgtaaccctgtccttcaaa

SEQ ID NO: 35975 - DNA, 25 bp, Probe Sequence
tctacaagaacgagggaggtacatg

SEQ ID NO: 35976 - DNA, 25 bp, Probe Sequence
aaactcgtaaccctgtccttcaaaa

SEQ ID NO: 35977 - DNA, 25 bp, Probe Sequence
ttctacaagaacgagggaggtacat

SEQ ID NO: 35978 - DNA, 25 bp, Probe Sequence
ctacaagaacgagggaggtacatgg

SEQ ID NO: 35979 - DNA, 25 bp, Probe Sequence
cttctacaagaacgagggaggtaca

SEQ ID NO: 35980 - DNA, 25 bp, Probe Sequence
tacaagaacgagggaggtacatggt

SEQ ID NO: 35981 - DNA, 25 bp, Probe Sequence
gcttctacaagaacgagggaggtac

SEQ ID NO: 35982 - DNA, 25 bp, Probe Sequence
gcaatcatcacctctgtctagttac

SEQ ID NO: 35983 - DNA, 25 bp, Probe Sequence
atgtcaatggaatcatgtactctgt

SEQ ID NO: 35984 - DNA, 25 bp, Probe Sequence
caatcatcacctctgtctagttaca

SEQ ID NO: 35985 - DNA, 25 bp, Probe Sequence
tgtcaatggaatcatgtactctgtg

SEQ ID NO: 35986 - DNA, 25 bp, Probe Sequence
tcaatggaatcatgtactctgtgaa

SEQ ID NO: 35987 - DNA, 25 bp, Probe Sequence
gtcaatggaatcatgtactctgtga

SEQ ID NO: 35988 - DNA, 25 bp, Probe Sequence
caaccacaaatctttccaactctac

SEQ ID NO: 35989 - DNA, 25 bp, Probe Sequence
tgcaatcatcacctctgtctagtta

SEQ ID NO: 35990 - DNA, 25 bp, Probe Sequence
aaccacaaatctttccaactctacg

SEQ ID NO: 35991 - DNA, 25 bp, Probe Sequence
ctagttacaggacggtttctttctc

SEQ ID NO: 35992 - DNA, 25 bp, Probe Sequence
tctagttacaggacggtttctttct

SEQ ID NO: 35993 - DNA, 25 bp, Probe Sequence
gcaaccacaaatctttccaactcta

SEQ ID NO: 35994 - DNA, 25 bp, Probe Sequence
caatggaatcatgtactctgtgaaa

SEQ ID NO: 35995 - DNA, 25 bp, Probe Sequence
gtctagttacaggacggtttctttc

SEQ ID NO: 35996 - DNA, 25 bp, Probe Sequence
attcacgatactgtgcaatcatcac

SEQ ID NO: 35997 - DNA, 25 bp, Probe Sequence
cattcacgatactgtgcaatcatca

SEQ ID NO: 35998 - DNA, 25 bp, Probe Sequence
acattcacgatactgtgcaatcatc

SEQ ID NO: 35999 - DNA, 25 bp, Probe Sequence
acaaatctttccaactctacggatt

SEQ ID NO: 36000 - DNA, 25 bp, Probe Sequence
cacaaatctttccaactctacggat

SEQ ID NO: 36001 - DNA, 25 bp, Probe Sequence
tgtctagttacaggacggtttcttt

SEQ ID NO: 36002 - DNA, 25 bp, Probe Sequence
accacaaatctttccaactctacgg

SEQ ID NO: 36003 - DNA, 25 bp, Probe Sequence
catgtcaatggaatcatgtactctg

SEQ ID NO: 36004 - DNA, 25 bp, Probe Sequence
tcatgtcaatggaatcatgtactct

SEQ ID NO: 36005 - DNA, 25 bp, Probe Sequence
aatctttccaactctacggatttgc

SEQ ID NO: 36006 - DNA, 25 bp, Probe Sequence
attgctatatgtgttacagacctcg

SEQ ID NO: 36007 - DNA, 25 bp, Probe Sequence
tgttacagacctcggttctcattaa

SEQ ID NO: 36008 - DNA, 25 bp, Probe Sequence
ctatatgtgttacagacctcggttc

SEQ ID NO: 36009 - DNA, 25 bp, Probe Sequence
ggtggttattgctatatgtgttaca

SEQ ID NO: 36010 - DNA, 25 bp, Probe Sequence
tatatgtgttacagacctcggttct

SEQ ID NO: 36011 - DNA, 25 bp, Probe Sequence
gtgttacagacctcggttctcatta

SEQ ID NO: 36012 - DNA, 25 bp, Probe Sequence
tattgctatatgtgttacagacctc

SEQ ID NO: 36013 - DNA, 25 bp, Probe Sequence
ctaagaactgaattatatgtgagcc

SEQ ID NO: 36014 - DNA, 25 bp, Probe Sequence
atatgtgttacagacctcggttctc

SEQ ID NO: 36015 - DNA, 25 bp, Probe Sequence
ttgctatatgtgttacagacctcgg

SEQ ID NO: 36016 - DNA, 25 bp, Probe Sequence
gtggttattgctatatgtgttacag

SEQ ID NO: 36017 - DNA, 25 bp, Probe Sequence
ctatgaagatggatactgatgggtg

SEQ ID NO: 36018 - DNA, 25 bp, Probe Sequence
tatgaagatggatactgatgggtga

SEQ ID NO: 36019 - DNA, 25 bp, Probe Sequence
gggtggttattgctatatgtgttac

SEQ ID NO: 36020 - DNA, 25 bp, Probe Sequence
agggtggttattgctatatgtgtta

SEQ ID NO: 36021 - DNA, 25 bp, Probe Sequence
tggttattgctatatgtgttacaga

SEQ ID NO: 36022 - DNA, 25 bp, Probe Sequence
gctatatgtgttacagacctcggtt

SEQ ID NO: 36023 - DNA, 25 bp, Probe Sequence
cagggtggttattgctatatgtgtt

SEQ ID NO: 36024 - DNA, 25 bp, Probe Sequence
tgtggttaaatgtaattggttagcc

SEQ ID NO: 36025 - DNA, 25 bp, Probe Sequence
gggtggttcaaagttatttctatgt

SEQ ID NO: 36026 - DNA, 25 bp, Probe Sequence
aagaactgaattatatgtgagccca

SEQ ID NO: 36027 - DNA, 25 bp, Probe Sequence
gtggttaaatgtaattggttagccc

SEQ ID NO: 36028 - DNA, 25 bp, Probe Sequence
tctatgaagatggatactgatgggt

SEQ ID NO: 36029 - DNA, 25 bp, Probe Sequence
gttattgctatatgtgttacagacc

SEQ ID NO: 36030 - DNA, 25 bp, Probe Sequence
ttactgtagttggaggatggagatg

SEQ ID NO: 36031 - DNA, 25 bp, Probe Sequence
gccttaatggagacaatagcagatc

SEQ ID NO: 36032 - DNA, 25 bp, Probe Sequence
tggattcataatagcaagattagca

SEQ ID NO: 36033 - DNA, 25 bp, Probe Sequence
gtagttggaggatggagatgctatg

SEQ ID NO: 36034 - DNA, 25 bp, Probe Sequence
gaggatggagatgctatgatggaag

SEQ ID NO: 36035 - DNA, 25 bp, Probe Sequence
tagttggaggatggagatgctatga

SEQ ID NO: 36036 - DNA, 25 bp, Probe Sequence
tgtagttggaggatggagatgctat

SEQ ID NO: 36037 - DNA, 25 bp, Probe Sequence
attctggacacagttggatcaatac

SEQ ID NO: 36038 - DNA, 25 bp, Probe Sequence
cattctggacacagttggatcaata

SEQ ID NO: 36039 - DNA, 25 bp, Probe Sequence
ctggattcataatagcaagattagc

SEQ ID NO: 36040 - DNA, 25 bp, Probe Sequence
gagacaatagcagatcctgtagtat

SEQ ID NO: 36041 - DNA, 25 bp, Probe Sequence
ttaatggagacaatagcagatcctg

SEQ ID NO: 36042 - DNA, 25 bp, Probe Sequence
cttaatggagacaatagcagatcct

SEQ ID NO: 36043 - DNA, 25 bp, Probe Sequence
agacaatagcagatcctgtagtatt

SEQ ID NO: 36044 - DNA, 25 bp, Probe Sequence
gttggaggatggagatgctatgatg

SEQ ID NO: 36045 - DNA, 25 bp, Probe Sequence
agttggaggatggagatgctatgat

SEQ ID NO: 36046 - DNA, 25 bp, Probe Sequence
ccttaatggagacaatagcagatcc

SEQ ID NO: 36047 - DNA, 25 bp, Probe Sequence
ggagacaatagcagatcctgtagta

SEQ ID NO: 36048 - DNA, 25 bp, Probe Sequence
cttagcatttactgtagttggagga

SEQ ID NO: 36049 - DNA, 25 bp, Probe Sequence
tcttagcatttactgtagttggagg

SEQ ID NO: 36050 - DNA, 25 bp, Probe Sequence
aatggagacaatagcagatcctgta

SEQ ID NO: 36051 - DNA, 25 bp, Probe Sequence
taatggagacaatagcagatcctgt

SEQ ID NO: 36052 - DNA, 25 bp, Probe Sequence
tagaaatggtttgccttaatggaga

SEQ ID NO: 36053 - DNA, 25 bp, Probe Sequence
ttctggacacagttggatcaatact

SEQ ID NO: 36054 - DNA, 25 bp, Probe Sequence
agagttaggaggcagattgatagta

SEQ ID NO: 36055 - DNA, 25 bp, Probe Sequence
tagagttaggaggcagattgatagt

SEQ ID NO: 36056 - DNA, 25 bp, Probe Sequence
ctagagttaggaggcagattgatag

SEQ ID NO: 36057 - DNA, 25 bp, Probe Sequence
gctagagttaggaggcagattgata

SEQ ID NO: 36058 - DNA, 25 bp, Probe Sequence
ggctagagttaggaggcagattgat

SEQ ID NO: 36059 - DNA, 25 bp, Probe Sequence
gaggctagagttaggaggcagattg

SEQ ID NO: 36060 - DNA, 25 bp, Probe Sequence
aggctagagttaggaggcagattga

SEQ ID NO: 36061 - DNA, 25 bp, Probe Sequence
tgaggctagagttaggaggcagatt

SEQ ID NO: 36062 - DNA, 25 bp, Probe Sequence
ttgaggctagagttaggaggcagat

SEQ ID NO: 36063 - DNA, 25 bp, Probe Sequence
gttgaggctagagttaggaggcaga

SEQ ID NO: 36064 - DNA, 25 bp, Probe Sequence
ctgcgtcatgcttctgtgtatataa

SEQ ID NO: 36065 - DNA, 25 bp, Probe Sequence
ctcttccatcctcaacaagtacgac

SEQ ID NO: 36066 - DNA, 25 bp, Probe Sequence
tgcgtcatgcttctgtgtatataaa

SEQ ID NO: 36067 - DNA, 25 bp, Probe Sequence
gtcatgcttctgtgtatataaaggc

SEQ ID NO: 36068 - DNA, 25 bp, Probe Sequence
gcgtcatgcttctgtgtatataaag

SEQ ID NO: 36069 - DNA, 25 bp, Probe Sequence
cgtcatgcttctgtgtatataaagg

SEQ ID NO: 36070 - DNA, 25 bp, Probe Sequence
gctgcgtcatgcttctgtgtatata

SEQ ID NO: 36071 - DNA, 25 bp, Probe Sequence
ctgctcttccatcctcaacaagtac

SEQ ID NO: 36072 - DNA, 25 bp, Probe Sequence
actgctcttccatcctcaacaagta

SEQ ID NO: 36073 - DNA, 25 bp, Probe Sequence
catcctcaacaagtacgacgacaac

SEQ ID NO: 36074 - DNA, 25 bp, Probe Sequence
cttccatcctcaacaagtacgacga

SEQ ID NO: 36075 - DNA, 25 bp, Probe Sequence
tcttccatcctcaacaagtacgacg

SEQ ID NO: 36076 - DNA, 25 bp, Probe Sequence
gctcttccatcctcaacaagtacga

SEQ ID NO: 36077 - DNA, 25 bp, Probe Sequence
tcatgcttctgtgtatataaaggcc

SEQ ID NO: 36078 - DNA, 25 bp, Probe Sequence
ttccatcctcaacaagtacgacgac

SEQ ID NO: 36079 - DNA, 25 bp, Probe Sequence
tgctcttccatcctcaacaagtacg

SEQ ID NO: 36080 - DNA, 25 bp, Probe Sequence
cactgctcttccatcctcaacaagt

SEQ ID NO: 36081 - DNA, 25 bp, Probe Sequence
tgctgcgtcatgcttctgtgtatat

SEQ ID NO: 36082 - DNA, 25 bp, Probe Sequence
ccatcctcaacaagtacgacgacaa

SEQ ID NO: 36083 - DNA, 25 bp, Probe Sequence
atcctcaacaagtacgacgacaacg

SEQ ID NO: 36084 - DNA, 25 bp, Probe Sequence
gatcttctcccattgacaggagcac

SEQ ID NO: 36085 - DNA, 25 bp, Probe Sequence
cacctattctgagtttgcgaaggat

SEQ ID NO: 36086 - DNA, 25 bp, Probe Sequence
acctattctgagtttgcgaaggatc

SEQ ID NO: 36087 - DNA, 25 bp, Probe Sequence
gtttacctcatacagtacgtgtcct

SEQ ID NO: 36088 - DNA, 25 bp, Probe Sequence
tttacctcatacagtacgtgtcctg

SEQ ID NO: 36089 - DNA, 25 bp, Probe Sequence
tgtttacctcatacagtacgtgtcc

SEQ ID NO: 36090 - DNA, 25 bp, Probe Sequence
ttcttcagcttaggagtgcttgaaa

SEQ ID NO: 36091 - DNA, 25 bp, Probe Sequence
tttcttcagcttaggagtgcttgaa

SEQ ID NO: 36092 - DNA, 25 bp, Probe Sequence
gttagccacgctgtttacctcatac

SEQ ID NO: 36093 - DNA, 25 bp, Probe Sequence
tcttcagcttaggagtgcttgaaac

SEQ ID NO: 36094 - DNA, 25 bp, Probe Sequence
tacctcatacagtacgtgtcctgtt

SEQ ID NO: 36095 - DNA, 25 bp, Probe Sequence
ttacctcatacagtacgtgtcctgt

SEQ ID NO: 36096 - DNA, 25 bp, Probe Sequence
ttcagcgagaactttcaaaggcttc

SEQ ID NO: 36097 - DNA, 25 bp, Probe Sequence
cttcagcgagaactttcaaaggctt

SEQ ID NO: 36098 - DNA, 25 bp, Probe Sequence
ctgtttacctcatacagtacgtgtc

SEQ ID NO: 36099 - DNA, 25 bp, Probe Sequence
ttagccacgctgtttacctcataca

SEQ ID NO: 36100 - DNA, 25 bp, Probe Sequence
tgttagccacgctgtttacctcata

SEQ ID NO: 36101 - DNA, 25 bp, Probe Sequence
ctactggcaaagaggtgacaggaag

SEQ ID NO: 36102 - DNA, 25 bp, Probe Sequence
cagcacctattctgagtttgcgaag

SEQ ID NO: 36103 - DNA, 25 bp, Probe Sequence
cagcttaggagtgcttgaaaccttg

SEQ ID NO: 36104 - DNA, 25 bp, Probe Sequence
ttttcttcagcttaggagtgcttga

SEQ ID NO: 36105 - DNA, 25 bp, Probe Sequence
cttcagcttaggagtgcttgaaacc

SEQ ID NO: 36106 - DNA, 25 bp, Probe Sequence
tcagcttaggagtgcttgaaacctt

SEQ ID NO: 36107 - DNA, 25 bp, Probe Sequence
ccacgctgtttacctcatacagtac

SEQ ID NO: 36108 - DNA, 25 bp, Probe Sequence
cagattgggagtctgtttgttccaa

SEQ ID NO: 36109 - DNA, 25 bp, Probe Sequence
tagtatctagcaatcacaacactgg

SEQ ID NO: 36110 - DNA, 25 bp, Probe Sequence
atagtatctagcaatcacaacactg

SEQ ID NO: 36111 - DNA, 25 bp, Probe Sequence
gatagtatctagcaatcacaacact

SEQ ID NO: 36112 - DNA, 25 bp, Probe Sequence
ggcttcctttcttggttcataaatg

SEQ ID NO: 36113 - DNA, 25 bp, Probe Sequence
tggcttcctttcttggttcataaat

SEQ ID NO: 36114 - DNA, 25 bp, Probe Sequence
ttggcttcctttcttggttcataaa

SEQ ID NO: 36115 - DNA, 25 bp, Probe Sequence
cttggcttcctttcttggttcataa

SEQ ID NO: 36116 - DNA, 25 bp, Probe Sequence
agtatctagcaatcacaacactggc

SEQ ID NO: 36117 - DNA, 25 bp, Probe Sequence
gcttcctttcttggttcataaatga

SEQ ID NO: 36118 - DNA, 25 bp, Probe Sequence
acttggcttcctttcttggttcata

SEQ ID NO: 36119 - DNA, 25 bp, Probe Sequence
agatagtatctagcaatcacaacac

SEQ ID NO: 36120 - DNA, 25 bp, Probe Sequence
cagatagtatctagcaatcacaaca

SEQ ID NO: 36121 - DNA, 25 bp, Probe Sequence
acagatagtatctagcaatcacaac

SEQ ID NO: 36122 - DNA, 25 bp, Probe Sequence
ggttcacttacagatagtatctagc

SEQ ID NO: 36123 - DNA, 25 bp, Probe Sequence
ttagtttggttcacttacagatagt

SEQ ID NO: 36124 - DNA, 25 bp, Probe Sequence
gttcacttacagatagtatctagca

SEQ ID NO: 36125 - DNA, 25 bp, Probe Sequence
ctttctgttgtcattgctgttgtcc

SEQ ID NO: 36126 - DNA, 25 bp, Probe Sequence
agtttggttcacttacagatagtat

SEQ ID NO: 36127 - DNA, 25 bp, Probe Sequence
gtttggttcacttacagatagtatc

SEQ ID NO: 36128 - DNA, 25 bp, Probe Sequence
tatctagcaatcacaacactggctg

SEQ ID NO: 36129 - DNA, 25 bp, Probe Sequence
gtatctagcaatcacaacactggct

SEQ ID NO: 36130 - DNA, 25 bp, Probe Sequence
aacttggcttcctttcttggttcat

SEQ ID NO: 36131 - DNA, 25 bp, Probe Sequence
ctcactgctaactctcaacaaaatg

SEQ ID NO: 36132 - DNA, 25 bp, Probe Sequence
gcctgaatcattctcgatttaactc

SEQ ID NO: 36133 - DNA, 25 bp, Probe Sequence
cgtatatcacataattccagtcaca

SEQ ID NO: 36134 - DNA, 25 bp, Probe Sequence
ttctgctccatagacatcagtattc

SEQ ID NO: 36135 - DNA, 25 bp, Probe Sequence
cttctgctccatagacatcagtatt

SEQ ID NO: 36136 - DNA, 25 bp, Probe Sequence
catagacatcagtattctgccatca

SEQ ID NO: 36137 - DNA, 25 bp, Probe Sequence
tagacatcagtattctgccatcatt

SEQ ID NO: 36138 - DNA, 25 bp, Probe Sequence
acttaccttgaacggataagaatct

SEQ ID NO: 36139 - DNA, 25 bp, Probe Sequence
agacttaccttgaacggataagaat

SEQ ID NO: 36140 - DNA, 25 bp, Probe Sequence
atagacatcagtattctgccatcat

SEQ ID NO: 36141 - DNA, 25 bp, Probe Sequence
ctgctccatagacatcagtattctg

SEQ ID NO: 36142 - DNA, 25 bp, Probe Sequence
tctgctccatagacatcagtattct

SEQ ID NO: 36143 - DNA, 25 bp, Probe Sequence
atatcacataattccagtcacagtt

SEQ ID NO: 36144 - DNA, 25 bp, Probe Sequence
gacttaccttgaacggataagaatc

SEQ ID NO: 36145 - DNA, 25 bp, Probe Sequence
ccatagacatcagtattctgccatc

SEQ ID NO: 36146 - DNA, 25 bp, Probe Sequence
acttctgctccatagacatcagtat

SEQ ID NO: 36147 - DNA, 25 bp, Probe Sequence
tagacttaccttgaacggataagaa

SEQ ID NO: 36148 - DNA, 25 bp, Probe Sequence
ttagacttaccttgaacggataaga

SEQ ID NO: 36149 - DNA, 25 bp, Probe Sequence
tccatagacatcagtattctgccat

SEQ ID NO: 36150 - DNA, 25 bp, Probe Sequence
gttgtacttctgctccatagacatc

SEQ ID NO: 36151 - DNA, 25 bp, Probe Sequence
ctccatagacatcagtattctgcca

SEQ ID NO: 36152 - DNA, 25 bp, Probe Sequence
ttgtacttctgctccatagacatca

SEQ ID NO: 36153 - DNA, 25 bp, Probe Sequence
agttgtacttctgctccatagacat

SEQ ID NO: 36154 - DNA, 25 bp, Probe Sequence
tacttctgctccatagacatcagta

SEQ ID NO: 36155 - DNA, 25 bp, Probe Sequence
gacttgagcttgacctaaggatatg

SEQ ID NO: 36156 - DNA, 25 bp, Probe Sequence
agacttgagcttgacctaaggatat

SEQ ID NO: 36157 - DNA, 25 bp, Probe Sequence
cttgtgaaggattaacttacagaga

SEQ ID NO: 36158 - DNA, 25 bp, Probe Sequence
ttgtgaaggattaacttacagagaa

SEQ ID NO: 36159 - DNA, 25 bp, Probe Sequence
ccttgtgaaggattaacttacagag

SEQ ID NO: 36160 - DNA, 25 bp, Probe Sequence
cttgtgaaggattaacttacagaga

SEQ ID NO: 36161 - DNA, 25 bp, Probe Sequence
ttgtgaaggattaacttacagagaa

SEQ ID NO: 36162 - DNA, 25 bp, Probe Sequence
ccttgtgaaggattaacttacagag

SEQ ID NO: 36163 - DNA, 25 bp, Probe Sequence
ttggaagtgaagtctatgatgtgaa

SEQ ID NO: 36164 - DNA, 25 bp, Probe Sequence
gagttggaagtgaagtctatgatgt

SEQ ID NO: 36165 - DNA, 25 bp, Probe Sequence
gttggaagtgaagtctatgatgtga

SEQ ID NO: 36166 - DNA, 25 bp, Probe Sequence
agttggaagtgaagtctatgatgtg

SEQ ID NO: 36167 - DNA, 25 bp, Probe Sequence
attatgaactgattgaccaagatgc

SEQ ID NO: 36168 - DNA, 25 bp, Probe Sequence
ttatgaactgattgaccaagatgct

SEQ ID NO: 36169 - DNA, 25 bp, Probe Sequence
ggagttggaagtgaagtctatgatg

SEQ ID NO: 36170 - DNA, 25 bp, Probe Sequence
aggagttggaagtgaagtctatgat

SEQ ID NO: 36171 - DNA, 25 bp, Probe Sequence
tatgaactgattgaccaagatgctc

SEQ ID NO: 36172 - DNA, 25 bp, Probe Sequence
aaggagttggaagtgaagtctatga

SEQ ID NO: 36173 - DNA, 25 bp, Probe Sequence
caaggagttggaagtgaagtctatg

SEQ ID NO: 36174 - DNA, 25 bp, Probe Sequence
cttcctgtctagtctctcctgtaag

SEQ ID NO: 36175 - DNA, 25 bp, Probe Sequence
tgattatgaactgattgaccaagat

SEQ ID NO: 36176 - DNA, 25 bp, Probe Sequence
gattatgaactgattgaccaagatg

SEQ ID NO: 36177 - DNA, 25 bp, Probe Sequence
ttgattatgaactgattgaccaaga

SEQ ID NO: 36178 - DNA, 25 bp, Probe Sequence
tattatatccagcaagacactaagg

SEQ ID NO: 36179 - DNA, 25 bp, Probe Sequence
cattgattatgaactgattgaccaa

SEQ ID NO: 36180 - DNA, 25 bp, Probe Sequence
ccttcctgtctagtctctcctgtaa

SEQ ID NO: 36181 - DNA, 25 bp, Probe Sequence
attgattatgaactgattgaccaag

SEQ ID NO: 36182 - DNA, 25 bp, Probe Sequence
gtactattatatccagcaagacact

SEQ ID NO: 36183 - DNA, 25 bp, Probe Sequence
tggaagtgaagtctatgatgtgaaa

SEQ ID NO: 36184 - DNA, 25 bp, Probe Sequence
ggaagtgaagtctatgatgtgaaac

SEQ ID NO: 36185 - DNA, 25 bp, Probe Sequence
attatatccagcaagacactaaggg

SEQ ID NO: 36186 - DNA, 25 bp, Probe Sequence
gaaagcatcaggaaagaggttaaag

SEQ ID NO: 36187 - DNA, 25 bp, Probe Sequence
cagttggtgaagagacttacagatg

SEQ ID NO: 36188 - DNA, 25 bp, Probe Sequence
ccagttggtgaagagacttacagat

SEQ ID NO: 36189 - DNA, 25 bp, Probe Sequence
ctatcctggtgatgtgttctaccta

SEQ ID NO: 36190 - DNA, 25 bp, Probe Sequence
atctatgacgacttatccaaacagg

SEQ ID NO: 36191 - DNA, 25 bp, Probe Sequence
tatcctggtgatgtgttctacctac

SEQ ID NO: 36192 - DNA, 25 bp, Probe Sequence
ggattcacatcaaataccagttcag

SEQ ID NO: 36193 - DNA, 25 bp, Probe Sequence
catctatgacgacttatccaaacag

SEQ ID NO: 36194 - DNA, 25 bp, Probe Sequence
agttggtgaagagacttacagatgc

SEQ ID NO: 36195 - DNA, 25 bp, Probe Sequence
gattcacatcaaataccagttcagt

SEQ ID NO: 36196 - DNA, 25 bp, Probe Sequence
ttcacatcaaataccagttcagttt

SEQ ID NO: 36197 - DNA, 25 bp, Probe Sequence
cttggtaatgctattgatggaaagg

SEQ ID NO: 36198 - DNA, 25 bp, Probe Sequence
ccttggtaatgctattgatggaaag

SEQ ID NO: 36199 - DNA, 25 bp, Probe Sequence
ttggtaatgctattgatggaaaggg

SEQ ID NO: 36200 - DNA, 25 bp, Probe Sequence
cccttggtaatgctattgatggaaa

SEQ ID NO: 36201 - DNA, 25 bp, Probe Sequence
attcacatcaaataccagttcagtt

SEQ ID NO: 36202 - DNA, 25 bp, Probe Sequence
tgctattgacacaatcattaaccag

SEQ ID NO: 36203 - DNA, 25 bp, Probe Sequence
gctattgacacaatcattaaccaga

SEQ ID NO: 36204 - DNA, 25 bp, Probe Sequence
ttgctattgacacaatcattaacca

SEQ ID NO: 36205 - DNA, 25 bp, Probe Sequence
gtgaagagacttacagatgcagatg

SEQ ID NO: 36206 - DNA, 25 bp, Probe Sequence
ggtaatgctattgatggaaagggtc

SEQ ID NO: 36207 - DNA, 25 bp, Probe Sequence
actgtatttatgttgctattggtca

SEQ ID NO: 36208 - DNA, 25 bp, Probe Sequence
ttgacacaatcattaaccagaaacg

SEQ ID NO: 36209 - DNA, 25 bp, Probe Sequence
gtgaactgattattggtgaccgaca

SEQ ID NO: 36210 - DNA, 25 bp, Probe Sequence
gaactgattattggtgaccgacaga

SEQ ID NO: 36211 - DNA, 25 bp, Probe Sequence
aagatgggtgactagatgatatgtg

SEQ ID NO: 36212 - DNA, 25 bp, Probe Sequence
gatgggtgactagatgatatgtgtg

SEQ ID NO: 36213 - DNA, 25 bp, Probe Sequence
agatgggtgactagatgatatgtgt

SEQ ID NO: 36214 - DNA, 25 bp, Probe Sequence
aataaacttggtatttgtctgggtc

SEQ ID NO: 36215 - DNA, 25 bp, Probe Sequence
gaagatgggtgactagatgatatgt

SEQ ID NO: 36216 - DNA, 25 bp, Probe Sequence
tgaagatgggtgactagatgatatg

SEQ ID NO: 36217 - DNA, 25 bp, Probe Sequence
gtgaagatgggtgactagatgatat

SEQ ID NO: 36218 - DNA, 25 bp, Probe Sequence
agtgaagatgggtgactagatgata

SEQ ID NO: 36219 - DNA, 25 bp, Probe Sequence
ctgtctaacctcttctgtggagtct

SEQ ID NO: 36220 - DNA, 25 bp, Probe Sequence
ctttgtaaagattctcatcgtggag

SEQ ID NO: 36221 - DNA, 25 bp, Probe Sequence
atgggtgactagatgatatgtgtgg

SEQ ID NO: 36222 - DNA, 25 bp, Probe Sequence
gagtgaagatgggtgactagatgat

SEQ ID NO: 36223 - DNA, 25 bp, Probe Sequence
tgtctaacctcttctgtggagtctg

SEQ ID NO: 36224 - DNA, 25 bp, Probe Sequence
ctatattaccggctcctccatcatt

SEQ ID NO: 36225 - DNA, 25 bp, Probe Sequence
gtgactagatgatatgtgtgggtgg

SEQ ID NO: 36226 - DNA, 25 bp, Probe Sequence
ggtgactagatgatatgtgtgggtg

SEQ ID NO: 36227 - DNA, 25 bp, Probe Sequence
catcatcatggcaattgtcattagc

SEQ ID NO: 36228 - DNA, 25 bp, Probe Sequence
gcatcatcatggcaattgtcattag

SEQ ID NO: 36229 - DNA, 25 bp, Probe Sequence
tatattaccggctcctccatcattg

SEQ ID NO: 36230 - DNA, 25 bp, Probe Sequence
cagagtgaagatgggtgactagatg

SEQ ID NO: 36231 - DNA, 25 bp, Probe Sequence
aattgtcattagcaacatggctgag

SEQ ID NO: 36232 - DNA, 25 bp, Probe Sequence
catctatattaccggctcctccatc

SEQ ID NO: 36233 - DNA, 25 bp, Probe Sequence
agagtgaagatgggtgactagatga

SEQ ID NO: 36234 - DNA, 25 bp, Probe Sequence
atcatcatggcaattgtcattagca

SEQ ID NO: 36235 - DNA, 25 bp, Probe Sequence
actgaagaatggagagagaattgaa

SEQ ID NO: 36236 - DNA, 25 bp, Probe Sequence
ttgacttactgaagaatggagagag

SEQ ID NO: 36237 - DNA, 25 bp, Probe Sequence
gttgacttactgaagaatggagaga

SEQ ID NO: 36238 - DNA, 25 bp, Probe Sequence
tgacttactgaagaatggagagaga

SEQ ID NO: 36239 - DNA, 25 bp, Probe Sequence
gacttactgaagaatggagagagaa

SEQ ID NO: 36240 - DNA, 25 bp, Probe Sequence
tactgaagaatggagagagaattga

SEQ ID NO: 36241 - DNA, 25 bp, Probe Sequence
acttactgaagaatggagagagaat

SEQ ID NO: 36242 - DNA, 25 bp, Probe Sequence
agttgacttactgaagaatggagag

SEQ ID NO: 36243 - DNA, 25 bp, Probe Sequence
tctcttatccaacatcaacatcttg

SEQ ID NO: 36244 - DNA, 25 bp, Probe Sequence
ttctcttatccaacatcaacatctt

SEQ ID NO: 36245 - DNA, 25 bp, Probe Sequence
ttactgaagaatggagagagaattg

SEQ ID NO: 36246 - DNA, 25 bp, Probe Sequence
attctcttatccaacatcaacatct

SEQ ID NO: 36247 - DNA, 25 bp, Probe Sequence
tgaagttgacttactgaagaatgga

SEQ ID NO: 36248 - DNA, 25 bp, Probe Sequence
cgacattgaagttgacttactgaag

SEQ ID NO: 36249 - DNA, 25 bp, Probe Sequence
aagttgacttactgaagaatggaga

SEQ ID NO: 36250 - DNA, 25 bp, Probe Sequence
gaagttgacttactgaagaatggag

SEQ ID NO: 36251 - DNA, 25 bp, Probe Sequence
ttgaagttgacttactgaagaatgg

SEQ ID NO: 36252 - DNA, 25 bp, Probe Sequence
cttactgaagaatggagagagaatt

SEQ ID NO: 36253 - DNA, 25 bp, Probe Sequence
gacattgaagttgacttactgaaga

SEQ ID NO: 36254 - DNA, 25 bp, Probe Sequence
atccgacattgaagttgacttactg

SEQ ID NO: 36255 - DNA, 25 bp, Probe Sequence
catccgacattgaagttgacttact

SEQ ID NO: 36256 - DNA, 25 bp, Probe Sequence
aagtaaggcatggttgtggttaatc

SEQ ID NO: 36257 - DNA, 25 bp, Probe Sequence
ccgacattgaagttgacttactgaa

SEQ ID NO: 36258 - DNA, 25 bp, Probe Sequence
acattgaagttgacttactgaagaa

SEQ ID NO: 36259 - DNA, 25 bp, Probe Sequence
cacagtctgaggaagatgatattga

SEQ ID NO: 36260 - DNA, 25 bp, Probe Sequence
cttggttcgttagtggattacttct

SEQ ID NO: 36261 - DNA, 25 bp, Probe Sequence
acagtctgaggaagatgatattgaa

SEQ ID NO: 36262 - DNA, 25 bp, Probe Sequence
tcacagtctgaggaagatgatattg

SEQ ID NO: 36263 - DNA, 25 bp, Probe Sequence
ttggttcgttagtggattacttctg

SEQ ID NO: 36264 - DNA, 25 bp, Probe Sequence
acttggttcgttagtggattacttc

SEQ ID NO: 36265 - DNA, 25 bp, Probe Sequence
gacttggttcgttagtggattactt

SEQ ID NO: 36266 - DNA, 25 bp, Probe Sequence
ggttcgttagtggattacttctgag

SEQ ID NO: 36267 - DNA, 25 bp, Probe Sequence
tggttcgttagtggattacttctga

SEQ ID NO: 36268 - DNA, 25 bp, Probe Sequence
ctgacttggttcgttagtggattac

SEQ ID NO: 36269 - DNA, 25 bp, Probe Sequence
tctgacttggttcgttagtggatta

SEQ ID NO: 36270 - DNA, 25 bp, Probe Sequence
gttcgttagtggattacttctgagc

SEQ ID NO: 36271 - DNA, 25 bp, Probe Sequence
tgacttggttcgttagtggattact

SEQ ID NO: 36272 - DNA, 25 bp, Probe Sequence
atctatattggaaggcgtctgacaa

SEQ ID NO: 36273 - DNA, 25 bp, Probe Sequence
gatctatattggaaggcgtctgaca

SEQ ID NO: 36274 - DNA, 25 bp, Probe Sequence
aagaaggaaagaagttgaaagcatc

SEQ ID NO: 36275 - DNA, 25 bp, Probe Sequence
gaaagaaggaaagaagttgaaagca

SEQ ID NO: 36276 - DNA, 25 bp, Probe Sequence
tgaaagaaggaaagaagttgaaagc

SEQ ID NO: 36277 - DNA, 25 bp, Probe Sequence
aattaagtctccgattattaggtga

SEQ ID NO: 36278 - DNA, 25 bp, Probe Sequence
ttgatgaagaactggagtctgactt

SEQ ID NO: 36279 - DNA, 25 bp, Probe Sequence
tctatattggaaggcgtctgacaac

SEQ ID NO: 36280 - DNA, 25 bp, Probe Sequence
gttccagcctcggtttctatttata

SEQ ID NO: 36281 - DNA, 25 bp, Probe Sequence
ttaagtctccgattattaggtgatc

SEQ ID NO: 36282 - DNA, 25 bp, Probe Sequence
aaagaaggaaagaagttgaaagcat

SEQ ID NO: 36283 - DNA, 25 bp, Probe Sequence
tacaatgtgaaaggcatcttctacc

SEQ ID NO: 36284 - DNA, 25 bp, Probe Sequence
gagtttccttgctgagatttcaaat

SEQ ID NO: 36285 - DNA, 25 bp, Probe Sequence
ttccttgctgagatttcaaatagtc

SEQ ID NO: 36286 - DNA, 25 bp, Probe Sequence
cttgctgagatttcaaatagtcctc

SEQ ID NO: 36287 - DNA, 25 bp, Probe Sequence
ccttgctgagatttcaaatagtcct

SEQ ID NO: 36288 - DNA, 25 bp, Probe Sequence
tccttgctgagatttcaaatagtcc

SEQ ID NO: 36289 - DNA, 25 bp, Probe Sequence
gtacaatgtgaaaggcatcttctac

SEQ ID NO: 36290 - DNA, 25 bp, Probe Sequence
agtacaatgtgaaaggcatcttcta

SEQ ID NO: 36291 - DNA, 25 bp, Probe Sequence
ttgctgagatttcaaatagtcctcc

SEQ ID NO: 36292 - DNA, 25 bp, Probe Sequence
tttccttgctgagatttcaaatagt

SEQ ID NO: 36293 - DNA, 25 bp, Probe Sequence
agtttccttgctgagatttcaaata

SEQ ID NO: 36294 - DNA, 25 bp, Probe Sequence
gtttccttgctgagatttcaaatag

SEQ ID NO: 36295 - DNA, 25 bp, Probe Sequence
gagtacaatgtgaaaggcatcttct

SEQ ID NO: 36296 - DNA, 25 bp, Probe Sequence
agagtacaatgtgaaaggcatcttc

SEQ ID NO: 36297 - DNA, 25 bp, Probe Sequence
cagagtacaatgtgaaaggcatctt

SEQ ID NO: 36298 - DNA, 25 bp, Probe Sequence
tgctgagatttcaaatagtcctccc

SEQ ID NO: 36299 - DNA, 25 bp, Probe Sequence
ggagtttccttgctgagatttcaaa

SEQ ID NO: 36300 - DNA, 25 bp, Probe Sequence
ctgctaagggactctatccattgag

SEQ ID NO: 36301 - DNA, 25 bp, Probe Sequence
ctaagggactctatccattgagcac

SEQ ID NO: 36302 - DNA, 25 bp, Probe Sequence
tctatccattgagcacattttccta

SEQ ID NO: 36303 - DNA, 25 bp, Probe Sequence
ccagagtacaatgtgaaaggcatct

SEQ ID NO: 36304 - DNA, 25 bp, Probe Sequence
cactgctaagggactctatccattg

SEQ ID NO: 36305 - DNA, 25 bp, Probe Sequence
tatccattgagcacattttcctaag

SEQ ID NO: 36306 - DNA, 25 bp, Probe Sequence
ctatccattgagcacattttcctaa

SEQ ID NO: 36307 - DNA, 25 bp, Probe Sequence
agaaactgaaataaagcctttgaaa

SEQ ID NO: 36308 - DNA, 25 bp, Probe Sequence
cagaaactgaaataaagcctttgaa

SEQ ID NO: 36309 - DNA, 25 bp, Probe Sequence
agaagatggcaaatggggaataaaa

SEQ ID NO: 36310 - DNA, 25 bp, Probe Sequence
cagaagatggcaaatggggaataaa

SEQ ID NO: 36311 - DNA, 25 bp, Probe Sequence
atcagaagatggcaaatggggaata

SEQ ID NO: 36312 - DNA, 25 bp, Probe Sequence
tcagaagatggcaaatggggaataa

SEQ ID NO: 36313 - DNA, 25 bp, Probe Sequence
aatcagaagatggcaaatggggaat

SEQ ID NO: 36314 - DNA, 25 bp, Probe Sequence
cctcagaaactgaaataaagccttt

SEQ ID NO: 36315 - DNA, 25 bp, Probe Sequence
acctcagaaactgaaataaagcctt

SEQ ID NO: 36316 - DNA, 25 bp, Probe Sequence
aacctcagaaactgaaataaagcct

SEQ ID NO: 36317 - DNA, 25 bp, Probe Sequence
taacctcagaaactgaaataaagcc

SEQ ID NO: 36318 - DNA, 25 bp, Probe Sequence
tcagaaactgaaataaagcctttga

SEQ ID NO: 36319 - DNA, 25 bp, Probe Sequence
gcatcctaacctcagaaactgaaat

SEQ ID NO: 36320 - DNA, 25 bp, Probe Sequence
ctcagaaactgaaataaagcctttg

SEQ ID NO: 36321 - DNA, 25 bp, Probe Sequence
gaaactgaaataaagcctttgaaaa

SEQ ID NO: 36322 - DNA, 25 bp, Probe Sequence
catcctaacctcagaaactgaaata

SEQ ID NO: 36323 - DNA, 25 bp, Probe Sequence
ctaacctcagaaactgaaataaagc

SEQ ID NO: 36324 - DNA, 25 bp, Probe Sequence
tcctaacctcagaaactgaaataaa

SEQ ID NO: 36325 - DNA, 25 bp, Probe Sequence
caatcagaagatggcaaatggggaa

SEQ ID NO: 36326 - DNA, 25 bp, Probe Sequence
cctaacctcagaaactgaaataaag

SEQ ID NO: 36327 - DNA, 25 bp, Probe Sequence
atcctaacctcagaaactgaaataa

SEQ ID NO: 36328 - DNA, 25 bp, Probe Sequence
ggcatcctaacctcagaaactgaaa

SEQ ID NO: 36329 - DNA, 25 bp, Probe Sequence
tggacaacttcgactcctctgagaa

SEQ ID NO: 36330 - DNA, 25 bp, Probe Sequence
catcctggaaggaagtttagacctg

SEQ ID NO: 36331 - DNA, 25 bp, Probe Sequence
aagtttgggatgaatgacaagattg

SEQ ID NO: 36332 - DNA, 25 bp, Probe Sequence
caagtttgggatgaatgacaagatt

SEQ ID NO: 36333 - DNA, 25 bp, Probe Sequence
ttcgtccagttacaaacccaataaa

SEQ ID NO: 36334 - DNA, 25 bp, Probe Sequence
cttcgtccagttacaaacccaataa

SEQ ID NO: 36335 - DNA, 25 bp, Probe Sequence
tcgtccagttacaaacccaataaac

SEQ ID NO: 36336 - DNA, 25 bp, Probe Sequence
ggatgaatgacaagattgttattga

SEQ ID NO: 36337 - DNA, 25 bp, Probe Sequence
ggtatcaagtatcgtcggaatgagc

SEQ ID NO: 36338 - DNA, 25 bp, Probe Sequence
gtatcaagtatcgtcggaatgagct

SEQ ID NO: 36339 - DNA, 25 bp, Probe Sequence
gcaagtttgggatgaatgacaagat

SEQ ID NO: 36340 - DNA, 25 bp, Probe Sequence
gtttgggatgaatgacaagattgtt

SEQ ID NO: 36341 - DNA, 25 bp, Probe Sequence
ggagagtttgagcttatgaggtatc

SEQ ID NO: 36342 - DNA, 25 bp, Probe Sequence
gagagtttgagcttatgaggtatcg

SEQ ID NO: 36343 - DNA, 25 bp, Probe Sequence
acttcgtccagttacaaacccaata

SEQ ID NO: 36344 - DNA, 25 bp, Probe Sequence
agtttgggatgaatgacaagattgt

SEQ ID NO: 36345 - DNA, 25 bp, Probe Sequence
gagggtatcaagtatcgtcggaatg

SEQ ID NO: 36346 - DNA, 25 bp, Probe Sequence
agagggtatcaagtatcgtcggaat

SEQ ID NO: 36347 - DNA, 25 bp, Probe Sequence
tggagagtttgagcttatgaggtat

SEQ ID NO: 36348 - DNA, 25 bp, Probe Sequence
atggagagtttgagcttatgaggta

SEQ ID NO: 36349 - DNA, 25 bp, Probe Sequence
cagatggagagtttgagcttatgag

SEQ ID NO: 36350 - DNA, 25 bp, Probe Sequence
tttgggatgaatgacaagattgtta

SEQ ID NO: 36351 - DNA, 25 bp, Probe Sequence
gtatcgcacaaccaaggacatcatc

SEQ ID NO: 36352 - DNA, 25 bp, Probe Sequence
tgggatgaatgacaagattgttatt

SEQ ID NO: 36353 - DNA, 25 bp, Probe Sequence
ttgggatgaatgacaagattgttat

SEQ ID NO: 36354 - DNA, 25 bp, Probe Sequence
gggatgaatgacaagattgttattg

SEQ ID NO: 36355 - DNA, 25 bp, Probe Sequence
gagacgtactaagtgcaagatatga

SEQ ID NO: 36356 - DNA, 25 bp, Probe Sequence
agacgtactaagtgcaagatatgaa

SEQ ID NO: 36357 - DNA, 25 bp, Probe Sequence
aacacacgatagtaaggagcattta

SEQ ID NO: 36358 - DNA, 25 bp, Probe Sequence
ccaacacacgatagtaaggagcatt

SEQ ID NO: 36359 - DNA, 25 bp, Probe Sequence
gtatttccaacacacgatagtaagg

SEQ ID NO: 36360 - DNA, 25 bp, Probe Sequence
ggagacgtactaagtgcaagatatg

SEQ ID NO: 36361 - DNA, 25 bp, Probe Sequence
tggagacgtactaagtgcaagatat

SEQ ID NO: 36362 - DNA, 25 bp, Probe Sequence
caacacacgatagtaaggagcattt

SEQ ID NO: 36363 - DNA, 25 bp, Probe Sequence
gtggagacgtactaagtgcaagata

SEQ ID NO: 36364 - DNA, 25 bp, Probe Sequence
cagatatgtttcaagagcctgtaaa

SEQ ID NO: 36365 - DNA, 25 bp, Probe Sequence
gcagatatgtttcaagagcctgtaa

SEQ ID NO: 36366 - DNA, 25 bp, Probe Sequence
gcctgtaaacctctgaaggaattta

SEQ ID NO: 36367 - DNA, 25 bp, Probe Sequence
tatttccaacacacgatagtaagga

SEQ ID NO: 36368 - DNA, 25 bp, Probe Sequence
atttccaacacacgatagtaaggag

SEQ ID NO: 36369 - DNA, 25 bp, Probe Sequence
cctgtaaacctctgaaggaatttat

SEQ ID NO: 36370 - DNA, 25 bp, Probe Sequence
gacgtactaagtgcaagatatgaaa

SEQ ID NO: 36371 - DNA, 25 bp, Probe Sequence
agcctgtaaacctctgaaggaattt

SEQ ID NO: 36372 - DNA, 25 bp, Probe Sequence
atatgtttcaagagcctgtaaacct

SEQ ID NO: 36373 - DNA, 25 bp, Probe Sequence
gatatgtttcaagagcctgtaaacc

SEQ ID NO: 36374 - DNA, 25 bp, Probe Sequence
acgtactaagtgcaagatatgaaat

SEQ ID NO: 36375 - DNA, 25 bp, Probe Sequence
tccaacacacgatagtaaggagcat

SEQ ID NO: 36376 - DNA, 25 bp, Probe Sequence
tatgtttcaagagcctgtaaacctc

SEQ ID NO: 36377 - DNA, 25 bp, Probe Sequence
agatatgtttcaagagcctgtaaac

SEQ ID NO: 36378 - DNA, 25 bp, Probe Sequence
gagcctgtaaacctctgaaggaatt

SEQ ID NO: 36379 - DNA, 25 bp, Probe Sequence
aagatgtgtcagatgagaagttacg

SEQ ID NO: 36380 - DNA, 25 bp, Probe Sequence
gatgtgtcagatgagaagttacgag

SEQ ID NO: 36381 - DNA, 25 bp, Probe Sequence
atgtgtcagatgagaagttacgaga

SEQ ID NO: 36382 - DNA, 25 bp, Probe Sequence
agatgtgtcagatgagaagttacga

SEQ ID NO: 36383 - DNA, 25 bp, Probe Sequence
atgagaagttacgagactacatctg

SEQ ID NO: 36384 - DNA, 25 bp, Probe Sequence
cagatgagaagttacgagactacat

SEQ ID NO: 36385 - DNA, 25 bp, Probe Sequence
tcagatgagaagttacgagactaca

SEQ ID NO: 36386 - DNA, 25 bp, Probe Sequence
gaagttacgagactacatctggaac

SEQ ID NO: 36387 - DNA, 25 bp, Probe Sequence
agaagttacgagactacatctggaa

SEQ ID NO: 36388 - DNA, 25 bp, Probe Sequence
gagaagttacgagactacatctgga

SEQ ID NO: 36389 - DNA, 25 bp, Probe Sequence
aagttacgagactacatctggaaca

SEQ ID NO: 36390 - DNA, 25 bp, Probe Sequence
tgagaagttacgagactacatctgg

SEQ ID NO: 36391 - DNA, 25 bp, Probe Sequence
attatggcatgacggagatgaatta

SEQ ID NO: 36392 - DNA, 25 bp, Probe Sequence
tattatggcatgacggagatgaatt

SEQ ID NO: 36393 - DNA, 25 bp, Probe Sequence
gtcagatgagaagttacgagactac

SEQ ID NO: 36394 - DNA, 25 bp, Probe Sequence
tgtcagatgagaagttacgagacta

SEQ ID NO: 36395 - DNA, 25 bp, Probe Sequence
gtattatggcatgacggagatgaat

SEQ ID NO: 36396 - DNA, 25 bp, Probe Sequence
ctacatctggaacacactcaactca

SEQ ID NO: 36397 - DNA, 25 bp, Probe Sequence
actacatctggaacacactcaactc

SEQ ID NO: 36398 - DNA, 25 bp, Probe Sequence
gactacatctggaacacactcaact

SEQ ID NO: 36399 - DNA, 25 bp, Probe Sequence
ttatggcatgacggagatgaattac

SEQ ID NO: 36400 - DNA, 25 bp, Probe Sequence
ttacgagactacatctggaacacac

SEQ ID NO: 36401 - DNA, 25 bp, Probe Sequence
gttacgagactacatctggaacaca

SEQ ID NO: 36402 - DNA, 25 bp, Probe Sequence
agttacgagactacatctggaacac

SEQ ID NO: 36403 - DNA, 25 bp, Probe Sequence
cctaattggatattgcctgattctg

SEQ ID NO: 36404 - DNA, 25 bp, Probe Sequence
taattggatattgcctgattctgtg

SEQ ID NO: 36405 - DNA, 25 bp, Probe Sequence
ctaattggatattgcctgattctgt

SEQ ID NO: 36406 - DNA, 25 bp, Probe Sequence
aattggatattgcctgattctgtgg

SEQ ID NO: 36407 - DNA, 25 bp, Probe Sequence
tgtctactatgaaccatcctgtact

SEQ ID NO: 36408 - DNA, 25 bp, Probe Sequence
gtgtctactatgaaccatcctgtac

SEQ ID NO: 36409 - DNA, 25 bp, Probe Sequence
gtctactatgaaccatcctgtactc

SEQ ID NO: 36410 - DNA, 25 bp, Probe Sequence
tggtgaagaaggatatattcggatg

SEQ ID NO: 36411 - DNA, 25 bp, Probe Sequence
tctacagaagtggtgtctactatga

SEQ ID NO: 36412 - DNA, 25 bp, Probe Sequence
ctctacagaagtggtgtctactatg

SEQ ID NO: 36413 - DNA, 25 bp, Probe Sequence
gaaggatatattcggatggcaagaa

SEQ ID NO: 36414 - DNA, 25 bp, Probe Sequence
aagaaggatatattcggatggcaag

SEQ ID NO: 36415 - DNA, 25 bp, Probe Sequence
gaagaaggatatattcggatggcaa

SEQ ID NO: 36416 - DNA, 25 bp, Probe Sequence
tacagaagtggtgtctactatgaac

SEQ ID NO: 36417 - DNA, 25 bp, Probe Sequence
cctctacagaagtggtgtctactat

SEQ ID NO: 36418 - DNA, 25 bp, Probe Sequence
ggtgaagaaggatatattcggatgg

SEQ ID NO: 36419 - DNA, 25 bp, Probe Sequence
ttggtgaagaaggatatattcggat

SEQ ID NO: 36420 - DNA, 25 bp, Probe Sequence
ctacagaagtggtgtctactatgaa

SEQ ID NO: 36421 - DNA, 25 bp, Probe Sequence
cagaatgtgaatcatggtgtacttg

SEQ ID NO: 36422 - DNA, 25 bp, Probe Sequence
attggatattgcctgattctgtgga

SEQ ID NO: 36423 - DNA, 25 bp, Probe Sequence
gaatgtgaatcatggtgtacttgtg

SEQ ID NO: 36424 - DNA, 25 bp, Probe Sequence
agaatgtgaatcatggtgtacttgt

SEQ ID NO: 36425 - DNA, 25 bp, Probe Sequence
tctactatgaaccatcctgtactca

SEQ ID NO: 36426 - DNA, 25 bp, Probe Sequence
agaaggatatattcggatggcaaga

SEQ ID NO: 36427 - DNA, 25 bp, Probe Sequence
ctctgccataatttgttgttcaact

SEQ ID NO: 36428 - DNA, 25 bp, Probe Sequence
tctgccataatttgttgttcaactg

SEQ ID NO: 36429 - DNA, 25 bp, Probe Sequence
ataatttgttgttcaactgctccct

SEQ ID NO: 36430 - DNA, 25 bp, Probe Sequence
cataatttgttgttcaactgctccc

SEQ ID NO: 36431 - DNA, 25 bp, Probe Sequence
ccataatttgttgttcaactgctcc

SEQ ID NO: 36432 - DNA, 25 bp, Probe Sequence
cctctgccataatttgttgttcaac

SEQ ID NO: 36433 - DNA, 25 bp, Probe Sequence
gccataatttgttgttcaactgctc

SEQ ID NO: 36434 - DNA, 25 bp, Probe Sequence
taatttgttgttcaactgctccctc

SEQ ID NO: 36435 - DNA, 25 bp, Probe Sequence
gcctctgccataatttgttgttcaa

SEQ ID NO: 36436 - DNA, 25 bp, Probe Sequence
ctgccataatttgttgttcaactgc

SEQ ID NO: 36437 - DNA, 25 bp, Probe Sequence
tgccataatttgttgttcaactgct

SEQ ID NO: 36438 - DNA, 25 bp, Probe Sequence
ttcaccccttgattaaagcaacttc

SEQ ID NO: 36439 - DNA, 25 bp, Probe Sequence
cttcaccccttgattaaagcaactt

SEQ ID NO: 36440 - DNA, 25 bp, Probe Sequence
caccccttgattaaagcaacttctg

SEQ ID NO: 36441 - DNA, 25 bp, Probe Sequence
tcaccccttgattaaagcaacttct

SEQ ID NO: 36442 - DNA, 25 bp, Probe Sequence
gacttcaccccttgattaaagcaac

SEQ ID NO: 36443 - DNA, 25 bp, Probe Sequence
attgaggacttcaccccttgattaa

SEQ ID NO: 36444 - DNA, 25 bp, Probe Sequence
ttgaggacttcaccccttgattaaa

SEQ ID NO: 36445 - DNA, 25 bp, Probe Sequence
acttcaccccttgattaaagcaact

SEQ ID NO: 36446 - DNA, 25 bp, Probe Sequence
gtagaaacgtgggttaagctcttcc

SEQ ID NO: 36447 - DNA, 25 bp, Probe Sequence
ggtagaaacgtgggttaagctcttc

SEQ ID NO: 36448 - DNA, 25 bp, Probe Sequence
aatttgttgttcaactgctccctcc

SEQ ID NO: 36449 - DNA, 25 bp, Probe Sequence
gattgaggacttcaccccttgatta

SEQ ID NO: 36450 - DNA, 25 bp, Probe Sequence
tagaaacgtgggttaagctcttcct

SEQ ID NO: 36451 - DNA, 25 bp, Probe Sequence
tatagaagacctgggacagaggact

SEQ ID NO: 36452 - DNA, 25 bp, Probe Sequence
caaataaatgccttggtacaagaaa

SEQ ID NO: 36453 - DNA, 25 bp, Probe Sequence
ctatagaagacctgggacagaggac

SEQ ID NO: 36454 - DNA, 25 bp, Probe Sequence
ccaaataaatgccttggtacaagaa

SEQ ID NO: 36455 - DNA, 25 bp, Probe Sequence
atcccaaataaatgccttggtacaa

SEQ ID NO: 36456 - DNA, 25 bp, Probe Sequence
ctcatcccaaataaatgccttggta

SEQ ID NO: 36457 - DNA, 25 bp, Probe Sequence
tcatcccaaataaatgccttggtac

SEQ ID NO: 36458 - DNA, 25 bp, Probe Sequence
cccaaataaatgccttggtacaaga

SEQ ID NO: 36459 - DNA, 25 bp, Probe Sequence
tcccaaataaatgccttggtacaag

SEQ ID NO: 36460 - DNA, 25 bp, Probe Sequence
catcccaaataaatgccttggtaca

SEQ ID NO: 36461 - DNA, 25 bp, Probe Sequence
atagaagacctgggacagaggactg

SEQ ID NO: 36462 - DNA, 25 bp, Probe Sequence
atcccagaagtggttgtttcccttg

SEQ ID NO: 36463 - DNA, 25 bp, Probe Sequence
catcccagaagtggttgtttccctt

SEQ ID NO: 36464 - DNA, 25 bp, Probe Sequence
cagaagtggttgtttcccttgcatg

SEQ ID NO: 36465 - DNA, 25 bp, Probe Sequence
aataaatgccttggtacaagaaaag

SEQ ID NO: 36466 - DNA, 25 bp, Probe Sequence
tcctcatcccaaataaatgccttgg

SEQ ID NO: 36467 - DNA, 25 bp, Probe Sequence
cctcatcccaaataaatgccttggt

SEQ ID NO: 36468 - DNA, 25 bp, Probe Sequence
aaataaatgccttggtacaagaaaa

SEQ ID NO: 36469 - DNA, 25 bp, Probe Sequence
agccactaaacttgttttacctagg

SEQ ID NO: 36470 - DNA, 25 bp, Probe Sequence
gccactaaacttgttttacctaggg

SEQ ID NO: 36471 - DNA, 25 bp, Probe Sequence
aagcttaccagccgagaaggaattc

SEQ ID NO: 36472 - DNA, 25 bp, Probe Sequence
gaagcttaccagccgagaaggaatt

SEQ ID NO: 36473 - DNA, 25 bp, Probe Sequence
cagaaggaagtaagttggagaagaa

SEQ ID NO: 36474 - DNA, 25 bp, Probe Sequence
acagaaggaagtaagttggagaaga

SEQ ID NO: 36475 - DNA, 25 bp, Probe Sequence
aacagaaggaagtaagttggagaag

SEQ ID NO: 36476 - DNA, 25 bp, Probe Sequence
taacagaaggaagtaagttggagaa

SEQ ID NO: 36477 - DNA, 25 bp, Probe Sequence
ttaacagaaggaagtaagttggaga

SEQ ID NO: 36478 - DNA, 25 bp, Probe Sequence
acattaacagaaggaagtaagttgg

SEQ ID NO: 36479 - DNA, 25 bp, Probe Sequence
cattaacagaaggaagtaagttgga

SEQ ID NO: 36480 - DNA, 25 bp, Probe Sequence
attaacagaaggaagtaagttggag

SEQ ID NO: 36481 - DNA, 25 bp, Probe Sequence
atgacattaacagaaggaagtaagt

SEQ ID NO: 36482 - DNA, 25 bp, Probe Sequence
tgacattaacagaaggaagtaagtt

SEQ ID NO: 36483 - DNA, 25 bp, Probe Sequence
ctgccttcatacagatgctgattaa

SEQ ID NO: 36484 - DNA, 25 bp, Probe Sequence
gacattaacagaaggaagtaagttg

SEQ ID NO: 36485 - DNA, 25 bp, Probe Sequence
agaaggaagtaagttggagaagaaa

SEQ ID NO: 36486 - DNA, 25 bp, Probe Sequence
tgactggagcaccttctaaatctaa

SEQ ID NO: 36487 - DNA, 25 bp, Probe Sequence
gactggagcaccttctaaatctaag

SEQ ID NO: 36488 - DNA, 25 bp, Probe Sequence
gaaggaagtaagttggagaagaaac

SEQ ID NO: 36489 - DNA, 25 bp, Probe Sequence
actggagcaccttctaaatctaaga

SEQ ID NO: 36490 - DNA, 25 bp, Probe Sequence
ctgactggagcaccttctaaatcta

SEQ ID NO: 36491 - DNA, 25 bp, Probe Sequence
ctggagcaccttctaaatctaagat

SEQ ID NO: 36492 - DNA, 25 bp, Probe Sequence
aatgacattaacagaaggaagtaag

SEQ ID NO: 36493 - DNA, 25 bp, Probe Sequence
tttattcaacctttgccactgatga

SEQ ID NO: 36494 - DNA, 25 bp, Probe Sequence
tgaaatgacattaacagaaggaagt

SEQ ID NO: 36495 - DNA, 25 bp, Probe Sequence
gccttcatacagatgctgattaaag

SEQ ID NO: 36496 - DNA, 25 bp, Probe Sequence
tgccttcatacagatgctgattaaa

SEQ ID NO: 36497 - DNA, 25 bp, Probe Sequence
tgatggttgatgtctcaggaataag

SEQ ID NO: 36498 - DNA, 25 bp, Probe Sequence
gtgatggttgatgtctcaggaataa

SEQ ID NO: 36499 - DNA, 25 bp, Probe Sequence
tgtgatggttgatgtctcaggaata

SEQ ID NO: 36500 - DNA, 25 bp, Probe Sequence
gatggttgatgtctcaggaataagc

SEQ ID NO: 36501 - DNA, 25 bp, Probe Sequence
tcatagttaagtagccactggtgtc

SEQ ID NO: 36502 - DNA, 25 bp, Probe Sequence
ctcatagttaagtagccactggtgt

SEQ ID NO: 36503 - DNA, 25 bp, Probe Sequence
ttgtgatggttgatgtctcaggaat

SEQ ID NO: 36504 - DNA, 25 bp, Probe Sequence
cctcatagttaagtagccactggtg

SEQ ID NO: 36505 - DNA, 25 bp, Probe Sequence
tttagaaagagaggaaggatgtctg

SEQ ID NO: 36506 - DNA, 25 bp, Probe Sequence
gagtttgtagtgggtggtttgtaaa

SEQ ID NO: 36507 - DNA, 25 bp, Probe Sequence
atagttaagtagccactggtgtcct

SEQ ID NO: 36508 - DNA, 25 bp, Probe Sequence
catagttaagtagccactggtgtcc

SEQ ID NO: 36509 - DNA, 25 bp, Probe Sequence
tattaagaaatcagatcccagggtg

SEQ ID NO: 36510 - DNA, 25 bp, Probe Sequence
atggttgatgtctcaggaataagct

SEQ ID NO: 36511 - DNA, 25 bp, Probe Sequence
ttattaagaaatcagatcccagggt

SEQ ID NO: 36512 - DNA, 25 bp, Probe Sequence
ttgatgtctcaggaataagctggat

SEQ ID NO: 36513 - DNA, 25 bp, Probe Sequence
atgtctcaggaataagctggatctc

SEQ ID NO: 36514 - DNA, 25 bp, Probe Sequence
gatgtctcaggaataagctggatct

SEQ ID NO: 36515 - DNA, 25 bp, Probe Sequence
ttagaaagagaggaaggatgtctgc

SEQ ID NO: 36516 - DNA, 25 bp, Probe Sequence
tgatgtctcaggaataagctggatc

SEQ ID NO: 36517 - DNA, 25 bp, Probe Sequence
tttattaagaaatcagatcccaggg

SEQ ID NO: 36518 - DNA, 25 bp, Probe Sequence
attaagaaatcagatcccagggtga

SEQ ID NO: 36519 - DNA, 25 bp, Probe Sequence
aggaataagctggatctccaatgtt

SEQ ID NO: 36520 - DNA, 25 bp, Probe Sequence
gttgatgtctcaggaataagctgga

SEQ ID NO: 36521 - DNA, 25 bp, Probe Sequence
aatcactccactgcttaccttacaa

SEQ ID NO: 36522 - DNA, 25 bp, Probe Sequence
aatgatcttagagaacaaggacagc

SEQ ID NO: 36523 - DNA, 25 bp, Probe Sequence
atcttagagaacaaggacagccatc

SEQ ID NO: 36524 - DNA, 25 bp, Probe Sequence
tttccatttgccttattgctacttc

SEQ ID NO: 36525 - DNA, 25 bp, Probe Sequence
catttccatttgccttattgctact

SEQ ID NO: 36526 - DNA, 25 bp, Probe Sequence
gacatttccatttgccttattgcta

SEQ ID NO: 36527 - DNA, 25 bp, Probe Sequence
gatcttagagaacaaggacagccat

SEQ ID NO: 36528 - DNA, 25 bp, Probe Sequence
atgatcttagagaacaaggacagcc

SEQ ID NO: 36529 - DNA, 25 bp, Probe Sequence
acatttccatttgccttattgctac

SEQ ID NO: 36530 - DNA, 25 bp, Probe Sequence
tgcttcaaaggtcaaacattacaaa

SEQ ID NO: 36531 - DNA, 25 bp, Probe Sequence
atttccatttgccttattgctactt

SEQ ID NO: 36532 - DNA, 25 bp, Probe Sequence
ttccatttgccttattgctacttca

SEQ ID NO: 36533 - DNA, 25 bp, Probe Sequence
atgcttcaaaggtcaaacattacaa

SEQ ID NO: 36534 - DNA, 25 bp, Probe Sequence
agaaatatgcttcaaaggtcaaaca

SEQ ID NO: 36535 - DNA, 25 bp, Probe Sequence
tatgcttcaaaggtcaaacattaca

SEQ ID NO: 36536 - DNA, 25 bp, Probe Sequence
atgacatttccatttgccttattgc

SEQ ID NO: 36537 - DNA, 25 bp, Probe Sequence
gaaatcactccactgcttaccttac

SEQ ID NO: 36538 - DNA, 25 bp, Probe Sequence
agaaatcactccactgcttacctta

SEQ ID NO: 36539 - DNA, 25 bp, Probe Sequence
ccatttgccttattgctacttcaag

SEQ ID NO: 36540 - DNA, 25 bp, Probe Sequence
tccatttgccttattgctacttcaa

SEQ ID NO: 36541 - DNA, 25 bp, Probe Sequence
gaactcctgacctcaagtgatcttc

SEQ ID NO: 36542 - DNA, 25 bp, Probe Sequence
cttagagaacaaggacagccatcac

SEQ ID NO: 36543 - DNA, 25 bp, Probe Sequence
tgacatttccatttgccttattgct

SEQ ID NO: 36544 - DNA, 25 bp, Probe Sequence
gaaatatgcttcaaaggtcaaacat

SEQ ID NO: 36545 - DNA, 25 bp, Probe Sequence
cacccataacaaacaattacaccat

SEQ ID NO: 36546 - DNA, 25 bp, Probe Sequence
ctcacccataacaaacaattacacc

SEQ ID NO: 36547 - DNA, 25 bp, Probe Sequence
actcacccataacaaacaattacac

SEQ ID NO: 36548 - DNA, 25 bp, Probe Sequence
cactcacccataacaaacaattaca

SEQ ID NO: 36549 - DNA, 25 bp, Probe Sequence
acactcacccataacaaacaattac

SEQ ID NO: 36550 - DNA, 25 bp, Probe Sequence
aaatctgactgctttactttgatgt

SEQ ID NO: 36551 - DNA, 25 bp, Probe Sequence
tcacccataacaaacaattacacca

SEQ ID NO: 36552 - DNA, 25 bp, Probe Sequence
tctgactgctttactttgatgtatc

SEQ ID NO: 36553 - DNA, 25 bp, Probe Sequence
gcatccagagtgacagtgaacttaa

SEQ ID NO: 36554 - DNA, 25 bp, Probe Sequence
gtacttgatgctcacagaggaagaa

SEQ ID NO: 36555 - DNA, 25 bp, Probe Sequence
aatctgactgctttactttgatgta

SEQ ID NO: 36556 - DNA, 25 bp, Probe Sequence
taagcaaattaccctcctacccaat

SEQ ID NO: 36557 - DNA, 25 bp, Probe Sequence
gtacactcacccataacaaacaatt

SEQ ID NO: 36558 - DNA, 25 bp, Probe Sequence
atcttcgtacttgatgctcacagag

SEQ ID NO: 36559 - DNA, 25 bp, Probe Sequence
cagcctaaaggtggttgtttattat

SEQ ID NO: 36560 - DNA, 25 bp, Probe Sequence
atctgactgctttactttgatgtat

SEQ ID NO: 36561 - DNA, 25 bp, Probe Sequence
ttaagcaaattaccctcctacccaa

SEQ ID NO: 36562 - DNA, 25 bp, Probe Sequence
tacactcacccataacaaacaatta

SEQ ID NO: 36563 - DNA, 25 bp, Probe Sequence
caaattaccctcctacccaattcta

SEQ ID NO: 36564 - DNA, 25 bp, Probe Sequence
aattaccctcctacccaattctatg

SEQ ID NO: 36565 - DNA, 25 bp, Probe Sequence
acccataacaaacaattacaccatg

SEQ ID NO: 36566 - DNA, 25 bp, Probe Sequence
aaattaccctcctacccaattctat

SEQ ID NO: 36567 - DNA, 25 bp, Probe Sequence
ctgactgctttactttgatgtatca

SEQ ID NO: 36568 - DNA, 25 bp, Probe Sequence
catccagagtgacagtgaacttaag

SEQ ID NO: 36569 - DNA, 25 bp, Probe Sequence
gcgtagaaatgtgagttgtattgtc

SEQ ID NO: 36570 - DNA, 25 bp, Probe Sequence
gtgcgtagaaatgtgagttgtattg

SEQ ID NO: 36571 - DNA, 25 bp, Probe Sequence
tgcgtagaaatgtgagttgtattgt

SEQ ID NO: 36572 - DNA, 25 bp, Probe Sequence
tgtgcgtagaaatgtgagttgtatt

SEQ ID NO: 36573 - DNA, 25 bp, Probe Sequence
ttgtgcgtagaaatgtgagttgtat

SEQ ID NO: 36574 - DNA, 25 bp, Probe Sequence
tttgtgcgtagaaatgtgagttgta

SEQ ID NO: 36575 - DNA, 25 bp, Probe Sequence
cgtagaaatgtgagttgtattgtca

SEQ ID NO: 36576 - DNA, 25 bp, Probe Sequence
tactttgtgcgtagaaatgtgagtt

SEQ ID NO: 36577 - DNA, 25 bp, Probe Sequence
ctttgtgcgtagaaatgtgagttgt

SEQ ID NO: 36578 - DNA, 25 bp, Probe Sequence
tgtactttgtgcgtagaaatgtgag

SEQ ID NO: 36579 - DNA, 25 bp, Probe Sequence
ctgtactttgtgcgtagaaatgtga

SEQ ID NO: 36580 - DNA, 25 bp, Probe Sequence
gtactttgtgcgtagaaatgtgagt

SEQ ID NO: 36581 - DNA, 25 bp, Probe Sequence
actttgtgcgtagaaatgtgagttg

SEQ ID NO: 36582 - DNA, 25 bp, Probe Sequence
gtagaaatgtgagttgtattgtcaa

SEQ ID NO: 36583 - DNA, 25 bp, Probe Sequence
gctgtactttgtgcgtagaaatgtg

SEQ ID NO: 36584 - DNA, 25 bp, Probe Sequence
gtgctgtactttgtgcgtagaaatg

SEQ ID NO: 36585 - DNA, 25 bp, Probe Sequence
cacctatgactttggggatgataat

SEQ ID NO: 36586 - DNA, 25 bp, Probe Sequence
acctatgactttggggatgataatc

SEQ ID NO: 36587 - DNA, 25 bp, Probe Sequence
tgctgtactttgtgcgtagaaatgt

SEQ ID NO: 36588 - DNA, 25 bp, Probe Sequence
tcacctatgactttggggatgataa

SEQ ID NO: 36589 - DNA, 25 bp, Probe Sequence
ctcacctatgactttggggatgata

SEQ ID NO: 36590 - DNA, 25 bp, Probe Sequence
agaaatgtgagttgtattgtcaacc

SEQ ID NO: 36591 - DNA, 25 bp, Probe Sequence
gaaatgtgagttgtattgtcaaccc

SEQ ID NO: 36592 - DNA, 25 bp, Probe Sequence
tctcacctatgactttggggatgat

SEQ ID NO: 36593 - DNA, 25 bp, Probe Sequence
aagaagaatgaggagatgatggaac

SEQ ID NO: 36594 - DNA, 25 bp, Probe Sequence
gaagaatgaggagatgatggaacag

SEQ ID NO: 36595 - DNA, 25 bp, Probe Sequence
agaatgaggagatgatggaacagaa

SEQ ID NO: 36596 - DNA, 25 bp, Probe Sequence
aagaatgaggagatgatggaacaga

SEQ ID NO: 36597 - DNA, 25 bp, Probe Sequence
agaagaatgaggagatgatggaaca

SEQ ID NO: 36598 - DNA, 25 bp, Probe Sequence
agatgatggaacagaaagagaagag

SEQ ID NO: 36599 - DNA, 25 bp, Probe Sequence
gagatgatggaacagaaagagaaga

SEQ ID NO: 36600 - DNA, 25 bp, Probe Sequence
gatgatggaacagaaagagaagagt

SEQ ID NO: 36601 - DNA, 25 bp, Probe Sequence
aaagaagaatgaggagatgatggaa

SEQ ID NO: 36602 - DNA, 25 bp, Probe Sequence
aatgaggagatgatggaacagaaag

SEQ ID NO: 36603 - DNA, 25 bp, Probe Sequence
agttaatggcagagcaagagaagac

SEQ ID NO: 36604 - DNA, 25 bp, Probe Sequence
cagttaatggcagagcaagagaaga

SEQ ID NO: 36605 - DNA, 25 bp, Probe Sequence
gaatgaggagatgatggaacagaaa

SEQ ID NO: 36606 - DNA, 25 bp, Probe Sequence
acagaaagagaagagttatcaggaa

SEQ ID NO: 36607 - DNA, 25 bp, Probe Sequence
ggagatgatggaacagaaagagaag

SEQ ID NO: 36608 - DNA, 25 bp, Probe Sequence
acaactgccattaaacttaactcaa

SEQ ID NO: 36609 - DNA, 25 bp, Probe Sequence
aacaactgccattaaacttaactca

SEQ ID NO: 36610 - DNA, 25 bp, Probe Sequence
ttggagccaatatgtaacatactct

SEQ ID NO: 36611 - DNA, 25 bp, Probe Sequence
cgagaatgagagcaagagacttcaa

SEQ ID NO: 36612 - DNA, 25 bp, Probe Sequence
aggagatgatggaacagaaagagaa

SEQ ID NO: 36613 - DNA, 25 bp, Probe Sequence
atgatggaacagaaagagaagagtt

SEQ ID NO: 36614 - DNA, 25 bp, Probe Sequence
gcaaagtaaaggttaagtatgaggt

SEQ ID NO: 36615 - DNA, 25 bp, Probe Sequence
atgaggagatgatggaacagaaaga

SEQ ID NO: 36616 - DNA, 25 bp, Probe Sequence
tggaacagaaagagaagagttatca

SEQ ID NO: 36617 - DNA, 25 bp, Probe Sequence
tttagagatatttcagccctttcct

SEQ ID NO: 36618 - DNA, 25 bp, Probe Sequence
gacgatgtgcctttgatttaatttg

SEQ ID NO: 36619 - DNA, 25 bp, Probe Sequence
gatgtgcctttgatttaatttggga

SEQ ID NO: 36620 - DNA, 25 bp, Probe Sequence
gcctttgatttaatttgggacactt

SEQ ID NO: 36621 - DNA, 25 bp, Probe Sequence
atgtgcctttgatttaatttgggac

SEQ ID NO: 36622 - DNA, 25 bp, Probe Sequence
tacaaattgctgggaggaagaatag

SEQ ID NO: 36623 - DNA, 25 bp, Probe Sequence
aaaccttaccaccaaacataccaaa

SEQ ID NO: 36624 - DNA, 25 bp, Probe Sequence
acgatgtgcctttgatttaatttgg

SEQ ID NO: 36625 - DNA, 25 bp, Probe Sequence
ctgggaggaagaataggctttatta

SEQ ID NO: 36626 - DNA, 25 bp, Probe Sequence
gagcagattcttaccaaacttcttt

SEQ ID NO: 36627 - DNA, 25 bp, Probe Sequence
cgacgatgtgcctttgatttaattt

SEQ ID NO: 36628 - DNA, 25 bp, Probe Sequence
tgggaggaagaataggctttattaa

SEQ ID NO: 36629 - DNA, 25 bp, Probe Sequence
ggagcagattcttaccaaacttctt

SEQ ID NO: 36630 - DNA, 25 bp, Probe Sequence
tgcctttgatttaatttgggacact

SEQ ID NO: 36631 - DNA, 25 bp, Probe Sequence
ctgtgctttactctgaagactctag

SEQ ID NO: 36632 - DNA, 25 bp, Probe Sequence
atgaagaccagaaagtacaaattgc

SEQ ID NO: 36633 - DNA, 25 bp, Probe Sequence
cgatgtgcctttgatttaatttggg

SEQ ID NO: 36634 - DNA, 25 bp, Probe Sequence
ccatcgtgtatataaatgaaggcag

SEQ ID NO: 36635 - DNA, 25 bp, Probe Sequence
tcctaaatgaagaccagaaagtaca

SEQ ID NO: 36636 - DNA, 25 bp, Probe Sequence
gtacaaattgctgggaggaagaata

SEQ ID NO: 36637 - DNA, 25 bp, Probe Sequence
tgaagaccagaaagtacaaattgct

SEQ ID NO: 36638 - DNA, 25 bp, Probe Sequence
cctgtgctttactctgaagactcta

SEQ ID NO: 36639 - DNA, 25 bp, Probe Sequence
cctttgatttaatttgggacacttt

SEQ ID NO: 36640 - DNA, 25 bp, Probe Sequence
cccatcgtgtatataaatgaaggca

SEQ ID NO: 36641 - DNA, 25 bp, Probe Sequence
gactcacacagcaagatcctatacg

SEQ ID NO: 36642 - DNA, 25 bp, Probe Sequence
ggactcacacagcaagatcctatac

SEQ ID NO: 36643 - DNA, 25 bp, Probe Sequence
tggactcacacagcaagatcctata

SEQ ID NO: 36644 - DNA, 25 bp, Probe Sequence
cacctttgagaagtctctgttgatg

SEQ ID NO: 36645 - DNA, 25 bp, Probe Sequence
acctttgagaagtctctgttgatgg

SEQ ID NO: 36646 - DNA, 25 bp, Probe Sequence
ccacctttgagaagtctctgttgat

SEQ ID NO: 36647 - DNA, 25 bp, Probe Sequence
ggtgtccattaaagagcagactcag

SEQ ID NO: 36648 - DNA, 25 bp, Probe Sequence
actcacacagcaagatcctatacgc

SEQ ID NO: 36649 - DNA, 25 bp, Probe Sequence
cctttgagaagtctctgttgatggg

SEQ ID NO: 36650 - DNA, 25 bp, Probe Sequence
gtggactcacacagcaagatcctat

SEQ ID NO: 36651 - DNA, 25 bp, Probe Sequence
gtgtccattaaagagcagactcagc

SEQ ID NO: 36652 - DNA, 25 bp, Probe Sequence
caccacctttgagaagtctctgttg

SEQ ID NO: 36653 - DNA, 25 bp, Probe Sequence
ctttgagaagtctctgttgatgggc

SEQ ID NO: 36654 - DNA, 25 bp, Probe Sequence
accacctttgagaagtctctgttga

SEQ ID NO: 36655 - DNA, 25 bp, Probe Sequence
ctcacacagcaagatcctatacgcc

SEQ ID NO: 36656 - DNA, 25 bp, Probe Sequence
tccattaaagagcagactcagcgtt

SEQ ID NO: 36657 - DNA, 25 bp, Probe Sequence
ttgagaagtctctgttgatgggcaa

SEQ ID NO: 36658 - DNA, 25 bp, Probe Sequence
tttgagaagtctctgttgatgggca

SEQ ID NO: 36659 - DNA, 25 bp, Probe Sequence
cggtgtccattaaagagcagactca

SEQ ID NO: 36660 - DNA, 25 bp, Probe Sequence
tgagaagtctctgttgatgggcaag

SEQ ID NO: 36661 - DNA, 25 bp, Probe Sequence
gtccattaaagagcagactcagcgt

SEQ ID NO: 36662 - DNA, 25 bp, Probe Sequence
tgtccattaaagagcagactcagcg

SEQ ID NO: 36663 - DNA, 25 bp, Probe Sequence
gaagtctctgttgatgggcaaggag

SEQ ID NO: 36664 - DNA, 25 bp, Probe Sequence
gcaccacctttgagaagtctctgtt

SEQ ID NO: 36665 - DNA, 25 bp, Probe Sequence
gagaagtctctgttgatgggcaagg

SEQ ID NO: 36666 - DNA, 25 bp, Probe Sequence
tgcttttgttcagttctggatattt

SEQ ID NO: 36667 - DNA, 25 bp, Probe Sequence
aaatgcttttgttcagttctggata

SEQ ID NO: 36668 - DNA, 25 bp, Probe Sequence
gcttttgttcagttctggatatttg

SEQ ID NO: 36669 - DNA, 25 bp, Probe Sequence
atgcttttgttcagttctggatatt

SEQ ID NO: 36670 - DNA, 25 bp, Probe Sequence
aatgcttttgttcagttctggatat

SEQ ID NO: 36671 - DNA, 25 bp, Probe Sequence
tggatatttgaaaatagcagtgtgt

SEQ ID NO: 36672 - DNA, 25 bp, Probe Sequence
aaaatgcttttgttcagttctggat

SEQ ID NO: 36673 - DNA, 25 bp, Probe Sequence
taaaatgcttttgttcagttctgga

SEQ ID NO: 36674 - DNA, 25 bp, Probe Sequence
ctaaaatgcttttgttcagttctgg

SEQ ID NO: 36675 - DNA, 25 bp, Probe Sequence
ggatatttgaaaatagcagtgtgtt

SEQ ID NO: 36676 - DNA, 25 bp, Probe Sequence
cttttgttcagttctggatatttga

SEQ ID NO: 36677 - DNA, 25 bp, Probe Sequence
ctggatatttgaaaatagcagtgtg

SEQ ID NO: 36678 - DNA, 25 bp, Probe Sequence
tctggatatttgaaaatagcagtgt

SEQ ID NO: 36679 - DNA, 25 bp, Probe Sequence
cagttctggatatttgaaaatagca

SEQ ID NO: 36680 - DNA, 25 bp, Probe Sequence
tttgttcagttctggatatttgaaa

SEQ ID NO: 36681 - DNA, 25 bp, Probe Sequence
tcagttctggatatttgaaaatagc

SEQ ID NO: 36682 - DNA, 25 bp, Probe Sequence
ttctggatatttgaaaatagcagtg

SEQ ID NO: 36683 - DNA, 25 bp, Probe Sequence
gttctggatatttgaaaatagcagt

SEQ ID NO: 36684 - DNA, 25 bp, Probe Sequence
gatatttgaaaatagcagtgtgttc

SEQ ID NO: 36685 - DNA, 25 bp, Probe Sequence
agttctggatatttgaaaatagcag

SEQ ID NO: 36686 - DNA, 25 bp, Probe Sequence
ttgttcagttctggatatttgaaaa

SEQ ID NO: 36687 - DNA, 25 bp, Probe Sequence
ttttgttcagttctggatatttgaa

SEQ ID NO: 36688 - DNA, 25 bp, Probe Sequence
tgttcagttctggatatttgaaaat

SEQ ID NO: 36689 - DNA, 25 bp, Probe Sequence
gttcagttctggatatttgaaaata

SEQ ID NO: 36690 - DNA, 25 bp, Probe Sequence
ttcagttctggatatttgaaaatag

SEQ ID NO: 36691 - DNA, 25 bp, Probe Sequence
gaatctgacttacgccattattacg

SEQ ID NO: 36692 - DNA, 25 bp, Probe Sequence
cgaatctgacttacgccattattac

SEQ ID NO: 36693 - DNA, 25 bp, Probe Sequence
aatctgacttacgccattattacga

SEQ ID NO: 36694 - DNA, 25 bp, Probe Sequence
atctgacttacgccattattacgac

SEQ ID NO: 36695 - DNA, 25 bp, Probe Sequence
gacttacgccattattacgacagta

SEQ ID NO: 36696 - DNA, 25 bp, Probe Sequence
ccattattacgacagtaccattgag

SEQ ID NO: 36697 - DNA, 25 bp, Probe Sequence
gccattattacgacagtaccattga

SEQ ID NO: 36698 - DNA, 25 bp, Probe Sequence
tctgacttacgccattattacgaca

SEQ ID NO: 36699 - DNA, 25 bp, Probe Sequence
ttattacgacagtaccattgagttg

SEQ ID NO: 36700 - DNA, 25 bp, Probe Sequence
cattattacgacagtaccattgagt

SEQ ID NO: 36701 - DNA, 25 bp, Probe Sequence
cttacgccattattacgacagtacc

SEQ ID NO: 36702 - DNA, 25 bp, Probe Sequence
acttacgccattattacgacagtac

SEQ ID NO: 36703 - DNA, 25 bp, Probe Sequence
tattacgacagtaccattgagttgt

SEQ ID NO: 36704 - DNA, 25 bp, Probe Sequence
tacgccattattacgacagtaccat

SEQ ID NO: 36705 - DNA, 25 bp, Probe Sequence
ctacatggcttatcttatgatctgg

SEQ ID NO: 36706 - DNA, 25 bp, Probe Sequence
cctacatggcttatcttatgatctg

SEQ ID NO: 36707 - DNA, 25 bp, Probe Sequence
attattacgacagtaccattgagtt

SEQ ID NO: 36708 - DNA, 25 bp, Probe Sequence
ttacgccattattacgacagtacca

SEQ ID NO: 36709 - DNA, 25 bp, Probe Sequence
actacaagaggtgaagatgacagtg

SEQ ID NO: 36710 - DNA, 25 bp, Probe Sequence
attacgacagtaccattgagttgtg

SEQ ID NO: 36711 - DNA, 25 bp, Probe Sequence
tgacttacgccattattacgacagt

SEQ ID NO: 36712 - DNA, 25 bp, Probe Sequence
ctgacttacgccattattacgacag

SEQ ID NO: 36713 - DNA, 25 bp, Probe Sequence
cgccattattacgacagtaccattg

SEQ ID NO: 36714 - DNA, 25 bp, Probe Sequence
atgaaacgctactaactacaggaag

SEQ ID NO: 36715 - DNA, 25 bp, Probe Sequence
gatggaatcaacacaacatagtatg

SEQ ID NO: 36716 - DNA, 25 bp, Probe Sequence
aactaatggctgtgacttcagagaa

SEQ ID NO: 36717 - DNA, 25 bp, Probe Sequence
aaagcaaagccaatctctcatttag

SEQ ID NO: 36718 - DNA, 25 bp, Probe Sequence
gaaagcaaagccaatctctcattta

SEQ ID NO: 36719 - DNA, 25 bp, Probe Sequence
caaatacaacattctccatctgctt

SEQ ID NO: 36720 - DNA, 25 bp, Probe Sequence
ccacaaatacaacattctccatctg

SEQ ID NO: 36721 - DNA, 25 bp, Probe Sequence
gaccacaaatacaacattctccatc

SEQ ID NO: 36722 - DNA, 25 bp, Probe Sequence
tatcagagaggaccacaaatacaac

SEQ ID NO: 36723 - DNA, 25 bp, Probe Sequence
aagtggcttctaaggtactgtcttc

SEQ ID NO: 36724 - DNA, 25 bp, Probe Sequence
aatacaacattctccatctgctttc

SEQ ID NO: 36725 - DNA, 25 bp, Probe Sequence
accacaaatacaacattctccatct

SEQ ID NO: 36726 - DNA, 25 bp, Probe Sequence
atagtatgtttgctttccttaccca

SEQ ID NO: 36727 - DNA, 25 bp, Probe Sequence
atacaacattctccatctgctttca

SEQ ID NO: 36728 - DNA, 25 bp, Probe Sequence
acaaatacaacattctccatctgct

SEQ ID NO: 36729 - DNA, 25 bp, Probe Sequence
cacaaatacaacattctccatctgc

SEQ ID NO: 36730 - DNA, 25 bp, Probe Sequence
agagaggaccacaaatacaacattc

SEQ ID NO: 36731 - DNA, 25 bp, Probe Sequence
aaccaccatcacatctttattcctc

SEQ ID NO: 36732 - DNA, 25 bp, Probe Sequence
aaatacaacattctccatctgcttt

SEQ ID NO: 36733 - DNA, 25 bp, Probe Sequence
cagagaggaccacaaatacaacatt

SEQ ID NO: 36734 - DNA, 25 bp, Probe Sequence
agaactaatggctgtgacttcagag

SEQ ID NO: 36735 - DNA, 25 bp, Probe Sequence
ccaccatcacatctttattcctcag

SEQ ID NO: 36736 - DNA, 25 bp, Probe Sequence
gaaccaccatcacatctttattcct

SEQ ID NO: 36737 - DNA, 25 bp, Probe Sequence
gaactaatggctgtgacttcagaga

SEQ ID NO: 36738 - DNA, 25 bp, Probe Sequence
atttagacctggcttctttcttctg

SEQ ID NO: 36739 - DNA, 25 bp, Probe Sequence
gaacgagttgaagcagttaatatgg

SEQ ID NO: 36740 - DNA, 25 bp, Probe Sequence
ggaacgagttgaagcagttaatatg

SEQ ID NO: 36741 - DNA, 25 bp, Probe Sequence
aggaacgagttgaagcagttaatat

SEQ ID NO: 36742 - DNA, 25 bp, Probe Sequence
aaggaacgagttgaagcagttaata

SEQ ID NO: 36743 - DNA, 25 bp, Probe Sequence
ggagttcctcagattgaagttacat

SEQ ID NO: 36744 - DNA, 25 bp, Probe Sequence
gaaggaacgagttgaagcagttaat

SEQ ID NO: 36745 - DNA, 25 bp, Probe Sequence
gagttcctcagattgaagttacatt

SEQ ID NO: 36746 - DNA, 25 bp, Probe Sequence
gtggagttcctcagattgaagttac

SEQ ID NO: 36747 - DNA, 25 bp, Probe Sequence
aacgagttgaagcagttaatatggc

SEQ ID NO: 36748 - DNA, 25 bp, Probe Sequence
agttaatatggctgaaggaatcatt

SEQ ID NO: 36749 - DNA, 25 bp, Probe Sequence
tggagttcctcagattgaagttaca

SEQ ID NO: 36750 - DNA, 25 bp, Probe Sequence
cagttaatatggctgaaggaatcat

SEQ ID NO: 36751 - DNA, 25 bp, Probe Sequence
gcagttaatatggctgaaggaatca

SEQ ID NO: 36752 - DNA, 25 bp, Probe Sequence
gttaatatggctgaaggaatcattc

SEQ ID NO: 36753 - DNA, 25 bp, Probe Sequence
aagaaggaacgagttgaagcagtta

SEQ ID NO: 36754 - DNA, 25 bp, Probe Sequence
agaaggaacgagttgaagcagttaa

SEQ ID NO: 36755 - DNA, 25 bp, Probe Sequence
cgtggagttcctcagattgaagtta

SEQ ID NO: 36756 - DNA, 25 bp, Probe Sequence
gaagttacatttgacattgatgcca

SEQ ID NO: 36757 - DNA, 25 bp, Probe Sequence
tgaagttacatttgacattgatgcc

SEQ ID NO: 36758 - DNA, 25 bp, Probe Sequence
tctggtggattaagcaaagatgata

SEQ ID NO: 36759 - DNA, 25 bp, Probe Sequence
ttctggtggattaagcaaagatgat

SEQ ID NO: 36760 - DNA, 25 bp, Probe Sequence
ctggtggattaagcaaagatgatat

SEQ ID NO: 36761 - DNA, 25 bp, Probe Sequence
aagttacatttgacattgatgccaa

SEQ ID NO: 36762 - DNA, 25 bp, Probe Sequence
attcaaggaccaattacctgctgat

SEQ ID NO: 36763 - DNA, 25 bp, Probe Sequence
catggacaatgagaatatgcacact

SEQ ID NO: 36764 - DNA, 25 bp, Probe Sequence
atggacaatgagaatatgcacactc

SEQ ID NO: 36765 - DNA, 25 bp, Probe Sequence
tttcagaacaaacaattcctccgtc

SEQ ID NO: 36766 - DNA, 25 bp, Probe Sequence
aacaattcctccgtccgctaagtat

SEQ ID NO: 36767 - DNA, 25 bp, Probe Sequence
atgtgtaccagtggactttgaagag

SEQ ID NO: 36768 - DNA, 25 bp, Probe Sequence
gaataaagcaccttctccctagaaa

SEQ ID NO: 36769 - DNA, 25 bp, Probe Sequence
catgtgtaccagtggactttgaaga

SEQ ID NO: 36770 - DNA, 25 bp, Probe Sequence
agaataaagcaccttctccctagaa

SEQ ID NO: 36771 - DNA, 25 bp, Probe Sequence
acaattcctccgtccgctaagtatg

SEQ ID NO: 36772 - DNA, 25 bp, Probe Sequence
gaggaacatcttttcagaacaaaca

SEQ ID NO: 36773 - DNA, 25 bp, Probe Sequence
cagaataaagcaccttctccctaga

SEQ ID NO: 36774 - DNA, 25 bp, Probe Sequence
tggacaatgagaatatgcacactcc

SEQ ID NO: 36775 - DNA, 25 bp, Probe Sequence
aggaacatcttttcagaacaaacaa

SEQ ID NO: 36776 - DNA, 25 bp, Probe Sequence
tcttttcagaacaaacaattcctcc

SEQ ID NO: 36777 - DNA, 25 bp, Probe Sequence
ttcagaacaaacaattcctccgtcc

SEQ ID NO: 36778 - DNA, 25 bp, Probe Sequence
cgaggaacatcttttcagaacaaac

SEQ ID NO: 36779 - DNA, 25 bp, Probe Sequence
cttttcagaacaaacaattcctccg

SEQ ID NO: 36780 - DNA, 25 bp, Probe Sequence
ggaacatcttttcagaacaaacaat

SEQ ID NO: 36781 - DNA, 25 bp, Probe Sequence
acatcttttcagaacaaacaattcc

SEQ ID NO: 36782 - DNA, 25 bp, Probe Sequence
ttttcagaacaaacaattcctccgt

SEQ ID NO: 36783 - DNA, 25 bp, Probe Sequence
catcttttcagaacaaacaattcct

SEQ ID NO: 36784 - DNA, 25 bp, Probe Sequence
ccagaataaagcaccttctccctag

SEQ ID NO: 36785 - DNA, 25 bp, Probe Sequence
atcttttcagaacaaacaattcctc

SEQ ID NO: 36786 - DNA, 25 bp, Probe Sequence
aaacaattcctccgtccgctaagta

SEQ ID NO: 36787 - DNA, 25 bp, Probe Sequence
ctattcctctgtgtgttctctggat

SEQ ID NO: 36788 - DNA, 25 bp, Probe Sequence
tattcctctgtgtgttctctggatc

SEQ ID NO: 36789 - DNA, 25 bp, Probe Sequence
attcctctgtgtgttctctggatct

SEQ ID NO: 36790 - DNA, 25 bp, Probe Sequence
cctattcctctgtgtgttctctgga

SEQ ID NO: 36791 - DNA, 25 bp, Probe Sequence
ttcctctgtgtgttctctggatctt

SEQ ID NO: 36792 - DNA, 25 bp, Probe Sequence
gcctattcctctgtgtgttctctgg

SEQ ID NO: 36793 - DNA, 25 bp, Probe Sequence
ctctgtgtgttctctggatcttttc

SEQ ID NO: 36794 - DNA, 25 bp, Probe Sequence
tctgtgtgttctctggatcttttca

SEQ ID NO: 36795 - DNA, 25 bp, Probe Sequence
tcctctgtgtgttctctggatcttt

SEQ ID NO: 36796 - DNA, 25 bp, Probe Sequence
ctgtgtgttctctggatcttttcag

SEQ ID NO: 36797 - DNA, 25 bp, Probe Sequence
cctctgtgtgttctctggatctttt

SEQ ID NO: 36798 - DNA, 25 bp, Probe Sequence
gagacagggatgatggagagttcat

SEQ ID NO: 36799 - DNA, 25 bp, Probe Sequence
agacagggatgatggagagttcatg

SEQ ID NO: 36800 - DNA, 25 bp, Probe Sequence
tggagacagggatgatggagagttc

SEQ ID NO: 36801 - DNA, 25 bp, Probe Sequence
ggcctattcctctgtgtgttctctg

SEQ ID NO: 36802 - DNA, 25 bp, Probe Sequence
tgtgtgttctctggatcttttcagc

SEQ ID NO: 36803 - DNA, 25 bp, Probe Sequence
ggagacagggatgatggagagttca

SEQ ID NO: 36804 - DNA, 25 bp, Probe Sequence
gtggcctattcctctgtgtgttctc

SEQ ID NO: 36805 - DNA, 25 bp, Probe Sequence
tggcctattcctctgtgtgttctct

SEQ ID NO: 36806 - DNA, 25 bp, Probe Sequence
ctggagacagggatgatggagagtt

SEQ ID NO: 36807 - DNA, 25 bp, Probe Sequence
ctgagtgactggagacagggatgat

SEQ ID NO: 36808 - DNA, 25 bp, Probe Sequence
gtaaggtggcctattcctctgtgtg

SEQ ID NO: 36809 - DNA, 25 bp, Probe Sequence
gtgtaaggtggcctattcctctgtg

SEQ ID NO: 36810 - DNA, 25 bp, Probe Sequence
gtgtgtaaggtggcctattcctctg

SEQ ID NO: 36811 - DNA, 25 bp, Probe Sequence
tatcatctataaggtgcctcactgt

SEQ ID NO: 36812 - DNA, 25 bp, Probe Sequence
atatcatctataaggtgcctcactg

SEQ ID NO: 36813 - DNA, 25 bp, Probe Sequence
catctataaggtgcctcactgtgta

SEQ ID NO: 36814 - DNA, 25 bp, Probe Sequence
ctggaacttcatttgtcttaccttg

SEQ ID NO: 36815 - DNA, 25 bp, Probe Sequence
actggaacttcatttgtcttacctt

SEQ ID NO: 36816 - DNA, 25 bp, Probe Sequence
aactggaacttcatttgtcttacct

SEQ ID NO: 36817 - DNA, 25 bp, Probe Sequence
aaactggaacttcatttgtcttacc

SEQ ID NO: 36818 - DNA, 25 bp, Probe Sequence
atcatctataaggtgcctcactgtg

SEQ ID NO: 36819 - DNA, 25 bp, Probe Sequence
tggatatcatctataaggtgcctca

SEQ ID NO: 36820 - DNA, 25 bp, Probe Sequence
ttggatatcatctataaggtgcctc

SEQ ID NO: 36821 - DNA, 25 bp, Probe Sequence
atctataaggtgcctcactgtgtac

SEQ ID NO: 36822 - DNA, 25 bp, Probe Sequence
gaacttcatttgtcttaccttggtg

SEQ ID NO: 36823 - DNA, 25 bp, Probe Sequence
tggaacttcatttgtcttaccttgg

SEQ ID NO: 36824 - DNA, 25 bp, Probe Sequence
caatcctcagaaagtgggtaaagac

SEQ ID NO: 36825 - DNA, 25 bp, Probe Sequence
aacttcatttgtcttaccttggtgt

SEQ ID NO: 36826 - DNA, 25 bp, Probe Sequence
acaatcctcagaaagtgggtaaaga

SEQ ID NO: 36827 - DNA, 25 bp, Probe Sequence
attggatatcatctataaggtgcct

SEQ ID NO: 36828 - DNA, 25 bp, Probe Sequence
aattgtgaagaagtgaaacctttcc

SEQ ID NO: 36829 - DNA, 25 bp, Probe Sequence
ggaacttcatttgtcttaccttggt

SEQ ID NO: 36830 - DNA, 25 bp, Probe Sequence
caaattgtgaagaagtgaaaccttt

SEQ ID NO: 36831 - DNA, 25 bp, Probe Sequence
tcaaattgtgaagaagtgaaacctt

SEQ ID NO: 36832 - DNA, 25 bp, Probe Sequence
cttcatttgtcttaccttggtgtca

SEQ ID NO: 36833 - DNA, 25 bp, Probe Sequence
acttcatttgtcttaccttggtgtc

SEQ ID NO: 36834 - DNA, 25 bp, Probe Sequence
tgagaatttacaccaaacccaaagg

SEQ ID NO: 36835 - DNA, 25 bp, Probe Sequence
gctaacttattctactccgatgatc

SEQ ID NO: 36836 - DNA, 25 bp, Probe Sequence
cagctaacttattctactccgatga

SEQ ID NO: 36837 - DNA, 25 bp, Probe Sequence
tcagctaacttattctactccgatg

SEQ ID NO: 36838 - DNA, 25 bp, Probe Sequence
ggctgaatgtaacagaggaactaac

SEQ ID NO: 36839 - DNA, 25 bp, Probe Sequence
ttcagctaacttattctactccgat

SEQ ID NO: 36840 - DNA, 25 bp, Probe Sequence
agctaacttattctactccgatgat

SEQ ID NO: 36841 - DNA, 25 bp, Probe Sequence
gctgaatgtaacagaggaactaacg

SEQ ID NO: 36842 - DNA, 25 bp, Probe Sequence
tgaatgtaacagaggaactaacgtc

SEQ ID NO: 36843 - DNA, 25 bp, Probe Sequence
attagcggtgtatttcttgaagttt

SEQ ID NO: 36844 - DNA, 25 bp, Probe Sequence
agcggtgtatttcttgaagtttaat

SEQ ID NO: 36845 - DNA, 25 bp, Probe Sequence
caaataaacgctcactccgaattag

SEQ ID NO: 36846 - DNA, 25 bp, Probe Sequence
aattagcggtgtatttcttgaagtt

SEQ ID NO: 36847 - DNA, 25 bp, Probe Sequence
gaattagcggtgtatttcttgaagt

SEQ ID NO: 36848 - DNA, 25 bp, Probe Sequence
cgaattagcggtgtatttcttgaag

SEQ ID NO: 36849 - DNA, 25 bp, Probe Sequence
ttagcggtgtatttcttgaagttta

SEQ ID NO: 36850 - DNA, 25 bp, Probe Sequence
tagcggtgtatttcttgaagtttaa

SEQ ID NO: 36851 - DNA, 25 bp, Probe Sequence
cggctgaatgtaacagaggaactaa

SEQ ID NO: 36852 - DNA, 25 bp, Probe Sequence
ctgaatgtaacagaggaactaacgt

SEQ ID NO: 36853 - DNA, 25 bp, Probe Sequence
atagtcagagggatcacaatctttc

SEQ ID NO: 36854 - DNA, 25 bp, Probe Sequence
gaatagtcagagggatcacaatctt

SEQ ID NO: 36855 - DNA, 25 bp, Probe Sequence
aatagtcagagggatcacaatcttt

SEQ ID NO: 36856 - DNA, 25 bp, Probe Sequence
tagtcagagggatcacaatctttca

SEQ ID NO: 36857 - DNA, 25 bp, Probe Sequence
ggaatagtcagagggatcacaatct

SEQ ID NO: 36858 - DNA, 25 bp, Probe Sequence
gcggtgtatttcttgaagtttaata

SEQ ID NO: 36859 - DNA, 25 bp, Probe Sequence
ccacttcctcaccaacacttattat

SEQ ID NO: 36860 - DNA, 25 bp, Probe Sequence
cacttcctcaccaacacttattatt

SEQ ID NO: 36861 - DNA, 25 bp, Probe Sequence
tccacttcctcaccaacacttatta

SEQ ID NO: 36862 - DNA, 25 bp, Probe Sequence
gatgtcaagtgcctagttcagtatc

SEQ ID NO: 36863 - DNA, 25 bp, Probe Sequence
atgtcaagtgcctagttcagtatct

SEQ ID NO: 36864 - DNA, 25 bp, Probe Sequence
gtgtgaagtggtatctcattgtgtt

SEQ ID NO: 36865 - DNA, 25 bp, Probe Sequence
tgtcaagtgcctagttcagtatctt

SEQ ID NO: 36866 - DNA, 25 bp, Probe Sequence
ggtatatatctaggagtggaactgc

SEQ ID NO: 36867 - DNA, 25 bp, Probe Sequence
atatatctaggagtggaactgctgg

SEQ ID NO: 36868 - DNA, 25 bp, Probe Sequence
ggatgtcaagtgcctagttcagtat

SEQ ID NO: 36869 - DNA, 25 bp, Probe Sequence
tatatatctaggagtggaactgctg

SEQ ID NO: 36870 - DNA, 25 bp, Probe Sequence
gtatatatctaggagtggaactgct

SEQ ID NO: 36871 - DNA, 25 bp, Probe Sequence
gtccacttcctcaccaacacttatt

SEQ ID NO: 36872 - DNA, 25 bp, Probe Sequence
gtccctttgatagataatgctgagt

SEQ ID NO: 36873 - DNA, 25 bp, Probe Sequence
agtccctttgatagataatgctgag

SEQ ID NO: 36874 - DNA, 25 bp, Probe Sequence
catagtagcatgtatcaacacttca

SEQ ID NO: 36875 - DNA, 25 bp, Probe Sequence
aatctgctttctgtctctatggttt

SEQ ID NO: 36876 - DNA, 25 bp, Probe Sequence
tagtgctgctatgaatgtttgtgta

SEQ ID NO: 36877 - DNA, 25 bp, Probe Sequence
atccagtccctttgatagataatgc

SEQ ID NO: 36878 - DNA, 25 bp, Probe Sequence
acctgtatttgtttgaatgcctatt

SEQ ID NO: 36879 - DNA, 25 bp, Probe Sequence
caatctgctttctgtctctatggtt

SEQ ID NO: 36880 - DNA, 25 bp, Probe Sequence
gcatttattggctcttgaatttcct

SEQ ID NO: 36881 - DNA, 25 bp, Probe Sequence
tccagtccctttgatagataatgct

SEQ ID NO: 36882 - DNA, 25 bp, Probe Sequence
tttctctcattcttgtattgccttt

SEQ ID NO: 36883 - DNA, 25 bp, Probe Sequence
gctaacttccactaatccattatcc

SEQ ID NO: 36884 - DNA, 25 bp, Probe Sequence
ggcatggattaatagagttggagtt

SEQ ID NO: 36885 - DNA, 25 bp, Probe Sequence
ctggcatggattaatagagttggag

SEQ ID NO: 36886 - DNA, 25 bp, Probe Sequence
ctaacttccactaatccattatcct

SEQ ID NO: 36887 - DNA, 25 bp, Probe Sequence
aggtaactaactgcttcatctcctt

SEQ ID NO: 36888 - DNA, 25 bp, Probe Sequence
aaggtaactaactgcttcatctcct

SEQ ID NO: 36889 - DNA, 25 bp, Probe Sequence
acaagctaacttccactaatccatt

SEQ ID NO: 36890 - DNA, 25 bp, Probe Sequence
tggcatggattaatagagttggagt

SEQ ID NO: 36891 - DNA, 25 bp, Probe Sequence
ttcacaagctaacttccactaatcc

SEQ ID NO: 36892 - DNA, 25 bp, Probe Sequence
cacaagctaacttccactaatccat

SEQ ID NO: 36893 - DNA, 25 bp, Probe Sequence
attcacaagctaacttccactaatc

SEQ ID NO: 36894 - DNA, 25 bp, Probe Sequence
tgcctgctgtatttatagtaaccat

SEQ ID NO: 36895 - DNA, 25 bp, Probe Sequence
ttgcctgctgtatttatagtaacca

SEQ ID NO: 36896 - DNA, 25 bp, Probe Sequence
ggtaactaactgcttcatctccttt

SEQ ID NO: 36897 - DNA, 25 bp, Probe Sequence
aattcacaagctaacttccactaat

SEQ ID NO: 36898 - DNA, 25 bp, Probe Sequence
caagctaacttccactaatccatta

SEQ ID NO: 36899 - DNA, 25 bp, Probe Sequence
gatgagcatttagcacaatttgaga

SEQ ID NO: 36900 - DNA, 25 bp, Probe Sequence
tttgcctgctgtatttatagtaacc

SEQ ID NO: 36901 - DNA, 25 bp, Probe Sequence
taacttccactaatccattatcctt

SEQ ID NO: 36902 - DNA, 25 bp, Probe Sequence
atgagcatttagcacaatttgagac

SEQ ID NO: 36903 - DNA, 25 bp, Probe Sequence
tgatgagcatttagcacaatttgag

SEQ ID NO: 36904 - DNA, 25 bp, Probe Sequence
ccaaatgtgccatactaatgatgag

SEQ ID NO: 36905 - DNA, 25 bp, Probe Sequence
actggcatggattaatagagttgga

SEQ ID NO: 36906 - DNA, 25 bp, Probe Sequence
gaccaaatgtgccatactaatgatg

SEQ ID NO: 36907 - DNA, 25 bp, Probe Sequence
ctattctggaggcgttgtcaatatg

SEQ ID NO: 36908 - DNA, 25 bp, Probe Sequence
attctggaggcgttgtcaatatgta

SEQ ID NO: 36909 - DNA, 25 bp, Probe Sequence
tattctggaggcgttgtcaatatgt

SEQ ID NO: 36910 - DNA, 25 bp, Probe Sequence
cgttaagtccaaggagaagaagagg

SEQ ID NO: 36911 - DNA, 25 bp, Probe Sequence
gatggttgggtgaaagtagaaagta

SEQ ID NO: 36912 - DNA, 25 bp, Probe Sequence
aagatggttgggtgaaagtagaaag

SEQ ID NO: 36913 - DNA, 25 bp, Probe Sequence
gaagatggttgggtgaaagtagaaa

SEQ ID NO: 36914 - DNA, 25 bp, Probe Sequence
ctattgcttatgccactcacagaga

SEQ ID NO: 36915 - DNA, 25 bp, Probe Sequence
gttaagtccaaggagaagaagaggc

SEQ ID NO: 36916 - DNA, 25 bp, Probe Sequence
tattgcttatgccactcacagagac

SEQ ID NO: 36917 - DNA, 25 bp, Probe Sequence
gctattctggaggcgttgtcaatat

SEQ ID NO: 36918 - DNA, 25 bp, Probe Sequence
ttctggaggcgttgtcaatatgtac

SEQ ID NO: 36919 - DNA, 25 bp, Probe Sequence
gggtgaaagtagaaagtacagatgt

SEQ ID NO: 36920 - DNA, 25 bp, Probe Sequence
tgggtgaaagtagaaagtacagatg

SEQ ID NO: 36921 - DNA, 25 bp, Probe Sequence
ttgggtgaaagtagaaagtacagat

SEQ ID NO: 36922 - DNA, 25 bp, Probe Sequence
gttgggtgaaagtagaaagtacaga

SEQ ID NO: 36923 - DNA, 25 bp, Probe Sequence
atggttgggtgaaagtagaaagtac

SEQ ID NO: 36924 - DNA, 25 bp, Probe Sequence
ggtgaaagtagaaagtacagatgtc

SEQ ID NO: 36925 - DNA, 25 bp, Probe Sequence
agatggttgggtgaaagtagaaagt

SEQ ID NO: 36926 - DNA, 25 bp, Probe Sequence
aagtagaaagtacagatgtcagtga

SEQ ID NO: 36927 - DNA, 25 bp, Probe Sequence
acgttaagtccaaggagaagaagag

SEQ ID NO: 36928 - DNA, 25 bp, Probe Sequence
ggttgggtgaaagtagaaagtacag

SEQ ID NO: 36929 - DNA, 25 bp, Probe Sequence
cacgttaagtccaaggagaagaaga

SEQ ID NO: 36930 - DNA, 25 bp, Probe Sequence
aaagtagaaagtacagatgtcagtg

SEQ ID NO: 36931 - DNA, 25 bp, Probe Sequence
aacaatcacctccagttattacaga

SEQ ID NO: 36932 - DNA, 25 bp, Probe Sequence
gaacaatcacctccagttattacag

SEQ ID NO: 36933 - DNA, 25 bp, Probe Sequence
cgaacaatcacctccagttattaca

SEQ ID NO: 36934 - DNA, 25 bp, Probe Sequence
acaatcacctccagttattacagag

SEQ ID NO: 36935 - DNA, 25 bp, Probe Sequence
tagactacacaacagcgaaggaatt

SEQ ID NO: 36936 - DNA, 25 bp, Probe Sequence
catagttgtgtatgatgtgacagat

SEQ ID NO: 36937 - DNA, 25 bp, Probe Sequence
atagttgtgtatgatgtgacagatc

SEQ ID NO: 36938 - DNA, 25 bp, Probe Sequence
tcgaacaatcacctccagttattac

SEQ ID NO: 36939 - DNA, 25 bp, Probe Sequence
cagatcaggagtccttcaataatgt

SEQ ID NO: 36940 - DNA, 25 bp, Probe Sequence
acagatcaggagtccttcaataatg

SEQ ID NO: 36941 - DNA, 25 bp, Probe Sequence
gacagatcaggagtccttcaataat

SEQ ID NO: 36942 - DNA, 25 bp, Probe Sequence
agatcaggagtccttcaataatgtt

SEQ ID NO: 36943 - DNA, 25 bp, Probe Sequence
gtagactacacaacagcgaaggaat

SEQ ID NO: 36944 - DNA, 25 bp, Probe Sequence
tctgaccacaaagaaagtagtagac

SEQ ID NO: 36945 - DNA, 25 bp, Probe Sequence
tgacagatcaggagtccttcaataa

SEQ ID NO: 36946 - DNA, 25 bp, Probe Sequence
tagtagactacacaacagcgaagga

SEQ ID NO: 36947 - DNA, 25 bp, Probe Sequence
atctgaccacaaagaaagtagtaga

SEQ ID NO: 36948 - DNA, 25 bp, Probe Sequence
ctgaccacaaagaaagtagtagact

SEQ ID NO: 36949 - DNA, 25 bp, Probe Sequence
taagaatgcaacgaacgtagaacag

SEQ ID NO: 36950 - DNA, 25 bp, Probe Sequence
ctaagaatgcaacgaacgtagaaca

SEQ ID NO: 36951 - DNA, 25 bp, Probe Sequence
gaaatagatcgttatgccagtgaaa

SEQ ID NO: 36952 - DNA, 25 bp, Probe Sequence
gtgacagatcaggagtccttcaata

SEQ ID NO: 36953 - DNA, 25 bp, Probe Sequence
ggaaatagatcgttatgccagtgaa

SEQ ID NO: 36954 - DNA, 25 bp, Probe Sequence
tgatctgaccacaaagaaagtagta

SEQ ID NO: 36955 - DNA, 25 bp, Probe Sequence
aatgagaactatgtggacacttgtt

SEQ ID NO: 36956 - DNA, 25 bp, Probe Sequence
gcattgtagtctccatatctgtatt

SEQ ID NO: 36957 - DNA, 25 bp, Probe Sequence
atgatgcttagccatagtattcagg

SEQ ID NO: 36958 - DNA, 25 bp, Probe Sequence
ctgcattgtagtctccatatctgta

SEQ ID NO: 36959 - DNA, 25 bp, Probe Sequence
gctcaggttggaataaagtggtata

SEQ ID NO: 36960 - DNA, 25 bp, Probe Sequence
ataatcccacatatacaaggtcagg

SEQ ID NO: 36961 - DNA, 25 bp, Probe Sequence
ttaagtgttggactgctaggagaac

SEQ ID NO: 36962 - DNA, 25 bp, Probe Sequence
cttaatggtcagtgttcctttcaaa

SEQ ID NO: 36963 - DNA, 25 bp, Probe Sequence
tgcattgtagtctccatatctgtat

SEQ ID NO: 36964 - DNA, 25 bp, Probe Sequence
aaatgagaactatgtggacacttgt

SEQ ID NO: 36965 - DNA, 25 bp, Probe Sequence
ccatagtattcaggcaaatgttcat

SEQ ID NO: 36966 - DNA, 25 bp, Probe Sequence
ttaatggtcagtgttcctttcaaac

SEQ ID NO: 36967 - DNA, 25 bp, Probe Sequence
attggaacttactaatttgggcttt

SEQ ID NO: 36968 - DNA, 25 bp, Probe Sequence
gacacttgtttcattggaaggttag

SEQ ID NO: 36969 - DNA, 25 bp, Probe Sequence
ccttaatggtcagtgttcctttcaa

SEQ ID NO: 36970 - DNA, 25 bp, Probe Sequence
tactgcattgtagtctccatatctg

SEQ ID NO: 36971 - DNA, 25 bp, Probe Sequence
gtactgcattgtagtctccatatct

SEQ ID NO: 36972 - DNA, 25 bp, Probe Sequence
tatgatgcttagccatagtattcag

SEQ ID NO: 36973 - DNA, 25 bp, Probe Sequence
ggtactgcattgtagtctccatatc

SEQ ID NO: 36974 - DNA, 25 bp, Probe Sequence
aactatgtggacacttgtttcattg

SEQ ID NO: 36975 - DNA, 25 bp, Probe Sequence
gaactatgtggacacttgtttcatt

SEQ ID NO: 36976 - DNA, 25 bp, Probe Sequence
agaactatgtggacacttgtttcat

SEQ ID NO: 36977 - DNA, 25 bp, Probe Sequence
atgagaactatgtggacacttgttt

SEQ ID NO: 36978 - DNA, 25 bp, Probe Sequence
tatgtggacacttgtttcattggaa

SEQ ID NO: 36979 - DNA, 25 bp, Probe Sequence
tcataactgtcttcatacgcttctg

SEQ ID NO: 36980 - DNA, 25 bp, Probe Sequence
gtcataactgtcttcatacgcttct

SEQ ID NO: 36981 - DNA, 25 bp, Probe Sequence
tgtcataactgtcttcatacgcttc

SEQ ID NO: 36982 - DNA, 25 bp, Probe Sequence
atgtcataactgtcttcatacgctt

SEQ ID NO: 36983 - DNA, 25 bp, Probe Sequence
tatatggtgctggttgtctcattac

SEQ ID NO: 36984 - DNA, 25 bp, Probe Sequence
cattctcattaacagtcaaggcgaa

SEQ ID NO: 36985 - DNA, 25 bp, Probe Sequence
atatatggtgctggttgtctcatta

SEQ ID NO: 36986 - DNA, 25 bp, Probe Sequence
cataactgtcttcatacgcttctgc

SEQ ID NO: 36987 - DNA, 25 bp, Probe Sequence
tccatgtcataactgtcttcatacg

SEQ ID NO: 36988 - DNA, 25 bp, Probe Sequence
tgtccatgtcataactgtcttcata

SEQ ID NO: 36989 - DNA, 25 bp, Probe Sequence
gtccatgtcataactgtcttcatac

SEQ ID NO: 36990 - DNA, 25 bp, Probe Sequence
gtgtccatgtcataactgtcttcat

SEQ ID NO: 36991 - DNA, 25 bp, Probe Sequence
atgtgtccatgtcataactgtcttc

SEQ ID NO: 36992 - DNA, 25 bp, Probe Sequence
tactgatgagacaagatgtggtgat

SEQ ID NO: 36993 - DNA, 25 bp, Probe Sequence
catgtcataactgtcttcatacgct

SEQ ID NO: 36994 - DNA, 25 bp, Probe Sequence
gaggcattctcattaacagtcaagg

SEQ ID NO: 36995 - DNA, 25 bp, Probe Sequence
ggaggcattctcattaacagtcaag

SEQ ID NO: 36996 - DNA, 25 bp, Probe Sequence
atggaagcataagaacatcggaact

SEQ ID NO: 36997 - DNA, 25 bp, Probe Sequence
gacaagatgtggtgatgacagaatc

SEQ ID NO: 36998 - DNA, 25 bp, Probe Sequence
ctactgatgagacaagatgtggtga

SEQ ID NO: 36999 - DNA, 25 bp, Probe Sequence
tgtgtccatgtcataactgtcttca

SEQ ID NO: 37000 - DNA, 25 bp, Probe Sequence
agacaagatgtggtgatgacagaat

SEQ ID NO: 37001 - DNA, 25 bp, Probe Sequence
ccatgtcataactgtcttcatacgc

SEQ ID NO: 37002 - DNA, 25 bp, Probe Sequence
ctcctactgatgagacaagatgtgg

SEQ ID NO: 37003 - DNA, 25 bp, Probe Sequence
ccagtgtatgtcttgtatccgatat

SEQ ID NO: 37004 - DNA, 25 bp, Probe Sequence
tctgtaagttaagaccttggatgtg

SEQ ID NO: 37005 - DNA, 25 bp, Probe Sequence
cctctatgaacttgatggacgaatg

SEQ ID NO: 37006 - DNA, 25 bp, Probe Sequence
ctgtaagttaagaccttggatgtgg

SEQ ID NO: 37007 - DNA, 25 bp, Probe Sequence
acctctatgaacttgatggacgaat

SEQ ID NO: 37008 - DNA, 25 bp, Probe Sequence
ctctatgaacttgatggacgaatgc

SEQ ID NO: 37009 - DNA, 25 bp, Probe Sequence
cacctctatgaacttgatggacgaa

SEQ ID NO: 37010 - DNA, 25 bp, Probe Sequence
tatgaacttgatggacgaatgcctt

SEQ ID NO: 37011 - DNA, 25 bp, Probe Sequence
cttggatgtggttatgttgtcctaa

SEQ ID NO: 37012 - DNA, 25 bp, Probe Sequence
ttaagaccttggatgtggttatgtt

SEQ ID NO: 37013 - DNA, 25 bp, Probe Sequence
aagttaagaccttggatgtggttat

SEQ ID NO: 37014 - DNA, 25 bp, Probe Sequence
agttaagaccttggatgtggttatg

SEQ ID NO: 37015 - DNA, 25 bp, Probe Sequence
taagaccttggatgtggttatgttg

SEQ ID NO: 37016 - DNA, 25 bp, Probe Sequence
gttaagaccttggatgtggttatgt

SEQ ID NO: 37017 - DNA, 25 bp, Probe Sequence
taagttaagaccttggatgtggtta

SEQ ID NO: 37018 - DNA, 25 bp, Probe Sequence
gtaagttaagaccttggatgtggtt

SEQ ID NO: 37019 - DNA, 25 bp, Probe Sequence
taaatggctactttggtttctgtct

SEQ ID NO: 37020 - DNA, 25 bp, Probe Sequence
ttaaatggctactttggtttctgtc

SEQ ID NO: 37021 - DNA, 25 bp, Probe Sequence
ctatgaacttgatggacgaatgcct

SEQ ID NO: 37022 - DNA, 25 bp, Probe Sequence
tctatgaacttgatggacgaatgcc

SEQ ID NO: 37023 - DNA, 25 bp, Probe Sequence
gtcttgtatccgatatctaacgctt

SEQ ID NO: 37024 - DNA, 25 bp, Probe Sequence
atgtcttgtatccgatatctaacgc

SEQ ID NO: 37025 - DNA, 25 bp, Probe Sequence
gatgtggttatgttgtcctaaagaa

SEQ ID NO: 37026 - DNA, 25 bp, Probe Sequence
tgtaagttaagaccttggatgtggt

SEQ ID NO: 37027 - DNA, 25 bp, Probe Sequence
ttcctaccaaccgttcttattgctg

SEQ ID NO: 37028 - DNA, 25 bp, Probe Sequence
gttcctaccaaccgttcttattgct

SEQ ID NO: 37029 - DNA, 25 bp, Probe Sequence
tcctaccaaccgttcttattgctgg

SEQ ID NO: 37030 - DNA, 25 bp, Probe Sequence
ggttcctaccaaccgttcttattgc

SEQ ID NO: 37031 - DNA, 25 bp, Probe Sequence
tggcaccaatatcataataggcata

SEQ ID NO: 37032 - DNA, 25 bp, Probe Sequence
ggcaccaatatcataataggcataa

SEQ ID NO: 37033 - DNA, 25 bp, Probe Sequence
ctggcaccaatatcataataggcat

SEQ ID NO: 37034 - DNA, 25 bp, Probe Sequence
cggtctaattcaactgagtaagtct

SEQ ID NO: 37035 - DNA, 25 bp, Probe Sequence
tcggtctaattcaactgagtaagtc

SEQ ID NO: 37036 - DNA, 25 bp, Probe Sequence
ctgagtaagtctgaacctctaatgg

SEQ ID NO: 37037 - DNA, 25 bp, Probe Sequence
caactgagtaagtctgaacctctaa

SEQ ID NO: 37038 - DNA, 25 bp, Probe Sequence
tcaactgagtaagtctgaacctcta

SEQ ID NO: 37039 - DNA, 25 bp, Probe Sequence
tgagtaagtctgaacctctaatgga

SEQ ID NO: 37040 - DNA, 25 bp, Probe Sequence
ctcggtctaattcaactgagtaagt

SEQ ID NO: 37041 - DNA, 25 bp, Probe Sequence
gagtaagtctgaacctctaatggaa

SEQ ID NO: 37042 - DNA, 25 bp, Probe Sequence
actgagtaagtctgaacctctaatg

SEQ ID NO: 37043 - DNA, 25 bp, Probe Sequence
gcatctagttctaagaagaggtcaa

SEQ ID NO: 37044 - DNA, 25 bp, Probe Sequence
cagcatctagttctaagaagaggtc

SEQ ID NO: 37045 - DNA, 25 bp, Probe Sequence
agcatctagttctaagaagaggtca

SEQ ID NO: 37046 - DNA, 25 bp, Probe Sequence
tcagcatctagttctaagaagaggt

SEQ ID NO: 37047 - DNA, 25 bp, Probe Sequence
cctcggtctaattcaactgagtaag

SEQ ID NO: 37048 - DNA, 25 bp, Probe Sequence
ggtctaattcaactgagtaagtctg

SEQ ID NO: 37049 - DNA, 25 bp, Probe Sequence
gttgctggcaccaatatcataatag

SEQ ID NO: 37050 - DNA, 25 bp, Probe Sequence
aactgagtaagtctgaacctctaat

SEQ ID NO: 37051 - DNA, 25 bp, Probe Sequence
tgttgctggcaccaatatcataata

SEQ ID NO: 37052 - DNA, 25 bp, Probe Sequence
ctcagcatctagttctaagaagagg

SEQ ID NO: 37053 - DNA, 25 bp, Probe Sequence
actcagcatctagttctaagaagag

SEQ ID NO: 37054 - DNA, 25 bp, Probe Sequence
ttgctggcaccaatatcataatagg

SEQ ID NO: 37055 - DNA, 25 bp, Probe Sequence
tctaggaatgatgagcgagatactt

SEQ ID NO: 37056 - DNA, 25 bp, Probe Sequence
gcagttattggaggaagagagagaa

SEQ ID NO: 37057 - DNA, 25 bp, Probe Sequence
gtatgttccttgtatgttcctatca

SEQ ID NO: 37058 - DNA, 25 bp, Probe Sequence
tgtatgttccttgtatgttcctatc

SEQ ID NO: 37059 - DNA, 25 bp, Probe Sequence
ttgagcagttattggaggaagagag

SEQ ID NO: 37060 - DNA, 25 bp, Probe Sequence
tatgttccttgtatgttcctatcag

SEQ ID NO: 37061 - DNA, 25 bp, Probe Sequence
gagcagttattggaggaagagagag

SEQ ID NO: 37062 - DNA, 25 bp, Probe Sequence
ctctaggaatgatgagcgagatact

SEQ ID NO: 37063 - DNA, 25 bp, Probe Sequence
atgttccttgtatgttcctatcagg

SEQ ID NO: 37064 - DNA, 25 bp, Probe Sequence
ttgtatgttccttgtatgttcctat

SEQ ID NO: 37065 - DNA, 25 bp, Probe Sequence
agcagttattggaggaagagagaga

SEQ ID NO: 37066 - DNA, 25 bp, Probe Sequence
tgagcagttattggaggaagagaga

SEQ ID NO: 37067 - DNA, 25 bp, Probe Sequence
acttcgacttctctaggaatgatga

SEQ ID NO: 37068 - DNA, 25 bp, Probe Sequence
cacttcgacttctctaggaatgatg

SEQ ID NO: 37069 - DNA, 25 bp, Probe Sequence
cctttgtatgttccttgtatgttcc

SEQ ID NO: 37070 - DNA, 25 bp, Probe Sequence
cagttattggaggaagagagagaaa

SEQ ID NO: 37071 - DNA, 25 bp, Probe Sequence
tatggcatttctatctattgtggct

SEQ ID NO: 37072 - DNA, 25 bp, Probe Sequence
gagcgagatactttcaagcatttag

SEQ ID NO: 37073 - DNA, 25 bp, Probe Sequence
aggtactacgatgtcatgtctgatg

SEQ ID NO: 37074 - DNA, 25 bp, Probe Sequence
cacctttgtatgttccttgtatgtt

SEQ ID NO: 37075 - DNA, 25 bp, Probe Sequence
gtactacgatgtcatgtctgatgag

SEQ ID NO: 37076 - DNA, 25 bp, Probe Sequence
atcgtgtggctactttcttaaacta

SEQ ID NO: 37077 - DNA, 25 bp, Probe Sequence
gagatactttcaagcatttagggac

SEQ ID NO: 37078 - DNA, 25 bp, Probe Sequence
tggcatttctatctattgtggcttt

SEQ ID NO: 37079 - DNA, 25 bp, Probe Sequence
cgaggttatcctgaggtgacattaa

SEQ ID NO: 37080 - DNA, 25 bp, Probe Sequence
gaggttatcctgaggtgacattaat

SEQ ID NO: 37081 - DNA, 25 bp, Probe Sequence
ggtgtataaagaagttctccatcca

SEQ ID NO: 37082 - DNA, 25 bp, Probe Sequence
aacggtgtataaagaagttctccat

SEQ ID NO: 37083 - DNA, 25 bp, Probe Sequence
aaacggtgtataaagaagttctcca

SEQ ID NO: 37084 - DNA, 25 bp, Probe Sequence
acggtgtataaagaagttctccatc

SEQ ID NO: 37085 - DNA, 25 bp, Probe Sequence
cggtgtataaagaagttctccatcc

SEQ ID NO: 37086 - DNA, 25 bp, Probe Sequence
tgtataaagaagttctccatccaga

SEQ ID NO: 37087 - DNA, 25 bp, Probe Sequence
gtgtataaagaagttctccatccag

SEQ ID NO: 37088 - DNA, 25 bp, Probe Sequence
agaggatgtgcttgatggagatgaa

SEQ ID NO: 37089 - DNA, 25 bp, Probe Sequence
tataaagaagttctccatccagagg

SEQ ID NO: 37090 - DNA, 25 bp, Probe Sequence
ataaagaagttctccatccagaggt

SEQ ID NO: 37091 - DNA, 25 bp, Probe Sequence
aagaggatgtgcttgatggagatga

SEQ ID NO: 37092 - DNA, 25 bp, Probe Sequence
taaagaagttctccatccagaggtt

SEQ ID NO: 37093 - DNA, 25 bp, Probe Sequence
cctaagagacctggacttaagagaa

SEQ ID NO: 37094 - DNA, 25 bp, Probe Sequence
gtataaagaagttctccatccagag

SEQ ID NO: 37095 - DNA, 25 bp, Probe Sequence
ctaagagacctggacttaagagaat

SEQ ID NO: 37096 - DNA, 25 bp, Probe Sequence
taagagacctggacttaagagaatt

SEQ ID NO: 37097 - DNA, 25 bp, Probe Sequence
gaggatgtgcttgatggagatgaaa

SEQ ID NO: 37098 - DNA, 25 bp, Probe Sequence
cattgctaagcgaggttatcctgag

SEQ ID NO: 37099 - DNA, 25 bp, Probe Sequence
aaagaggatgtgcttgatggagatg

SEQ ID NO: 37100 - DNA, 25 bp, Probe Sequence
attaatggactgcatgaggctcttc

SEQ ID NO: 37101 - DNA, 25 bp, Probe Sequence
aaagaagttctccatccagaggttc

SEQ ID NO: 37102 - DNA, 25 bp, Probe Sequence
caaagaggatgtgcttgatggagat

SEQ ID NO: 37103 - DNA, 25 bp, Probe Sequence
tcttcagcttctccatgttcttcaa

SEQ ID NO: 37104 - DNA, 25 bp, Probe Sequence
cttcagcttctccatgttcttcaac

SEQ ID NO: 37105 - DNA, 25 bp, Probe Sequence
ctcttcagcttctccatgttcttca

SEQ ID NO: 37106 - DNA, 25 bp, Probe Sequence
ctacctcttcagcttctccatgttc

SEQ ID NO: 37107 - DNA, 25 bp, Probe Sequence
tacctcttcagcttctccatgttct

SEQ ID NO: 37108 - DNA, 25 bp, Probe Sequence
tctacctcttcagcttctccatgtt

SEQ ID NO: 37109 - DNA, 25 bp, Probe Sequence
gaagatggaaataaacctgcgtgtg

SEQ ID NO: 37110 - DNA, 25 bp, Probe Sequence
cctcttcagcttctccatgttcttc

SEQ ID NO: 37111 - DNA, 25 bp, Probe Sequence
gtctacctcttcagcttctccatgt

SEQ ID NO: 37112 - DNA, 25 bp, Probe Sequence
ctggaagatggaaataaacctgcgt

SEQ ID NO: 37113 - DNA, 25 bp, Probe Sequence
acctcttcagcttctccatgttctt

SEQ ID NO: 37114 - DNA, 25 bp, Probe Sequence
ctactccgtctacctcttcagcttc

SEQ ID NO: 37115 - DNA, 25 bp, Probe Sequence
tttattttacaaactggactggctc

SEQ ID NO: 37116 - DNA, 25 bp, Probe Sequence
ttattttacaaactggactggctca

SEQ ID NO: 37117 - DNA, 25 bp, Probe Sequence
ttcagcttctccatgttcttcaacg

SEQ ID NO: 37118 - DNA, 25 bp, Probe Sequence
atttattttacaaactggactggct

SEQ ID NO: 37119 - DNA, 25 bp, Probe Sequence
ggaagatggaaataaacctgcgtgt

SEQ ID NO: 37120 - DNA, 25 bp, Probe Sequence
tggaagatggaaataaacctgcgtg

SEQ ID NO: 37121 - DNA, 25 bp, Probe Sequence
cttcgagacaacgtgactttaatgg

SEQ ID NO: 37122 - DNA, 25 bp, Probe Sequence
ccctggaagatggaaataaacctgc

SEQ ID NO: 37123 - DNA, 25 bp, Probe Sequence
tactccgtctacctcttcagcttct

SEQ ID NO: 37124 - DNA, 25 bp, Probe Sequence
catcctgggcttcattgacatcttc

SEQ ID NO: 37125 - DNA, 25 bp, Probe Sequence
aagatggaaataaacctgcgtgtgg

SEQ ID NO: 37126 - DNA, 25 bp, Probe Sequence
gcttcgagacaacgtgactttaatg

SEQ ID NO: 37127 - DNA, 25 bp, Probe Sequence
atattcagcaacacttcctcctctc

SEQ ID NO: 37128 - DNA, 25 bp, Probe Sequence
atggacatggacttagacaaggaat

SEQ ID NO: 37129 - DNA, 25 bp, Probe Sequence
tggacatggacttagacaaggaatt

SEQ ID NO: 37130 - DNA, 25 bp, Probe Sequence
atgacatggacatggacttagacaa

SEQ ID NO: 37131 - DNA, 25 bp, Probe Sequence
caatattcagcaacacttcctcctc

SEQ ID NO: 37132 - DNA, 25 bp, Probe Sequence
aatattcagcaacacttcctcctct

SEQ ID NO: 37133 - DNA, 25 bp, Probe Sequence
gacaatattcagcaacacttcctcc

SEQ ID NO: 37134 - DNA, 25 bp, Probe Sequence
gatgacatggacatggacttagaca

SEQ ID NO: 37135 - DNA, 25 bp, Probe Sequence
atggatgacatggacatggacttag

SEQ ID NO: 37136 - DNA, 25 bp, Probe Sequence
gatggatgacatggacatggactta

SEQ ID NO: 37137 - DNA, 25 bp, Probe Sequence
tattcagcaacacttcctcctctct

SEQ ID NO: 37138 - DNA, 25 bp, Probe Sequence
catggacatggacttagacaaggaa

SEQ ID NO: 37139 - DNA, 25 bp, Probe Sequence
tgacatggacatggacttagacaag

SEQ ID NO: 37140 - DNA, 25 bp, Probe Sequence
acaatattcagcaacacttcctcct

SEQ ID NO: 37141 - DNA, 25 bp, Probe Sequence
ggatgacatggacatggacttagac

SEQ ID NO: 37142 - DNA, 25 bp, Probe Sequence
cactactcatcgagaggtactatgc

SEQ ID NO: 37143 - DNA, 25 bp, Probe Sequence
gcactactcatcgagaggtactatg

SEQ ID NO: 37144 - DNA, 25 bp, Probe Sequence
gacatggacatggacttagacaagg

SEQ ID NO: 37145 - DNA, 25 bp, Probe Sequence
ataaagatgtcagagacctgtttgt

SEQ ID NO: 37146 - DNA, 25 bp, Probe Sequence
acaataaagatgtcagagacctgtt

SEQ ID NO: 37147 - DNA, 25 bp, Probe Sequence
gacatggacttagacaaggaatttc

SEQ ID NO: 37148 - DNA, 25 bp, Probe Sequence
acatggacttagacaaggaatttct

SEQ ID NO: 37149 - DNA, 25 bp, Probe Sequence
cacaataaagatgtcagagacctgt

SEQ ID NO: 37150 - DNA, 25 bp, Probe Sequence
ggacatggacttagacaaggaattt

SEQ ID NO: 37151 - DNA, 25 bp, Probe Sequence
ccttgaactcttagtgattgagact

SEQ ID NO: 37152 - DNA, 25 bp, Probe Sequence
accttgaactcttagtgattgagac

SEQ ID NO: 37153 - DNA, 25 bp, Probe Sequence
taaggacatgacaccaactattagg

SEQ ID NO: 37154 - DNA, 25 bp, Probe Sequence
cttgaactcttagtgattgagactc

SEQ ID NO: 37155 - DNA, 25 bp, Probe Sequence
taccttgaactcttagtgattgaga

SEQ ID NO: 37156 - DNA, 25 bp, Probe Sequence
aggacatgacaccaactattaggaa

SEQ ID NO: 37157 - DNA, 25 bp, Probe Sequence
aaggacatgacaccaactattagga

SEQ ID NO: 37158 - DNA, 25 bp, Probe Sequence
agtaccttgaactcttagtgattga

SEQ ID NO: 37159 - DNA, 25 bp, Probe Sequence
ttggaacaactggaacctgactatt

SEQ ID NO: 37160 - DNA, 25 bp, Probe Sequence
gtaccttgaactcttagtgattgag

SEQ ID NO: 37161 - DNA, 25 bp, Probe Sequence
ttaaggacatgacaccaactattag

SEQ ID NO: 37162 - DNA, 25 bp, Probe Sequence
aagtaccttgaactcttagtgattg

SEQ ID NO: 37163 - DNA, 25 bp, Probe Sequence
acaacggctaatgaagaaggaacaa

SEQ ID NO: 37164 - DNA, 25 bp, Probe Sequence
gtcttctgaattaggtgacttagat

SEQ ID NO: 37165 - DNA, 25 bp, Probe Sequence
cacaggtttctctagtagattagca

SEQ ID NO: 37166 - DNA, 25 bp, Probe Sequence
caggtttctctagtagattagcagc

SEQ ID NO: 37167 - DNA, 25 bp, Probe Sequence
acaggtttctctagtagattagcag

SEQ ID NO: 37168 - DNA, 25 bp, Probe Sequence
gcacaggtttctctagtagattagc

SEQ ID NO: 37169 - DNA, 25 bp, Probe Sequence
agcacaggtttctctagtagattag

SEQ ID NO: 37170 - DNA, 25 bp, Probe Sequence
aaattctttggaacaactggaacct

SEQ ID NO: 37171 - DNA, 25 bp, Probe Sequence
tttatcatgccagtaggagaaatct

SEQ ID NO: 37172 - DNA, 25 bp, Probe Sequence
ggacatgacaccaactattaggaaa

SEQ ID NO: 37173 - DNA, 25 bp, Probe Sequence
tgttattaagaagagagaaccattg

SEQ ID NO: 37174 - DNA, 25 bp, Probe Sequence
caacggctaatgaagaaggaacaaa

SEQ ID NO: 37175 - DNA, 25 bp, Probe Sequence
ctacacaaagagttcccatctcaag

SEQ ID NO: 37176 - DNA, 25 bp, Probe Sequence
aaacctacacaaagagttcccatct

SEQ ID NO: 37177 - DNA, 25 bp, Probe Sequence
tacacaaagagttcccatctcaagg

SEQ ID NO: 37178 - DNA, 25 bp, Probe Sequence
cctacacaaagagttcccatctcaa

SEQ ID NO: 37179 - DNA, 25 bp, Probe Sequence
aacctacacaaagagttcccatctc

SEQ ID NO: 37180 - DNA, 25 bp, Probe Sequence
acctacacaaagagttcccatctca

SEQ ID NO: 37181 - DNA, 25 bp, Probe Sequence
aaaacctacacaaagagttcccatc

SEQ ID NO: 37182 - DNA, 25 bp, Probe Sequence
caaaacctacacaaagagttcccat

SEQ ID NO: 37183 - DNA, 25 bp, Probe Sequence
gtgagaaaccttaccactgtgactg

SEQ ID NO: 37184 - DNA, 25 bp, Probe Sequence
ttaaatcccagacagtggatatgac

SEQ ID NO: 37185 - DNA, 25 bp, Probe Sequence
taaatcccagacagtggatatgacc

SEQ ID NO: 37186 - DNA, 25 bp, Probe Sequence
tttaaatcccagacagtggatatga

SEQ ID NO: 37187 - DNA, 25 bp, Probe Sequence
tgagaaaccttaccactgtgactgg

SEQ ID NO: 37188 - DNA, 25 bp, Probe Sequence
ggtgagaaaccttaccactgtgact

SEQ ID NO: 37189 - DNA, 25 bp, Probe Sequence
gcaaaacctacacaaagagttccca

SEQ ID NO: 37190 - DNA, 25 bp, Probe Sequence
aaagagttcccatctcaaggcacac

SEQ ID NO: 37191 - DNA, 25 bp, Probe Sequence
caaagagttcccatctcaaggcaca

SEQ ID NO: 37192 - DNA, 25 bp, Probe Sequence
acaaagagttcccatctcaaggcac

SEQ ID NO: 37193 - DNA, 25 bp, Probe Sequence
cacaaagagttcccatctcaaggca

SEQ ID NO: 37194 - DNA, 25 bp, Probe Sequence
acacaaagagttcccatctcaaggc

SEQ ID NO: 37195 - DNA, 25 bp, Probe Sequence
gagaaaccttaccactgtgactggg

SEQ ID NO: 37196 - DNA, 25 bp, Probe Sequence
ggcaaaacctacacaaagagttccc

SEQ ID NO: 37197 - DNA, 25 bp, Probe Sequence
ctcagatgaactgaccaggcactac

SEQ ID NO: 37198 - DNA, 25 bp, Probe Sequence
gaaaccttaccactgtgactgggac

SEQ ID NO: 37199 - DNA, 25 bp, Probe Sequence
tcaccttatcttatccaagcatcac

SEQ ID NO: 37200 - DNA, 25 bp, Probe Sequence
ccttatcttatccaagcatcacgat

SEQ ID NO: 37201 - DNA, 25 bp, Probe Sequence
atcaccttatcttatccaagcatca

SEQ ID NO: 37202 - DNA, 25 bp, Probe Sequence
tcatcaccttatcttatccaagcat

SEQ ID NO: 37203 - DNA, 25 bp, Probe Sequence
atcatcaccttatcttatccaagca

SEQ ID NO: 37204 - DNA, 25 bp, Probe Sequence
catcaccttatcttatccaagcatc

SEQ ID NO: 37205 - DNA, 25 bp, Probe Sequence
cttatcttatccaagcatcacgatt

SEQ ID NO: 37206 - DNA, 25 bp, Probe Sequence
accttatcttatccaagcatcacga

SEQ ID NO: 37207 - DNA, 25 bp, Probe Sequence
caccttatcttatccaagcatcacg

SEQ ID NO: 37208 - DNA, 25 bp, Probe Sequence
gatcatcaccttatcttatccaagc

SEQ ID NO: 37209 - DNA, 25 bp, Probe Sequence
atcacgattaatgttctaggagcag

SEQ ID NO: 37210 - DNA, 25 bp, Probe Sequence
ttatcttatccaagcatcacgatta

SEQ ID NO: 37211 - DNA, 25 bp, Probe Sequence
aagcatcacgattaatgttctagga

SEQ ID NO: 37212 - DNA, 25 bp, Probe Sequence
caagcatcacgattaatgttctagg

SEQ ID NO: 37213 - DNA, 25 bp, Probe Sequence
ccaagcatcacgattaatgttctag

SEQ ID NO: 37214 - DNA, 25 bp, Probe Sequence
tccaagcatcacgattaatgttcta

SEQ ID NO: 37215 - DNA, 25 bp, Probe Sequence
tatcttatccaagcatcacgattaa

SEQ ID NO: 37216 - DNA, 25 bp, Probe Sequence
agcatcacgattaatgttctaggag

SEQ ID NO: 37217 - DNA, 25 bp, Probe Sequence
tatccaagcatcacgattaatgttc

SEQ ID NO: 37218 - DNA, 25 bp, Probe Sequence
cttatccaagcatcacgattaatgt

SEQ ID NO: 37219 - DNA, 25 bp, Probe Sequence
catcacgattaatgttctaggagca

SEQ ID NO: 37220 - DNA, 25 bp, Probe Sequence
tcttatccaagcatcacgattaatg

SEQ ID NO: 37221 - DNA, 25 bp, Probe Sequence
atccaagcatcacgattaatgttct

SEQ ID NO: 37222 - DNA, 25 bp, Probe Sequence
ttatccaagcatcacgattaatgtt

SEQ ID NO: 37223 - DNA, 25 bp, Probe Sequence
ccatctggtgcttacattctgaata

SEQ ID NO: 37224 - DNA, 25 bp, Probe Sequence
catctggtgcttacattctgaatat

SEQ ID NO: 37225 - DNA, 25 bp, Probe Sequence
atctggtgcttacattctgaatata

SEQ ID NO: 37226 - DNA, 25 bp, Probe Sequence
cactttgatttccagccatttactc

SEQ ID NO: 37227 - DNA, 25 bp, Probe Sequence
tctggtgcttacattctgaatatat

SEQ ID NO: 37228 - DNA, 25 bp, Probe Sequence
ctggtgcttacattctgaatatatg

SEQ ID NO: 37229 - DNA, 25 bp, Probe Sequence
tttctacaagtttgaccttagccat

SEQ ID NO: 37230 - DNA, 25 bp, Probe Sequence
ctttgatttccagccatttactcca

SEQ ID NO: 37231 - DNA, 25 bp, Probe Sequence
actttgatttccagccatttactcc

SEQ ID NO: 37232 - DNA, 25 bp, Probe Sequence
tttgatttccagccatttactccaa

SEQ ID NO: 37233 - DNA, 25 bp, Probe Sequence
ttgatttccagccatttactccaag

SEQ ID NO: 37234 - DNA, 25 bp, Probe Sequence
gagcactttgatttccagccattta

SEQ ID NO: 37235 - DNA, 25 bp, Probe Sequence
tatatgtcatctcccaagaggcttc

SEQ ID NO: 37236 - DNA, 25 bp, Probe Sequence
ttctacaagtttgaccttagccatg

SEQ ID NO: 37237 - DNA, 25 bp, Probe Sequence
gcactttgatttccagccatttact

SEQ ID NO: 37238 - DNA, 25 bp, Probe Sequence
agcactttgatttccagccatttac

SEQ ID NO: 37239 - DNA, 25 bp, Probe Sequence
gaatatatgtcatctcccaagaggc

SEQ ID NO: 37240 - DNA, 25 bp, Probe Sequence
tgaatatatgtcatctcccaagagg

SEQ ID NO: 37241 - DNA, 25 bp, Probe Sequence
cctatctttgggatttacatggaat

SEQ ID NO: 37242 - DNA, 25 bp, Probe Sequence
atatatgtcatctcccaagaggctt

SEQ ID NO: 37243 - DNA, 25 bp, Probe Sequence
aatatatgtcatctcccaagaggct

SEQ ID NO: 37244 - DNA, 25 bp, Probe Sequence
gatttccagccatttactccaagtc

SEQ ID NO: 37245 - DNA, 25 bp, Probe Sequence
tctgaatatatgtcatctcccaaga

SEQ ID NO: 37246 - DNA, 25 bp, Probe Sequence
gaacattctgacctctgtcttgctc

SEQ ID NO: 37247 - DNA, 25 bp, Probe Sequence
acttcaacaagccagatatagatgc

SEQ ID NO: 37248 - DNA, 25 bp, Probe Sequence
ggtaacatacttcaacaagccagat

SEQ ID NO: 37249 - DNA, 25 bp, Probe Sequence
gtaacatacttcaacaagccagata

SEQ ID NO: 37250 - DNA, 25 bp, Probe Sequence
attgctacttgagtgtgaacagtta

SEQ ID NO: 37251 - DNA, 25 bp, Probe Sequence
cttcaacaagccagatatagatgcc

SEQ ID NO: 37252 - DNA, 25 bp, Probe Sequence
ttcaacaagccagatatagatgcct

SEQ ID NO: 37253 - DNA, 25 bp, Probe Sequence
acatacttcaacaagccagatatag

SEQ ID NO: 37254 - DNA, 25 bp, Probe Sequence
tattgacattgctacttgagtgtga

SEQ ID NO: 37255 - DNA, 25 bp, Probe Sequence
ttattgacattgctacttgagtgtg

SEQ ID NO: 37256 - DNA, 25 bp, Probe Sequence
ttgctacttgagtgtgaacagttac

SEQ ID NO: 37257 - DNA, 25 bp, Probe Sequence
tacttcaacaagccagatatagatg

SEQ ID NO: 37258 - DNA, 25 bp, Probe Sequence
catacttcaacaagccagatataga

SEQ ID NO: 37259 - DNA, 25 bp, Probe Sequence
attgacattgctacttgagtgtgaa

SEQ ID NO: 37260 - DNA, 25 bp, Probe Sequence
aacatacttcaacaagccagatata

SEQ ID NO: 37261 - DNA, 25 bp, Probe Sequence
taacatacttcaacaagccagatat

SEQ ID NO: 37262 - DNA, 25 bp, Probe Sequence
ctacttgagtgtgaacagttacctg

SEQ ID NO: 37263 - DNA, 25 bp, Probe Sequence
cattgctacttgagtgtgaacagtt

SEQ ID NO: 37264 - DNA, 25 bp, Probe Sequence
tatgtcatccaggaacttagaccaa

SEQ ID NO: 37265 - DNA, 25 bp, Probe Sequence
ttattgagtaccaagccatgtaatg

SEQ ID NO: 37266 - DNA, 25 bp, Probe Sequence
ctatgtcatccaggaacttagacca

SEQ ID NO: 37267 - DNA, 25 bp, Probe Sequence
ttgacattgctacttgagtgtgaac

SEQ ID NO: 37268 - DNA, 25 bp, Probe Sequence
gttacctatgatatggttccagagc

SEQ ID NO: 37269 - DNA, 25 bp, Probe Sequence
tgttacctatgatatggttccagag

SEQ ID NO: 37270 - DNA, 25 bp, Probe Sequence
acacacttgttacctatgatatggt

SEQ ID NO: 37271 - DNA, 25 bp, Probe Sequence
ttgcgttaatgaagactacacagaa

SEQ ID NO: 37272 - DNA, 25 bp, Probe Sequence
ttgtgtggatcagatacatacttgg

SEQ ID NO: 37273 - DNA, 25 bp, Probe Sequence
attcaagatcctacagtaagagtga

SEQ ID NO: 37274 - DNA, 25 bp, Probe Sequence
acatcttattgttggtaatagtgct

SEQ ID NO: 37275 - DNA, 25 bp, Probe Sequence
catcttattgttggtaatagtgctt

SEQ ID NO: 37276 - DNA, 25 bp, Probe Sequence
tgtggatcagatacatacttggcaa

SEQ ID NO: 37277 - DNA, 25 bp, Probe Sequence
atttgcgttaatgaagactacacag

SEQ ID NO: 37278 - DNA, 25 bp, Probe Sequence
gatttgcgttaatgaagactacaca

SEQ ID NO: 37279 - DNA, 25 bp, Probe Sequence
agatttgcgttaatgaagactacac

SEQ ID NO: 37280 - DNA, 25 bp, Probe Sequence
tgcgttaatgaagactacacagaaa

SEQ ID NO: 37281 - DNA, 25 bp, Probe Sequence
tttgcgttaatgaagactacacaga

SEQ ID NO: 37282 - DNA, 25 bp, Probe Sequence
aagatttgcgttaatgaagactaca

SEQ ID NO: 37283 - DNA, 25 bp, Probe Sequence
tattcaagatcctacagtaagagtg

SEQ ID NO: 37284 - DNA, 25 bp, Probe Sequence
tggatcagatacatacttggcaaat

SEQ ID NO: 37285 - DNA, 25 bp, Probe Sequence
ctagggatttgtgtggatcagatac

SEQ ID NO: 37286 - DNA, 25 bp, Probe Sequence
ggatcagatacatacttggcaaatt

SEQ ID NO: 37287 - DNA, 25 bp, Probe Sequence
gtgtggatcagatacatacttggca

SEQ ID NO: 37288 - DNA, 25 bp, Probe Sequence
tgtgtggatcagatacatacttggc

SEQ ID NO: 37289 - DNA, 25 bp, Probe Sequence
gtggatcagatacatacttggcaaa

SEQ ID NO: 37290 - DNA, 25 bp, Probe Sequence
aagatcctacagtaagagtgaaaca

SEQ ID NO: 37291 - DNA, 25 bp, Probe Sequence
tcttctggtttgttctttcatgttt

SEQ ID NO: 37292 - DNA, 25 bp, Probe Sequence
ttcttctggtttgttctttcatgtt

SEQ ID NO: 37293 - DNA, 25 bp, Probe Sequence
aaagatttgcgttaatgaagactac

SEQ ID NO: 37294 - DNA, 25 bp, Probe Sequence
cacaaagatttgcgttaatgaagac

SEQ ID NO: 37295 - DNA, 25 bp, Probe Sequence
gcaaggacaggtcagaataataagt

SEQ ID NO: 37296 - DNA, 25 bp, Probe Sequence
ggcaaggacaggtcagaataataag

SEQ ID NO: 37297 - DNA, 25 bp, Probe Sequence
aggcaaggacaggtcagaataataa

SEQ ID NO: 37298 - DNA, 25 bp, Probe Sequence
aaggcaaggacaggtcagaataata

SEQ ID NO: 37299 - DNA, 25 bp, Probe Sequence
taaggcaaggacaggtcagaataat

SEQ ID NO: 37300 - DNA, 25 bp, Probe Sequence
ctctactgcttatgtaacaggatgg

SEQ ID NO: 37301 - DNA, 25 bp, Probe Sequence
agttataatggagccatcttgtctg

SEQ ID NO: 37302 - DNA, 25 bp, Probe Sequence
ctaaggcaaggacaggtcagaataa

SEQ ID NO: 37303 - DNA, 25 bp, Probe Sequence
gctctactgcttatgtaacaggatg

SEQ ID NO: 37304 - DNA, 25 bp, Probe Sequence
tagttataatggagccatcttgtct

SEQ ID NO: 37305 - DNA, 25 bp, Probe Sequence
caaggacaggtcagaataataagta

SEQ ID NO: 37306 - DNA, 25 bp, Probe Sequence
catagttataatggagccatcttgt

SEQ ID NO: 37307 - DNA, 25 bp, Probe Sequence
acatagttataatggagccatcttg

SEQ ID NO: 37308 - DNA, 25 bp, Probe Sequence
cacatagttataatggagccatctt

SEQ ID NO: 37309 - DNA, 25 bp, Probe Sequence
ggctctactgcttatgtaacaggat

SEQ ID NO: 37310 - DNA, 25 bp, Probe Sequence
atagttataatggagccatcttgtc

SEQ ID NO: 37311 - DNA, 25 bp, Probe Sequence
agtaatgatgtatgtaatgcaccac

SEQ ID NO: 37312 - DNA, 25 bp, Probe Sequence
cacctggctctactgcttatgtaac

SEQ ID NO: 37313 - DNA, 25 bp, Probe Sequence
aaggacaggtcagaataataagtaa

SEQ ID NO: 37314 - DNA, 25 bp, Probe Sequence
tattccacctggctctactgcttat

SEQ ID NO: 37315 - DNA, 25 bp, Probe Sequence
atattccacctggctctactgctta

SEQ ID NO: 37316 - DNA, 25 bp, Probe Sequence
ccacatagttataatggagccatct

SEQ ID NO: 37317 - DNA, 25 bp, Probe Sequence
accacatagttataatggagccatc

SEQ ID NO: 37318 - DNA, 25 bp, Probe Sequence
aagtaatgatgtatgtaatgcacca

SEQ ID NO: 37319 - DNA, 25 bp, Probe Sequence
tacaagccttaccaacaattacaga

SEQ ID NO: 37320 - DNA, 25 bp, Probe Sequence
acttagatacaagccttaccaacaa

SEQ ID NO: 37321 - DNA, 25 bp, Probe Sequence
agacttagatacaagccttaccaac

SEQ ID NO: 37322 - DNA, 25 bp, Probe Sequence
cagacttagatacaagccttaccaa

SEQ ID NO: 37323 - DNA, 25 bp, Probe Sequence
gcatcagacttagatacaagcctta

SEQ ID NO: 37324 - DNA, 25 bp, Probe Sequence
gacttagatacaagccttaccaaca

SEQ ID NO: 37325 - DNA, 25 bp, Probe Sequence
atcagacttagatacaagccttacc

SEQ ID NO: 37326 - DNA, 25 bp, Probe Sequence
atacaagccttaccaacaattacag

SEQ ID NO: 37327 - DNA, 25 bp, Probe Sequence
gatacaagccttaccaacaattaca

SEQ ID NO: 37328 - DNA, 25 bp, Probe Sequence
acaagccttaccaacaattacagaa

SEQ ID NO: 37329 - DNA, 25 bp, Probe Sequence
tcagacttagatacaagccttacca

SEQ ID NO: 37330 - DNA, 25 bp, Probe Sequence
agatacaagccttaccaacaattac

SEQ ID NO: 37331 - DNA, 25 bp, Probe Sequence
cttagatacaagccttaccaacaat

SEQ ID NO: 37332 - DNA, 25 bp, Probe Sequence
catcagacttagatacaagccttac

SEQ ID NO: 37333 - DNA, 25 bp, Probe Sequence
ttagatacaagccttaccaacaatt

SEQ ID NO: 37334 - DNA, 25 bp, Probe Sequence
tagatacaagccttaccaacaatta

SEQ ID NO: 37335 - DNA, 25 bp, Probe Sequence
cagactcatagcatcagtggatacc

SEQ ID NO: 37336 - DNA, 25 bp, Probe Sequence
ctcttccagactcatagcatcagtg

SEQ ID NO: 37337 - DNA, 25 bp, Probe Sequence
tctcttccagactcatagcatcagt

SEQ ID NO: 37338 - DNA, 25 bp, Probe Sequence
gccttaccaacaattacagaaacat

SEQ ID NO: 37339 - DNA, 25 bp, Probe Sequence
aagccttaccaacaattacagaaac

SEQ ID NO: 37340 - DNA, 25 bp, Probe Sequence
caagccttaccaacaattacagaaa

SEQ ID NO: 37341 - DNA, 25 bp, Probe Sequence
ttgatagattccttacccagtgaag

SEQ ID NO: 37342 - DNA, 25 bp, Probe Sequence
tgatagattccttacccagtgaaga

SEQ ID NO: 37343 - DNA, 25 bp, Probe Sequence
caactttgatgtgcttatggtgaag

SEQ ID NO: 37344 - DNA, 25 bp, Probe Sequence
cttattgctgacaccaactttgatg

SEQ ID NO: 37345 - DNA, 25 bp, Probe Sequence
ccagtacatggaactcttcaacaag

SEQ ID NO: 37346 - DNA, 25 bp, Probe Sequence
agtacatggaactcttcaacaagat

SEQ ID NO: 37347 - DNA, 25 bp, Probe Sequence
gtacatggaactcttcaacaagatc

SEQ ID NO: 37348 - DNA, 25 bp, Probe Sequence
tacatggaactcttcaacaagatcc

SEQ ID NO: 37349 - DNA, 25 bp, Probe Sequence
cagtacatggaactcttcaacaaga

SEQ ID NO: 37350 - DNA, 25 bp, Probe Sequence
ccttattgctgacaccaactttgat

SEQ ID NO: 37351 - DNA, 25 bp, Probe Sequence
ttattgctgacaccaactttgatgt

SEQ ID NO: 37352 - DNA, 25 bp, Probe Sequence
gtgtggactgtgagacttaccatac

SEQ ID NO: 37353 - DNA, 25 bp, Probe Sequence
tgtgtggactgtgagacttaccata

SEQ ID NO: 37354 - DNA, 25 bp, Probe Sequence
ctgacaccaactttgatgtgcttat

SEQ ID NO: 37355 - DNA, 25 bp, Probe Sequence
tgacaccaactttgatgtgcttatg

SEQ ID NO: 37356 - DNA, 25 bp, Probe Sequence
tattgctgacaccaactttgatgtg

SEQ ID NO: 37357 - DNA, 25 bp, Probe Sequence
cttgccttattgctgacaccaactt

SEQ ID NO: 37358 - DNA, 25 bp, Probe Sequence
ccaactttgatgtgcttatggtgaa

SEQ ID NO: 37359 - DNA, 25 bp, Probe Sequence
ttgtgtggactgtgagacttaccat

SEQ ID NO: 37360 - DNA, 25 bp, Probe Sequence
attttgtgtggactgtgagacttac

SEQ ID NO: 37361 - DNA, 25 bp, Probe Sequence
cattttgtgtggactgtgagactta

SEQ ID NO: 37362 - DNA, 25 bp, Probe Sequence
acatggaactcttcaacaagatccg

SEQ ID NO: 37363 - DNA, 25 bp, Probe Sequence
tgtggactgtgagacttaccatacg

SEQ ID NO: 37364 - DNA, 25 bp, Probe Sequence
gacaccaactttgatgtgcttatgg

SEQ ID NO: 37365 - DNA, 25 bp, Probe Sequence
ttgccttattgctgacaccaacttt

SEQ ID NO: 37366 - DNA, 25 bp, Probe Sequence
gccttattgctgacaccaactttga

SEQ ID NO: 37367 - DNA, 25 bp, Probe Sequence
aagaattgatgctgtgaatgctgag

SEQ ID NO: 37368 - DNA, 25 bp, Probe Sequence
aatgctgagacaattcgagaagtat

SEQ ID NO: 37369 - DNA, 25 bp, Probe Sequence
atgctgagacaattcgagaagtatg

SEQ ID NO: 37370 - DNA, 25 bp, Probe Sequence
caagaattgatgctgtgaatgctga

SEQ ID NO: 37371 - DNA, 25 bp, Probe Sequence
gaattgatgctgtgaatgctgagac

SEQ ID NO: 37372 - DNA, 25 bp, Probe Sequence
agaattgatgctgtgaatgctgaga

SEQ ID NO: 37373 - DNA, 25 bp, Probe Sequence
gagacaattcgagaagtatgtacca

SEQ ID NO: 37374 - DNA, 25 bp, Probe Sequence
tgagacaattcgagaagtatgtacc

SEQ ID NO: 37375 - DNA, 25 bp, Probe Sequence
gtcccattaagcaactaccagattt

SEQ ID NO: 37376 - DNA, 25 bp, Probe Sequence
agacaattcgagaagtatgtaccaa

SEQ ID NO: 37377 - DNA, 25 bp, Probe Sequence
gctgagacaattcgagaagtatgta

SEQ ID NO: 37378 - DNA, 25 bp, Probe Sequence
tggaagcagcatactttcaaattat

SEQ ID NO: 37379 - DNA, 25 bp, Probe Sequence
gtgaagatattggtaggcaaatgtt

SEQ ID NO: 37380 - DNA, 25 bp, Probe Sequence
ttgtgaagatattggtaggcaaatg

SEQ ID NO: 37381 - DNA, 25 bp, Probe Sequence
tgtgaagatattggtaggcaaatgt

SEQ ID NO: 37382 - DNA, 25 bp, Probe Sequence
ctgagacaattcgagaagtatgtac

SEQ ID NO: 37383 - DNA, 25 bp, Probe Sequence
ttggaagcagcatactttcaaatta

SEQ ID NO: 37384 - DNA, 25 bp, Probe Sequence
gttggaagcagcatactttcaaatt

SEQ ID NO: 37385 - DNA, 25 bp, Probe Sequence
tgagaaattatgttggaagcagcat

SEQ ID NO: 37386 - DNA, 25 bp, Probe Sequence
aatttgtgaagatattggtaggcaa

SEQ ID NO: 37387 - DNA, 25 bp, Probe Sequence
gcagcatactttcaaattattacca

SEQ ID NO: 37388 - DNA, 25 bp, Probe Sequence
ggaagcagcatactttcaaattatt

SEQ ID NO: 37389 - DNA, 25 bp, Probe Sequence
ctctgagaaattatgttggaagcag

SEQ ID NO: 37390 - DNA, 25 bp, Probe Sequence
tctctgagaaattatgttggaagca

SEQ ID NO: 37391 - DNA, 25 bp, Probe Sequence
gactatatggattacagaggctacg

SEQ ID NO: 37392 - DNA, 25 bp, Probe Sequence
caagactatatggattacagaggct

SEQ ID NO: 37393 - DNA, 25 bp, Probe Sequence
cttgtcagagttctcagtagtcttc

SEQ ID NO: 37394 - DNA, 25 bp, Probe Sequence
agactatatggattacagaggctac

SEQ ID NO: 37395 - DNA, 25 bp, Probe Sequence
ttgtcagagttctcagtagtcttca

SEQ ID NO: 37396 - DNA, 25 bp, Probe Sequence
cagagttctcagtagtcttcagtct

SEQ ID NO: 37397 - DNA, 25 bp, Probe Sequence
tcagagttctcagtagtcttcagtc

SEQ ID NO: 37398 - DNA, 25 bp, Probe Sequence
gtcagagttctcagtagtcttcagt

SEQ ID NO: 37399 - DNA, 25 bp, Probe Sequence
tgtcagagttctcagtagtcttcag

SEQ ID NO: 37400 - DNA, 25 bp, Probe Sequence
agttctcagtagtcttcagtctcct

SEQ ID NO: 37401 - DNA, 25 bp, Probe Sequence
agagttctcagtagtcttcagtctc

SEQ ID NO: 37402 - DNA, 25 bp, Probe Sequence
agaagacagaagtagtgatatacca

SEQ ID NO: 37403 - DNA, 25 bp, Probe Sequence
ccttgtcagagttctcagtagtctt

SEQ ID NO: 37404 - DNA, 25 bp, Probe Sequence
aagactatatggattacagaggcta

SEQ ID NO: 37405 - DNA, 25 bp, Probe Sequence
gagttctcagtagtcttcagtctcc

SEQ ID NO: 37406 - DNA, 25 bp, Probe Sequence
ccaagactatatggattacagaggc

SEQ ID NO: 37407 - DNA, 25 bp, Probe Sequence
ccaagaagacagaagtagtgatata

SEQ ID NO: 37408 - DNA, 25 bp, Probe Sequence
accttgtcagagttctcagtagtct

SEQ ID NO: 37409 - DNA, 25 bp, Probe Sequence
gaagacagaagtagtgatataccat

SEQ ID NO: 37410 - DNA, 25 bp, Probe Sequence
aagaagacagaagtagtgatatacc

SEQ ID NO: 37411 - DNA, 25 bp, Probe Sequence
gttctcagtagtcttcagtctcctg

SEQ ID NO: 37412 - DNA, 25 bp, Probe Sequence
tcccaagaagacagaagtagtgata

SEQ ID NO: 37413 - DNA, 25 bp, Probe Sequence
aaatgagacggcaaagaaagttaaa

SEQ ID NO: 37414 - DNA, 25 bp, Probe Sequence
cccaagaagacagaagtagtgatat

SEQ ID NO: 37415 - DNA, 25 bp, Probe Sequence
aatgtttgattcagacagcttatgg

SEQ ID NO: 37416 - DNA, 25 bp, Probe Sequence
atgtttgattcagacagcttatggg

SEQ ID NO: 37417 - DNA, 25 bp, Probe Sequence
aaatgtttgattcagacagcttatg

SEQ ID NO: 37418 - DNA, 25 bp, Probe Sequence
gccagctctttgttcagttgactta

SEQ ID NO: 37419 - DNA, 25 bp, Probe Sequence
agagctcacagtctagattagaagt

SEQ ID NO: 37420 - DNA, 25 bp, Probe Sequence
cgtagagctcacagtctagattaga

SEQ ID NO: 37421 - DNA, 25 bp, Probe Sequence
gtagagctcacagtctagattagaa

SEQ ID NO: 37422 - DNA, 25 bp, Probe Sequence
tagagctcacagtctagattagaag

SEQ ID NO: 37423 - DNA, 25 bp, Probe Sequence
ccgtagagctcacagtctagattag

SEQ ID NO: 37424 - DNA, 25 bp, Probe Sequence
aaaatgtttgattcagacagcttat

SEQ ID NO: 37425 - DNA, 25 bp, Probe Sequence
tccgtagagctcacagtctagatta

SEQ ID NO: 37426 - DNA, 25 bp, Probe Sequence
gtttgattcagacagcttatggggt

SEQ ID NO: 37427 - DNA, 25 bp, Probe Sequence
tgtttgattcagacagcttatgggg

SEQ ID NO: 37428 - DNA, 25 bp, Probe Sequence
agccagctctttgttcagttgactt

SEQ ID NO: 37429 - DNA, 25 bp, Probe Sequence
aagccagctctttgttcagttgact

SEQ ID NO: 37430 - DNA, 25 bp, Probe Sequence
aaagccagctctttgttcagttgac

SEQ ID NO: 37431 - DNA, 25 bp, Probe Sequence
ctccgtagagctcacagtctagatt

SEQ ID NO: 37432 - DNA, 25 bp, Probe Sequence
attgacagtagtcccctccgtagag

SEQ ID NO: 37433 - DNA, 25 bp, Probe Sequence
gattgacagtagtcccctccgtaga

SEQ ID NO: 37434 - DNA, 25 bp, Probe Sequence
cctccgtagagctcacagtctagat

SEQ ID NO: 37435 - DNA, 25 bp, Probe Sequence
ggaatctcaccatcaagaaggactg

SEQ ID NO: 37436 - DNA, 25 bp, Probe Sequence
ccgtctaaccatgatgccttaacat

SEQ ID NO: 37437 - DNA, 25 bp, Probe Sequence
atcaagaaggactggaaggactgag

SEQ ID NO: 37438 - DNA, 25 bp, Probe Sequence
gaatctcaccatcaagaaggactgg

SEQ ID NO: 37439 - DNA, 25 bp, Probe Sequence
gagtggaatctcaccatcaagaagg

SEQ ID NO: 37440 - DNA, 25 bp, Probe Sequence
ggagtggaatctcaccatcaagaag

SEQ ID NO: 37441 - DNA, 25 bp, Probe Sequence
catcaagaaggactggaaggactga

SEQ ID NO: 37442 - DNA, 25 bp, Probe Sequence
atctcaccatcaagaaggactggaa

SEQ ID NO: 37443 - DNA, 25 bp, Probe Sequence
aatctcaccatcaagaaggactgga

SEQ ID NO: 37444 - DNA, 25 bp, Probe Sequence
tggaatctcaccatcaagaaggact

SEQ ID NO: 37445 - DNA, 25 bp, Probe Sequence
gtggaatctcaccatcaagaaggac

SEQ ID NO: 37446 - DNA, 25 bp, Probe Sequence
agtggaatctcaccatcaagaagga

SEQ ID NO: 37447 - DNA, 25 bp, Probe Sequence
aaactcaagtcacctcagtaccatc

SEQ ID NO: 37448 - DNA, 25 bp, Probe Sequence
ccatcagtatttattgcctccgtcc

SEQ ID NO: 37449 - DNA, 25 bp, Probe Sequence
aactcaagtcacctcagtaccatcc

SEQ ID NO: 37450 - DNA, 25 bp, Probe Sequence
ctcaagtcacctcagtaccatccag

SEQ ID NO: 37451 - DNA, 25 bp, Probe Sequence
catcagtatttattgcctccgtccg

SEQ ID NO: 37452 - DNA, 25 bp, Probe Sequence
tctcaccatcaagaaggactggaag

SEQ ID NO: 37453 - DNA, 25 bp, Probe Sequence
cgtctaaccatgatgccttaacatg

SEQ ID NO: 37454 - DNA, 25 bp, Probe Sequence
atcagtatttattgcctccgtccgt

SEQ ID NO: 37455 - DNA, 25 bp, Probe Sequence
gccatcagtatttattgcctccgtc

SEQ ID NO: 37456 - DNA, 25 bp, Probe Sequence
ggaaataaatgcccctgaaggaaaa

SEQ ID NO: 37457 - DNA, 25 bp, Probe Sequence
atgatgccttaacatgtggagtgta

SEQ ID NO: 37458 - DNA, 25 bp, Probe Sequence
actcaagtcacctcagtaccatcca

SEQ ID NO: 37459 - DNA, 25 bp, Probe Sequence
gaactagcggaattactggaggaag

SEQ ID NO: 37460 - DNA, 25 bp, Probe Sequence
aaacactaatttgctgctttctgac

SEQ ID NO: 37461 - DNA, 25 bp, Probe Sequence
gaacaacacggtttagaaagaatcc

SEQ ID NO: 37462 - DNA, 25 bp, Probe Sequence
ggaacaacacggtttagaaagaatc

SEQ ID NO: 37463 - DNA, 25 bp, Probe Sequence
actagcggaattactggaggaagaa

SEQ ID NO: 37464 - DNA, 25 bp, Probe Sequence
aactagcggaattactggaggaaga

SEQ ID NO: 37465 - DNA, 25 bp, Probe Sequence
aacaacacggtttagaaagaatccc

SEQ ID NO: 37466 - DNA, 25 bp, Probe Sequence
gggaacaacacggtttagaaagaat

SEQ ID NO: 37467 - DNA, 25 bp, Probe Sequence
aacactaatttgctgctttctgacc

SEQ ID NO: 37468 - DNA, 25 bp, Probe Sequence
gccagtgctcatctttgctaataag

SEQ ID NO: 37469 - DNA, 25 bp, Probe Sequence
ctagcggaattactggaggaagaaa

SEQ ID NO: 37470 - DNA, 25 bp, Probe Sequence
cactaatttgctgctttctgaccaa

SEQ ID NO: 37471 - DNA, 25 bp, Probe Sequence
tgccagtgctcatctttgctaataa

SEQ ID NO: 37472 - DNA, 25 bp, Probe Sequence
agggaacaacacggtttagaaagaa

SEQ ID NO: 37473 - DNA, 25 bp, Probe Sequence
agtttagacaattccagtgggcttt

SEQ ID NO: 37474 - DNA, 25 bp, Probe Sequence
ggaactagcggaattactggaggaa

SEQ ID NO: 37475 - DNA, 25 bp, Probe Sequence
gagggaacaacacggtttagaaaga

SEQ ID NO: 37476 - DNA, 25 bp, Probe Sequence
agagggaacaacacggtttagaaag

SEQ ID NO: 37477 - DNA, 25 bp, Probe Sequence
gagagggaacaacacggtttagaaa

SEQ ID NO: 37478 - DNA, 25 bp, Probe Sequence
tcaggaactagcggaattactggag

SEQ ID NO: 37479 - DNA, 25 bp, Probe Sequence
agatttaactgatctctgaggttca

SEQ ID NO: 37480 - DNA, 25 bp, Probe Sequence
acactaatttgctgctttctgacca

SEQ ID NO: 37481 - DNA, 25 bp, Probe Sequence
ctgatctctgaggttcagtatcatt

SEQ ID NO: 37482 - DNA, 25 bp, Probe Sequence
gtgccagtgctcatctttgctaata

SEQ ID NO: 37483 - DNA, 25 bp, Probe Sequence
cattagagggatgagacagacattc

SEQ ID NO: 37484 - DNA, 25 bp, Probe Sequence
aatagcttgtcttcgtccatctgtt

SEQ ID NO: 37485 - DNA, 25 bp, Probe Sequence
cagtaaccctaaggaagttgctaac

SEQ ID NO: 37486 - DNA, 25 bp, Probe Sequence
ccagtaaccctaaggaagttgctaa

SEQ ID NO: 37487 - DNA, 25 bp, Probe Sequence
atagcttgtcttcgtccatctgttg

SEQ ID NO: 37488 - DNA, 25 bp, Probe Sequence
tcaatagcttgtcttcgtccatctg

SEQ ID NO: 37489 - DNA, 25 bp, Probe Sequence
gtcaatagcttgtcttcgtccatct

SEQ ID NO: 37490 - DNA, 25 bp, Probe Sequence
agtcaatagcttgtcttcgtccatc

SEQ ID NO: 37491 - DNA, 25 bp, Probe Sequence
gagtcaatagcttgtcttcgtccat

SEQ ID NO: 37492 - DNA, 25 bp, Probe Sequence
agtagcattgatgtaataaacaggt

SEQ ID NO: 37493 - DNA, 25 bp, Probe Sequence
tactctacttcccagtaaccctaag

SEQ ID NO: 37494 - DNA, 25 bp, Probe Sequence
caatagcttgtcttcgtccatctgt

SEQ ID NO: 37495 - DNA, 25 bp, Probe Sequence
ttgagtcaatagcttgtcttcgtcc

SEQ ID NO: 37496 - DNA, 25 bp, Probe Sequence
tcaataaacagtcactggaaagagt

SEQ ID NO: 37497 - DNA, 25 bp, Probe Sequence
actcaataaacagtcactggaaaga

SEQ ID NO: 37498 - DNA, 25 bp, Probe Sequence
cactcaataaacagtcactggaaag

SEQ ID NO: 37499 - DNA, 25 bp, Probe Sequence
ctcaataaacagtcactggaaagag

SEQ ID NO: 37500 - DNA, 25 bp, Probe Sequence
acactcaataaacagtcactggaaa

SEQ ID NO: 37501 - DNA, 25 bp, Probe Sequence
tctctttgagtcaatagcttgtctt

SEQ ID NO: 37502 - DNA, 25 bp, Probe Sequence
ttctctttgagtcaatagcttgtct

SEQ ID NO: 37503 - DNA, 25 bp, Probe Sequence
gttctctttgagtcaatagcttgtc

SEQ ID NO: 37504 - DNA, 25 bp, Probe Sequence
ctctttgagtcaatagcttgtcttc

SEQ ID NO: 37505 - DNA, 25 bp, Probe Sequence
gacactcaataaacagtcactggaa

SEQ ID NO: 37506 - DNA, 25 bp, Probe Sequence
gtagcattgatgtaataaacaggtt

SEQ ID NO: 37507 - DNA, 25 bp, Probe Sequence
ctctggatcggaatttacctgattt

SEQ ID NO: 37508 - DNA, 25 bp, Probe Sequence
ggatcggaatttacctgatttcttc

SEQ ID NO: 37509 - DNA, 25 bp, Probe Sequence
tggatcggaatttacctgatttctt

SEQ ID NO: 37510 - DNA, 25 bp, Probe Sequence
ctggatcggaatttacctgatttct

SEQ ID NO: 37511 - DNA, 25 bp, Probe Sequence
tctggatcggaatttacctgatttc

SEQ ID NO: 37512 - DNA, 25 bp, Probe Sequence
tctctggatcggaatttacctgatt

SEQ ID NO: 37513 - DNA, 25 bp, Probe Sequence
gatcggaatttacctgatttcttca

SEQ ID NO: 37514 - DNA, 25 bp, Probe Sequence
gtctctggatcggaatttacctgat

SEQ ID NO: 37515 - DNA, 25 bp, Probe Sequence
agtgtctttgtgatttgagtaaagc

SEQ ID NO: 37516 - DNA, 25 bp, Probe Sequence
tgtgatttgagtaaagctcctattc

SEQ ID NO: 37517 - DNA, 25 bp, Probe Sequence
gatttgagtaaagctcctattctgt

SEQ ID NO: 37518 - DNA, 25 bp, Probe Sequence
tgatttgagtaaagctcctattctg

SEQ ID NO: 37519 - DNA, 25 bp, Probe Sequence
gtgatttgagtaaagctcctattct

SEQ ID NO: 37520 - DNA, 25 bp, Probe Sequence
tttgagtaaagctcctattctgttt

SEQ ID NO: 37521 - DNA, 25 bp, Probe Sequence
ttgtgatttgagtaaagctcctatt

SEQ ID NO: 37522 - DNA, 25 bp, Probe Sequence
tttgtgatttgagtaaagctcctat

SEQ ID NO: 37523 - DNA, 25 bp, Probe Sequence
atagtgtctttgtgatttgagtaaa

SEQ ID NO: 37524 - DNA, 25 bp, Probe Sequence
aatagtgtctttgtgatttgagtaa

SEQ ID NO: 37525 - DNA, 25 bp, Probe Sequence
atttgagtaaagctcctattctgtt

SEQ ID NO: 37526 - DNA, 25 bp, Probe Sequence
attgaaaaggaaaggcttggtaaaa

SEQ ID NO: 37527 - DNA, 25 bp, Probe Sequence
gattgaaaaggaaaggcttggtaaa

SEQ ID NO: 37528 - DNA, 25 bp, Probe Sequence
tagattgaaaaggaaaggcttggta

SEQ ID NO: 37529 - DNA, 25 bp, Probe Sequence
cagtagattgaaaaggaaaggcttg

SEQ ID NO: 37530 - DNA, 25 bp, Probe Sequence
gacagtagattgaaaaggaaaggct

SEQ ID NO: 37531 - DNA, 25 bp, Probe Sequence
agagaaggaggcagtcaataagatg

SEQ ID NO: 37532 - DNA, 25 bp, Probe Sequence
cagagaaggaggcagtcaataagat

SEQ ID NO: 37533 - DNA, 25 bp, Probe Sequence
agaaggaggcagtcaataagatgtc

SEQ ID NO: 37534 - DNA, 25 bp, Probe Sequence
gagaaggaggcagtcaataagatgt

SEQ ID NO: 37535 - DNA, 25 bp, Probe Sequence
ttctactggatcacttgtcaagatg

SEQ ID NO: 37536 - DNA, 25 bp, Probe Sequence
ataacaaggatgtgtcggtgatgat

SEQ ID NO: 37537 - DNA, 25 bp, Probe Sequence
aagtgttacaacaagacgaagatcc

SEQ ID NO: 37538 - DNA, 25 bp, Probe Sequence
aataacaaggatgtgtcggtgatga

SEQ ID NO: 37539 - DNA, 25 bp, Probe Sequence
caataacaaggatgtgtcggtgatg

SEQ ID NO: 37540 - DNA, 25 bp, Probe Sequence
tcaataacaaggatgtgtcggtgat

SEQ ID NO: 37541 - DNA, 25 bp, Probe Sequence
aaactggaacgaggaatttgagata

SEQ ID NO: 37542 - DNA, 25 bp, Probe Sequence
aactggaacgaggaatttgagatag

SEQ ID NO: 37543 - DNA, 25 bp, Probe Sequence
ctggaacgaggaatttgagatagag

SEQ ID NO: 37544 - DNA, 25 bp, Probe Sequence
actgttgtatcttgaataaacgctg

SEQ ID NO: 37545 - DNA, 25 bp, Probe Sequence
cactgttgtatcttgaataaacgct

SEQ ID NO: 37546 - DNA, 25 bp, Probe Sequence
tctactggatcacttgtcaagatgc

SEQ ID NO: 37547 - DNA, 25 bp, Probe Sequence
actggaacgaggaatttgagataga

SEQ ID NO: 37548 - DNA, 25 bp, Probe Sequence
tcactgttgtatcttgaataaacgc

SEQ ID NO: 37549 - DNA, 25 bp, Probe Sequence
gttgtatcttgaataaacgctgctg

SEQ ID NO: 37550 - DNA, 25 bp, Probe Sequence
ctgttgtatcttgaataaacgctgc

SEQ ID NO: 37551 - DNA, 25 bp, Probe Sequence
gattccctcactgttgtatcttgaa

SEQ ID NO: 37552 - DNA, 25 bp, Probe Sequence
tccctcactgttgtatcttgaataa

SEQ ID NO: 37553 - DNA, 25 bp, Probe Sequence
ttccctcactgttgtatcttgaata

SEQ ID NO: 37554 - DNA, 25 bp, Probe Sequence
tgttgtatcttgaataaacgctgct

SEQ ID NO: 37555 - DNA, 25 bp, Probe Sequence
gtcagaagaagaagttgtagaagga

SEQ ID NO: 37556 - DNA, 25 bp, Probe Sequence
agtcagaagaagaagttgtagaagg

SEQ ID NO: 37557 - DNA, 25 bp, Probe Sequence
tccaacataactaccatctctctct

SEQ ID NO: 37558 - DNA, 25 bp, Probe Sequence
actcttccaacataactaccatctc

SEQ ID NO: 37559 - DNA, 25 bp, Probe Sequence
gaagttgtagaaggagagaaggaag

SEQ ID NO: 37560 - DNA, 25 bp, Probe Sequence
gaagaagttgtagaaggagagaagg

SEQ ID NO: 37561 - DNA, 25 bp, Probe Sequence
cagaagaagaagttgtagaaggaga

SEQ ID NO: 37562 - DNA, 25 bp, Probe Sequence
tcagaagaagaagttgtagaaggag

SEQ ID NO: 37563 - DNA, 25 bp, Probe Sequence
ctcagtcagaagaagaagttgtaga

SEQ ID NO: 37564 - DNA, 25 bp, Probe Sequence
ttccaacataactaccatctctctc

SEQ ID NO: 37565 - DNA, 25 bp, Probe Sequence
tcttccaacataactaccatctctc

SEQ ID NO: 37566 - DNA, 25 bp, Probe Sequence
ccaacataactaccatctctctctt

SEQ ID NO: 37567 - DNA, 25 bp, Probe Sequence
cttccaacataactaccatctctct

SEQ ID NO: 37568 - DNA, 25 bp, Probe Sequence
ctcttccaacataactaccatctct

SEQ ID NO: 37569 - DNA, 25 bp, Probe Sequence
agaagttgtagaaggagagaaggaa

SEQ ID NO: 37570 - DNA, 25 bp, Probe Sequence
aagaagttgtagaaggagagaagga

SEQ ID NO: 37571 - DNA, 25 bp, Probe Sequence
agaagaagttgtagaaggagagaag

SEQ ID NO: 37572 - DNA, 25 bp, Probe Sequence
gaagaagaagttgtagaaggagaga

SEQ ID NO: 37573 - DNA, 25 bp, Probe Sequence
agaagaagaagttgtagaaggagag

SEQ ID NO: 37574 - DNA, 25 bp, Probe Sequence
tcagtcagaagaagaagttgtagaa

SEQ ID NO: 37575 - DNA, 25 bp, Probe Sequence
aagttgtagaaggagagaaggaagt

SEQ ID NO: 37576 - DNA, 25 bp, Probe Sequence
cagtcagaagaagaagttgtagaag

SEQ ID NO: 37577 - DNA, 25 bp, Probe Sequence
aagaagaagttgtagaaggagagaa

SEQ ID NO: 37578 - DNA, 25 bp, Probe Sequence
tctcagtcagaagaagaagttgtag

SEQ ID NO: 37579 - DNA, 25 bp, Probe Sequence
taatgtgcttgttggtatgttgcta

SEQ ID NO: 37580 - DNA, 25 bp, Probe Sequence
ctgagcaatggtgtagttcttagac

SEQ ID NO: 37581 - DNA, 25 bp, Probe Sequence
atgtgcttgttggtatgttgctatt

SEQ ID NO: 37582 - DNA, 25 bp, Probe Sequence
aatgtgcttgttggtatgttgctat

SEQ ID NO: 37583 - DNA, 25 bp, Probe Sequence
ttaatgtgcttgttggtatgttgct

SEQ ID NO: 37584 - DNA, 25 bp, Probe Sequence
cctgagcaatggtgtagttcttaga

SEQ ID NO: 37585 - DNA, 25 bp, Probe Sequence
ttctacaggacgaattgaggcttaa

SEQ ID NO: 37586 - DNA, 25 bp, Probe Sequence
gcaatggtgtagttcttagacctaa

SEQ ID NO: 37587 - DNA, 25 bp, Probe Sequence
agcaatggtgtagttcttagaccta

SEQ ID NO: 37588 - DNA, 25 bp, Probe Sequence
ttaccacatcattgcttcctttcta

SEQ ID NO: 37589 - DNA, 25 bp, Probe Sequence
tacctgagcaatggtgtagttctta

SEQ ID NO: 37590 - DNA, 25 bp, Probe Sequence
taccacatcattgcttcctttctac

SEQ ID NO: 37591 - DNA, 25 bp, Probe Sequence
cgaattgaggcttaaactttactgt

SEQ ID NO: 37592 - DNA, 25 bp, Probe Sequence
acgaattgaggcttaaactttactg

SEQ ID NO: 37593 - DNA, 25 bp, Probe Sequence
gacgaattgaggcttaaactttact

SEQ ID NO: 37594 - DNA, 25 bp, Probe Sequence
ggacgaattgaggcttaaactttac

SEQ ID NO: 37595 - DNA, 25 bp, Probe Sequence
aggacgaattgaggcttaaacttta

SEQ ID NO: 37596 - DNA, 25 bp, Probe Sequence
tttaatgtgcttgttggtatgttgc

SEQ ID NO: 37597 - DNA, 25 bp, Probe Sequence
atgttgctctaagtgctgtttgtta

SEQ ID NO: 37598 - DNA, 25 bp, Probe Sequence
taaagaaagatgttgctctaagtgc

SEQ ID NO: 37599 - DNA, 25 bp, Probe Sequence
aaagaaagatgttgctctaagtgct

SEQ ID NO: 37600 - DNA, 25 bp, Probe Sequence
ttctgcttgttcttaatgctgtggt

SEQ ID NO: 37601 - DNA, 25 bp, Probe Sequence
gttaccacatcattgcttcctttct

SEQ ID NO: 37602 - DNA, 25 bp, Probe Sequence
aatggtgtagttcttagacctaagg

SEQ ID NO: 37603 - DNA, 25 bp, Probe Sequence
aagacacttggtaatagacttcagt

SEQ ID NO: 37604 - DNA, 25 bp, Probe Sequence
ttggtaatagacttcagtgaactct

SEQ ID NO: 37605 - DNA, 25 bp, Probe Sequence
cttggtaatagacttcagtgaactc

SEQ ID NO: 37606 - DNA, 25 bp, Probe Sequence
acttggtaatagacttcagtgaact

SEQ ID NO: 37607 - DNA, 25 bp, Probe Sequence
ggtaatagacttcagtgaactctgt

SEQ ID NO: 37608 - DNA, 25 bp, Probe Sequence
tggtaatagacttcagtgaactctg

SEQ ID NO: 37609 - DNA, 25 bp, Probe Sequence
atagacttcagtgaactctgtatga

SEQ ID NO: 37610 - DNA, 25 bp, Probe Sequence
ctgatccagaacacttcaagaactc

SEQ ID NO: 37611 - DNA, 25 bp, Probe Sequence
atccagaacacttcaagaactcgtc

SEQ ID NO: 37612 - DNA, 25 bp, Probe Sequence
atcactgatccagaacacttcaaga

SEQ ID NO: 37613 - DNA, 25 bp, Probe Sequence
ctcttgggcatttgtatttgtagta

SEQ ID NO: 37614 - DNA, 25 bp, Probe Sequence
actgtaacctcaaggaaaccataaa

SEQ ID NO: 37615 - DNA, 25 bp, Probe Sequence
aactgtaacctcaaggaaaccataa

SEQ ID NO: 37616 - DNA, 25 bp, Probe Sequence
aaactgtaacctcaaggaaaccata

SEQ ID NO: 37617 - DNA, 25 bp, Probe Sequence
ctgtaacctcaaggaaaccataaag

SEQ ID NO: 37618 - DNA, 25 bp, Probe Sequence
tgggcatttgtatttgtagtaaagt

SEQ ID NO: 37619 - DNA, 25 bp, Probe Sequence
actgatccagaacacttcaagaact

SEQ ID NO: 37620 - DNA, 25 bp, Probe Sequence
cactgatccagaacacttcaagaac

SEQ ID NO: 37621 - DNA, 25 bp, Probe Sequence
tcactgatccagaacacttcaagaa

SEQ ID NO: 37622 - DNA, 25 bp, Probe Sequence
cctcttgggcatttgtatttgtagt

SEQ ID NO: 37623 - DNA, 25 bp, Probe Sequence
acctcttgggcatttgtatttgtag

SEQ ID NO: 37624 - DNA, 25 bp, Probe Sequence
tgcctaaggaagtttggaaatagtc

SEQ ID NO: 37625 - DNA, 25 bp, Probe Sequence
ctgcctaaggaagtttggaaatagt

SEQ ID NO: 37626 - DNA, 25 bp, Probe Sequence
aatagacttcagtgaactctgtatg

SEQ ID NO: 37627 - DNA, 25 bp, Probe Sequence
tcacactgagaatgtaagaactaca

SEQ ID NO: 37628 - DNA, 25 bp, Probe Sequence
cacactgagaatgtaagaactacaa

SEQ ID NO: 37629 - DNA, 25 bp, Probe Sequence
tttatcctttgattctccttcagcc

SEQ ID NO: 37630 - DNA, 25 bp, Probe Sequence
ttatcctttgattctccttcagccc

SEQ ID NO: 37631 - DNA, 25 bp, Probe Sequence
tatcctttgattctccttcagccct

SEQ ID NO: 37632 - DNA, 25 bp, Probe Sequence
gctcacactgagaatgtaagaacta

SEQ ID NO: 37633 - DNA, 25 bp, Probe Sequence
ctcacactgagaatgtaagaactac

SEQ ID NO: 37634 - DNA, 25 bp, Probe Sequence
actgagaatgtaagaactacaaaca

SEQ ID NO: 37635 - DNA, 25 bp, Probe Sequence
acactgagaatgtaagaactacaaa

SEQ ID NO: 37636 - DNA, 25 bp, Probe Sequence
cactgagaatgtaagaactacaaac

SEQ ID NO: 37637 - DNA, 25 bp, Probe Sequence
gattggctcacactgagaatgtaag

SEQ ID NO: 37638 - DNA, 25 bp, Probe Sequence
ttttatcctttgattctccttcagc

SEQ ID NO: 37639 - DNA, 25 bp, Probe Sequence
attggctcacactgagaatgtaaga

SEQ ID NO: 37640 - DNA, 25 bp, Probe Sequence
agattggctcacactgagaatgtaa

SEQ ID NO: 37641 - DNA, 25 bp, Probe Sequence
ttggctcacactgagaatgtaagaa

SEQ ID NO: 37642 - DNA, 25 bp, Probe Sequence
atttggggtggattttggttttgtt

SEQ ID NO: 37643 - DNA, 25 bp, Probe Sequence
ctgagaatgtaagaactacaaacaa

SEQ ID NO: 37644 - DNA, 25 bp, Probe Sequence
ggctcacactgagaatgtaagaact

SEQ ID NO: 37645 - DNA, 25 bp, Probe Sequence
cagattggctcacactgagaatgta

SEQ ID NO: 37646 - DNA, 25 bp, Probe Sequence
tggtattttatcctttgattctcct

SEQ ID NO: 37647 - DNA, 25 bp, Probe Sequence
atcaacatcttttcttgcctctgtg

SEQ ID NO: 37648 - DNA, 25 bp, Probe Sequence
ctggtattttatcctttgattctcc

SEQ ID NO: 37649 - DNA, 25 bp, Probe Sequence
gatttggggtggattttggttttgt

SEQ ID NO: 37650 - DNA, 25 bp, Probe Sequence
tggctcacactgagaatgtaagaac

SEQ ID NO: 37651 - DNA, 25 bp, Probe Sequence
acacacagcatgtaatggtatctta

SEQ ID NO: 37652 - DNA, 25 bp, Probe Sequence
cacacagcatgtaatggtatcttaa

SEQ ID NO: 37653 - DNA, 25 bp, Probe Sequence
gtgaagtggaaatgttctaaaggtg

SEQ ID NO: 37654 - DNA, 25 bp, Probe Sequence
ttgtgaagtggaaatgttctaaagg

SEQ ID NO: 37655 - DNA, 25 bp, Probe Sequence
tgtgaagtggaaatgttctaaaggt

SEQ ID NO: 37656 - DNA, 25 bp, Probe Sequence
gccaagtaagaaagtgaagcaaatc

SEQ ID NO: 37657 - DNA, 25 bp, Probe Sequence
gttctaaaggtggtgaggcaataaa

SEQ ID NO: 37658 - DNA, 25 bp, Probe Sequence
gaagtggaaatgttctaaaggtggt

SEQ ID NO: 37659 - DNA, 25 bp, Probe Sequence
tgaagtggaaatgttctaaaggtgg

SEQ ID NO: 37660 - DNA, 25 bp, Probe Sequence
ccaagtaagaaagtgaagcaaatca

SEQ ID NO: 37661 - DNA, 25 bp, Probe Sequence
tatgacatttcacgggagatttctt

SEQ ID NO: 37662 - DNA, 25 bp, Probe Sequence
aagaaagtgaagcaaatcagaaact

SEQ ID NO: 37663 - DNA, 25 bp, Probe Sequence
tgaagcaaatcagaaacttgtgaag

SEQ ID NO: 37664 - DNA, 25 bp, Probe Sequence
tacacacagcatgtaatggtatctt

SEQ ID NO: 37665 - DNA, 25 bp, Probe Sequence
atacacacagcatgtaatggtatct

SEQ ID NO: 37666 - DNA, 25 bp, Probe Sequence
gtgaagcaaatcagaaacttgtgaa

SEQ ID NO: 37667 - DNA, 25 bp, Probe Sequence
aagtggaaatgttctaaaggtggtg

SEQ ID NO: 37668 - DNA, 25 bp, Probe Sequence
cttgtgaagtggaaatgttctaaag

SEQ ID NO: 37669 - DNA, 25 bp, Probe Sequence
gtatgacatttcacgggagatttct

SEQ ID NO: 37670 - DNA, 25 bp, Probe Sequence
agtatgacatttcacgggagatttc

SEQ ID NO: 37671 - DNA, 25 bp, Probe Sequence
aatacacacagcatgtaatggtatc

SEQ ID NO: 37672 - DNA, 25 bp, Probe Sequence
cagtatgacatttcacgggagattt

SEQ ID NO: 37673 - DNA, 25 bp, Probe Sequence
agtaagaaagtgaagcaaatcagaa

SEQ ID NO: 37674 - DNA, 25 bp, Probe Sequence
aagtaagaaagtgaagcaaatcaga

SEQ ID NO: 37675 - DNA, 25 bp, Probe Sequence
atcttcattacggaactcatcacat

SEQ ID NO: 37676 - DNA, 25 bp, Probe Sequence
catcttcattacggaactcatcaca

SEQ ID NO: 37677 - DNA, 25 bp, Probe Sequence
agtggattggataacttcgtgataa

SEQ ID NO: 37678 - DNA, 25 bp, Probe Sequence
gagtggattggataacttcgtgata

SEQ ID NO: 37679 - DNA, 25 bp, Probe Sequence
ccttcagagtggattggataacttc

SEQ ID NO: 37680 - DNA, 25 bp, Probe Sequence
ccatcttcattacggaactcatcac

SEQ ID NO: 37681 - DNA, 25 bp, Probe Sequence
cttcagagtggattggataacttcg

SEQ ID NO: 37682 - DNA, 25 bp, Probe Sequence
acagttaagatgttggaatacctgg

SEQ ID NO: 37683 - DNA, 25 bp, Probe Sequence
agagtggattggataacttcgtgat

SEQ ID NO: 37684 - DNA, 25 bp, Probe Sequence
tcttcattacggaactcatcacatg

SEQ ID NO: 37685 - DNA, 25 bp, Probe Sequence
ttcagagtggattggataacttcgt

SEQ ID NO: 37686 - DNA, 25 bp, Probe Sequence
agtcatctcttcacagtcatctgag

SEQ ID NO: 37687 - DNA, 25 bp, Probe Sequence
tgttctgacattgaaggaagaggaa

SEQ ID NO: 37688 - DNA, 25 bp, Probe Sequence
ctccatcttcattacggaactcatc

SEQ ID NO: 37689 - DNA, 25 bp, Probe Sequence
tccttcagagtggattggataactt

SEQ ID NO: 37690 - DNA, 25 bp, Probe Sequence
cagtcatctcttcacagtcatctga

SEQ ID NO: 37691 - DNA, 25 bp, Probe Sequence
cagagtggattggataacttcgtga

SEQ ID NO: 37692 - DNA, 25 bp, Probe Sequence
tcagagtggattggataacttcgtg

SEQ ID NO: 37693 - DNA, 25 bp, Probe Sequence
caaagagcacatttaccagtatagc

SEQ ID NO: 37694 - DNA, 25 bp, Probe Sequence
ggattggataacttcgtgataaacc

SEQ ID NO: 37695 - DNA, 25 bp, Probe Sequence
acatcaaagagcacatttaccagta

SEQ ID NO: 37696 - DNA, 25 bp, Probe Sequence
tccatcttcattacggaactcatca

SEQ ID NO: 37697 - DNA, 25 bp, Probe Sequence
catcaaagagcacatttaccagtat

SEQ ID NO: 37698 - DNA, 25 bp, Probe Sequence
tggattggataacttcgtgataaac

SEQ ID NO: 37699 - DNA, 25 bp, Probe Sequence
aatgagcctttgttgctaatcaaat

SEQ ID NO: 37700 - DNA, 25 bp, Probe Sequence
atgagcctttgttgctaatcaaatc

SEQ ID NO: 37701 - DNA, 25 bp, Probe Sequence
caatgagcctttgttgctaatcaaa

SEQ ID NO: 37702 - DNA, 25 bp, Probe Sequence
tgagcctttgttgctaatcaaatcc

SEQ ID NO: 37703 - DNA, 25 bp, Probe Sequence
gagcctttgttgctaatcaaatccg

SEQ ID NO: 37704 - DNA, 25 bp, Probe Sequence
taatcaaatccgggacttgtttgta

SEQ ID NO: 37705 - DNA, 25 bp, Probe Sequence
tgctaatcaaatccgggacttgttt

SEQ ID NO: 37706 - DNA, 25 bp, Probe Sequence
ttgctaatcaaatccgggacttgtt

SEQ ID NO: 37707 - DNA, 25 bp, Probe Sequence
ttgttgctaatcaaatccgggactt

SEQ ID NO: 37708 - DNA, 25 bp, Probe Sequence
aaatccgggacttgtttgtacgttt

SEQ ID NO: 37709 - DNA, 25 bp, Probe Sequence
ctaatcaaatccgggacttgtttgt

SEQ ID NO: 37710 - DNA, 25 bp, Probe Sequence
aatcaaatccgggacttgtttgtac

SEQ ID NO: 37711 - DNA, 25 bp, Probe Sequence
gttgctaatcaaatccgggacttgt

SEQ ID NO: 37712 - DNA, 25 bp, Probe Sequence
tgttgctaatcaaatccgggacttg

SEQ ID NO: 37713 - DNA, 25 bp, Probe Sequence
gctaatcaaatccgggacttgtttg

SEQ ID NO: 37714 - DNA, 25 bp, Probe Sequence
ctttgttgctaatcaaatccgggac

SEQ ID NO: 37715 - DNA, 25 bp, Probe Sequence
tttgttgctaatcaaatccgggact

SEQ ID NO: 37716 - DNA, 25 bp, Probe Sequence
ttttctcactgaaaccttttccagt

SEQ ID NO: 37717 - DNA, 25 bp, Probe Sequence
atcaaatccgggacttgtttgtacg

SEQ ID NO: 37718 - DNA, 25 bp, Probe Sequence
cctttgttgctaatcaaatccggga

SEQ ID NO: 37719 - DNA, 25 bp, Probe Sequence
aatccgggacttgtttgtacgtttt

SEQ ID NO: 37720 - DNA, 25 bp, Probe Sequence
caaatccgggacttgtttgtacgtt

SEQ ID NO: 37721 - DNA, 25 bp, Probe Sequence
agcctttgttgctaatcaaatccgg

SEQ ID NO: 37722 - DNA, 25 bp, Probe Sequence
gcaatgagcctttgttgctaatcaa

SEQ ID NO: 37723 - DNA, 25 bp, Probe Sequence
caagtcggaacagcagataacaatg

SEQ ID NO: 37724 - DNA, 25 bp, Probe Sequence
ccttatctccaacaatgagcaactg

SEQ ID NO: 37725 - DNA, 25 bp, Probe Sequence
gaccttatctccaacaatgagcaac

SEQ ID NO: 37726 - DNA, 25 bp, Probe Sequence
accttatctccaacaatgagcaact

SEQ ID NO: 37727 - DNA, 25 bp, Probe Sequence
cttatctccaacaatgagcaactgc

SEQ ID NO: 37728 - DNA, 25 bp, Probe Sequence
ccaagtcggaacagcagataacaat

SEQ ID NO: 37729 - DNA, 25 bp, Probe Sequence
cgaccttatctccaacaatgagcaa

SEQ ID NO: 37730 - DNA, 25 bp, Probe Sequence
gagaacctgagacaccttaagaaca

SEQ ID NO: 37731 - DNA, 25 bp, Probe Sequence
agaacctgagacaccttaagaacac

SEQ ID NO: 37732 - DNA, 25 bp, Probe Sequence
ggagaacctgagacaccttaagaac

SEQ ID NO: 37733 - DNA, 25 bp, Probe Sequence
caagtatggcaacatgacagaggac

SEQ ID NO: 37734 - DNA, 25 bp, Probe Sequence
ttatctccaacaatgagcaactgcc

SEQ ID NO: 37735 - DNA, 25 bp, Probe Sequence
gaacctgagacaccttaagaacacc

SEQ ID NO: 37736 - DNA, 25 bp, Probe Sequence
cctgagacaccttaagaacaccatg

SEQ ID NO: 37737 - DNA, 25 bp, Probe Sequence
gaagatcagaagccagtcatggatg

SEQ ID NO: 37738 - DNA, 25 bp, Probe Sequence
accaagtcggaacagcagataacaa

SEQ ID NO: 37739 - DNA, 25 bp, Probe Sequence
aaccaagtcggaacagcagataaca

SEQ ID NO: 37740 - DNA, 25 bp, Probe Sequence
aaaccaagtcggaacagcagataac

SEQ ID NO: 37741 - DNA, 25 bp, Probe Sequence
caaaccaagtcggaacagcagataa

SEQ ID NO: 37742 - DNA, 25 bp, Probe Sequence
acctgagacaccttaagaacaccat

SEQ ID NO: 37743 - DNA, 25 bp, Probe Sequence
aagatcagaagccagtcatggatga

SEQ ID NO: 37744 - DNA, 25 bp, Probe Sequence
tacaagacaaaccaagtcggaacag

SEQ ID NO: 37745 - DNA, 25 bp, Probe Sequence
aacctgagacaccttaagaacacca

SEQ ID NO: 37746 - DNA, 25 bp, Probe Sequence
caccaagtatggcaacatgacagag

SEQ ID NO: 37747 - DNA, 25 bp, Probe Sequence
cttcaactgtaatcacaacatcctg

SEQ ID NO: 37748 - DNA, 25 bp, Probe Sequence
ttcaactgtaatcacaacatcctga

SEQ ID NO: 37749 - DNA, 25 bp, Probe Sequence
caaggatgtgaagcagttctatgac

SEQ ID NO: 37750 - DNA, 25 bp, Probe Sequence
aactgtaatcacaacatcctgactc

SEQ ID NO: 37751 - DNA, 25 bp, Probe Sequence
caactgtaatcacaacatcctgact

SEQ ID NO: 37752 - DNA, 25 bp, Probe Sequence
tcaactgtaatcacaacatcctgac

SEQ ID NO: 37753 - DNA, 25 bp, Probe Sequence
ccttcaactgtaatcacaacatcct

SEQ ID NO: 37754 - DNA, 25 bp, Probe Sequence
caacatcatcagcaacctcttcaag

SEQ ID NO: 37755 - DNA, 25 bp, Probe Sequence
aaggatgtgaagcagttctatgacc

SEQ ID NO: 37756 - DNA, 25 bp, Probe Sequence
ccaaggatgtgaagcagttctatga

SEQ ID NO: 37757 - DNA, 25 bp, Probe Sequence
ccaacaccttctatgtaggcatcta

SEQ ID NO: 37758 - DNA, 25 bp, Probe Sequence
aagtacctgctcttcgtcttcaatt

SEQ ID NO: 37759 - DNA, 25 bp, Probe Sequence
actgtaatcacaacatcctgactcc

SEQ ID NO: 37760 - DNA, 25 bp, Probe Sequence
gccttcaactgtaatcacaacatcc

SEQ ID NO: 37761 - DNA, 25 bp, Probe Sequence
ctcttcgtcttcaatttcgtcttct

SEQ ID NO: 37762 - DNA, 25 bp, Probe Sequence
tttaataaagaaggaacatcaggca

SEQ ID NO: 37763 - DNA, 25 bp, Probe Sequence
ttaataaagaaggaacatcaggcat

SEQ ID NO: 37764 - DNA, 25 bp, Probe Sequence
tcttcgtcttcaatttcgtcttctg

SEQ ID NO: 37765 - DNA, 25 bp, Probe Sequence
gatgtgaagcagttctatgaccagg

SEQ ID NO: 37766 - DNA, 25 bp, Probe Sequence
ggatgtgaagcagttctatgaccag

SEQ ID NO: 37767 - DNA, 25 bp, Probe Sequence
caacaccttctatgtaggcatctac

SEQ ID NO: 37768 - DNA, 25 bp, Probe Sequence
cgccttcaactgtaatcacaacatc

SEQ ID NO: 37769 - DNA, 25 bp, Probe Sequence
caagtacctgctcttcgtcttcaat

SEQ ID NO: 37770 - DNA, 25 bp, Probe Sequence
tcgccttcaactgtaatcacaacat

SEQ ID NO: 37771 - DNA, 25 bp, Probe Sequence
gagttcaacgagaagaagacaacat

SEQ ID NO: 37772 - DNA, 25 bp, Probe Sequence
gtgagttcaacgagaagaagacaac

SEQ ID NO: 37773 - DNA, 25 bp, Probe Sequence
tacttcatcctgctcctcatcatct

SEQ ID NO: 37774 - DNA, 25 bp, Probe Sequence
agttcaacgagaagaagacaacatg

SEQ ID NO: 37775 - DNA, 25 bp, Probe Sequence
tgagttcaacgagaagaagacaaca

SEQ ID NO: 37776 - DNA, 25 bp, Probe Sequence
gtacttcatcctgctcctcatcatc

SEQ ID NO: 37777 - DNA, 25 bp, Probe Sequence
ggtgagttcaacgagaagaagacaa

SEQ ID NO: 37778 - DNA, 25 bp, Probe Sequence
acttcatcctgctcctcatcatctt

SEQ ID NO: 37779 - DNA, 25 bp, Probe Sequence
tgtacttcatcctgctcctcatcat

SEQ ID NO: 37780 - DNA, 25 bp, Probe Sequence
catacaggtgctcaataaacacttg

SEQ ID NO: 37781 - DNA, 25 bp, Probe Sequence
ttcatcctgctcctcatcatctttc

SEQ ID NO: 37782 - DNA, 25 bp, Probe Sequence
cttcatcctgctcctcatcatcttt

SEQ ID NO: 37783 - DNA, 25 bp, Probe Sequence
aagtacctgctgtttacctacaatt

SEQ ID NO: 37784 - DNA, 25 bp, Probe Sequence
atacaggtgctcaataaacacttgt

SEQ ID NO: 37785 - DNA, 25 bp, Probe Sequence
acatacaggtgctcaataaacactt

SEQ ID NO: 37786 - DNA, 25 bp, Probe Sequence
aggtgctcaataaacacttgtagag

SEQ ID NO: 37787 - DNA, 25 bp, Probe Sequence
caagtacctgctgtttacctacaat

SEQ ID NO: 37788 - DNA, 25 bp, Probe Sequence
caggtgctcaataaacacttgtaga

SEQ ID NO: 37789 - DNA, 25 bp, Probe Sequence
acaggtgctcaataaacacttgtag

SEQ ID NO: 37790 - DNA, 25 bp, Probe Sequence
cacatacaggtgctcaataaacact

SEQ ID NO: 37791 - DNA, 25 bp, Probe Sequence
ctgtacttcatcctgctcctcatca

SEQ ID NO: 37792 - DNA, 25 bp, Probe Sequence
tcaagtacctgctgtttacctacaa

SEQ ID NO: 37793 - DNA, 25 bp, Probe Sequence
catcctgctcctcatcatctttctg

SEQ ID NO: 37794 - DNA, 25 bp, Probe Sequence
cctcaagtacctgctgtttacctac

SEQ ID NO: 37795 - DNA, 25 bp, Probe Sequence
ctatcagtatggtgctaatgtgtct

SEQ ID NO: 37796 - DNA, 25 bp, Probe Sequence
cctatcagtatggtgctaatgtgtc

SEQ ID NO: 37797 - DNA, 25 bp, Probe Sequence
gcttctagttcaaccatcaatctaa

SEQ ID NO: 37798 - DNA, 25 bp, Probe Sequence
aatgtcacggctactctatatactt

SEQ ID NO: 37799 - DNA, 25 bp, Probe Sequence
gccaacatcatatacctcttgaaga

SEQ ID NO: 37800 - DNA, 25 bp, Probe Sequence
atcaatctaatggtgagcacagaac

SEQ ID NO: 37801 - DNA, 25 bp, Probe Sequence
catcaatctaatggtgagcacagaa

SEQ ID NO: 37802 - DNA, 25 bp, Probe Sequence
aatgatctagttcagaaggaagcaa

SEQ ID NO: 37803 - DNA, 25 bp, Probe Sequence
tatcagtatggtgctaatgtgtctg

SEQ ID NO: 37804 - DNA, 25 bp, Probe Sequence
agcttctagttcaaccatcaatcta

SEQ ID NO: 37805 - DNA, 25 bp, Probe Sequence
cagcttctagttcaaccatcaatct

SEQ ID NO: 37806 - DNA, 25 bp, Probe Sequence
tcagcttctagttcaaccatcaatc

SEQ ID NO: 37807 - DNA, 25 bp, Probe Sequence
ccaacatcatatacctcttgaagaa

SEQ ID NO: 37808 - DNA, 25 bp, Probe Sequence
atgacctatcagtatggtgctaatg

SEQ ID NO: 37809 - DNA, 25 bp, Probe Sequence
gtcagcttctagttcaaccatcaat

SEQ ID NO: 37810 - DNA, 25 bp, Probe Sequence
atcagtatggtgctaatgtgtctgt

SEQ ID NO: 37811 - DNA, 25 bp, Probe Sequence
gacctatcagtatggtgctaatgtg

SEQ ID NO: 37812 - DNA, 25 bp, Probe Sequence
tgacctatcagtatggtgctaatgt

SEQ ID NO: 37813 - DNA, 25 bp, Probe Sequence
tatgtgaacattcctatcaatccaa

SEQ ID NO: 37814 - DNA, 25 bp, Probe Sequence
ttatgtgaacattcctatcaatcca

SEQ ID NO: 37815 - DNA, 25 bp, Probe Sequence
acattcctatcaatccaaattccct

SEQ ID NO: 37816 - DNA, 25 bp, Probe Sequence
acctatcagtatggtgctaatgtgt

SEQ ID NO: 37817 - DNA, 25 bp, Probe Sequence
ttcctatcaatccaaattccctctg

SEQ ID NO: 37818 - DNA, 25 bp, Probe Sequence
cattcctatcaatccaaattccctc

SEQ ID NO: 37819 - DNA, 25 bp, Probe Sequence
gtctatatcctccttctaacagcac

SEQ ID NO: 37820 - DNA, 25 bp, Probe Sequence
tatatcctccttctaacagcacctt

SEQ ID NO: 37821 - DNA, 25 bp, Probe Sequence
ctatatcctccttctaacagcacct

SEQ ID NO: 37822 - DNA, 25 bp, Probe Sequence
tctatatcctccttctaacagcacc

SEQ ID NO: 37823 - DNA, 25 bp, Probe Sequence
acttgactacagttgtgctcataat

SEQ ID NO: 37824 - DNA, 25 bp, Probe Sequence
ttgactacagttgtgctcataattg

SEQ ID NO: 37825 - DNA, 25 bp, Probe Sequence
atatcctccttctaacagcaccttc

SEQ ID NO: 37826 - DNA, 25 bp, Probe Sequence
cattcaactgagatcataccacttc

SEQ ID NO: 37827 - DNA, 25 bp, Probe Sequence
cttgactacagttgtgctcataatt

SEQ ID NO: 37828 - DNA, 25 bp, Probe Sequence
ccagagaatgtgtctatatcctcct

SEQ ID NO: 37829 - DNA, 25 bp, Probe Sequence
gtgtctatatcctccttctaacagc

SEQ ID NO: 37830 - DNA, 25 bp, Probe Sequence
tgtctatatcctccttctaacagca

SEQ ID NO: 37831 - DNA, 25 bp, Probe Sequence
tacagttgtgctcataattgtcctt

SEQ ID NO: 37832 - DNA, 25 bp, Probe Sequence
cagagaatgtgtctatatcctcctt

SEQ ID NO: 37833 - DNA, 25 bp, Probe Sequence
gcattcaactgagatcataccactt

SEQ ID NO: 37834 - DNA, 25 bp, Probe Sequence
tgactacagttgtgctcataattgt

SEQ ID NO: 37835 - DNA, 25 bp, Probe Sequence
agagaatgtgtctatatcctccttc

SEQ ID NO: 37836 - DNA, 25 bp, Probe Sequence
ctacagttgtgctcataattgtcct

SEQ ID NO: 37837 - DNA, 25 bp, Probe Sequence
gactacagttgtgctcataattgtc

SEQ ID NO: 37838 - DNA, 25 bp, Probe Sequence
aactgagatcataccacttcattcc

SEQ ID NO: 37839 - DNA, 25 bp, Probe Sequence
tcaactgagatcataccacttcatt

SEQ ID NO: 37840 - DNA, 25 bp, Probe Sequence
ttcaactgagatcataccacttcat

SEQ ID NO: 37841 - DNA, 25 bp, Probe Sequence
attcaactgagatcataccacttca

SEQ ID NO: 37842 - DNA, 25 bp, Probe Sequence
caactgagatcataccacttcattc

SEQ ID NO: 37843 - DNA, 25 bp, Probe Sequence
gccttgtgagatggaatcgtaataa

SEQ ID NO: 37844 - DNA, 25 bp, Probe Sequence
cgccttgtgagatggaatcgtaata

SEQ ID NO: 37845 - DNA, 25 bp, Probe Sequence
ttgtgagatggaatcgtaataaacc

SEQ ID NO: 37846 - DNA, 25 bp, Probe Sequence
gctctacatcgtcactgagtacatg

SEQ ID NO: 37847 - DNA, 25 bp, Probe Sequence
ccttgtgagatggaatcgtaataaa

SEQ ID NO: 37848 - DNA, 25 bp, Probe Sequence
ctctacatcgtcactgagtacatgg

SEQ ID NO: 37849 - DNA, 25 bp, Probe Sequence
agataaggagaaagaaagtacccag

SEQ ID NO: 37850 - DNA, 25 bp, Probe Sequence
gataaggagaaagaaagtacccagc

SEQ ID NO: 37851 - DNA, 25 bp, Probe Sequence
aagaaattctccactaagtctgacg

SEQ ID NO: 37852 - DNA, 25 bp, Probe Sequence
aagataaggagaaagaaagtaccca

SEQ ID NO: 37853 - DNA, 25 bp, Probe Sequence
caagataaggagaaagaaagtaccc

SEQ ID NO: 37854 - DNA, 25 bp, Probe Sequence
gaagaaattctccactaagtctgac

SEQ ID NO: 37855 - DNA, 25 bp, Probe Sequence
cttgtgagatggaatcgtaataaac

SEQ ID NO: 37856 - DNA, 25 bp, Probe Sequence
ataaggagaaagaaagtacccagca

SEQ ID NO: 37857 - DNA, 25 bp, Probe Sequence
taaggagaaagaaagtacccagcaa

SEQ ID NO: 37858 - DNA, 25 bp, Probe Sequence
ctcctcaagttctcgctagatgtct

SEQ ID NO: 37859 - DNA, 25 bp, Probe Sequence
tctcctcaagttctcgctagatgtc

SEQ ID NO: 37860 - DNA, 25 bp, Probe Sequence
ctgtctcctcaagttctcgctagat

SEQ ID NO: 37861 - DNA, 25 bp, Probe Sequence
gaatccttctctgggaaatctactc

SEQ ID NO: 37862 - DNA, 25 bp, Probe Sequence
cttctctgggaaatctactcctttg

SEQ ID NO: 37863 - DNA, 25 bp, Probe Sequence
ggagaaagaaagtacccagcaaatg

SEQ ID NO: 37864 - DNA, 25 bp, Probe Sequence
tcaagataaggagaaagaaagtacc

SEQ ID NO: 37865 - DNA, 25 bp, Probe Sequence
tgtgagatggaatcgtaataaacca

SEQ ID NO: 37866 - DNA, 25 bp, Probe Sequence
gtgagatggaatcgtaataaaccac

SEQ ID NO: 37867 - DNA, 25 bp, Probe Sequence
aacatcacaatctatgacgaggaag

SEQ ID NO: 37868 - DNA, 25 bp, Probe Sequence
caacatcacaatctatgacgaggaa

SEQ ID NO: 37869 - DNA, 25 bp, Probe Sequence
cttagtgtccttcttaacagactca

SEQ ID NO: 37870 - DNA, 25 bp, Probe Sequence
ccttagtgtccttcttaacagactc

SEQ ID NO: 37871 - DNA, 25 bp, Probe Sequence
tgtagccaacatcacaatctatgac

SEQ ID NO: 37872 - DNA, 25 bp, Probe Sequence
ttagtgtccttcttaacagactcaa

SEQ ID NO: 37873 - DNA, 25 bp, Probe Sequence
ttcacttcaagtcatggatgtctaa

SEQ ID NO: 37874 - DNA, 25 bp, Probe Sequence
tcacttcaagtcatggatgtctaag

SEQ ID NO: 37875 - DNA, 25 bp, Probe Sequence
tagccaacatcacaatctatgacga

SEQ ID NO: 37876 - DNA, 25 bp, Probe Sequence
gtagccaacatcacaatctatgacg

SEQ ID NO: 37877 - DNA, 25 bp, Probe Sequence
catgtgccttagtgtccttcttaac

SEQ ID NO: 37878 - DNA, 25 bp, Probe Sequence
tctaagcaccgtaagacctacagta

SEQ ID NO: 37879 - DNA, 25 bp, Probe Sequence
cttcaagtcatggatgtctaagcac

SEQ ID NO: 37880 - DNA, 25 bp, Probe Sequence
atgtgccttagtgtccttcttaaca

SEQ ID NO: 37881 - DNA, 25 bp, Probe Sequence
ctaagcaccgtaagacctacagtac

SEQ ID NO: 37882 - DNA, 25 bp, Probe Sequence
gccttagtgtccttcttaacagact

SEQ ID NO: 37883 - DNA, 25 bp, Probe Sequence
ccaacatcacaatctatgacgagga

SEQ ID NO: 37884 - DNA, 25 bp, Probe Sequence
cacttcaagtcatggatgtctaagc

SEQ ID NO: 37885 - DNA, 25 bp, Probe Sequence
gtgccttagtgtccttcttaacaga

SEQ ID NO: 37886 - DNA, 25 bp, Probe Sequence
gaagggctactttccacatatagag

SEQ ID NO: 37887 - DNA, 25 bp, Probe Sequence
acttcaagtcatggatgtctaagca

SEQ ID NO: 37888 - DNA, 25 bp, Probe Sequence
agaagggctactttccacatataga

SEQ ID NO: 37889 - DNA, 25 bp, Probe Sequence
cagaagggctactttccacatatag

SEQ ID NO: 37890 - DNA, 25 bp, Probe Sequence
tgccttagtgtccttcttaacagac

SEQ ID NO: 37891 - DNA, 25 bp, Probe Sequence
atccttaatgcttctcagtcttcag

SEQ ID NO: 37892 - DNA, 25 bp, Probe Sequence
catccttaatgcttctcagtcttca

SEQ ID NO: 37893 - DNA, 25 bp, Probe Sequence
cagaaatccagaagcatccttaatg

SEQ ID NO: 37894 - DNA, 25 bp, Probe Sequence
gcagaaatccagaagcatccttaat

SEQ ID NO: 37895 - DNA, 25 bp, Probe Sequence
gtttggtttcccatctaatcaactt

SEQ ID NO: 37896 - DNA, 25 bp, Probe Sequence
tgtttggtttcccatctaatcaact

SEQ ID NO: 37897 - DNA, 25 bp, Probe Sequence
gtgtttggtttcccatctaatcaac

SEQ ID NO: 37898 - DNA, 25 bp, Probe Sequence
tccttaatgcttctcagtcttcagc

SEQ ID NO: 37899 - DNA, 25 bp, Probe Sequence
ggtgtttggtttcccatctaatcaa

SEQ ID NO: 37900 - DNA, 25 bp, Probe Sequence
gttggtataaactgagggtggcttt

SEQ ID NO: 37901 - DNA, 25 bp, Probe Sequence
ttggtttcccatctaatcaacttaa

SEQ ID NO: 37902 - DNA, 25 bp, Probe Sequence
tttggtttcccatctaatcaactta

SEQ ID NO: 37903 - DNA, 25 bp, Probe Sequence
ttaatgcttctcagtcttcagccag

SEQ ID NO: 37904 - DNA, 25 bp, Probe Sequence
cttaatgcttctcagtcttcagcca

SEQ ID NO: 37905 - DNA, 25 bp, Probe Sequence
tgtgagctttagatcattaaatcca

SEQ ID NO: 37906 - DNA, 25 bp, Probe Sequence
ggtttcccatctaatcaacttaagg

SEQ ID NO: 37907 - DNA, 25 bp, Probe Sequence
ccatctaatcaacttaagggaagcc

SEQ ID NO: 37908 - DNA, 25 bp, Probe Sequence
ctgtgagctttagatcattaaatcc

SEQ ID NO: 37909 - DNA, 25 bp, Probe Sequence
tataaactgagggtggcttttagag

SEQ ID NO: 37910 - DNA, 25 bp, Probe Sequence
gtataaactgagggtggcttttaga

SEQ ID NO: 37911 - DNA, 25 bp, Probe Sequence
catctaatcaacttaagggaagccg

SEQ ID NO: 37912 - DNA, 25 bp, Probe Sequence
gcatctgtgagctttagatcattaa

SEQ ID NO: 37913 - DNA, 25 bp, Probe Sequence
taatgcttctcagtcttcagccaga

SEQ ID NO: 37914 - DNA, 25 bp, Probe Sequence
ccttaatgcttctcagtcttcagcc

SEQ ID NO: 37915 - DNA, 25 bp, Probe Sequence
attcttcagattgtggatgtgtgtc

SEQ ID NO: 37916 - DNA, 25 bp, Probe Sequence
atggttatgatagcactcagcaata

SEQ ID NO: 37917 - DNA, 25 bp, Probe Sequence
aatggttatgatagcactcagcaat

SEQ ID NO: 37918 - DNA, 25 bp, Probe Sequence
tggttatgatagcactcagcaatac

SEQ ID NO: 37919 - DNA, 25 bp, Probe Sequence
cattcttcagattgtggatgtgtgt

SEQ ID NO: 37920 - DNA, 25 bp, Probe Sequence
actcagcaatacggaagtaatgttc

SEQ ID NO: 37921 - DNA, 25 bp, Probe Sequence
gaatggttatgatagcactcagcaa

SEQ ID NO: 37922 - DNA, 25 bp, Probe Sequence
cactcagcaatacggaagtaatgtt

SEQ ID NO: 37923 - DNA, 25 bp, Probe Sequence
cagaatggttatgatagcactcagc

SEQ ID NO: 37924 - DNA, 25 bp, Probe Sequence
gttatgatagcactcagcaatacgg

SEQ ID NO: 37925 - DNA, 25 bp, Probe Sequence
ggttatgatagcactcagcaatacg

SEQ ID NO: 37926 - DNA, 25 bp, Probe Sequence
tatgatagcactcagcaatacggaa

SEQ ID NO: 37927 - DNA, 25 bp, Probe Sequence
ttatgatagcactcagcaatacgga

SEQ ID NO: 37928 - DNA, 25 bp, Probe Sequence
tagcactcagcaatacggaagtaat

SEQ ID NO: 37929 - DNA, 25 bp, Probe Sequence
atagcactcagcaatacggaagtaa

SEQ ID NO: 37930 - DNA, 25 bp, Probe Sequence
agaatggttatgatagcactcagca

SEQ ID NO: 37931 - DNA, 25 bp, Probe Sequence
ttcttcagattgtggatgtgtgtca

SEQ ID NO: 37932 - DNA, 25 bp, Probe Sequence
tcttcagattgtggatgtgtgtcat

SEQ ID NO: 37933 - DNA, 25 bp, Probe Sequence
gatagcactcagcaatacggaagta

SEQ ID NO: 37934 - DNA, 25 bp, Probe Sequence
aacttattcgtctaatggaagagat

SEQ ID NO: 37935 - DNA, 25 bp, Probe Sequence
cttattcgtctaatggaagagatca

SEQ ID NO: 37936 - DNA, 25 bp, Probe Sequence
acttattcgtctaatggaagagatc

SEQ ID NO: 37937 - DNA, 25 bp, Probe Sequence
ccagaatggttatgatagcactcag

SEQ ID NO: 37938 - DNA, 25 bp, Probe Sequence
taataacataaagcaagtgagcgac

SEQ ID NO: 37939 - DNA, 25 bp, Probe Sequence
gtgatggtgaacttctacaacaatt

SEQ ID NO: 37940 - DNA, 25 bp, Probe Sequence
ggtgatggtgaacttctacaacaat

SEQ ID NO: 37941 - DNA, 25 bp, Probe Sequence
tggtgaacttctacaacaattacat

SEQ ID NO: 37942 - DNA, 25 bp, Probe Sequence
atggtgaacttctacaacaattaca

SEQ ID NO: 37943 - DNA, 25 bp, Probe Sequence
tgatggtgaacttctacaacaatta

SEQ ID NO: 37944 - DNA, 25 bp, Probe Sequence
gatggtgaacttctacaacaattac

SEQ ID NO: 37945 - DNA, 25 bp, Probe Sequence
tggtgatggtgaacttctacaacaa

SEQ ID NO: 37946 - DNA, 25 bp, Probe Sequence
ggtgaacttctacaacaattacatt

SEQ ID NO: 37947 - DNA, 25 bp, Probe Sequence
ctggtgatggtgaacttctacaaca

SEQ ID NO: 37948 - DNA, 25 bp, Probe Sequence
cttctacaacaattacatttcctgc

SEQ ID NO: 37949 - DNA, 25 bp, Probe Sequence
cctggtgatggtgaacttctacaac

SEQ ID NO: 37950 - DNA, 25 bp, Probe Sequence
acttctacaacaattacatttcctg

SEQ ID NO: 37951 - DNA, 25 bp, Probe Sequence
tctacaacaattacatttcctgcac

SEQ ID NO: 37952 - DNA, 25 bp, Probe Sequence
ctacaacaattacatttcctgcacc

SEQ ID NO: 37953 - DNA, 25 bp, Probe Sequence
ttctacaacaattacatttcctgca

SEQ ID NO: 37954 - DNA, 25 bp, Probe Sequence
tacaacaattacatttcctgcacca

SEQ ID NO: 37955 - DNA, 25 bp, Probe Sequence
caattacatttcctgcaccaacaag

SEQ ID NO: 37956 - DNA, 25 bp, Probe Sequence
caacaattacatttcctgcaccaac

SEQ ID NO: 37957 - DNA, 25 bp, Probe Sequence
aacttctacaacaattacatttcct

SEQ ID NO: 37958 - DNA, 25 bp, Probe Sequence
acagttcaggacacacacacagtag

SEQ ID NO: 37959 - DNA, 25 bp, Probe Sequence
gacagttcaggacacacacacagta

SEQ ID NO: 37960 - DNA, 25 bp, Probe Sequence
acaattacatttcctgcaccaacaa

SEQ ID NO: 37961 - DNA, 25 bp, Probe Sequence
aacaattacatttcctgcaccaaca

SEQ ID NO: 37962 - DNA, 25 bp, Probe Sequence
acaacaattacatttcctgcaccaa

SEQ ID NO: 37963 - DNA, 25 bp, Probe Sequence
aaatgggcacagtatgctccttaca

SEQ ID NO: 37964 - DNA, 25 bp, Probe Sequence
ggcacagtatgctccttacagaaaa

SEQ ID NO: 37965 - DNA, 25 bp, Probe Sequence
gggcacagtatgctccttacagaaa

SEQ ID NO: 37966 - DNA, 25 bp, Probe Sequence
aatgggcacagtatgctccttacag

SEQ ID NO: 37967 - DNA, 25 bp, Probe Sequence
cttcatagactccatcaagaatgct

SEQ ID NO: 37968 - DNA, 25 bp, Probe Sequence
ttcatagactccatcaagaatgctg

SEQ ID NO: 37969 - DNA, 25 bp, Probe Sequence
acttcatagactccatcaagaatgc

SEQ ID NO: 37970 - DNA, 25 bp, Probe Sequence
gacttcatagactccatcaagaatg

SEQ ID NO: 37971 - DNA, 25 bp, Probe Sequence
ttctaagcagttatggtgatgactt

SEQ ID NO: 37972 - DNA, 25 bp, Probe Sequence
tgacttcatagactccatcaagaat

SEQ ID NO: 37973 - DNA, 25 bp, Probe Sequence
taagcagttatggtgatgacttagc

SEQ ID NO: 37974 - DNA, 25 bp, Probe Sequence
tctaagcagttatggtgatgactta

SEQ ID NO: 37975 - DNA, 25 bp, Probe Sequence
ttgcttaccttatgaggactaatcg

SEQ ID NO: 37976 - DNA, 25 bp, Probe Sequence
ccttgcttaccttatgaggactaat

SEQ ID NO: 37977 - DNA, 25 bp, Probe Sequence
atctcttcatgcttgacatacctac

SEQ ID NO: 37978 - DNA, 25 bp, Probe Sequence
aatctcttcatgcttgacataccta

SEQ ID NO: 37979 - DNA, 25 bp, Probe Sequence
gaatctcttcatgcttgacatacct

SEQ ID NO: 37980 - DNA, 25 bp, Probe Sequence
agaatctcttcatgcttgacatacc

SEQ ID NO: 37981 - DNA, 25 bp, Probe Sequence
tgcttgacatacctaccagtattat

SEQ ID NO: 37982 - DNA, 25 bp, Probe Sequence
atgcttgacatacctaccagtatta

SEQ ID NO: 37983 - DNA, 25 bp, Probe Sequence
tgtagaatctcttcatgcttgacat

SEQ ID NO: 37984 - DNA, 25 bp, Probe Sequence
ttgtagaatctcttcatgcttgaca

SEQ ID NO: 37985 - DNA, 25 bp, Probe Sequence
gtcattgtctactcctagaagaacc

SEQ ID NO: 37986 - DNA, 25 bp, Probe Sequence
cattgtctactcctagaagaaccaa

SEQ ID NO: 37987 - DNA, 25 bp, Probe Sequence
tcattgtctactcctagaagaacca

SEQ ID NO: 37988 - DNA, 25 bp, Probe Sequence
cttgcttaccttatgaggactaatc

SEQ ID NO: 37989 - DNA, 25 bp, Probe Sequence
tgtcattgtctactcctagaagaac

SEQ ID NO: 37990 - DNA, 25 bp, Probe Sequence
ttcatgcttgacatacctaccagta

SEQ ID NO: 37991 - DNA, 25 bp, Probe Sequence
ggtcaactgcttcaacatcaattat

SEQ ID NO: 37992 - DNA, 25 bp, Probe Sequence
aggtcaactgcttcaacatcaatta

SEQ ID NO: 37993 - DNA, 25 bp, Probe Sequence
caactgcttcaacatcaattatctg

SEQ ID NO: 37994 - DNA, 25 bp, Probe Sequence
tcaactgcttcaacatcaattatct

SEQ ID NO: 37995 - DNA, 25 bp, Probe Sequence
gtcaactgcttcaacatcaattatc

SEQ ID NO: 37996 - DNA, 25 bp, Probe Sequence
ctgcttcaacatcaattatctgagg

SEQ ID NO: 37997 - DNA, 25 bp, Probe Sequence
tgcttcaacatcaattatctgagga

SEQ ID NO: 37998 - DNA, 25 bp, Probe Sequence
ttcaacatcaattatctgaggaacg

SEQ ID NO: 37999 - DNA, 25 bp, Probe Sequence
gcttcaacatcaattatctgaggaa

SEQ ID NO: 38000 - DNA, 25 bp, Probe Sequence
actgcttcaacatcaattatctgag

SEQ ID NO: 38001 - DNA, 25 bp, Probe Sequence
aactgcttcaacatcaattatctga

SEQ ID NO: 38002 - DNA, 25 bp, Probe Sequence
ttaaccttcatcaatgatctgtgtg

SEQ ID NO: 38003 - DNA, 25 bp, Probe Sequence
taaccttcatcaatgatctgtgtgg

SEQ ID NO: 38004 - DNA, 25 bp, Probe Sequence
cttcaacatcaattatctgaggaac

SEQ ID NO: 38005 - DNA, 25 bp, Probe Sequence
attaaccttcatcaatgatctgtgt

SEQ ID NO: 38006 - DNA, 25 bp, Probe Sequence
gacatcttgaccattgacatcagtc

SEQ ID NO: 38007 - DNA, 25 bp, Probe Sequence
ctcattacactaaacacctcttgga

SEQ ID NO: 38008 - DNA, 25 bp, Probe Sequence
acactcattacactaaacacctctt

SEQ ID NO: 38009 - DNA, 25 bp, Probe Sequence
aacactcattacactaaacacctct

SEQ ID NO: 38010 - DNA, 25 bp, Probe Sequence
ctcaccaagcataaacatattcctg

SEQ ID NO: 38011 - DNA, 25 bp, Probe Sequence
tctcaccaagcataaacatattcct

SEQ ID NO: 38012 - DNA, 25 bp, Probe Sequence
tcattacactaaacacctcttggat

SEQ ID NO: 38013 - DNA, 25 bp, Probe Sequence
actcattacactaaacacctcttgg

SEQ ID NO: 38014 - DNA, 25 bp, Probe Sequence
cactcattacactaaacacctcttg

SEQ ID NO: 38015 - DNA, 25 bp, Probe Sequence
gcactctaacttatgtgaactgaga

SEQ ID NO: 38016 - DNA, 25 bp, Probe Sequence
ttcatttgctcctttgtcatattgt

SEQ ID NO: 38017 - DNA, 25 bp, Probe Sequence
ttgctcctttgtcatattgtaatgc

SEQ ID NO: 38018 - DNA, 25 bp, Probe Sequence
attcttcaccaacatttcatttgct

SEQ ID NO: 38019 - DNA, 25 bp, Probe Sequence
tcatttgctcctttgtcatattgta

SEQ ID NO: 38020 - DNA, 25 bp, Probe Sequence
ctcctttgtcatattgtaatgccaa

SEQ ID NO: 38021 - DNA, 25 bp, Probe Sequence
tttcatttgctcctttgtcatattg

SEQ ID NO: 38022 - DNA, 25 bp, Probe Sequence
ttcttcaccaacatttcatttgctc

SEQ ID NO: 38023 - DNA, 25 bp, Probe Sequence
aattcttcaccaacatttcatttgc

SEQ ID NO: 38024 - DNA, 25 bp, Probe Sequence
catttcatttgctcctttgtcatat

SEQ ID NO: 38025 - DNA, 25 bp, Probe Sequence
gctcctttgtcatattgtaatgcca

SEQ ID NO: 38026 - DNA, 25 bp, Probe Sequence
tgctcctttgtcatattgtaatgcc

SEQ ID NO: 38027 - DNA, 25 bp, Probe Sequence
aacatttcatttgctcctttgtcat

SEQ ID NO: 38028 - DNA, 25 bp, Probe Sequence
catttgctcctttgtcatattgtaa

SEQ ID NO: 38029 - DNA, 25 bp, Probe Sequence
atgcactctaacttatgtgaactga

SEQ ID NO: 38030 - DNA, 25 bp, Probe Sequence
acatttcatttgctcctttgtcata

SEQ ID NO: 38031 - DNA, 25 bp, Probe Sequence
tgcactctaacttatgtgaactgag

SEQ ID NO: 38032 - DNA, 25 bp, Probe Sequence
aatgcactctaacttatgtgaactg

SEQ ID NO: 38033 - DNA, 25 bp, Probe Sequence
tttgctcctttgtcatattgtaatg

SEQ ID NO: 38034 - DNA, 25 bp, Probe Sequence
caacatttcatttgctcctttgtca

SEQ ID NO: 38035 - DNA, 25 bp, Probe Sequence
caccaacatttcatttgctcctttg

SEQ ID NO: 38036 - DNA, 25 bp, Probe Sequence
tcaccaacatttcatttgctccttt

SEQ ID NO: 38037 - DNA, 25 bp, Probe Sequence
ttcaccaacatttcatttgctcctt

SEQ ID NO: 38038 - DNA, 25 bp, Probe Sequence
atttcatttgctcctttgtcatatt

SEQ ID NO: 38039 - DNA, 25 bp, Probe Sequence
acattatagccacatcaacagaagt

SEQ ID NO: 38040 - DNA, 25 bp, Probe Sequence
accttcttgtgtatattacttggca

SEQ ID NO: 38041 - DNA, 25 bp, Probe Sequence
agactctactcctaactgacttcaa

SEQ ID NO: 38042 - DNA, 25 bp, Probe Sequence
tatagccacatcaacagaagtaact

SEQ ID NO: 38043 - DNA, 25 bp, Probe Sequence
gactctactcctaactgacttcaat

SEQ ID NO: 38044 - DNA, 25 bp, Probe Sequence
ttatagccacatcaacagaagtaac

SEQ ID NO: 38045 - DNA, 25 bp, Probe Sequence
agataagattgagttctgatgcgtt

SEQ ID NO: 38046 - DNA, 25 bp, Probe Sequence
ccttcttgtgtatattacttggcat

SEQ ID NO: 38047 - DNA, 25 bp, Probe Sequence
gagataagattgagttctgatgcgt

SEQ ID NO: 38048 - DNA, 25 bp, Probe Sequence
tgagataagattgagttctgatgcg

SEQ ID NO: 38049 - DNA, 25 bp, Probe Sequence
cattatagccacatcaacagaagta

SEQ ID NO: 38050 - DNA, 25 bp, Probe Sequence
tacattatagccacatcaacagaag

SEQ ID NO: 38051 - DNA, 25 bp, Probe Sequence
gataagattgagttctgatgcgtta

SEQ ID NO: 38052 - DNA, 25 bp, Probe Sequence
ttacattatagccacatcaacagaa

SEQ ID NO: 38053 - DNA, 25 bp, Probe Sequence
atgagataagattgagttctgatgc

SEQ ID NO: 38054 - DNA, 25 bp, Probe Sequence
ataagattgagttctgatgcgttaa

SEQ ID NO: 38055 - DNA, 25 bp, Probe Sequence
actctactcctaactgacttcaata

SEQ ID NO: 38056 - DNA, 25 bp, Probe Sequence
attatagccacatcaacagaagtaa

SEQ ID NO: 38057 - DNA, 25 bp, Probe Sequence
tggcatgagatgatattgtacttgt

SEQ ID NO: 38058 - DNA, 25 bp, Probe Sequence
acttggcatgagatgatattgtact

SEQ ID NO: 38059 - DNA, 25 bp, Probe Sequence
ttgtgatgataatgaggtactgaac

SEQ ID NO: 38060 - DNA, 25 bp, Probe Sequence
ctaagcagactctactcctaactga

SEQ ID NO: 38061 - DNA, 25 bp, Probe Sequence
cagactctactcctaactgacttca

SEQ ID NO: 38062 - DNA, 25 bp, Probe Sequence
ttggcatgagatgatattgtacttg

SEQ ID NO: 38063 - DNA, 25 bp, Probe Sequence
cacacaggacaattattcttatgcc

SEQ ID NO: 38064 - DNA, 25 bp, Probe Sequence
caggaggagactatacaactacaat

SEQ ID NO: 38065 - DNA, 25 bp, Probe Sequence
tcacacaggacaattattcttatgc

SEQ ID NO: 38066 - DNA, 25 bp, Probe Sequence
ggtatatgaagaactcctggcaatt

SEQ ID NO: 38067 - DNA, 25 bp, Probe Sequence
tatatgaagaactcctggcaattcc

SEQ ID NO: 38068 - DNA, 25 bp, Probe Sequence
tggtgattattccttgtggcattac

SEQ ID NO: 38069 - DNA, 25 bp, Probe Sequence
gtggtgattattccttgtggcatta

SEQ ID NO: 38070 - DNA, 25 bp, Probe Sequence
gtatatgaagaactcctggcaattc

SEQ ID NO: 38071 - DNA, 25 bp, Probe Sequence
gcaggaggagactatacaactacaa

SEQ ID NO: 38072 - DNA, 25 bp, Probe Sequence
tatgctcaggtatatgaagaactcc

SEQ ID NO: 38073 - DNA, 25 bp, Probe Sequence
agatacttgacttatatgctcaggt

SEQ ID NO: 38074 - DNA, 25 bp, Probe Sequence
tgaagtcacacaggacaattattct

SEQ ID NO: 38075 - DNA, 25 bp, Probe Sequence
cagatacttgacttatatgctcagg

SEQ ID NO: 38076 - DNA, 25 bp, Probe Sequence
atatgaagaactcctggcaattcct

SEQ ID NO: 38077 - DNA, 25 bp, Probe Sequence
gaagtcacacaggacaattattctt

SEQ ID NO: 38078 - DNA, 25 bp, Probe Sequence
atgaagtcacacaggacaattattc

SEQ ID NO: 38079 - DNA, 25 bp, Probe Sequence
acacaggacaattattcttatgcct

SEQ ID NO: 38080 - DNA, 25 bp, Probe Sequence
aggaggagactatacaactacaata

SEQ ID NO: 38081 - DNA, 25 bp, Probe Sequence
aatgaagtcacacaggacaattatt

SEQ ID NO: 38082 - DNA, 25 bp, Probe Sequence
atgctcaggtatatgaagaactcct

SEQ ID NO: 38083 - DNA, 25 bp, Probe Sequence
aggtatatgaagaactcctggcaat

SEQ ID NO: 38084 - DNA, 25 bp, Probe Sequence
cacaggacaattattcttatgccta

SEQ ID NO: 38085 - DNA, 25 bp, Probe Sequence
gattattccttgtggcattaccaat

SEQ ID NO: 38086 - DNA, 25 bp, Probe Sequence
atatgctcaggtatatgaagaactc

SEQ ID NO: 38087 - DNA, 25 bp, Probe Sequence
ttatgctgactacgaatctgtgaat

SEQ ID NO: 38088 - DNA, 25 bp, Probe Sequence
ctgactacgaatctgtgaatgaatg

SEQ ID NO: 38089 - DNA, 25 bp, Probe Sequence
cttatgctgactacgaatctgtgaa

SEQ ID NO: 38090 - DNA, 25 bp, Probe Sequence
gaacttatgctgactacgaatctgt

SEQ ID NO: 38091 - DNA, 25 bp, Probe Sequence
agccaagattgactgtattagatga

SEQ ID NO: 38092 - DNA, 25 bp, Probe Sequence
tatgctgactacgaatctgtgaatg

SEQ ID NO: 38093 - DNA, 25 bp, Probe Sequence
gttcttcgtcacttaatgttggttc

SEQ ID NO: 38094 - DNA, 25 bp, Probe Sequence
aacttatgctgactacgaatctgtg

SEQ ID NO: 38095 - DNA, 25 bp, Probe Sequence
gttgttcttcgtcacttaatgttgg

SEQ ID NO: 38096 - DNA, 25 bp, Probe Sequence
gctgactacgaatctgtgaatgaat

SEQ ID NO: 38097 - DNA, 25 bp, Probe Sequence
agaacttatgctgactacgaatctg

SEQ ID NO: 38098 - DNA, 25 bp, Probe Sequence
tgttcttcgtcacttaatgttggtt

SEQ ID NO: 38099 - DNA, 25 bp, Probe Sequence
ttgttcttcgtcacttaatgttggt

SEQ ID NO: 38100 - DNA, 25 bp, Probe Sequence
gccaagattgactgtattagatgaa

SEQ ID NO: 38101 - DNA, 25 bp, Probe Sequence
tgactacgaatctgtgaatgaatgc

SEQ ID NO: 38102 - DNA, 25 bp, Probe Sequence
agttgttcttcgtcacttaatgttg

SEQ ID NO: 38103 - DNA, 25 bp, Probe Sequence
ttcttcgtcacttaatgttggttcc

SEQ ID NO: 38104 - DNA, 25 bp, Probe Sequence
acttatgctgactacgaatctgtga

SEQ ID NO: 38105 - DNA, 25 bp, Probe Sequence
gtccttcaactgttcatatctactt

SEQ ID NO: 38106 - DNA, 25 bp, Probe Sequence
agtccttcaactgttcatatctact

SEQ ID NO: 38107 - DNA, 25 bp, Probe Sequence
tagccaagattgactgtattagatg

SEQ ID NO: 38108 - DNA, 25 bp, Probe Sequence
actctagccaagattgactgtatta

SEQ ID NO: 38109 - DNA, 25 bp, Probe Sequence
tactctagccaagattgactgtatt

SEQ ID NO: 38110 - DNA, 25 bp, Probe Sequence
ttatactctagccaagattgactgt

SEQ ID NO: 38111 - DNA, 25 bp, Probe Sequence
catctacagaattagcattggaagc

SEQ ID NO: 38112 - DNA, 25 bp, Probe Sequence
atgaagttgaagaccagattacagc

SEQ ID NO: 38113 - DNA, 25 bp, Probe Sequence
aatgtagactatcttctcatccacg

SEQ ID NO: 38114 - DNA, 25 bp, Probe Sequence
acatctacagaattagcattggaag

SEQ ID NO: 38115 - DNA, 25 bp, Probe Sequence
tatcctccaagcaagaagtgtgtta

SEQ ID NO: 38116 - DNA, 25 bp, Probe Sequence
atattcagagtaacacaggattcac

SEQ ID NO: 38117 - DNA, 25 bp, Probe Sequence
atgtagactatcttctcatccacgg

SEQ ID NO: 38118 - DNA, 25 bp, Probe Sequence
tatgaagttgaagaccagattacag

SEQ ID NO: 38119 - DNA, 25 bp, Probe Sequence
tattcagagtaacacaggattcact

SEQ ID NO: 38120 - DNA, 25 bp, Probe Sequence
aacatctacagaattagcattggaa

SEQ ID NO: 38121 - DNA, 25 bp, Probe Sequence
tagactatcttctcatccacggaac

SEQ ID NO: 38122 - DNA, 25 bp, Probe Sequence
gtagactatcttctcatccacggaa

SEQ ID NO: 38123 - DNA, 25 bp, Probe Sequence
ttgctaattcaagtgtatggtggtc

SEQ ID NO: 38124 - DNA, 25 bp, Probe Sequence
ttatgaagttgaagaccagattaca

SEQ ID NO: 38125 - DNA, 25 bp, Probe Sequence
attcagagtaacacaggattcactg

SEQ ID NO: 38126 - DNA, 25 bp, Probe Sequence
agtgtgttacttgccatctaaggaa

SEQ ID NO: 38127 - DNA, 25 bp, Probe Sequence
tgtagactatcttctcatccacgga

SEQ ID NO: 38128 - DNA, 25 bp, Probe Sequence
ctatcctccaagcaagaagtgtgtt

SEQ ID NO: 38129 - DNA, 25 bp, Probe Sequence
agtgtaaggtctgtatttgctgtta

SEQ ID NO: 38130 - DNA, 25 bp, Probe Sequence
agaataccctggaagaagaaacatc

SEQ ID NO: 38131 - DNA, 25 bp, Probe Sequence
aagaataccctggaagaagaaacat

SEQ ID NO: 38132 - DNA, 25 bp, Probe Sequence
ttgaagaataccctggaagaagaaa

SEQ ID NO: 38133 - DNA, 25 bp, Probe Sequence
tttgaagaataccctggaagaagaa

SEQ ID NO: 38134 - DNA, 25 bp, Probe Sequence
gaagaataccctggaagaagaaaca

SEQ ID NO: 38135 - DNA, 25 bp, Probe Sequence
cctatgagtgagaatatgtggtgtt

SEQ ID NO: 38136 - DNA, 25 bp, Probe Sequence
gtcatccagcattaggtatatctcc

SEQ ID NO: 38137 - DNA, 25 bp, Probe Sequence
tgtcatccagcattaggtatatctc

SEQ ID NO: 38138 - DNA, 25 bp, Probe Sequence
gtgtccatgtgttcttattgttcaa

SEQ ID NO: 38139 - DNA, 25 bp, Probe Sequence
gtgtgtccatgtgttcttattgttc

SEQ ID NO: 38140 - DNA, 25 bp, Probe Sequence
tgtccatgtgttcttattgttcaat

SEQ ID NO: 38141 - DNA, 25 bp, Probe Sequence
tgtgtccatgtgttcttattgttca

SEQ ID NO: 38142 - DNA, 25 bp, Probe Sequence
ctgtcatccagcattaggtatatct

SEQ ID NO: 38143 - DNA, 25 bp, Probe Sequence
ccatgtgttcttattgttcaattcc

SEQ ID NO: 38144 - DNA, 25 bp, Probe Sequence
tcatccagcattaggtatatctcct

SEQ ID NO: 38145 - DNA, 25 bp, Probe Sequence
cctgtcatccagcattaggtatatc

SEQ ID NO: 38146 - DNA, 25 bp, Probe Sequence
gctgaattatattggtccagaagtt

SEQ ID NO: 38147 - DNA, 25 bp, Probe Sequence
cttcgtgtgtccatgtgttcttatt

SEQ ID NO: 38148 - DNA, 25 bp, Probe Sequence
gtccatgtgttcttattgttcaatt

SEQ ID NO: 38149 - DNA, 25 bp, Probe Sequence
ttcgtgtgtccatgtgttcttattg

SEQ ID NO: 38150 - DNA, 25 bp, Probe Sequence
tccatgtgttcttattgttcaattc

SEQ ID NO: 38151 - DNA, 25 bp, Probe Sequence
cgtgtgtccatgtgttcttattgtt

SEQ ID NO: 38152 - DNA, 25 bp, Probe Sequence
acctatgagtgagaatatgtggtgt

SEQ ID NO: 38153 - DNA, 25 bp, Probe Sequence
ccatagaagggagggaataaatcat

SEQ ID NO: 38154 - DNA, 25 bp, Probe Sequence
ccatcttactctgccctatttgaaa

SEQ ID NO: 38155 - DNA, 25 bp, Probe Sequence
agtgagaatatgtggtgtttggttt

SEQ ID NO: 38156 - DNA, 25 bp, Probe Sequence
atgagtgagaatatgtggtgtttgg

SEQ ID NO: 38157 - DNA, 25 bp, Probe Sequence
catcttactctgccctatttgaaag

SEQ ID NO: 38158 - DNA, 25 bp, Probe Sequence
gtattagcagagacaaagagttacc

SEQ ID NO: 38159 - DNA, 25 bp, Probe Sequence
aagttagttgtcttctctgtgctgg

SEQ ID NO: 38160 - DNA, 25 bp, Probe Sequence
agatgatggtatctgtgagtatgtt

SEQ ID NO: 38161 - DNA, 25 bp, Probe Sequence
gatgatggtatctgtgagtatgttt

SEQ ID NO: 38162 - DNA, 25 bp, Probe Sequence
gttagttgtcttctctgtgctggtc

SEQ ID NO: 38163 - DNA, 25 bp, Probe Sequence
agttagttgtcttctctgtgctggt

SEQ ID NO: 38164 - DNA, 25 bp, Probe Sequence
cttctctgtgctggtcctttcttat

SEQ ID NO: 38165 - DNA, 25 bp, Probe Sequence
ttctctgtgctggtcctttcttatg

SEQ ID NO: 38166 - DNA, 25 bp, Probe Sequence
gctggtcctttcttatgtcctcata

SEQ ID NO: 38167 - DNA, 25 bp, Probe Sequence
gaagttagttgtcttctctgtgctg

SEQ ID NO: 38168 - DNA, 25 bp, Probe Sequence
gagctatgtttacattgacacagtg

SEQ ID NO: 38169 - DNA, 25 bp, Probe Sequence
tgagctatgtttacattgacacagt

SEQ ID NO: 38170 - DNA, 25 bp, Probe Sequence
ttagttgtcttctctgtgctggtcc

SEQ ID NO: 38171 - DNA, 25 bp, Probe Sequence
agctatgtttacattgacacagtgt

SEQ ID NO: 38172 - DNA, 25 bp, Probe Sequence
ctatgtttacattgacacagtgtgc

SEQ ID NO: 38173 - DNA, 25 bp, Probe Sequence
gctatgtttacattgacacagtgtg

SEQ ID NO: 38174 - DNA, 25 bp, Probe Sequence
ctctgtgctggtcctttcttatgtc

SEQ ID NO: 38175 - DNA, 25 bp, Probe Sequence
tcttctctgtgctggtcctttctta

SEQ ID NO: 38176 - DNA, 25 bp, Probe Sequence
gtgagctatgtttacattgacacag

SEQ ID NO: 38177 - DNA, 25 bp, Probe Sequence
ctttgcggtgagctatgtttacatt

SEQ ID NO: 38178 - DNA, 25 bp, Probe Sequence
gatggtatctgtgagtatgttttgc

SEQ ID NO: 38179 - DNA, 25 bp, Probe Sequence
ggtgagctatgtttacattgacaca

SEQ ID NO: 38180 - DNA, 25 bp, Probe Sequence
tctctgtgctggtcctttcttatgt

SEQ ID NO: 38181 - DNA, 25 bp, Probe Sequence
tttgcggtgagctatgtttacattg

SEQ ID NO: 38182 - DNA, 25 bp, Probe Sequence
tatgtttacattgacacagtgtgcc

SEQ ID NO: 38183 - DNA, 25 bp, Probe Sequence
gtggataagatgatggaacagaaga

SEQ ID NO: 38184 - DNA, 25 bp, Probe Sequence
aggaagaagaggtggataagatgat

SEQ ID NO: 38185 - DNA, 25 bp, Probe Sequence
gatggaacagaagatgaaggaagaa

SEQ ID NO: 38186 - DNA, 25 bp, Probe Sequence
atgatggaacagaagatgaaggaag

SEQ ID NO: 38187 - DNA, 25 bp, Probe Sequence
aagatgatggaacagaagatgaagg

SEQ ID NO: 38188 - DNA, 25 bp, Probe Sequence
gaagaagaggtggataagatgatgg

SEQ ID NO: 38189 - DNA, 25 bp, Probe Sequence
ggaagaagaggtggataagatgatg

SEQ ID NO: 38190 - DNA, 25 bp, Probe Sequence
gatgatggaacagaagatgaaggaa

SEQ ID NO: 38191 - DNA, 25 bp, Probe Sequence
atggaacagaagatgaaggaagaac

SEQ ID NO: 38192 - DNA, 25 bp, Probe Sequence
gaagaggtggataagatgatggaac

SEQ ID NO: 38193 - DNA, 25 bp, Probe Sequence
agaagaggtggataagatgatggaa

SEQ ID NO: 38194 - DNA, 25 bp, Probe Sequence
aagaagaggtggataagatgatgga

SEQ ID NO: 38195 - DNA, 25 bp, Probe Sequence
tggataagatgatggaacagaagat

SEQ ID NO: 38196 - DNA, 25 bp, Probe Sequence
ggtggataagatgatggaacagaag

SEQ ID NO: 38197 - DNA, 25 bp, Probe Sequence
ggataagatgatggaacagaagatg

SEQ ID NO: 38198 - DNA, 25 bp, Probe Sequence
gaggaagaagaggtggataagatga

SEQ ID NO: 38199 - DNA, 25 bp, Probe Sequence
aagatgaaggaagaacaggagagaa

SEQ ID NO: 38200 - DNA, 25 bp, Probe Sequence
agatgatggaacagaagatgaagga

SEQ ID NO: 38201 - DNA, 25 bp, Probe Sequence
aggtggataagatgatggaacagaa

SEQ ID NO: 38202 - DNA, 25 bp, Probe Sequence
aagaggtggataagatgatggaaca

SEQ ID NO: 38203 - DNA, 25 bp, Probe Sequence
aaggagatggaagagagaatgtcat

SEQ ID NO: 38204 - DNA, 25 bp, Probe Sequence
gaacagaagatgaaggaagaacagg

SEQ ID NO: 38205 - DNA, 25 bp, Probe Sequence
ggaacagaagatgaaggaagaacag

SEQ ID NO: 38206 - DNA, 25 bp, Probe Sequence
ggaagagagaatgtcattagaggag

SEQ ID NO: 38207 - DNA, 25 bp, Probe Sequence
agcgagttcttgatgtgaatctcat

SEQ ID NO: 38208 - DNA, 25 bp, Probe Sequence
cgagttcttgatgtgaatctcatgg

SEQ ID NO: 38209 - DNA, 25 bp, Probe Sequence
gcgagttcttgatgtgaatctcatg

SEQ ID NO: 38210 - DNA, 25 bp, Probe Sequence
ccctctgtgcctaataaagtctctt

SEQ ID NO: 38211 - DNA, 25 bp, Probe Sequence
ttccagcgagttcttgatgtgaatc

SEQ ID NO: 38212 - DNA, 25 bp, Probe Sequence
cttccagcgagttcttgatgtgaat

SEQ ID NO: 38213 - DNA, 25 bp, Probe Sequence
cagcgagttcttgatgtgaatctca

SEQ ID NO: 38214 - DNA, 25 bp, Probe Sequence
ccaagccaagaagttaggaaacaac

SEQ ID NO: 38215 - DNA, 25 bp, Probe Sequence
gagttcttgatgtgaatctcatggg

SEQ ID NO: 38216 - DNA, 25 bp, Probe Sequence
ccagcgagttcttgatgtgaatctc

SEQ ID NO: 38217 - DNA, 25 bp, Probe Sequence
cctctgtgcctaataaagtctcttt

SEQ ID NO: 38218 - DNA, 25 bp, Probe Sequence
tccagcgagttcttgatgtgaatct

SEQ ID NO: 38219 - DNA, 25 bp, Probe Sequence
tagcaagacgtacaacttaaagaag

SEQ ID NO: 38220 - DNA, 25 bp, Probe Sequence
ctagcaagacgtacaacttaaagaa

SEQ ID NO: 38221 - DNA, 25 bp, Probe Sequence
agcaagacgtacaacttaaagaagg

SEQ ID NO: 38222 - DNA, 25 bp, Probe Sequence
cccaagccaagaagttaggaaacaa

SEQ ID NO: 38223 - DNA, 25 bp, Probe Sequence
caagacgtacaacttaaagaagggc

SEQ ID NO: 38224 - DNA, 25 bp, Probe Sequence
gcaagacgtacaacttaaagaaggg

SEQ ID NO: 38225 - DNA, 25 bp, Probe Sequence
acttccagcgagttcttgatgtgaa

SEQ ID NO: 38226 - DNA, 25 bp, Probe Sequence
agttcttgatgtgaatctcatgggc

SEQ ID NO: 38227 - DNA, 25 bp, Probe Sequence
gccctctgtgcctaataaagtctct

SEQ ID NO: 38228 - DNA, 25 bp, Probe Sequence
aagaagttaggaaacaactgcgttt

SEQ ID NO: 38229 - DNA, 25 bp, Probe Sequence
aagccaagaagttaggaaacaactg

SEQ ID NO: 38230 - DNA, 25 bp, Probe Sequence
caagccaagaagttaggaaacaact

SEQ ID NO: 38231 - DNA, 25 bp, Probe Sequence
ctactggtctctctatgcctctcta

SEQ ID NO: 38232 - DNA, 25 bp, Probe Sequence
tctctctatgcctctctacagtctc

SEQ ID NO: 38233 - DNA, 25 bp, Probe Sequence
tactggtctctctatgcctctctac

SEQ ID NO: 38234 - DNA, 25 bp, Probe Sequence
gtctctctatgcctctctacagtct

SEQ ID NO: 38235 - DNA, 25 bp, Probe Sequence
ggagttgtagttaatcatcaagaga

SEQ ID NO: 38236 - DNA, 25 bp, Probe Sequence
ttagctctgagaaccgtagatgatt

SEQ ID NO: 38237 - DNA, 25 bp, Probe Sequence
ggtctctctatgcctctctacagtc

SEQ ID NO: 38238 - DNA, 25 bp, Probe Sequence
ctctctatgcctctctacagtctcg

SEQ ID NO: 38239 - DNA, 25 bp, Probe Sequence
gctcctttccataaatccttgatga

SEQ ID NO: 38240 - DNA, 25 bp, Probe Sequence
tgggagttgtagttaatcatcaaga

SEQ ID NO: 38241 - DNA, 25 bp, Probe Sequence
ctatgcctctctacagtctcgtctc

SEQ ID NO: 38242 - DNA, 25 bp, Probe Sequence
ctctatgcctctctacagtctcgtc

SEQ ID NO: 38243 - DNA, 25 bp, Probe Sequence
cttcctactggtctctctatgcctc

SEQ ID NO: 38244 - DNA, 25 bp, Probe Sequence
ctcttcctactggtctctctatgcc

SEQ ID NO: 38245 - DNA, 25 bp, Probe Sequence
cctcttcctactggtctctctatgc

SEQ ID NO: 38246 - DNA, 25 bp, Probe Sequence
gttccttccagtgtcatttctcatc

SEQ ID NO: 38247 - DNA, 25 bp, Probe Sequence
ctcctttccataaatccttgatgat

SEQ ID NO: 38248 - DNA, 25 bp, Probe Sequence
gggagttgtagttaatcatcaagag

SEQ ID NO: 38249 - DNA, 25 bp, Probe Sequence
ttgggagttgtagttaatcatcaag

SEQ ID NO: 38250 - DNA, 25 bp, Probe Sequence
tttgatgttccttccagtgtcattt

SEQ ID NO: 38251 - DNA, 25 bp, Probe Sequence
tgagaggacagagagaaataagtgc

SEQ ID NO: 38252 - DNA, 25 bp, Probe Sequence
gatgttccttccagtgtcatttctc

SEQ ID NO: 38253 - DNA, 25 bp, Probe Sequence
ggctcctttccataaatccttgatg

SEQ ID NO: 38254 - DNA, 25 bp, Probe Sequence
ctgagaggacagagagaaataagtg

SEQ ID NO: 38255 - DNA, 25 bp, Probe Sequence
aacaagcagtagagatgaagaatga

SEQ ID NO: 38256 - DNA, 25 bp, Probe Sequence
acaagcagtagagatgaagaatgat

SEQ ID NO: 38257 - DNA, 25 bp, Probe Sequence
agatgagactaatgtgaagatggag

SEQ ID NO: 38258 - DNA, 25 bp, Probe Sequence
ggacctactggatgatgatgataat

SEQ ID NO: 38259 - DNA, 25 bp, Probe Sequence
aagatgagactaatgtgaagatgga

SEQ ID NO: 38260 - DNA, 25 bp, Probe Sequence
acctactggatgatgatgataatga

SEQ ID NO: 38261 - DNA, 25 bp, Probe Sequence
gacctactggatgatgatgataatg

SEQ ID NO: 38262 - DNA, 25 bp, Probe Sequence
gatgagactaatgtgaagatggagt

SEQ ID NO: 38263 - DNA, 25 bp, Probe Sequence
aagaatgataagtcagaagaggagc

SEQ ID NO: 38264 - DNA, 25 bp, Probe Sequence
gaatgataagtcagaagaggagcag

SEQ ID NO: 38265 - DNA, 25 bp, Probe Sequence
ccttcgttcagtatgttaatgagag

SEQ ID NO: 38266 - DNA, 25 bp, Probe Sequence
atacataagttcagtagttgcttcc

SEQ ID NO: 38267 - DNA, 25 bp, Probe Sequence
ttgccttcgttcagtatgttaatga

SEQ ID NO: 38268 - DNA, 25 bp, Probe Sequence
gccttcgttcagtatgttaatgaga

SEQ ID NO: 38269 - DNA, 25 bp, Probe Sequence
aatgataagtcagaagaggagcaga

SEQ ID NO: 38270 - DNA, 25 bp, Probe Sequence
agaatgataagtcagaagaggagca

SEQ ID NO: 38271 - DNA, 25 bp, Probe Sequence
gcagtagagatgaagaatgataagt

SEQ ID NO: 38272 - DNA, 25 bp, Probe Sequence
caagcagtagagatgaagaatgata

SEQ ID NO: 38273 - DNA, 25 bp, Probe Sequence
ggatgatgatgataatgaagatcgg

SEQ ID NO: 38274 - DNA, 25 bp, Probe Sequence
tgaagaatgataagtcagaagagga

SEQ ID NO: 38275 - DNA, 25 bp, Probe Sequence
tgccttcgttcagtatgttaatgag

SEQ ID NO: 38276 - DNA, 25 bp, Probe Sequence
cctactggatgatgatgataatgaa

SEQ ID NO: 38277 - DNA, 25 bp, Probe Sequence
agcagtagagatgaagaatgataag

SEQ ID NO: 38278 - DNA, 25 bp, Probe Sequence
ttcatacataagttcagtagttgct

SEQ ID NO: 38279 - DNA, 25 bp, Probe Sequence
tcacattacatctctccacctcttg

SEQ ID NO: 38280 - DNA, 25 bp, Probe Sequence
gtcacattacatctctccacctctt

SEQ ID NO: 38281 - DNA, 25 bp, Probe Sequence
aaggtgctgtcatatatcttggaat

SEQ ID NO: 38282 - DNA, 25 bp, Probe Sequence
aggtgctgtcatatatcttggaatg

SEQ ID NO: 38283 - DNA, 25 bp, Probe Sequence
taaggtgctgtcatatatcttggaa

SEQ ID NO: 38284 - DNA, 25 bp, Probe Sequence
ttaaggtgctgtcatatatcttgga

SEQ ID NO: 38285 - DNA, 25 bp, Probe Sequence
gtaacaccttctaacctgtgaattg

SEQ ID NO: 38286 - DNA, 25 bp, Probe Sequence
agtaacaccttctaacctgtgaatt

SEQ ID NO: 38287 - DNA, 25 bp, Probe Sequence
cagtaacaccttctaacctgtgaat

SEQ ID NO: 38288 - DNA, 25 bp, Probe Sequence
taacaccttctaacctgtgaattgg

SEQ ID NO: 38289 - DNA, 25 bp, Probe Sequence
tcaaccaatcctttcttatagcctt

SEQ ID NO: 38290 - DNA, 25 bp, Probe Sequence
atcaaccaatcctttcttatagcct

SEQ ID NO: 38291 - DNA, 25 bp, Probe Sequence
catcaaccaatcctttcttatagcc

SEQ ID NO: 38292 - DNA, 25 bp, Probe Sequence
gctgctggagtatctagtaatcctt

SEQ ID NO: 38293 - DNA, 25 bp, Probe Sequence
ttgttatgtgagaaatgttactggg

SEQ ID NO: 38294 - DNA, 25 bp, Probe Sequence
agttattgcagataccacattcatt

SEQ ID NO: 38295 - DNA, 25 bp, Probe Sequence
aagttattgcagataccacattcat

SEQ ID NO: 38296 - DNA, 25 bp, Probe Sequence
tcatcaaccaatcctttcttatagc

SEQ ID NO: 38297 - DNA, 25 bp, Probe Sequence
gctcatcaaccaatcctttcttata

SEQ ID NO: 38298 - DNA, 25 bp, Probe Sequence
catcttctacaaacccatttcagac

SEQ ID NO: 38299 - DNA, 25 bp, Probe Sequence
ccagtaacaccttctaacctgtgaa

SEQ ID NO: 38300 - DNA, 25 bp, Probe Sequence
ttctacaaacccatttcagaccaat

SEQ ID NO: 38301 - DNA, 25 bp, Probe Sequence
tcaagtgcatcttcagacaagtatg

SEQ ID NO: 38302 - DNA, 25 bp, Probe Sequence
atcttctacaaacccatttcagacc

SEQ ID NO: 38303 - DNA, 25 bp, Probe Sequence
gtgtgatttgtgttatactggttgt

SEQ ID NO: 38304 - DNA, 25 bp, Probe Sequence
tgtgtgatttgtgttatactggttg

SEQ ID NO: 38305 - DNA, 25 bp, Probe Sequence
gttgtgtgatttgtgttatactggt

SEQ ID NO: 38306 - DNA, 25 bp, Probe Sequence
tgttgtgtgatttgtgttatactgg

SEQ ID NO: 38307 - DNA, 25 bp, Probe Sequence
taaatactgtggttgcctctatgtg

SEQ ID NO: 38308 - DNA, 25 bp, Probe Sequence
ttaaatactgtggttgcctctatgt

SEQ ID NO: 38309 - DNA, 25 bp, Probe Sequence
ttgtgtgatttgtgttatactggtt

SEQ ID NO: 38310 - DNA, 25 bp, Probe Sequence
cctcatacaagtaaacacagaaagt

SEQ ID NO: 38311 - DNA, 25 bp, Probe Sequence
attaaatactgtggttgcctctatg

SEQ ID NO: 38312 - DNA, 25 bp, Probe Sequence
tctactaatgttgtgtgatttgtgt

SEQ ID NO: 38313 - DNA, 25 bp, Probe Sequence
tcctcatacaagtaaacacagaaag

SEQ ID NO: 38314 - DNA, 25 bp, Probe Sequence
caaattaaatactgtggttgcctct

SEQ ID NO: 38315 - DNA, 25 bp, Probe Sequence
acaggtagcacaatctactaatgtt

SEQ ID NO: 38316 - DNA, 25 bp, Probe Sequence
aacaggtagcacaatctactaatgt

SEQ ID NO: 38317 - DNA, 25 bp, Probe Sequence
atggctacctaaattgaaatccttt

SEQ ID NO: 38318 - DNA, 25 bp, Probe Sequence
aatggctacctaaattgaaatcctt

SEQ ID NO: 38319 - DNA, 25 bp, Probe Sequence
aaatggctacctaaattgaaatcct

SEQ ID NO: 38320 - DNA, 25 bp, Probe Sequence
caggtagcacaatctactaatgttg

SEQ ID NO: 38321 - DNA, 25 bp, Probe Sequence
tggaaaggttatcttaaatggctac

SEQ ID NO: 38322 - DNA, 25 bp, Probe Sequence
tcatacaagtaaacacagaaagtca

SEQ ID NO: 38323 - DNA, 25 bp, Probe Sequence
tgtgatttgtgttatactggttgta

SEQ ID NO: 38324 - DNA, 25 bp, Probe Sequence
aaattaaatactgtggttgcctcta

SEQ ID NO: 38325 - DNA, 25 bp, Probe Sequence
acaaattaaatactgtggttgcctc

SEQ ID NO: 38326 - DNA, 25 bp, Probe Sequence
aacaaattaaatactgtggttgcct

SEQ ID NO: 38327 - DNA, 25 bp, Probe Sequence
gagtacaacagcatcatcagaagtt

SEQ ID NO: 38328 - DNA, 25 bp, Probe Sequence
gttggattatcttgacagtattgac

SEQ ID NO: 38329 - DNA, 25 bp, Probe Sequence
tgttggattatcttgacagtattga

SEQ ID NO: 38330 - DNA, 25 bp, Probe Sequence
ttggattatcttgacagtattgact

SEQ ID NO: 38331 - DNA, 25 bp, Probe Sequence
tttcctgtttgatgctgtctatttg

SEQ ID NO: 38332 - DNA, 25 bp, Probe Sequence
tttatttatgtgaacttgctcctgc

SEQ ID NO: 38333 - DNA, 25 bp, Probe Sequence
gcacattattggcgtatctttaagt

SEQ ID NO: 38334 - DNA, 25 bp, Probe Sequence
tacaaatacgaccattaacctcagt

SEQ ID NO: 38335 - DNA, 25 bp, Probe Sequence
aaggttgagctgttggattatcttg

SEQ ID NO: 38336 - DNA, 25 bp, Probe Sequence
attggcgtatctttaagttggattc

SEQ ID NO: 38337 - DNA, 25 bp, Probe Sequence
ttgtcctctgtagataaacccatag

SEQ ID NO: 38338 - DNA, 25 bp, Probe Sequence
gtaatgcacattattggcgtatctt

SEQ ID NO: 38339 - DNA, 25 bp, Probe Sequence
aagacaatttagcatagacccagat

SEQ ID NO: 38340 - DNA, 25 bp, Probe Sequence
gaagacaatttagcatagacccaga

SEQ ID NO: 38341 - DNA, 25 bp, Probe Sequence
tcaggaagacaatttagcatagacc

SEQ ID NO: 38342 - DNA, 25 bp, Probe Sequence
ttggcgtatctttaagttggattca

SEQ ID NO: 38343 - DNA, 25 bp, Probe Sequence
tgtcctctgtagataaacccataga

SEQ ID NO: 38344 - DNA, 25 bp, Probe Sequence
acaaatacgaccattaacctcagtt

SEQ ID NO: 38345 - DNA, 25 bp, Probe Sequence
gataaacccatagaagttgatgagc

SEQ ID NO: 38346 - DNA, 25 bp, Probe Sequence
tttgtcctctgtagataaacccata

SEQ ID NO: 38347 - DNA, 25 bp, Probe Sequence
ttacaaatacgaccattaacctcag

SEQ ID NO: 38348 - DNA, 25 bp, Probe Sequence
ggttgagctgttggattatcttgac

SEQ ID NO: 38349 - DNA, 25 bp, Probe Sequence
aggttgagctgttggattatcttga

SEQ ID NO: 38350 - DNA, 25 bp, Probe Sequence
ggcgtatctttaagttggattcaaa

SEQ ID NO: 38351 - DNA, 25 bp, Probe Sequence
tctgagtaaaacaagtctcggaatt

SEQ ID NO: 38352 - DNA, 25 bp, Probe Sequence
ctctgagtaaaacaagtctcggaat

SEQ ID NO: 38353 - DNA, 25 bp, Probe Sequence
actctgagtaaaacaagtctcggaa

SEQ ID NO: 38354 - DNA, 25 bp, Probe Sequence
cactctgagtaaaacaagtctcgga

SEQ ID NO: 38355 - DNA, 25 bp, Probe Sequence
tccactctgagtaaaacaagtctcg

SEQ ID NO: 38356 - DNA, 25 bp, Probe Sequence
tggggcaaagaaacaacatagtttt

SEQ ID NO: 38357 - DNA, 25 bp, Probe Sequence
ttggggcaaagaaacaacatagttt

SEQ ID NO: 38358 - DNA, 25 bp, Probe Sequence
catttggggcaaagaaacaacatag

SEQ ID NO: 38359 - DNA, 25 bp, Probe Sequence
ggggcaaagaaacaacatagttttg

SEQ ID NO: 38360 - DNA, 25 bp, Probe Sequence
atttggggcaaagaaacaacatagt

SEQ ID NO: 38361 - DNA, 25 bp, Probe Sequence
tcatttggggcaaagaaacaacata

SEQ ID NO: 38362 - DNA, 25 bp, Probe Sequence
ctgagtaaaacaagtctcggaattc

SEQ ID NO: 38363 - DNA, 25 bp, Probe Sequence
tttggggcaaagaaacaacatagtt

SEQ ID NO: 38364 - DNA, 25 bp, Probe Sequence
ccactctgagtaaaacaagtctcgg

SEQ ID NO: 38365 - DNA, 25 bp, Probe Sequence
gggcaaagaaacaacatagttttgt

SEQ ID NO: 38366 - DNA, 25 bp, Probe Sequence
ttcatttggggcaaagaaacaacat

SEQ ID NO: 38367 - DNA, 25 bp, Probe Sequence
tttcatttggggcaaagaaacaaca

SEQ ID NO: 38368 - DNA, 25 bp, Probe Sequence
tagccgtagtgtaatgattgatgag

SEQ ID NO: 38369 - DNA, 25 bp, Probe Sequence
atagccgtagtgtaatgattgatga

SEQ ID NO: 38370 - DNA, 25 bp, Probe Sequence
aatatggagattggaatgaaggtgg

SEQ ID NO: 38371 - DNA, 25 bp, Probe Sequence
aatagccgtagtgtaatgattgatg

SEQ ID NO: 38372 - DNA, 25 bp, Probe Sequence
ccgtagtgtaatgattgatgaggac

SEQ ID NO: 38373 - DNA, 25 bp, Probe Sequence
actcaatagccgtagtgtaatgatt

SEQ ID NO: 38374 - DNA, 25 bp, Probe Sequence
gattgtgcctatccttgagaagatg

SEQ ID NO: 38375 - DNA, 25 bp, Probe Sequence
agcatctgtaacaagtatggagaga

SEQ ID NO: 38376 - DNA, 25 bp, Probe Sequence
tgattgtgcctatccttgagaagat

SEQ ID NO: 38377 - DNA, 25 bp, Probe Sequence
atgattgtgcctatccttgagaaga

SEQ ID NO: 38378 - DNA, 25 bp, Probe Sequence
cgtagtgtaatgattgatgaggaca

SEQ ID NO: 38379 - DNA, 25 bp, Probe Sequence
ctgtaacaagtatggagagatgcct

SEQ ID NO: 38380 - DNA, 25 bp, Probe Sequence
gtaatgattgatgaggacatgactg

SEQ ID NO: 38381 - DNA, 25 bp, Probe Sequence
taatgattgatgaggacatgactgc

SEQ ID NO: 38382 - DNA, 25 bp, Probe Sequence
ctcatcctactctcatcacacactg

SEQ ID NO: 38383 - DNA, 25 bp, Probe Sequence
tctgtaacaagtatggagagatgcc

SEQ ID NO: 38384 - DNA, 25 bp, Probe Sequence
tgtaacaagtatggagagatgcctg

SEQ ID NO: 38385 - DNA, 25 bp, Probe Sequence
cagcatctgtaacaagtatggagag

SEQ ID NO: 38386 - DNA, 25 bp, Probe Sequence
aatctcaaccgtattccatacaagg

SEQ ID NO: 38387 - DNA, 25 bp, Probe Sequence
tcagcatctgtaacaagtatggaga

SEQ ID NO: 38388 - DNA, 25 bp, Probe Sequence
gtcagcatctgtaacaagtatggag

SEQ ID NO: 38389 - DNA, 25 bp, Probe Sequence
gccgtagtgtaatgattgatgagga

SEQ ID NO: 38390 - DNA, 25 bp, Probe Sequence
agccgtagtgtaatgattgatgagg

SEQ ID NO: 38391 - DNA, 25 bp, Probe Sequence
gtagtgtaatgattgatgaggacat

SEQ ID NO: 38392 - DNA, 25 bp, Probe Sequence
ggagatacaatgaggtgaagaagaa

SEQ ID NO: 38393 - DNA, 25 bp, Probe Sequence
ctggagatacaatgaggtgaagaag

SEQ ID NO: 38394 - DNA, 25 bp, Probe Sequence
tggagatacaatgaggtgaagaaga

SEQ ID NO: 38395 - DNA, 25 bp, Probe Sequence
attctggagatacaatgaggtgaag

SEQ ID NO: 38396 - DNA, 25 bp, Probe Sequence
aattctggagatacaatgaggtgaa

SEQ ID NO: 38397 - DNA, 25 bp, Probe Sequence
ctaatcagcattctcactcctacct

SEQ ID NO: 38398 - DNA, 25 bp, Probe Sequence
tctggagatacaatgaggtgaagaa

SEQ ID NO: 38399 - DNA, 25 bp, Probe Sequence
ttctggagatacaatgaggtgaaga

SEQ ID NO: 38400 - DNA, 25 bp, Probe Sequence
aagaatagatgctgactgtactcct

SEQ ID NO: 38401 - DNA, 25 bp, Probe Sequence
caagaatagatgctgactgtactcc

SEQ ID NO: 38402 - DNA, 25 bp, Probe Sequence
ccaagaatagatgctgactgtactc

SEQ ID NO: 38403 - DNA, 25 bp, Probe Sequence
agaatagatgctgactgtactcctc

SEQ ID NO: 38404 - DNA, 25 bp, Probe Sequence
gaatgaatactggatctactcagcc

SEQ ID NO: 38405 - DNA, 25 bp, Probe Sequence
ggaatgaatactggatctactcagc

SEQ ID NO: 38406 - DNA, 25 bp, Probe Sequence
gaatagatgctgactgtactcctcc

SEQ ID NO: 38407 - DNA, 25 bp, Probe Sequence
taatcagcattctcactcctacctg

SEQ ID NO: 38408 - DNA, 25 bp, Probe Sequence
gcattctcactcctacctggtaatt

SEQ ID NO: 38409 - DNA, 25 bp, Probe Sequence
acaaattctggagatacaatgaggt

SEQ ID NO: 38410 - DNA, 25 bp, Probe Sequence
aaattctggagatacaatgaggtga

SEQ ID NO: 38411 - DNA, 25 bp, Probe Sequence
caaattctggagatacaatgaggtg

SEQ ID NO: 38412 - DNA, 25 bp, Probe Sequence
gacaaattctggagatacaatgagg

SEQ ID NO: 38413 - DNA, 25 bp, Probe Sequence
aatgaatactggatctactcagcca

SEQ ID NO: 38414 - DNA, 25 bp, Probe Sequence
tggagacaaattctggagatacaat

SEQ ID NO: 38415 - DNA, 25 bp, Probe Sequence
ctggagacaaattctggagatacaa

SEQ ID NO: 38416 - DNA, 25 bp, Probe Sequence
gtagaccagtgaggcagatatgtat

SEQ ID NO: 38417 - DNA, 25 bp, Probe Sequence
tagaccagtgaggcagatatgtatc

SEQ ID NO: 38418 - DNA, 25 bp, Probe Sequence
gagaggacggcaatgaagaagataa

SEQ ID NO: 38419 - DNA, 25 bp, Probe Sequence
gacggcaatgaagaagataaagaaa

SEQ ID NO: 38420 - DNA, 25 bp, Probe Sequence
agagaggacggcaatgaagaagata

SEQ ID NO: 38421 - DNA, 25 bp, Probe Sequence
tagagaggacggcaatgaagaagat

SEQ ID NO: 38422 - DNA, 25 bp, Probe Sequence
ggacggcaatgaagaagataaagaa

SEQ ID NO: 38423 - DNA, 25 bp, Probe Sequence
ggtagaccagtgaggcagatatgta

SEQ ID NO: 38424 - DNA, 25 bp, Probe Sequence
gaggacggcaatgaagaagataaag

SEQ ID NO: 38425 - DNA, 25 bp, Probe Sequence
aggacggcaatgaagaagataaaga

SEQ ID NO: 38426 - DNA, 25 bp, Probe Sequence
agaggacggcaatgaagaagataaa

SEQ ID NO: 38427 - DNA, 25 bp, Probe Sequence
aaggtagaccagtgaggcagatatg

SEQ ID NO: 38428 - DNA, 25 bp, Probe Sequence
caaggtagaccagtgaggcagatat

SEQ ID NO: 38429 - DNA, 25 bp, Probe Sequence
agaccagtgaggcagatatgtatcg

SEQ ID NO: 38430 - DNA, 25 bp, Probe Sequence
aaagattggagctgaagacctaaag

SEQ ID NO: 38431 - DNA, 25 bp, Probe Sequence
ctagagaggacggcaatgaagaaga

SEQ ID NO: 38432 - DNA, 25 bp, Probe Sequence
aagattggagctgaagacctaaagt

SEQ ID NO: 38433 - DNA, 25 bp, Probe Sequence
agattggagctgaagacctaaagtg

SEQ ID NO: 38434 - DNA, 25 bp, Probe Sequence
ctaaaccacaagatggcaaagagac

SEQ ID NO: 38435 - DNA, 25 bp, Probe Sequence
acggcaatgaagaagataaagaaaa

SEQ ID NO: 38436 - DNA, 25 bp, Probe Sequence
aggtagaccagtgaggcagatatgt

SEQ ID NO: 38437 - DNA, 25 bp, Probe Sequence
gaccagtgaggcagatatgtatcgg

SEQ ID NO: 38438 - DNA, 25 bp, Probe Sequence
acaaggtagaccagtgaggcagata

SEQ ID NO: 38439 - DNA, 25 bp, Probe Sequence
cggcaatgaagaagataaagaaaat

SEQ ID NO: 38440 - DNA, 25 bp, Probe Sequence
tatgtgtgacttatgactctctgtg

SEQ ID NO: 38441 - DNA, 25 bp, Probe Sequence
ctcctatgtgtgacttatgactctc

SEQ ID NO: 38442 - DNA, 25 bp, Probe Sequence
cttatgactctctgtgttctgtgta

SEQ ID NO: 38443 - DNA, 25 bp, Probe Sequence
cctatgtgtgacttatgactctctg

SEQ ID NO: 38444 - DNA, 25 bp, Probe Sequence
tcctatgtgtgacttatgactctct

SEQ ID NO: 38445 - DNA, 25 bp, Probe Sequence
ctatgtgtgacttatgactctctgt

SEQ ID NO: 38446 - DNA, 25 bp, Probe Sequence
tatgactctctgtgttctgtgtatt

SEQ ID NO: 38447 - DNA, 25 bp, Probe Sequence
ttatgactctctgtgttctgtgtat

SEQ ID NO: 38448 - DNA, 25 bp, Probe Sequence
agataggcttcagttgttaattggt

SEQ ID NO: 38449 - DNA, 25 bp, Probe Sequence
gacttatgactctctgtgttctgtg

SEQ ID NO: 38450 - DNA, 25 bp, Probe Sequence
gtgacttatgactctctgtgttctg

SEQ ID NO: 38451 - DNA, 25 bp, Probe Sequence
gagataggcttcagttgttaattgg

SEQ ID NO: 38452 - DNA, 25 bp, Probe Sequence
gataggcttcagttgttaattggtt

SEQ ID NO: 38453 - DNA, 25 bp, Probe Sequence
tgtagagataggcttcagttgttaa

SEQ ID NO: 38454 - DNA, 25 bp, Probe Sequence
tatactgattcctccaactctccac

SEQ ID NO: 38455 - DNA, 25 bp, Probe Sequence
tgacttatgactctctgtgttctgt

SEQ ID NO: 38456 - DNA, 25 bp, Probe Sequence
tgtgacttatgactctctgtgttct

SEQ ID NO: 38457 - DNA, 25 bp, Probe Sequence
gtgtgacttatgactctctgtgttc

SEQ ID NO: 38458 - DNA, 25 bp, Probe Sequence
cctcctatgtgtgacttatgactct

SEQ ID NO: 38459 - DNA, 25 bp, Probe Sequence
acttatgactctctgtgttctgtgt

SEQ ID NO: 38460 - DNA, 25 bp, Probe Sequence
atgtgtgacttatgactctctgtgt

SEQ ID NO: 38461 - DNA, 25 bp, Probe Sequence
agagataggcttcagttgttaattg

SEQ ID NO: 38462 - DNA, 25 bp, Probe Sequence
tgtgtgacttatgactctctgtgtt

SEQ ID NO: 38463 - DNA, 25 bp, Probe Sequence
gtagagataggcttcagttgttaat

SEQ ID NO: 38464 - DNA, 25 bp, Probe Sequence
tatgttggcaaggaactgaatatga

SEQ ID NO: 38465 - DNA, 25 bp, Probe Sequence
atatgttggcaaggaactgaatatg

SEQ ID NO: 38466 - DNA, 25 bp, Probe Sequence
atgttggcaaggaactgaatatgat

SEQ ID NO: 38467 - DNA, 25 bp, Probe Sequence
gccttgaagagtaattgactggatt

SEQ ID NO: 38468 - DNA, 25 bp, Probe Sequence
tgttggcaaggaactgaatatgatc

SEQ ID NO: 38469 - DNA, 25 bp, Probe Sequence
ctggttctggtgaatgctgtctatt

SEQ ID NO: 38470 - DNA, 25 bp, Probe Sequence
taaagtcagcaagaatgaggagaaa

SEQ ID NO: 38471 - DNA, 25 bp, Probe Sequence
ttaaagtcagcaagaatgaggagaa

SEQ ID NO: 38472 - DNA, 25 bp, Probe Sequence
agtcttgtgatttcctctcatcttt

SEQ ID NO: 38473 - DNA, 25 bp, Probe Sequence
aagtcttgtgatttcctctcatctt

SEQ ID NO: 38474 - DNA, 25 bp, Probe Sequence
aaagtcttgtgatttcctctcatct

SEQ ID NO: 38475 - DNA, 25 bp, Probe Sequence
gcaaatgatgtttaagcaatctact

SEQ ID NO: 38476 - DNA, 25 bp, Probe Sequence
gatgaacagtttgacaaggagaaca

SEQ ID NO: 38477 - DNA, 25 bp, Probe Sequence
ccttgaagagtaattgactggattt

SEQ ID NO: 38478 - DNA, 25 bp, Probe Sequence
ggagaaagaactcacttacgagaag

SEQ ID NO: 38479 - DNA, 25 bp, Probe Sequence
catatgttggcaaggaactgaatat

SEQ ID NO: 38480 - DNA, 25 bp, Probe Sequence
cagcagaagcaacaagaacaacaag

SEQ ID NO: 38481 - DNA, 25 bp, Probe Sequence
atgaacagtttgacaaggagaacac

SEQ ID NO: 38482 - DNA, 25 bp, Probe Sequence
atgatggatgaagaggaggtggaag

SEQ ID NO: 38483 - DNA, 25 bp, Probe Sequence
aaagtcagcaagaatgaggagaaac

SEQ ID NO: 38484 - DNA, 25 bp, Probe Sequence
ggttctggtgaatgctgtctatttc

SEQ ID NO: 38485 - DNA, 25 bp, Probe Sequence
tggagaaagaactcacttacgagaa

SEQ ID NO: 38486 - DNA, 25 bp, Probe Sequence
ggatgaacagtttgacaaggagaac

SEQ ID NO: 38487 - DNA, 25 bp, Probe Sequence
cagtggtggcagttcagaaataaag

SEQ ID NO: 38488 - DNA, 25 bp, Probe Sequence
ccaggtcagttcaggaagtatatct

SEQ ID NO: 38489 - DNA, 25 bp, Probe Sequence
actaatacttctctcagcagttgat

SEQ ID NO: 38490 - DNA, 25 bp, Probe Sequence
gagactagcactaaggattctggta

SEQ ID NO: 38491 - DNA, 25 bp, Probe Sequence
tactaatacttctctcagcagttga

SEQ ID NO: 38492 - DNA, 25 bp, Probe Sequence
gtcagttcaggaagtatatctggag

SEQ ID NO: 38493 - DNA, 25 bp, Probe Sequence
tcagttcaggaagtatatctggagt

SEQ ID NO: 38494 - DNA, 25 bp, Probe Sequence
caggtcagttcaggaagtatatctg

SEQ ID NO: 38495 - DNA, 25 bp, Probe Sequence
ctactaatacttctctcagcagttg

SEQ ID NO: 38496 - DNA, 25 bp, Probe Sequence
agactagcactaaggattctggtac

SEQ ID NO: 38497 - DNA, 25 bp, Probe Sequence
gaagtatatctggagtacctgctct

SEQ ID NO: 38498 - DNA, 25 bp, Probe Sequence
ggtcagttcaggaagtatatctgga

SEQ ID NO: 38499 - DNA, 25 bp, Probe Sequence
aggtcagttcaggaagtatatctgg

SEQ ID NO: 38500 - DNA, 25 bp, Probe Sequence
aagtatatctggagtacctgctctg

SEQ ID NO: 38501 - DNA, 25 bp, Probe Sequence
cagttcaggaagtatatctggagta

SEQ ID NO: 38502 - DNA, 25 bp, Probe Sequence
ctaatacttctctcagcagttgatc

SEQ ID NO: 38503 - DNA, 25 bp, Probe Sequence
gtatatctggagtacctgctctgtt

SEQ ID NO: 38504 - DNA, 25 bp, Probe Sequence
gttcaggaagtatatctggagtacc

SEQ ID NO: 38505 - DNA, 25 bp, Probe Sequence
atccaggtcagttcaggaagtatat

SEQ ID NO: 38506 - DNA, 25 bp, Probe Sequence
ttcaggaagtatatctggagtacct

SEQ ID NO: 38507 - DNA, 25 bp, Probe Sequence
tccaggtcagttcaggaagtatatc

SEQ ID NO: 38508 - DNA, 25 bp, Probe Sequence
ggaagtatatctggagtacctgctc

SEQ ID NO: 38509 - DNA, 25 bp, Probe Sequence
ctgtgagactagcactaaggattct

SEQ ID NO: 38510 - DNA, 25 bp, Probe Sequence
agttcaggaagtatatctggagtac

SEQ ID NO: 38511 - DNA, 25 bp, Probe Sequence
catccaggtcagttcaggaagtata

SEQ ID NO: 38512 - DNA, 25 bp, Probe Sequence
ttatggtggcaaatgtttggtagaa

SEQ ID NO: 38513 - DNA, 25 bp, Probe Sequence
tttatggtggcaaatgtttggtaga

SEQ ID NO: 38514 - DNA, 25 bp, Probe Sequence
tatggtggcaaatgtttggtagaac

SEQ ID NO: 38515 - DNA, 25 bp, Probe Sequence
atggtggcaaatgtttggtagaact

SEQ ID NO: 38516 - DNA, 25 bp, Probe Sequence
ttttatggtggcaaatgtttggtag

SEQ ID NO: 38517 - DNA, 25 bp, Probe Sequence
attttatggtggcaaatgtttggta

SEQ ID NO: 38518 - DNA, 25 bp, Probe Sequence
tattttatggtggcaaatgtttggt

SEQ ID NO: 38519 - DNA, 25 bp, Probe Sequence
gtattttatggtggcaaatgtttgg

SEQ ID NO: 38520 - DNA, 25 bp, Probe Sequence
tgtattttatggtggcaaatgtttg

SEQ ID NO: 38521 - DNA, 25 bp, Probe Sequence
atgtattttatggtggcaaatgttt

SEQ ID NO: 38522 - DNA, 25 bp, Probe Sequence
catgtattttatggtggcaaatgtt

SEQ ID NO: 38523 - DNA, 25 bp, Probe Sequence
acatgtattttatggtggcaaatgt

SEQ ID NO: 38524 - DNA, 25 bp, Probe Sequence
aggccagtgataatgcaatagagtc

SEQ ID NO: 38525 - DNA, 25 bp, Probe Sequence
gtgataatgcaatagagtccctgga

SEQ ID NO: 38526 - DNA, 25 bp, Probe Sequence
agtgataatgcaatagagtccctgg

SEQ ID NO: 38527 - DNA, 25 bp, Probe Sequence
ccagtgataatgcaatagagtccct

SEQ ID NO: 38528 - DNA, 25 bp, Probe Sequence
caggccagtgataatgcaatagagt

SEQ ID NO: 38529 - DNA, 25 bp, Probe Sequence
cagtgataatgcaatagagtccctg

SEQ ID NO: 38530 - DNA, 25 bp, Probe Sequence
tgataatgcaatagagtccctggac

SEQ ID NO: 38531 - DNA, 25 bp, Probe Sequence
ggccagtgataatgcaatagagtcc

SEQ ID NO: 38532 - DNA, 25 bp, Probe Sequence
gccagtgataatgcaatagagtccc

SEQ ID NO: 38533 - DNA, 25 bp, Probe Sequence
gataatgcaatagagtccctggacg

SEQ ID NO: 38534 - DNA, 25 bp, Probe Sequence
ataatgcaatagagtccctggacgg

SEQ ID NO: 38535 - DNA, 25 bp, Probe Sequence
gcaggccagtgataatgcaatagag

SEQ ID NO: 38536 - DNA, 25 bp, Probe Sequence
ctgaataaagaatggagaggcccct

SEQ ID NO: 38537 - DNA, 25 bp, Probe Sequence
actgaataaagaatggagaggcccc

SEQ ID NO: 38538 - DNA, 25 bp, Probe Sequence
tgaataaagaatggagaggcccctc

SEQ ID NO: 38539 - DNA, 25 bp, Probe Sequence
gaataaagaatggagaggcccctct

SEQ ID NO: 38540 - DNA, 25 bp, Probe Sequence
tttgggagaagaacagattaaacct

SEQ ID NO: 38541 - DNA, 25 bp, Probe Sequence
cttatttggaattgctggattgtca

SEQ ID NO: 38542 - DNA, 25 bp, Probe Sequence
tcataccttatttggaattgctgga

SEQ ID NO: 38543 - DNA, 25 bp, Probe Sequence
ttatttggaattgctggattgtcac

SEQ ID NO: 38544 - DNA, 25 bp, Probe Sequence
taccttatttggaattgctggattg

SEQ ID NO: 38545 - DNA, 25 bp, Probe Sequence
cataccttatttggaattgctggat

SEQ ID NO: 38546 - DNA, 25 bp, Probe Sequence
ccttatttggaattgctggattgtc

SEQ ID NO: 38547 - DNA, 25 bp, Probe Sequence
tatttggaattgctggattgtcact

SEQ ID NO: 38548 - DNA, 25 bp, Probe Sequence
ttcataccttatttggaattgctgg

SEQ ID NO: 38549 - DNA, 25 bp, Probe Sequence
accttatttggaattgctggattgt

SEQ ID NO: 38550 - DNA, 25 bp, Probe Sequence
ataccttatttggaattgctggatt

SEQ ID NO: 38551 - DNA, 25 bp, Probe Sequence
ttgatagagagaaactgcgtaattt

SEQ ID NO: 38552 - DNA, 25 bp, Probe Sequence
atttggaattgctggattgtcactt

SEQ ID NO: 38553 - DNA, 25 bp, Probe Sequence
attgatagagagaaactgcgtaatt

SEQ ID NO: 38554 - DNA, 25 bp, Probe Sequence
tttggaattgctggattgtcacttt

SEQ ID NO: 38555 - DNA, 25 bp, Probe Sequence
ttgggagaagaacagattaaacctg

SEQ ID NO: 38556 - DNA, 25 bp, Probe Sequence
atttctgtatttgaagtgcttatcg

SEQ ID NO: 38557 - DNA, 25 bp, Probe Sequence
tttcataccttatttggaattgctg

SEQ ID NO: 38558 - DNA, 25 bp, Probe Sequence
tttagcatgtcaagatgaagaaacg

SEQ ID NO: 38559 - DNA, 25 bp, Probe Sequence
gctagtgagctagattcattgaatt

SEQ ID NO: 38560 - DNA, 25 bp, Probe Sequence
ttagcatgtcaagatgaagaaacgg

SEQ ID NO: 38561 - DNA, 25 bp, Probe Sequence
tgtatttgaagtgcttatcgaatct

SEQ ID NO: 38562 - DNA, 25 bp, Probe Sequence
tctgtatttgaagtgcttatcgaat

SEQ ID NO: 38563 - DNA, 25 bp, Probe Sequence
ttctgtatttgaagtgcttatcgaa

SEQ ID NO: 38564 - DNA, 25 bp, Probe Sequence
gtcctactctatacaatgcttaccg

SEQ ID NO: 38565 - DNA, 25 bp, Probe Sequence
ttgtgatatatggagtcttggtgtc

SEQ ID NO: 38566 - DNA, 25 bp, Probe Sequence
cttgtgatatatggagtcttggtgt

SEQ ID NO: 38567 - DNA, 25 bp, Probe Sequence
gctatgatgctgcttgtgatatatg

SEQ ID NO: 38568 - DNA, 25 bp, Probe Sequence
tatgatgctgcttgtgatatatgga

SEQ ID NO: 38569 - DNA, 25 bp, Probe Sequence
ctatgatgctgcttgtgatatatgg

SEQ ID NO: 38570 - DNA, 25 bp, Probe Sequence
aggctatgatgctgcttgtgatata

SEQ ID NO: 38571 - DNA, 25 bp, Probe Sequence
atgatgctgcttgtgatatatggag

SEQ ID NO: 38572 - DNA, 25 bp, Probe Sequence
agtcttggtgtcctactctatacaa

SEQ ID NO: 38573 - DNA, 25 bp, Probe Sequence
ggctatgatgctgcttgtgatatat

SEQ ID NO: 38574 - DNA, 25 bp, Probe Sequence
ctgcttgtgatatatggagtcttgg

SEQ ID NO: 38575 - DNA, 25 bp, Probe Sequence
tgtcctactctatacaatgcttacc

SEQ ID NO: 38576 - DNA, 25 bp, Probe Sequence
ggtgtcctactctatacaatgctta

SEQ ID NO: 38577 - DNA, 25 bp, Probe Sequence
cttggtgtcctactctatacaatgc

SEQ ID NO: 38578 - DNA, 25 bp, Probe Sequence
tcttggtgtcctactctatacaatg

SEQ ID NO: 38579 - DNA, 25 bp, Probe Sequence
gtcttggtgtcctactctatacaat

SEQ ID NO: 38580 - DNA, 25 bp, Probe Sequence
gcttgtgatatatggagtcttggtg

SEQ ID NO: 38581 - DNA, 25 bp, Probe Sequence
tggtgtcctactctatacaatgctt

SEQ ID NO: 38582 - DNA, 25 bp, Probe Sequence
ttggtgtcctactctatacaatgct

SEQ ID NO: 38583 - DNA, 25 bp, Probe Sequence
gatgctgcttgtgatatatggagtc

SEQ ID NO: 38584 - DNA, 25 bp, Probe Sequence
tgcttgtgatatatggagtcttggt

SEQ ID NO: 38585 - DNA, 25 bp, Probe Sequence
gctgcttgtgatatatggagtcttg

SEQ ID NO: 38586 - DNA, 25 bp, Probe Sequence
atgctgcttgtgatatatggagtct

SEQ ID NO: 38587 - DNA, 25 bp, Probe Sequence
gtgtcctactctatacaatgcttac

SEQ ID NO: 38588 - DNA, 25 bp, Probe Sequence
tcggttacaagaagaattggagaag

SEQ ID NO: 38589 - DNA, 25 bp, Probe Sequence
gtcggttacaagaagaattggagaa

SEQ ID NO: 38590 - DNA, 25 bp, Probe Sequence
atgtcggttacaagaagaattggag

SEQ ID NO: 38591 - DNA, 25 bp, Probe Sequence
cggttacaagaagaattggagaagc

SEQ ID NO: 38592 - DNA, 25 bp, Probe Sequence
tgtcggttacaagaagaattggaga

SEQ ID NO: 38593 - DNA, 25 bp, Probe Sequence
tctcctagaatctcaatctcagctc

SEQ ID NO: 38594 - DNA, 25 bp, Probe Sequence
ctagaatctcaatctcagctcgatg

SEQ ID NO: 38595 - DNA, 25 bp, Probe Sequence
ttccttacaaataaaccaaccaacc

SEQ ID NO: 38596 - DNA, 25 bp, Probe Sequence
catgtcggttacaagaagaattgga

SEQ ID NO: 38597 - DNA, 25 bp, Probe Sequence
acaaataaaccaaccaacctacaaa

SEQ ID NO: 38598 - DNA, 25 bp, Probe Sequence
tccttacaaataaaccaaccaacct

SEQ ID NO: 38599 - DNA, 25 bp, Probe Sequence
gttacaagaagaattggagaagctc

SEQ ID NO: 38600 - DNA, 25 bp, Probe Sequence
ggttacaagaagaattggagaagct

SEQ ID NO: 38601 - DNA, 25 bp, Probe Sequence
ccttacaaataaaccaaccaaccta

SEQ ID NO: 38602 - DNA, 25 bp, Probe Sequence
ctcgaagagattgtagagaagctaa

SEQ ID NO: 38603 - DNA, 25 bp, Probe Sequence
acattccttacaaataaaccaacca

SEQ ID NO: 38604 - DNA, 25 bp, Probe Sequence
tacaaataaaccaaccaacctacaa

SEQ ID NO: 38605 - DNA, 25 bp, Probe Sequence
ttacaaataaaccaaccaacctaca

SEQ ID NO: 38606 - DNA, 25 bp, Probe Sequence
cacattccttacaaataaaccaacc

SEQ ID NO: 38607 - DNA, 25 bp, Probe Sequence
tgccttacacattccttacaaataa

SEQ ID NO: 38608 - DNA, 25 bp, Probe Sequence
cctagaatctcaatctcagctcgat

SEQ ID NO: 38609 - DNA, 25 bp, Probe Sequence
gcaacttctcctagaatctcaatct

SEQ ID NO: 38610 - DNA, 25 bp, Probe Sequence
cttctcctagaatctcaatctcagc

SEQ ID NO: 38611 - DNA, 25 bp, Probe Sequence
cttacaaataaaccaaccaacctac

SEQ ID NO: 38612 - DNA, 25 bp, Probe Sequence
cgtagacttatctggaatgtgaaca

SEQ ID NO: 38613 - DNA, 25 bp, Probe Sequence
aatgcttaactgtagtcctgagtag

SEQ ID NO: 38614 - DNA, 25 bp, Probe Sequence
taacttaatgatggagaagagtgct

SEQ ID NO: 38615 - DNA, 25 bp, Probe Sequence
gtagacttatctggaatgtgaacac

SEQ ID NO: 38616 - DNA, 25 bp, Probe Sequence
cttaatgatggagaagagtgctcaa

SEQ ID NO: 38617 - DNA, 25 bp, Probe Sequence
aacttaatgatggagaagagtgctc

SEQ ID NO: 38618 - DNA, 25 bp, Probe Sequence
ttaatgatggagaagagtgctcaac

SEQ ID NO: 38619 - DNA, 25 bp, Probe Sequence
ttaacttaatgatggagaagagtgc

SEQ ID NO: 38620 - DNA, 25 bp, Probe Sequence
ggcatgagaataccttaatactgag

SEQ ID NO: 38621 - DNA, 25 bp, Probe Sequence
acttaatgatggagaagagtgctca

SEQ ID NO: 38622 - DNA, 25 bp, Probe Sequence
tgagaataccttaatactgagttgg

SEQ ID NO: 38623 - DNA, 25 bp, Probe Sequence
taatgatggagaagagtgctcaaca

SEQ ID NO: 38624 - DNA, 25 bp, Probe Sequence
gaataccttaatactgagttggaga

SEQ ID NO: 38625 - DNA, 25 bp, Probe Sequence
agaataccttaatactgagttggag

SEQ ID NO: 38626 - DNA, 25 bp, Probe Sequence
gagaataccttaatactgagttgga

SEQ ID NO: 38627 - DNA, 25 bp, Probe Sequence
gcatgagaataccttaatactgagt

SEQ ID NO: 38628 - DNA, 25 bp, Probe Sequence
atgcttaactgtagtcctgagtagg

SEQ ID NO: 38629 - DNA, 25 bp, Probe Sequence
ttctaccaatattctaggcatgaga

SEQ ID NO: 38630 - DNA, 25 bp, Probe Sequence
tgatactggtattaagctgaatcct

SEQ ID NO: 38631 - DNA, 25 bp, Probe Sequence
tactggtattaagctgaatcctcac

SEQ ID NO: 38632 - DNA, 25 bp, Probe Sequence
ctggtattaagctgaatcctcacta

SEQ ID NO: 38633 - DNA, 25 bp, Probe Sequence
tatctggaatgtgaacacaactctt

SEQ ID NO: 38634 - DNA, 25 bp, Probe Sequence
ttatctggaatgtgaacacaactct

SEQ ID NO: 38635 - DNA, 25 bp, Probe Sequence
cttatctggaatgtgaacacaactc

SEQ ID NO: 38636 - DNA, 25 bp, Probe Sequence
tcactacactacaggatatgatctc

SEQ ID NO: 38637 - DNA, 25 bp, Probe Sequence
ttcactacactacaggatatgatct

SEQ ID NO: 38638 - DNA, 25 bp, Probe Sequence
actacactacaggatatgatctcca

SEQ ID NO: 38639 - DNA, 25 bp, Probe Sequence
cactacactacaggatatgatctcc

SEQ ID NO: 38640 - DNA, 25 bp, Probe Sequence
aggatatgatctccatgtagtccat

SEQ ID NO: 38641 - DNA, 25 bp, Probe Sequence
acactacaggatatgatctccatgt

SEQ ID NO: 38642 - DNA, 25 bp, Probe Sequence
tatttcattgactaacccaggacag

SEQ ID NO: 38643 - DNA, 25 bp, Probe Sequence
ttatttcattgactaacccaggaca

SEQ ID NO: 38644 - DNA, 25 bp, Probe Sequence
aattacatctccattagggctgaaa

SEQ ID NO: 38645 - DNA, 25 bp, Probe Sequence
ttgaataagtctcccacagttgtat

SEQ ID NO: 38646 - DNA, 25 bp, Probe Sequence
caggatatgatctccatgtagtcca

SEQ ID NO: 38647 - DNA, 25 bp, Probe Sequence
acaggatatgatctccatgtagtcc

SEQ ID NO: 38648 - DNA, 25 bp, Probe Sequence
ctacactacaggatatgatctccat

SEQ ID NO: 38649 - DNA, 25 bp, Probe Sequence
tacactacaggatatgatctccatg

SEQ ID NO: 38650 - DNA, 25 bp, Probe Sequence
agatcatatccatgtgtatgtggtt

SEQ ID NO: 38651 - DNA, 25 bp, Probe Sequence
aagatcatatccatgtgtatgtggt

SEQ ID NO: 38652 - DNA, 25 bp, Probe Sequence
agagtgctcgatactgttaattaca

SEQ ID NO: 38653 - DNA, 25 bp, Probe Sequence
cttgaataagtctcccacagttgta

SEQ ID NO: 38654 - DNA, 25 bp, Probe Sequence
tttatttcattgactaacccaggac

SEQ ID NO: 38655 - DNA, 25 bp, Probe Sequence
atatccatgtgtatgtggttagaca

SEQ ID NO: 38656 - DNA, 25 bp, Probe Sequence
aagtctcccacagttgtataaattg

SEQ ID NO: 38657 - DNA, 25 bp, Probe Sequence
ccagagtgctcgatactgttaatta

SEQ ID NO: 38658 - DNA, 25 bp, Probe Sequence
catatccatgtgtatgtggttagac

SEQ ID NO: 38659 - DNA, 25 bp, Probe Sequence
gctcgatactgttaattacatctcc

SEQ ID NO: 38660 - DNA, 25 bp, Probe Sequence
gataaggagactgaggcttagagag

SEQ ID NO: 38661 - DNA, 25 bp, Probe Sequence
ataaggagactgaggcttagagaga

SEQ ID NO: 38662 - DNA, 25 bp, Probe Sequence
taaggagactgaggcttagagagag

SEQ ID NO: 38663 - DNA, 25 bp, Probe Sequence
cttgttggtcagaggagtgattgaa

SEQ ID NO: 38664 - DNA, 25 bp, Probe Sequence
ggataaggagactgaggcttagaga

SEQ ID NO: 38665 - DNA, 25 bp, Probe Sequence
aggataaggagactgaggcttagag

SEQ ID NO: 38666 - DNA, 25 bp, Probe Sequence
ttgttggtcagaggagtgattgaac

SEQ ID NO: 38667 - DNA, 25 bp, Probe Sequence
caggataaggagactgaggcttaga

SEQ ID NO: 38668 - DNA, 25 bp, Probe Sequence
accattgtgaagcacctactatgtg

SEQ ID NO: 38669 - DNA, 25 bp, Probe Sequence
caccattgtgaagcacctactatgt

SEQ ID NO: 38670 - DNA, 25 bp, Probe Sequence
ctctgagtccactgctccatttata

SEQ ID NO: 38671 - DNA, 25 bp, Probe Sequence
gtgattgaacctgctcatctccaag

SEQ ID NO: 38672 - DNA, 25 bp, Probe Sequence
ctgagtccactgctccatttataac

SEQ ID NO: 38673 - DNA, 25 bp, Probe Sequence
tctgagtccactgctccatttataa

SEQ ID NO: 38674 - DNA, 25 bp, Probe Sequence
ccaggataaggagactgaggcttag

SEQ ID NO: 38675 - DNA, 25 bp, Probe Sequence
agtgattgaacctgctcatctccaa

SEQ ID NO: 38676 - DNA, 25 bp, Probe Sequence
aaggagactgaggcttagagagagg

SEQ ID NO: 38677 - DNA, 25 bp, Probe Sequence
attgaacctgctcatctccaaggat

SEQ ID NO: 38678 - DNA, 25 bp, Probe Sequence
tgagtccactgctccatttataacc

SEQ ID NO: 38679 - DNA, 25 bp, Probe Sequence
tccaggataaggagactgaggctta

SEQ ID NO: 38680 - DNA, 25 bp, Probe Sequence
ctgcttccaggataaggagactgag

SEQ ID NO: 38681 - DNA, 25 bp, Probe Sequence
gagtgattgaacctgctcatctcca

SEQ ID NO: 38682 - DNA, 25 bp, Probe Sequence
aggagtgattgaacctgctcatctc

SEQ ID NO: 38683 - DNA, 25 bp, Probe Sequence
gaggagtgattgaacctgctcatct

SEQ ID NO: 38684 - DNA, 25 bp, Probe Sequence
atacttatctctctgtgctgtggaa

SEQ ID NO: 38685 - DNA, 25 bp, Probe Sequence
catacttatctctctgtgctgtgga

SEQ ID NO: 38686 - DNA, 25 bp, Probe Sequence
tacttatctctctgtgctgtggaag

SEQ ID NO: 38687 - DNA, 25 bp, Probe Sequence
tgttgtaactaggctcagagatgtg

SEQ ID NO: 38688 - DNA, 25 bp, Probe Sequence
gtcacaccagccatacttatctctc

SEQ ID NO: 38689 - DNA, 25 bp, Probe Sequence
tcacaccagccatacttatctctct

SEQ ID NO: 38690 - DNA, 25 bp, Probe Sequence
aactgttgtaactaggctcagagat

SEQ ID NO: 38691 - DNA, 25 bp, Probe Sequence
ctatgtgccaactgttgtaactagg

SEQ ID NO: 38692 - DNA, 25 bp, Probe Sequence
cctatgtgccaactgttgtaactag

SEQ ID NO: 38693 - DNA, 25 bp, Probe Sequence
tctcatgtatcatctggataggagc

SEQ ID NO: 38694 - DNA, 25 bp, Probe Sequence
catctcatgtatcatctggatagga

SEQ ID NO: 38695 - DNA, 25 bp, Probe Sequence
atctcatgtatcatctggataggag

SEQ ID NO: 38696 - DNA, 25 bp, Probe Sequence
ccctattctctctttacgcttagtt

SEQ ID NO: 38697 - DNA, 25 bp, Probe Sequence
ctcactaccctattctctctttacg

SEQ ID NO: 38698 - DNA, 25 bp, Probe Sequence
gctcactaccctattctctctttac

SEQ ID NO: 38699 - DNA, 25 bp, Probe Sequence
ctgttgtaactaggctcagagatgt

SEQ ID NO: 38700 - DNA, 25 bp, Probe Sequence
actgttgtaactaggctcagagatg

SEQ ID NO: 38701 - DNA, 25 bp, Probe Sequence
acacatacaggatttgaactcagat

SEQ ID NO: 38702 - DNA, 25 bp, Probe Sequence
atctgtctgataggaatgtgaaagc

SEQ ID NO: 38703 - DNA, 25 bp, Probe Sequence
tgctacacatacaggatttgaactc

SEQ ID NO: 38704 - DNA, 25 bp, Probe Sequence
accctattctctctttacgcttagt

SEQ ID NO: 38705 - DNA, 25 bp, Probe Sequence
taccctattctctctttacgcttag

SEQ ID NO: 38706 - DNA, 25 bp, Probe Sequence
ctaccctattctctctttacgctta

SEQ ID NO: 38707 - DNA, 25 bp, Probe Sequence
actaccctattctctctttacgctt

SEQ ID NO: 38708 - DNA, 25 bp, Probe Sequence
ctagtgacaaggactcagacttacg

SEQ ID NO: 38709 - DNA, 25 bp, Probe Sequence
ctaaagccgttccaggattatcaaa

SEQ ID NO: 38710 - DNA, 25 bp, Probe Sequence
gactctcaattacatccaaacagtg

SEQ ID NO: 38711 - DNA, 25 bp, Probe Sequence
actaaagccgttccaggattatcaa

SEQ ID NO: 38712 - DNA, 25 bp, Probe Sequence
aactaaagccgttccaggattatca

SEQ ID NO: 38713 - DNA, 25 bp, Probe Sequence
ggactctcaattacatccaaacagt

SEQ ID NO: 38714 - DNA, 25 bp, Probe Sequence
actctcaattacatccaaacagtgg

SEQ ID NO: 38715 - DNA, 25 bp, Probe Sequence
actagtgacaaggactcagacttac

SEQ ID NO: 38716 - DNA, 25 bp, Probe Sequence
gactcagacttacgcctagtggtag

SEQ ID NO: 38717 - DNA, 25 bp, Probe Sequence
tagtgacaaggactcagacttacgc

SEQ ID NO: 38718 - DNA, 25 bp, Probe Sequence
ctagtggtaggagacagcttgaaag

SEQ ID NO: 38719 - DNA, 25 bp, Probe Sequence
taaagccgttccaggattatcaaaa

SEQ ID NO: 38720 - DNA, 25 bp, Probe Sequence
gatttctccacaatgcaagctacag

SEQ ID NO: 38721 - DNA, 25 bp, Probe Sequence
gacaaggactcagacttacgcctag

SEQ ID NO: 38722 - DNA, 25 bp, Probe Sequence
ctccaccttccttcctctactctcc

SEQ ID NO: 38723 - DNA, 25 bp, Probe Sequence
cctccaccttccttcctctactctc

SEQ ID NO: 38724 - DNA, 25 bp, Probe Sequence
atttctccacaatgcaagctacaga

SEQ ID NO: 38725 - DNA, 25 bp, Probe Sequence
ctgtatcctgaggttttctatggca

SEQ ID NO: 38726 - DNA, 25 bp, Probe Sequence
caaggactcagacttacgcctagtg

SEQ ID NO: 38727 - DNA, 25 bp, Probe Sequence
ttacagatcacagcccctataccta

SEQ ID NO: 38728 - DNA, 25 bp, Probe Sequence
tgacaaggactcagacttacgccta

SEQ ID NO: 38729 - DNA, 25 bp, Probe Sequence
ggactcagacttacgcctagtggta

SEQ ID NO: 38730 - DNA, 25 bp, Probe Sequence
acaaggactcagacttacgcctagt

SEQ ID NO: 38731 - DNA, 25 bp, Probe Sequence
gaactaaagccgttccaggattatc

SEQ ID NO: 38732 - DNA, 25 bp, Probe Sequence
ctattatccagcaggacattcagag

SEQ ID NO: 38733 - DNA, 25 bp, Probe Sequence
cctattatccagcaggacattcaga

SEQ ID NO: 38734 - DNA, 25 bp, Probe Sequence
tattatccagcaggacattcagagc

SEQ ID NO: 38735 - DNA, 25 bp, Probe Sequence
ctccaagagcagtttaatagcattg

SEQ ID NO: 38736 - DNA, 25 bp, Probe Sequence
tctccaagagcagtttaatagcatt

SEQ ID NO: 38737 - DNA, 25 bp, Probe Sequence
ttctccaagagcagtttaatagcat

SEQ ID NO: 38738 - DNA, 25 bp, Probe Sequence
tttctccaagagcagtttaatagca

SEQ ID NO: 38739 - DNA, 25 bp, Probe Sequence
atttctccaagagcagtttaatagc

SEQ ID NO: 38740 - DNA, 25 bp, Probe Sequence
cttctctatggtggacgtagtgatg

SEQ ID NO: 38741 - DNA, 25 bp, Probe Sequence
gaaagtattgctgccttcatacaac

SEQ ID NO: 38742 - DNA, 25 bp, Probe Sequence
cagaacttctctatggtggacgtag

SEQ ID NO: 38743 - DNA, 25 bp, Probe Sequence
ggaatttctccaagagcagtttaat

SEQ ID NO: 38744 - DNA, 25 bp, Probe Sequence
gaacttctctatggtggacgtagtg

SEQ ID NO: 38745 - DNA, 25 bp, Probe Sequence
agaacttctctatggtggacgtagt

SEQ ID NO: 38746 - DNA, 25 bp, Probe Sequence
acttctctatggtggacgtagtgat

SEQ ID NO: 38747 - DNA, 25 bp, Probe Sequence
aacttctctatggtggacgtagtga

SEQ ID NO: 38748 - DNA, 25 bp, Probe Sequence
tagaagagtatgtgcgggagagttt

SEQ ID NO: 38749 - DNA, 25 bp, Probe Sequence
aaagtattgctgccttcatacaacg

SEQ ID NO: 38750 - DNA, 25 bp, Probe Sequence
gaatttctccaagagcagtttaata

SEQ ID NO: 38751 - DNA, 25 bp, Probe Sequence
ccctcttccttcacagtatttaaga

SEQ ID NO: 38752 - DNA, 25 bp, Probe Sequence
aatttctccaagagcagtttaatag

SEQ ID NO: 38753 - DNA, 25 bp, Probe Sequence
ccctattatccagcaggacattcag

SEQ ID NO: 38754 - DNA, 25 bp, Probe Sequence
cccctcttccttcacagtatttaag

SEQ ID NO: 38755 - DNA, 25 bp, Probe Sequence
ctagaagagtatgtgcgggagagtt

SEQ ID NO: 38756 - DNA, 25 bp, Probe Sequence
tagacatctcctcctacattgaaca

SEQ ID NO: 38757 - DNA, 25 bp, Probe Sequence
atagacatctcctcctacattgaac

SEQ ID NO: 38758 - DNA, 25 bp, Probe Sequence
gatagacatctcctcctacattgaa

SEQ ID NO: 38759 - DNA, 25 bp, Probe Sequence
tacattgaacagacacggtagaaga

SEQ ID NO: 38760 - DNA, 25 bp, Probe Sequence
agacatctcctcctacattgaacag

SEQ ID NO: 38761 - DNA, 25 bp, Probe Sequence
gacatctcctcctacattgaacaga

SEQ ID NO: 38762 - DNA, 25 bp, Probe Sequence
aattatgacatgcctgaggattctg

SEQ ID NO: 38763 - DNA, 25 bp, Probe Sequence
taattatgacatgcctgaggattct

SEQ ID NO: 38764 - DNA, 25 bp, Probe Sequence
atctcctcctacattgaacagacac

SEQ ID NO: 38765 - DNA, 25 bp, Probe Sequence
catctcctcctacattgaacagaca

SEQ ID NO: 38766 - DNA, 25 bp, Probe Sequence
acatctcctcctacattgaacagac

SEQ ID NO: 38767 - DNA, 25 bp, Probe Sequence
ttaattatgacatgcctgaggattc

SEQ ID NO: 38768 - DNA, 25 bp, Probe Sequence
attgaacagacacggtagaagactc

SEQ ID NO: 38769 - DNA, 25 bp, Probe Sequence
attatgacatgcctgaggattctga

SEQ ID NO: 38770 - DNA, 25 bp, Probe Sequence
gaatgatgccaagatcctcaatgat

SEQ ID NO: 38771 - DNA, 25 bp, Probe Sequence
tattagtgagctgcctgatgagata

SEQ ID NO: 38772 - DNA, 25 bp, Probe Sequence
cattgaacagacacggtagaagact

SEQ ID NO: 38773 - DNA, 25 bp, Probe Sequence
aatgatgccaagatcctcaatgatg

SEQ ID NO: 38774 - DNA, 25 bp, Probe Sequence
atattagtgagctgcctgatgagat

SEQ ID NO: 38775 - DNA, 25 bp, Probe Sequence
acattgaacagacacggtagaagac

SEQ ID NO: 38776 - DNA, 25 bp, Probe Sequence
aatattagtgagctgcctgatgaga

SEQ ID NO: 38777 - DNA, 25 bp, Probe Sequence
caatattagtgagctgcctgatgag

SEQ ID NO: 38778 - DNA, 25 bp, Probe Sequence
gagaatgatgccaagatcctcaatg

SEQ ID NO: 38779 - DNA, 25 bp, Probe Sequence
agaatgatgccaagatcctcaatga

SEQ ID NO: 38780 - DNA, 25 bp, Probe Sequence
ttcttcaattagtctcagttctctt

SEQ ID NO: 38781 - DNA, 25 bp, Probe Sequence
atcaggaaaccagaaataccacatt

SEQ ID NO: 38782 - DNA, 25 bp, Probe Sequence
ggtttcttcaattagtctcagttct

SEQ ID NO: 38783 - DNA, 25 bp, Probe Sequence
aggtttcttcaattagtctcagttc

SEQ ID NO: 38784 - DNA, 25 bp, Probe Sequence
tcttcaattagtctcagttctctta

SEQ ID NO: 38785 - DNA, 25 bp, Probe Sequence
gatcaggaaaccagaaataccacat

SEQ ID NO: 38786 - DNA, 25 bp, Probe Sequence
cagtgaggtttcttcaattagtctc

SEQ ID NO: 38787 - DNA, 25 bp, Probe Sequence
aatggcagtgaggtttcttcaatta

SEQ ID NO: 38788 - DNA, 25 bp, Probe Sequence
gcagtgaggtttcttcaattagtct

SEQ ID NO: 38789 - DNA, 25 bp, Probe Sequence
gaaaggttggttcttgactctgaag

SEQ ID NO: 38790 - DNA, 25 bp, Probe Sequence
tcaggaaaccagaaataccacattt

SEQ ID NO: 38791 - DNA, 25 bp, Probe Sequence
atggcagtgaggtttcttcaattag

SEQ ID NO: 38792 - DNA, 25 bp, Probe Sequence
caggaaaccagaaataccacattta

SEQ ID NO: 38793 - DNA, 25 bp, Probe Sequence
gaggtttcttcaattagtctcagtt

SEQ ID NO: 38794 - DNA, 25 bp, Probe Sequence
atgaaaggttggttcttgactctga

SEQ ID NO: 38795 - DNA, 25 bp, Probe Sequence
ggcagtgaggtttcttcaattagtc

SEQ ID NO: 38796 - DNA, 25 bp, Probe Sequence
tgaaaggttggttcttgactctgaa

SEQ ID NO: 38797 - DNA, 25 bp, Probe Sequence
gtttcttcaattagtctcagttctc

SEQ ID NO: 38798 - DNA, 25 bp, Probe Sequence
ggaaaccagaaataccacatttatg

SEQ ID NO: 38799 - DNA, 25 bp, Probe Sequence
aggaaaccagaaataccacatttat

SEQ ID NO: 38800 - DNA, 25 bp, Probe Sequence
tttcttcaattagtctcagttctct

SEQ ID NO: 38801 - DNA, 25 bp, Probe Sequence
gaatggcagtgaggtttcttcaatt

SEQ ID NO: 38802 - DNA, 25 bp, Probe Sequence
cttcaattagtctcagttctcttaa

SEQ ID NO: 38803 - DNA, 25 bp, Probe Sequence
gggaaataaagtgtgttggcgttag

SEQ ID NO: 38804 - DNA, 25 bp, Probe Sequence
ttcttcaattagtctcagttctctt

SEQ ID NO: 38805 - DNA, 25 bp, Probe Sequence
atcaggaaaccagaaataccacatt

SEQ ID NO: 38806 - DNA, 25 bp, Probe Sequence
ggtttcttcaattagtctcagttct

SEQ ID NO: 38807 - DNA, 25 bp, Probe Sequence
aggtttcttcaattagtctcagttc

SEQ ID NO: 38808 - DNA, 25 bp, Probe Sequence
tcttcaattagtctcagttctctta

SEQ ID NO: 38809 - DNA, 25 bp, Probe Sequence
gatcaggaaaccagaaataccacat

SEQ ID NO: 38810 - DNA, 25 bp, Probe Sequence
cagtgaggtttcttcaattagtctc

SEQ ID NO: 38811 - DNA, 25 bp, Probe Sequence
aatggcagtgaggtttcttcaatta

SEQ ID NO: 38812 - DNA, 25 bp, Probe Sequence
gcagtgaggtttcttcaattagtct

SEQ ID NO: 38813 - DNA, 25 bp, Probe Sequence
gaaaggttggttcttgactctgaag

SEQ ID NO: 38814 - DNA, 25 bp, Probe Sequence
tcaggaaaccagaaataccacattt

SEQ ID NO: 38815 - DNA, 25 bp, Probe Sequence
atggcagtgaggtttcttcaattag

SEQ ID NO: 38816 - DNA, 25 bp, Probe Sequence
caggaaaccagaaataccacattta

SEQ ID NO: 38817 - DNA, 25 bp, Probe Sequence
gaggtttcttcaattagtctcagtt

SEQ ID NO: 38818 - DNA, 25 bp, Probe Sequence
atgaaaggttggttcttgactctga

SEQ ID NO: 38819 - DNA, 25 bp, Probe Sequence
ggcagtgaggtttcttcaattagtc

SEQ ID NO: 38820 - DNA, 25 bp, Probe Sequence
tgaaaggttggttcttgactctgaa

SEQ ID NO: 38821 - DNA, 25 bp, Probe Sequence
gtttcttcaattagtctcagttctc

SEQ ID NO: 38822 - DNA, 25 bp, Probe Sequence
ggaaaccagaaataccacatttatg

SEQ ID NO: 38823 - DNA, 25 bp, Probe Sequence
aggaaaccagaaataccacatttat

SEQ ID NO: 38824 - DNA, 25 bp, Probe Sequence
tttcttcaattagtctcagttctct

SEQ ID NO: 38825 - DNA, 25 bp, Probe Sequence
gaatggcagtgaggtttcttcaatt

SEQ ID NO: 38826 - DNA, 25 bp, Probe Sequence
cttcaattagtctcagttctcttaa

SEQ ID NO: 38827 - DNA, 25 bp, Probe Sequence
gggaaataaagtgtgttggcgttag

SEQ ID NO: 38828 - DNA, 25 bp, Probe Sequence
taccttctgctgtgtgtgtgtatat

SEQ ID NO: 38829 - DNA, 25 bp, Probe Sequence
ccttctgctgtgtgtgtgtatatat

SEQ ID NO: 38830 - DNA, 25 bp, Probe Sequence
gctctgagttcatggatgttaattg

SEQ ID NO: 38831 - DNA, 25 bp, Probe Sequence
accttctgctgtgtgtgtgtatata

SEQ ID NO: 38832 - DNA, 25 bp, Probe Sequence
gagttcatggatgttaattgagagc

SEQ ID NO: 38833 - DNA, 25 bp, Probe Sequence
agctctgagttcatggatgttaatt

SEQ ID NO: 38834 - DNA, 25 bp, Probe Sequence
agttcatggatgttaattgagagcc

SEQ ID NO: 38835 - DNA, 25 bp, Probe Sequence
tgagttcatggatgttaattgagag

SEQ ID NO: 38836 - DNA, 25 bp, Probe Sequence
ctgagttcatggatgttaattgaga

SEQ ID NO: 38837 - DNA, 25 bp, Probe Sequence
tctgagttcatggatgttaattgag

SEQ ID NO: 38838 - DNA, 25 bp, Probe Sequence
ctctgagttcatggatgttaattga

SEQ ID NO: 38839 - DNA, 25 bp, Probe Sequence
cagctctgagttcatggatgttaat

SEQ ID NO: 38840 - DNA, 25 bp, Probe Sequence
gtaccttctgctgtgtgtgtgtata

SEQ ID NO: 38841 - DNA, 25 bp, Probe Sequence
tctagtctttatttatggtcgtgcc

SEQ ID NO: 38842 - DNA, 25 bp, Probe Sequence
caatgagaatcagatcgagtccaag

SEQ ID NO: 38843 - DNA, 25 bp, Probe Sequence
tagtctttatttatggtcgtgccct

SEQ ID NO: 38844 - DNA, 25 bp, Probe Sequence
tcaatgagaatcagatcgagtccaa

SEQ ID NO: 38845 - DNA, 25 bp, Probe Sequence
ttctagtctttatttatggtcgtgc

SEQ ID NO: 38846 - DNA, 25 bp, Probe Sequence
cccttctagtctttatttatggtcg

SEQ ID NO: 38847 - DNA, 25 bp, Probe Sequence
ctgtcaatgagaatcagatcgagtc

SEQ ID NO: 38848 - DNA, 25 bp, Probe Sequence
ctagtctttatttatggtcgtgccc

SEQ ID NO: 38849 - DNA, 25 bp, Probe Sequence
cttctgctgtgtgtgtgtatatata

SEQ ID NO: 38850 - DNA, 25 bp, Probe Sequence
gtctttatttatggtcgtgcccttc

SEQ ID NO: 38851 - DNA, 25 bp, Probe Sequence
ccgcttctcttattcgtgttaggtg

SEQ ID NO: 38852 - DNA, 25 bp, Probe Sequence
ttatgaaggcagtgaagaagtatcc

SEQ ID NO: 38853 - DNA, 25 bp, Probe Sequence
aattaactggttccatcaagactgt

SEQ ID NO: 38854 - DNA, 25 bp, Probe Sequence
attatgaaggcagtgaagaagtatc

SEQ ID NO: 38855 - DNA, 25 bp, Probe Sequence
attaactggttccatcaagactgtg

SEQ ID NO: 38856 - DNA, 25 bp, Probe Sequence
aattatgaaggcagtgaagaagtat

SEQ ID NO: 38857 - DNA, 25 bp, Probe Sequence
gcacataattaactggttccatcaa

SEQ ID NO: 38858 - DNA, 25 bp, Probe Sequence
ggatctcagtatcaacagaataacc

SEQ ID NO: 38859 - DNA, 25 bp, Probe Sequence
taattaactggttccatcaagactg

SEQ ID NO: 38860 - DNA, 25 bp, Probe Sequence
cagtatcaacagaataaccatgtgc

SEQ ID NO: 38861 - DNA, 25 bp, Probe Sequence
cctggatctcagtatcaacagaata

SEQ ID NO: 38862 - DNA, 25 bp, Probe Sequence
cattcacctggatctcagtatcaac

SEQ ID NO: 38863 - DNA, 25 bp, Probe Sequence
acctggatctcagtatcaacagaat

SEQ ID NO: 38864 - DNA, 25 bp, Probe Sequence
tctcagtatcaacagaataaccatg

SEQ ID NO: 38865 - DNA, 25 bp, Probe Sequence
gatctcagtatcaacagaataacca

SEQ ID NO: 38866 - DNA, 25 bp, Probe Sequence
tggatctcagtatcaacagaataac

SEQ ID NO: 38867 - DNA, 25 bp, Probe Sequence
acataattaactggttccatcaaga

SEQ ID NO: 38868 - DNA, 25 bp, Probe Sequence
cacataattaactggttccatcaag

SEQ ID NO: 38869 - DNA, 25 bp, Probe Sequence
tcagtatcaacagaataaccatgtg

SEQ ID NO: 38870 - DNA, 25 bp, Probe Sequence
attcacctggatctcagtatcaaca

SEQ ID NO: 38871 - DNA, 25 bp, Probe Sequence
atctcagtatcaacagaataaccat

SEQ ID NO: 38872 - DNA, 25 bp, Probe Sequence
cataattaactggttccatcaagac

SEQ ID NO: 38873 - DNA, 25 bp, Probe Sequence
ctaatgtgtaaatggcaaaggtgta

SEQ ID NO: 38874 - DNA, 25 bp, Probe Sequence
tattcctaatcaacatggagtggag

SEQ ID NO: 38875 - DNA, 25 bp, Probe Sequence
ctattcctaatcaacatggagtgga

SEQ ID NO: 38876 - DNA, 25 bp, Probe Sequence
ggcaatcctcagtatagttacaaca

SEQ ID NO: 38877 - DNA, 25 bp, Probe Sequence
tggcaatcctcagtatagttacaac

SEQ ID NO: 38878 - DNA, 25 bp, Probe Sequence
attatatcctcattcacctgcctct

SEQ ID NO: 38879 - DNA, 25 bp, Probe Sequence
cattatatcctcattcacctgcctc

SEQ ID NO: 38880 - DNA, 25 bp, Probe Sequence
ttatgaaggcaatgaagaagtatcc

SEQ ID NO: 38881 - DNA, 25 bp, Probe Sequence
tgcctctcagtatcaacagaataat

SEQ ID NO: 38882 - DNA, 25 bp, Probe Sequence
gcaatcctcagtatagttacaacaa

SEQ ID NO: 38883 - DNA, 25 bp, Probe Sequence
gcctctcagtatcaacagaataatc

SEQ ID NO: 38884 - DNA, 25 bp, Probe Sequence
ttatatcctcattcacctgcctctc

SEQ ID NO: 38885 - DNA, 25 bp, Probe Sequence
atgaagaagtatcctcacctcagat

SEQ ID NO: 38886 - DNA, 25 bp, Probe Sequence
aagaagtatcctcacctcagatgaa

SEQ ID NO: 38887 - DNA, 25 bp, Probe Sequence
aatgaagaagtatcctcacctcaga

SEQ ID NO: 38888 - DNA, 25 bp, Probe Sequence
caatgaagaagtatcctcacctcag

SEQ ID NO: 38889 - DNA, 25 bp, Probe Sequence
ctggatatataaggctggtggtaac

SEQ ID NO: 38890 - DNA, 25 bp, Probe Sequence
tggatatataaggctggtggtaact

SEQ ID NO: 38891 - DNA, 25 bp, Probe Sequence
agaagtatcctcacctcagatgaag

SEQ ID NO: 38892 - DNA, 25 bp, Probe Sequence
ggacagaattacatgaatgacagtg

SEQ ID NO: 38893 - DNA, 25 bp, Probe Sequence
aggacagaattacatgaatgacagt

SEQ ID NO: 38894 - DNA, 25 bp, Probe Sequence
agaggacagaattacatgaatgaca

SEQ ID NO: 38895 - DNA, 25 bp, Probe Sequence
ccaagaggacagaattacatgaatg

SEQ ID NO: 38896 - DNA, 25 bp, Probe Sequence
gaagaagtatcctcacctcagatga

SEQ ID NO: 38897 - DNA, 25 bp, Probe Sequence
gacagaattacatgaatgacagtgc

SEQ ID NO: 38898 - DNA, 25 bp, Probe Sequence
gaggacagaattacatgaatgacag

SEQ ID NO: 38899 - DNA, 25 bp, Probe Sequence
ggatatataaggctggtggtaactt

SEQ ID NO: 38900 - DNA, 25 bp, Probe Sequence
ggtcttctctcttcattcctcttag

SEQ ID NO: 38901 - DNA, 25 bp, Probe Sequence
gttgacataagttcctacctgacta

SEQ ID NO: 38902 - DNA, 25 bp, Probe Sequence
atgttgacataagttcctacctgac

SEQ ID NO: 38903 - DNA, 25 bp, Probe Sequence
tgttgacataagttcctacctgact

SEQ ID NO: 38904 - DNA, 25 bp, Probe Sequence
ttgacataagttcctacctgactat

SEQ ID NO: 38905 - DNA, 25 bp, Probe Sequence
catgttgacataagttcctacctga

SEQ ID NO: 38906 - DNA, 25 bp, Probe Sequence
gtcttctctcttcattcctcttagg

SEQ ID NO: 38907 - DNA, 25 bp, Probe Sequence
aggtcttctctcttcattcctctta

SEQ ID NO: 38908 - DNA, 25 bp, Probe Sequence
cataagttcctacctgactatgctt

SEQ ID NO: 38909 - DNA, 25 bp, Probe Sequence
gacataagttcctacctgactatgc

SEQ ID NO: 38910 - DNA, 25 bp, Probe Sequence
ccatgttgacataagttcctacctg

SEQ ID NO: 38911 - DNA, 25 bp, Probe Sequence
acataagttcctacctgactatgct

SEQ ID NO: 38912 - DNA, 25 bp, Probe Sequence
tgacataagttcctacctgactatg

SEQ ID NO: 38913 - DNA, 25 bp, Probe Sequence
caccatgttgacataagttcctacc

SEQ ID NO: 38914 - DNA, 25 bp, Probe Sequence
ccaccatgttgacataagttcctac

SEQ ID NO: 38915 - DNA, 25 bp, Probe Sequence
accatgttgacataagttcctacct

SEQ ID NO: 38916 - DNA, 25 bp, Probe Sequence
caggtcttctctcttcattcctctt

SEQ ID NO: 38917 - DNA, 25 bp, Probe Sequence
ctacctgactatgctttctctccta

SEQ ID NO: 38918 - DNA, 25 bp, Probe Sequence
ttcctacctgactatgctttctctc

SEQ ID NO: 38919 - DNA, 25 bp, Probe Sequence
tacctgactatgctttctctcctag

SEQ ID NO: 38920 - DNA, 25 bp, Probe Sequence
gttcctacctgactatgctttctct

SEQ ID NO: 38921 - DNA, 25 bp, Probe Sequence
taagttcctacctgactatgctttc

SEQ ID NO: 38922 - DNA, 25 bp, Probe Sequence
ataagttcctacctgactatgcttt

SEQ ID NO: 38923 - DNA, 25 bp, Probe Sequence
aagttcctacctgactatgctttct

SEQ ID NO: 38924 - DNA, 25 bp, Probe Sequence
gtgtgggcttgcttagattactata

SEQ ID NO: 38925 - DNA, 25 bp, Probe Sequence
tgtgggcttgcttagattactatat

SEQ ID NO: 38926 - DNA, 25 bp, Probe Sequence
aaatatgtatgtgtgggcttgctta

SEQ ID NO: 38927 - DNA, 25 bp, Probe Sequence
atactattcaggatggtgggaaatc

SEQ ID NO: 38928 - DNA, 25 bp, Probe Sequence
gatactattcaggatggtgggaaat

SEQ ID NO: 38929 - DNA, 25 bp, Probe Sequence
aatatgtatgtgtgggcttgcttag

SEQ ID NO: 38930 - DNA, 25 bp, Probe Sequence
gcagtgatactattcaggatggtgg

SEQ ID NO: 38931 - DNA, 25 bp, Probe Sequence
gtgggcttgcttagattactatatt

SEQ ID NO: 38932 - DNA, 25 bp, Probe Sequence
ttcttccactacattgttgaaatca

SEQ ID NO: 38933 - DNA, 25 bp, Probe Sequence
tgtgtgggcttgcttagattactat

SEQ ID NO: 38934 - DNA, 25 bp, Probe Sequence
atgtgtgggcttgcttagattacta

SEQ ID NO: 38935 - DNA, 25 bp, Probe Sequence
tatgtgtgggcttgcttagattact

SEQ ID NO: 38936 - DNA, 25 bp, Probe Sequence
gtatgtgtgggcttgcttagattac

SEQ ID NO: 38937 - DNA, 25 bp, Probe Sequence
tgatactattcaggatggtgggaaa

SEQ ID NO: 38938 - DNA, 25 bp, Probe Sequence
tatgtatgtgtgggcttgcttagat

SEQ ID NO: 38939 - DNA, 25 bp, Probe Sequence
atatgtatgtgtgggcttgcttaga

SEQ ID NO: 38940 - DNA, 25 bp, Probe Sequence
tgtatgtgtgggcttgcttagatta

SEQ ID NO: 38941 - DNA, 25 bp, Probe Sequence
gtgatactattcaggatggtgggaa

SEQ ID NO: 38942 - DNA, 25 bp, Probe Sequence
tgggcttgcttagattactatattt

SEQ ID NO: 38943 - DNA, 25 bp, Probe Sequence
tcttccactacattgttgaaatcaa

SEQ ID NO: 38944 - DNA, 25 bp, Probe Sequence
tgcagtgatactattcaggatggtg

SEQ ID NO: 38945 - DNA, 25 bp, Probe Sequence
atgtatgtgtgggcttgcttagatt

SEQ ID NO: 38946 - DNA, 25 bp, Probe Sequence
gggcttgcttagattactatatttc

SEQ ID NO: 38947 - DNA, 25 bp, Probe Sequence
agtgatactattcaggatggtggga

SEQ ID NO: 38948 - DNA, 25 bp, Probe Sequence
atggaaggtcctgacagattattac

SEQ ID NO: 38949 - DNA, 25 bp, Probe Sequence
ggaaggtcctgacagattattacag

SEQ ID NO: 38950 - DNA, 25 bp, Probe Sequence
tggaaggtcctgacagattattaca

SEQ ID NO: 38951 - DNA, 25 bp, Probe Sequence
catggaaggtcctgacagattatta

SEQ ID NO: 38952 - DNA, 25 bp, Probe Sequence
ctttctgaagtgctctttgattacc

SEQ ID NO: 38953 - DNA, 25 bp, Probe Sequence
gtttctttctgaagtgctctttgat

SEQ ID NO: 38954 - DNA, 25 bp, Probe Sequence
tctgaagtgctctttgattaccttt

SEQ ID NO: 38955 - DNA, 25 bp, Probe Sequence
ttctgaagtgctctttgattacctt

SEQ ID NO: 38956 - DNA, 25 bp, Probe Sequence
tttctgaagtgctctttgattacct

SEQ ID NO: 38957 - DNA, 25 bp, Probe Sequence
tctttctgaagtgctctttgattac

SEQ ID NO: 38958 - DNA, 25 bp, Probe Sequence
tttctttctgaagtgctctttgatt

SEQ ID NO: 38959 - DNA, 25 bp, Probe Sequence
agtttctttctgaagtgctctttga

SEQ ID NO: 38960 - DNA, 25 bp, Probe Sequence
ttctttctgaagtgctctttgatta

SEQ ID NO: 38961 - DNA, 25 bp, Probe Sequence
ttgacttcatctcaggaactcgaat

SEQ ID NO: 38962 - DNA, 25 bp, Probe Sequence
gagtttctttctgaagtgctctttg

SEQ ID NO: 38963 - DNA, 25 bp, Probe Sequence
tgaaaccaagaaggatctgtatgaa

SEQ ID NO: 38964 - DNA, 25 bp, Probe Sequence
ctgaaaccaagaaggatctgtatga

SEQ ID NO: 38965 - DNA, 25 bp, Probe Sequence
gaaaccaagaaggatctgtatgaac

SEQ ID NO: 38966 - DNA, 25 bp, Probe Sequence
aaaccaagaaggatctgtatgaacc

SEQ ID NO: 38967 - DNA, 25 bp, Probe Sequence
atctttccgtctcccatgttatatg

SEQ ID NO: 38968 - DNA, 25 bp, Probe Sequence
catctttccgtctcccatgttatat

SEQ ID NO: 38969 - DNA, 25 bp, Probe Sequence
cttctatgatccagcaaggcacaat

SEQ ID NO: 38970 - DNA, 25 bp, Probe Sequence
tgacttcatctcaggaactcgaatg

SEQ ID NO: 38971 - DNA, 25 bp, Probe Sequence
atgctttgtattaaattgcttctca

SEQ ID NO: 38972 - DNA, 25 bp, Probe Sequence
gacaaagcgtattaaacagaacact

SEQ ID NO: 38973 - DNA, 25 bp, Probe Sequence
agacaaagcgtattaaacagaacac

SEQ ID NO: 38974 - DNA, 25 bp, Probe Sequence
cagacaaagcgtattaaacagaaca

SEQ ID NO: 38975 - DNA, 25 bp, Probe Sequence
taccagacaaagcgtattaaacaga

SEQ ID NO: 38976 - DNA, 25 bp, Probe Sequence
ctaccagacaaagcgtattaaacag

SEQ ID NO: 38977 - DNA, 25 bp, Probe Sequence
cactaccagacaaagcgtattaaac

SEQ ID NO: 38978 - DNA, 25 bp, Probe Sequence
actaccagacaaagcgtattaaaca

SEQ ID NO: 38979 - DNA, 25 bp, Probe Sequence
ccagacaaagcgtattaaacagaac

SEQ ID NO: 38980 - DNA, 25 bp, Probe Sequence
acaaagcgtattaaacagaacactt

SEQ ID NO: 38981 - DNA, 25 bp, Probe Sequence
accagacaaagcgtattaaacagaa

SEQ ID NO: 38982 - DNA, 25 bp, Probe Sequence
aaggatggatgaatggagaggacaa

SEQ ID NO: 38983 - DNA, 25 bp, Probe Sequence
gcactaccagacaaagcgtattaaa

SEQ ID NO: 38984 - DNA, 25 bp, Probe Sequence
aagcactaccagacaaagcgtatta

SEQ ID NO: 38985 - DNA, 25 bp, Probe Sequence
agcactaccagacaaagcgtattaa

SEQ ID NO: 38986 - DNA, 25 bp, Probe Sequence
caaggatggatgaatggagaggaca

SEQ ID NO: 38987 - DNA, 25 bp, Probe Sequence
ccatccaaatgctgttgaaccatag

SEQ ID NO: 38988 - DNA, 25 bp, Probe Sequence
gatggatgaatggagaggacaaagg

SEQ ID NO: 38989 - DNA, 25 bp, Probe Sequence
ggatggatgaatggagaggacaaag

SEQ ID NO: 38990 - DNA, 25 bp, Probe Sequence
ggctacaggaactgaatgtggattc

SEQ ID NO: 38991 - DNA, 25 bp, Probe Sequence
caaagcgtattaaacagaacacttt

SEQ ID NO: 38992 - DNA, 25 bp, Probe Sequence
accatccaaatgctgttgaaccata

SEQ ID NO: 38993 - DNA, 25 bp, Probe Sequence
aggatggatgaatggagaggacaaa

SEQ ID NO: 38994 - DNA, 25 bp, Probe Sequence
agcgtattaaacagaacacttttga

SEQ ID NO: 38995 - DNA, 25 bp, Probe Sequence
tggctacaggaactgaatgtggatt

SEQ ID NO: 38996 - DNA, 25 bp, Probe Sequence
gttcctgtcatctattcgctactaa

SEQ ID NO: 38997 - DNA, 25 bp, Probe Sequence
cctatggatagagtcttgacacatt

SEQ ID NO: 38998 - DNA, 25 bp, Probe Sequence
ctagttcctgtcatctattcgctac

SEQ ID NO: 38999 - DNA, 25 bp, Probe Sequence
ggatagagtcttgacacattctgaa

SEQ ID NO: 39000 - DNA, 25 bp, Probe Sequence
atggatagagtcttgacacattctg

SEQ ID NO: 39001 - DNA, 25 bp, Probe Sequence
atgagagtaattgcttgacaacaac

SEQ ID NO: 39002 - DNA, 25 bp, Probe Sequence
agtaattgcttgacaacaacctatg

SEQ ID NO: 39003 - DNA, 25 bp, Probe Sequence
gagtaattgcttgacaacaacctat

SEQ ID NO: 39004 - DNA, 25 bp, Probe Sequence
agagtaattgcttgacaacaaccta

SEQ ID NO: 39005 - DNA, 25 bp, Probe Sequence
tatgctagttcctgtcatctattcg

SEQ ID NO: 39006 - DNA, 25 bp, Probe Sequence
acctatgctagttcctgtcatctat

SEQ ID NO: 39007 - DNA, 25 bp, Probe Sequence
aatgagagtaattgcttgacaacaa

SEQ ID NO: 39008 - DNA, 25 bp, Probe Sequence
gatagagtcttgacacattctgaac

SEQ ID NO: 39009 - DNA, 25 bp, Probe Sequence
agttcctgtcatctattcgctacta

SEQ ID NO: 39010 - DNA, 25 bp, Probe Sequence
tagttcctgtcatctattcgctact

SEQ ID NO: 39011 - DNA, 25 bp, Probe Sequence
cctatgctagttcctgtcatctatt

SEQ ID NO: 39012 - DNA, 25 bp, Probe Sequence
tggatagagtcttgacacattctga

SEQ ID NO: 39013 - DNA, 25 bp, Probe Sequence
tagagtcttgacacattctgaactt

SEQ ID NO: 39014 - DNA, 25 bp, Probe Sequence
atagagtcttgacacattctgaact

SEQ ID NO: 39015 - DNA, 25 bp, Probe Sequence
agagtcttgacacattctgaacttg

SEQ ID NO: 39016 - DNA, 25 bp, Probe Sequence
gtaattgcttgacaacaacctatgc

SEQ ID NO: 39017 - DNA, 25 bp, Probe Sequence
tatggatagagtcttgacacattct

SEQ ID NO: 39018 - DNA, 25 bp, Probe Sequence
ctatggatagagtcttgacacattc

SEQ ID NO: 39019 - DNA, 25 bp, Probe Sequence
gacaatcagacctatgctagttcct

SEQ ID NO: 39020 - DNA, 25 bp, Probe Sequence
gagaagtagatgtggtcaagtgttc

SEQ ID NO: 39021 - DNA, 25 bp, Probe Sequence
aagaatggaggtggagaagtagatg

SEQ ID NO: 39022 - DNA, 25 bp, Probe Sequence
gaagtagatgtggtcaagtgttctc

SEQ ID NO: 39023 - DNA, 25 bp, Probe Sequence
aagtagatgtggtcaagtgttctct

SEQ ID NO: 39024 - DNA, 25 bp, Probe Sequence
ttcaggaacatctaagaggacagtg

SEQ ID NO: 39025 - DNA, 25 bp, Probe Sequence
ggagaagtagatgtggtcaagtgtt

SEQ ID NO: 39026 - DNA, 25 bp, Probe Sequence
gaacatctaagaggacagtgcttct

SEQ ID NO: 39027 - DNA, 25 bp, Probe Sequence
gaatggaggtggagaagtagatgtg

SEQ ID NO: 39028 - DNA, 25 bp, Probe Sequence
agaatggaggtggagaagtagatgt

SEQ ID NO: 39029 - DNA, 25 bp, Probe Sequence
agtagatgtggtcaagtgttctcta

SEQ ID NO: 39030 - DNA, 25 bp, Probe Sequence
gtagatgtggtcaagtgttctctag

SEQ ID NO: 39031 - DNA, 25 bp, Probe Sequence
tagatgtggtcaagtgttctctagg

SEQ ID NO: 39032 - DNA, 25 bp, Probe Sequence
gtggagaagtagatgtggtcaagtg

SEQ ID NO: 39033 - DNA, 25 bp, Probe Sequence
gctgataaagatgacacacaacaaa

SEQ ID NO: 39034 - DNA, 25 bp, Probe Sequence
gagtcagattccaggtttatgtaga

SEQ ID NO: 39035 - DNA, 25 bp, Probe Sequence
gagttacaagaggctaccaaagaat

SEQ ID NO: 39036 - DNA, 25 bp, Probe Sequence
aaatatctcctgttcgtttcaagtg

SEQ ID NO: 39037 - DNA, 25 bp, Probe Sequence
caaatatctcctgttcgtttcaagt

SEQ ID NO: 39038 - DNA, 25 bp, Probe Sequence
gtcaaatatctcctgttcgtttcaa

SEQ ID NO: 39039 - DNA, 25 bp, Probe Sequence
tgtcaaatatctcctgttcgtttca

SEQ ID NO: 39040 - DNA, 25 bp, Probe Sequence
gttgtcaaatatctcctgttcgttt

SEQ ID NO: 39041 - DNA, 25 bp, Probe Sequence
gatgtggtcaagtgttctctaggtc

SEQ ID NO: 39042 - DNA, 25 bp, Probe Sequence
aatatctcctgttcgtttcaagtga

SEQ ID NO: 39043 - DNA, 25 bp, Probe Sequence
tcaaatatctcctgttcgtttcaag

SEQ ID NO: 39044 - DNA, 25 bp, Probe Sequence
cacatataagttgagaaggtgcctg

SEQ ID NO: 39045 - DNA, 25 bp, Probe Sequence
ggaagtatatttgagccagaggaat

SEQ ID NO: 39046 - DNA, 25 bp, Probe Sequence
aagtatatttgagccagaggaatgt

SEQ ID NO: 39047 - DNA, 25 bp, Probe Sequence
agtatatttgagccagaggaatgtg

SEQ ID NO: 39048 - DNA, 25 bp, Probe Sequence
gaagtatatttgagccagaggaatg

SEQ ID NO: 39049 - DNA, 25 bp, Probe Sequence
ctcttctgagctagttggttgaatt

SEQ ID NO: 39050 - DNA, 25 bp, Probe Sequence
acatataagttgagaaggtgcctgc

SEQ ID NO: 39051 - DNA, 25 bp, Probe Sequence
taagatacaaatggtggaggattgc

SEQ ID NO: 39052 - DNA, 25 bp, Probe Sequence
ccacatataagttgagaaggtgcct

SEQ ID NO: 39053 - DNA, 25 bp, Probe Sequence
ttaagatacaaatggtggaggattg

SEQ ID NO: 39054 - DNA, 25 bp, Probe Sequence
attatccattcccaagatgcctgat

SEQ ID NO: 39055 - DNA, 25 bp, Probe Sequence
catataagttgagaaggtgcctgcc

SEQ ID NO: 39056 - DNA, 25 bp, Probe Sequence
ttcccacatataagttgagaaggtg

SEQ ID NO: 39057 - DNA, 25 bp, Probe Sequence
cctcttctgagctagttggttgaat

SEQ ID NO: 39058 - DNA, 25 bp, Probe Sequence
gatcagaaaccaaccatgaatgaac

SEQ ID NO: 39059 - DNA, 25 bp, Probe Sequence
aagatacaaatggtggaggattgct

SEQ ID NO: 39060 - DNA, 25 bp, Probe Sequence
tcttctgagctagttggttgaattt

SEQ ID NO: 39061 - DNA, 25 bp, Probe Sequence
ataagttgagaaggtgcctgccata

SEQ ID NO: 39062 - DNA, 25 bp, Probe Sequence
tataagttgagaaggtgcctgccat

SEQ ID NO: 39063 - DNA, 25 bp, Probe Sequence
atataagttgagaaggtgcctgcca

SEQ ID NO: 39064 - DNA, 25 bp, Probe Sequence
cattatccattcccaagatgcctga

SEQ ID NO: 39065 - DNA, 25 bp, Probe Sequence
actacatgctggaagtatatttgag

SEQ ID NO: 39066 - DNA, 25 bp, Probe Sequence
atcagaaaccaaccatgaatgaacc

SEQ ID NO: 39067 - DNA, 25 bp, Probe Sequence
cttctggactgtttactacatgctg

SEQ ID NO: 39068 - DNA, 25 bp, Probe Sequence
ctccgattccacagtgtatgattat

SEQ ID NO: 39069 - DNA, 25 bp, Probe Sequence
tccgattccacagtgtatgattatg

SEQ ID NO: 39070 - DNA, 25 bp, Probe Sequence
cgattccacagtgtatgattatgct

SEQ ID NO: 39071 - DNA, 25 bp, Probe Sequence
ccgattccacagtgtatgattatgc

SEQ ID NO: 39072 - DNA, 25 bp, Probe Sequence
gattccacagtgtatgattatgctg

SEQ ID NO: 39073 - DNA, 25 bp, Probe Sequence
cctccgattccacagtgtatgatta

SEQ ID NO: 39074 - DNA, 25 bp, Probe Sequence
ccacagaagcaccacctatcatatt

SEQ ID NO: 39075 - DNA, 25 bp, Probe Sequence
attccacagtgtatgattatgctgg

SEQ ID NO: 39076 - DNA, 25 bp, Probe Sequence
tttgcctcatctcctatctttagtg

SEQ ID NO: 39077 - DNA, 25 bp, Probe Sequence
ggttatttgcctcatctcctatctt

SEQ ID NO: 39078 - DNA, 25 bp, Probe Sequence
ttaatgtagcctgcctctatttgtt

SEQ ID NO: 39079 - DNA, 25 bp, Probe Sequence
atttgcctcatctcctatctttagt

SEQ ID NO: 39080 - DNA, 25 bp, Probe Sequence
ggcaggtaatttcaaagggttattt

SEQ ID NO: 39081 - DNA, 25 bp, Probe Sequence
ctctatttgttgggcaggtaatttc

SEQ ID NO: 39082 - DNA, 25 bp, Probe Sequence
acagaagcaccacctatcatatttg

SEQ ID NO: 39083 - DNA, 25 bp, Probe Sequence
cacagaagcaccacctatcatattt

SEQ ID NO: 39084 - DNA, 25 bp, Probe Sequence
taatgtagcctgcctctatttgttg

SEQ ID NO: 39085 - DNA, 25 bp, Probe Sequence
gtgccacaaattctcctttatcttt

SEQ ID NO: 39086 - DNA, 25 bp, Probe Sequence
tctatttgttgggcaggtaatttca

SEQ ID NO: 39087 - DNA, 25 bp, Probe Sequence
tccacagaagcaccacctatcatat

SEQ ID NO: 39088 - DNA, 25 bp, Probe Sequence
tcttatgtgtaattattccaccgtg

SEQ ID NO: 39089 - DNA, 25 bp, Probe Sequence
atgaaatgaggagtttgagttagtc

SEQ ID NO: 39090 - DNA, 25 bp, Probe Sequence
gatttggatgtggctatggaaagaa

SEQ ID NO: 39091 - DNA, 25 bp, Probe Sequence
atcatatttgccacaccaactaaac

SEQ ID NO: 39092 - DNA, 25 bp, Probe Sequence
tatctccacatctctgaagaagttg

SEQ ID NO: 39093 - DNA, 25 bp, Probe Sequence
ctatctccacatctctgaagaagtt

SEQ ID NO: 39094 - DNA, 25 bp, Probe Sequence
tcctatctccacatctctgaagaag

SEQ ID NO: 39095 - DNA, 25 bp, Probe Sequence
ctcctatctccacatctctgaagaa

SEQ ID NO: 39096 - DNA, 25 bp, Probe Sequence
cctatctccacatctctgaagaagt

SEQ ID NO: 39097 - DNA, 25 bp, Probe Sequence
atctccacatctctgaagaagttga

SEQ ID NO: 39098 - DNA, 25 bp, Probe Sequence
ttaagagatcgtaggcaattagaga

SEQ ID NO: 39099 - DNA, 25 bp, Probe Sequence
taagagatcgtaggcaattagagat

SEQ ID NO: 39100 - DNA, 25 bp, Probe Sequence
tctccacatctctgaagaagttgag

SEQ ID NO: 39101 - DNA, 25 bp, Probe Sequence
cctcctatctccacatctctgaaga

SEQ ID NO: 39102 - DNA, 25 bp, Probe Sequence
caattagagatcgaagcctcctatc

SEQ ID NO: 39103 - DNA, 25 bp, Probe Sequence
ctccacatctctgaagaagttgagg

SEQ ID NO: 39104 - DNA, 25 bp, Probe Sequence
ctggagttgatggaataaaggttgg

SEQ ID NO: 39105 - DNA, 25 bp, Probe Sequence
gcaattagagatcgaagcctcctat

SEQ ID NO: 39106 - DNA, 25 bp, Probe Sequence
aagagatcgtaggcaattagagatc

SEQ ID NO: 39107 - DNA, 25 bp, Probe Sequence
aattagagatcgaagcctcctatct

SEQ ID NO: 39108 - DNA, 25 bp, Probe Sequence
tttaagagatcgtaggcaattagag

SEQ ID NO: 39109 - DNA, 25 bp, Probe Sequence
gcctcctatctccacatctctgaag

SEQ ID NO: 39110 - DNA, 25 bp, Probe Sequence
gaagcctcctatctccacatctctg

SEQ ID NO: 39111 - DNA, 25 bp, Probe Sequence
ctcttactgctgttctccctttctc

SEQ ID NO: 39112 - DNA, 25 bp, Probe Sequence
agagatcgtaggcaattagagatcg

SEQ ID NO: 39113 - DNA, 25 bp, Probe Sequence
tggagttgatggaataaaggttggg

SEQ ID NO: 39114 - DNA, 25 bp, Probe Sequence
cctggagttgatggaataaaggttg

SEQ ID NO: 39115 - DNA, 25 bp, Probe Sequence
gagagaatgacttctgccttcatct

SEQ ID NO: 39116 - DNA, 25 bp, Probe Sequence
atacttcaggaggcttagcatattg

SEQ ID NO: 39117 - DNA, 25 bp, Probe Sequence
aatacttcaggaggcttagcatatt

SEQ ID NO: 39118 - DNA, 25 bp, Probe Sequence
aagcagcacagaatgttatccttac

SEQ ID NO: 39119 - DNA, 25 bp, Probe Sequence
caagcagcacagaatgttatcctta

SEQ ID NO: 39120 - DNA, 25 bp, Probe Sequence
ggaaaggactcttgattcttctctt

SEQ ID NO: 39121 - DNA, 25 bp, Probe Sequence
tctcttcacgtctctaacaatcctt

SEQ ID NO: 39122 - DNA, 25 bp, Probe Sequence
ttctcttcacgtctctaacaatcct

SEQ ID NO: 39123 - DNA, 25 bp, Probe Sequence
tgttgttcaataaaccagagcaatg

SEQ ID NO: 39124 - DNA, 25 bp, Probe Sequence
ttcagtcattcagggaaacagaaag

SEQ ID NO: 39125 - DNA, 25 bp, Probe Sequence
aagttggactgttgttcaataaacc

SEQ ID NO: 39126 - DNA, 25 bp, Probe Sequence
ctgtaaagttggactgttgttcaat

SEQ ID NO: 39127 - DNA, 25 bp, Probe Sequence
ttaatgctgtaaagttggactgttg

SEQ ID NO: 39128 - DNA, 25 bp, Probe Sequence
gttctcttcacgtctctaacaatcc

SEQ ID NO: 39129 - DNA, 25 bp, Probe Sequence
aaatacttcaggaggcttagcatat

SEQ ID NO: 39130 - DNA, 25 bp, Probe Sequence
tttaatgctgtaaagttggactgtt

SEQ ID NO: 39131 - DNA, 25 bp, Probe Sequence
taatgctgtaaagttggactgttgt

SEQ ID NO: 39132 - DNA, 25 bp, Probe Sequence
atttaatgctgtaaagttggactgt

SEQ ID NO: 39133 - DNA, 25 bp, Probe Sequence
cagaatgttatccttacgtcctgag

SEQ ID NO: 39134 - DNA, 25 bp, Probe Sequence
tgtaaagttggactgttgttcaata

SEQ ID NO: 39135 - DNA, 25 bp, Probe Sequence
aaagttggactgttgttcaataaac

SEQ ID NO: 39136 - DNA, 25 bp, Probe Sequence
agaatgttatccttacgtcctgagc

SEQ ID NO: 39137 - DNA, 25 bp, Probe Sequence
tcagtcattcagggaaacagaaaga

SEQ ID NO: 39138 - DNA, 25 bp, Probe Sequence
ctgttgttcaataaaccagagcaat

SEQ ID NO: 39139 - DNA, 25 bp, Probe Sequence
cccttatttaatgctgtaaagttgg

SEQ ID NO: 39140 - DNA, 25 bp, Probe Sequence
cgctctcttcacagcagtaccttag

SEQ ID NO: 39141 - DNA, 25 bp, Probe Sequence
gacaacaagagcgaaactctgtcta

SEQ ID NO: 39142 - DNA, 25 bp, Probe Sequence
attgatgagaacaagagttaatgcc

SEQ ID NO: 39143 - DNA, 25 bp, Probe Sequence
cctagatgagtctcttcaagaatgg

SEQ ID NO: 39144 - DNA, 25 bp, Probe Sequence
acctagatgagtctcttcaagaatg

SEQ ID NO: 39145 - DNA, 25 bp, Probe Sequence
cacctagatgagtctcttcaagaat

SEQ ID NO: 39146 - DNA, 25 bp, Probe Sequence
ccacctagatgagtctcttcaagaa

SEQ ID NO: 39147 - DNA, 25 bp, Probe Sequence
cccaggaaatagaagtgaaattgtc

SEQ ID NO: 39148 - DNA, 25 bp, Probe Sequence
ttctattggcagtgactgattcatg

SEQ ID NO: 39149 - DNA, 25 bp, Probe Sequence
tcccaggaaatagaagtgaaattgt

SEQ ID NO: 39150 - DNA, 25 bp, Probe Sequence
gtcccaggaaatagaagtgaaattg

SEQ ID NO: 39151 - DNA, 25 bp, Probe Sequence
gatgagaacaagagttaatgcccta

SEQ ID NO: 39152 - DNA, 25 bp, Probe Sequence
gagacctacaggaagaaagtgattg

SEQ ID NO: 39153 - DNA, 25 bp, Probe Sequence
agttctgaagattcacgtatccatc

SEQ ID NO: 39154 - DNA, 25 bp, Probe Sequence
atgagaacaagagttaatgccctac

SEQ ID NO: 39155 - DNA, 25 bp, Probe Sequence
cagttctgaagattcacgtatccat

SEQ ID NO: 39156 - DNA, 25 bp, Probe Sequence
ctttgaactccctactctccagaat

SEQ ID NO: 39157 - DNA, 25 bp, Probe Sequence
cgtcccaggaaatagaagtgaaatt

SEQ ID NO: 39158 - DNA, 25 bp, Probe Sequence
ttattcgtcccaggaaatagaagtg

SEQ ID NO: 39159 - DNA, 25 bp, Probe Sequence
gttattcgtcccaggaaatagaagt

SEQ ID NO: 39160 - DNA, 25 bp, Probe Sequence
cattgatgagaacaagagttaatgc

SEQ ID NO: 39161 - DNA, 25 bp, Probe Sequence
ctacaggaagaaagtgattgggttc

SEQ ID NO: 39162 - DNA, 25 bp, Probe Sequence
tttgaactccctactctccagaatc

SEQ ID NO: 39163 - DNA, 25 bp, Probe Sequence
ccaggaaatagaagtgaaattgtct

SEQ ID NO: 39164 - DNA, 25 bp, Probe Sequence
ggttattcgtcccaggaaatagaag

SEQ ID NO: 39165 - DNA, 25 bp, Probe Sequence
gtctcttcaagaatgggaaatcaag

SEQ ID NO: 39166 - DNA, 25 bp, Probe Sequence
cacacatacacagatacacacacac

SEQ ID NO: 39167 - DNA, 25 bp, Probe Sequence
cacacacatacacagatacacacac

SEQ ID NO: 39168 - DNA, 25 bp, Probe Sequence
acacatacacagatacacacacaca

SEQ ID NO: 39169 - DNA, 25 bp, Probe Sequence
acacacatacacagatacacacaca

SEQ ID NO: 39170 - DNA, 25 bp, Probe Sequence
tataccacctctcaaccattactca

SEQ ID NO: 39171 - DNA, 25 bp, Probe Sequence
ttataccacctctcaaccattactc

SEQ ID NO: 39172 - DNA, 25 bp, Probe Sequence
cttataccacctctcaaccattact

SEQ ID NO: 39173 - DNA, 25 bp, Probe Sequence
tcttataccacctctcaaccattac

SEQ ID NO: 39174 - DNA, 25 bp, Probe Sequence
ttcttataccacctctcaaccatta

SEQ ID NO: 39175 - DNA, 25 bp, Probe Sequence
gttcttataccacctctcaaccatt

SEQ ID NO: 39176 - DNA, 25 bp, Probe Sequence
cacatacacagatacacacacacaa

SEQ ID NO: 39177 - DNA, 25 bp, Probe Sequence
attgttcttataccacctctcaacc

SEQ ID NO: 39178 - DNA, 25 bp, Probe Sequence
gattgttcttataccacctctcaac

SEQ ID NO: 39179 - DNA, 25 bp, Probe Sequence
tgttcttataccacctctcaaccat

SEQ ID NO: 39180 - DNA, 25 bp, Probe Sequence
agattgttcttataccacctctcaa

SEQ ID NO: 39181 - DNA, 25 bp, Probe Sequence
ataccacctctcaaccattactcac

SEQ ID NO: 39182 - DNA, 25 bp, Probe Sequence
ttgttcttataccacctctcaacca

SEQ ID NO: 39183 - DNA, 25 bp, Probe Sequence
catgatgctggattacctctcttaa

SEQ ID NO: 39184 - DNA, 25 bp, Probe Sequence
tagattgttcttataccacctctca

SEQ ID NO: 39185 - DNA, 25 bp, Probe Sequence
aactcttcagcgaatccttctagta

SEQ ID NO: 39186 - DNA, 25 bp, Probe Sequence
acatgatgctggattacctctctta

SEQ ID NO: 39187 - DNA, 25 bp, Probe Sequence
tacatgatgctggattacctctctt

SEQ ID NO: 39188 - DNA, 25 bp, Probe Sequence
tctcaaccattactcacacttccag

SEQ ID NO: 39189 - DNA, 25 bp, Probe Sequence
ctctcaaccattactcacacttcca

SEQ ID NO: 39190 - DNA, 25 bp, Probe Sequence
tatgtccattccatgtaccagctta

SEQ ID NO: 39191 - DNA, 25 bp, Probe Sequence
taattctaatgtcccacctatgtcc

SEQ ID NO: 39192 - DNA, 25 bp, Probe Sequence
attctaatgtcccacctatgtccat

SEQ ID NO: 39193 - DNA, 25 bp, Probe Sequence
cattccatgtaccagcttagttata

SEQ ID NO: 39194 - DNA, 25 bp, Probe Sequence
aattctaatgtcccacctatgtcca

SEQ ID NO: 39195 - DNA, 25 bp, Probe Sequence
aaagaggcaaactaacaagtcaaat

SEQ ID NO: 39196 - DNA, 25 bp, Probe Sequence
caaagaggcaaactaacaagtcaaa

SEQ ID NO: 39197 - DNA, 25 bp, Probe Sequence
gaggcaaactaacaagtcaaattct

SEQ ID NO: 39198 - DNA, 25 bp, Probe Sequence
agaggcaaactaacaagtcaaattc

SEQ ID NO: 39199 - DNA, 25 bp, Probe Sequence
aagaggcaaactaacaagtcaaatt

SEQ ID NO: 39200 - DNA, 25 bp, Probe Sequence
cacctatgtccattccatgtaccag

SEQ ID NO: 39201 - DNA, 25 bp, Probe Sequence
tattcacttctggaagctaggaatg

SEQ ID NO: 39202 - DNA, 25 bp, Probe Sequence
aggcaaactaacaagtcaaattcta

SEQ ID NO: 39203 - DNA, 25 bp, Probe Sequence
ttcacttctggaagctaggaatgag

SEQ ID NO: 39204 - DNA, 25 bp, Probe Sequence
ttattcacttctggaagctaggaat

SEQ ID NO: 39205 - DNA, 25 bp, Probe Sequence
acaaagaggcaaactaacaagtcaa

SEQ ID NO: 39206 - DNA, 25 bp, Probe Sequence
atgtccattccatgtaccagcttag

SEQ ID NO: 39207 - DNA, 25 bp, Probe Sequence
ctatgtccattccatgtaccagctt

SEQ ID NO: 39208 - DNA, 25 bp, Probe Sequence
tccatgtaccagcttagttatatac

SEQ ID NO: 39209 - DNA, 25 bp, Probe Sequence
tgtaacatttgtagattggatacga

SEQ ID NO: 39210 - DNA, 25 bp, Probe Sequence
ataattctaatgtcccacctatgtc

SEQ ID NO: 39211 - DNA, 25 bp, Probe Sequence
ggcaaactaacaagtcaaattctaa

SEQ ID NO: 39212 - DNA, 25 bp, Probe Sequence
attccatgtaccagcttagttatat

SEQ ID NO: 39213 - DNA, 25 bp, Probe Sequence
attcacttctggaagctaggaatga

SEQ ID NO: 39214 - DNA, 25 bp, Probe Sequence
cgtcctcttgtgtataataaacctt

SEQ ID NO: 39215 - DNA, 25 bp, Probe Sequence
acagaacgtcctcttgtgtataata

SEQ ID NO: 39216 - DNA, 25 bp, Probe Sequence
cagaacgtcctcttgtgtataataa

SEQ ID NO: 39217 - DNA, 25 bp, Probe Sequence
gacagaacgtcctcttgtgtataat

SEQ ID NO: 39218 - DNA, 25 bp, Probe Sequence
caagtctcagaaggatcagaacacc

SEQ ID NO: 39219 - DNA, 25 bp, Probe Sequence
tgaatttcacatccaatttctaggg

SEQ ID NO: 39220 - DNA, 25 bp, Probe Sequence
ccctgaatttcacatccaatttcta

SEQ ID NO: 39221 - DNA, 25 bp, Probe Sequence
accctgaatttcacatccaatttct

SEQ ID NO: 39222 - DNA, 25 bp, Probe Sequence
caccctgaatttcacatccaatttc

SEQ ID NO: 39223 - DNA, 25 bp, Probe Sequence
aagtctcagaaggatcagaacacct

SEQ ID NO: 39224 - DNA, 25 bp, Probe Sequence
gcaagtctcagaaggatcagaacac

SEQ ID NO: 39225 - DNA, 25 bp, Probe Sequence
acgtcctcttgtgtataataaacct

SEQ ID NO: 39226 - DNA, 25 bp, Probe Sequence
ctgaatttcacatccaatttctagg

SEQ ID NO: 39227 - DNA, 25 bp, Probe Sequence
cctgaatttcacatccaatttctag

SEQ ID NO: 39228 - DNA, 25 bp, Probe Sequence
gatcagttcttcagcctggtacatg

SEQ ID NO: 39229 - DNA, 25 bp, Probe Sequence
aacgtcctcttgtgtataataaacc

SEQ ID NO: 39230 - DNA, 25 bp, Probe Sequence
ccaccctgaatttcacatccaattt

SEQ ID NO: 39231 - DNA, 25 bp, Probe Sequence
cagaccaagaggatcagttcttcag

SEQ ID NO: 39232 - DNA, 25 bp, Probe Sequence
gtcctcttgtgtataataaaccttt

SEQ ID NO: 39233 - DNA, 25 bp, Probe Sequence
atcagttcttcagcctggtacatga

SEQ ID NO: 39234 - DNA, 25 bp, Probe Sequence
cttctctctgacgaaagatgtgctc

SEQ ID NO: 39235 - DNA, 25 bp, Probe Sequence
tccaccctgaatttcacatccaatt

SEQ ID NO: 39236 - DNA, 25 bp, Probe Sequence
gaacgtcctcttgtgtataataaac

SEQ ID NO: 39237 - DNA, 25 bp, Probe Sequence
ttctctctgacgaaagatgtgctct

SEQ ID NO: 39238 - DNA, 25 bp, Probe Sequence
tttcctctttcaagccaaataccag

SEQ ID NO: 39239 - DNA, 25 bp, Probe Sequence
gatttcctctttcaagccaaatacc

SEQ ID NO: 39240 - DNA, 25 bp, Probe Sequence
atttcctctttcaagccaaatacca

SEQ ID NO: 39241 - DNA, 25 bp, Probe Sequence
ggatttcctctttcaagccaaatac

SEQ ID NO: 39242 - DNA, 25 bp, Probe Sequence
tcctctttcaagccaaataccagat

SEQ ID NO: 39243 - DNA, 25 bp, Probe Sequence
ttcctctttcaagccaaataccaga

SEQ ID NO: 39244 - DNA, 25 bp, Probe Sequence
ctctttcaagccaaataccagatcc

SEQ ID NO: 39245 - DNA, 25 bp, Probe Sequence
cctctttcaagccaaataccagatc

SEQ ID NO: 39246 - DNA, 25 bp, Probe Sequence
aggatttcctctttcaagccaaata

SEQ ID NO: 39247 - DNA, 25 bp, Probe Sequence
aaggatttcctctttcaagccaaat

SEQ ID NO: 39248 - DNA, 25 bp, Probe Sequence
ctcaagtacaagcttaggtggtatg

SEQ ID NO: 39249 - DNA, 25 bp, Probe Sequence
caaggatttcctctttcaagccaaa

SEQ ID NO: 39250 - DNA, 25 bp, Probe Sequence
tctttcaagccaaataccagatccg

SEQ ID NO: 39251 - DNA, 25 bp, Probe Sequence
caccaactactccctcaagtacaag

SEQ ID NO: 39252 - DNA, 25 bp, Probe Sequence
tcaaggatttcctctttcaagccaa

SEQ ID NO: 39253 - DNA, 25 bp, Probe Sequence
tcaagtacaagcttaggtggtatgg

SEQ ID NO: 39254 - DNA, 25 bp, Probe Sequence
ctcaaggatttcctctttcaagcca

SEQ ID NO: 39255 - DNA, 25 bp, Probe Sequence
acaccaactactccctcaagtacaa

SEQ ID NO: 39256 - DNA, 25 bp, Probe Sequence
cctcaagtacaagcttaggtggtat

SEQ ID NO: 39257 - DNA, 25 bp, Probe Sequence
cctcaaggatttcctctttcaagcc

SEQ ID NO: 39258 - DNA, 25 bp, Probe Sequence
ccctcaaggatttcctctttcaagc

SEQ ID NO: 39259 - DNA, 25 bp, Probe Sequence
gccctcaaggatttcctctttcaag

SEQ ID NO: 39260 - DNA, 25 bp, Probe Sequence
cacaccaactactccctcaagtaca

SEQ ID NO: 39261 - DNA, 25 bp, Probe Sequence
ccaagaacatgaaggacttgacctg

SEQ ID NO: 39262 - DNA, 25 bp, Probe Sequence
ttggatgattgactgtaatgctttc

SEQ ID NO: 39263 - DNA, 25 bp, Probe Sequence
tttggatgattgactgtaatgcttt

SEQ ID NO: 39264 - DNA, 25 bp, Probe Sequence
gatgattgactgtaatgctttccat

SEQ ID NO: 39265 - DNA, 25 bp, Probe Sequence
aagaagcctttgttgttgaagaatg

SEQ ID NO: 39266 - DNA, 25 bp, Probe Sequence
ctttgttgttgaagaatgggtgaag

SEQ ID NO: 39267 - DNA, 25 bp, Probe Sequence
atgctttccatttacctgactaaac

SEQ ID NO: 39268 - DNA, 25 bp, Probe Sequence
tgctttccatttacctgactaaaca

SEQ ID NO: 39269 - DNA, 25 bp, Probe Sequence
ggaattagaagatattgacacaaca

SEQ ID NO: 39270 - DNA, 25 bp, Probe Sequence
tggaattagaagatattgacacaac

SEQ ID NO: 39271 - DNA, 25 bp, Probe Sequence
tgctttggactatgagaaacttctt

SEQ ID NO: 39272 - DNA, 25 bp, Probe Sequence
agtgctttggactatgagaaacttc

SEQ ID NO: 39273 - DNA, 25 bp, Probe Sequence
gttgttgaagaatgggtgaaggaaa

SEQ ID NO: 39274 - DNA, 25 bp, Probe Sequence
cagtgctttggactatgagaaactt

SEQ ID NO: 39275 - DNA, 25 bp, Probe Sequence
gtgctttggactatgagaaacttct

SEQ ID NO: 39276 - DNA, 25 bp, Probe Sequence
gctttccatttacctgactaaacag

SEQ ID NO: 39277 - DNA, 25 bp, Probe Sequence
gaagagagaaatgtcatggaagagg

SEQ ID NO: 39278 - DNA, 25 bp, Probe Sequence
tttgttgttgaagaatgggtgaagg

SEQ ID NO: 39279 - DNA, 25 bp, Probe Sequence
gctttggactatgagaaacttctta

SEQ ID NO: 39280 - DNA, 25 bp, Probe Sequence
ttgttgaagaatgggtgaaggaaac

SEQ ID NO: 39281 - DNA, 25 bp, Probe Sequence
tgaagagagaaatgtcatggaagag

SEQ ID NO: 39282 - DNA, 25 bp, Probe Sequence
cctttgttgttgaagaatgggtgaa

SEQ ID NO: 39283 - DNA, 25 bp, Probe Sequence
agaagcctttgttgttgaagaatgg

SEQ ID NO: 39284 - DNA, 25 bp, Probe Sequence
ctttccatttacctgactaaacaga

SEQ ID NO: 39285 - DNA, 25 bp, Probe Sequence
agagaaatgtcatggaagagggaaa

SEQ ID NO: 39286 - DNA, 25 bp, Probe Sequence
ttactattctggtgctgcttcataa

SEQ ID NO: 39287 - DNA, 25 bp, Probe Sequence
tactattctggtgctgcttcataac

SEQ ID NO: 39288 - DNA, 25 bp, Probe Sequence
gctatctacctatcctgagtctatc

SEQ ID NO: 39289 - DNA, 25 bp, Probe Sequence
ctattctggtgctgcttcataacaa

SEQ ID NO: 39290 - DNA, 25 bp, Probe Sequence
tgatggatctacttatggtcttgtt

SEQ ID NO: 39291 - DNA, 25 bp, Probe Sequence
atgatggatctacttatggtcttgt

SEQ ID NO: 39292 - DNA, 25 bp, Probe Sequence
gaagacatggatatgagtgactgaa

SEQ ID NO: 39293 - DNA, 25 bp, Probe Sequence
aagaagacatggatatgagtgactg

SEQ ID NO: 39294 - DNA, 25 bp, Probe Sequence
gaagaagacatggatatgagtgact

SEQ ID NO: 39295 - DNA, 25 bp, Probe Sequence
tgaagaagacatggatatgagtgac

SEQ ID NO: 39296 - DNA, 25 bp, Probe Sequence
aagacatggatatgagtgactgaat

SEQ ID NO: 39297 - DNA, 25 bp, Probe Sequence
gtacgaggtaaccaattcttgtcat

SEQ ID NO: 39298 - DNA, 25 bp, Probe Sequence
agaagacatggatatgagtgactga

SEQ ID NO: 39299 - DNA, 25 bp, Probe Sequence
atgaagaagacatggatatgagtga

SEQ ID NO: 39300 - DNA, 25 bp, Probe Sequence
caacatgatggatctacttatggtc

SEQ ID NO: 39301 - DNA, 25 bp, Probe Sequence
actattctggtgctgcttcataaca

SEQ ID NO: 39302 - DNA, 25 bp, Probe Sequence
tgttattgtggcaagaatatcctaa

SEQ ID NO: 39303 - DNA, 25 bp, Probe Sequence
acatgatggatctacttatggtctt

SEQ ID NO: 39304 - DNA, 25 bp, Probe Sequence
aacatgatggatctacttatggtct

SEQ ID NO: 39305 - DNA, 25 bp, Probe Sequence
catgttattgtggcaagaatatcct

SEQ ID NO: 39306 - DNA, 25 bp, Probe Sequence
aatctgattgagtaaccaagcagtt

SEQ ID NO: 39307 - DNA, 25 bp, Probe Sequence
ggatatgagtgactgaatattgcct

SEQ ID NO: 39308 - DNA, 25 bp, Probe Sequence
tggatatgagtgactgaatattgcc

SEQ ID NO: 39309 - DNA, 25 bp, Probe Sequence
gcatgttattgtggcaagaatatcc

SEQ ID NO: 39310 - DNA, 25 bp, Probe Sequence
aagtatgacacagagaaggaagatg

SEQ ID NO: 39311 - DNA, 25 bp, Probe Sequence
caagtatgacacagagaaggaagat

SEQ ID NO: 39312 - DNA, 25 bp, Probe Sequence
tacaagtatgacacagagaaggaag

SEQ ID NO: 39313 - DNA, 25 bp, Probe Sequence
acaagtatgacacagagaaggaaga

SEQ ID NO: 39314 - DNA, 25 bp, Probe Sequence
atacaagtatgacacagagaaggaa

SEQ ID NO: 39315 - DNA, 25 bp, Probe Sequence
agagaaggaagatgtggttagtgtg

SEQ ID NO: 39316 - DNA, 25 bp, Probe Sequence
cagagaaggaagatgtggttagtgt

SEQ ID NO: 39317 - DNA, 25 bp, Probe Sequence
atctagttcctggattggttgctaa

SEQ ID NO: 39318 - DNA, 25 bp, Probe Sequence
agtatgacacagagaaggaagatgt

SEQ ID NO: 39319 - DNA, 25 bp, Probe Sequence
atatactgaagcagattgatccgtt

SEQ ID NO: 39320 - DNA, 25 bp, Probe Sequence
aatatactgaagcagattgatccgt

SEQ ID NO: 39321 - DNA, 25 bp, Probe Sequence
cactactggataacaagaggattcc

SEQ ID NO: 39322 - DNA, 25 bp, Probe Sequence
ccactactggataacaagaggattc

SEQ ID NO: 39323 - DNA, 25 bp, Probe Sequence
acagagaaggaagatgtggttagtg

SEQ ID NO: 39324 - DNA, 25 bp, Probe Sequence
agatgaatactacagctacgacgaa

SEQ ID NO: 39325 - DNA, 25 bp, Probe Sequence
tatgcgaaatccaaatcaacacaat

SEQ ID NO: 39326 - DNA, 25 bp, Probe Sequence
actttatgcgaaatccaaatcaaca

SEQ ID NO: 39327 - DNA, 25 bp, Probe Sequence
gagaaggaagatgtggttagtgtgg

SEQ ID NO: 39328 - DNA, 25 bp, Probe Sequence
cctcggactatttatgactttggat

SEQ ID NO: 39329 - DNA, 25 bp, Probe Sequence
ttatgcgaaatccaaatcaacacaa

SEQ ID NO: 39330 - DNA, 25 bp, Probe Sequence
tttatgcgaaatccaaatcaacaca

SEQ ID NO: 39331 - DNA, 25 bp, Probe Sequence
ctttatgcgaaatccaaatcaacac

SEQ ID NO: 39332 - DNA, 25 bp, Probe Sequence
taaggactaaagcagaatgtaggag

SEQ ID NO: 39333 - DNA, 25 bp, Probe Sequence
gatgtggttagtgtggtgaaatcta

SEQ ID NO: 39334 - DNA, 25 bp, Probe Sequence
atcttcatcatcatcatcatcgtgt

SEQ ID NO: 39335 - DNA, 25 bp, Probe Sequence
actgttctggttatcttcatcatca

SEQ ID NO: 39336 - DNA, 25 bp, Probe Sequence
tcttcatcatcatcatcatcgtgtg

SEQ ID NO: 39337 - DNA, 25 bp, Probe Sequence
tatcttcatcatcatcatcatcgtg

SEQ ID NO: 39338 - DNA, 25 bp, Probe Sequence
gttctggttatcttcatcatcatca

SEQ ID NO: 39339 - DNA, 25 bp, Probe Sequence
tgttctggttatcttcatcatcatc

SEQ ID NO: 39340 - DNA, 25 bp, Probe Sequence
ctgttctggttatcttcatcatcat

SEQ ID NO: 39341 - DNA, 25 bp, Probe Sequence
aagtagatgaggtggtggacataat

SEQ ID NO: 39342 - DNA, 25 bp, Probe Sequence
ctggttatcttcatcatcatcatca

SEQ ID NO: 39343 - DNA, 25 bp, Probe Sequence
ggattactgttctggttatcttcat

SEQ ID NO: 39344 - DNA, 25 bp, Probe Sequence
cttcatcatcatcatcatcgtgtgg

SEQ ID NO: 39345 - DNA, 25 bp, Probe Sequence
tctggttatcttcatcatcatcatc

SEQ ID NO: 39346 - DNA, 25 bp, Probe Sequence
agtagatgaggtggtggacataatg

SEQ ID NO: 39347 - DNA, 25 bp, Probe Sequence
tactgttctggttatcttcatcatc

SEQ ID NO: 39348 - DNA, 25 bp, Probe Sequence
ttatcttcatcatcatcatcatcgt

SEQ ID NO: 39349 - DNA, 25 bp, Probe Sequence
caagtagatgaggtggtggacataa

SEQ ID NO: 39350 - DNA, 25 bp, Probe Sequence
tggttatcttcatcatcatcatcat

SEQ ID NO: 39351 - DNA, 25 bp, Probe Sequence
gttatcttcatcatcatcatcatcg

SEQ ID NO: 39352 - DNA, 25 bp, Probe Sequence
ttctggttatcttcatcatcatcat

SEQ ID NO: 39353 - DNA, 25 bp, Probe Sequence
ttactgttctggttatcttcatcat

SEQ ID NO: 39354 - DNA, 25 bp, Probe Sequence
attactgttctggttatcttcatca

SEQ ID NO: 39355 - DNA, 25 bp, Probe Sequence
ggttatcttcatcatcatcatcatc

SEQ ID NO: 39356 - DNA, 25 bp, Probe Sequence
gattactgttctggttatcttcatc

SEQ ID NO: 39357 - DNA, 25 bp, Probe Sequence
tcaagtagatgaggtggtggacata

SEQ ID NO: 39358 - DNA, 25 bp, Probe Sequence
gaacatataaatgcgaaggaaacca

SEQ ID NO: 39359 - DNA, 25 bp, Probe Sequence
agaacatataaatgcgaaggaaacc

SEQ ID NO: 39360 - DNA, 25 bp, Probe Sequence
aacatataaatgcgaaggaaaccat

SEQ ID NO: 39361 - DNA, 25 bp, Probe Sequence
catataaatgcgaaggaaaccatgt

SEQ ID NO: 39362 - DNA, 25 bp, Probe Sequence
acatataaatgcgaaggaaaccatg

SEQ ID NO: 39363 - DNA, 25 bp, Probe Sequence
tgtactctcactttaaactcaccaa

SEQ ID NO: 39364 - DNA, 25 bp, Probe Sequence
tataaatgcgaaggaaaccatgtat

SEQ ID NO: 39365 - DNA, 25 bp, Probe Sequence
atataaatgcgaaggaaaccatgta

SEQ ID NO: 39366 - DNA, 25 bp, Probe Sequence
agccactaagttatttgtgtactct

SEQ ID NO: 39367 - DNA, 25 bp, Probe Sequence
gccactaagttatttgtgtactctc

SEQ ID NO: 39368 - DNA, 25 bp, Probe Sequence
gtactctcactttaaactcaccaaa

SEQ ID NO: 39369 - DNA, 25 bp, Probe Sequence
tagaacatataaatgcgaaggaaac

SEQ ID NO: 39370 - DNA, 25 bp, Probe Sequence
gactgagaaacattgagttatatgg

SEQ ID NO: 39371 - DNA, 25 bp, Probe Sequence
ccactaagttatttgtgtactctca

SEQ ID NO: 39372 - DNA, 25 bp, Probe Sequence
tagccactaagttatttgtgtactc

SEQ ID NO: 39373 - DNA, 25 bp, Probe Sequence
catttagccactaagttatttgtgt

SEQ ID NO: 39374 - DNA, 25 bp, Probe Sequence
gtgtactctcactttaaactcacca

SEQ ID NO: 39375 - DNA, 25 bp, Probe Sequence
tgtgtactctcactttaaactcacc

SEQ ID NO: 39376 - DNA, 25 bp, Probe Sequence
gccattagaacatataaatgcgaag

SEQ ID NO: 39377 - DNA, 25 bp, Probe Sequence
ttagaacatataaatgcgaaggaaa

SEQ ID NO: 39378 - DNA, 25 bp, Probe Sequence
tcatttagccactaagttatttgtg

SEQ ID NO: 39379 - DNA, 25 bp, Probe Sequence
ttgtgtactctcactttaaactcac

SEQ ID NO: 39380 - DNA, 25 bp, Probe Sequence
ttagccactaagttatttgtgtact

SEQ ID NO: 39381 - DNA, 25 bp, Probe Sequence
tcagactgagaaacattgagttata

SEQ ID NO: 39382 - DNA, 25 bp, Probe Sequence
gatacagagaacaggaatacaggag

SEQ ID NO: 39383 - DNA, 25 bp, Probe Sequence
atacagagaacaggaatacaggaga

SEQ ID NO: 39384 - DNA, 25 bp, Probe Sequence
agatacagagaacaggaatacagga

SEQ ID NO: 39385 - DNA, 25 bp, Probe Sequence
tacagagaacaggaatacaggagaa

SEQ ID NO: 39386 - DNA, 25 bp, Probe Sequence
agagaacaggaatacaggagaagag

SEQ ID NO: 39387 - DNA, 25 bp, Probe Sequence
ataatagcagaacaagagaacgaag

SEQ ID NO: 39388 - DNA, 25 bp, Probe Sequence
cagagaacaggaatacaggagaaga

SEQ ID NO: 39389 - DNA, 25 bp, Probe Sequence
tagatacagagaacaggaatacagg

SEQ ID NO: 39390 - DNA, 25 bp, Probe Sequence
taatagcagaacaagagaacgaagc

SEQ ID NO: 39391 - DNA, 25 bp, Probe Sequence
caatccaggagtagagaatgtgata

SEQ ID NO: 39392 - DNA, 25 bp, Probe Sequence
aatcagagaagtccagttagagtaa

SEQ ID NO: 39393 - DNA, 25 bp, Probe Sequence
acagagaacaggaatacaggagaag

SEQ ID NO: 39394 - DNA, 25 bp, Probe Sequence
gaacaagagaacgaagcagaagtag

SEQ ID NO: 39395 - DNA, 25 bp, Probe Sequence
agtaccatagatacagagaacagga

SEQ ID NO: 39396 - DNA, 25 bp, Probe Sequence
aggagtaccatagatacagagaaca

SEQ ID NO: 39397 - DNA, 25 bp, Probe Sequence
gaagcaaggagtaccatagatacag

SEQ ID NO: 39398 - DNA, 25 bp, Probe Sequence
cagaagcaaggagtaccatagatac

SEQ ID NO: 39399 - DNA, 25 bp, Probe Sequence
gagtaccatagatacagagaacagg

SEQ ID NO: 39400 - DNA, 25 bp, Probe Sequence
ggagtaccatagatacagagaacag

SEQ ID NO: 39401 - DNA, 25 bp, Probe Sequence
aagcaaggagtaccatagatacaga

SEQ ID NO: 39402 - DNA, 25 bp, Probe Sequence
agaagcaaggagtaccatagataca

SEQ ID NO: 39403 - DNA, 25 bp, Probe Sequence
gagaacaggaatacaggagaagagg

SEQ ID NO: 39404 - DNA, 25 bp, Probe Sequence
accatagatacagagaacaggaata

SEQ ID NO: 39405 - DNA, 25 bp, Probe Sequence
taccatagatacagagaacaggaat

SEQ ID NO: 39406 - DNA, 25 bp, Probe Sequence
ctaacttactctgtgttcaggtgtg

SEQ ID NO: 39407 - DNA, 25 bp, Probe Sequence
aattctacctgtgctacataggaga

SEQ ID NO: 39408 - DNA, 25 bp, Probe Sequence
ttcctaacttactctgtgttcaggt

SEQ ID NO: 39409 - DNA, 25 bp, Probe Sequence
tagcatcactaacctgacagttgtt

SEQ ID NO: 39410 - DNA, 25 bp, Probe Sequence
ctacctgtgctacataggagaagtt

SEQ ID NO: 39411 - DNA, 25 bp, Probe Sequence
ttagcatcactaacctgacagttgt

SEQ ID NO: 39412 - DNA, 25 bp, Probe Sequence
tcctaacttactctgtgttcaggtg

SEQ ID NO: 39413 - DNA, 25 bp, Probe Sequence
gtgctacataggagaagtttggaat

SEQ ID NO: 39414 - DNA, 25 bp, Probe Sequence
ttactctgtgttcaggtgtggaatt

SEQ ID NO: 39415 - DNA, 25 bp, Probe Sequence
taacttactctgtgttcaggtgtgg

SEQ ID NO: 39416 - DNA, 25 bp, Probe Sequence
cctaacttactctgtgttcaggtgt

SEQ ID NO: 39417 - DNA, 25 bp, Probe Sequence
tctacctgtgctacataggagaagt

SEQ ID NO: 39418 - DNA, 25 bp, Probe Sequence
tgctacataggagaagtttggaatg

SEQ ID NO: 39419 - DNA, 25 bp, Probe Sequence
aggaatttgctttgtttactgctag

SEQ ID NO: 39420 - DNA, 25 bp, Probe Sequence
cttactctgtgttcaggtgtggaat

SEQ ID NO: 39421 - DNA, 25 bp, Probe Sequence
attctacctgtgctacataggagaa

SEQ ID NO: 39422 - DNA, 25 bp, Probe Sequence
ttctacctgtgctacataggagaag

SEQ ID NO: 39423 - DNA, 25 bp, Probe Sequence
ggaatttgctttgtttactgctagt

SEQ ID NO: 39424 - DNA, 25 bp, Probe Sequence
gctacataggagaagtttggaatgc

SEQ ID NO: 39425 - DNA, 25 bp, Probe Sequence
caggaatttgctttgtttactgcta

SEQ ID NO: 39426 - DNA, 25 bp, Probe Sequence
gttgccaggaatttgctttgtttac

SEQ ID NO: 39427 - DNA, 25 bp, Probe Sequence
aaattctacctgtgctacataggag

SEQ ID NO: 39428 - DNA, 25 bp, Probe Sequence
tttcctaacttactctgtgttcagg

SEQ ID NO: 39429 - DNA, 25 bp, Probe Sequence
ttgccaggaatttgctttgtttact

SEQ ID NO: 39430 - DNA, 25 bp, Probe Sequence
cctcttccctaataaaactgactcc

SEQ ID NO: 39431 - DNA, 25 bp, Probe Sequence
ccctcttccctaataaaactgactc

SEQ ID NO: 39432 - DNA, 25 bp, Probe Sequence
ctcttccctaataaaactgactccg

SEQ ID NO: 39433 - DNA, 25 bp, Probe Sequence
cccctcttccctaataaaactgact

SEQ ID NO: 39434 - DNA, 25 bp, Probe Sequence
gaaaatctacttctacagttggggc

SEQ ID NO: 39435 - DNA, 25 bp, Probe Sequence
aaaatctacttctacagttggggct

SEQ ID NO: 39436 - DNA, 25 bp, Probe Sequence
gcccctcttccctaataaaactgac

SEQ ID NO: 39437 - DNA, 25 bp, Probe Sequence
agcccctcttccctaataaaactga

SEQ ID NO: 39438 - DNA, 25 bp, Probe Sequence
aaatctacttctacagttggggctg

SEQ ID NO: 39439 - DNA, 25 bp, Probe Sequence
gttcttcaagtcctcagccttctgg

SEQ ID NO: 39440 - DNA, 25 bp, Probe Sequence
ggttcttcaagtcctcagccttctg

SEQ ID NO: 39441 - DNA, 25 bp, Probe Sequence
gagcccctcttccctaataaaactg

SEQ ID NO: 39442 - DNA, 25 bp, Probe Sequence
agaaaatctacttctacagttgggg

SEQ ID NO: 39443 - DNA, 25 bp, Probe Sequence
tggcagaaaatctacttctacagtt

SEQ ID NO: 39444 - DNA, 25 bp, Probe Sequence
gcagaaaatctacttctacagttgg

SEQ ID NO: 39445 - DNA, 25 bp, Probe Sequence
ggcagaaaatctacttctacagttg

SEQ ID NO: 39446 - DNA, 25 bp, Probe Sequence
ctggcagaaaatctacttctacagt

SEQ ID NO: 39447 - DNA, 25 bp, Probe Sequence
cagaaaatctacttctacagttggg

SEQ ID NO: 39448 - DNA, 25 bp, Probe Sequence
cctggcagaaaatctacttctacag

SEQ ID NO: 39449 - DNA, 25 bp, Probe Sequence
cacctggcagaaaatctacttctac

SEQ ID NO: 39450 - DNA, 25 bp, Probe Sequence
acctggcagaaaatctacttctaca

SEQ ID NO: 39451 - DNA, 25 bp, Probe Sequence
aatctacttctacagttggggctga

SEQ ID NO: 39452 - DNA, 25 bp, Probe Sequence
ccacctggcagaaaatctacttcta

SEQ ID NO: 39453 - DNA, 25 bp, Probe Sequence
tcttccctaataaaactgactccgg

SEQ ID NO: 39454 - DNA, 25 bp, Probe Sequence
gctagtggaagacatcaagtacatc

SEQ ID NO: 39455 - DNA, 25 bp, Probe Sequence
atccagctctcagttaagaagattc

SEQ ID NO: 39456 - DNA, 25 bp, Probe Sequence
catccagctctcagttaagaagatt

SEQ ID NO: 39457 - DNA, 25 bp, Probe Sequence
agctagtggaagacatcaagtacat

SEQ ID NO: 39458 - DNA, 25 bp, Probe Sequence
ctagtggaagacatcaagtacatcc

SEQ ID NO: 39459 - DNA, 25 bp, Probe Sequence
tagtggaagacatcaagtacatcct

SEQ ID NO: 39460 - DNA, 25 bp, Probe Sequence
caatgcctactatctacccaacaag

SEQ ID NO: 39461 - DNA, 25 bp, Probe Sequence
ctactatctacccaacaagaaccag

SEQ ID NO: 39462 - DNA, 25 bp, Probe Sequence
tactatctacccaacaagaaccaga

SEQ ID NO: 39463 - DNA, 25 bp, Probe Sequence
tcaatgcctactatctacccaacaa

SEQ ID NO: 39464 - DNA, 25 bp, Probe Sequence
ctctcagttaagaagattcggcagg

SEQ ID NO: 39465 - DNA, 25 bp, Probe Sequence
atgcctactatctacccaacaagaa

SEQ ID NO: 39466 - DNA, 25 bp, Probe Sequence
aatgcctactatctacccaacaaga

SEQ ID NO: 39467 - DNA, 25 bp, Probe Sequence
cagctagtggaagacatcaagtaca

SEQ ID NO: 39468 - DNA, 25 bp, Probe Sequence
ctcaatgcctactatctacccaaca

SEQ ID NO: 39469 - DNA, 25 bp, Probe Sequence
caaagtctggtcaataaatcactgc

SEQ ID NO: 39470 - DNA, 25 bp, Probe Sequence
gcaaagtctggtcaataaatcactg

SEQ ID NO: 39471 - DNA, 25 bp, Probe Sequence
cctactatctacccaacaagaacca

SEQ ID NO: 39472 - DNA, 25 bp, Probe Sequence
agtggaagacatcaagtacatcctg

SEQ ID NO: 39473 - DNA, 25 bp, Probe Sequence
ctcagttaagaagattcggcaggag

SEQ ID NO: 39474 - DNA, 25 bp, Probe Sequence
tccagctctcagttaagaagattcg

SEQ ID NO: 39475 - DNA, 25 bp, Probe Sequence
tctcagttaagaagattcggcagga

SEQ ID NO: 39476 - DNA, 25 bp, Probe Sequence
tgcctactatctacccaacaagaac

SEQ ID NO: 39477 - DNA, 25 bp, Probe Sequence
gtccgtctctatgacaacttcactg

SEQ ID NO: 39478 - DNA, 25 bp, Probe Sequence
cctgtgtggtaactgtattgttcta

SEQ ID NO: 39479 - DNA, 25 bp, Probe Sequence
acaactaacttcttcaactatggac

SEQ ID NO: 39480 - DNA, 25 bp, Probe Sequence
caactaacttcttcaactatggact

SEQ ID NO: 39481 - DNA, 25 bp, Probe Sequence
atgtaatcctgtaggttggtacttc

SEQ ID NO: 39482 - DNA, 25 bp, Probe Sequence
ctgtgtggtaactgtattgttctag

SEQ ID NO: 39483 - DNA, 25 bp, Probe Sequence
tatgtaatcctgtaggttggtactt

SEQ ID NO: 39484 - DNA, 25 bp, Probe Sequence
tgtaatcctgtaggttggtacttcc

SEQ ID NO: 39485 - DNA, 25 bp, Probe Sequence
aactaacttcttcaactatggactt

SEQ ID NO: 39486 - DNA, 25 bp, Probe Sequence
atatgtaatcctgtaggttggtact

SEQ ID NO: 39487 - DNA, 25 bp, Probe Sequence
cttatatgtaatcctgtaggttggt

SEQ ID NO: 39488 - DNA, 25 bp, Probe Sequence
tacaactaacttcttcaactatgga

SEQ ID NO: 39489 - DNA, 25 bp, Probe Sequence
tcttatatgtaatcctgtaggttgg

SEQ ID NO: 39490 - DNA, 25 bp, Probe Sequence
gtgtcttatatgtaatcctgtaggt

SEQ ID NO: 39491 - DNA, 25 bp, Probe Sequence
agtgtcttatatgtaatcctgtagg

SEQ ID NO: 39492 - DNA, 25 bp, Probe Sequence
ttacaactaacttcttcaactatgg

SEQ ID NO: 39493 - DNA, 25 bp, Probe Sequence
tatatgtaatcctgtaggttggtac

SEQ ID NO: 39494 - DNA, 25 bp, Probe Sequence
aaagccgtagtaagaaatggatcat

SEQ ID NO: 39495 - DNA, 25 bp, Probe Sequence
aagccgtagtaagaaatggatcata

SEQ ID NO: 39496 - DNA, 25 bp, Probe Sequence
ggacaagtagcacaaactgtataac

SEQ ID NO: 39497 - DNA, 25 bp, Probe Sequence
aggacaagtagcacaaactgtataa

SEQ ID NO: 39498 - DNA, 25 bp, Probe Sequence
agccgtagtaagaaatggatcatat

SEQ ID NO: 39499 - DNA, 25 bp, Probe Sequence
gacaagtagcacaaactgtataacg

SEQ ID NO: 39500 - DNA, 25 bp, Probe Sequence
gaggacaagtagcacaaactgtata

SEQ ID NO: 39501 - DNA, 25 bp, Probe Sequence
tgtaaattggttgaaaggtctagtt

SEQ ID NO: 39502 - DNA, 25 bp, Probe Sequence
cccgattacatttctaagcgtgaaa

SEQ ID NO: 39503 - DNA, 25 bp, Probe Sequence
gagcttctcattgtgtagaatttct

SEQ ID NO: 39504 - DNA, 25 bp, Probe Sequence
gcttctcattgtgtagaatttctag

SEQ ID NO: 39505 - DNA, 25 bp, Probe Sequence
agcttctcattgtgtagaatttcta

SEQ ID NO: 39506 - DNA, 25 bp, Probe Sequence
ccgattacatttctaagcgtgaaaa

SEQ ID NO: 39507 - DNA, 25 bp, Probe Sequence
tcattgtgtagaatttctagatccc

SEQ ID NO: 39508 - DNA, 25 bp, Probe Sequence
tgagcttctcattgtgtagaatttc

SEQ ID NO: 39509 - DNA, 25 bp, Probe Sequence
ccccgattacatttctaagcgtgaa

SEQ ID NO: 39510 - DNA, 25 bp, Probe Sequence
ttgagcttctcattgtgtagaattt

SEQ ID NO: 39511 - DNA, 25 bp, Probe Sequence
tttgagcttctcattgtgtagaatt

SEQ ID NO: 39512 - DNA, 25 bp, Probe Sequence
ctcattgtgtagaatttctagatcc

SEQ ID NO: 39513 - DNA, 25 bp, Probe Sequence
gggctggttttctatgaacgattcc

SEQ ID NO: 39514 - DNA, 25 bp, Probe Sequence
ggggctggttttctatgaacgattc

SEQ ID NO: 39515 - DNA, 25 bp, Probe Sequence
cattgtgtagaatttctagatcccc

SEQ ID NO: 39516 - DNA, 25 bp, Probe Sequence
ggctggttttctatgaacgattccg

SEQ ID NO: 39517 - DNA, 25 bp, Probe Sequence
tctcattgtgtagaatttctagatc

SEQ ID NO: 39518 - DNA, 25 bp, Probe Sequence
cttctcattgtgtagaatttctaga

SEQ ID NO: 39519 - DNA, 25 bp, Probe Sequence
ttttgagcttctcattgtgtagaat

SEQ ID NO: 39520 - DNA, 25 bp, Probe Sequence
ttctcattgtgtagaatttctagat

SEQ ID NO: 39521 - DNA, 25 bp, Probe Sequence
ctggttttctatgaacgattccggc

SEQ ID NO: 39522 - DNA, 25 bp, Probe Sequence
gctggttttctatgaacgattccgg

SEQ ID NO: 39523 - DNA, 25 bp, Probe Sequence
gttttctatgaacgattccggcctg

SEQ ID NO: 39524 - DNA, 25 bp, Probe Sequence
ttattgcgatcactggttaagaatg

SEQ ID NO: 39525 - DNA, 25 bp, Probe Sequence
tattgcgatcactggttaagaatgt

SEQ ID NO: 39526 - DNA, 25 bp, Probe Sequence
aattattgcgatcactggttaagaa

SEQ ID NO: 39527 - DNA, 25 bp, Probe Sequence
attattgcgatcactggttaagaat

SEQ ID NO: 39528 - DNA, 25 bp, Probe Sequence
attgcgatcactggttaagaatgtt

SEQ ID NO: 39529 - DNA, 25 bp, Probe Sequence
aatgtaattattgcgatcactggtt

SEQ ID NO: 39530 - DNA, 25 bp, Probe Sequence
ggtgtgtctacatctagtgttactt

SEQ ID NO: 39531 - DNA, 25 bp, Probe Sequence
aggtgtgtctacatctagtgttact

SEQ ID NO: 39532 - DNA, 25 bp, Probe Sequence
caggtgtgtctacatctagtgttac

SEQ ID NO: 39533 - DNA, 25 bp, Probe Sequence
tgtaattattgcgatcactggttaa

SEQ ID NO: 39534 - DNA, 25 bp, Probe Sequence
atgtaattattgcgatcactggtta

SEQ ID NO: 39535 - DNA, 25 bp, Probe Sequence
tgaaggaagacttattaacaacagt

SEQ ID NO: 39536 - DNA, 25 bp, Probe Sequence
ccaggtgtgtctacatctagtgtta

SEQ ID NO: 39537 - DNA, 25 bp, Probe Sequence
ctacattgcgattgtgacaacatag

SEQ ID NO: 39538 - DNA, 25 bp, Probe Sequence
tctacattgcgattgtgacaacata

SEQ ID NO: 39539 - DNA, 25 bp, Probe Sequence
taattattgcgatcactggttaaga

SEQ ID NO: 39540 - DNA, 25 bp, Probe Sequence
gtaattattgcgatcactggttaag

SEQ ID NO: 39541 - DNA, 25 bp, Probe Sequence
ttgacataagctctacattgcgatt

SEQ ID NO: 39542 - DNA, 25 bp, Probe Sequence
tgacataagctctacattgcgattg

SEQ ID NO: 39543 - DNA, 25 bp, Probe Sequence
aagtccaaagtgaaacagataaagg

SEQ ID NO: 39544 - DNA, 25 bp, Probe Sequence
tgaagtccaaagtgaaacagataaa

SEQ ID NO: 39545 - DNA, 25 bp, Probe Sequence
ctctacattgcgattgtgacaacat

SEQ ID NO: 39546 - DNA, 25 bp, Probe Sequence
ttgaaggaagacttattaacaacag

SEQ ID NO: 39547 - DNA, 25 bp, Probe Sequence
gttgtccaggtgtgtctacatctag

SEQ ID NO: 39548 - DNA, 25 bp, Probe Sequence
tgccactgttattagattgacaaga

SEQ ID NO: 39549 - DNA, 25 bp, Probe Sequence
gttgccactgttattagattgacaa

SEQ ID NO: 39550 - DNA, 25 bp, Probe Sequence
ttgccactgttattagattgacaag

SEQ ID NO: 39551 - DNA, 25 bp, Probe Sequence
gccactgttattagattgacaagat

SEQ ID NO: 39552 - DNA, 25 bp, Probe Sequence
ggttgccactgttattagattgaca

SEQ ID NO: 39553 - DNA, 25 bp, Probe Sequence
aatggttgccactgttattagattg

SEQ ID NO: 39554 - DNA, 25 bp, Probe Sequence
agaatggttgccactgttattagat

SEQ ID NO: 39555 - DNA, 25 bp, Probe Sequence
gaagaatggttgccactgttattag

SEQ ID NO: 39556 - DNA, 25 bp, Probe Sequence
gaatggttgccactgttattagatt

SEQ ID NO: 39557 - DNA, 25 bp, Probe Sequence
aagaatggttgccactgttattaga

SEQ ID NO: 39558 - DNA, 25 bp, Probe Sequence
aggctgttaatagtagttaagtgtt

SEQ ID NO: 39559 - DNA, 25 bp, Probe Sequence
aaggctgttaatagtagttaagtgt

SEQ ID NO: 39560 - DNA, 25 bp, Probe Sequence
atggttgccactgttattagattga

SEQ ID NO: 39561 - DNA, 25 bp, Probe Sequence
tgaagaatggttgccactgttatta

SEQ ID NO: 39562 - DNA, 25 bp, Probe Sequence
gttctacagcataagccttatcctg

SEQ ID NO: 39563 - DNA, 25 bp, Probe Sequence
ggttctacagcataagccttatcct

SEQ ID NO: 39564 - DNA, 25 bp, Probe Sequence
tgttaattctgtcacagcctgtata

SEQ ID NO: 39565 - DNA, 25 bp, Probe Sequence
tggcaaaggctgttaatagtagtta

SEQ ID NO: 39566 - DNA, 25 bp, Probe Sequence
ctaagagaagtgcatgtgaagaatg

SEQ ID NO: 39567 - DNA, 25 bp, Probe Sequence
ccactgttattagattgacaagatg

SEQ ID NO: 39568 - DNA, 25 bp, Probe Sequence
ttggcaaaggctgttaatagtagtt

SEQ ID NO: 39569 - DNA, 25 bp, Probe Sequence
tggttgccactgttattagattgac

SEQ ID NO: 39570 - DNA, 25 bp, Probe Sequence
tctaagagaagtgcatgtgaagaat

SEQ ID NO: 39571 - DNA, 25 bp, Probe Sequence
ccctctttcaaactgttaattctgt

SEQ ID NO: 39572 - DNA, 25 bp, Probe Sequence
tgccactgttattagattgacaaga

SEQ ID NO: 39573 - DNA, 25 bp, Probe Sequence
gttgccactgttattagattgacaa

SEQ ID NO: 39574 - DNA, 25 bp, Probe Sequence
ttgccactgttattagattgacaag

SEQ ID NO: 39575 - DNA, 25 bp, Probe Sequence
gccactgttattagattgacaagat

SEQ ID NO: 39576 - DNA, 25 bp, Probe Sequence
ggttgccactgttattagattgaca

SEQ ID NO: 39577 - DNA, 25 bp, Probe Sequence
aatggttgccactgttattagattg

SEQ ID NO: 39578 - DNA, 25 bp, Probe Sequence
agaatggttgccactgttattagat

SEQ ID NO: 39579 - DNA, 25 bp, Probe Sequence
gaagaatggttgccactgttattag

SEQ ID NO: 39580 - DNA, 25 bp, Probe Sequence
gaatggttgccactgttattagatt

SEQ ID NO: 39581 - DNA, 25 bp, Probe Sequence
aagaatggttgccactgttattaga

SEQ ID NO: 39582 - DNA, 25 bp, Probe Sequence
aggctgttaatagtagttaagtgtt

SEQ ID NO: 39583 - DNA, 25 bp, Probe Sequence
aaggctgttaatagtagttaagtgt

SEQ ID NO: 39584 - DNA, 25 bp, Probe Sequence
atggttgccactgttattagattga

SEQ ID NO: 39585 - DNA, 25 bp, Probe Sequence
tgaagaatggttgccactgttatta

SEQ ID NO: 39586 - DNA, 25 bp, Probe Sequence
gttctacagcataagccttatcctg

SEQ ID NO: 39587 - DNA, 25 bp, Probe Sequence
ggttctacagcataagccttatcct

SEQ ID NO: 39588 - DNA, 25 bp, Probe Sequence
tgttaattctgtcacagcctgtata

SEQ ID NO: 39589 - DNA, 25 bp, Probe Sequence
tggcaaaggctgttaatagtagtta

SEQ ID NO: 39590 - DNA, 25 bp, Probe Sequence
ctaagagaagtgcatgtgaagaatg

SEQ ID NO: 39591 - DNA, 25 bp, Probe Sequence
ccactgttattagattgacaagatg

SEQ ID NO: 39592 - DNA, 25 bp, Probe Sequence
ttggcaaaggctgttaatagtagtt

SEQ ID NO: 39593 - DNA, 25 bp, Probe Sequence
tggttgccactgttattagattgac

SEQ ID NO: 39594 - DNA, 25 bp, Probe Sequence
tctaagagaagtgcatgtgaagaat

SEQ ID NO: 39595 - DNA, 25 bp, Probe Sequence
ccctctttcaaactgttaattctgt

SEQ ID NO: 39596 - DNA, 25 bp, Probe Sequence
aagaatcagagcagtagcaagagaa

SEQ ID NO: 39597 - DNA, 25 bp, Probe Sequence
caagaatcagagcagtagcaagaga

SEQ ID NO: 39598 - DNA, 25 bp, Probe Sequence
aacgagacaagaatcagagcagtag

SEQ ID NO: 39599 - DNA, 25 bp, Probe Sequence
gaacgagacaagaatcagagcagta

SEQ ID NO: 39600 - DNA, 25 bp, Probe Sequence
acaagaatcagagcagtagcaagag

SEQ ID NO: 39601 - DNA, 25 bp, Probe Sequence
agacaagaatcagagcagtagcaag

SEQ ID NO: 39602 - DNA, 25 bp, Probe Sequence
gacaagaatcagagcagtagcaaga

SEQ ID NO: 39603 - DNA, 25 bp, Probe Sequence
gagacaagaatcagagcagtagcaa

SEQ ID NO: 39604 - DNA, 25 bp, Probe Sequence
tcacagagctatgaacagaatatca

SEQ ID NO: 39605 - DNA, 25 bp, Probe Sequence
cgctttcaggaagacattatttcaa

SEQ ID NO: 39606 - DNA, 25 bp, Probe Sequence
cacagagctatgaacagaatatcaa

SEQ ID NO: 39607 - DNA, 25 bp, Probe Sequence
ctcacagagctatgaacagaatatc

SEQ ID NO: 39608 - DNA, 25 bp, Probe Sequence
ttaacctacctcccaacaccattat

SEQ ID NO: 39609 - DNA, 25 bp, Probe Sequence
gaatatcaaacagattggcaccttt

SEQ ID NO: 39610 - DNA, 25 bp, Probe Sequence
aacagaatatcaaacagattggcac

SEQ ID NO: 39611 - DNA, 25 bp, Probe Sequence
gaacagaatatcaaacagattggca

SEQ ID NO: 39612 - DNA, 25 bp, Probe Sequence
ttcaatatggaataagactgccagt

SEQ ID NO: 39613 - DNA, 25 bp, Probe Sequence
gaatcagagcagtagcaagagaaag

SEQ ID NO: 39614 - DNA, 25 bp, Probe Sequence
agaatatcaaacagattggcacctt

SEQ ID NO: 39615 - DNA, 25 bp, Probe Sequence
tgaacagaatatcaaacagattggc

SEQ ID NO: 39616 - DNA, 25 bp, Probe Sequence
aatatggaataagactgccagtgac

SEQ ID NO: 39617 - DNA, 25 bp, Probe Sequence
caatatggaataagactgccagtga

SEQ ID NO: 39618 - DNA, 25 bp, Probe Sequence
tcaatatggaataagactgccagtg

SEQ ID NO: 39619 - DNA, 25 bp, Probe Sequence
agaatcagagcagtagcaagagaaa

SEQ ID NO: 39620 - DNA, 25 bp, Probe Sequence
ggcataggattacttgtctcagaag

SEQ ID NO: 39621 - DNA, 25 bp, Probe Sequence
agaggttactggagttcttattcaa

SEQ ID NO: 39622 - DNA, 25 bp, Probe Sequence
tgctgaagtgagattctactattgt

SEQ ID NO: 39623 - DNA, 25 bp, Probe Sequence
cctcattcattattgtaccagcatc

SEQ ID NO: 39624 - DNA, 25 bp, Probe Sequence
tcctcattcattattgtaccagcat

SEQ ID NO: 39625 - DNA, 25 bp, Probe Sequence
ttcctcattcattattgtaccagca

SEQ ID NO: 39626 - DNA, 25 bp, Probe Sequence
cttcctcattcattattgtaccagc

SEQ ID NO: 39627 - DNA, 25 bp, Probe Sequence
ttctactattgttcattgcttcctt

SEQ ID NO: 39628 - DNA, 25 bp, Probe Sequence
aagaatagccagtacagcatacaat

SEQ ID NO: 39629 - DNA, 25 bp, Probe Sequence
gcataggattacttgtctcagaagc

SEQ ID NO: 39630 - DNA, 25 bp, Probe Sequence
aatagccagtacagcatacaatctc

SEQ ID NO: 39631 - DNA, 25 bp, Probe Sequence
gaatagccagtacagcatacaatct

SEQ ID NO: 39632 - DNA, 25 bp, Probe Sequence
agaatagccagtacagcatacaatc

SEQ ID NO: 39633 - DNA, 25 bp, Probe Sequence
ttcattattgtaccagcatcatagc

SEQ ID NO: 39634 - DNA, 25 bp, Probe Sequence
taggcttgagtgaacttctgatcta

SEQ ID NO: 39635 - DNA, 25 bp, Probe Sequence
ctcattcattattgtaccagcatca

SEQ ID NO: 39636 - DNA, 25 bp, Probe Sequence
gaggctggtctgaatatgattgttc

SEQ ID NO: 39637 - DNA, 25 bp, Probe Sequence
attctactattgttcattgcttcct

SEQ ID NO: 39638 - DNA, 25 bp, Probe Sequence
gaggttactggagttcttattcaat

SEQ ID NO: 39639 - DNA, 25 bp, Probe Sequence
gattctactattgttcattgcttcc

SEQ ID NO: 39640 - DNA, 25 bp, Probe Sequence
caagaggctggtctgaatatgattg

SEQ ID NO: 39641 - DNA, 25 bp, Probe Sequence
agaggctggtctgaatatgattgtt

SEQ ID NO: 39642 - DNA, 25 bp, Probe Sequence
aagaggctggtctgaatatgattgt

SEQ ID NO: 39643 - DNA, 25 bp, Probe Sequence
acaagaggctggtctgaatatgatt

SEQ ID NO: 39644 - DNA, 25 bp, Probe Sequence
gaaactccgtctctaccaatataca

SEQ ID NO: 39645 - DNA, 25 bp, Probe Sequence
tgaaactccgtctctaccaatatac

SEQ ID NO: 39646 - DNA, 25 bp, Probe Sequence
gtgaaactccgtctctaccaatata

SEQ ID NO: 39647 - DNA, 25 bp, Probe Sequence
aactccgtctctaccaatatacaaa

SEQ ID NO: 39648 - DNA, 25 bp, Probe Sequence
aaactccgtctctaccaatatacaa

SEQ ID NO: 39649 - DNA, 25 bp, Probe Sequence
caggacattcttgccgtattctcat

SEQ ID NO: 39650 - DNA, 25 bp, Probe Sequence
aaagttacagtttacgcaggacatt

SEQ ID NO: 39651 - DNA, 25 bp, Probe Sequence
ttacagtttacgcaggacattcttg

SEQ ID NO: 39652 - DNA, 25 bp, Probe Sequence
gttacagtttacgcaggacattctt

SEQ ID NO: 39653 - DNA, 25 bp, Probe Sequence
aagttacagtttacgcaggacattc

SEQ ID NO: 39654 - DNA, 25 bp, Probe Sequence
tagtgaaactccgtctctaccaata

SEQ ID NO: 39655 - DNA, 25 bp, Probe Sequence
agtgaaactccgtctctaccaatat

SEQ ID NO: 39656 - DNA, 25 bp, Probe Sequence
atagtgaaactccgtctctaccaat

SEQ ID NO: 39657 - DNA, 25 bp, Probe Sequence
caacatagtgaaactccgtctctac

SEQ ID NO: 39658 - DNA, 25 bp, Probe Sequence
caaagttacagtttacgcaggacat

SEQ ID NO: 39659 - DNA, 25 bp, Probe Sequence
caatatgcagcaatggtaagcgtaa

SEQ ID NO: 39660 - DNA, 25 bp, Probe Sequence
catgatcccagataagtgtgtgttt

SEQ ID NO: 39661 - DNA, 25 bp, Probe Sequence
aggacattcttgccgtattctcatg

SEQ ID NO: 39662 - DNA, 25 bp, Probe Sequence
agttacagtttacgcaggacattct

SEQ ID NO: 39663 - DNA, 25 bp, Probe Sequence
catagtgaaactccgtctctaccaa

SEQ ID NO: 39664 - DNA, 25 bp, Probe Sequence
aacatagtgaaactccgtctctacc

SEQ ID NO: 39665 - DNA, 25 bp, Probe Sequence
ccaacatagtgaaactccgtctcta

SEQ ID NO: 39666 - DNA, 25 bp, Probe Sequence
tcaaagttacagtttacgcaggaca

SEQ ID NO: 39667 - DNA, 25 bp, Probe Sequence
acaatatgcagcaatggtaagcgta

SEQ ID NO: 39668 - DNA, 25 bp, Probe Sequence
gattacgtcatccagactactcgaa

SEQ ID NO: 39669 - DNA, 25 bp, Probe Sequence
catgattacgtcatccagactactc

SEQ ID NO: 39670 - DNA, 25 bp, Probe Sequence
tgattacgtcatccagactactcga

SEQ ID NO: 39671 - DNA, 25 bp, Probe Sequence
ccatgattacgtcatccagactact

SEQ ID NO: 39672 - DNA, 25 bp, Probe Sequence
atgattacgtcatccagactactcg

SEQ ID NO: 39673 - DNA, 25 bp, Probe Sequence
ttacgtcatccagactactcgaaat

SEQ ID NO: 39674 - DNA, 25 bp, Probe Sequence
attacgtcatccagactactcgaaa

SEQ ID NO: 39675 - DNA, 25 bp, Probe Sequence
tacgtcatccagactactcgaaatg

SEQ ID NO: 39676 - DNA, 25 bp, Probe Sequence
gtacatcatcctgtgctcggaaatc

SEQ ID NO: 39677 - DNA, 25 bp, Probe Sequence
agtacatcatcctgtgctcggaaat

SEQ ID NO: 39678 - DNA, 25 bp, Probe Sequence
cccatgattacgtcatccagactac

SEQ ID NO: 39679 - DNA, 25 bp, Probe Sequence
tacatcatcctgtgctcggaaatcc

SEQ ID NO: 39680 - DNA, 25 bp, Probe Sequence
gagtacatcatcctgtgctcggaaa

SEQ ID NO: 39681 - DNA, 25 bp, Probe Sequence
acgtcatccagactactcgaaatgg

SEQ ID NO: 39682 - DNA, 25 bp, Probe Sequence
gtttaacctcacggcccatgattac

SEQ ID NO: 39683 - DNA, 25 bp, Probe Sequence
gcccatgattacgtcatccagacta

SEQ ID NO: 39684 - DNA, 25 bp, Probe Sequence
ggtttaacctcacggcccatgatta

SEQ ID NO: 39685 - DNA, 25 bp, Probe Sequence
cttgtgtatgttggatattgtggtg

SEQ ID NO: 39686 - DNA, 25 bp, Probe Sequence
tgtgtatgttggatattgtggtgtt

SEQ ID NO: 39687 - DNA, 25 bp, Probe Sequence
ttgtgtatgttggatattgtggtgt

SEQ ID NO: 39688 - DNA, 25 bp, Probe Sequence
ctgaggcttgtgtatgttggatatt

SEQ ID NO: 39689 - DNA, 25 bp, Probe Sequence
aagatactgaattggctgaagaact

SEQ ID NO: 39690 - DNA, 25 bp, Probe Sequence
agatactgaattggctgaagaactc

SEQ ID NO: 39691 - DNA, 25 bp, Probe Sequence
gaggcttgtgtatgttggatattgt

SEQ ID NO: 39692 - DNA, 25 bp, Probe Sequence
tgaggcttgtgtatgttggatattg

SEQ ID NO: 39693 - DNA, 25 bp, Probe Sequence
aggcttgtgtatgttggatattgtg

SEQ ID NO: 39694 - DNA, 25 bp, Probe Sequence
gcttgtgtatgttggatattgtggt

SEQ ID NO: 39695 - DNA, 25 bp, Probe Sequence
gatactgaattggctgaagaactcc

SEQ ID NO: 39696 - DNA, 25 bp, Probe Sequence
atactgaattggctgaagaactcct

SEQ ID NO: 39697 - DNA, 25 bp, Probe Sequence
agacaacactaatcagcacatcgta

SEQ ID NO: 39698 - DNA, 25 bp, Probe Sequence
ggcttgtgtatgttggatattgtgg

SEQ ID NO: 39699 - DNA, 25 bp, Probe Sequence
aatgttacagacaacttgcctgatt

SEQ ID NO: 39700 - DNA, 25 bp, Probe Sequence
actgctcaatattcaatctgttgtg

SEQ ID NO: 39701 - DNA, 25 bp, Probe Sequence
aagaagaagaacaagctacagagac

SEQ ID NO: 39702 - DNA, 25 bp, Probe Sequence
cctgaggcttgtgtatgttggatat

SEQ ID NO: 39703 - DNA, 25 bp, Probe Sequence
gacaacactaatcagcacatcgtac

SEQ ID NO: 39704 - DNA, 25 bp, Probe Sequence
ctgctcaatattcaatctgttgtga

SEQ ID NO: 39705 - DNA, 25 bp, Probe Sequence
aactgctcaatattcaatctgttgt

SEQ ID NO: 39706 - DNA, 25 bp, Probe Sequence
tactgaattggctgaagaactcctg

SEQ ID NO: 39707 - DNA, 25 bp, Probe Sequence
tcaatctgttgtgaagaacctgatt

SEQ ID NO: 39708 - DNA, 25 bp, Probe Sequence
ttatgttgtgctgtatcctgtgctt

SEQ ID NO: 39709 - DNA, 25 bp, Probe Sequence
acttcattagcacacagattcactt

SEQ ID NO: 39710 - DNA, 25 bp, Probe Sequence
gacttcattagcacacagattcact

SEQ ID NO: 39711 - DNA, 25 bp, Probe Sequence
agacttcattagcacacagattcac

SEQ ID NO: 39712 - DNA, 25 bp, Probe Sequence
cagacttcattagcacacagattca

SEQ ID NO: 39713 - DNA, 25 bp, Probe Sequence
gcagacttcattagcacacagattc

SEQ ID NO: 39714 - DNA, 25 bp, Probe Sequence
tacagacatatccacaaggtcgtaa

SEQ ID NO: 39715 - DNA, 25 bp, Probe Sequence
cttcattagcacacagattcacttt

SEQ ID NO: 39716 - DNA, 25 bp, Probe Sequence
gtacagacatatccacaaggtcgta

SEQ ID NO: 39717 - DNA, 25 bp, Probe Sequence
ttcattagcacacagattcacttta

SEQ ID NO: 39718 - DNA, 25 bp, Probe Sequence
tcattagcacacagattcactttaa

SEQ ID NO: 39719 - DNA, 25 bp, Probe Sequence
agcacacagattcactttaatttct

SEQ ID NO: 39720 - DNA, 25 bp, Probe Sequence
attaacacccagtacagacatatcc

SEQ ID NO: 39721 - DNA, 25 bp, Probe Sequence
gctattaacacccagtacagacata

SEQ ID NO: 39722 - DNA, 25 bp, Probe Sequence
ttaacacccagtacagacatatcca

SEQ ID NO: 39723 - DNA, 25 bp, Probe Sequence
atttgccaatgtagtctcacttaaa

SEQ ID NO: 39724 - DNA, 25 bp, Probe Sequence
gcacacagattcactttaatttctt

SEQ ID NO: 39725 - DNA, 25 bp, Probe Sequence
ccagtacagacatatccacaaggtc

SEQ ID NO: 39726 - DNA, 25 bp, Probe Sequence
agacatatccacaaggtcgtaaatg

SEQ ID NO: 39727 - DNA, 25 bp, Probe Sequence
cagacatatccacaaggtcgtaaat

SEQ ID NO: 39728 - DNA, 25 bp, Probe Sequence
taacacccagtacagacatatccac

SEQ ID NO: 39729 - DNA, 25 bp, Probe Sequence
tagcacacagattcactttaatttc

SEQ ID NO: 39730 - DNA, 25 bp, Probe Sequence
ctttacaggcttggctttgagattc

SEQ ID NO: 39731 - DNA, 25 bp, Probe Sequence
cagtacagacatatccacaaggtcg

SEQ ID NO: 39732 - DNA, 25 bp, Probe Sequence
cattagcacacagattcactttaat

SEQ ID NO: 39733 - DNA, 25 bp, Probe Sequence
atggcgaaacctcatctctactaaa

SEQ ID NO: 39734 - DNA, 25 bp, Probe Sequence
tttcagtcccagaacctacagatac

SEQ ID NO: 39735 - DNA, 25 bp, Probe Sequence
gcagccatcttaatacattaaacca

SEQ ID NO: 39736 - DNA, 25 bp, Probe Sequence
agcagccatcttaatacattaaacc

SEQ ID NO: 39737 - DNA, 25 bp, Probe Sequence
ccagcagccatcttaatacattaaa

SEQ ID NO: 39738 - DNA, 25 bp, Probe Sequence
cccagcagccatcttaatacattaa

SEQ ID NO: 39739 - DNA, 25 bp, Probe Sequence
ctaagccaagaacttacagggattt

SEQ ID NO: 39740 - DNA, 25 bp, Probe Sequence
tactaagccaagaacttacagggat

SEQ ID NO: 39741 - DNA, 25 bp, Probe Sequence
cagcagccatcttaatacattaaac

SEQ ID NO: 39742 - DNA, 25 bp, Probe Sequence
gcctcaactttatccacatgaaatg

SEQ ID NO: 39743 - DNA, 25 bp, Probe Sequence
tttctcgcctcaactttatccacat

SEQ ID NO: 39744 - DNA, 25 bp, Probe Sequence
ctactaagccaagaacttacaggga

SEQ ID NO: 39745 - DNA, 25 bp, Probe Sequence
agccatcttaatacattaaaccagt

SEQ ID NO: 39746 - DNA, 25 bp, Probe Sequence
actaagccaagaacttacagggatt

SEQ ID NO: 39747 - DNA, 25 bp, Probe Sequence
cagccatcttaatacattaaaccag

SEQ ID NO: 39748 - DNA, 25 bp, Probe Sequence
catggcgaaacctcatctctactaa

SEQ ID NO: 39749 - DNA, 25 bp, Probe Sequence
gaacctacagataccctgctacttg

SEQ ID NO: 39750 - DNA, 25 bp, Probe Sequence
cgcctcaactttatccacatgaaat

SEQ ID NO: 39751 - DNA, 25 bp, Probe Sequence
gcccagcagccatcttaatacatta

SEQ ID NO: 39752 - DNA, 25 bp, Probe Sequence
agaacctacagataccctgctactt

SEQ ID NO: 39753 - DNA, 25 bp, Probe Sequence
gccatcttaatacattaaaccagtt

SEQ ID NO: 39754 - DNA, 25 bp, Probe Sequence
ttcagtcccagaacctacagatacc

SEQ ID NO: 39755 - DNA, 25 bp, Probe Sequence
ctacagataccctgctacttgcttc

SEQ ID NO: 39756 - DNA, 25 bp, Probe Sequence
ggcgaaacctcatctctactaaaat

SEQ ID NO: 39757 - DNA, 25 bp, Probe Sequence
gtactgcttatggttgtaggattca

SEQ ID NO: 39758 - DNA, 25 bp, Probe Sequence
tgtactgcttatggttgtaggattc

SEQ ID NO: 39759 - DNA, 25 bp, Probe Sequence
ctgtactgcttatggttgtaggatt

SEQ ID NO: 39760 - DNA, 25 bp, Probe Sequence
cttctgtactgcttatggttgtagg

SEQ ID NO: 39761 - DNA, 25 bp, Probe Sequence
tctgtactgcttatggttgtaggat

SEQ ID NO: 39762 - DNA, 25 bp, Probe Sequence
ttctgtactgcttatggttgtagga

SEQ ID NO: 39763 - DNA, 25 bp, Probe Sequence
tactgcttatggttgtaggattcag

SEQ ID NO: 39764 - DNA, 25 bp, Probe Sequence
gcttctgtactgcttatggttgtag

SEQ ID NO: 39765 - DNA, 25 bp, Probe Sequence
tagagataaggattgcacattggaa

SEQ ID NO: 39766 - DNA, 25 bp, Probe Sequence
ttagagataaggattgcacattgga

SEQ ID NO: 39767 - DNA, 25 bp, Probe Sequence
agagaaggtagttaatgcagtagaa

SEQ ID NO: 39768 - DNA, 25 bp, Probe Sequence
aagagaaggtagttaatgcagtaga

SEQ ID NO: 39769 - DNA, 25 bp, Probe Sequence
ggcttctgtactgcttatggttgta

SEQ ID NO: 39770 - DNA, 25 bp, Probe Sequence
actgcttatggttgtaggattcagg

SEQ ID NO: 39771 - DNA, 25 bp, Probe Sequence
ttggcttctgtactgcttatggttg

SEQ ID NO: 39772 - DNA, 25 bp, Probe Sequence
agttaatgcagtagaaagtagtggt

SEQ ID NO: 39773 - DNA, 25 bp, Probe Sequence
agagataaggattgcacattggaaa

SEQ ID NO: 39774 - DNA, 25 bp, Probe Sequence
tttagagataaggattgcacattgg

SEQ ID NO: 39775 - DNA, 25 bp, Probe Sequence
tgggcaccacatttcttatattaaa

SEQ ID NO: 39776 - DNA, 25 bp, Probe Sequence
ataacaatctctaatttgcatgggc

SEQ ID NO: 39777 - DNA, 25 bp, Probe Sequence
atgggcaccacatttcttatattaa

SEQ ID NO: 39778 - DNA, 25 bp, Probe Sequence
tttggcttctgtactgcttatggtt

SEQ ID NO: 39779 - DNA, 25 bp, Probe Sequence
catgggcaccacatttcttatatta

SEQ ID NO: 39780 - DNA, 25 bp, Probe Sequence
gaaggtagttaatgcagtagaaagt

SEQ ID NO: 39781 - DNA, 25 bp, Probe Sequence
caagagtaagaggcaacagatagag

SEQ ID NO: 39782 - DNA, 25 bp, Probe Sequence
aagagtaagaggcaacagatagagt

SEQ ID NO: 39783 - DNA, 25 bp, Probe Sequence
tcaagagtaagaggcaacagataga

SEQ ID NO: 39784 - DNA, 25 bp, Probe Sequence
gtcaagagtaagaggcaacagatag

SEQ ID NO: 39785 - DNA, 25 bp, Probe Sequence
gtgtccttggtaataagaagtcaga

SEQ ID NO: 39786 - DNA, 25 bp, Probe Sequence
agtgtccttggtaataagaagtcag

SEQ ID NO: 39787 - DNA, 25 bp, Probe Sequence
gagtgtccttggtaataagaagtca

SEQ ID NO: 39788 - DNA, 25 bp, Probe Sequence
tgtccttggtaataagaagtcagag

SEQ ID NO: 39789 - DNA, 25 bp, Probe Sequence
agagtgtccttggtaataagaagtc

SEQ ID NO: 39790 - DNA, 25 bp, Probe Sequence
gtccttggtaataagaagtcagaga

SEQ ID NO: 39791 - DNA, 25 bp, Probe Sequence
agagtaagaggcaacagatagagtg

SEQ ID NO: 39792 - DNA, 25 bp, Probe Sequence
tccttggtaataagaagtcagagat

SEQ ID NO: 39793 - DNA, 25 bp, Probe Sequence
tagagtgtccttggtaataagaagt

SEQ ID NO: 39794 - DNA, 25 bp, Probe Sequence
caacagatagagtgtccttggtaat

SEQ ID NO: 39795 - DNA, 25 bp, Probe Sequence
agatagagtgtccttggtaataaga

SEQ ID NO: 39796 - DNA, 25 bp, Probe Sequence
cagatagagtgtccttggtaataag

SEQ ID NO: 39797 - DNA, 25 bp, Probe Sequence
aattcgtgatgttagtaaccttggc

SEQ ID NO: 39798 - DNA, 25 bp, Probe Sequence
ccttggtaataagaagtcagagatt

SEQ ID NO: 39799 - DNA, 25 bp, Probe Sequence
tgtcaagagtaagaggcaacagata

SEQ ID NO: 39800 - DNA, 25 bp, Probe Sequence
acagatagagtgtccttggtaataa

SEQ ID NO: 39801 - DNA, 25 bp, Probe Sequence
aacagatagagtgtccttggtaata

SEQ ID NO: 39802 - DNA, 25 bp, Probe Sequence
aatacttctattgttatgcctccaa

SEQ ID NO: 39803 - DNA, 25 bp, Probe Sequence
agtaagaggcaacagatagagtgtc

SEQ ID NO: 39804 - DNA, 25 bp, Probe Sequence
gagtaagaggcaacagatagagtgt

SEQ ID NO: 39805 - DNA, 25 bp, Probe Sequence
gcttcttctcttgtggttgttagat

SEQ ID NO: 39806 - DNA, 25 bp, Probe Sequence
cttcttctcttgtggttgttagatc

SEQ ID NO: 39807 - DNA, 25 bp, Probe Sequence
ccatgatactgtcagttaccttagt

SEQ ID NO: 39808 - DNA, 25 bp, Probe Sequence
gccatgatactgtcagttaccttag

SEQ ID NO: 39809 - DNA, 25 bp, Probe Sequence
tgccatgatactgtcagttacctta

SEQ ID NO: 39810 - DNA, 25 bp, Probe Sequence
aggtggatgtttgggattgtattat

SEQ ID NO: 39811 - DNA, 25 bp, Probe Sequence
gaggtggatgtttgggattgtatta

SEQ ID NO: 39812 - DNA, 25 bp, Probe Sequence
atttaagaggtggatgtttgggatt

SEQ ID NO: 39813 - DNA, 25 bp, Probe Sequence
ggtggatgtttgggattgtattatt

SEQ ID NO: 39814 - DNA, 25 bp, Probe Sequence
taatttaagaggtggatgtttggga

SEQ ID NO: 39815 - DNA, 25 bp, Probe Sequence
gtaatttaagaggtggatgtttggg

SEQ ID NO: 39816 - DNA, 25 bp, Probe Sequence
aatttaagaggtggatgtttgggat

SEQ ID NO: 39817 - DNA, 25 bp, Probe Sequence
cagcttcttctcttgtggttgttag

SEQ ID NO: 39818 - DNA, 25 bp, Probe Sequence
ggaaatgacctttaatgacactaca

SEQ ID NO: 39819 - DNA, 25 bp, Probe Sequence
agtaatttaagaggtggatgtttgg

SEQ ID NO: 39820 - DNA, 25 bp, Probe Sequence
tttaagaggtggatgtttgggattg

SEQ ID NO: 39821 - DNA, 25 bp, Probe Sequence
catgatactgtcagttaccttagtt

SEQ ID NO: 39822 - DNA, 25 bp, Probe Sequence
taagaggtggatgtttgggattgta

SEQ ID NO: 39823 - DNA, 25 bp, Probe Sequence
agttactcaaatctgtgaagactgt

SEQ ID NO: 39824 - DNA, 25 bp, Probe Sequence
agcttcttctcttgtggttgttaga

SEQ ID NO: 39825 - DNA, 25 bp, Probe Sequence
aagttactcaaatctgtgaagactg

SEQ ID NO: 39826 - DNA, 25 bp, Probe Sequence
agaggtggatgtttgggattgtatt

SEQ ID NO: 39827 - DNA, 25 bp, Probe Sequence
aagaggtggatgtttgggattgtat

SEQ ID NO: 39828 - DNA, 25 bp, Probe Sequence
tgtgaagactgtatttgctataact

SEQ ID NO: 39829 - DNA, 25 bp, Probe Sequence
tcattaaatggaagtgtctgccaaa

SEQ ID NO: 39830 - DNA, 25 bp, Probe Sequence
gtcattaaatggaagtgtctgccaa

SEQ ID NO: 39831 - DNA, 25 bp, Probe Sequence
cattaaatggaagtgtctgccaaaa

SEQ ID NO: 39832 - DNA, 25 bp, Probe Sequence
tcttgctaatggttagaacagtgaa

SEQ ID NO: 39833 - DNA, 25 bp, Probe Sequence
cttgctaatggttagaacagtgaat

SEQ ID NO: 39834 - DNA, 25 bp, Probe Sequence
tgctaatggttagaacagtgaatac

SEQ ID NO: 39835 - DNA, 25 bp, Probe Sequence
gctaatggttagaacagtgaatact

SEQ ID NO: 39836 - DNA, 25 bp, Probe Sequence
gcacagctctagttacattcttatg

SEQ ID NO: 39837 - DNA, 25 bp, Probe Sequence
ttgctaatggttagaacagtgaata

SEQ ID NO: 39838 - DNA, 25 bp, Probe Sequence
gccttaaagtagtccattcttgcta

SEQ ID NO: 39839 - DNA, 25 bp, Probe Sequence
cacagctctagttacattcttatga

SEQ ID NO: 39840 - DNA, 25 bp, Probe Sequence
ttcttgctaatggttagaacagtga

SEQ ID NO: 39841 - DNA, 25 bp, Probe Sequence
atagttctttgtaacctgtgtgaag

SEQ ID NO: 39842 - DNA, 25 bp, Probe Sequence
attcttgctaatggttagaacagtg

SEQ ID NO: 39843 - DNA, 25 bp, Probe Sequence
cattcttgctaatggttagaacagt

SEQ ID NO: 39844 - DNA, 25 bp, Probe Sequence
ccagccttaaagtagtccattcttg

SEQ ID NO: 39845 - DNA, 25 bp, Probe Sequence
tagttctttgtaacctgtgtgaagc

SEQ ID NO: 39846 - DNA, 25 bp, Probe Sequence
aatagttctttgtaacctgtgtgaa

SEQ ID NO: 39847 - DNA, 25 bp, Probe Sequence
aaatagttctttgtaacctgtgtga

SEQ ID NO: 39848 - DNA, 25 bp, Probe Sequence
ccttaaagtagtccattcttgctaa

SEQ ID NO: 39849 - DNA, 25 bp, Probe Sequence
cagccttaaagtagtccattcttgc

SEQ ID NO: 39850 - DNA, 25 bp, Probe Sequence
tttccctaacactttcttgaaggtc

SEQ ID NO: 39851 - DNA, 25 bp, Probe Sequence
acagctctagttacattcttatgat

SEQ ID NO: 39852 - DNA, 25 bp, Probe Sequence
agcacagctctagttacattcttat

SEQ ID NO: 39853 - DNA, 25 bp, Probe Sequence
agttacattcttatgatatggcatt

SEQ ID NO: 39854 - DNA, 25 bp, Probe Sequence
tggttagaacagtgaatactagtgg

SEQ ID NO: 39855 - DNA, 25 bp, Probe Sequence
ggttagaacagtgaatactagtgga

SEQ ID NO: 39856 - DNA, 25 bp, Probe Sequence
tatgaatgagatcagagccaagaag

SEQ ID NO: 39857 - DNA, 25 bp, Probe Sequence
ctatgaatgagatcagagccaagaa

SEQ ID NO: 39858 - DNA, 25 bp, Probe Sequence
ttgaagaggctatgaatgagatcag

SEQ ID NO: 39859 - DNA, 25 bp, Probe Sequence
gaagaggctatgaatgagatcagag

SEQ ID NO: 39860 - DNA, 25 bp, Probe Sequence
attgaagaggctatgaatgagatca

SEQ ID NO: 39861 - DNA, 25 bp, Probe Sequence
tgaagaggctatgaatgagatcaga

SEQ ID NO: 39862 - DNA, 25 bp, Probe Sequence
catactacatgatgtggtggaagtg

SEQ ID NO: 39863 - DNA, 25 bp, Probe Sequence
aaactacaagagcaagagaaacaac

SEQ ID NO: 39864 - DNA, 25 bp, Probe Sequence
tgaagaaactacaagagcaagagaa

SEQ ID NO: 39865 - DNA, 25 bp, Probe Sequence
gaaactacaagagcaagagaaacaa

SEQ ID NO: 39866 - DNA, 25 bp, Probe Sequence
agaaactacaagagcaagagaaaca

SEQ ID NO: 39867 - DNA, 25 bp, Probe Sequence
aagaaactacaagagcaagagaaac

SEQ ID NO: 39868 - DNA, 25 bp, Probe Sequence
ctgaagaaactacaagagcaagaga

SEQ ID NO: 39869 - DNA, 25 bp, Probe Sequence
tacaagagcaagagaaacaacagaa

SEQ ID NO: 39870 - DNA, 25 bp, Probe Sequence
caagagcaagagaaacaacagaaag

SEQ ID NO: 39871 - DNA, 25 bp, Probe Sequence
aactacaagagcaagagaaacaaca

SEQ ID NO: 39872 - DNA, 25 bp, Probe Sequence
gaagaaactacaagagcaagagaaa

SEQ ID NO: 39873 - DNA, 25 bp, Probe Sequence
caagatcgagaggagcatactacat

SEQ ID NO: 39874 - DNA, 25 bp, Probe Sequence
gaacaagatcgagaggagcatacta

SEQ ID NO: 39875 - DNA, 25 bp, Probe Sequence
gatcgagaggagcatactacatgat

SEQ ID NO: 39876 - DNA, 25 bp, Probe Sequence
aaggaggtgtcagatttcattcaag

SEQ ID NO: 39877 - DNA, 25 bp, Probe Sequence
aagagcaagagaaacaacagaaagt

SEQ ID NO: 39878 - DNA, 25 bp, Probe Sequence
ctacaagagcaagagaaacaacaga

SEQ ID NO: 39879 - DNA, 25 bp, Probe Sequence
ccattgaagaggctatgaatgagat

SEQ ID NO: 39880 - DNA, 25 bp, Probe Sequence
ccctctttcttgcctctatttctta

SEQ ID NO: 39881 - DNA, 25 bp, Probe Sequence
ttcttgcctctatttcttagttgga

SEQ ID NO: 39882 - DNA, 25 bp, Probe Sequence
ctctcacatttcagtccgtttatca

SEQ ID NO: 39883 - DNA, 25 bp, Probe Sequence
tactccctctttcttgcctctattt

SEQ ID NO: 39884 - DNA, 25 bp, Probe Sequence
ttactccctctttcttgcctctatt

SEQ ID NO: 39885 - DNA, 25 bp, Probe Sequence
tcttgcctctatttcttagttggaa

SEQ ID NO: 39886 - DNA, 25 bp, Probe Sequence
tttcttgcctctatttcttagttgg

SEQ ID NO: 39887 - DNA, 25 bp, Probe Sequence
cctctttcttgcctctatttcttag

SEQ ID NO: 39888 - DNA, 25 bp, Probe Sequence
tctcacatttcagtccgtttatcac

SEQ ID NO: 39889 - DNA, 25 bp, Probe Sequence
cttgcctctatttcttagttggaag

SEQ ID NO: 39890 - DNA, 25 bp, Probe Sequence
tccctctttcttgcctctatttctt

SEQ ID NO: 39891 - DNA, 25 bp, Probe Sequence
gttactccctctttcttgcctctat

SEQ ID NO: 39892 - DNA, 25 bp, Probe Sequence
cacatttcagtccgtttatcacttt

SEQ ID NO: 39893 - DNA, 25 bp, Probe Sequence
ttcagtccgtttatcactttaccaa

SEQ ID NO: 39894 - DNA, 25 bp, Probe Sequence
tttcagtccgtttatcactttacca

SEQ ID NO: 39895 - DNA, 25 bp, Probe Sequence
aactctcacatttcagtccgtttat

SEQ ID NO: 39896 - DNA, 25 bp, Probe Sequence
atttcagtccgtttatcactttacc

SEQ ID NO: 39897 - DNA, 25 bp, Probe Sequence
tcacatttcagtccgtttatcactt

SEQ ID NO: 39898 - DNA, 25 bp, Probe Sequence
ctctttcttgcctctatttcttagt

SEQ ID NO: 39899 - DNA, 25 bp, Probe Sequence
ctccctctttcttgcctctatttct

SEQ ID NO: 39900 - DNA, 25 bp, Probe Sequence
actctcacatttcagtccgtttatc

SEQ ID NO: 39901 - DNA, 25 bp, Probe Sequence
agtccgtttatcactttaccaacag

SEQ ID NO: 39902 - DNA, 25 bp, Probe Sequence
tcagtccgtttatcactttaccaac

SEQ ID NO: 39903 - DNA, 25 bp, Probe Sequence
ctcacatttcagtccgtttatcact

SEQ ID NO: 39904 - DNA, 25 bp, Probe Sequence
gtctacaaccactacctgttctctg

SEQ ID NO: 39905 - DNA, 25 bp, Probe Sequence
ttgtctacaaccactacctgttctc

SEQ ID NO: 39906 - DNA, 25 bp, Probe Sequence
ctttctaccgttaagagacatccag

SEQ ID NO: 39907 - DNA, 25 bp, Probe Sequence
tgtctacaaccactacctgttctct

SEQ ID NO: 39908 - DNA, 25 bp, Probe Sequence
ttctaccgttaagagacatccagca

SEQ ID NO: 39909 - DNA, 25 bp, Probe Sequence
tctaccgttaagagacatccagcag

SEQ ID NO: 39910 - DNA, 25 bp, Probe Sequence
tttctaccgttaagagacatccagc

SEQ ID NO: 39911 - DNA, 25 bp, Probe Sequence
gctttctaccgttaagagacatcca

SEQ ID NO: 39912 - DNA, 25 bp, Probe Sequence
tttcctttgtctacaaccactacct

SEQ ID NO: 39913 - DNA, 25 bp, Probe Sequence
gtttcctttgtctacaaccactacc

SEQ ID NO: 39914 - DNA, 25 bp, Probe Sequence
ctttgtctacaaccactacctgttc

SEQ ID NO: 39915 - DNA, 25 bp, Probe Sequence
cgtttcctttgtctacaaccactac

SEQ ID NO: 39916 - DNA, 25 bp, Probe Sequence
tttgtctacaaccactacctgttct

SEQ ID NO: 39917 - DNA, 25 bp, Probe Sequence
tctacaaccactacctgttctctgg

SEQ ID NO: 39918 - DNA, 25 bp, Probe Sequence
ttcctttgtctacaaccactacctg

SEQ ID NO: 39919 - DNA, 25 bp, Probe Sequence
gcctcagggtttctcctctttattt

SEQ ID NO: 39920 - DNA, 25 bp, Probe Sequence
cctctttattttcctgtggttttgt

SEQ ID NO: 39921 - DNA, 25 bp, Probe Sequence
tctcctctttattttcctgtggttt

SEQ ID NO: 39922 - DNA, 25 bp, Probe Sequence
ttctcctctttattttcctgtggtt

SEQ ID NO: 39923 - DNA, 25 bp, Probe Sequence
tttctcctctttattttcctgtggt

SEQ ID NO: 39924 - DNA, 25 bp, Probe Sequence
gtttctcctctttattttcctgtgg

SEQ ID NO: 39925 - DNA, 25 bp, Probe Sequence
ggtttctcctctttattttcctgtg

SEQ ID NO: 39926 - DNA, 25 bp, Probe Sequence
tcctctttattttcctgtggttttg

SEQ ID NO: 39927 - DNA, 25 bp, Probe Sequence
gaagactcaaaaggaaaagccattt

SEQ ID NO: 39928 - DNA, 25 bp, Probe Sequence
aatactatgtgttctggtgtgtctt

SEQ ID NO: 39929 - DNA, 25 bp, Probe Sequence
ccaagtagacgatgaaggaagatat

SEQ ID NO: 39930 - DNA, 25 bp, Probe Sequence
gataccgagattaaggatgatgtga

SEQ ID NO: 39931 - DNA, 25 bp, Probe Sequence
ccgagattaaggatgatgtgattga

SEQ ID NO: 39932 - DNA, 25 bp, Probe Sequence
atactatgtgttctggtgtgtctta

SEQ ID NO: 39933 - DNA, 25 bp, Probe Sequence
tactatgtgttctggtgtgtcttaa

SEQ ID NO: 39934 - DNA, 25 bp, Probe Sequence
taccgagattaaggatgatgtgatt

SEQ ID NO: 39935 - DNA, 25 bp, Probe Sequence
ggataccgagattaaggatgatgtg

SEQ ID NO: 39936 - DNA, 25 bp, Probe Sequence
accgagattaaggatgatgtgattg

SEQ ID NO: 39937 - DNA, 25 bp, Probe Sequence
ataccgagattaaggatgatgtgat

SEQ ID NO: 39938 - DNA, 25 bp, Probe Sequence
cgagattaaggatgatgtgattgaa

SEQ ID NO: 39939 - DNA, 25 bp, Probe Sequence
atatgtacctcttccaacttaccac

SEQ ID NO: 39940 - DNA, 25 bp, Probe Sequence
aggatgatgtgattgaagaatgtaa

SEQ ID NO: 39941 - DNA, 25 bp, Probe Sequence
aaggatgatgtgattgaagaatgta

SEQ ID NO: 39942 - DNA, 25 bp, Probe Sequence
taaggatgatgtgattgaagaatgt

SEQ ID NO: 39943 - DNA, 25 bp, Probe Sequence
agtagacgatgaaggaagatatagt

SEQ ID NO: 39944 - DNA, 25 bp, Probe Sequence
agattaaggatgatgtgattgaaga

SEQ ID NO: 39945 - DNA, 25 bp, Probe Sequence
tatgtacctcttccaacttaccaca

SEQ ID NO: 39946 - DNA, 25 bp, Probe Sequence
tccaagtagacgatgaaggaagata

SEQ ID NO: 39947 - DNA, 25 bp, Probe Sequence
gagattaaggatgatgtgattgaag

SEQ ID NO: 39948 - DNA, 25 bp, Probe Sequence
caagtagacgatgaaggaagatata

SEQ ID NO: 39949 - DNA, 25 bp, Probe Sequence
ggatgatgtgattgaagaatgtaat

SEQ ID NO: 39950 - DNA, 25 bp, Probe Sequence
ttaaggatgatgtgattgaagaatg

SEQ ID NO: 39951 - DNA, 25 bp, Probe Sequence
tagacgatgaaggaagatatagtcc

SEQ ID NO: 39952 - DNA, 25 bp, Probe Sequence
tgtgaagagaagagagaatgattga

SEQ ID NO: 39953 - DNA, 25 bp, Probe Sequence
aattccattcatacatcagcactct

SEQ ID NO: 39954 - DNA, 25 bp, Probe Sequence
caattccattcatacatcagcactc

SEQ ID NO: 39955 - DNA, 25 bp, Probe Sequence
atcaattccattcatacatcagcac

SEQ ID NO: 39956 - DNA, 25 bp, Probe Sequence
ccttcagcaatcaattccattcata

SEQ ID NO: 39957 - DNA, 25 bp, Probe Sequence
tcaattccattcatacatcagcact

SEQ ID NO: 39958 - DNA, 25 bp, Probe Sequence
ttcagcaatcaattccattcataca

SEQ ID NO: 39959 - DNA, 25 bp, Probe Sequence
aatcaattccattcatacatcagca

SEQ ID NO: 39960 - DNA, 25 bp, Probe Sequence
agcaatcaattccattcatacatca

SEQ ID NO: 39961 - DNA, 25 bp, Probe Sequence
tcagcaatcaattccattcatacat

SEQ ID NO: 39962 - DNA, 25 bp, Probe Sequence
caatcaattccattcatacatcagc

SEQ ID NO: 39963 - DNA, 25 bp, Probe Sequence
gcaatcaattccattcatacatcag

SEQ ID NO: 39964 - DNA, 25 bp, Probe Sequence
cagcaatcaattccattcatacatc

SEQ ID NO: 39965 - DNA, 25 bp, Probe Sequence
gtgaagagaagagagaatgattgaa

SEQ ID NO: 39966 - DNA, 25 bp, Probe Sequence
atgtgaagagaagagagaatgattg

SEQ ID NO: 39967 - DNA, 25 bp, Probe Sequence
cttcagcaatcaattccattcatac

SEQ ID NO: 39968 - DNA, 25 bp, Probe Sequence
cactccatcagagaatgactatcaa

SEQ ID NO: 39969 - DNA, 25 bp, Probe Sequence
ttcactccatcagagaatgactatc

SEQ ID NO: 39970 - DNA, 25 bp, Probe Sequence
cttcactccatcagagaatgactat

SEQ ID NO: 39971 - DNA, 25 bp, Probe Sequence
ttcctagtagataagtgaagagcag

SEQ ID NO: 39972 - DNA, 25 bp, Probe Sequence
tcactccatcagagaatgactatca

SEQ ID NO: 39973 - DNA, 25 bp, Probe Sequence
aatagacagtgttgaggaccatctt

SEQ ID NO: 39974 - DNA, 25 bp, Probe Sequence
actccatcagagaatgactatcaat

SEQ ID NO: 39975 - DNA, 25 bp, Probe Sequence
ccatgtgaagagaagagagaatgat

SEQ ID NO: 39976 - DNA, 25 bp, Probe Sequence
ttggaagtaattgttgaagttgtgc

SEQ ID NO: 39977 - DNA, 25 bp, Probe Sequence
cttggaagtaattgttgaagttgtg

SEQ ID NO: 39978 - DNA, 25 bp, Probe Sequence
tcttggaagtaattgttgaagttgt

SEQ ID NO: 39979 - DNA, 25 bp, Probe Sequence
tgtcttggaagtaattgttgaagtt

SEQ ID NO: 39980 - DNA, 25 bp, Probe Sequence
ttgtcttggaagtaattgttgaagt

SEQ ID NO: 39981 - DNA, 25 bp, Probe Sequence
gtcttggaagtaattgttgaagttg

SEQ ID NO: 39982 - DNA, 25 bp, Probe Sequence
taattgttgaagttgtgcagttgat

SEQ ID NO: 39983 - DNA, 25 bp, Probe Sequence
aagtaattgttgaagttgtgcagtt

SEQ ID NO: 39984 - DNA, 25 bp, Probe Sequence
gaagtaattgttgaagttgtgcagt

SEQ ID NO: 39985 - DNA, 25 bp, Probe Sequence
gtaattgttgaagttgtgcagttga

SEQ ID NO: 39986 - DNA, 25 bp, Probe Sequence
agtaattgttgaagttgtgcagttg

SEQ ID NO: 39987 - DNA, 25 bp, Probe Sequence
aattgttgaagttgtgcagttgatc

SEQ ID NO: 39988 - DNA, 25 bp, Probe Sequence
ggaagtaattgttgaagttgtgcag

SEQ ID NO: 39989 - DNA, 25 bp, Probe Sequence
aagcatttatctttgtcttggaagt

SEQ ID NO: 39990 - DNA, 25 bp, Probe Sequence
tggaagtaattgttgaagttgtgca

SEQ ID NO: 39991 - DNA, 25 bp, Probe Sequence
tctttgtcttggaagtaattgttga

SEQ ID NO: 39992 - DNA, 25 bp, Probe Sequence
tactttgttgtttcacttcatgctc

SEQ ID NO: 39993 - DNA, 25 bp, Probe Sequence
agcatttatctttgtcttggaagta

SEQ ID NO: 39994 - DNA, 25 bp, Probe Sequence
tgctatacactgggatgtctaattg

SEQ ID NO: 39995 - DNA, 25 bp, Probe Sequence
atactttgttgtttcacttcatgct

SEQ ID NO: 39996 - DNA, 25 bp, Probe Sequence
tttgtcttggaagtaattgttgaag

SEQ ID NO: 39997 - DNA, 25 bp, Probe Sequence
ctttgtcttggaagtaattgttgaa

SEQ ID NO: 39998 - DNA, 25 bp, Probe Sequence
gtgctatacactgggatgtctaatt

SEQ ID NO: 39999 - DNA, 25 bp, Probe Sequence
ctttgttgtttcacttcatgctctg

SEQ ID NO: 40000 - DNA, 25 bp, Probe Sequence
ccagaaataaagtctaagagaagcg

SEQ ID NO: 40001 - DNA, 25 bp, Probe Sequence
tccagaaataaagtctaagagaagc

SEQ ID NO: 40002 - DNA, 25 bp, Probe Sequence
ctaacgacctcatgctcatcaagtt

SEQ ID NO: 40003 - DNA, 25 bp, Probe Sequence
taacgacctcatgctcatcaagttg

SEQ ID NO: 40004 - DNA, 25 bp, Probe Sequence
tcatgctcatcaagttggacgaatc

SEQ ID NO: 40005 - DNA, 25 bp, Probe Sequence
ctcatgctcatcaagttggacgaat

SEQ ID NO: 40006 - DNA, 25 bp, Probe Sequence
cggaaggaattcaggaatatctgtt

SEQ ID NO: 40007 - DNA, 25 bp, Probe Sequence
ggaaggaattcaggaatatctgttc

SEQ ID NO: 40008 - DNA, 25 bp, Probe Sequence
gcaaattcactgagtggatagagaa

SEQ ID NO: 40009 - DNA, 25 bp, Probe Sequence
caaattcactgagtggatagagaaa

SEQ ID NO: 40010 - DNA, 25 bp, Probe Sequence
ctgtttccagaactcctacaccatc

SEQ ID NO: 40011 - DNA, 25 bp, Probe Sequence
ctgcggaaggaattcaggaatatct

SEQ ID NO: 40012 - DNA, 25 bp, Probe Sequence
ctgcaaattcactgagtggatagag

SEQ ID NO: 40013 - DNA, 25 bp, Probe Sequence
ctctgcaaattcactgagtggatag

SEQ ID NO: 40014 - DNA, 25 bp, Probe Sequence
ccagaaataaatcccctagatccag

SEQ ID NO: 40015 - DNA, 25 bp, Probe Sequence
tccagaaataaatcccctagatcca

SEQ ID NO: 40016 - DNA, 25 bp, Probe Sequence
gcggaaggaattcaggaatatctgt

SEQ ID NO: 40017 - DNA, 25 bp, Probe Sequence
tgcggaaggaattcaggaatatctg

SEQ ID NO: 40018 - DNA, 25 bp, Probe Sequence
atcccctagatccagaaataaagtc

SEQ ID NO: 40019 - DNA, 25 bp, Probe Sequence
cagaaataaatcccctagatccaga

SEQ ID NO: 40020 - DNA, 25 bp, Probe Sequence
atccagaaataaatcccctagatcc

SEQ ID NO: 40021 - DNA, 25 bp, Probe Sequence
agatccagaaataaagtctaagaga

SEQ ID NO: 40022 - DNA, 25 bp, Probe Sequence
tcccctagatccagaaataaagtct

SEQ ID NO: 40023 - DNA, 25 bp, Probe Sequence
ttcccctagatccagaaataaatcc

SEQ ID NO: 40024 - DNA, 25 bp, Probe Sequence
gataatccactgtccaagaaggttc

SEQ ID NO: 40025 - DNA, 25 bp, Probe Sequence
ttcctgctaatcctgtcataatgaa

SEQ ID NO: 40026 - DNA, 25 bp, Probe Sequence
cctgctaatcctgtcataatgaatg

SEQ ID NO: 40027 - DNA, 25 bp, Probe Sequence
tcctgctaatcctgtcataatgaat

SEQ ID NO: 40028 - DNA, 25 bp, Probe Sequence
ttcactgtatatgattcggtattgg

SEQ ID NO: 40029 - DNA, 25 bp, Probe Sequence
cagtgtcatccacaacttcctatat

SEQ ID NO: 40030 - DNA, 25 bp, Probe Sequence
ctgctaatcctgtcataatgaatgt

SEQ ID NO: 40031 - DNA, 25 bp, Probe Sequence
agtgtcatccacaacttcctatatt

SEQ ID NO: 40032 - DNA, 25 bp, Probe Sequence
tcagtgtcatccacaacttcctata

SEQ ID NO: 40033 - DNA, 25 bp, Probe Sequence
ataatccactgtccaagaaggttcg

SEQ ID NO: 40034 - DNA, 25 bp, Probe Sequence
gttcactgtatatgattcggtattg

SEQ ID NO: 40035 - DNA, 25 bp, Probe Sequence
tctcagttcactgtatatgattcgg

SEQ ID NO: 40036 - DNA, 25 bp, Probe Sequence
ctcagttcactgtatatgattcggt

SEQ ID NO: 40037 - DNA, 25 bp, Probe Sequence
tcctgtcataatgaatgtagcttct

SEQ ID NO: 40038 - DNA, 25 bp, Probe Sequence
tgtcatccacaacttcctatattag

SEQ ID NO: 40039 - DNA, 25 bp, Probe Sequence
agttcactgtatatgattcggtatt

SEQ ID NO: 40040 - DNA, 25 bp, Probe Sequence
cctgtcataatgaatgtagcttctc

SEQ ID NO: 40041 - DNA, 25 bp, Probe Sequence
tcagttcactgtatatgattcggta

SEQ ID NO: 40042 - DNA, 25 bp, Probe Sequence
gtgtcatccacaacttcctatatta

SEQ ID NO: 40043 - DNA, 25 bp, Probe Sequence
tgctaatcctgtcataatgaatgta

SEQ ID NO: 40044 - DNA, 25 bp, Probe Sequence
tcagagaaattgggacagtaacata

SEQ ID NO: 40045 - DNA, 25 bp, Probe Sequence
ctggacctctcatttctcttcattg

SEQ ID NO: 40046 - DNA, 25 bp, Probe Sequence
tctggacctctcatttctcttcatt

SEQ ID NO: 40047 - DNA, 25 bp, Probe Sequence
ctcagtgtcatccacaacttcctat

SEQ ID NO: 40048 - DNA, 25 bp, Probe Sequence
gcactcgttagattcctttcttaga

SEQ ID NO: 40049 - DNA, 25 bp, Probe Sequence
tctcagtctctccacatttccatag

SEQ ID NO: 40050 - DNA, 25 bp, Probe Sequence
ctctcagtctctccacatttccata

SEQ ID NO: 40051 - DNA, 25 bp, Probe Sequence
ctcagtctctccacatttccataga

SEQ ID NO: 40052 - DNA, 25 bp, Probe Sequence
aacaagaagctctgaagaatgacct

SEQ ID NO: 40053 - DNA, 25 bp, Probe Sequence
cttaccagacagatggagaaggatg

SEQ ID NO: 40054 - DNA, 25 bp, Probe Sequence
agatggagaaggatgaaactgtgag

SEQ ID NO: 40055 - DNA, 25 bp, Probe Sequence
cagacagatggagaaggatgaaact

SEQ ID NO: 40056 - DNA, 25 bp, Probe Sequence
taccagacagatggagaaggatgaa

SEQ ID NO: 40057 - DNA, 25 bp, Probe Sequence
ttaccagacagatggagaaggatga

SEQ ID NO: 40058 - DNA, 25 bp, Probe Sequence
cactcgttagattcctttcttagaa

SEQ ID NO: 40059 - DNA, 25 bp, Probe Sequence
acaagaagctctgaagaatgacctg

SEQ ID NO: 40060 - DNA, 25 bp, Probe Sequence
gagaaggatgaaactgtgagtgact

SEQ ID NO: 40061 - DNA, 25 bp, Probe Sequence
gatggagaaggatgaaactgtgagt

SEQ ID NO: 40062 - DNA, 25 bp, Probe Sequence
agaaggatgaaactgtgagtgactg

SEQ ID NO: 40063 - DNA, 25 bp, Probe Sequence
agacagatggagaaggatgaaactg

SEQ ID NO: 40064 - DNA, 25 bp, Probe Sequence
atggagaaggatgaaactgtgagtg

SEQ ID NO: 40065 - DNA, 25 bp, Probe Sequence
tgcactcgttagattcctttcttag

SEQ ID NO: 40066 - DNA, 25 bp, Probe Sequence
cagatggagaaggatgaaactgtga

SEQ ID NO: 40067 - DNA, 25 bp, Probe Sequence
aaacaagaagctctgaagaatgacc

SEQ ID NO: 40068 - DNA, 25 bp, Probe Sequence
caagaagctctgaagaatgacctgg

SEQ ID NO: 40069 - DNA, 25 bp, Probe Sequence
ggagaaggatgaaactgtgagtgac

SEQ ID NO: 40070 - DNA, 25 bp, Probe Sequence
atgctaaacctctgtttcatgctaa

SEQ ID NO: 40071 - DNA, 25 bp, Probe Sequence
aatgctaaacctctgtttcatgcta

SEQ ID NO: 40072 - DNA, 25 bp, Probe Sequence
gaggataggagttcacttcatcttc

SEQ ID NO: 40073 - DNA, 25 bp, Probe Sequence
aggataggagttcacttcatcttct

SEQ ID NO: 40074 - DNA, 25 bp, Probe Sequence
tgaggataggagttcacttcatctt

SEQ ID NO: 40075 - DNA, 25 bp, Probe Sequence
ttgaggataggagttcacttcatct

SEQ ID NO: 40076 - DNA, 25 bp, Probe Sequence
ggataggagttcacttcatcttctc

SEQ ID NO: 40077 - DNA, 25 bp, Probe Sequence
ataggagttcacttcatcttctcag

SEQ ID NO: 40078 - DNA, 25 bp, Probe Sequence
gataggagttcacttcatcttctca

SEQ ID NO: 40079 - DNA, 25 bp, Probe Sequence
taggagttcacttcatcttctcagc

SEQ ID NO: 40080 - DNA, 25 bp, Probe Sequence
tttgaggataggagttcacttcatc

SEQ ID NO: 40081 - DNA, 25 bp, Probe Sequence
ttacaaataagcagagaatacggtt

SEQ ID NO: 40082 - DNA, 25 bp, Probe Sequence
gtttgaggataggagttcacttcat

SEQ ID NO: 40083 - DNA, 25 bp, Probe Sequence
tacaaataagcagagaatacggttt

SEQ ID NO: 40084 - DNA, 25 bp, Probe Sequence
tttacaaataagcagagaatacggt

SEQ ID NO: 40085 - DNA, 25 bp, Probe Sequence
ggaatactagggagaaggtttcatt

SEQ ID NO: 40086 - DNA, 25 bp, Probe Sequence
aatactagggagaaggtttcattgc

SEQ ID NO: 40087 - DNA, 25 bp, Probe Sequence
gaatactagggagaaggtttcattg

SEQ ID NO: 40088 - DNA, 25 bp, Probe Sequence
gggaatactagggagaaggtttcat

SEQ ID NO: 40089 - DNA, 25 bp, Probe Sequence
ggtttgaggataggagttcacttca

SEQ ID NO: 40090 - DNA, 25 bp, Probe Sequence
taagtttctcagctcccatttctac

SEQ ID NO: 40091 - DNA, 25 bp, Probe Sequence
ttaagtttctcagctcccatttcta

SEQ ID NO: 40092 - DNA, 25 bp, Probe Sequence
atactagggagaaggtttcattgcc

SEQ ID NO: 40093 - DNA, 25 bp, Probe Sequence
tctcagctcccatttctactcttaa

SEQ ID NO: 40094 - DNA, 25 bp, Probe Sequence
ttctcagctcccatttctactctta

SEQ ID NO: 40095 - DNA, 25 bp, Probe Sequence
ttcatcttctcagctcccatttcta

SEQ ID NO: 40096 - DNA, 25 bp, Probe Sequence
ataacacaagactcaaggaagatgg

SEQ ID NO: 40097 - DNA, 25 bp, Probe Sequence
ctgagatagaagaacacctgaactg

SEQ ID NO: 40098 - DNA, 25 bp, Probe Sequence
atatccacggtgttccttatgttat

SEQ ID NO: 40099 - DNA, 25 bp, Probe Sequence
tctgagatagaagaacacctgaact

SEQ ID NO: 40100 - DNA, 25 bp, Probe Sequence
taacacaagactcaaggaagatgga

SEQ ID NO: 40101 - DNA, 25 bp, Probe Sequence
aagagccacattagaactgatgatg

SEQ ID NO: 40102 - DNA, 25 bp, Probe Sequence
tatccacggtgttccttatgttata

SEQ ID NO: 40103 - DNA, 25 bp, Probe Sequence
ggcaatcaaggaacataagatggat

SEQ ID NO: 40104 - DNA, 25 bp, Probe Sequence
atctgagatagaagaacacctgaac

SEQ ID NO: 40105 - DNA, 25 bp, Probe Sequence
tataacacaagactcaaggaagatg

SEQ ID NO: 40106 - DNA, 25 bp, Probe Sequence
gcaatcaaggaacataagatggatc

SEQ ID NO: 40107 - DNA, 25 bp, Probe Sequence
aggaacataagatggatcaagcaat

SEQ ID NO: 40108 - DNA, 25 bp, Probe Sequence
ggaacataagatggatcaagcaatt

SEQ ID NO: 40109 - DNA, 25 bp, Probe Sequence
aaggaacataagatggatcaagcaa

SEQ ID NO: 40110 - DNA, 25 bp, Probe Sequence
gagatagaagaacacctgaactgta

SEQ ID NO: 40111 - DNA, 25 bp, Probe Sequence
caagcaattatcttctgtagaacca

SEQ ID NO: 40112 - DNA, 25 bp, Probe Sequence
gatggatcaagcaattatcttctgt

SEQ ID NO: 40113 - DNA, 25 bp, Probe Sequence
tcaaggaacataagatggatcaagc

SEQ ID NO: 40114 - DNA, 25 bp, Probe Sequence
tcaagcaattatcttctgtagaacc

SEQ ID NO: 40115 - DNA, 25 bp, Probe Sequence
caaggaacataagatggatcaagca

SEQ ID NO: 40116 - DNA, 25 bp, Probe Sequence
caatcaaggaacataagatggatca

SEQ ID NO: 40117 - DNA, 25 bp, Probe Sequence
tgagatagaagaacacctgaactgt

SEQ ID NO: 40118 - DNA, 25 bp, Probe Sequence
tggatcaagcaattatcttctgtag

SEQ ID NO: 40119 - DNA, 25 bp, Probe Sequence
atccacggtgttccttatgttataa

SEQ ID NO: 40120 - DNA, 25 bp, Probe Sequence
tgtagtgtgatgtgtctgaactaat

SEQ ID NO: 40121 - DNA, 25 bp, Probe Sequence
ctgtagtgtgatgtgtctgaactaa

SEQ ID NO: 40122 - DNA, 25 bp, Probe Sequence
cctgtagtgtgatgtgtctgaacta

SEQ ID NO: 40123 - DNA, 25 bp, Probe Sequence
tgtctgaactaataaagtggctgaa

SEQ ID NO: 40124 - DNA, 25 bp, Probe Sequence
gatgtgtctgaactaataaagtggc

SEQ ID NO: 40125 - DNA, 25 bp, Probe Sequence
tctgaactaataaagtggctgaaga

SEQ ID NO: 40126 - DNA, 25 bp, Probe Sequence
gtctgaactaataaagtggctgaag

SEQ ID NO: 40127 - DNA, 25 bp, Probe Sequence
atgtgtctgaactaataaagtggct

SEQ ID NO: 40128 - DNA, 25 bp, Probe Sequence
tgaactaataaagtggctgaagagg

SEQ ID NO: 40129 - DNA, 25 bp, Probe Sequence
ctgaactaataaagtggctgaagag

SEQ ID NO: 40130 - DNA, 25 bp, Probe Sequence
gtagtgtgatgtgtctgaactaata

SEQ ID NO: 40131 - DNA, 25 bp, Probe Sequence
gtgtctgaactaataaagtggctga

SEQ ID NO: 40132 - DNA, 25 bp, Probe Sequence
tgtgtctgaactaataaagtggctg

SEQ ID NO: 40133 - DNA, 25 bp, Probe Sequence
tgatgtgtctgaactaataaagtgg

SEQ ID NO: 40134 - DNA, 25 bp, Probe Sequence
gtgtgatgtgtctgaactaataaag

SEQ ID NO: 40135 - DNA, 25 bp, Probe Sequence
gaactaataaagtggctgaagaggc

SEQ ID NO: 40136 - DNA, 25 bp, Probe Sequence
tagtgtgatgtgtctgaactaataa

SEQ ID NO: 40137 - DNA, 25 bp, Probe Sequence
tgtgatgtgtctgaactaataaagt

SEQ ID NO: 40138 - DNA, 25 bp, Probe Sequence
agtgtgatgtgtctgaactaataaa

SEQ ID NO: 40139 - DNA, 25 bp, Probe Sequence
gtgatgtgtctgaactaataaagtg

SEQ ID NO: 40140 - DNA, 25 bp, Probe Sequence
aactaataaagtggctgaagaggca

SEQ ID NO: 40141 - DNA, 25 bp, Probe Sequence
acggtgcctgtaattattaaacatg

SEQ ID NO: 40142 - DNA, 25 bp, Probe Sequence
cacggtgcctgtaattattaaacat

SEQ ID NO: 40143 - DNA, 25 bp, Probe Sequence
cggtgcctgtaattattaaacatga

SEQ ID NO: 40144 - DNA, 25 bp, Probe Sequence
ctcggaactatcagaaagtgccttc

SEQ ID NO: 40145 - DNA, 25 bp, Probe Sequence
agtggctcggaactatcagaaagtg

SEQ ID NO: 40146 - DNA, 25 bp, Probe Sequence
cagtggctcggaactatcagaaagt

SEQ ID NO: 40147 - DNA, 25 bp, Probe Sequence
tcggaactatcagaaagtgccttcg

SEQ ID NO: 40148 - DNA, 25 bp, Probe Sequence
gctcggaactatcagaaagtgcctt

SEQ ID NO: 40149 - DNA, 25 bp, Probe Sequence
ccagtggctcggaactatcagaaag

SEQ ID NO: 40150 - DNA, 25 bp, Probe Sequence
aactatcagaaagtgccttcggcta

SEQ ID NO: 40151 - DNA, 25 bp, Probe Sequence
actatcagaaagtgccttcggctac

SEQ ID NO: 40152 - DNA, 25 bp, Probe Sequence
gaactatcagaaagtgccttcggct

SEQ ID NO: 40153 - DNA, 25 bp, Probe Sequence
ttttacccatcatgcaccctgtaca

SEQ ID NO: 40154 - DNA, 25 bp, Probe Sequence
catcatctgaaatggggaaatatgt

SEQ ID NO: 40155 - DNA, 25 bp, Probe Sequence
tcatctgaaatggggaaatatgtaa

SEQ ID NO: 40156 - DNA, 25 bp, Probe Sequence
atcatctgaaatggggaaatatgta

SEQ ID NO: 40157 - DNA, 25 bp, Probe Sequence
catctgaaatggggaaatatgtaaa

SEQ ID NO: 40158 - DNA, 25 bp, Probe Sequence
atctgaaatggggaaatatgtaaat

SEQ ID NO: 40159 - DNA, 25 bp, Probe Sequence
tgtaaataaatatatcagcaaagca

SEQ ID NO: 40160 - DNA, 25 bp, Probe Sequence
tctgaaatggggaaatatgtaaata

SEQ ID NO: 40161 - DNA, 25 bp, Probe Sequence
accatcatctgaaatggggaaatat

SEQ ID NO: 40162 - DNA, 25 bp, Probe Sequence
ccatcatctgaaatggggaaatatg

SEQ ID NO: 40163 - DNA, 25 bp, Probe Sequence
caccatcatctgaaatggggaaata

SEQ ID NO: 40164 - DNA, 25 bp, Probe Sequence
ctgaaatggggaaatatgtaaataa

SEQ ID NO: 40165 - DNA, 25 bp, Probe Sequence
tcaccatcatctgaaatggggaaat

SEQ ID NO: 40166 - DNA, 25 bp, Probe Sequence
gtcaccatcatctgaaatggggaaa

SEQ ID NO: 40167 - DNA, 25 bp, Probe Sequence
tttgtcaccatcatctgaaatgggg

SEQ ID NO: 40168 - DNA, 25 bp, Probe Sequence
tgtcaccatcatctgaaatggggaa

SEQ ID NO: 40169 - DNA, 25 bp, Probe Sequence
ttgtcaccatcatctgaaatgggga

SEQ ID NO: 40170 - DNA, 25 bp, Probe Sequence
catcatctgaaatggggaaatatgt

SEQ ID NO: 40171 - DNA, 25 bp, Probe Sequence
tcatctgaaatggggaaatatgtaa

SEQ ID NO: 40172 - DNA, 25 bp, Probe Sequence
atcatctgaaatggggaaatatgta

SEQ ID NO: 40173 - DNA, 25 bp, Probe Sequence
catctgaaatggggaaatatgtaaa

SEQ ID NO: 40174 - DNA, 25 bp, Probe Sequence
atctgaaatggggaaatatgtaaat

SEQ ID NO: 40175 - DNA, 25 bp, Probe Sequence
tgtaaataaatatatcagcaaagca

SEQ ID NO: 40176 - DNA, 25 bp, Probe Sequence
tctgaaatggggaaatatgtaaata

SEQ ID NO: 40177 - DNA, 25 bp, Probe Sequence
accatcatctgaaatggggaaatat

SEQ ID NO: 40178 - DNA, 25 bp, Probe Sequence
ccatcatctgaaatggggaaatatg

SEQ ID NO: 40179 - DNA, 25 bp, Probe Sequence
caccatcatctgaaatggggaaata

SEQ ID NO: 40180 - DNA, 25 bp, Probe Sequence
ctgaaatggggaaatatgtaaataa

SEQ ID NO: 40181 - DNA, 25 bp, Probe Sequence
tcaccatcatctgaaatggggaaat

SEQ ID NO: 40182 - DNA, 25 bp, Probe Sequence
gtcaccatcatctgaaatggggaaa

SEQ ID NO: 40183 - DNA, 25 bp, Probe Sequence
tttgtcaccatcatctgaaatgggg

SEQ ID NO: 40184 - DNA, 25 bp, Probe Sequence
tgtcaccatcatctgaaatggggaa

SEQ ID NO: 40185 - DNA, 25 bp, Probe Sequence
ttgtcaccatcatctgaaatgggga

SEQ ID NO: 40186 - DNA, 25 bp, Probe Sequence
ggaatgaatggataatctcaccgaa

SEQ ID NO: 40187 - DNA, 25 bp, Probe Sequence
ctggaatgaatggataatctcaccg

SEQ ID NO: 40188 - DNA, 25 bp, Probe Sequence
atcggctggaatgaatggataatct

SEQ ID NO: 40189 - DNA, 25 bp, Probe Sequence
actgtagattgtgtatgttatgtgt

SEQ ID NO: 40190 - DNA, 25 bp, Probe Sequence
gctggaatgaatggataatctcacc

SEQ ID NO: 40191 - DNA, 25 bp, Probe Sequence
ggctggaatgaatggataatctcac

SEQ ID NO: 40192 - DNA, 25 bp, Probe Sequence
catcggctggaatgaatggataatc

SEQ ID NO: 40193 - DNA, 25 bp, Probe Sequence
tggaatgaatggataatctcaccga

SEQ ID NO: 40194 - DNA, 25 bp, Probe Sequence
tcggctggaatgaatggataatctc

SEQ ID NO: 40195 - DNA, 25 bp, Probe Sequence
acatcggctggaatgaatggataat

SEQ ID NO: 40196 - DNA, 25 bp, Probe Sequence
ctgtagattgtgtatgttatgtgtt

SEQ ID NO: 40197 - DNA, 25 bp, Probe Sequence
taatcgtggtgtaaatgagtgtttc

SEQ ID NO: 40198 - DNA, 25 bp, Probe Sequence
gtggtgtaaatgagtgtttcctttc

SEQ ID NO: 40199 - DNA, 25 bp, Probe Sequence
gataatcgtggtgtaaatgagtgtt

SEQ ID NO: 40200 - DNA, 25 bp, Probe Sequence
aggataatcgtggtgtaaatgagtg

SEQ ID NO: 40201 - DNA, 25 bp, Probe Sequence
caggataatcgtggtgtaaatgagt

SEQ ID NO: 40202 - DNA, 25 bp, Probe Sequence
aacatatccacaacattggcttgat

SEQ ID NO: 40203 - DNA, 25 bp, Probe Sequence
ggataatcgtggtgtaaatgagtgt

SEQ ID NO: 40204 - DNA, 25 bp, Probe Sequence
ataatcgtggtgtaaatgagtgttt

SEQ ID NO: 40205 - DNA, 25 bp, Probe Sequence
gaatggataatctcaccgaaatctt

SEQ ID NO: 40206 - DNA, 25 bp, Probe Sequence
gacatcggctggaatgaatggataa

SEQ ID NO: 40207 - DNA, 25 bp, Probe Sequence
cggctggaatgaatggataatctca

SEQ ID NO: 40208 - DNA, 25 bp, Probe Sequence
ggtgtaaatgagtgtttcctttcaa

SEQ ID NO: 40209 - DNA, 25 bp, Probe Sequence
acatatccacaacattggcttgatg

SEQ ID NO: 40210 - DNA, 25 bp, Probe Sequence
gaagatactggtacttgatagcctc

SEQ ID NO: 40211 - DNA, 25 bp, Probe Sequence
tgaagatactggtacttgatagcct

SEQ ID NO: 40212 - DNA, 25 bp, Probe Sequence
gtgaagatactggtacttgatagcc

SEQ ID NO: 40213 - DNA, 25 bp, Probe Sequence
agatactggtacttgatagcctctt

SEQ ID NO: 40214 - DNA, 25 bp, Probe Sequence
aagatactggtacttgatagcctct

SEQ ID NO: 40215 - DNA, 25 bp, Probe Sequence
gatactggtacttgatagcctctta

SEQ ID NO: 40216 - DNA, 25 bp, Probe Sequence
cgtgaagatactggtacttgatagc

SEQ ID NO: 40217 - DNA, 25 bp, Probe Sequence
gtctgtactgatcctcaaccaataa

SEQ ID NO: 40218 - DNA, 25 bp, Probe Sequence
atactggtacttgatagcctcttaa

SEQ ID NO: 40219 - DNA, 25 bp, Probe Sequence
tgtctgtactgatcctcaaccaata

SEQ ID NO: 40220 - DNA, 25 bp, Probe Sequence
gaagccaagtctgattaataaccat

SEQ ID NO: 40221 - DNA, 25 bp, Probe Sequence
agaagccaagtctgattaataacca

SEQ ID NO: 40222 - DNA, 25 bp, Probe Sequence
atgtctgtactgatcctcaaccaat

SEQ ID NO: 40223 - DNA, 25 bp, Probe Sequence
aagaagccaagtctgattaataacc

SEQ ID NO: 40224 - DNA, 25 bp, Probe Sequence
aatgtctgtactgatcctcaaccaa

SEQ ID NO: 40225 - DNA, 25 bp, Probe Sequence
aaccatataccatgtcttatcagtg

SEQ ID NO: 40226 - DNA, 25 bp, Probe Sequence
ttgttactgtgctgtgaaagattac

SEQ ID NO: 40227 - DNA, 25 bp, Probe Sequence
ggctaaccaagaaactaaagaagac

SEQ ID NO: 40228 - DNA, 25 bp, Probe Sequence
acgtgaagatactggtacttgatag

SEQ ID NO: 40229 - DNA, 25 bp, Probe Sequence
atgtagtgtacgtgctattgagttg

SEQ ID NO: 40230 - DNA, 25 bp, Probe Sequence
catgtagtgtacgtgctattgagtt

SEQ ID NO: 40231 - DNA, 25 bp, Probe Sequence
atattgaattatgggaggctctgac

SEQ ID NO: 40232 - DNA, 25 bp, Probe Sequence
gatattgaattatgggaggctctga

SEQ ID NO: 40233 - DNA, 25 bp, Probe Sequence
agtgtgggatattgaattatgggag

SEQ ID NO: 40234 - DNA, 25 bp, Probe Sequence
attaccgagcctatgaagatgagta

SEQ ID NO: 40235 - DNA, 25 bp, Probe Sequence
aagtgatgaagaagaagaggaggaa

SEQ ID NO: 40236 - DNA, 25 bp, Probe Sequence
tgatgaagaagaagaggaggaagag

SEQ ID NO: 40237 - DNA, 25 bp, Probe Sequence
caattaccgagcctatgaagatgag

SEQ ID NO: 40238 - DNA, 25 bp, Probe Sequence
gtgatgaagaagaagaggaggaaga

SEQ ID NO: 40239 - DNA, 25 bp, Probe Sequence
agtgatgaagaagaagaggaggaag

SEQ ID NO: 40240 - DNA, 25 bp, Probe Sequence
aattaccgagcctatgaagatgagt

SEQ ID NO: 40241 - DNA, 25 bp, Probe Sequence
gacaattaccgagcctatgaagatg

SEQ ID NO: 40242 - DNA, 25 bp, Probe Sequence
tggctatgatggtcagaattactac

SEQ ID NO: 40243 - DNA, 25 bp, Probe Sequence
gatggctatgatggtcagaattact

SEQ ID NO: 40244 - DNA, 25 bp, Probe Sequence
atggctatgatggtcagaattacta

SEQ ID NO: 40245 - DNA, 25 bp, Probe Sequence
acaattaccgagcctatgaagatga

SEQ ID NO: 40246 - DNA, 25 bp, Probe Sequence
gatgaagaagaagaggaggaagagg

SEQ ID NO: 40247 - DNA, 25 bp, Probe Sequence
atgaagaagaagaggaggaagagga

SEQ ID NO: 40248 - DNA, 25 bp, Probe Sequence
cgatggctatgatggtcagaattac

SEQ ID NO: 40249 - DNA, 25 bp, Probe Sequence
ttaccgagcctatgaagatgagtac

SEQ ID NO: 40250 - DNA, 25 bp, Probe Sequence
acgatggctatgatggtcagaatta

SEQ ID NO: 40251 - DNA, 25 bp, Probe Sequence
tacgatggctatgatggtcagaatt

SEQ ID NO: 40252 - DNA, 25 bp, Probe Sequence
tgaagaagaagaggaggaagaggaa

SEQ ID NO: 40253 - DNA, 25 bp, Probe Sequence
tcaatgaatacgacaatggatatga

SEQ ID NO: 40254 - DNA, 25 bp, Probe Sequence
ggacaattaccgagcctatgaagat

SEQ ID NO: 40255 - DNA, 25 bp, Probe Sequence
caatgaatacgacaatggatatgaa

SEQ ID NO: 40256 - DNA, 25 bp, Probe Sequence
ctacgatggctatgatggtcagaat

SEQ ID NO: 40257 - DNA, 25 bp, Probe Sequence
ggctatgatggtcagaattactacc

SEQ ID NO: 40258 - DNA, 25 bp, Probe Sequence
cataaggtatccgtccatgttcttg

SEQ ID NO: 40259 - DNA, 25 bp, Probe Sequence
aacacattcaggcattagcaattcg

SEQ ID NO: 40260 - DNA, 25 bp, Probe Sequence
agagataacactgaggttgcatatt

SEQ ID NO: 40261 - DNA, 25 bp, Probe Sequence
aaacacattcaggcattagcaattc

SEQ ID NO: 40262 - DNA, 25 bp, Probe Sequence
agtagatgctccaaggagacataag

SEQ ID NO: 40263 - DNA, 25 bp, Probe Sequence
cacattcaggcattagcaattcgtc

SEQ ID NO: 40264 - DNA, 25 bp, Probe Sequence
aagtgattcagaacatgaccgaatt

SEQ ID NO: 40265 - DNA, 25 bp, Probe Sequence
acacttaccaaggaagatatcatca

SEQ ID NO: 40266 - DNA, 25 bp, Probe Sequence
aagacacttaccaaggaagatatca

SEQ ID NO: 40267 - DNA, 25 bp, Probe Sequence
ctatctgctgagtgtgctaaatact

SEQ ID NO: 40268 - DNA, 25 bp, Probe Sequence
tatctgctgagtgtgctaaatactg

SEQ ID NO: 40269 - DNA, 25 bp, Probe Sequence
atgctccaaggagacataaggtatc

SEQ ID NO: 40270 - DNA, 25 bp, Probe Sequence
gatgctccaaggagacataaggtat

SEQ ID NO: 40271 - DNA, 25 bp, Probe Sequence
cagtagatgctccaaggagacataa

SEQ ID NO: 40272 - DNA, 25 bp, Probe Sequence
gctatctgctgagtgtgctaaatac

SEQ ID NO: 40273 - DNA, 25 bp, Probe Sequence
agacacttaccaaggaagatatcat

SEQ ID NO: 40274 - DNA, 25 bp, Probe Sequence
gacacttaccaaggaagatatcatc

SEQ ID NO: 40275 - DNA, 25 bp, Probe Sequence
gaagtgattcagaacatgaccgaat

SEQ ID NO: 40276 - DNA, 25 bp, Probe Sequence
ataaggtatccgtccatgttcttgc

SEQ ID NO: 40277 - DNA, 25 bp, Probe Sequence
cagagataacactgaggttgcatat

SEQ ID NO: 40278 - DNA, 25 bp, Probe Sequence
attcttgtcctgttgttggagagtt

SEQ ID NO: 40279 - DNA, 25 bp, Probe Sequence
aaattctacaaggaaatgttggcag

SEQ ID NO: 40280 - DNA, 25 bp, Probe Sequence
tcaaattctacaaggaaatgttggc

SEQ ID NO: 40281 - DNA, 25 bp, Probe Sequence
attctacaaggaaatgttggcagta

SEQ ID NO: 40282 - DNA, 25 bp, Probe Sequence
ttgagattaagaatgccaggaatat

SEQ ID NO: 40283 - DNA, 25 bp, Probe Sequence
ctgctgactgccaataacattcttc

SEQ ID NO: 40284 - DNA, 25 bp, Probe Sequence
taagaatgccaggaatattgtcatc

SEQ ID NO: 40285 - DNA, 25 bp, Probe Sequence
attaagaatgccaggaatattgtca

SEQ ID NO: 40286 - DNA, 25 bp, Probe Sequence
ctgccaataacattcttcgatctct

SEQ ID NO: 40287 - DNA, 25 bp, Probe Sequence
ttaagaatgccaggaatattgtcat

SEQ ID NO: 40288 - DNA, 25 bp, Probe Sequence
agattaagaatgccaggaatattgt

SEQ ID NO: 40289 - DNA, 25 bp, Probe Sequence
tgccaataacattcttcgatctctg

SEQ ID NO: 40290 - DNA, 25 bp, Probe Sequence
actgccaataacattcttcgatctc

SEQ ID NO: 40291 - DNA, 25 bp, Probe Sequence
gactgccaataacattcttcgatct

SEQ ID NO: 40292 - DNA, 25 bp, Probe Sequence
tttcccttgtatctatttgtggtga

SEQ ID NO: 40293 - DNA, 25 bp, Probe Sequence
gtttcccttgtatctatttgtggtg

SEQ ID NO: 40294 - DNA, 25 bp, Probe Sequence
cccttgtatctatttgtggtgaatg

SEQ ID NO: 40295 - DNA, 25 bp, Probe Sequence
tcccttgtatctatttgtggtgaat

SEQ ID NO: 40296 - DNA, 25 bp, Probe Sequence
taagaagtgcagcaggttaagaatt

SEQ ID NO: 40297 - DNA, 25 bp, Probe Sequence
tgactgccaataacattcttcgatc

SEQ ID NO: 40298 - DNA, 25 bp, Probe Sequence
ctgactgccaataacattcttcgat

SEQ ID NO: 40299 - DNA, 25 bp, Probe Sequence
gattaagaatgccaggaatattgtc

SEQ ID NO: 40300 - DNA, 25 bp, Probe Sequence
ggtttcccttgtatctatttgtggt

SEQ ID NO: 40301 - DNA, 25 bp, Probe Sequence
tggtttcccttgtatctatttgtgg

SEQ ID NO: 40302 - DNA, 25 bp, Probe Sequence
ccttgtatctatttgtggtgaatgt

SEQ ID NO: 40303 - DNA, 25 bp, Probe Sequence
tgagattaagaatgccaggaatatt

SEQ ID NO: 40304 - DNA, 25 bp, Probe Sequence
atggatagctcattaagaagtgcag

SEQ ID NO: 40305 - DNA, 25 bp, Probe Sequence
ttcccttgtatctatttgtggtgaa

SEQ ID NO: 40306 - DNA, 25 bp, Probe Sequence
acctatgttacagaagtcagagagt

SEQ ID NO: 40307 - DNA, 25 bp, Probe Sequence
cctatgttacagaagtcagagagtt

SEQ ID NO: 40308 - DNA, 25 bp, Probe Sequence
aatctgagaagagaacgagaacatt

SEQ ID NO: 40309 - DNA, 25 bp, Probe Sequence
accaggtgttagagtgaagtaattg

SEQ ID NO: 40310 - DNA, 25 bp, Probe Sequence
ctaccaggtgttagagtgaagtaat

SEQ ID NO: 40311 - DNA, 25 bp, Probe Sequence
tacctatgttacagaagtcagagag

SEQ ID NO: 40312 - DNA, 25 bp, Probe Sequence
ctacctatgttacagaagtcagaga

SEQ ID NO: 40313 - DNA, 25 bp, Probe Sequence
taccaggtgttagagtgaagtaatt

SEQ ID NO: 40314 - DNA, 25 bp, Probe Sequence
ctatgttacagaagtcagagagttg

SEQ ID NO: 40315 - DNA, 25 bp, Probe Sequence
tgttacagaagtcagagagttgaag

SEQ ID NO: 40316 - DNA, 25 bp, Probe Sequence
atgttacagaagtcagagagttgaa

SEQ ID NO: 40317 - DNA, 25 bp, Probe Sequence
gttacagaagtcagagagttgaagg

SEQ ID NO: 40318 - DNA, 25 bp, Probe Sequence
taagtggtctctggaatgagttaga

SEQ ID NO: 40319 - DNA, 25 bp, Probe Sequence
ataagtggtctctggaatgagttag

SEQ ID NO: 40320 - DNA, 25 bp, Probe Sequence
tctacctatgttacagaagtcagag

SEQ ID NO: 40321 - DNA, 25 bp, Probe Sequence
actaccaggtgttagagtgaagtaa

SEQ ID NO: 40322 - DNA, 25 bp, Probe Sequence
ggaacgatctacctatgttacagaa

SEQ ID NO: 40323 - DNA, 25 bp, Probe Sequence
atggaacgatctacctatgttacag

SEQ ID NO: 40324 - DNA, 25 bp, Probe Sequence
gatggaacgatctacctatgttaca

SEQ ID NO: 40325 - DNA, 25 bp, Probe Sequence
agtggtctctggaatgagttagatt

SEQ ID NO: 40326 - DNA, 25 bp, Probe Sequence
aagtggtctctggaatgagttagat

SEQ ID NO: 40327 - DNA, 25 bp, Probe Sequence
aataagtggtctctggaatgagtta

SEQ ID NO: 40328 - DNA, 25 bp, Probe Sequence
tatgttacagaagtcagagagttga

SEQ ID NO: 40329 - DNA, 25 bp, Probe Sequence
cgatctacctatgttacagaagtca

SEQ ID NO: 40330 - DNA, 25 bp, Probe Sequence
tgtatttgttcaaggatgggaagta

SEQ ID NO: 40331 - DNA, 25 bp, Probe Sequence
ctgtatttgttcaaggatgggaagt

SEQ ID NO: 40332 - DNA, 25 bp, Probe Sequence
gtatttgttcaaggatgggaagtac

SEQ ID NO: 40333 - DNA, 25 bp, Probe Sequence
aactggtattctgttctggaggaaa

SEQ ID NO: 40334 - DNA, 25 bp, Probe Sequence
aaactggtattctgttctggaggaa

SEQ ID NO: 40335 - DNA, 25 bp, Probe Sequence
tacaaactggtattctgttctggag

SEQ ID NO: 40336 - DNA, 25 bp, Probe Sequence
actggtattctgttctggaggaaag

SEQ ID NO: 40337 - DNA, 25 bp, Probe Sequence
atacaaactggtattctgttctgga

SEQ ID NO: 40338 - DNA, 25 bp, Probe Sequence
gatacaaactggtattctgttctgg

SEQ ID NO: 40339 - DNA, 25 bp, Probe Sequence
ggatacaaactggtattctgttctg

SEQ ID NO: 40340 - DNA, 25 bp, Probe Sequence
cggatacaaactggtattctgttct

SEQ ID NO: 40341 - DNA, 25 bp, Probe Sequence
gctgtatttgttcaaggatgggaag

SEQ ID NO: 40342 - DNA, 25 bp, Probe Sequence
caaactggtattctgttctggagga

SEQ ID NO: 40343 - DNA, 25 bp, Probe Sequence
gtattctgttctggaggaaagggag

SEQ ID NO: 40344 - DNA, 25 bp, Probe Sequence
ctggtattctgttctggaggaaagg

SEQ ID NO: 40345 - DNA, 25 bp, Probe Sequence
acaaactggtattctgttctggagg

SEQ ID NO: 40346 - DNA, 25 bp, Probe Sequence
tattctgttctggaggaaagggagg

SEQ ID NO: 40347 - DNA, 25 bp, Probe Sequence
tccagtaccgagagaaagcctattt

SEQ ID NO: 40348 - DNA, 25 bp, Probe Sequence
ttccagtaccgagagaaagcctatt

SEQ ID NO: 40349 - DNA, 25 bp, Probe Sequence
agctgtatttgttcaaggatgggaa

SEQ ID NO: 40350 - DNA, 25 bp, Probe Sequence
ggtattctgttctggaggaaaggga

SEQ ID NO: 40351 - DNA, 25 bp, Probe Sequence
ttggagtgtttctaataaacttgga

SEQ ID NO: 40352 - DNA, 25 bp, Probe Sequence
gttggagtgtttctaataaacttgg

SEQ ID NO: 40353 - DNA, 25 bp, Probe Sequence
tggagtgtttctaataaacttggat

SEQ ID NO: 40354 - DNA, 25 bp, Probe Sequence
ggctagatttctgtcttgtttgttt

SEQ ID NO: 40355 - DNA, 25 bp, Probe Sequence
ttcggctagatttctgtcttgtttg

SEQ ID NO: 40356 - DNA, 25 bp, Probe Sequence
gttcggctagatttctgtcttgttt

SEQ ID NO: 40357 - DNA, 25 bp, Probe Sequence
cggctagatttctgtcttgtttgtt

SEQ ID NO: 40358 - DNA, 25 bp, Probe Sequence
agttcggctagatttctgtcttgtt

SEQ ID NO: 40359 - DNA, 25 bp, Probe Sequence
tcggctagatttctgtcttgtttgt

SEQ ID NO: 40360 - DNA, 25 bp, Probe Sequence
cagttcggctagatttctgtcttgt

SEQ ID NO: 40361 - DNA, 25 bp, Probe Sequence
gctagatttctgtcttgtttgtttt

SEQ ID NO: 40362 - DNA, 25 bp, Probe Sequence
gcagttcggctagatttctgtcttg

SEQ ID NO: 40363 - DNA, 25 bp, Probe Sequence
ggcagttcggctagatttctgtctt

SEQ ID NO: 40364 - DNA, 25 bp, Probe Sequence
atacctgatagacacattcctctct

SEQ ID NO: 40365 - DNA, 25 bp, Probe Sequence
tacctgatagacacattcctctctg

SEQ ID NO: 40366 - DNA, 25 bp, Probe Sequence
ccactgtactcattcataaggtagg

SEQ ID NO: 40367 - DNA, 25 bp, Probe Sequence
cactgtactcattcataaggtaggt

SEQ ID NO: 40368 - DNA, 25 bp, Probe Sequence
attccactgtactcattcataaggt

SEQ ID NO: 40369 - DNA, 25 bp, Probe Sequence
tatacctgatagacacattcctctc

SEQ ID NO: 40370 - DNA, 25 bp, Probe Sequence
tccactgtactcattcataaggtag

SEQ ID NO: 40371 - DNA, 25 bp, Probe Sequence
actgtactcattcataaggtaggtt

SEQ ID NO: 40372 - DNA, 25 bp, Probe Sequence
ttccactgtactcattcataaggta

SEQ ID NO: 40373 - DNA, 25 bp, Probe Sequence
ttcatctctcttgtctatacctgat

SEQ ID NO: 40374 - DNA, 25 bp, Probe Sequence
ctatacctgatagacacattcctct

SEQ ID NO: 40375 - DNA, 25 bp, Probe Sequence
tattccactgtactcattcataagg

SEQ ID NO: 40376 - DNA, 25 bp, Probe Sequence
tcatctctcttgtctatacctgata

SEQ ID NO: 40377 - DNA, 25 bp, Probe Sequence
gactcttctcaactctttccctata

SEQ ID NO: 40378 - DNA, 25 bp, Probe Sequence
agactcttctcaactctttccctat

SEQ ID NO: 40379 - DNA, 25 bp, Probe Sequence
agtagtattccactgtactcattca

SEQ ID NO: 40380 - DNA, 25 bp, Probe Sequence
tctctgggtcttcaattagaatgtg

SEQ ID NO: 40381 - DNA, 25 bp, Probe Sequence
catattggtttgtgttaaatgctgt

SEQ ID NO: 40382 - DNA, 25 bp, Probe Sequence
catctctcttgtctatacctgatag

SEQ ID NO: 40383 - DNA, 25 bp, Probe Sequence
aaactcacaccaggtacttaaagat

SEQ ID NO: 40384 - DNA, 25 bp, Probe Sequence
ttggtttgtgttaaatgctgtactt

SEQ ID NO: 40385 - DNA, 25 bp, Probe Sequence
ctgagaagtgcctttagttgaagag

SEQ ID NO: 40386 - DNA, 25 bp, Probe Sequence
cagactcttctcaactctttcccta

SEQ ID NO: 40387 - DNA, 25 bp, Probe Sequence
aactcacaccaggtacttaaagatg

SEQ ID NO: 40388 - DNA, 25 bp, Probe Sequence
ggcataccgataggcttatattcaa

SEQ ID NO: 40389 - DNA, 25 bp, Probe Sequence
ctggcataccgataggcttatattc

SEQ ID NO: 40390 - DNA, 25 bp, Probe Sequence
atctggcataccgataggcttatat

SEQ ID NO: 40391 - DNA, 25 bp, Probe Sequence
tctggcataccgataggcttatatt

SEQ ID NO: 40392 - DNA, 25 bp, Probe Sequence
tggcataccgataggcttatattca

SEQ ID NO: 40393 - DNA, 25 bp, Probe Sequence
agaagagacattaagagttcctgaa

SEQ ID NO: 40394 - DNA, 25 bp, Probe Sequence
aagaagagacattaagagttcctga

SEQ ID NO: 40395 - DNA, 25 bp, Probe Sequence
tatctggcataccgataggcttata

SEQ ID NO: 40396 - DNA, 25 bp, Probe Sequence
tatatctggcataccgataggctta

SEQ ID NO: 40397 - DNA, 25 bp, Probe Sequence
agagcgtgttcttattactgacatt

SEQ ID NO: 40398 - DNA, 25 bp, Probe Sequence
atatctggcataccgataggcttat

SEQ ID NO: 40399 - DNA, 25 bp, Probe Sequence
attacatcaggatagaggtagagtt

SEQ ID NO: 40400 - DNA, 25 bp, Probe Sequence
ttatatctggcataccgataggctt

SEQ ID NO: 40401 - DNA, 25 bp, Probe Sequence
tcacgagaggctaagaatattgtac

SEQ ID NO: 40402 - DNA, 25 bp, Probe Sequence
aattacatcaggatagaggtagagt

SEQ ID NO: 40403 - DNA, 25 bp, Probe Sequence
ttctgttatattaagagcgtgttct

SEQ ID NO: 40404 - DNA, 25 bp, Probe Sequence
tggtaatatggtcatgtgaatcaat

SEQ ID NO: 40405 - DNA, 25 bp, Probe Sequence
atggtaatatggtcatgtgaatcaa

SEQ ID NO: 40406 - DNA, 25 bp, Probe Sequence
ttggtgattatggtaatatggtcat

SEQ ID NO: 40407 - DNA, 25 bp, Probe Sequence
attggtgattatggtaatatggtca

SEQ ID NO: 40408 - DNA, 25 bp, Probe Sequence
ctcacgagaggctaagaatattgta

SEQ ID NO: 40409 - DNA, 25 bp, Probe Sequence
ggtgattatggtaatatggtcatgt

SEQ ID NO: 40410 - DNA, 25 bp, Probe Sequence
tggtgattatggtaatatggtcatg

SEQ ID NO: 40411 - DNA, 25 bp, Probe Sequence
acagaacagattacaaatgagaagc

SEQ ID NO: 40412 - DNA, 25 bp, Probe Sequence
tggcttagaagaccttggtattcag

SEQ ID NO: 40413 - DNA, 25 bp, Probe Sequence
ctggcttagaagaccttggtattca

SEQ ID NO: 40414 - DNA, 25 bp, Probe Sequence
ttagaagaccttggtattcaggcaa

SEQ ID NO: 40415 - DNA, 25 bp, Probe Sequence
ctggataacaagggataaagtggag

SEQ ID NO: 40416 - DNA, 25 bp, Probe Sequence
cctggcttagaagaccttggtattc

SEQ ID NO: 40417 - DNA, 25 bp, Probe Sequence
cttagaagaccttggtattcaggca

SEQ ID NO: 40418 - DNA, 25 bp, Probe Sequence
aaggaattgttaatgcagttaagga

SEQ ID NO: 40419 - DNA, 25 bp, Probe Sequence
tagaagaccttggtattcaggcaac

SEQ ID NO: 40420 - DNA, 25 bp, Probe Sequence
aggaattgttaatgcagttaaggat

SEQ ID NO: 40421 - DNA, 25 bp, Probe Sequence
tgggtagcaagagtctttgaaataa

SEQ ID NO: 40422 - DNA, 25 bp, Probe Sequence
atgggtagcaagagtctttgaaata

SEQ ID NO: 40423 - DNA, 25 bp, Probe Sequence
ggaattgttaatgcagttaaggatc

SEQ ID NO: 40424 - DNA, 25 bp, Probe Sequence
caagagtctttgaaataagcccatt

SEQ ID NO: 40425 - DNA, 25 bp, Probe Sequence
gtagcaagagtctttgaaataagcc

SEQ ID NO: 40426 - DNA, 25 bp, Probe Sequence
ggtagcaagagtctttgaaataagc

SEQ ID NO: 40427 - DNA, 25 bp, Probe Sequence
agtctttgaaataagcccatttgag

SEQ ID NO: 40428 - DNA, 25 bp, Probe Sequence
gagtctttgaaataagcccatttga

SEQ ID NO: 40429 - DNA, 25 bp, Probe Sequence
agagtctttgaaataagcccatttg

SEQ ID NO: 40430 - DNA, 25 bp, Probe Sequence
gggtagcaagagtctttgaaataag

SEQ ID NO: 40431 - DNA, 25 bp, Probe Sequence
ggcttagaagaccttggtattcagg

SEQ ID NO: 40432 - DNA, 25 bp, Probe Sequence
tagcaagagtctttgaaataagccc

SEQ ID NO: 40433 - DNA, 25 bp, Probe Sequence
gatgggtagcaagagtctttgaaat

SEQ ID NO: 40434 - DNA, 25 bp, Probe Sequence
gtctttgaaataagcccatttgagc

SEQ ID NO: 40435 - DNA, 25 bp, Probe Sequence
gtctgctgaaattgaggatgtgaag

SEQ ID NO: 40436 - DNA, 25 bp, Probe Sequence
tgaagcaagcattctatattccaag

SEQ ID NO: 40437 - DNA, 25 bp, Probe Sequence
aggaaggaagtagcattagcagtaa

SEQ ID NO: 40438 - DNA, 25 bp, Probe Sequence
gaagcaagcattctatattccaaga

SEQ ID NO: 40439 - DNA, 25 bp, Probe Sequence
ctcaccacatagcacatagaatgat

SEQ ID NO: 40440 - DNA, 25 bp, Probe Sequence
tcaccacatagcacatagaatgata

SEQ ID NO: 40441 - DNA, 25 bp, Probe Sequence
gaggaaggaagtagcattagcagta

SEQ ID NO: 40442 - DNA, 25 bp, Probe Sequence
ttgaagcaagcattctatattccaa

SEQ ID NO: 40443 - DNA, 25 bp, Probe Sequence
caccacatagcacatagaatgatat

SEQ ID NO: 40444 - DNA, 25 bp, Probe Sequence
attgaagcaagcattctatattcca

SEQ ID NO: 40445 - DNA, 25 bp, Probe Sequence
atgaatcttacagtgatgtgtcctt

SEQ ID NO: 40446 - DNA, 25 bp, Probe Sequence
gaatcttacagtgatgtgtccttct

SEQ ID NO: 40447 - DNA, 25 bp, Probe Sequence
gatgaatcttacagtgatgtgtcct

SEQ ID NO: 40448 - DNA, 25 bp, Probe Sequence
tgaatcttacagtgatgtgtccttc

SEQ ID NO: 40449 - DNA, 25 bp, Probe Sequence
ttacagtgatgtgtccttctattga

SEQ ID NO: 40450 - DNA, 25 bp, Probe Sequence
acttcatactctaagaatgtcacac

SEQ ID NO: 40451 - DNA, 25 bp, Probe Sequence
cttacagtgatgtgtccttctattg

SEQ ID NO: 40452 - DNA, 25 bp, Probe Sequence
tcttacagtgatgtgtccttctatt

SEQ ID NO: 40453 - DNA, 25 bp, Probe Sequence
aatcttacagtgatgtgtccttcta

SEQ ID NO: 40454 - DNA, 25 bp, Probe Sequence
tacagtgatgtgtccttctattgac

SEQ ID NO: 40455 - DNA, 25 bp, Probe Sequence
tgatctcaccattatgacatccatc

SEQ ID NO: 40456 - DNA, 25 bp, Probe Sequence
atcttacagtgatgtgtccttctat

SEQ ID NO: 40457 - DNA, 25 bp, Probe Sequence
agatgaatcttacagtgatgtgtcc

SEQ ID NO: 40458 - DNA, 25 bp, Probe Sequence
gatctcaccattatgacatccatcc

SEQ ID NO: 40459 - DNA, 25 bp, Probe Sequence
catactctaagaatgtcacacaaca

SEQ ID NO: 40460 - DNA, 25 bp, Probe Sequence
cttcaatgtcactgtcaccaagact

SEQ ID NO: 40461 - DNA, 25 bp, Probe Sequence
ttcaatgtcactgtcaccaagactg

SEQ ID NO: 40462 - DNA, 25 bp, Probe Sequence
ggaatttagcatggatcttcgtacc

SEQ ID NO: 40463 - DNA, 25 bp, Probe Sequence
gggaatttagcatggatcttcgtac

SEQ ID NO: 40464 - DNA, 25 bp, Probe Sequence
ttagcatggatcttcgtaccaagag

SEQ ID NO: 40465 - DNA, 25 bp, Probe Sequence
caccttcaatgtcactgtcaccaag

SEQ ID NO: 40466 - DNA, 25 bp, Probe Sequence
accttcaatgtcactgtcaccaaga

SEQ ID NO: 40467 - DNA, 25 bp, Probe Sequence
aatttagcatggatcttcgtaccaa

SEQ ID NO: 40468 - DNA, 25 bp, Probe Sequence
atttagcatggatcttcgtaccaag

SEQ ID NO: 40469 - DNA, 25 bp, Probe Sequence
gaatttagcatggatcttcgtacca

SEQ ID NO: 40470 - DNA, 25 bp, Probe Sequence
ccttcaatgtcactgtcaccaagac

SEQ ID NO: 40471 - DNA, 25 bp, Probe Sequence
tcaatgtcactgtcaccaagactga

SEQ ID NO: 40472 - DNA, 25 bp, Probe Sequence
cccatacacacacaaaccattttat

SEQ ID NO: 40473 - DNA, 25 bp, Probe Sequence
ccatacacacacaaaccattttatt

SEQ ID NO: 40474 - DNA, 25 bp, Probe Sequence
caagaaatgttatgaaatggcctcc

SEQ ID NO: 40475 - DNA, 25 bp, Probe Sequence
ccccatacacacacaaaccatttta

SEQ ID NO: 40476 - DNA, 25 bp, Probe Sequence
tttagcatggatcttcgtaccaaga

SEQ ID NO: 40477 - DNA, 25 bp, Probe Sequence
aagaaatgttatgaaatggcctccc

SEQ ID NO: 40478 - DNA, 25 bp, Probe Sequence
acaagaaatgttatgaaatggcctc

SEQ ID NO: 40479 - DNA, 25 bp, Probe Sequence
tcaacaagaaatgttatgaaatggc

SEQ ID NO: 40480 - DNA, 25 bp, Probe Sequence
gatggggaatttagcatggatcttc

SEQ ID NO: 40481 - DNA, 25 bp, Probe Sequence
cattaccccataccccttattgctg

SEQ ID NO: 40482 - DNA, 25 bp, Probe Sequence
catacacacacaaaccattttattt

SEQ ID NO: 40483 - DNA, 25 bp, Probe Sequence
tccccatacacacacaaaccatttt

SEQ ID NO: 40484 - DNA, 25 bp, Probe Sequence
gcttatactactgccagaagacatt

SEQ ID NO: 40485 - DNA, 25 bp, Probe Sequence
tgcttatactactgccagaagacat

SEQ ID NO: 40486 - DNA, 25 bp, Probe Sequence
ctctctagcaacatcaatcaaccag

SEQ ID NO: 40487 - DNA, 25 bp, Probe Sequence
gactctctagcaacatcaatcaacc

SEQ ID NO: 40488 - DNA, 25 bp, Probe Sequence
ggactctctagcaacatcaatcaac

SEQ ID NO: 40489 - DNA, 25 bp, Probe Sequence
ctctagcaacatcaatcaaccagtt

SEQ ID NO: 40490 - DNA, 25 bp, Probe Sequence
tggactctctagcaacatcaatcaa

SEQ ID NO: 40491 - DNA, 25 bp, Probe Sequence
atggactctctagcaacatcaatca

SEQ ID NO: 40492 - DNA, 25 bp, Probe Sequence
tctctagcaacatcaatcaaccagt

SEQ ID NO: 40493 - DNA, 25 bp, Probe Sequence
actctctagcaacatcaatcaacca

SEQ ID NO: 40494 - DNA, 25 bp, Probe Sequence
ggaagacagttatgatctcaagtca

SEQ ID NO: 40495 - DNA, 25 bp, Probe Sequence
tggaagacagttatgatctcaagtc

SEQ ID NO: 40496 - DNA, 25 bp, Probe Sequence
ctggaagacagttatgatctcaagt

SEQ ID NO: 40497 - DNA, 25 bp, Probe Sequence
agacagttatgatctcaagtcaacc

SEQ ID NO: 40498 - DNA, 25 bp, Probe Sequence
agacatgatggagttgtatgaagtg

SEQ ID NO: 40499 - DNA, 25 bp, Probe Sequence
cagacatgatggagttgtatgaagt

SEQ ID NO: 40500 - DNA, 25 bp, Probe Sequence
cttatactactgccagaagacatta

SEQ ID NO: 40501 - DNA, 25 bp, Probe Sequence
aagacagttatgatctcaagtcaac

SEQ ID NO: 40502 - DNA, 25 bp, Probe Sequence
gctggaagacagttatgatctcaag

SEQ ID NO: 40503 - DNA, 25 bp, Probe Sequence
ctgcttatactactgccagaagaca

SEQ ID NO: 40504 - DNA, 25 bp, Probe Sequence
gaagacagttatgatctcaagtcaa

SEQ ID NO: 40505 - DNA, 25 bp, Probe Sequence
tcctcttcttcatcaggcacaataa

SEQ ID NO: 40506 - DNA, 25 bp, Probe Sequence
ttcctcttcttcatcaggcacaata

SEQ ID NO: 40507 - DNA, 25 bp, Probe Sequence
agtgggagtgagatagatatacgaa

SEQ ID NO: 40508 - DNA, 25 bp, Probe Sequence
atgtataatcgtcttagagccactg

SEQ ID NO: 40509 - DNA, 25 bp, Probe Sequence
tatgtataatcgtcttagagccact

SEQ ID NO: 40510 - DNA, 25 bp, Probe Sequence
tgtgctgtatcctcaagttattgtc

SEQ ID NO: 40511 - DNA, 25 bp, Probe Sequence
ctgtgctgtatcctcaagttattgt

SEQ ID NO: 40512 - DNA, 25 bp, Probe Sequence
cttctctccattgagtattgctctt

SEQ ID NO: 40513 - DNA, 25 bp, Probe Sequence
ttctcttctctccattgagtattgc

SEQ ID NO: 40514 - DNA, 25 bp, Probe Sequence
ttctctccattgagtattgctcttg

SEQ ID NO: 40515 - DNA, 25 bp, Probe Sequence
aattagtaggatggctgtgctgtat

SEQ ID NO: 40516 - DNA, 25 bp, Probe Sequence
tagaggttaatgaagaaggctcaga

SEQ ID NO: 40517 - DNA, 25 bp, Probe Sequence
ctcttctctccattgagtattgctc

SEQ ID NO: 40518 - DNA, 25 bp, Probe Sequence
tcttctctccattgagtattgctct

SEQ ID NO: 40519 - DNA, 25 bp, Probe Sequence
tctcttctctccattgagtattgct

SEQ ID NO: 40520 - DNA, 25 bp, Probe Sequence
attagtaggatggctgtgctgtatc

SEQ ID NO: 40521 - DNA, 25 bp, Probe Sequence
ctagaggttaatgaagaaggctcag

SEQ ID NO: 40522 - DNA, 25 bp, Probe Sequence
gaggttaatgaagaaggctcagaag

SEQ ID NO: 40523 - DNA, 25 bp, Probe Sequence
tataatcgtcttagagccactggtg

SEQ ID NO: 40524 - DNA, 25 bp, Probe Sequence
gtataatcgtcttagagccactggt

SEQ ID NO: 40525 - DNA, 25 bp, Probe Sequence
tgtataatcgtcttagagccactgg

SEQ ID NO: 40526 - DNA, 25 bp, Probe Sequence
caatgatgtatcagcaaggagaatt

SEQ ID NO: 40527 - DNA, 25 bp, Probe Sequence
gtgctgtatcctcaagttattgtcg

SEQ ID NO: 40528 - DNA, 25 bp, Probe Sequence
atatgtataatcgtcttagagccac

SEQ ID NO: 40529 - DNA, 25 bp, Probe Sequence
agaggttaatgaagaaggctcagaa

SEQ ID NO: 40530 - DNA, 25 bp, Probe Sequence
ccaatgatgtatcagcaaggagaat

SEQ ID NO: 40531 - DNA, 25 bp, Probe Sequence
gctgtgctgtatcctcaagttattg

SEQ ID NO: 40532 - DNA, 25 bp, Probe Sequence
aggaatgtcttcacttatacttgga

SEQ ID NO: 40533 - DNA, 25 bp, Probe Sequence
gaggaatgtcttcacttatacttgg

SEQ ID NO: 40534 - DNA, 25 bp, Probe Sequence
tcagaggaatgtcttcacttatact

SEQ ID NO: 40535 - DNA, 25 bp, Probe Sequence
ggaatgtcttcacttatacttggat

SEQ ID NO: 40536 - DNA, 25 bp, Probe Sequence
agaggaatgtcttcacttatacttg

SEQ ID NO: 40537 - DNA, 25 bp, Probe Sequence
cagaggaatgtcttcacttatactt

SEQ ID NO: 40538 - DNA, 25 bp, Probe Sequence
ttcagaggaatgtcttcacttatac

SEQ ID NO: 40539 - DNA, 25 bp, Probe Sequence
gcagagaatgtggatacagaataat

SEQ ID NO: 40540 - DNA, 25 bp, Probe Sequence
tctcttcccatttctgattgttgta

SEQ ID NO: 40541 - DNA, 25 bp, Probe Sequence
tcacttatacttggatttgctctct

SEQ ID NO: 40542 - DNA, 25 bp, Probe Sequence
ttcccatttctgattgttgtatagc

SEQ ID NO: 40543 - DNA, 25 bp, Probe Sequence
atttgctctcttcccatttctgatt

SEQ ID NO: 40544 - DNA, 25 bp, Probe Sequence
tgtcttcacttatacttggatttgc

SEQ ID NO: 40545 - DNA, 25 bp, Probe Sequence
aatcagatgcagagaatgtggatac

SEQ ID NO: 40546 - DNA, 25 bp, Probe Sequence
caatcagatgcagagaatgtggata

SEQ ID NO: 40547 - DNA, 25 bp, Probe Sequence
gtcttcacttatacttggatttgct

SEQ ID NO: 40548 - DNA, 25 bp, Probe Sequence
ctcttcccatttctgattgttgtat

SEQ ID NO: 40549 - DNA, 25 bp, Probe Sequence
ctctcttcccatttctgattgttgt

SEQ ID NO: 40550 - DNA, 25 bp, Probe Sequence
gatttgctctcttcccatttctgat

SEQ ID NO: 40551 - DNA, 25 bp, Probe Sequence
ttcacttatacttggatttgctctc

SEQ ID NO: 40552 - DNA, 25 bp, Probe Sequence
tcttcacttatacttggatttgctc

SEQ ID NO: 40553 - DNA, 25 bp, Probe Sequence
cacttatacttggatttgctctctt

SEQ ID NO: 40554 - DNA, 25 bp, Probe Sequence
cttcacttatacttggatttgctct

SEQ ID NO: 40555 - DNA, 25 bp, Probe Sequence
agagaatgtggatacagaataatgt

SEQ ID NO: 40556 - DNA, 25 bp, Probe Sequence
caggaggtggagtaactaaggatat

SEQ ID NO: 40557 - DNA, 25 bp, Probe Sequence
ttaacttctcaggacatccaacatt

SEQ ID NO: 40558 - DNA, 25 bp, Probe Sequence
attaacttctcaggacatccaacat

SEQ ID NO: 40559 - DNA, 25 bp, Probe Sequence
cattaacttctcaggacatccaaca

SEQ ID NO: 40560 - DNA, 25 bp, Probe Sequence
tcaggaggtggagtaactaaggata

SEQ ID NO: 40561 - DNA, 25 bp, Probe Sequence
ccattaacttctcaggacatccaac

SEQ ID NO: 40562 - DNA, 25 bp, Probe Sequence
cctcctggatcactactatgtatgg

SEQ ID NO: 40563 - DNA, 25 bp, Probe Sequence
ggatcactactatgtatggaggcaa

SEQ ID NO: 40564 - DNA, 25 bp, Probe Sequence
ctggatcactactatgtatggaggc

SEQ ID NO: 40565 - DNA, 25 bp, Probe Sequence
tggactatccttatgcctctaactt

SEQ ID NO: 40566 - DNA, 25 bp, Probe Sequence
gtggactatccttatgcctctaact

SEQ ID NO: 40567 - DNA, 25 bp, Probe Sequence
tcctggatcactactatgtatggag

SEQ ID NO: 40568 - DNA, 25 bp, Probe Sequence
ctcctggatcactactatgtatgga

SEQ ID NO: 40569 - DNA, 25 bp, Probe Sequence
gtcaggaggtggagtaactaaggat

SEQ ID NO: 40570 - DNA, 25 bp, Probe Sequence
atagaatagagggtgatgacggtaa

SEQ ID NO: 40571 - DNA, 25 bp, Probe Sequence
tggatcactactatgtatggaggca

SEQ ID NO: 40572 - DNA, 25 bp, Probe Sequence
cctggatcactactatgtatggagg

SEQ ID NO: 40573 - DNA, 25 bp, Probe Sequence
ctatcaaggtagtgtgccagtattt

SEQ ID NO: 40574 - DNA, 25 bp, Probe Sequence
aatgactttgaactgtgctgtaaat

SEQ ID NO: 40575 - DNA, 25 bp, Probe Sequence
ggatttaatgactttgaactgtgct

SEQ ID NO: 40576 - DNA, 25 bp, Probe Sequence
tggatttaatgactttgaactgtgc

SEQ ID NO: 40577 - DNA, 25 bp, Probe Sequence
cctatcaaggtagtgtgccagtatt

SEQ ID NO: 40578 - DNA, 25 bp, Probe Sequence
atttaatgactttgaactgtgctgt

SEQ ID NO: 40579 - DNA, 25 bp, Probe Sequence
gatagaatagagggtgatgacggta

SEQ ID NO: 40580 - DNA, 25 bp, Probe Sequence
aaggtttacaaggacttactggaaa

SEQ ID NO: 40581 - DNA, 25 bp, Probe Sequence
gaaggtttacaaggacttactggaa

SEQ ID NO: 40582 - DNA, 25 bp, Probe Sequence
cacgaaggtttacaaggacttactg

SEQ ID NO: 40583 - DNA, 25 bp, Probe Sequence
atgttaatgacctcatgctcgtgaa

SEQ ID NO: 40584 - DNA, 25 bp, Probe Sequence
caagttcaccaagtggataaatgac

SEQ ID NO: 40585 - DNA, 25 bp, Probe Sequence
ttaaacctcatgccctgttgataaa

SEQ ID NO: 40586 - DNA, 25 bp, Probe Sequence
aagttcaccaagtggataaatgaca

SEQ ID NO: 40587 - DNA, 25 bp, Probe Sequence
cgaaggtttacaaggacttactgga

SEQ ID NO: 40588 - DNA, 25 bp, Probe Sequence
acgaaggtttacaaggacttactgg

SEQ ID NO: 40589 - DNA, 25 bp, Probe Sequence
agttcaccaagtggataaatgacac

SEQ ID NO: 40590 - DNA, 25 bp, Probe Sequence
taaacctcatgccctgttgataaac

SEQ ID NO: 40591 - DNA, 25 bp, Probe Sequence
tgttaatgacctcatgctcgtgaag

SEQ ID NO: 40592 - DNA, 25 bp, Probe Sequence
gatatatttaaacctcatgccctgt

SEQ ID NO: 40593 - DNA, 25 bp, Probe Sequence
tatatttaaacctcatgccctgttg

SEQ ID NO: 40594 - DNA, 25 bp, Probe Sequence
atttaaacctcatgccctgttgata

SEQ ID NO: 40595 - DNA, 25 bp, Probe Sequence
tatttaaacctcatgccctgttgat

SEQ ID NO: 40596 - DNA, 25 bp, Probe Sequence
atatttaaacctcatgccctgttga

SEQ ID NO: 40597 - DNA, 25 bp, Probe Sequence
tttaaacctcatgccctgttgataa

SEQ ID NO: 40598 - DNA, 25 bp, Probe Sequence
gcaagttcaccaagtggataaatga

SEQ ID NO: 40599 - DNA, 25 bp, Probe Sequence
agatatatttaaacctcatgccctg

SEQ ID NO: 40600 - DNA, 25 bp, Probe Sequence
caagtggataaatgacaccatgaaa

SEQ ID NO: 40601 - DNA, 25 bp, Probe Sequence
gttcaccaagtggataaatgacacc

SEQ ID NO: 40602 - DNA, 25 bp, Probe Sequence
ctcatgccctgttgataaaccaatc

SEQ ID NO: 40603 - DNA, 25 bp, Probe Sequence
gcacgaaggtttacaaggacttact

SEQ ID NO: 40604 - DNA, 25 bp, Probe Sequence
catcatcatctctgcaagactcatc

SEQ ID NO: 40605 - DNA, 25 bp, Probe Sequence
tcatcatcatctctgcaagactcat

SEQ ID NO: 40606 - DNA, 25 bp, Probe Sequence
ttcatcatcatctctgcaagactca

SEQ ID NO: 40607 - DNA, 25 bp, Probe Sequence
atctttgacttctcccactccctaa

SEQ ID NO: 40608 - DNA, 25 bp, Probe Sequence
atcatcatctctgcaagactcatcg

SEQ ID NO: 40609 - DNA, 25 bp, Probe Sequence
tttcatcatcatctctgcaagactc

SEQ ID NO: 40610 - DNA, 25 bp, Probe Sequence
ctttcatcatcatctctgcaagact

SEQ ID NO: 40611 - DNA, 25 bp, Probe Sequence
catctttgacttctcccactcccta

SEQ ID NO: 40612 - DNA, 25 bp, Probe Sequence
tctttgacttctcccactccctaag

SEQ ID NO: 40613 - DNA, 25 bp, Probe Sequence
caagagaaaaggaaagtagaacagc

SEQ ID NO: 40614 - DNA, 25 bp, Probe Sequence
ccaagagaaaaggaaagtagaacag

SEQ ID NO: 40615 - DNA, 25 bp, Probe Sequence
ctacacagcccttgttctcatcaat

SEQ ID NO: 40616 - DNA, 25 bp, Probe Sequence
cctttcatcatcatctctgcaagac

SEQ ID NO: 40617 - DNA, 25 bp, Probe Sequence
tacacagcccttgttctcatcaatg

SEQ ID NO: 40618 - DNA, 25 bp, Probe Sequence
tcatcagctccatctttgacttctc

SEQ ID NO: 40619 - DNA, 25 bp, Probe Sequence
ctcatcagctccatctttgacttct

SEQ ID NO: 40620 - DNA, 25 bp, Probe Sequence
tctacacagcccttgttctcatcaa

SEQ ID NO: 40621 - DNA, 25 bp, Probe Sequence
aagagaaaaggaaagtagaacagct

SEQ ID NO: 40622 - DNA, 25 bp, Probe Sequence
tccaagagaaaaggaaagtagaaca

SEQ ID NO: 40623 - DNA, 25 bp, Probe Sequence
ctccaagagaaaaggaaagtagaac

SEQ ID NO: 40624 - DNA, 25 bp, Probe Sequence
gctccaagagaaaaggaaagtagaa

SEQ ID NO: 40625 - DNA, 25 bp, Probe Sequence
catcagctccatctttgacttctcc

SEQ ID NO: 40626 - DNA, 25 bp, Probe Sequence
ctccatctttgacttctcccactcc

SEQ ID NO: 40627 - DNA, 25 bp, Probe Sequence
gcctttcatcatcatctctgcaaga

SEQ ID NO: 40628 - DNA, 25 bp, Probe Sequence
aagtagtttgatgatttgtttggca

SEQ ID NO: 40629 - DNA, 25 bp, Probe Sequence
accaacaaatctcaagccctataaa

SEQ ID NO: 40630 - DNA, 25 bp, Probe Sequence
taagattgtggaatgggtgtaagac

SEQ ID NO: 40631 - DNA, 25 bp, Probe Sequence
tgtattaagattgtggaatgggtgt

SEQ ID NO: 40632 - DNA, 25 bp, Probe Sequence
gaagtagtttgatgatttgtttggc

SEQ ID NO: 40633 - DNA, 25 bp, Probe Sequence
gtgaaagtgggtttgattaaatgga

SEQ ID NO: 40634 - DNA, 25 bp, Probe Sequence
ttaagattgtggaatgggtgtaaga

SEQ ID NO: 40635 - DNA, 25 bp, Probe Sequence
aacaaatctcaagccctataaatgg

SEQ ID NO: 40636 - DNA, 25 bp, Probe Sequence
ccaacaaatctcaagccctataaat

SEQ ID NO: 40637 - DNA, 25 bp, Probe Sequence
gaccaacaaatctcaagccctataa

SEQ ID NO: 40638 - DNA, 25 bp, Probe Sequence
gatttgtttggcatataggaagcac

SEQ ID NO: 40639 - DNA, 25 bp, Probe Sequence
atgatttgtttggcatataggaagc

SEQ ID NO: 40640 - DNA, 25 bp, Probe Sequence
agtagtttgatgatttgtttggcat

SEQ ID NO: 40641 - DNA, 25 bp, Probe Sequence
ggtgaaagtgggtttgattaaatgg

SEQ ID NO: 40642 - DNA, 25 bp, Probe Sequence
gggtgaaagtgggtttgattaaatg

SEQ ID NO: 40643 - DNA, 25 bp, Probe Sequence
tgatttgtttggcatataggaagca

SEQ ID NO: 40644 - DNA, 25 bp, Probe Sequence
tgaaagtgggtttgattaaatggat

SEQ ID NO: 40645 - DNA, 25 bp, Probe Sequence
atgtattaagattgtggaatgggtg

SEQ ID NO: 40646 - DNA, 25 bp, Probe Sequence
attaagattgtggaatgggtgtaag

SEQ ID NO: 40647 - DNA, 25 bp, Probe Sequence
ccctataaatggcttgtattgaact

SEQ ID NO: 40648 - DNA, 25 bp, Probe Sequence
ctggaggctaagtattgctttctac

SEQ ID NO: 40649 - DNA, 25 bp, Probe Sequence
tctggaggctaagtattgctttcta

SEQ ID NO: 40650 - DNA, 25 bp, Probe Sequence
ggaggctaagtattgctttctacaa

SEQ ID NO: 40651 - DNA, 25 bp, Probe Sequence
caacaaatctcaagccctataaatg

SEQ ID NO: 40652 - DNA, 25 bp, Probe Sequence
atggctggctaatagacactgaatc

SEQ ID NO: 40653 - DNA, 25 bp, Probe Sequence
gatggctggctaatagacactgaat

SEQ ID NO: 40654 - DNA, 25 bp, Probe Sequence
tagaactatagatccacatgaacgc

SEQ ID NO: 40655 - DNA, 25 bp, Probe Sequence
gtttgtctttctactgtttcatccc

SEQ ID NO: 40656 - DNA, 25 bp, Probe Sequence
tgtttgtctttctactgtttcatcc

SEQ ID NO: 40657 - DNA, 25 bp, Probe Sequence
ccgatactgtttgtctttctactgt

SEQ ID NO: 40658 - DNA, 25 bp, Probe Sequence
cgatactgtttgtctttctactgtt

SEQ ID NO: 40659 - DNA, 25 bp, Probe Sequence
attactgggttaaattgtggaaagg

SEQ ID NO: 40660 - DNA, 25 bp, Probe Sequence
aattggatggctggctaatagacac

SEQ ID NO: 40661 - DNA, 25 bp, Probe Sequence
actgtttgtctttctactgtttcat

SEQ ID NO: 40662 - DNA, 25 bp, Probe Sequence
tttactccctaaacaacacttgaca

SEQ ID NO: 40663 - DNA, 25 bp, Probe Sequence
caacaaagttcattaacctgggatg

SEQ ID NO: 40664 - DNA, 25 bp, Probe Sequence
gaactatagatccacatgaacgcac

SEQ ID NO: 40665 - DNA, 25 bp, Probe Sequence
agaactatagatccacatgaacgca

SEQ ID NO: 40666 - DNA, 25 bp, Probe Sequence
ctagaactatagatccacatgaacg

SEQ ID NO: 40667 - DNA, 25 bp, Probe Sequence
ttactgggttaaattgtggaaaggg

SEQ ID NO: 40668 - DNA, 25 bp, Probe Sequence
ttactccctaaacaacacttgacag

SEQ ID NO: 40669 - DNA, 25 bp, Probe Sequence
ctatagatcagtgtgttaggaatgg

SEQ ID NO: 40670 - DNA, 25 bp, Probe Sequence
atttactccctaaacaacacttgac

SEQ ID NO: 40671 - DNA, 25 bp, Probe Sequence
ctgtttgtctttctactgtttcatc

SEQ ID NO: 40672 - DNA, 25 bp, Probe Sequence
tactgtttgtctttctactgtttca

SEQ ID NO: 40673 - DNA, 25 bp, Probe Sequence
gccgatactgtttgtctttctactg

SEQ ID NO: 40674 - DNA, 25 bp, Probe Sequence
ctgccgatactgtttgtctttctac

SEQ ID NO: 40675 - DNA, 25 bp, Probe Sequence
tctgccgatactgtttgtctttcta

SEQ ID NO: 40676 - DNA, 25 bp, Probe Sequence
aactggattatcaccttagcaactt

SEQ ID NO: 40677 - DNA, 25 bp, Probe Sequence
aagtagtcagtggaagagagtagag

SEQ ID NO: 40678 - DNA, 25 bp, Probe Sequence
actggattatcaccttagcaactta

SEQ ID NO: 40679 - DNA, 25 bp, Probe Sequence
caagtagtcagtggaagagagtaga

SEQ ID NO: 40680 - DNA, 25 bp, Probe Sequence
cagatgtaaggactcaagtgtagaa

SEQ ID NO: 40681 - DNA, 25 bp, Probe Sequence
tggattatcaccttagcaacttaga

SEQ ID NO: 40682 - DNA, 25 bp, Probe Sequence
gatgtaaggactcaagtgtagaaga

SEQ ID NO: 40683 - DNA, 25 bp, Probe Sequence
agatgtaaggactcaagtgtagaag

SEQ ID NO: 40684 - DNA, 25 bp, Probe Sequence
cgaatcaactggagtctatgcttaa

SEQ ID NO: 40685 - DNA, 25 bp, Probe Sequence
ctggattatcaccttagcaacttag

SEQ ID NO: 40686 - DNA, 25 bp, Probe Sequence
atgtaaggactcaagtgtagaagaa

SEQ ID NO: 40687 - DNA, 25 bp, Probe Sequence
ggattatcaccttagcaacttagaa

SEQ ID NO: 40688 - DNA, 25 bp, Probe Sequence
acagatgtaaggactcaagtgtaga

SEQ ID NO: 40689 - DNA, 25 bp, Probe Sequence
aataacatgctgccattcttgattg

SEQ ID NO: 40690 - DNA, 25 bp, Probe Sequence
ccgaatcaactggagtctatgctta

SEQ ID NO: 40691 - DNA, 25 bp, Probe Sequence
gagtggatctgtagaagtctgtctt

SEQ ID NO: 40692 - DNA, 25 bp, Probe Sequence
cacagatgtaaggactcaagtgtag

SEQ ID NO: 40693 - DNA, 25 bp, Probe Sequence
ttgtaccgaatcaactggagtctat

SEQ ID NO: 40694 - DNA, 25 bp, Probe Sequence
tcacagatgtaaggactcaagtgta

SEQ ID NO: 40695 - DNA, 25 bp, Probe Sequence
tgtaccgaatcaactggagtctatg

SEQ ID NO: 40696 - DNA, 25 bp, Probe Sequence
agtagtcagtggaagagagtagagc

SEQ ID NO: 40697 - DNA, 25 bp, Probe Sequence
aagccacaggtgttgattgttataa

SEQ ID NO: 40698 - DNA, 25 bp, Probe Sequence
aaactggattatcaccttagcaact

SEQ ID NO: 40699 - DNA, 25 bp, Probe Sequence
tctcacagatgtaaggactcaagtg

SEQ ID NO: 40700 - DNA, 25 bp, Probe Sequence
gcagtccaaggtattgagacatatt

SEQ ID NO: 40701 - DNA, 25 bp, Probe Sequence
agcagtccaaggtattgagacatat

SEQ ID NO: 40702 - DNA, 25 bp, Probe Sequence
aggtattgagacatattactggaag

SEQ ID NO: 40703 - DNA, 25 bp, Probe Sequence
caaggtattgagacatattactgga

SEQ ID NO: 40704 - DNA, 25 bp, Probe Sequence
tccaaggtattgagacatattactg

SEQ ID NO: 40705 - DNA, 25 bp, Probe Sequence
ggtattgagacatattactggaagt

SEQ ID NO: 40706 - DNA, 25 bp, Probe Sequence
gactattacactgcctggaggatag

SEQ ID NO: 40707 - DNA, 25 bp, Probe Sequence
aaggtattgagacatattactggaa

SEQ ID NO: 40708 - DNA, 25 bp, Probe Sequence
ccaaggtattgagacatattactgg

SEQ ID NO: 40709 - DNA, 25 bp, Probe Sequence
gtccaaggtattgagacatattact

SEQ ID NO: 40710 - DNA, 25 bp, Probe Sequence
agtccaaggtattgagacatattac

SEQ ID NO: 40711 - DNA, 25 bp, Probe Sequence
cagtccaaggtattgagacatatta

SEQ ID NO: 40712 - DNA, 25 bp, Probe Sequence
cagcagtccaaggtattgagacata

SEQ ID NO: 40713 - DNA, 25 bp, Probe Sequence
tttaggtcctttagtttgcttctgt

SEQ ID NO: 40714 - DNA, 25 bp, Probe Sequence
taggtcctttagtttgcttctgtaa

SEQ ID NO: 40715 - DNA, 25 bp, Probe Sequence
ttaggtcctttagtttgcttctgta

SEQ ID NO: 40716 - DNA, 25 bp, Probe Sequence
aggtcctttagtttgcttctgtaag

SEQ ID NO: 40717 - DNA, 25 bp, Probe Sequence
atggttctttatcatttctcttccc

SEQ ID NO: 40718 - DNA, 25 bp, Probe Sequence
gagtatacagtcctagagaattcct

SEQ ID NO: 40719 - DNA, 25 bp, Probe Sequence
agagtatacagtcctagagaattcc

SEQ ID NO: 40720 - DNA, 25 bp, Probe Sequence
agacatggaatttatgaatggttct

SEQ ID NO: 40721 - DNA, 25 bp, Probe Sequence
agagagtatacagtcctagagaatt

SEQ ID NO: 40722 - DNA, 25 bp, Probe Sequence
actattacactgcctggaggatagc

SEQ ID NO: 40723 - DNA, 25 bp, Probe Sequence
agtagacatggaatttatgaatggt

SEQ ID NO: 40724 - DNA, 25 bp, Probe Sequence
ttccttcttactgtgtcaattccta

SEQ ID NO: 40725 - DNA, 25 bp, Probe Sequence
tccttcttactgtgtcaattcctat

SEQ ID NO: 40726 - DNA, 25 bp, Probe Sequence
ccttcttactgtgtcaattcctatt

SEQ ID NO: 40727 - DNA, 25 bp, Probe Sequence
ttctctttccttcttactgtgtcaa

SEQ ID NO: 40728 - DNA, 25 bp, Probe Sequence
cttctctttccttcttactgtgtca

SEQ ID NO: 40729 - DNA, 25 bp, Probe Sequence
tcttctctttccttcttactgtgtc

SEQ ID NO: 40730 - DNA, 25 bp, Probe Sequence
ccatcttctctttccttcttactgt

SEQ ID NO: 40731 - DNA, 25 bp, Probe Sequence
tccatcttctctttccttcttactg

SEQ ID NO: 40732 - DNA, 25 bp, Probe Sequence
actccatcttctctttccttcttac

SEQ ID NO: 40733 - DNA, 25 bp, Probe Sequence
cactccatcttctctttccttctta

SEQ ID NO: 40734 - DNA, 25 bp, Probe Sequence
tctctttccttcttactgtgtcaat

SEQ ID NO: 40735 - DNA, 25 bp, Probe Sequence
ctccatcttctctttccttcttact

SEQ ID NO: 40736 - DNA, 25 bp, Probe Sequence
atcttctctttccttcttactgtgt

SEQ ID NO: 40737 - DNA, 25 bp, Probe Sequence
tttccttcttactgtgtcaattcct

SEQ ID NO: 40738 - DNA, 25 bp, Probe Sequence
ctttccttcttactgtgtcaattcc

SEQ ID NO: 40739 - DNA, 25 bp, Probe Sequence
catcttctctttccttcttactgtg

SEQ ID NO: 40740 - DNA, 25 bp, Probe Sequence
tctttccttcttactgtgtcaattc

SEQ ID NO: 40741 - DNA, 25 bp, Probe Sequence
ctctttccttcttactgtgtcaatt

SEQ ID NO: 40742 - DNA, 25 bp, Probe Sequence
gtttcttcaccatcactccatcaaa

SEQ ID NO: 40743 - DNA, 25 bp, Probe Sequence
gtataggaagagggtatggtctgag

SEQ ID NO: 40744 - DNA, 25 bp, Probe Sequence
tataggaagagggtatggtctgaga

SEQ ID NO: 40745 - DNA, 25 bp, Probe Sequence
tttcttcaccatcactccatcaaag

SEQ ID NO: 40746 - DNA, 25 bp, Probe Sequence
aagttctcagtttcttcaccatcac

SEQ ID NO: 40747 - DNA, 25 bp, Probe Sequence
caagttctcagtttcttcaccatca

SEQ ID NO: 40748 - DNA, 25 bp, Probe Sequence
aacagaataccaagcagaatgatga

SEQ ID NO: 40749 - DNA, 25 bp, Probe Sequence
caacagaataccaagcagaatgatg

SEQ ID NO: 40750 - DNA, 25 bp, Probe Sequence
acagaataccaagcagaatgatgag

SEQ ID NO: 40751 - DNA, 25 bp, Probe Sequence
ccaacagaataccaagcagaatgat

SEQ ID NO: 40752 - DNA, 25 bp, Probe Sequence
gaataccaagcagaatgatgaggac

SEQ ID NO: 40753 - DNA, 25 bp, Probe Sequence
agaataccaagcagaatgatgagga

SEQ ID NO: 40754 - DNA, 25 bp, Probe Sequence
cagaataccaagcagaatgatgagg

SEQ ID NO: 40755 - DNA, 25 bp, Probe Sequence
aagttacaccaacagaataccaagc

SEQ ID NO: 40756 - DNA, 25 bp, Probe Sequence
tacaccaacagaataccaagcagaa

SEQ ID NO: 40757 - DNA, 25 bp, Probe Sequence
ttacaccaacagaataccaagcaga

SEQ ID NO: 40758 - DNA, 25 bp, Probe Sequence
caccaacagaataccaagcagaatg

SEQ ID NO: 40759 - DNA, 25 bp, Probe Sequence
gttacaccaacagaataccaagcag

SEQ ID NO: 40760 - DNA, 25 bp, Probe Sequence
accaacagaataccaagcagaatga

SEQ ID NO: 40761 - DNA, 25 bp, Probe Sequence
taagtcggtaagctagaggattgta

SEQ ID NO: 40762 - DNA, 25 bp, Probe Sequence
gttaagtcggtaagctagaggattg

SEQ ID NO: 40763 - DNA, 25 bp, Probe Sequence
agttacaccaacagaataccaagca

SEQ ID NO: 40764 - DNA, 25 bp, Probe Sequence
aataccaagcagaatgatgaggacc

SEQ ID NO: 40765 - DNA, 25 bp, Probe Sequence
acaccaacagaataccaagcagaat

SEQ ID NO: 40766 - DNA, 25 bp, Probe Sequence
acacattggagagcttagaggataa

SEQ ID NO: 40767 - DNA, 25 bp, Probe Sequence
aagtcggtaagctagaggattgtaa

SEQ ID NO: 40768 - DNA, 25 bp, Probe Sequence
ttaagtcggtaagctagaggattgt

SEQ ID NO: 40769 - DNA, 25 bp, Probe Sequence
gacacattggagagcttagaggata

SEQ ID NO: 40770 - DNA, 25 bp, Probe Sequence
aattccactgattgtgataatggtt

SEQ ID NO: 40771 - DNA, 25 bp, Probe Sequence
cagtataaaggaaagcgttaagtcg

SEQ ID NO: 40772 - DNA, 25 bp, Probe Sequence
ggatggaatgactgaatctgataca

SEQ ID NO: 40773 - DNA, 25 bp, Probe Sequence
tggatggaatgactgaatctgatac

SEQ ID NO: 40774 - DNA, 25 bp, Probe Sequence
gatggatggaatgactgaatctgat

SEQ ID NO: 40775 - DNA, 25 bp, Probe Sequence
atggatggaatgactgaatctgata

SEQ ID NO: 40776 - DNA, 25 bp, Probe Sequence
ttctgatggatggaatgactgaatc

SEQ ID NO: 40777 - DNA, 25 bp, Probe Sequence
gttctgatggatggaatgactgaat

SEQ ID NO: 40778 - DNA, 25 bp, Probe Sequence
ctgatggatggaatgactgaatctg

SEQ ID NO: 40779 - DNA, 25 bp, Probe Sequence
tctgatggatggaatgactgaatct

SEQ ID NO: 40780 - DNA, 25 bp, Probe Sequence
tgatggatggaatgactgaatctga

SEQ ID NO: 40781 - DNA, 25 bp, Probe Sequence
atcagatgtgccttgagaatagtat

SEQ ID NO: 40782 - DNA, 25 bp, Probe Sequence
gatgtgccttgagaatagtatatgt

SEQ ID NO: 40783 - DNA, 25 bp, Probe Sequence
tcagatgtgccttgagaatagtata

SEQ ID NO: 40784 - DNA, 25 bp, Probe Sequence
agatgtgccttgagaatagtatatg

SEQ ID NO: 40785 - DNA, 25 bp, Probe Sequence
cagatgtgccttgagaatagtatat

SEQ ID NO: 40786 - DNA, 25 bp, Probe Sequence
gactgatgaagatgctgttctgatg

SEQ ID NO: 40787 - DNA, 25 bp, Probe Sequence
tgttctgatggatggaatgactgaa

SEQ ID NO: 40788 - DNA, 25 bp, Probe Sequence
gatgaagatgctgttctgatggatg

SEQ ID NO: 40789 - DNA, 25 bp, Probe Sequence
catcagatgtgccttgagaatagta

SEQ ID NO: 40790 - DNA, 25 bp, Probe Sequence
atatcatcagatgtgccttgagaat

SEQ ID NO: 40791 - DNA, 25 bp, Probe Sequence
atggaatgactgaatctgatacagc

SEQ ID NO: 40792 - DNA, 25 bp, Probe Sequence
atcatcagatgtgccttgagaatag

SEQ ID NO: 40793 - DNA, 25 bp, Probe Sequence
gatggaatgactgaatctgatacag

SEQ ID NO: 40794 - DNA, 25 bp, Probe Sequence
tatcatcagatgtgccttgagaata

SEQ ID NO: 40795 - DNA, 25 bp, Probe Sequence
tatatcatcagatgtgccttgagaa

SEQ ID NO: 40796 - DNA, 25 bp, Probe Sequence
ataggtataagtggtgtgtgtatgc

SEQ ID NO: 40797 - DNA, 25 bp, Probe Sequence
gtgataggtataagtggtgtgtgta

SEQ ID NO: 40798 - DNA, 25 bp, Probe Sequence
aatgtgtgtgtgcttatgtatgagg

SEQ ID NO: 40799 - DNA, 25 bp, Probe Sequence
tgataggtataagtggtgtgtgtat

SEQ ID NO: 40800 - DNA, 25 bp, Probe Sequence
gataggtataagtggtgtgtgtatg

SEQ ID NO: 40801 - DNA, 25 bp, Probe Sequence
tgtgtgtgtgcttatgtatgaggta

SEQ ID NO: 40802 - DNA, 25 bp, Probe Sequence
ggtgataggtataagtggtgtgtgt

SEQ ID NO: 40803 - DNA, 25 bp, Probe Sequence
tggtgataggtataagtggtgtgtg

SEQ ID NO: 40804 - DNA, 25 bp, Probe Sequence
gtggtgataggtataagtggtgtgt

SEQ ID NO: 40805 - DNA, 25 bp, Probe Sequence
gtgtgtgtgcttatgtatgaggtac

SEQ ID NO: 40806 - DNA, 25 bp, Probe Sequence
atgtgtgtgtgcttatgtatgaggt

SEQ ID NO: 40807 - DNA, 25 bp, Probe Sequence
taggtataagtggtgtgtgtatgcg

SEQ ID NO: 40808 - DNA, 25 bp, Probe Sequence
ggtggtgataggtataagtggtgtg

SEQ ID NO: 40809 - DNA, 25 bp, Probe Sequence
gtggtggtgataggtataagtggtg

SEQ ID NO: 40810 - DNA, 25 bp, Probe Sequence
taactccatgtctctgagcattaga

SEQ ID NO: 40811 - DNA, 25 bp, Probe Sequence
gagtagctgagattataggcaccta

SEQ ID NO: 40812 - DNA, 25 bp, Probe Sequence
tggtggtgataggtataagtggtgt

SEQ ID NO: 40813 - DNA, 25 bp, Probe Sequence
ctaactccatgtctctgagcattag

SEQ ID NO: 40814 - DNA, 25 bp, Probe Sequence
actccatgtctctgagcattagatt

SEQ ID NO: 40815 - DNA, 25 bp, Probe Sequence
aactccatgtctctgagcattagat

SEQ ID NO: 40816 - DNA, 25 bp, Probe Sequence
aaatgtgtgtgtgcttatgtatgag

SEQ ID NO: 40817 - DNA, 25 bp, Probe Sequence
aatacctcccttagaagtttgttgt

SEQ ID NO: 40818 - DNA, 25 bp, Probe Sequence
atacctcccttagaagtttgttgtg

SEQ ID NO: 40819 - DNA, 25 bp, Probe Sequence
cctaactccatgtctctgagcatta

SEQ ID NO: 40820 - DNA, 25 bp, Probe Sequence
tacaggttatgattcagaggaggag

SEQ ID NO: 40821 - DNA, 25 bp, Probe Sequence
ctacaggttatgattcagaggagga

SEQ ID NO: 40822 - DNA, 25 bp, Probe Sequence
ttatgattcagaggaggaggaagag

SEQ ID NO: 40823 - DNA, 25 bp, Probe Sequence
gttatgattcagaggaggaggaaga

SEQ ID NO: 40824 - DNA, 25 bp, Probe Sequence
tatgattcagaggaggaggaagaga

SEQ ID NO: 40825 - DNA, 25 bp, Probe Sequence
cacctcaacctaagaagtccaagaa

SEQ ID NO: 40826 - DNA, 25 bp, Probe Sequence
ggttatgattcagaggaggaggaag

SEQ ID NO: 40827 - DNA, 25 bp, Probe Sequence
aggttatgattcagaggaggaggaa

SEQ ID NO: 40828 - DNA, 25 bp, Probe Sequence
atgattcagaggaggaggaagagag

SEQ ID NO: 40829 - DNA, 25 bp, Probe Sequence
cctacaggttatgattcagaggagg

SEQ ID NO: 40830 - DNA, 25 bp, Probe Sequence
acccagaagagattgagattgattt

SEQ ID NO: 40831 - DNA, 25 bp, Probe Sequence
aacccagaagagattgagattgatt

SEQ ID NO: 40832 - DNA, 25 bp, Probe Sequence
aaacccagaagagattgagattgat

SEQ ID NO: 40833 - DNA, 25 bp, Probe Sequence
caggttatgattcagaggaggagga

SEQ ID NO: 40834 - DNA, 25 bp, Probe Sequence
cctcaacctaagaagtccaagaaag

SEQ ID NO: 40835 - DNA, 25 bp, Probe Sequence
aacctaagaagtccaagaaagcaag

SEQ ID NO: 40836 - DNA, 25 bp, Probe Sequence
cctggactgtctttgttgattctaa

SEQ ID NO: 40837 - DNA, 25 bp, Probe Sequence
acaggttatgattcagaggaggagg

SEQ ID NO: 40838 - DNA, 25 bp, Probe Sequence
tggactgtctttgttgattctaact

SEQ ID NO: 40839 - DNA, 25 bp, Probe Sequence
ctggactgtctttgttgattctaac

SEQ ID NO: 40840 - DNA, 25 bp, Probe Sequence
caacctaagaagtccaagaaagcaa

SEQ ID NO: 40841 - DNA, 25 bp, Probe Sequence
gcctacaggttatgattcagaggag

SEQ ID NO: 40842 - DNA, 25 bp, Probe Sequence
caaacccagaagagattgagattga

SEQ ID NO: 40843 - DNA, 25 bp, Probe Sequence
ctcaacctaagaagtccaagaaagc

SEQ ID NO: 40844 - DNA, 25 bp, Probe Sequence
tatgcctcctataagtccagttgaa

SEQ ID NO: 40845 - DNA, 25 bp, Probe Sequence
ctatgcctcctataagtccagttga

SEQ ID NO: 40846 - DNA, 25 bp, Probe Sequence
attatactgtgctccaaggacgata

SEQ ID NO: 40847 - DNA, 25 bp, Probe Sequence
cctatgcctcctataagtccagttg

SEQ ID NO: 40848 - DNA, 25 bp, Probe Sequence
catccacctatgcctcctataagtc

SEQ ID NO: 40849 - DNA, 25 bp, Probe Sequence
ttatactgtgctccaaggacgatac

SEQ ID NO: 40850 - DNA, 25 bp, Probe Sequence
acctatgcctcctataagtccagtt

SEQ ID NO: 40851 - DNA, 25 bp, Probe Sequence
atccacctatgcctcctataagtcc

SEQ ID NO: 40852 - DNA, 25 bp, Probe Sequence
cattatactgtgctccaaggacgat

SEQ ID NO: 40853 - DNA, 25 bp, Probe Sequence
cacctatgcctcctataagtccagt

SEQ ID NO: 40854 - DNA, 25 bp, Probe Sequence
agaggagaagggaatcattgtttac

SEQ ID NO: 40855 - DNA, 25 bp, Probe Sequence
cagaggagaagggaatcattgttta

SEQ ID NO: 40856 - DNA, 25 bp, Probe Sequence
tatactgtgctccaaggacgatact

SEQ ID NO: 40857 - DNA, 25 bp, Probe Sequence
cctcctataagtccagttgaaatct

SEQ ID NO: 40858 - DNA, 25 bp, Probe Sequence
aaagttccaagtttgcgtataagac

SEQ ID NO: 40859 - DNA, 25 bp, Probe Sequence
gaaagttccaagtttgcgtataaga

SEQ ID NO: 40860 - DNA, 25 bp, Probe Sequence
tgaaagttccaagtttgcgtataag

SEQ ID NO: 40861 - DNA, 25 bp, Probe Sequence
ctgaaagttccaagtttgcgtataa

SEQ ID NO: 40862 - DNA, 25 bp, Probe Sequence
gcctcctataagtccagttgaaatc

SEQ ID NO: 40863 - DNA, 25 bp, Probe Sequence
gaggagaagggaatcattgtttaca

SEQ ID NO: 40864 - DNA, 25 bp, Probe Sequence
aggagaagggaatcattgtttacac

SEQ ID NO: 40865 - DNA, 25 bp, Probe Sequence
aagttccaagtttgcgtataagaca

SEQ ID NO: 40866 - DNA, 25 bp, Probe Sequence
tccacttctccaacttctgtttaat

SEQ ID NO: 40867 - DNA, 25 bp, Probe Sequence
ccacttctccaacttctgtttaatc

SEQ ID NO: 40868 - DNA, 25 bp, Probe Sequence
gatttaacttgggtaacatggcttg

SEQ ID NO: 40869 - DNA, 25 bp, Probe Sequence
agatttaacttgggtaacatggctt

SEQ ID NO: 40870 - DNA, 25 bp, Probe Sequence
gggaccaagagaaagaagcagatat

SEQ ID NO: 40871 - DNA, 25 bp, Probe Sequence
gagatttaacttgggtaacatggct

SEQ ID NO: 40872 - DNA, 25 bp, Probe Sequence
agagatttaacttgggtaacatggc

SEQ ID NO: 40873 - DNA, 25 bp, Probe Sequence
aagagatttaacttgggtaacatgg

SEQ ID NO: 40874 - DNA, 25 bp, Probe Sequence
atttaacttgggtaacatggcttgg

SEQ ID NO: 40875 - DNA, 25 bp, Probe Sequence
agggaccaagagaaagaagcagata

SEQ ID NO: 40876 - DNA, 25 bp, Probe Sequence
agagaaagaagcagatatccaaagg

SEQ ID NO: 40877 - DNA, 25 bp, Probe Sequence
ccaagagaaagaagcagatatccaa

SEQ ID NO: 40878 - DNA, 25 bp, Probe Sequence
caagagaaagaagcagatatccaaa

SEQ ID NO: 40879 - DNA, 25 bp, Probe Sequence
gaccaagagaaagaagcagatatcc

SEQ ID NO: 40880 - DNA, 25 bp, Probe Sequence
ggaccaagagaaagaagcagatatc

SEQ ID NO: 40881 - DNA, 25 bp, Probe Sequence
gagaaagaagcagatatccaaaggg

SEQ ID NO: 40882 - DNA, 25 bp, Probe Sequence
aagagaaagaagcagatatccaaag

SEQ ID NO: 40883 - DNA, 25 bp, Probe Sequence
aaagagatttaacttgggtaacatg

SEQ ID NO: 40884 - DNA, 25 bp, Probe Sequence
accaagagaaagaagcagatatcca

SEQ ID NO: 40885 - DNA, 25 bp, Probe Sequence
gaaagaagcagatatccaaagggtg

SEQ ID NO: 40886 - DNA, 25 bp, Probe Sequence
agaaagaagcagatatccaaagggt

SEQ ID NO: 40887 - DNA, 25 bp, Probe Sequence
ttcctgggttttctcattgtctttt

SEQ ID NO: 40888 - DNA, 25 bp, Probe Sequence
cactttggactgctgcttctcttag

SEQ ID NO: 40889 - DNA, 25 bp, Probe Sequence
cttcctgggttttctcattgtcttt

SEQ ID NO: 40890 - DNA, 25 bp, Probe Sequence
ctatgctcctgggatacgctatgaa

SEQ ID NO: 40891 - DNA, 25 bp, Probe Sequence
ttgcatcagtactttgtatgggata

SEQ ID NO: 40892 - DNA, 25 bp, Probe Sequence
ctgatgtactttggcttcactcact

SEQ ID NO: 40893 - DNA, 25 bp, Probe Sequence
tgatgtactttggcttcactcactg

SEQ ID NO: 40894 - DNA, 25 bp, Probe Sequence
ccaaggatgaggaccaggactacat

SEQ ID NO: 40895 - DNA, 25 bp, Probe Sequence
gatgtactttggcttcactcactgc

SEQ ID NO: 40896 - DNA, 25 bp, Probe Sequence
gctgatgtactttggcttcactcac

SEQ ID NO: 40897 - DNA, 25 bp, Probe Sequence
caaggatgaggaccaggactacatc

SEQ ID NO: 40898 - DNA, 25 bp, Probe Sequence
gtgctgatgtactttggcttcactc

SEQ ID NO: 40899 - DNA, 25 bp, Probe Sequence
tgctgatgtactttggcttcactca

SEQ ID NO: 40900 - DNA, 25 bp, Probe Sequence
ctagtcacagttaccgcgtgtacta

SEQ ID NO: 40901 - DNA, 25 bp, Probe Sequence
cacagttaccgcgtgtactacaatg

SEQ ID NO: 40902 - DNA, 25 bp, Probe Sequence
tagtcacagttaccgcgtgtactac

SEQ ID NO: 40903 - DNA, 25 bp, Probe Sequence
tcacagttaccgcgtgtactacaat

SEQ ID NO: 40904 - DNA, 25 bp, Probe Sequence
aaggatgaggaccaggactacatcg

SEQ ID NO: 40905 - DNA, 25 bp, Probe Sequence
gtcacagttaccgcgtgtactacaa

SEQ ID NO: 40906 - DNA, 25 bp, Probe Sequence
gactacatcgtggaccactccattg

SEQ ID NO: 40907 - DNA, 25 bp, Probe Sequence
ggtgtctgttaatgagagagtgatg

SEQ ID NO: 40908 - DNA, 25 bp, Probe Sequence
aggtgtctgttaatgagagagtgat

SEQ ID NO: 40909 - DNA, 25 bp, Probe Sequence
gaaggtgtctgttaatgagagagtg

SEQ ID NO: 40910 - DNA, 25 bp, Probe Sequence
agaaggtgtctgttaatgagagagt

SEQ ID NO: 40911 - DNA, 25 bp, Probe Sequence
aaggtgtctgttaatgagagagtga

SEQ ID NO: 40912 - DNA, 25 bp, Probe Sequence
taagtaccaagaagacacctgctat

SEQ ID NO: 40913 - DNA, 25 bp, Probe Sequence
ccatactgaatgaacacaccttctg

SEQ ID NO: 40914 - DNA, 25 bp, Probe Sequence
gtgtctgttaatgagagagtgatgc

SEQ ID NO: 40915 - DNA, 25 bp, Probe Sequence
catactgaatgaacacaccttctgt

SEQ ID NO: 40916 - DNA, 25 bp, Probe Sequence
ctaagtaccaagaagacacctgcta

SEQ ID NO: 40917 - DNA, 25 bp, Probe Sequence
tgtctgttaatgagagagtgatgcc

SEQ ID NO: 40918 - DNA, 25 bp, Probe Sequence
aagtaccaagaagacacctgctatg

SEQ ID NO: 40919 - DNA, 25 bp, Probe Sequence
aaacaatgagaagcagtggataaat

SEQ ID NO: 40920 - DNA, 25 bp, Probe Sequence
atgagaagcagtggataaataaggc

SEQ ID NO: 40921 - DNA, 25 bp, Probe Sequence
aatgagaagcagtggataaataagg

SEQ ID NO: 40922 - DNA, 25 bp, Probe Sequence
tacaccttaaacaatgagaagcagt

SEQ ID NO: 40923 - DNA, 25 bp, Probe Sequence
catccaaggattatgcagaagtagg

SEQ ID NO: 40924 - DNA, 25 bp, Probe Sequence
ccatccaaggattatgcagaagtag

SEQ ID NO: 40925 - DNA, 25 bp, Probe Sequence
ctaccatccaaggattatgcagaag

SEQ ID NO: 40926 - DNA, 25 bp, Probe Sequence
taaacaatgagaagcagtggataaa

SEQ ID NO: 40927 - DNA, 25 bp, Probe Sequence
caagtagatattgggctcatcaaac

SEQ ID NO: 40928 - DNA, 25 bp, Probe Sequence
cttaaacaatgagaagcagtggata

SEQ ID NO: 40929 - DNA, 25 bp, Probe Sequence
ttaaacaatgagaagcagtggataa

SEQ ID NO: 40930 - DNA, 25 bp, Probe Sequence
agtagatattgggctcatcaaactc

SEQ ID NO: 40931 - DNA, 25 bp, Probe Sequence
ctctctctctctctgtctctgtctc

SEQ ID NO: 40932 - DNA, 25 bp, Probe Sequence
ctctctctctctgtctctgtctctg

SEQ ID NO: 40933 - DNA, 25 bp, Probe Sequence
tctctctctctctgtctctgtctct

SEQ ID NO: 40934 - DNA, 25 bp, Probe Sequence
tctctctctctctctgtctctgtct

SEQ ID NO: 40935 - DNA, 25 bp, Probe Sequence
ctctctctgtctctgtctctgtctc

SEQ ID NO: 40936 - DNA, 25 bp, Probe Sequence
ctctctctctgtctctgtctctgtc

SEQ ID NO: 40937 - DNA, 25 bp, Probe Sequence
ttctctctctctctctgtctctgtc

SEQ ID NO: 40938 - DNA, 25 bp, Probe Sequence
tctctctctgtctctgtctctgtct

SEQ ID NO: 40939 - DNA, 25 bp, Probe Sequence
tctctctctctgtctctgtctctgt

SEQ ID NO: 40940 - DNA, 25 bp, Probe Sequence
tctctctgtctctgtctctgtctca

SEQ ID NO: 40941 - DNA, 25 bp, Probe Sequence
tttctttctctctctctctctgtct

SEQ ID NO: 40942 - DNA, 25 bp, Probe Sequence
ctttctttctctctctctctctgtc

SEQ ID NO: 40943 - DNA, 25 bp, Probe Sequence
tctttctttctctctctctctctgt

SEQ ID NO: 40944 - DNA, 25 bp, Probe Sequence
ctctttctttctctctctctctctg

SEQ ID NO: 40945 - DNA, 25 bp, Probe Sequence
tctctttctttctctctctctctct

SEQ ID NO: 40946 - DNA, 25 bp, Probe Sequence
tctctctttctttctctctctctct

SEQ ID NO: 40947 - DNA, 25 bp, Probe Sequence
tctctctctttctttctctctctct

SEQ ID NO: 40948 - DNA, 25 bp, Probe Sequence
tctctctctctttctttctctctct

SEQ ID NO: 40949 - DNA, 25 bp, Probe Sequence
tctctctctctctttctttctctct

SEQ ID NO: 40950 - DNA, 25 bp, Probe Sequence
tctctctctctctctttctttctct

SEQ ID NO: 40951 - DNA, 25 bp, Probe Sequence
ttctttctctctctctctctgtctc

SEQ ID NO: 40952 - DNA, 25 bp, Probe Sequence
tgttctctctctctctctttctttc

SEQ ID NO: 40953 - DNA, 25 bp, Probe Sequence
ctctctttctttctctctctctctc

SEQ ID NO: 40954 - DNA, 25 bp, Probe Sequence
ctctctctttctttctctctctctc

SEQ ID NO: 40955 - DNA, 25 bp, Probe Sequence
gaagatggttattaacactgtgctg

SEQ ID NO: 40956 - DNA, 25 bp, Probe Sequence
ctgaagatggttattaacactgtgc

SEQ ID NO: 40957 - DNA, 25 bp, Probe Sequence
tgaagatggttattaacactgtgct

SEQ ID NO: 40958 - DNA, 25 bp, Probe Sequence
tctgaagatggttattaacactgtg

SEQ ID NO: 40959 - DNA, 25 bp, Probe Sequence
aagatggttattaacactgtgctgt

SEQ ID NO: 40960 - DNA, 25 bp, Probe Sequence
ttctgaagatggttattaacactgt

SEQ ID NO: 40961 - DNA, 25 bp, Probe Sequence
atatttgttatcttctttgcctgcc

SEQ ID NO: 40962 - DNA, 25 bp, Probe Sequence
gctcagttgtgtttgtatttccttt

SEQ ID NO: 40963 - DNA, 25 bp, Probe Sequence
agtaatggatttctttggatgctga

SEQ ID NO: 40964 - DNA, 25 bp, Probe Sequence
ttatcttctttgcctgcctgtattt

SEQ ID NO: 40965 - DNA, 25 bp, Probe Sequence
tatttgttatcttctttgcctgcct

SEQ ID NO: 40966 - DNA, 25 bp, Probe Sequence
gttatcagtcagattctttccttgg

SEQ ID NO: 40967 - DNA, 25 bp, Probe Sequence
aatggatttctttggatgctgaatg

SEQ ID NO: 40968 - DNA, 25 bp, Probe Sequence
gtaatggatttctttggatgctgaa

SEQ ID NO: 40969 - DNA, 25 bp, Probe Sequence
aagtaatggatttctttggatgctg

SEQ ID NO: 40970 - DNA, 25 bp, Probe Sequence
tcagttgtgtttgtatttcctttct

SEQ ID NO: 40971 - DNA, 25 bp, Probe Sequence
cttggctcagttgtgtttgtatttc

SEQ ID NO: 40972 - DNA, 25 bp, Probe Sequence
ttatcagtcagattctttccttggc

SEQ ID NO: 40973 - DNA, 25 bp, Probe Sequence
ctcagttgtgtttgtatttcctttc

SEQ ID NO: 40974 - DNA, 25 bp, Probe Sequence
gttatcttctttgcctgcctgtatt

SEQ ID NO: 40975 - DNA, 25 bp, Probe Sequence
taatggatttctttggatgctgaat

SEQ ID NO: 40976 - DNA, 25 bp, Probe Sequence
tgttatcagtcagattctttccttg

SEQ ID NO: 40977 - DNA, 25 bp, Probe Sequence
tatcagtcagattctttccttggct

SEQ ID NO: 40978 - DNA, 25 bp, Probe Sequence
cagttgtgtttgtatttcctttctt

SEQ ID NO: 40979 - DNA, 25 bp, Probe Sequence
gctaagcattattattcaactggtc

SEQ ID NO: 40980 - DNA, 25 bp, Probe Sequence
agctaagcattattattcaactggt

SEQ ID NO: 40981 - DNA, 25 bp, Probe Sequence
gtaaagcagataggaatgtatgtgt

SEQ ID NO: 40982 - DNA, 25 bp, Probe Sequence
tgtaaagcagataggaatgtatgtg

SEQ ID NO: 40983 - DNA, 25 bp, Probe Sequence
ctaagcattattattcaactggtct

SEQ ID NO: 40984 - DNA, 25 bp, Probe Sequence
aatgatgtaaagcagataggaatgt

SEQ ID NO: 40985 - DNA, 25 bp, Probe Sequence
aacaagtattgcagtaatcatcact

SEQ ID NO: 40986 - DNA, 25 bp, Probe Sequence
aaagcagataggaatgtatgtgtac

SEQ ID NO: 40987 - DNA, 25 bp, Probe Sequence
gaatgatgtaaagcagataggaatg

SEQ ID NO: 40988 - DNA, 25 bp, Probe Sequence
aagcattattattcaactggtctaa

SEQ ID NO: 40989 - DNA, 25 bp, Probe Sequence
attgcagtaatcatcacttacaggt

SEQ ID NO: 40990 - DNA, 25 bp, Probe Sequence
ttgcagtaatcatcacttacaggta

SEQ ID NO: 40991 - DNA, 25 bp, Probe Sequence
tgcagtaatcatcacttacaggtac

SEQ ID NO: 40992 - DNA, 25 bp, Probe Sequence
actagcactatataattccggtcag

SEQ ID NO: 40993 - DNA, 25 bp, Probe Sequence
atgtaaagcagataggaatgtatgt

SEQ ID NO: 40994 - DNA, 25 bp, Probe Sequence
agaatgatgtaaagcagataggaat

SEQ ID NO: 40995 - DNA, 25 bp, Probe Sequence
ttcacatttctaaatcccatcttga

SEQ ID NO: 40996 - DNA, 25 bp, Probe Sequence
tttcacatttctaaatcccatcttg

SEQ ID NO: 40997 - DNA, 25 bp, Probe Sequence
cagtgctgacaaataacatttaaca

SEQ ID NO: 40998 - DNA, 25 bp, Probe Sequence
tcacatttctaaatcccatcttgat

SEQ ID NO: 40999 - DNA, 25 bp, Probe Sequence
tgatgtaaagcagataggaatgtat

SEQ ID NO: 41000 - DNA, 25 bp, Probe Sequence
atgatgtaaagcagataggaatgta

SEQ ID NO: 41001 - DNA, 25 bp, Probe Sequence
cgggaatttcatttacagctacatt

SEQ ID NO: 41002 - DNA, 25 bp, Probe Sequence
aaacgggaatttcatttacagctac

SEQ ID NO: 41003 - DNA, 25 bp, Probe Sequence
tcagtatgttacagagaaggtcttg

SEQ ID NO: 41004 - DNA, 25 bp, Probe Sequence
gtcagtatgttacagagaaggtctt

SEQ ID NO: 41005 - DNA, 25 bp, Probe Sequence
cagtatgttacagagaaggtcttgg

SEQ ID NO: 41006 - DNA, 25 bp, Probe Sequence
aattgctagaagtcagaacaggatg

SEQ ID NO: 41007 - DNA, 25 bp, Probe Sequence
ttgtcagtatgttacagagaaggtc

SEQ ID NO: 41008 - DNA, 25 bp, Probe Sequence
gttgtcagtatgttacagagaaggt

SEQ ID NO: 41009 - DNA, 25 bp, Probe Sequence
tgtcagtatgttacagagaaggtct

SEQ ID NO: 41010 - DNA, 25 bp, Probe Sequence
cgttgtcagtatgttacagagaagg

SEQ ID NO: 41011 - DNA, 25 bp, Probe Sequence
catgccttgagtacataccatacag

SEQ ID NO: 41012 - DNA, 25 bp, Probe Sequence
aagtatgaaggcagtggagaagatg

SEQ ID NO: 41013 - DNA, 25 bp, Probe Sequence
caagtatgaaggcagtggagaagat

SEQ ID NO: 41014 - DNA, 25 bp, Probe Sequence
aatacaagaaggatggtgctgactt

SEQ ID NO: 41015 - DNA, 25 bp, Probe Sequence
gtatgttacagagaaggtcttggct

SEQ ID NO: 41016 - DNA, 25 bp, Probe Sequence
agtatgttacagagaaggtcttggc

SEQ ID NO: 41017 - DNA, 25 bp, Probe Sequence
tcatgccttgagtacataccataca

SEQ ID NO: 41018 - DNA, 25 bp, Probe Sequence
attgctagaagtcagaacaggatgg

SEQ ID NO: 41019 - DNA, 25 bp, Probe Sequence
caatacaagaaggatggtgctgact

SEQ ID NO: 41020 - DNA, 25 bp, Probe Sequence
tatgttacagagaaggtcttggctg

SEQ ID NO: 41021 - DNA, 25 bp, Probe Sequence
agaaagatgataatggtgttccctt

SEQ ID NO: 41022 - DNA, 25 bp, Probe Sequence
gaaagatgataatggtgttcccttc

SEQ ID NO: 41023 - DNA, 25 bp, Probe Sequence
cagaaagatgataatggtgttccct

SEQ ID NO: 41024 - DNA, 25 bp, Probe Sequence
atgccttgagtacataccatacagc

SEQ ID NO: 41025 - DNA, 25 bp, Probe Sequence
agaccctctaccagaaagatgataa

SEQ ID NO: 41026 - DNA, 25 bp, Probe Sequence
accctctaccagaaagatgataatg

SEQ ID NO: 41027 - DNA, 25 bp, Probe Sequence
ttgagaactatattgcggacattga

SEQ ID NO: 41028 - DNA, 25 bp, Probe Sequence
tgagaactatattgcggacattgag

SEQ ID NO: 41029 - DNA, 25 bp, Probe Sequence
gagaactatattgcggacattgagg

SEQ ID NO: 41030 - DNA, 25 bp, Probe Sequence
gaactatattgcggacattgaggtg

SEQ ID NO: 41031 - DNA, 25 bp, Probe Sequence
agaactatattgcggacattgaggt

SEQ ID NO: 41032 - DNA, 25 bp, Probe Sequence
tttgagaactatattgcggacattg

SEQ ID NO: 41033 - DNA, 25 bp, Probe Sequence
ctttgagaactatattgcggacatt

SEQ ID NO: 41034 - DNA, 25 bp, Probe Sequence
aactatattgcggacattgaggtgg

SEQ ID NO: 41035 - DNA, 25 bp, Probe Sequence
gaataagaaggacctgaggcaagac

SEQ ID NO: 41036 - DNA, 25 bp, Probe Sequence
tctttgagaactatattgcggacat

SEQ ID NO: 41037 - DNA, 25 bp, Probe Sequence
ctgtctttgagaactatattgcgga

SEQ ID NO: 41038 - DNA, 25 bp, Probe Sequence
actgtctttgagaactatattgcgg

SEQ ID NO: 41039 - DNA, 25 bp, Probe Sequence
gtccctactgtctttgagaactata

SEQ ID NO: 41040 - DNA, 25 bp, Probe Sequence
ctatattgcggacattgaggtggac

SEQ ID NO: 41041 - DNA, 25 bp, Probe Sequence
tactgtctttgagaactatattgcg

SEQ ID NO: 41042 - DNA, 25 bp, Probe Sequence
cgtccctactgtctttgagaactat

SEQ ID NO: 41043 - DNA, 25 bp, Probe Sequence
tccctactgtctttgagaactatat

SEQ ID NO: 41044 - DNA, 25 bp, Probe Sequence
actatattgcggacattgaggtgga

SEQ ID NO: 41045 - DNA, 25 bp, Probe Sequence
gtctttgagaactatattgcggaca

SEQ ID NO: 41046 - DNA, 25 bp, Probe Sequence
tgtctttgagaactatattgcggac

SEQ ID NO: 41047 - DNA, 25 bp, Probe Sequence
ggaataagaaggacctgaggcaaga

SEQ ID NO: 41048 - DNA, 25 bp, Probe Sequence
ccctactgtctttgagaactatatt

SEQ ID NO: 41049 - DNA, 25 bp, Probe Sequence
ctgatgtcatcctcatgtgcttctc

SEQ ID NO: 41050 - DNA, 25 bp, Probe Sequence
ctactgtctttgagaactatattgc

SEQ ID NO: 41051 - DNA, 25 bp, Probe Sequence
ttcaggtctgtcatctcctataaga

SEQ ID NO: 41052 - DNA, 25 bp, Probe Sequence
attcaggtctgtcatctcctataag

SEQ ID NO: 41053 - DNA, 25 bp, Probe Sequence
aattcaggtctgtcatctcctataa

SEQ ID NO: 41054 - DNA, 25 bp, Probe Sequence
cgaagaaactgttcctccattattt

SEQ ID NO: 41055 - DNA, 25 bp, Probe Sequence
ccgaagaaactgttcctccattatt

SEQ ID NO: 41056 - DNA, 25 bp, Probe Sequence
agaaactgttcctccattatttgaa

SEQ ID NO: 41057 - DNA, 25 bp, Probe Sequence
aagaaactgttcctccattatttga

SEQ ID NO: 41058 - DNA, 25 bp, Probe Sequence
gaagaaactgttcctccattatttg

SEQ ID NO: 41059 - DNA, 25 bp, Probe Sequence
tccgaagaaactgttcctccattat

SEQ ID NO: 41060 - DNA, 25 bp, Probe Sequence
taataaattcaggtctgtcatctcc

SEQ ID NO: 41061 - DNA, 25 bp, Probe Sequence
aataaattcaggtctgtcatctcct

SEQ ID NO: 41062 - DNA, 25 bp, Probe Sequence
gaaactgttcctccattatttgaat

SEQ ID NO: 41063 - DNA, 25 bp, Probe Sequence
aaattcaggtctgtcatctcctata

SEQ ID NO: 41064 - DNA, 25 bp, Probe Sequence
taaattcaggtctgtcatctcctat

SEQ ID NO: 41065 - DNA, 25 bp, Probe Sequence
ataaattcaggtctgtcatctccta

SEQ ID NO: 41066 - DNA, 25 bp, Probe Sequence
gtccgaagaaactgttcctccatta

SEQ ID NO: 41067 - DNA, 25 bp, Probe Sequence
tgttcctccattatttgaattactg

SEQ ID NO: 41068 - DNA, 25 bp, Probe Sequence
actgttcctccattatttgaattac

SEQ ID NO: 41069 - DNA, 25 bp, Probe Sequence
aaactgttcctccattatttgaatt

SEQ ID NO: 41070 - DNA, 25 bp, Probe Sequence
ctgttcctccattatttgaattact

SEQ ID NO: 41071 - DNA, 25 bp, Probe Sequence
tcaggtctgtcatctcctataagac

SEQ ID NO: 41072 - DNA, 25 bp, Probe Sequence
ttaataaattcaggtctgtcatctc

SEQ ID NO: 41073 - DNA, 25 bp, Probe Sequence
aactgttcctccattatttgaatta

SEQ ID NO: 41074 - DNA, 25 bp, Probe Sequence
tgtaaagaaggaaaattcagccagt

SEQ ID NO: 41075 - DNA, 25 bp, Probe Sequence
aatggaatatgccttctctgctatg

SEQ ID NO: 41076 - DNA, 25 bp, Probe Sequence
caatggaatatgccttctctgctat

SEQ ID NO: 41077 - DNA, 25 bp, Probe Sequence
aatatgccttctctgctatgtctga

SEQ ID NO: 41078 - DNA, 25 bp, Probe Sequence
ttaacaatggaatatgccttctctg

SEQ ID NO: 41079 - DNA, 25 bp, Probe Sequence
gaatatgccttctctgctatgtctg

SEQ ID NO: 41080 - DNA, 25 bp, Probe Sequence
taacaatggaatatgccttctctgc

SEQ ID NO: 41081 - DNA, 25 bp, Probe Sequence
atatgccttctctgctatgtctgaa

SEQ ID NO: 41082 - DNA, 25 bp, Probe Sequence
acttggtgtgtgttcatcagttatt

SEQ ID NO: 41083 - DNA, 25 bp, Probe Sequence
atggaatatgccttctctgctatgt

SEQ ID NO: 41084 - DNA, 25 bp, Probe Sequence
acaatggaatatgccttctctgcta

SEQ ID NO: 41085 - DNA, 25 bp, Probe Sequence
ggaatatgccttctctgctatgtct

SEQ ID NO: 41086 - DNA, 25 bp, Probe Sequence
tggaatatgccttctctgctatgtc

SEQ ID NO: 41087 - DNA, 25 bp, Probe Sequence
tatgatgccatgtcactgtgaataa

SEQ ID NO: 41088 - DNA, 25 bp, Probe Sequence
ctatgatgccatgtcactgtgaata

SEQ ID NO: 41089 - DNA, 25 bp, Probe Sequence
aacaatggaatatgccttctctgct

SEQ ID NO: 41090 - DNA, 25 bp, Probe Sequence
acatatattgctgttacttctgctt

SEQ ID NO: 41091 - DNA, 25 bp, Probe Sequence
agtcccattgtaagtgttgtttcta

SEQ ID NO: 41092 - DNA, 25 bp, Probe Sequence
ttggtgtgtgttcatcagttatttg

SEQ ID NO: 41093 - DNA, 25 bp, Probe Sequence
cttggtgtgtgttcatcagttattt

SEQ ID NO: 41094 - DNA, 25 bp, Probe Sequence
gtcccattgtaagtgttgtttctaa

SEQ ID NO: 41095 - DNA, 25 bp, Probe Sequence
attgctgttacttctgctttcttta

SEQ ID NO: 41096 - DNA, 25 bp, Probe Sequence
tattgctgttacttctgctttcttt

SEQ ID NO: 41097 - DNA, 25 bp, Probe Sequence
ttgctttgtcttgcttatagtcatt

SEQ ID NO: 41098 - DNA, 25 bp, Probe Sequence
ggtgtgtgttcatcagttatttgtg

SEQ ID NO: 41099 - DNA, 25 bp, Probe Sequence
cagaagaggagattgacgagaactt

SEQ ID NO: 41100 - DNA, 25 bp, Probe Sequence
ctcagaagaggagattgacgagaac

SEQ ID NO: 41101 - DNA, 25 bp, Probe Sequence
tcagaagaggagattgacgagaact

SEQ ID NO: 41102 - DNA, 25 bp, Probe Sequence
aactataaccactagctcgacacag

SEQ ID NO: 41103 - DNA, 25 bp, Probe Sequence
agttgtgacctttgacttgtttaag

SEQ ID NO: 41104 - DNA, 25 bp, Probe Sequence
gagttgtgacctttgacttgtttaa

SEQ ID NO: 41105 - DNA, 25 bp, Probe Sequence
aataggatcatcagcaaacacaaag

SEQ ID NO: 41106 - DNA, 25 bp, Probe Sequence
caataggatcatcagcaaacacaaa

SEQ ID NO: 41107 - DNA, 25 bp, Probe Sequence
ataggatcatcagcaaacacaaaga

SEQ ID NO: 41108 - DNA, 25 bp, Probe Sequence
tcaataggatcatcagcaaacacaa

SEQ ID NO: 41109 - DNA, 25 bp, Probe Sequence
ctcaataggatcatcagcaaacaca

SEQ ID NO: 41110 - DNA, 25 bp, Probe Sequence
ggagttgtgacctttgacttgttta

SEQ ID NO: 41111 - DNA, 25 bp, Probe Sequence
taggatcatcagcaaacacaaagac

SEQ ID NO: 41112 - DNA, 25 bp, Probe Sequence
taaactataaccactagctcgacac

SEQ ID NO: 41113 - DNA, 25 bp, Probe Sequence
ctataaccactagctcgacacagtc

SEQ ID NO: 41114 - DNA, 25 bp, Probe Sequence
ataaactataaccactagctcgaca

SEQ ID NO: 41115 - DNA, 25 bp, Probe Sequence
actataaccactagctcgacacagt

SEQ ID NO: 41116 - DNA, 25 bp, Probe Sequence
aagaggagattgacgagaacttcaa

SEQ ID NO: 41117 - DNA, 25 bp, Probe Sequence
tataaccactagctcgacacagtct

SEQ ID NO: 41118 - DNA, 25 bp, Probe Sequence
aaactataaccactagctcgacaca

SEQ ID NO: 41119 - DNA, 25 bp, Probe Sequence
agaggagattgacgagaacttcaag

SEQ ID NO: 41120 - DNA, 25 bp, Probe Sequence
agaagaggagattgacgagaacttc

SEQ ID NO: 41121 - DNA, 25 bp, Probe Sequence
cctcaataggatcatcagcaaacac

SEQ ID NO: 41122 - DNA, 25 bp, Probe Sequence
cttcagggacttgtgtactggttat

SEQ ID NO: 41123 - DNA, 25 bp, Probe Sequence
aagaataaagcagcatttgaaatcg

SEQ ID NO: 41124 - DNA, 25 bp, Probe Sequence
agaataaagcagcatttgaaatcgc

SEQ ID NO: 41125 - DNA, 25 bp, Probe Sequence
tgtaagaataaagcagcatttgaaa

SEQ ID NO: 41126 - DNA, 25 bp, Probe Sequence
ttgtaagaataaagcagcatttgaa

SEQ ID NO: 41127 - DNA, 25 bp, Probe Sequence
tttgtaagaataaagcagcatttga

SEQ ID NO: 41128 - DNA, 25 bp, Probe Sequence
cagtatttgtaagaataaagcagca

SEQ ID NO: 41129 - DNA, 25 bp, Probe Sequence
atcttactcctgttgatgcagctaa

SEQ ID NO: 41130 - DNA, 25 bp, Probe Sequence
ttctacatcttactcctgttgatgc

SEQ ID NO: 41131 - DNA, 25 bp, Probe Sequence
accctttgtattgtagataagagga

SEQ ID NO: 41132 - DNA, 25 bp, Probe Sequence
atttgtaagaataaagcagcatttg

SEQ ID NO: 41133 - DNA, 25 bp, Probe Sequence
acagtatttgtaagaataaagcagc

SEQ ID NO: 41134 - DNA, 25 bp, Probe Sequence
tcttactcctgttgatgcagctaag

SEQ ID NO: 41135 - DNA, 25 bp, Probe Sequence
gatgcagctaaggtacatttgtaaa

SEQ ID NO: 41136 - DNA, 25 bp, Probe Sequence
tgatgcagctaaggtacatttgtaa

SEQ ID NO: 41137 - DNA, 25 bp, Probe Sequence
ttgatgcagctaaggtacatttgta

SEQ ID NO: 41138 - DNA, 25 bp, Probe Sequence
cgagagaagctaaacgtgtttattt

SEQ ID NO: 41139 - DNA, 25 bp, Probe Sequence
aaccctttgtattgtagataagagg

SEQ ID NO: 41140 - DNA, 25 bp, Probe Sequence
cactaaactgcgagagaagctaaac

SEQ ID NO: 41141 - DNA, 25 bp, Probe Sequence
gtaagaataaagcagcatttgaaat

SEQ ID NO: 41142 - DNA, 25 bp, Probe Sequence
agtatttgtaagaataaagcagcat

SEQ ID NO: 41143 - DNA, 25 bp, Probe Sequence
ccctttgtattgtagataagaggaa

SEQ ID NO: 41144 - DNA, 25 bp, Probe Sequence
gtagataagaggaaaagactgagca

SEQ ID NO: 41145 - DNA, 25 bp, Probe Sequence
tgtagataagaggaaaagactgagc

SEQ ID NO: 41146 - DNA, 25 bp, Probe Sequence
gttgatgcagctaaggtacatttgt

SEQ ID NO: 41147 - DNA, 25 bp, Probe Sequence
gtgtgaatagtatcaagcaggattg

SEQ ID NO: 41148 - DNA, 25 bp, Probe Sequence
cgtgtgaatagtatcaagcaggatt

SEQ ID NO: 41149 - DNA, 25 bp, Probe Sequence
gaactgctccattcctagtcttaat

SEQ ID NO: 41150 - DNA, 25 bp, Probe Sequence
aactgctccattcctagtcttaatt

SEQ ID NO: 41151 - DNA, 25 bp, Probe Sequence
gctccattcctagtcttaattacca

SEQ ID NO: 41152 - DNA, 25 bp, Probe Sequence
tgctccattcctagtcttaattacc

SEQ ID NO: 41153 - DNA, 25 bp, Probe Sequence
taagcattctgttacctgtgatatt

SEQ ID NO: 41154 - DNA, 25 bp, Probe Sequence
tgaactgctccattcctagtcttaa

SEQ ID NO: 41155 - DNA, 25 bp, Probe Sequence
ttagactgaactgctccattcctag

SEQ ID NO: 41156 - DNA, 25 bp, Probe Sequence
ataagcattctgttacctgtgatat

SEQ ID NO: 41157 - DNA, 25 bp, Probe Sequence
atataagcattctgttacctgtgat

SEQ ID NO: 41158 - DNA, 25 bp, Probe Sequence
ctgctccattcctagtcttaattac

SEQ ID NO: 41159 - DNA, 25 bp, Probe Sequence
ctgaactgctccattcctagtctta

SEQ ID NO: 41160 - DNA, 25 bp, Probe Sequence
actgctccattcctagtcttaatta

SEQ ID NO: 41161 - DNA, 25 bp, Probe Sequence
tataagcattctgttacctgtgata

SEQ ID NO: 41162 - DNA, 25 bp, Probe Sequence
tacacactgcttaccctgatttatt

SEQ ID NO: 41163 - DNA, 25 bp, Probe Sequence
ttacacactgcttaccctgatttat

SEQ ID NO: 41164 - DNA, 25 bp, Probe Sequence
ccgtgtgaatagtatcaagcaggat

SEQ ID NO: 41165 - DNA, 25 bp, Probe Sequence
gttacacactgcttaccctgattta

SEQ ID NO: 41166 - DNA, 25 bp, Probe Sequence
acacactgcttaccctgatttattc

SEQ ID NO: 41167 - DNA, 25 bp, Probe Sequence
tagactgaactgctccattcctagt

SEQ ID NO: 41168 - DNA, 25 bp, Probe Sequence
tatataagcattctgttacctgtga

SEQ ID NO: 41169 - DNA, 25 bp, Probe Sequence
aagcattctgttacctgtgatattt

SEQ ID NO: 41170 - DNA, 25 bp, Probe Sequence
tttccaactgccatctatacaattt

SEQ ID NO: 41171 - DNA, 25 bp, Probe Sequence
tccaggagattgttgataaggttaa

SEQ ID NO: 41172 - DNA, 25 bp, Probe Sequence
atccaggagattgttgataaggtta

SEQ ID NO: 41173 - DNA, 25 bp, Probe Sequence
atgaggacttggtacttactggata

SEQ ID NO: 41174 - DNA, 25 bp, Probe Sequence
attactacattaaggtacgagcagg

SEQ ID NO: 41175 - DNA, 25 bp, Probe Sequence
ttaaggtacgagcaggtgataataa

SEQ ID NO: 41176 - DNA, 25 bp, Probe Sequence
tacattaaggtacgagcaggtgata

SEQ ID NO: 41177 - DNA, 25 bp, Probe Sequence
aatgaggacttggtacttactggat

SEQ ID NO: 41178 - DNA, 25 bp, Probe Sequence
tgaggacttggtacttactggatac

SEQ ID NO: 41179 - DNA, 25 bp, Probe Sequence
ttactacattaaggtacgagcaggt

SEQ ID NO: 41180 - DNA, 25 bp, Probe Sequence
cattaaggtacgagcaggtgataat

SEQ ID NO: 41181 - DNA, 25 bp, Probe Sequence
attaaggtacgagcaggtgataata

SEQ ID NO: 41182 - DNA, 25 bp, Probe Sequence
acattaaggtacgagcaggtgataa

SEQ ID NO: 41183 - DNA, 25 bp, Probe Sequence
aattactacattaaggtacgagcag

SEQ ID NO: 41184 - DNA, 25 bp, Probe Sequence
tactacattaaggtacgagcaggtg

SEQ ID NO: 41185 - DNA, 25 bp, Probe Sequence
aatgatacctggaggcttatctgag

SEQ ID NO: 41186 - DNA, 25 bp, Probe Sequence
ctacattaaggtacgagcaggtgat

SEQ ID NO: 41187 - DNA, 25 bp, Probe Sequence
aatccaggagattgttgataaggtt

SEQ ID NO: 41188 - DNA, 25 bp, Probe Sequence
ttctgattccttcaactggctactg

SEQ ID NO: 41189 - DNA, 25 bp, Probe Sequence
gttctgattccttcaactggctact

SEQ ID NO: 41190 - DNA, 25 bp, Probe Sequence
tgttctgattccttcaactggctac

SEQ ID NO: 41191 - DNA, 25 bp, Probe Sequence
gtgttctgattccttcaactggcta

SEQ ID NO: 41192 - DNA, 25 bp, Probe Sequence
ccaggagattgttgataaggttaaa

SEQ ID NO: 41193 - DNA, 25 bp, Probe Sequence
gattccttcaactggctactgagtc

SEQ ID NO: 41194 - DNA, 25 bp, Probe Sequence
ctgattccttcaactggctactgag

SEQ ID NO: 41195 - DNA, 25 bp, Probe Sequence
cttcatcttcagcatcgtcttcttg

SEQ ID NO: 41196 - DNA, 25 bp, Probe Sequence
tcttcatcttcagcatcgtcttctt

SEQ ID NO: 41197 - DNA, 25 bp, Probe Sequence
aatacagtgttcagttcaagttgcc

SEQ ID NO: 41198 - DNA, 25 bp, Probe Sequence
ctcttcatcttcagcatcgtcttct

SEQ ID NO: 41199 - DNA, 25 bp, Probe Sequence
aaatacagtgttcagttcaagttgc

SEQ ID NO: 41200 - DNA, 25 bp, Probe Sequence
gcaaatacagtgttcagttcaagtt

SEQ ID NO: 41201 - DNA, 25 bp, Probe Sequence
gaagaagaaaggtggcaaatacagt

SEQ ID NO: 41202 - DNA, 25 bp, Probe Sequence
tgaagaagaaaggtggcaaatacag

SEQ ID NO: 41203 - DNA, 25 bp, Probe Sequence
ctgaagaagaaaggtggcaaataca

SEQ ID NO: 41204 - DNA, 25 bp, Probe Sequence
caaatacagtgttcagttcaagttg

SEQ ID NO: 41205 - DNA, 25 bp, Probe Sequence
aagaagaaaggtggcaaatacagtg

SEQ ID NO: 41206 - DNA, 25 bp, Probe Sequence
gagactatcctggctaacacggtaa

SEQ ID NO: 41207 - DNA, 25 bp, Probe Sequence
ggcaaatacagtgttcagttcaagt

SEQ ID NO: 41208 - DNA, 25 bp, Probe Sequence
tggcaaatacagtgttcagttcaag

SEQ ID NO: 41209 - DNA, 25 bp, Probe Sequence
gaagaaaggtggcaaatacagtgtt

SEQ ID NO: 41210 - DNA, 25 bp, Probe Sequence
aagaaaggtggcaaatacagtgttc

SEQ ID NO: 41211 - DNA, 25 bp, Probe Sequence
gtggcaaatacagtgttcagttcaa

SEQ ID NO: 41212 - DNA, 25 bp, Probe Sequence
gagatcgagactatcctggctaaca

SEQ ID NO: 41213 - DNA, 25 bp, Probe Sequence
agaagaaaggtggcaaatacagtgt

SEQ ID NO: 41214 - DNA, 25 bp, Probe Sequence
gaaaggtggcaaatacagtgttcag

SEQ ID NO: 41215 - DNA, 25 bp, Probe Sequence
agatcgagactatcctggctaacac

SEQ ID NO: 41216 - DNA, 25 bp, Probe Sequence
agactatcctggctaacacggtaaa

SEQ ID NO: 41217 - DNA, 25 bp, Probe Sequence
cctgaagaagaaaggtggcaaatac

SEQ ID NO: 41218 - DNA, 25 bp, Probe Sequence
agaaaggtggcaaatacagtgttca

SEQ ID NO: 41219 - DNA, 25 bp, Probe Sequence
cattacagagaaggtttcagaagac

SEQ ID NO: 41220 - DNA, 25 bp, Probe Sequence
attacagagaaggtttcagaagact

SEQ ID NO: 41221 - DNA, 25 bp, Probe Sequence
gcattacagagaaggtttcagaaga

SEQ ID NO: 41222 - DNA, 25 bp, Probe Sequence
aagttcgtaaacccaggactattta

SEQ ID NO: 41223 - DNA, 25 bp, Probe Sequence
aaagttcgtaaacccaggactattt

SEQ ID NO: 41224 - DNA, 25 bp, Probe Sequence
agttcgtaaacccaggactatttat

SEQ ID NO: 41225 - DNA, 25 bp, Probe Sequence
caaaccaaagaaagttcgtaaaccc

SEQ ID NO: 41226 - DNA, 25 bp, Probe Sequence
ttacagagaaggtttcagaagactc

SEQ ID NO: 41227 - DNA, 25 bp, Probe Sequence
gaaagttcgtaaacccaggactatt

SEQ ID NO: 41228 - DNA, 25 bp, Probe Sequence
gttcgtaaacccaggactatttatt

SEQ ID NO: 41229 - DNA, 25 bp, Probe Sequence
agagaaggtttcagaagactcagta

SEQ ID NO: 41230 - DNA, 25 bp, Probe Sequence
tacagagaaggtttcagaagactca

SEQ ID NO: 41231 - DNA, 25 bp, Probe Sequence
aaaccaaagaaagttcgtaaaccca

SEQ ID NO: 41232 - DNA, 25 bp, Probe Sequence
ttcgtaaacccaggactatttattc

SEQ ID NO: 41233 - DNA, 25 bp, Probe Sequence
agaaagttcgtaaacccaggactat

SEQ ID NO: 41234 - DNA, 25 bp, Probe Sequence
cgcattacagagaaggtttcagaag

SEQ ID NO: 41235 - DNA, 25 bp, Probe Sequence
gcaaaccaaagaaagttcgtaaacc

SEQ ID NO: 41236 - DNA, 25 bp, Probe Sequence
ggcaaaccaaagaaagttcgtaaac

SEQ ID NO: 41237 - DNA, 25 bp, Probe Sequence
aagaaagttcgtaaacccaggacta

SEQ ID NO: 41238 - DNA, 25 bp, Probe Sequence
aaccaaagaaagttcgtaaacccag

SEQ ID NO: 41239 - DNA, 25 bp, Probe Sequence
gagaaggtttcagaagactcagtac

SEQ ID NO: 41240 - DNA, 25 bp, Probe Sequence
tcgtaaacccaggactatttattcc

SEQ ID NO: 41241 - DNA, 25 bp, Probe Sequence
taaacccaggactatttattccagc

SEQ ID NO: 41242 - DNA, 25 bp, Probe Sequence
cgtaaacccaggactatttattcca

SEQ ID NO: 41243 - DNA, 25 bp, Probe Sequence
ctgagaatgtggaatacctaaggat

SEQ ID NO: 41244 - DNA, 25 bp, Probe Sequence
tgagtcatctattcaagcacttaca

SEQ ID NO: 41245 - DNA, 25 bp, Probe Sequence
cagtagcattatgagtagtgtgaat

SEQ ID NO: 41246 - DNA, 25 bp, Probe Sequence
gagtcatctattcaagcacttacag

SEQ ID NO: 41247 - DNA, 25 bp, Probe Sequence
agtcatctattcaagcacttacagc

SEQ ID NO: 41248 - DNA, 25 bp, Probe Sequence
gacagtagcattatgagtagtgtga

SEQ ID NO: 41249 - DNA, 25 bp, Probe Sequence
tgacagtagcattatgagtagtgtg

SEQ ID NO: 41250 - DNA, 25 bp, Probe Sequence
tgagaatgtggaatacctaaggata

SEQ ID NO: 41251 - DNA, 25 bp, Probe Sequence
acagtagcattatgagtagtgtgaa

SEQ ID NO: 41252 - DNA, 25 bp, Probe Sequence
ctacagttatgttcagtcacacaca

SEQ ID NO: 41253 - DNA, 25 bp, Probe Sequence
atgacagtagcattatgagtagtgt

SEQ ID NO: 41254 - DNA, 25 bp, Probe Sequence
gctgagaatgtggaatacctaagga

SEQ ID NO: 41255 - DNA, 25 bp, Probe Sequence
tacagttatgttcagtcacacacac

SEQ ID NO: 41256 - DNA, 25 bp, Probe Sequence
atgtggaatacctaaggataacacc

SEQ ID NO: 41257 - DNA, 25 bp, Probe Sequence
cctacagttatgttcagtcacacac

SEQ ID NO: 41258 - DNA, 25 bp, Probe Sequence
agtagcattatgagtagtgtgaatt

SEQ ID NO: 41259 - DNA, 25 bp, Probe Sequence
agaatgtggaatacctaaggataac

SEQ ID NO: 41260 - DNA, 25 bp, Probe Sequence
attggaagattcagctagttaggag

SEQ ID NO: 41261 - DNA, 25 bp, Probe Sequence
gattggaagattcagctagttagga

SEQ ID NO: 41262 - DNA, 25 bp, Probe Sequence
agattggaagattcagctagttagg

SEQ ID NO: 41263 - DNA, 25 bp, Probe Sequence
tatcaagtcatggcaggtacagtag

SEQ ID NO: 41264 - DNA, 25 bp, Probe Sequence
ttcagcctacagttatgttcagtca

SEQ ID NO: 41265 - DNA, 25 bp, Probe Sequence
gtctctgccttgagtcatctattca

SEQ ID NO: 41266 - DNA, 25 bp, Probe Sequence
tgtctctgccttgagtcatctattc

SEQ ID NO: 41267 - DNA, 25 bp, Probe Sequence
gccacaattaaggactcattaactg

SEQ ID NO: 41268 - DNA, 25 bp, Probe Sequence
ccacaattaaggactcattaactga

SEQ ID NO: 41269 - DNA, 25 bp, Probe Sequence
acaattaaggactcattaactgatg

SEQ ID NO: 41270 - DNA, 25 bp, Probe Sequence
cacaattaaggactcattaactgat

SEQ ID NO: 41271 - DNA, 25 bp, Probe Sequence
gtactgctttcttcaaactctcaga

SEQ ID NO: 41272 - DNA, 25 bp, Probe Sequence
ggccacaattaaggactcattaact

SEQ ID NO: 41273 - DNA, 25 bp, Probe Sequence
atacatttctggagcagccttagtc

SEQ ID NO: 41274 - DNA, 25 bp, Probe Sequence
tactgctttcttcaaactctcagaa

SEQ ID NO: 41275 - DNA, 25 bp, Probe Sequence
catacatttctggagcagccttagt

SEQ ID NO: 41276 - DNA, 25 bp, Probe Sequence
gctagtttacctgtgtcgtgagaag

SEQ ID NO: 41277 - DNA, 25 bp, Probe Sequence
tcgtgagaaggacattgtgaaactc

SEQ ID NO: 41278 - DNA, 25 bp, Probe Sequence
ctagtttacctgtgtcgtgagaagg

SEQ ID NO: 41279 - DNA, 25 bp, Probe Sequence
caattaaggactcattaactgatga

SEQ ID NO: 41280 - DNA, 25 bp, Probe Sequence
aggactcattaactgatgaaacaaa

SEQ ID NO: 41281 - DNA, 25 bp, Probe Sequence
aaggactcattaactgatgaaacaa

SEQ ID NO: 41282 - DNA, 25 bp, Probe Sequence
tagtttacctgtgtcgtgagaagga

SEQ ID NO: 41283 - DNA, 25 bp, Probe Sequence
acaccaaatggattgcttctgactc

SEQ ID NO: 41284 - DNA, 25 bp, Probe Sequence
gacaccaaatggattgcttctgact

SEQ ID NO: 41285 - DNA, 25 bp, Probe Sequence
agacaccaaatggattgcttctgac

SEQ ID NO: 41286 - DNA, 25 bp, Probe Sequence
gtcgtgagaaggacattgtgaaact

SEQ ID NO: 41287 - DNA, 25 bp, Probe Sequence
taaggactcattaactgatgaaaca

SEQ ID NO: 41288 - DNA, 25 bp, Probe Sequence
ggactcattaactgatgaaacaaat

SEQ ID NO: 41289 - DNA, 25 bp, Probe Sequence
cacagacaccaaatggattgcttct

SEQ ID NO: 41290 - DNA, 25 bp, Probe Sequence
agtactgctttcttcaaactctcag

SEQ ID NO: 41291 - DNA, 25 bp, Probe Sequence
gttattatctgggcttatatctggc

SEQ ID NO: 41292 - DNA, 25 bp, Probe Sequence
tctcagaatcccttaacagttgtat

SEQ ID NO: 41293 - DNA, 25 bp, Probe Sequence
cctctgctttctcctttaattgtaa

SEQ ID NO: 41294 - DNA, 25 bp, Probe Sequence
gcctctgctttctcctttaattgta

SEQ ID NO: 41295 - DNA, 25 bp, Probe Sequence
gccgactaagagaagttgtaaagta

SEQ ID NO: 41296 - DNA, 25 bp, Probe Sequence
ctcagaatcccttaacagttgtatt

SEQ ID NO: 41297 - DNA, 25 bp, Probe Sequence
ttctcagaatcccttaacagttgta

SEQ ID NO: 41298 - DNA, 25 bp, Probe Sequence
gttctcagaatcccttaacagttgt

SEQ ID NO: 41299 - DNA, 25 bp, Probe Sequence
tcagaatcccttaacagttgtattt

SEQ ID NO: 41300 - DNA, 25 bp, Probe Sequence
caaccatgtcatttcagaagttagt

SEQ ID NO: 41301 - DNA, 25 bp, Probe Sequence
accatgtcatttcagaagttagttt

SEQ ID NO: 41302 - DNA, 25 bp, Probe Sequence
ccatgtcatttcagaagttagtttg

SEQ ID NO: 41303 - DNA, 25 bp, Probe Sequence
tgttattatctgggcttatatctgg

SEQ ID NO: 41304 - DNA, 25 bp, Probe Sequence
aaccatgtcatttcagaagttagtt

SEQ ID NO: 41305 - DNA, 25 bp, Probe Sequence
ccgactaagagaagttgtaaagtat

SEQ ID NO: 41306 - DNA, 25 bp, Probe Sequence
aaacaaccatgtcatttcagaagtt

SEQ ID NO: 41307 - DNA, 25 bp, Probe Sequence
acaaccatgtcatttcagaagttag

SEQ ID NO: 41308 - DNA, 25 bp, Probe Sequence
aacaaccatgtcatttcagaagtta

SEQ ID NO: 41309 - DNA, 25 bp, Probe Sequence
catgtcatttcagaagttagtttgt

SEQ ID NO: 41310 - DNA, 25 bp, Probe Sequence
ctctgctttctcctttaattgtaaa

SEQ ID NO: 41311 - DNA, 25 bp, Probe Sequence
tcccttaacagttgtatttaacaga

SEQ ID NO: 41312 - DNA, 25 bp, Probe Sequence
tttaatagacttacagggataaggc

SEQ ID NO: 41313 - DNA, 25 bp, Probe Sequence
cgactaagagaagttgtaaagtatg

SEQ ID NO: 41314 - DNA, 25 bp, Probe Sequence
gaaacaaccatgtcatttcagaagt

SEQ ID NO: 41315 - DNA, 25 bp, Probe Sequence
atgttcaattacttcctctctctgg

SEQ ID NO: 41316 - DNA, 25 bp, Probe Sequence
ctcttcaagttcaaccactgttaag

SEQ ID NO: 41317 - DNA, 25 bp, Probe Sequence
tactcttcaagttcaaccactgtta

SEQ ID NO: 41318 - DNA, 25 bp, Probe Sequence
cttcaagttcaaccactgttaagac

SEQ ID NO: 41319 - DNA, 25 bp, Probe Sequence
ctcttactcttcaagttcaaccact

SEQ ID NO: 41320 - DNA, 25 bp, Probe Sequence
actcttcaagttcaaccactgttaa

SEQ ID NO: 41321 - DNA, 25 bp, Probe Sequence
ttactcttcaagttcaaccactgtt

SEQ ID NO: 41322 - DNA, 25 bp, Probe Sequence
aaccactgttaagacctcctattga

SEQ ID NO: 41323 - DNA, 25 bp, Probe Sequence
tcaaccactgttaagacctcctatt

SEQ ID NO: 41324 - DNA, 25 bp, Probe Sequence
ttcaaccactgttaagacctcctat

SEQ ID NO: 41325 - DNA, 25 bp, Probe Sequence
tcttactcttcaagttcaaccactg

SEQ ID NO: 41326 - DNA, 25 bp, Probe Sequence
cactgttaagacctcctattgagtt

SEQ ID NO: 41327 - DNA, 25 bp, Probe Sequence
caaccactgttaagacctcctattg

SEQ ID NO: 41328 - DNA, 25 bp, Probe Sequence
cttactcttcaagttcaaccactgt

SEQ ID NO: 41329 - DNA, 25 bp, Probe Sequence
ttcaagttcaaccactgttaagacc

SEQ ID NO: 41330 - DNA, 25 bp, Probe Sequence
catgttcaattacttcctctctctg

SEQ ID NO: 41331 - DNA, 25 bp, Probe Sequence
gttcaaccactgttaagacctccta

SEQ ID NO: 41332 - DNA, 25 bp, Probe Sequence
ccactgttaagacctcctattgagt

SEQ ID NO: 41333 - DNA, 25 bp, Probe Sequence
accactgttaagacctcctattgag

SEQ ID NO: 41334 - DNA, 25 bp, Probe Sequence
caagttcaaccactgttaagacctc

SEQ ID NO: 41335 - DNA, 25 bp, Probe Sequence
gctcttactcttcaagttcaaccac

SEQ ID NO: 41336 - DNA, 25 bp, Probe Sequence
tgttcaattacttcctctctctggc

SEQ ID NO: 41337 - DNA, 25 bp, Probe Sequence
atctgcttcactcctagtaaccttc

SEQ ID NO: 41338 - DNA, 25 bp, Probe Sequence
tcaagttcaaccactgttaagacct

SEQ ID NO: 41339 - DNA, 25 bp, Probe Sequence
gcctcttaactgtaacaatgttcat

SEQ ID NO: 41340 - DNA, 25 bp, Probe Sequence
tcttaactgtaacaatgttcatggt

SEQ ID NO: 41341 - DNA, 25 bp, Probe Sequence
ttaactgtaacaatgttcatggttg

SEQ ID NO: 41342 - DNA, 25 bp, Probe Sequence
ctcttaactgtaacaatgttcatgg

SEQ ID NO: 41343 - DNA, 25 bp, Probe Sequence
cctcttaactgtaacaatgttcatg

SEQ ID NO: 41344 - DNA, 25 bp, Probe Sequence
ctcctgtagatccagatgaagactc

SEQ ID NO: 41345 - DNA, 25 bp, Probe Sequence
cagtatcattgtggagaaccaagag

SEQ ID NO: 41346 - DNA, 25 bp, Probe Sequence
ctcagtatcattgtggagaaccaag

SEQ ID NO: 41347 - DNA, 25 bp, Probe Sequence
cttaactgtaacaatgttcatggtt

SEQ ID NO: 41348 - DNA, 25 bp, Probe Sequence
catgctcagtatcattgtggagaac

SEQ ID NO: 41349 - DNA, 25 bp, Probe Sequence
tcagtatcattgtggagaaccaaga

SEQ ID NO: 41350 - DNA, 25 bp, Probe Sequence
tcctgtagatccagatgaagactct

SEQ ID NO: 41351 - DNA, 25 bp, Probe Sequence
atgctcagtatcattgtggagaacc

SEQ ID NO: 41352 - DNA, 25 bp, Probe Sequence
agtatcattgtggagaaccaagagg

SEQ ID NO: 41353 - DNA, 25 bp, Probe Sequence
gtttaagactttaacaatgggaacc

SEQ ID NO: 41354 - DNA, 25 bp, Probe Sequence
tttaagactttaacaatgggaaccc

SEQ ID NO: 41355 - DNA, 25 bp, Probe Sequence
cctcctgtagatccagatgaagact

SEQ ID NO: 41356 - DNA, 25 bp, Probe Sequence
gctcagtatcattgtggagaaccaa

SEQ ID NO: 41357 - DNA, 25 bp, Probe Sequence
agttaaatggtagtgtgcggagttt

SEQ ID NO: 41358 - DNA, 25 bp, Probe Sequence
aagttaaatggtagtgtgcggagtt

SEQ ID NO: 41359 - DNA, 25 bp, Probe Sequence
ggcctcttaactgtaacaatgttca

SEQ ID NO: 41360 - DNA, 25 bp, Probe Sequence
ctgtaacaatgttcatggttgtgat

SEQ ID NO: 41361 - DNA, 25 bp, Probe Sequence
gtaacaatgttcatggttgtgatgt

SEQ ID NO: 41362 - DNA, 25 bp, Probe Sequence
tgtaacaatgttcatggttgtgatg

SEQ ID NO: 41363 - DNA, 25 bp, Probe Sequence
ttctccttagtcttctcatagcatt

SEQ ID NO: 41364 - DNA, 25 bp, Probe Sequence
aataactactgtgttcctggcaata

SEQ ID NO: 41365 - DNA, 25 bp, Probe Sequence
ataactactgtgttcctggcaatag

SEQ ID NO: 41366 - DNA, 25 bp, Probe Sequence
cattattggaattaacctggtgctg

SEQ ID NO: 41367 - DNA, 25 bp, Probe Sequence
tcattattggaattaacctggtgct

SEQ ID NO: 41368 - DNA, 25 bp, Probe Sequence
ctggcaatagtgtgttctgattaga

SEQ ID NO: 41369 - DNA, 25 bp, Probe Sequence
cctggcaatagtgtgttctgattag

SEQ ID NO: 41370 - DNA, 25 bp, Probe Sequence
ttcattattggaattaacctggtgc

SEQ ID NO: 41371 - DNA, 25 bp, Probe Sequence
tcctggcaatagtgtgttctgatta

SEQ ID NO: 41372 - DNA, 25 bp, Probe Sequence
tctccttagtcttctcatagcatta

SEQ ID NO: 41373 - DNA, 25 bp, Probe Sequence
caataactactgtgttcctggcaat

SEQ ID NO: 41374 - DNA, 25 bp, Probe Sequence
attattggaattaacctggtgctgg

SEQ ID NO: 41375 - DNA, 25 bp, Probe Sequence
tccttagtcttctcatagcattaac

SEQ ID NO: 41376 - DNA, 25 bp, Probe Sequence
gttcattattggaattaacctggtg

SEQ ID NO: 41377 - DNA, 25 bp, Probe Sequence
tggaattaacctggtgctggatatt

SEQ ID NO: 41378 - DNA, 25 bp, Probe Sequence
ttggaattaacctggtgctggatat

SEQ ID NO: 41379 - DNA, 25 bp, Probe Sequence
attggaattaacctggtgctggata

SEQ ID NO: 41380 - DNA, 25 bp, Probe Sequence
tattggaattaacctggtgctggat

SEQ ID NO: 41381 - DNA, 25 bp, Probe Sequence
attgttgaggtggtctgaatgttct

SEQ ID NO: 41382 - DNA, 25 bp, Probe Sequence
ctccttagtcttctcatagcattaa

SEQ ID NO: 41383 - DNA, 25 bp, Probe Sequence
ttcctggcaatagtgtgttctgatt

SEQ ID NO: 41384 - DNA, 25 bp, Probe Sequence
ttattggaattaacctggtgctgga

SEQ ID NO: 41385 - DNA, 25 bp, Probe Sequence
ccttagtcttctcatagcattaact

SEQ ID NO: 41386 - DNA, 25 bp, Probe Sequence
gcttattgttccaagacattgtcaa

SEQ ID NO: 41387 - DNA, 25 bp, Probe Sequence
taaaggagccaattccaactctgta

SEQ ID NO: 41388 - DNA, 25 bp, Probe Sequence
tttccataaaggagccaattccaac

SEQ ID NO: 41389 - DNA, 25 bp, Probe Sequence
cataaaggagccaattccaactctg

SEQ ID NO: 41390 - DNA, 25 bp, Probe Sequence
ataaaggagccaattccaactctgt

SEQ ID NO: 41391 - DNA, 25 bp, Probe Sequence
aaggagccaattccaactctgtaaa

SEQ ID NO: 41392 - DNA, 25 bp, Probe Sequence
aaaggagccaattccaactctgtaa

SEQ ID NO: 41393 - DNA, 25 bp, Probe Sequence
ttccataaaggagccaattccaact

SEQ ID NO: 41394 - DNA, 25 bp, Probe Sequence
ccataaaggagccaattccaactct

SEQ ID NO: 41395 - DNA, 25 bp, Probe Sequence
tccataaaggagccaattccaactc

SEQ ID NO: 41396 - DNA, 25 bp, Probe Sequence
ctacgacgacttcaactgcaacatc

SEQ ID NO: 41397 - DNA, 25 bp, Probe Sequence
gtggagataagaaggggatggaatg

SEQ ID NO: 41398 - DNA, 25 bp, Probe Sequence
ttttccataaaggagccaattccaa

SEQ ID NO: 41399 - DNA, 25 bp, Probe Sequence
tgtggagataagaaggggatggaat

SEQ ID NO: 41400 - DNA, 25 bp, Probe Sequence
tacgacgacttcaactgcaacatct

SEQ ID NO: 41401 - DNA, 25 bp, Probe Sequence
ctgtggagataagaaggggatggaa

SEQ ID NO: 41402 - DNA, 25 bp, Probe Sequence
cttcctcaagatctggaactaatgg

SEQ ID NO: 41403 - DNA, 25 bp, Probe Sequence
ccttcctcaagatctggaactaatg

SEQ ID NO: 41404 - DNA, 25 bp, Probe Sequence
tccttcctcaagatctggaactaat

SEQ ID NO: 41405 - DNA, 25 bp, Probe Sequence
tggagataagaaggggatggaatgg

SEQ ID NO: 41406 - DNA, 25 bp, Probe Sequence
aggagccaattccaactctgtaaaa

SEQ ID NO: 41407 - DNA, 25 bp, Probe Sequence
ctccttcctcaagatctggaactaa

SEQ ID NO: 41408 - DNA, 25 bp, Probe Sequence
tcctcaagatctggaactaatggcc

SEQ ID NO: 41409 - DNA, 25 bp, Probe Sequence
actccttcctcaagatctggaacta

SEQ ID NO: 41410 - DNA, 25 bp, Probe Sequence
gagataagaaggggatggaatgggg

SEQ ID NO: 41411 - DNA, 25 bp, Probe Sequence
ccgagaggacagaatggatataatc

SEQ ID NO: 41412 - DNA, 25 bp, Probe Sequence
ttcctaccatatacttctctccagc

SEQ ID NO: 41413 - DNA, 25 bp, Probe Sequence
ctaccatatacttctctccagccaa

SEQ ID NO: 41414 - DNA, 25 bp, Probe Sequence
catatacttctctccagccaacaag

SEQ ID NO: 41415 - DNA, 25 bp, Probe Sequence
cgagaggacagaatggatataatct

SEQ ID NO: 41416 - DNA, 25 bp, Probe Sequence
taccatatacttctctccagccaac

SEQ ID NO: 41417 - DNA, 25 bp, Probe Sequence
atatacttctctccagccaacaaga

SEQ ID NO: 41418 - DNA, 25 bp, Probe Sequence
gccgagaggacagaatggatataat

SEQ ID NO: 41419 - DNA, 25 bp, Probe Sequence
ccatatacttctctccagccaacaa

SEQ ID NO: 41420 - DNA, 25 bp, Probe Sequence
gtgaaggtagtggtagcagagaatt

SEQ ID NO: 41421 - DNA, 25 bp, Probe Sequence
tcctaccatatacttctctccagcc

SEQ ID NO: 41422 - DNA, 25 bp, Probe Sequence
cctaccatatacttctctccagcca

SEQ ID NO: 41423 - DNA, 25 bp, Probe Sequence
aatatcgtcatagccaagatggatg

SEQ ID NO: 41424 - DNA, 25 bp, Probe Sequence
ggaaataccaggaccagtttatgtt

SEQ ID NO: 41425 - DNA, 25 bp, Probe Sequence
tgtgaaggtagtggtagcagagaat

SEQ ID NO: 41426 - DNA, 25 bp, Probe Sequence
gaaataccaggaccagtttatgttt

SEQ ID NO: 41427 - DNA, 25 bp, Probe Sequence
accatatacttctctccagccaaca

SEQ ID NO: 41428 - DNA, 25 bp, Probe Sequence
tttcctaccatatacttctctccag

SEQ ID NO: 41429 - DNA, 25 bp, Probe Sequence
caagaagaagaagaaggcacaggag

SEQ ID NO: 41430 - DNA, 25 bp, Probe Sequence
tgaaggtagtggtagcagagaattt

SEQ ID NO: 41431 - DNA, 25 bp, Probe Sequence
tatacttctctccagccaacaagaa

SEQ ID NO: 41432 - DNA, 25 bp, Probe Sequence
cccaaatatcgtcatagccaagatg

SEQ ID NO: 41433 - DNA, 25 bp, Probe Sequence
acccaaatatcgtcatagccaagat

SEQ ID NO: 41434 - DNA, 25 bp, Probe Sequence
caatgatgtgccttctccatatgaa

SEQ ID NO: 41435 - DNA, 25 bp, Probe Sequence
tggtttggagtccctgaataataaa

SEQ ID NO: 41436 - DNA, 25 bp, Probe Sequence
gtggtttggagtccctgaataataa

SEQ ID NO: 41437 - DNA, 25 bp, Probe Sequence
tcgataatcattgcatagtgactga

SEQ ID NO: 41438 - DNA, 25 bp, Probe Sequence
ggtttggagtccctgaataataaag

SEQ ID NO: 41439 - DNA, 25 bp, Probe Sequence
cgataatcattgcatagtgactgaa

SEQ ID NO: 41440 - DNA, 25 bp, Probe Sequence
tgtggtttggagtccctgaataata

SEQ ID NO: 41441 - DNA, 25 bp, Probe Sequence
tgtttctgaacttcgtgccatattt

SEQ ID NO: 41442 - DNA, 25 bp, Probe Sequence
ttgtttctgaacttcgtgccatatt

SEQ ID NO: 41443 - DNA, 25 bp, Probe Sequence
gtttggagtccctgaataataaaga

SEQ ID NO: 41444 - DNA, 25 bp, Probe Sequence
gaagacatcattggttctgtgtttc

SEQ ID NO: 41445 - DNA, 25 bp, Probe Sequence
catcattggttctgtgtttcctacg

SEQ ID NO: 41446 - DNA, 25 bp, Probe Sequence
cttgtttctgaacttcgtgccatat

SEQ ID NO: 41447 - DNA, 25 bp, Probe Sequence
tttggagtccctgaataataaagag

SEQ ID NO: 41448 - DNA, 25 bp, Probe Sequence
gacatcattggttctgtgtttccta

SEQ ID NO: 41449 - DNA, 25 bp, Probe Sequence
acatcattggttctgtgtttcctac

SEQ ID NO: 41450 - DNA, 25 bp, Probe Sequence
ttggagtccctgaataataaagagg

SEQ ID NO: 41451 - DNA, 25 bp, Probe Sequence
ttgtggtttggagtccctgaataat

SEQ ID NO: 41452 - DNA, 25 bp, Probe Sequence
tttgtggtttggagtccctgaataa

SEQ ID NO: 41453 - DNA, 25 bp, Probe Sequence
aagacatcattggttctgtgtttcc

SEQ ID NO: 41454 - DNA, 25 bp, Probe Sequence
agtatttgactgttactgtccttgg

SEQ ID NO: 41455 - DNA, 25 bp, Probe Sequence
cctacggaaataagaaacgataaat

SEQ ID NO: 41456 - DNA, 25 bp, Probe Sequence
gtatttgactgttactgtccttggc

SEQ ID NO: 41457 - DNA, 25 bp, Probe Sequence
catcaggaaacagttgtcagaagac

SEQ ID NO: 41458 - DNA, 25 bp, Probe Sequence
ccatcaggaaacagttgtcagaaga

SEQ ID NO: 41459 - DNA, 25 bp, Probe Sequence
cagggagggaccaataaatcataat

SEQ ID NO: 41460 - DNA, 25 bp, Probe Sequence
agggagggaccaataaatcataatg

SEQ ID NO: 41461 - DNA, 25 bp, Probe Sequence
acagggagggaccaataaatcataa

SEQ ID NO: 41462 - DNA, 25 bp, Probe Sequence
gacagggagggaccaataaatcata

SEQ ID NO: 41463 - DNA, 25 bp, Probe Sequence
gggagggaccaataaatcataatga

SEQ ID NO: 41464 - DNA, 25 bp, Probe Sequence
ggagggaccaataaatcataatgaa

SEQ ID NO: 41465 - DNA, 25 bp, Probe Sequence
agggaccaataaatcataatgaaga

SEQ ID NO: 41466 - DNA, 25 bp, Probe Sequence
ccaataaatcataatgaagaaacgc

SEQ ID NO: 41467 - DNA, 25 bp, Probe Sequence
gagggaccaataaatcataatgaag

SEQ ID NO: 41468 - DNA, 25 bp, Probe Sequence
gggaccaataaatcataatgaagaa

SEQ ID NO: 41469 - DNA, 25 bp, Probe Sequence
ggacagggagggaccaataaatcat

SEQ ID NO: 41470 - DNA, 25 bp, Probe Sequence
caataaatcataatgaagaaacgct

SEQ ID NO: 41471 - DNA, 25 bp, Probe Sequence
aataaatcataatgaagaaacgctc

SEQ ID NO: 41472 - DNA, 25 bp, Probe Sequence
accaataaatcataatgaagaaacg

SEQ ID NO: 41473 - DNA, 25 bp, Probe Sequence
ggaccaataaatcataatgaagaaa

SEQ ID NO: 41474 - DNA, 25 bp, Probe Sequence
gagagattcgtcgttatcagaagtc

SEQ ID NO: 41475 - DNA, 25 bp, Probe Sequence
agagattcgtcgttatcagaagtcg

SEQ ID NO: 41476 - DNA, 25 bp, Probe Sequence
cgagagattcgtcgttatcagaagt

SEQ ID NO: 41477 - DNA, 25 bp, Probe Sequence
ttcgagagattcgtcgttatcagaa

SEQ ID NO: 41478 - DNA, 25 bp, Probe Sequence
tcgagagattcgtcgttatcagaag

SEQ ID NO: 41479 - DNA, 25 bp, Probe Sequence
cttcgagagattcgtcgttatcaga

SEQ ID NO: 41480 - DNA, 25 bp, Probe Sequence
gagattcgtcgttatcagaagtcga

SEQ ID NO: 41481 - DNA, 25 bp, Probe Sequence
catccacgctaagagagtcaccatc

SEQ ID NO: 41482 - DNA, 25 bp, Probe Sequence
taagagagtcaccatcatgcccaaa

SEQ ID NO: 41483 - DNA, 25 bp, Probe Sequence
tccacgctaagagagtcaccatcat

SEQ ID NO: 41484 - DNA, 25 bp, Probe Sequence
atccacgctaagagagtcaccatca

SEQ ID NO: 41485 - DNA, 25 bp, Probe Sequence
gcttcgagagattcgtcgttatcag

SEQ ID NO: 41486 - DNA, 25 bp, Probe Sequence
ctaagagagtcaccatcatgcccaa

SEQ ID NO: 41487 - DNA, 25 bp, Probe Sequence
ccacgctaagagagtcaccatcatg

SEQ ID NO: 41488 - DNA, 25 bp, Probe Sequence
gtctgttcgaagataccaacctgtg

SEQ ID NO: 41489 - DNA, 25 bp, Probe Sequence
catcatgcccaaagacatccagttg

SEQ ID NO: 41490 - DNA, 25 bp, Probe Sequence
ctgttcgaagataccaacctgtgtg

SEQ ID NO: 41491 - DNA, 25 bp, Probe Sequence
tctgttcgaagataccaacctgtgt

SEQ ID NO: 41492 - DNA, 25 bp, Probe Sequence
aagagagtcaccatcatgcccaaag

SEQ ID NO: 41493 - DNA, 25 bp, Probe Sequence
cgcttcgagagattcgtcgttatca

SEQ ID NO: 41494 - DNA, 25 bp, Probe Sequence
agtcaccatcatgcccaaagacatc

SEQ ID NO: 41495 - DNA, 25 bp, Probe Sequence
gagtcaccatcatgcccaaagacat

SEQ ID NO: 41496 - DNA, 25 bp, Probe Sequence
ggtctgttcgaagataccaacctgt

SEQ ID NO: 41497 - DNA, 25 bp, Probe Sequence
tacctggtgggtctgttcgaagata

SEQ ID NO: 41498 - DNA, 25 bp, Probe Sequence
tggctctatatgattaccaaggaga

SEQ ID NO: 41499 - DNA, 25 bp, Probe Sequence
gtggctctatatgattaccaaggag

SEQ ID NO: 41500 - DNA, 25 bp, Probe Sequence
taatcactgacattgagatggtgga

SEQ ID NO: 41501 - DNA, 25 bp, Probe Sequence
gtaatcactgacattgagatggtgg

SEQ ID NO: 41502 - DNA, 25 bp, Probe Sequence
ctgtggctctatatgattaccaagg

SEQ ID NO: 41503 - DNA, 25 bp, Probe Sequence
tgtggctctatatgattaccaagga

SEQ ID NO: 41504 - DNA, 25 bp, Probe Sequence
cgtaatcactgacattgagatggtg

SEQ ID NO: 41505 - DNA, 25 bp, Probe Sequence
gctgtggctctatatgattaccaag

SEQ ID NO: 41506 - DNA, 25 bp, Probe Sequence
atatgattaccaaggagagggaagt

SEQ ID NO: 41507 - DNA, 25 bp, Probe Sequence
gcaaatgtctaaccagatgagtttc

SEQ ID NO: 41508 - DNA, 25 bp, Probe Sequence
ccctgaagaaatatctgtgaacctt

SEQ ID NO: 41509 - DNA, 25 bp, Probe Sequence
ttccctgaagaaatatctgtgaacc

SEQ ID NO: 41510 - DNA, 25 bp, Probe Sequence
tctatatgattaccaaggagaggga

SEQ ID NO: 41511 - DNA, 25 bp, Probe Sequence
tatatgattaccaaggagagggaag

SEQ ID NO: 41512 - DNA, 25 bp, Probe Sequence
ctatatgattaccaaggagagggaa

SEQ ID NO: 41513 - DNA, 25 bp, Probe Sequence
tatgattaccaaggagagggaagtg

SEQ ID NO: 41514 - DNA, 25 bp, Probe Sequence
aaccttctttctgttcagtcctaaa

SEQ ID NO: 41515 - DNA, 25 bp, Probe Sequence
caaatgtctaaccagatgagtttct

SEQ ID NO: 41516 - DNA, 25 bp, Probe Sequence
tccctgaagaaatatctgtgaacct

SEQ ID NO: 41517 - DNA, 25 bp, Probe Sequence
atttctcttgtgttcctgactcctt

SEQ ID NO: 41518 - DNA, 25 bp, Probe Sequence
tataagaagacgacgcccatagaag

SEQ ID NO: 41519 - DNA, 25 bp, Probe Sequence
gaaacacgagtcccagagagattat

SEQ ID NO: 41520 - DNA, 25 bp, Probe Sequence
tgagaatgactatgaggacgttgag

SEQ ID NO: 41521 - DNA, 25 bp, Probe Sequence
ctgagaatgactatgaggacgttga

SEQ ID NO: 41522 - DNA, 25 bp, Probe Sequence
ctgaccattccattattgagacctt

SEQ ID NO: 41523 - DNA, 25 bp, Probe Sequence
tgaccattccattattgagacctta

SEQ ID NO: 41524 - DNA, 25 bp, Probe Sequence
gaccattccattattgagaccttaa

SEQ ID NO: 41525 - DNA, 25 bp, Probe Sequence
atgctaacaggatctacaggatgat

SEQ ID NO: 41526 - DNA, 25 bp, Probe Sequence
cctgaccattccattattgagacct

SEQ ID NO: 41527 - DNA, 25 bp, Probe Sequence
tgataagaacgacaagtctgtgaag

SEQ ID NO: 41528 - DNA, 25 bp, Probe Sequence
ctgataagaacgacaagtctgtgaa

SEQ ID NO: 41529 - DNA, 25 bp, Probe Sequence
atcacgcatggaagaagtagactaa

SEQ ID NO: 41530 - DNA, 25 bp, Probe Sequence
gataagaacgacaagtctgtgaagg

SEQ ID NO: 41531 - DNA, 25 bp, Probe Sequence
taagaacgacaagtctgtgaaggat

SEQ ID NO: 41532 - DNA, 25 bp, Probe Sequence
ataagaacgacaagtctgtgaagga

SEQ ID NO: 41533 - DNA, 25 bp, Probe Sequence
catgctaacaggatctacaggatga

SEQ ID NO: 41534 - DNA, 25 bp, Probe Sequence
cacatgctaacaggatctacaggat

SEQ ID NO: 41535 - DNA, 25 bp, Probe Sequence
agacacatgctaacaggatctacag

SEQ ID NO: 41536 - DNA, 25 bp, Probe Sequence
acatgctaacaggatctacaggatg

SEQ ID NO: 41537 - DNA, 25 bp, Probe Sequence
taaaccctgaccattccattattga

SEQ ID NO: 41538 - DNA, 25 bp, Probe Sequence
gagataaaccctgaccattccatta

SEQ ID NO: 41539 - DNA, 25 bp, Probe Sequence
cagacacatgctaacaggatctaca

SEQ ID NO: 41540 - DNA, 25 bp, Probe Sequence
tattgatgaagatgaccctactgct

SEQ ID NO: 41541 - DNA, 25 bp, Probe Sequence
aaaccctgaccattccattattgag

SEQ ID NO: 41542 - DNA, 25 bp, Probe Sequence
catcacgcatggaagaagtagacta

SEQ ID NO: 41543 - DNA, 25 bp, Probe Sequence
gtattgatgaagatgaccctactgc

SEQ ID NO: 41544 - DNA, 25 bp, Probe Sequence
agataaaccctgaccattccattat

SEQ ID NO: 41545 - DNA, 25 bp, Probe Sequence
aaacttggtctgggtattgatgaag

SEQ ID NO: 41546 - DNA, 25 bp, Probe Sequence
gtcaaaccctgcctttcctttactt

SEQ ID NO: 41547 - DNA, 25 bp, Probe Sequence
tctttggaagagagaagaacagagt

SEQ ID NO: 41548 - DNA, 25 bp, Probe Sequence
cctatttatgtttctactcggggaa

SEQ ID NO: 41549 - DNA, 25 bp, Probe Sequence
ctatttatgtttctactcggggaac

SEQ ID NO: 41550 - DNA, 25 bp, Probe Sequence
ccctatttatgtttctactcgggga

SEQ ID NO: 41551 - DNA, 25 bp, Probe Sequence
atttatgtttctactcggggaacaa

SEQ ID NO: 41552 - DNA, 25 bp, Probe Sequence
tttatgtttctactcggggaacaaa

SEQ ID NO: 41553 - DNA, 25 bp, Probe Sequence
tatttatgtttctactcggggaaca

SEQ ID NO: 41554 - DNA, 25 bp, Probe Sequence
ttatgtttctactcggggaacaaac

SEQ ID NO: 41555 - DNA, 25 bp, Probe Sequence
ttctttggaagagagaagaacagag

SEQ ID NO: 41556 - DNA, 25 bp, Probe Sequence
tttctttggaagagagaagaacaga

SEQ ID NO: 41557 - DNA, 25 bp, Probe Sequence
gccctatttatgtttctactcgggg

SEQ ID NO: 41558 - DNA, 25 bp, Probe Sequence
tatgtttctactcggggaacaaacg

SEQ ID NO: 41559 - DNA, 25 bp, Probe Sequence
ttttctttggaagagagaagaacag

SEQ ID NO: 41560 - DNA, 25 bp, Probe Sequence
atgtttctactcggggaacaaacgt

SEQ ID NO: 41561 - DNA, 25 bp, Probe Sequence
gtttctactcggggaacaaacgttg

SEQ ID NO: 41562 - DNA, 25 bp, Probe Sequence
tgtttctactcggggaacaaacgtt

SEQ ID NO: 41563 - DNA, 25 bp, Probe Sequence
atgccaaccagtttccttattctta

SEQ ID NO: 41564 - DNA, 25 bp, Probe Sequence
ccaaccagtttccttattcttacca

SEQ ID NO: 41565 - DNA, 25 bp, Probe Sequence
caaccagtttccttattcttaccat

SEQ ID NO: 41566 - DNA, 25 bp, Probe Sequence
tgccaaccagtttccttattcttac

SEQ ID NO: 41567 - DNA, 25 bp, Probe Sequence
gccaaccagtttccttattcttacc

SEQ ID NO: 41568 - DNA, 25 bp, Probe Sequence
aaccagtttccttattcttaccatg

SEQ ID NO: 41569 - DNA, 25 bp, Probe Sequence
catgccaaccagtttccttattctt

SEQ ID NO: 41570 - DNA, 25 bp, Probe Sequence
aaccttccaagttcatcccatgtta

SEQ ID NO: 41571 - DNA, 25 bp, Probe Sequence
taaccttccaagttcatcccatgtt

SEQ ID NO: 41572 - DNA, 25 bp, Probe Sequence
accttccaagttcatcccatgttag

SEQ ID NO: 41573 - DNA, 25 bp, Probe Sequence
ttccatgccaaccagtttccttatt

SEQ ID NO: 41574 - DNA, 25 bp, Probe Sequence
gtaaccttccaagttcatcccatgt

SEQ ID NO: 41575 - DNA, 25 bp, Probe Sequence
aagttcatcccatgttagctccaaa

SEQ ID NO: 41576 - DNA, 25 bp, Probe Sequence
ccatgccaaccagtttccttattct

SEQ ID NO: 41577 - DNA, 25 bp, Probe Sequence
tccatgccaaccagtttccttattc

SEQ ID NO: 41578 - DNA, 25 bp, Probe Sequence
cttccatgccaaccagtttccttat

SEQ ID NO: 41579 - DNA, 25 bp, Probe Sequence
agttcatcccatgttagctccaaag

SEQ ID NO: 41580 - DNA, 25 bp, Probe Sequence
ttccaagttcatcccatgttagctc

SEQ ID NO: 41581 - DNA, 25 bp, Probe Sequence
cttccaagttcatcccatgttagct

SEQ ID NO: 41582 - DNA, 25 bp, Probe Sequence
ggtaaccttccaagttcatcccatg

SEQ ID NO: 41583 - DNA, 25 bp, Probe Sequence
caagttcatcccatgttagctccaa

SEQ ID NO: 41584 - DNA, 25 bp, Probe Sequence
ccttccaagttcatcccatgttagc

SEQ ID NO: 41585 - DNA, 25 bp, Probe Sequence
tggtaaccttccaagttcatcccat

SEQ ID NO: 41586 - DNA, 25 bp, Probe Sequence
gccgttttatattaggactccttag

SEQ ID NO: 41587 - DNA, 25 bp, Probe Sequence
cctgtagaactgactcctagaagta

SEQ ID NO: 41588 - DNA, 25 bp, Probe Sequence
tgtagaactgactcctagaagtacc

SEQ ID NO: 41589 - DNA, 25 bp, Probe Sequence
ctgtagaactgactcctagaagtac

SEQ ID NO: 41590 - DNA, 25 bp, Probe Sequence
agcctgtagaactgactcctagaag

SEQ ID NO: 41591 - DNA, 25 bp, Probe Sequence
gatcactgtattcagctctgtcaag

SEQ ID NO: 41592 - DNA, 25 bp, Probe Sequence
tggtgccactaatgttgatctaaag

SEQ ID NO: 41593 - DNA, 25 bp, Probe Sequence
ctggtgccactaatgttgatctaaa

SEQ ID NO: 41594 - DNA, 25 bp, Probe Sequence
atcactgtattcagctctgtcaaga

SEQ ID NO: 41595 - DNA, 25 bp, Probe Sequence
gaaggctttactctgaaacatcaca

SEQ ID NO: 41596 - DNA, 25 bp, Probe Sequence
actgtattcagctctgtcaagaatg

SEQ ID NO: 41597 - DNA, 25 bp, Probe Sequence
cactgtattcagctctgtcaagaat

SEQ ID NO: 41598 - DNA, 25 bp, Probe Sequence
tcactgtattcagctctgtcaagaa

SEQ ID NO: 41599 - DNA, 25 bp, Probe Sequence
atgtaagattcaagagtttgccgac

SEQ ID NO: 41600 - DNA, 25 bp, Probe Sequence
gctggtgccactaatgttgatctaa

SEQ ID NO: 41601 - DNA, 25 bp, Probe Sequence
ggctttactctgaaacatcacacat

SEQ ID NO: 41602 - DNA, 25 bp, Probe Sequence
aaggctttactctgaaacatcacac

SEQ ID NO: 41603 - DNA, 25 bp, Probe Sequence
gcctgtagaactgactcctagaagt

SEQ ID NO: 41604 - DNA, 25 bp, Probe Sequence
gtattcagctctgtcaagaatggtc

SEQ ID NO: 41605 - DNA, 25 bp, Probe Sequence
ctgtattcagctctgtcaagaatgg

SEQ ID NO: 41606 - DNA, 25 bp, Probe Sequence
gtagaactgactcctagaagtaccc

SEQ ID NO: 41607 - DNA, 25 bp, Probe Sequence
gctttactctgaaacatcacacatg

SEQ ID NO: 41608 - DNA, 25 bp, Probe Sequence
cagcctgtagaactgactcctagaa

SEQ ID NO: 41609 - DNA, 25 bp, Probe Sequence
cgaaggctttactctgaaacatcac

SEQ ID NO: 41610 - DNA, 25 bp, Probe Sequence
tgtattcagctctgtcaagaatggt

SEQ ID NO: 41611 - DNA, 25 bp, Probe Sequence
tcaacatagtccagaacctgctaag

SEQ ID NO: 41612 - DNA, 25 bp, Probe Sequence
gattatcaccaagccaaacatcatc

SEQ ID NO: 41613 - DNA, 25 bp, Probe Sequence
ttatcaccaagccaaacatcatcat

SEQ ID NO: 41614 - DNA, 25 bp, Probe Sequence
attatcaccaagccaaacatcatca

SEQ ID NO: 41615 - DNA, 25 bp, Probe Sequence
gtcaacatagtccagaacctgctaa

SEQ ID NO: 41616 - DNA, 25 bp, Probe Sequence
ttccatgtcaacatagtccagaacc

SEQ ID NO: 41617 - DNA, 25 bp, Probe Sequence
gtatgattatcaccaagccaaacat

SEQ ID NO: 41618 - DNA, 25 bp, Probe Sequence
tatgattatcaccaagccaaacatc

SEQ ID NO: 41619 - DNA, 25 bp, Probe Sequence
caactggaccctgatgagaagatag

SEQ ID NO: 41620 - DNA, 25 bp, Probe Sequence
tggatctcattgaagtttcagacaa

SEQ ID NO: 41621 - DNA, 25 bp, Probe Sequence
agtggatctcattgaagtttcagac

SEQ ID NO: 41622 - DNA, 25 bp, Probe Sequence
ggaccctgatgagaagatagcatac

SEQ ID NO: 41623 - DNA, 25 bp, Probe Sequence
gagtggatctcattgaagtttcaga

SEQ ID NO: 41624 - DNA, 25 bp, Probe Sequence
caacatagtccagaacctgctaagg

SEQ ID NO: 41625 - DNA, 25 bp, Probe Sequence
ccgtggataatggaaggtgaatttc

SEQ ID NO: 41626 - DNA, 25 bp, Probe Sequence
aaactttgaaggcttaatctctttc

SEQ ID NO: 41627 - DNA, 25 bp, Probe Sequence
tttccatgtcaacatagtccagaac

SEQ ID NO: 41628 - DNA, 25 bp, Probe Sequence
gtggatctcattgaagtttcagaca

SEQ ID NO: 41629 - DNA, 25 bp, Probe Sequence
aaggtgaatttccatgtcaacatag

SEQ ID NO: 41630 - DNA, 25 bp, Probe Sequence
gaaggtgaatttccatgtcaacata

SEQ ID NO: 41631 - DNA, 25 bp, Probe Sequence
caagagcaacaggaaatgaacacat

SEQ ID NO: 41632 - DNA, 25 bp, Probe Sequence
tccatgtcaacatagtccagaacct

SEQ ID NO: 41633 - DNA, 25 bp, Probe Sequence
tgtcaacatagtccagaacctgcta

SEQ ID NO: 41634 - DNA, 25 bp, Probe Sequence
gaccctgatgagaagatagcatacg

SEQ ID NO: 41635 - DNA, 25 bp, Probe Sequence
tgaattaagcaacaatgtaactggt

SEQ ID NO: 41636 - DNA, 25 bp, Probe Sequence
aattaagcaacaatgtaactggtct

SEQ ID NO: 41637 - DNA, 25 bp, Probe Sequence
gaattaagcaacaatgtaactggtc

SEQ ID NO: 41638 - DNA, 25 bp, Probe Sequence
ttaagcaacaatgtaactggtcttg

SEQ ID NO: 41639 - DNA, 25 bp, Probe Sequence
attaagcaacaatgtaactggtctt

SEQ ID NO: 41640 - DNA, 25 bp, Probe Sequence
taagcaacaatgtaactggtcttga

SEQ ID NO: 41641 - DNA, 25 bp, Probe Sequence
caacaatgtaactggtcttgacttg

SEQ ID NO: 41642 - DNA, 25 bp, Probe Sequence
cgatgaattaagcaacaatgtaact

SEQ ID NO: 41643 - DNA, 25 bp, Probe Sequence
atgaattaagcaacaatgtaactgg

SEQ ID NO: 41644 - DNA, 25 bp, Probe Sequence
ctcctaagacagagttagagtcaac

SEQ ID NO: 41645 - DNA, 25 bp, Probe Sequence
tctcctaagacagagttagagtcaa

SEQ ID NO: 41646 - DNA, 25 bp, Probe Sequence
cctaagacagagttagagtcaacaa

SEQ ID NO: 41647 - DNA, 25 bp, Probe Sequence
tcctaagacagagttagagtcaaca

SEQ ID NO: 41648 - DNA, 25 bp, Probe Sequence
agacagagttagagtcaacaatctt

SEQ ID NO: 41649 - DNA, 25 bp, Probe Sequence
aagacagagttagagtcaacaatct

SEQ ID NO: 41650 - DNA, 25 bp, Probe Sequence
ggacaacaatgatggtcagaattat

SEQ ID NO: 41651 - DNA, 25 bp, Probe Sequence
gcacagatagtgataccttctcatt

SEQ ID NO: 41652 - DNA, 25 bp, Probe Sequence
gcaacaatgtaactggtcttgactt

SEQ ID NO: 41653 - DNA, 25 bp, Probe Sequence
aagcaacaatgtaactggtcttgac

SEQ ID NO: 41654 - DNA, 25 bp, Probe Sequence
tgtaactggtcttgacttgtcatat

SEQ ID NO: 41655 - DNA, 25 bp, Probe Sequence
atgtaactggtcttgacttgtcata

SEQ ID NO: 41656 - DNA, 25 bp, Probe Sequence
aatgtaactggtcttgacttgtcat

SEQ ID NO: 41657 - DNA, 25 bp, Probe Sequence
aactggtcttgacttgtcatattcc

SEQ ID NO: 41658 - DNA, 25 bp, Probe Sequence
gtaactggtcttgacttgtcatatt

SEQ ID NO: 41659 - DNA, 25 bp, Probe Sequence
gttacaagacaatggatgaggatat

SEQ ID NO: 41660 - DNA, 25 bp, Probe Sequence
atggatgaggatattgtgattcagc

SEQ ID NO: 41661 - DNA, 25 bp, Probe Sequence
atgttacaagacaatggatgaggat

SEQ ID NO: 41662 - DNA, 25 bp, Probe Sequence
tgttacaagacaatggatgaggata

SEQ ID NO: 41663 - DNA, 25 bp, Probe Sequence
gatgaggatattgtgattcagcagg

SEQ ID NO: 41664 - DNA, 25 bp, Probe Sequence
ggatgaggatattgtgattcagcag

SEQ ID NO: 41665 - DNA, 25 bp, Probe Sequence
aatggatgaggatattgtgattcag

SEQ ID NO: 41666 - DNA, 25 bp, Probe Sequence
gatattgtgattcagcaggacgatg

SEQ ID NO: 41667 - DNA, 25 bp, Probe Sequence
atgaggatattgtgattcagcagga

SEQ ID NO: 41668 - DNA, 25 bp, Probe Sequence
ttacaagacaatggatgaggatatt

SEQ ID NO: 41669 - DNA, 25 bp, Probe Sequence
tggatgaggatattgtgattcagca

SEQ ID NO: 41670 - DNA, 25 bp, Probe Sequence
gattgtcacacttatcatgttgtcc

SEQ ID NO: 41671 - DNA, 25 bp, Probe Sequence
attgtcacacttatcatgttgtcca

SEQ ID NO: 41672 - DNA, 25 bp, Probe Sequence
atattgtgattcagcaggacgatga

SEQ ID NO: 41673 - DNA, 25 bp, Probe Sequence
catgttacaagacaatggatgagga

SEQ ID NO: 41674 - DNA, 25 bp, Probe Sequence
tgaggatattgtgattcagcaggac

SEQ ID NO: 41675 - DNA, 25 bp, Probe Sequence
ttgtcacacttatcatgttgtccag

SEQ ID NO: 41676 - DNA, 25 bp, Probe Sequence
ggatattgtgattcagcaggacgat

SEQ ID NO: 41677 - DNA, 25 bp, Probe Sequence
gtcacacttatcatgttgtccagag

SEQ ID NO: 41678 - DNA, 25 bp, Probe Sequence
tattgtgattcagcaggacgatgag

SEQ ID NO: 41679 - DNA, 25 bp, Probe Sequence
tgtcacacttatcatgttgtccaga

SEQ ID NO: 41680 - DNA, 25 bp, Probe Sequence
cttatcatgttgtccagaggtccag

SEQ ID NO: 41681 - DNA, 25 bp, Probe Sequence
caatggatgaggatattgtgattca

SEQ ID NO: 41682 - DNA, 25 bp, Probe Sequence
gaggatattgtgattcagcaggacg

SEQ ID NO: 41683 - DNA, 25 bp, Probe Sequence
tcctaagaagagtgctgtcattatt

SEQ ID NO: 41684 - DNA, 25 bp, Probe Sequence
ttcctaagaagagtgctgtcattat

SEQ ID NO: 41685 - DNA, 25 bp, Probe Sequence
gcttagtattgacactctctaccaa

SEQ ID NO: 41686 - DNA, 25 bp, Probe Sequence
ctgcttagtattgacactctctacc

SEQ ID NO: 41687 - DNA, 25 bp, Probe Sequence
cctgcttagtattgacactctctac

SEQ ID NO: 41688 - DNA, 25 bp, Probe Sequence
taacctgcttagtattgacactctc

SEQ ID NO: 41689 - DNA, 25 bp, Probe Sequence
gtaacctgcttagtattgacactct

SEQ ID NO: 41690 - DNA, 25 bp, Probe Sequence
acctgcttagtattgacactctcta

SEQ ID NO: 41691 - DNA, 25 bp, Probe Sequence
tgcttagtattgacactctctacca

SEQ ID NO: 41692 - DNA, 25 bp, Probe Sequence
aacctgcttagtattgacactctct

SEQ ID NO: 41693 - DNA, 25 bp, Probe Sequence
cgtaacctgcttagtattgacactc

SEQ ID NO: 41694 - DNA, 25 bp, Probe Sequence
ttcgtcttcagtgtcttaatgtgga

SEQ ID NO: 41695 - DNA, 25 bp, Probe Sequence
ttcagtgtcttaatgtggaagttaa

SEQ ID NO: 41696 - DNA, 25 bp, Probe Sequence
tcgtcttcagtgtcttaatgtggaa

SEQ ID NO: 41697 - DNA, 25 bp, Probe Sequence
ttagtattgacactctctaccaaga

SEQ ID NO: 41698 - DNA, 25 bp, Probe Sequence
cttagtattgacactctctaccaag

SEQ ID NO: 41699 - DNA, 25 bp, Probe Sequence
tcctcttatcaacaacttgtgacat

SEQ ID NO: 41700 - DNA, 25 bp, Probe Sequence
ttcctcttatcaacaacttgtgaca

SEQ ID NO: 41701 - DNA, 25 bp, Probe Sequence
cctcttatcaacaacttgtgacatg

SEQ ID NO: 41702 - DNA, 25 bp, Probe Sequence
cttatcaacaacttgtgacatgaga

SEQ ID NO: 41703 - DNA, 25 bp, Probe Sequence
tcttatcaacaacttgtgacatgag

SEQ ID NO: 41704 - DNA, 25 bp, Probe Sequence
ctcttatcaacaacttgtgacatga

SEQ ID NO: 41705 - DNA, 25 bp, Probe Sequence
tatcaacaacttgtgacatgagatt

SEQ ID NO: 41706 - DNA, 25 bp, Probe Sequence
ttatcaacaacttgtgacatgagat

SEQ ID NO: 41707 - DNA, 25 bp, Probe Sequence
actgacaaactggaagatgagaaat

SEQ ID NO: 41708 - DNA, 25 bp, Probe Sequence
ctgacaaactggaagatgagaaatc

SEQ ID NO: 41709 - DNA, 25 bp, Probe Sequence
gactgacaaactggaagatgagaaa

SEQ ID NO: 41710 - DNA, 25 bp, Probe Sequence
agactgacaaactggaagatgagaa

SEQ ID NO: 41711 - DNA, 25 bp, Probe Sequence
gagactgacaaactggaagatgaga

SEQ ID NO: 41712 - DNA, 25 bp, Probe Sequence
ggagactgacaaactggaagatgag

SEQ ID NO: 41713 - DNA, 25 bp, Probe Sequence
gacaaactggaagatgagaaatctg

SEQ ID NO: 41714 - DNA, 25 bp, Probe Sequence
tgacaaactggaagatgagaaatct

SEQ ID NO: 41715 - DNA, 25 bp, Probe Sequence
acaaactggaagatgagaaatctgg

SEQ ID NO: 41716 - DNA, 25 bp, Probe Sequence
caaactggaagatgagaaatctggg

SEQ ID NO: 41717 - DNA, 25 bp, Probe Sequence
cctgtaccttgtatctccctttccc

SEQ ID NO: 41718 - DNA, 25 bp, Probe Sequence
ccctgtaccttgtatctccctttcc

SEQ ID NO: 41719 - DNA, 25 bp, Probe Sequence
cggagactgacaaactggaagatga

SEQ ID NO: 41720 - DNA, 25 bp, Probe Sequence
aaactggaagatgagaaatctgggc

SEQ ID NO: 41721 - DNA, 25 bp, Probe Sequence
gacagtatcccacatccaactccag

SEQ ID NO: 41722 - DNA, 25 bp, Probe Sequence
gccctgtaccttgtatctccctttc

SEQ ID NO: 41723 - DNA, 25 bp, Probe Sequence
aactggaagatgagaaatctgggct

SEQ ID NO: 41724 - DNA, 25 bp, Probe Sequence
actggaagatgagaaatctgggctg

SEQ ID NO: 41725 - DNA, 25 bp, Probe Sequence
gtaccttgtatctccctttccccag

SEQ ID NO: 41726 - DNA, 25 bp, Probe Sequence
ctgtaccttgtatctccctttcccc

SEQ ID NO: 41727 - DNA, 25 bp, Probe Sequence
tgtaccttgtatctccctttcccca

SEQ ID NO: 41728 - DNA, 25 bp, Probe Sequence
taccttgtatctccctttccccagg

SEQ ID NO: 41729 - DNA, 25 bp, Probe Sequence
ctggacagtatcccacatccaactc

SEQ ID NO: 41730 - DNA, 25 bp, Probe Sequence
ctatatcaacctggatgagagtgag

SEQ ID NO: 41731 - DNA, 25 bp, Probe Sequence
actatatcaacctggatgagagtga

SEQ ID NO: 41732 - DNA, 25 bp, Probe Sequence
gactatatcaacctggatgagagtg

SEQ ID NO: 41733 - DNA, 25 bp, Probe Sequence
ggactatatcaacctggatgagagt

SEQ ID NO: 41734 - DNA, 25 bp, Probe Sequence
ccactgtcatctcctactccaatac

SEQ ID NO: 41735 - DNA, 25 bp, Probe Sequence
tccactgtcatctcctactccaata

SEQ ID NO: 41736 - DNA, 25 bp, Probe Sequence
catcttccactgtcatctcctactc

SEQ ID NO: 41737 - DNA, 25 bp, Probe Sequence
ctcatcttccactgtcatctcctac

SEQ ID NO: 41738 - DNA, 25 bp, Probe Sequence
tctcatcttccactgtcatctccta

SEQ ID NO: 41739 - DNA, 25 bp, Probe Sequence
cactgtcatctcctactccaatacg

SEQ ID NO: 41740 - DNA, 25 bp, Probe Sequence
tcatcttccactgtcatctcctact

SEQ ID NO: 41741 - DNA, 25 bp, Probe Sequence
aggactatatcaacctggatgagag

SEQ ID NO: 41742 - DNA, 25 bp, Probe Sequence
cttctcatcttccactgtcatctcc

SEQ ID NO: 41743 - DNA, 25 bp, Probe Sequence
ccttctcatcttccactgtcatctc

SEQ ID NO: 41744 - DNA, 25 bp, Probe Sequence
tatatcaacctggatgagagtgagg

SEQ ID NO: 41745 - DNA, 25 bp, Probe Sequence
ttccactgtcatctcctactccaat

SEQ ID NO: 41746 - DNA, 25 bp, Probe Sequence
ttctcatcttccactgtcatctcct

SEQ ID NO: 41747 - DNA, 25 bp, Probe Sequence
atcttccactgtcatctcctactcc

SEQ ID NO: 41748 - DNA, 25 bp, Probe Sequence
accttctcatcttccactgtcatct

SEQ ID NO: 41749 - DNA, 25 bp, Probe Sequence
tccttctttaatctcctggtttacc

SEQ ID NO: 41750 - DNA, 25 bp, Probe Sequence
actgtcatctcctactccaatacgg

SEQ ID NO: 41751 - DNA, 25 bp, Probe Sequence
cttccactgtcatctcctactccaa

SEQ ID NO: 41752 - DNA, 25 bp, Probe Sequence
gcaacttgtaactaggtgtttatgg

SEQ ID NO: 41753 - DNA, 25 bp, Probe Sequence
ttccttctttaatctcctggtttac

SEQ ID NO: 41754 - DNA, 25 bp, Probe Sequence
gagatagtaggaagagttcttggtg

SEQ ID NO: 41755 - DNA, 25 bp, Probe Sequence
tgagatagtaggaagagttcttggt

SEQ ID NO: 41756 - DNA, 25 bp, Probe Sequence
ttgagatagtaggaagagttcttgg

SEQ ID NO: 41757 - DNA, 25 bp, Probe Sequence
agatagtaggaagagttcttggtgg

SEQ ID NO: 41758 - DNA, 25 bp, Probe Sequence
gatagtaggaagagttcttggtggt

SEQ ID NO: 41759 - DNA, 25 bp, Probe Sequence
atagtaggaagagttcttggtggtg

SEQ ID NO: 41760 - DNA, 25 bp, Probe Sequence
tagtaggaagagttcttggtggtgt

SEQ ID NO: 41761 - DNA, 25 bp, Probe Sequence
agttatagggaagatatgggtgttt

SEQ ID NO: 41762 - DNA, 25 bp, Probe Sequence
gtagttatagggaagatatgggtgt

SEQ ID NO: 41763 - DNA, 25 bp, Probe Sequence
agtagttatagggaagatatgggtg

SEQ ID NO: 41764 - DNA, 25 bp, Probe Sequence
tttaagttcccatttgaaattgctg

SEQ ID NO: 41765 - DNA, 25 bp, Probe Sequence
tttcaagtgcgttctttagaccaat

SEQ ID NO: 41766 - DNA, 25 bp, Probe Sequence
tagttatagggaagatatgggtgtt

SEQ ID NO: 41767 - DNA, 25 bp, Probe Sequence
cccttcaattcttcagttgtatagt

SEQ ID NO: 41768 - DNA, 25 bp, Probe Sequence
ctttcaagtgcgttctttagaccaa

SEQ ID NO: 41769 - DNA, 25 bp, Probe Sequence
ttcaagtgcgttctttagaccaatg

SEQ ID NO: 41770 - DNA, 25 bp, Probe Sequence
caactttcaagtgcgttctttagac

SEQ ID NO: 41771 - DNA, 25 bp, Probe Sequence
ttaagttcccatttgaaattgctgg

SEQ ID NO: 41772 - DNA, 25 bp, Probe Sequence
agtaggaagagttcttggtggtgtc

SEQ ID NO: 41773 - DNA, 25 bp, Probe Sequence
tttgagatagtaggaagagttcttg

SEQ ID NO: 41774 - DNA, 25 bp, Probe Sequence
aactttcaagtgcgttctttagacc

SEQ ID NO: 41775 - DNA, 25 bp, Probe Sequence
tagtagttatagggaagatatgggt

SEQ ID NO: 41776 - DNA, 25 bp, Probe Sequence
ccttcaattcttcagttgtatagta

SEQ ID NO: 41777 - DNA, 25 bp, Probe Sequence
aaaggatttaagttgcactgacaaa

SEQ ID NO: 41778 - DNA, 25 bp, Probe Sequence
tgctatctgtgttatgactcaatgt

SEQ ID NO: 41779 - DNA, 25 bp, Probe Sequence
tctgtgttatgactcaatgtggatt

SEQ ID NO: 41780 - DNA, 25 bp, Probe Sequence
gctatctgtgttatgactcaatgtg

SEQ ID NO: 41781 - DNA, 25 bp, Probe Sequence
atctgtgttatgactcaatgtggat

SEQ ID NO: 41782 - DNA, 25 bp, Probe Sequence
tatctgtgttatgactcaatgtgga

SEQ ID NO: 41783 - DNA, 25 bp, Probe Sequence
tatgattaggtgacgagttgacatt

SEQ ID NO: 41784 - DNA, 25 bp, Probe Sequence
ttatgattaggtgacgagttgacat

SEQ ID NO: 41785 - DNA, 25 bp, Probe Sequence
ctatctgtgttatgactcaatgtgg

SEQ ID NO: 41786 - DNA, 25 bp, Probe Sequence
atgattaggtgacgagttgacattg

SEQ ID NO: 41787 - DNA, 25 bp, Probe Sequence
gattaggtgacgagttgacattgag

SEQ ID NO: 41788 - DNA, 25 bp, Probe Sequence
ttgctatctgtgttatgactcaatg

SEQ ID NO: 41789 - DNA, 25 bp, Probe Sequence
taggtgacgagttgacattgagatt

SEQ ID NO: 41790 - DNA, 25 bp, Probe Sequence
ttaggtgacgagttgacattgagat

SEQ ID NO: 41791 - DNA, 25 bp, Probe Sequence
attaggtgacgagttgacattgaga

SEQ ID NO: 41792 - DNA, 25 bp, Probe Sequence
taagagcattggaagtagttacaac

SEQ ID NO: 41793 - DNA, 25 bp, Probe Sequence
tcttaacaatgattctacttcctgg

SEQ ID NO: 41794 - DNA, 25 bp, Probe Sequence
ctggttatctgaagactgtcctgaa

SEQ ID NO: 41795 - DNA, 25 bp, Probe Sequence
tgattaggtgacgagttgacattga

SEQ ID NO: 41796 - DNA, 25 bp, Probe Sequence
gcattggaagtagttacaactcaag

SEQ ID NO: 41797 - DNA, 25 bp, Probe Sequence
aagagcattggaagtagttacaact

SEQ ID NO: 41798 - DNA, 25 bp, Probe Sequence
tggaagtagttacaactcaaggatt

SEQ ID NO: 41799 - DNA, 25 bp, Probe Sequence
ttggaagtagttacaactcaaggat

SEQ ID NO: 41800 - DNA, 25 bp, Probe Sequence
attggaagtagttacaactcaagga

SEQ ID NO: 41801 - DNA, 25 bp, Probe Sequence
cattggaagtagttacaactcaagg

SEQ ID NO: 41802 - DNA, 25 bp, Probe Sequence
gagaatgatgaatgaccaactgatg

SEQ ID NO: 41803 - DNA, 25 bp, Probe Sequence
tgagaatgatgaatgaccaactgat

SEQ ID NO: 41804 - DNA, 25 bp, Probe Sequence
tattattggcagacattgttgaagg

SEQ ID NO: 41805 - DNA, 25 bp, Probe Sequence
gtgagaatgatgaatgaccaactga

SEQ ID NO: 41806 - DNA, 25 bp, Probe Sequence
gtattatagaaggtctcaagtggct

SEQ ID NO: 41807 - DNA, 25 bp, Probe Sequence
agtattatagaaggtctcaagtggc

SEQ ID NO: 41808 - DNA, 25 bp, Probe Sequence
attattggcagacattgttgaagga

SEQ ID NO: 41809 - DNA, 25 bp, Probe Sequence
ttattggcagacattgttgaaggaa

SEQ ID NO: 41810 - DNA, 25 bp, Probe Sequence
aattacgaggagcactggtatatga

SEQ ID NO: 41811 - DNA, 25 bp, Probe Sequence
caattacgaggagcactggtatatg

SEQ ID NO: 41812 - DNA, 25 bp, Probe Sequence
tcaattacgaggagcactggtatat

SEQ ID NO: 41813 - DNA, 25 bp, Probe Sequence
acaatagactacttactactcagca

SEQ ID NO: 41814 - DNA, 25 bp, Probe Sequence
attacgaggagcactggtatatgag

SEQ ID NO: 41815 - DNA, 25 bp, Probe Sequence
aatgatgaatgaccaactgatgctc

SEQ ID NO: 41816 - DNA, 25 bp, Probe Sequence
gaatgatgaatgaccaactgatgct

SEQ ID NO: 41817 - DNA, 25 bp, Probe Sequence
agaatgatgaatgaccaactgatgc

SEQ ID NO: 41818 - DNA, 25 bp, Probe Sequence
cacaatagactacttactactcagc

SEQ ID NO: 41819 - DNA, 25 bp, Probe Sequence
attatagaaggtctcaagtggctag

SEQ ID NO: 41820 - DNA, 25 bp, Probe Sequence
agtgagaatgatgaatgaccaactg

SEQ ID NO: 41821 - DNA, 25 bp, Probe Sequence
cagtgagaatgatgaatgaccaact

SEQ ID NO: 41822 - DNA, 25 bp, Probe Sequence
tattatagaaggtctcaagtggcta

SEQ ID NO: 41823 - DNA, 25 bp, Probe Sequence
atattattggcagacattgttgaag

SEQ ID NO: 41824 - DNA, 25 bp, Probe Sequence
caatagactacttactactcagcaa

SEQ ID NO: 41825 - DNA, 25 bp, Probe Sequence
ttcctggaatctatgatgctatctt

SEQ ID NO: 41826 - DNA, 25 bp, Probe Sequence
ctatatctccgactatgccttcttg

SEQ ID NO: 41827 - DNA, 25 bp, Probe Sequence
cctatatctccgactatgccttctt

SEQ ID NO: 41828 - DNA, 25 bp, Probe Sequence
tatatctccgactatgccttcttgg

SEQ ID NO: 41829 - DNA, 25 bp, Probe Sequence
agaccctcattgaccagtatttaag

SEQ ID NO: 41830 - DNA, 25 bp, Probe Sequence
acatccaataaagagactgatacca

SEQ ID NO: 41831 - DNA, 25 bp, Probe Sequence
ctcattgaccagtatttaagggacc

SEQ ID NO: 41832 - DNA, 25 bp, Probe Sequence
cacatccaataaagagactgatacc

SEQ ID NO: 41833 - DNA, 25 bp, Probe Sequence
gcctatatctccgactatgccttct

SEQ ID NO: 41834 - DNA, 25 bp, Probe Sequence
ctgaccactggatgctctatgaatg

SEQ ID NO: 41835 - DNA, 25 bp, Probe Sequence
gagaccctcattgaccagtatttaa

SEQ ID NO: 41836 - DNA, 25 bp, Probe Sequence
cctcacatccaataaagagactgat

SEQ ID NO: 41837 - DNA, 25 bp, Probe Sequence
catccaataaagagactgataccaa

SEQ ID NO: 41838 - DNA, 25 bp, Probe Sequence
atccaataaagagactgataccaaa

SEQ ID NO: 41839 - DNA, 25 bp, Probe Sequence
ccctcacatccaataaagagactga

SEQ ID NO: 41840 - DNA, 25 bp, Probe Sequence
cctcattgaccagtatttaagggac

SEQ ID NO: 41841 - DNA, 25 bp, Probe Sequence
gaccctcattgaccagtatttaagg

SEQ ID NO: 41842 - DNA, 25 bp, Probe Sequence
tcacatccaataaagagactgatac

SEQ ID NO: 41843 - DNA, 25 bp, Probe Sequence
tcattgaccagtatttaagggaccc

SEQ ID NO: 41844 - DNA, 25 bp, Probe Sequence
ctcacatccaataaagagactgata

SEQ ID NO: 41845 - DNA, 25 bp, Probe Sequence
attgagatcaagccagtaaacccat

SEQ ID NO: 41846 - DNA, 25 bp, Probe Sequence
gatctcttcagaggaaggcattact

SEQ ID NO: 41847 - DNA, 25 bp, Probe Sequence
atctcttcagaggaaggcattactg

SEQ ID NO: 41848 - DNA, 25 bp, Probe Sequence
cgcctatatctccgactatgccttc

SEQ ID NO: 41849 - DNA, 25 bp, Probe Sequence
attgaccagtatttaagggacccta

SEQ ID NO: 41850 - DNA, 25 bp, Probe Sequence
tacttaggtgtcttaacgtggattg

SEQ ID NO: 41851 - DNA, 25 bp, Probe Sequence
gtacttaggtgtcttaacgtggatt

SEQ ID NO: 41852 - DNA, 25 bp, Probe Sequence
ggactccgtacttaggtgtcttaac

SEQ ID NO: 41853 - DNA, 25 bp, Probe Sequence
aggactccgtacttaggtgtcttaa

SEQ ID NO: 41854 - DNA, 25 bp, Probe Sequence
atgattcaggttgtaccattacatg

SEQ ID NO: 41855 - DNA, 25 bp, Probe Sequence
catgattcaggttgtaccattacat

SEQ ID NO: 41856 - DNA, 25 bp, Probe Sequence
gaggactccgtacttaggtgtctta

SEQ ID NO: 41857 - DNA, 25 bp, Probe Sequence
acttaggtgtcttaacgtggattgg

SEQ ID NO: 41858 - DNA, 25 bp, Probe Sequence
attcccatgtttgatgactttccac

SEQ ID NO: 41859 - DNA, 25 bp, Probe Sequence
cattcccatgtttgatgactttcca

SEQ ID NO: 41860 - DNA, 25 bp, Probe Sequence
taatatttacctggaggactccgta

SEQ ID NO: 41861 - DNA, 25 bp, Probe Sequence
gtgtaatatttacctggaggactcc

SEQ ID NO: 41862 - DNA, 25 bp, Probe Sequence
gactccgtacttaggtgtcttaacg

SEQ ID NO: 41863 - DNA, 25 bp, Probe Sequence
ggaacaagccaaaagaggattattt

SEQ ID NO: 41864 - DNA, 25 bp, Probe Sequence
cctttccttcactgatttgctttta

SEQ ID NO: 41865 - DNA, 25 bp, Probe Sequence
aatatttacctggaggactccgtac

SEQ ID NO: 41866 - DNA, 25 bp, Probe Sequence
gtaatatttacctggaggactccgt

SEQ ID NO: 41867 - DNA, 25 bp, Probe Sequence
tgtaatatttacctggaggactccg

SEQ ID NO: 41868 - DNA, 25 bp, Probe Sequence
tcctttccttcactgatttgctttt

SEQ ID NO: 41869 - DNA, 25 bp, Probe Sequence
ctttccttcactgatttgcttttaa

SEQ ID NO: 41870 - DNA, 25 bp, Probe Sequence
gacattcccatgtttgatgactttc

SEQ ID NO: 41871 - DNA, 25 bp, Probe Sequence
cgtacttaggtgtcttaacgtggat

SEQ ID NO: 41872 - DNA, 25 bp, Probe Sequence
atatttacctggaggactccgtact

SEQ ID NO: 41873 - DNA, 25 bp, Probe Sequence
atgacattcccatgtttgatgactt

SEQ ID NO: 41874 - DNA, 25 bp, Probe Sequence
acaggcagcttaagtgtgagtttag

SEQ ID NO: 41875 - DNA, 25 bp, Probe Sequence
gacaggcagcttaagtgtgagttta

SEQ ID NO: 41876 - DNA, 25 bp, Probe Sequence
atcaagaattgcctggctgttgaag

SEQ ID NO: 41877 - DNA, 25 bp, Probe Sequence
gatcaagaattgcctggctgttgaa

SEQ ID NO: 41878 - DNA, 25 bp, Probe Sequence
ctcttggttgatcctcttgtactgg

SEQ ID NO: 41879 - DNA, 25 bp, Probe Sequence
cctcttggttgatcctcttgtactg

SEQ ID NO: 41880 - DNA, 25 bp, Probe Sequence
acctcttggttgatcctcttgtact

SEQ ID NO: 41881 - DNA, 25 bp, Probe Sequence
cacctcttggttgatcctcttgtac

SEQ ID NO: 41882 - DNA, 25 bp, Probe Sequence
tcacctcttggttgatcctcttgta

SEQ ID NO: 41883 - DNA, 25 bp, Probe Sequence
ctccatccttcctctgttccttctg

SEQ ID NO: 41884 - DNA, 25 bp, Probe Sequence
ctgaccatgagactttgctgagaag

SEQ ID NO: 41885 - DNA, 25 bp, Probe Sequence
ctcacctcttggttgatcctcttgt

SEQ ID NO: 41886 - DNA, 25 bp, Probe Sequence
ggtgccttttgtatccccaattaaa

SEQ ID NO: 41887 - DNA, 25 bp, Probe Sequence
tcttggttgatcctcttgtactggg

SEQ ID NO: 41888 - DNA, 25 bp, Probe Sequence
cctccatccttcctctgttccttct

SEQ ID NO: 41889 - DNA, 25 bp, Probe Sequence
tgtatccccaattaaaggtagaaaa

SEQ ID NO: 41890 - DNA, 25 bp, Probe Sequence
gtatccccaattaaaggtagaaaac

SEQ ID NO: 41891 - DNA, 25 bp, Probe Sequence
caattaaaggtagaaaaccaccctg

SEQ ID NO: 41892 - DNA, 25 bp, Probe Sequence
atccccaattaaaggtagaaaacca

SEQ ID NO: 41893 - DNA, 25 bp, Probe Sequence
ttgtatccccaattaaaggtagaaa

SEQ ID NO: 41894 - DNA, 25 bp, Probe Sequence
tttgtatccccaattaaaggtagaa

SEQ ID NO: 41895 - DNA, 25 bp, Probe Sequence
ttttgtatccccaattaaaggtaga

SEQ ID NO: 41896 - DNA, 25 bp, Probe Sequence
ccaattaaaggtagaaaaccaccct

SEQ ID NO: 41897 - DNA, 25 bp, Probe Sequence
tccccaattaaaggtagaaaaccac

SEQ ID NO: 41898 - DNA, 25 bp, Probe Sequence
aggtgccttttgtatccccaattaa

SEQ ID NO: 41899 - DNA, 25 bp, Probe Sequence
aattaaaggtagaaaaccaccctgc

SEQ ID NO: 41900 - DNA, 25 bp, Probe Sequence
gtgccttttgtatccccaattaaag

SEQ ID NO: 41901 - DNA, 25 bp, Probe Sequence
tatccccaattaaaggtagaaaacc

SEQ ID NO: 41902 - DNA, 25 bp, Probe Sequence
aatgaagatggagaagaagaactgg

SEQ ID NO: 41903 - DNA, 25 bp, Probe Sequence
cgagacaatacacattccaactatg

SEQ ID NO: 41904 - DNA, 25 bp, Probe Sequence
gcgagacaatacacattccaactat

SEQ ID NO: 41905 - DNA, 25 bp, Probe Sequence
atgaagatggagaagaagaactggc

SEQ ID NO: 41906 - DNA, 25 bp, Probe Sequence
gagacaatacacattccaactatgg

SEQ ID NO: 41907 - DNA, 25 bp, Probe Sequence
gaagatggagaagaagaactggcaa

SEQ ID NO: 41908 - DNA, 25 bp, Probe Sequence
ggcgagacaatacacattccaacta

SEQ ID NO: 41909 - DNA, 25 bp, Probe Sequence
aagatggagaagaagaactggcaac

SEQ ID NO: 41910 - DNA, 25 bp, Probe Sequence
actggataaatgaagatggagaaga

SEQ ID NO: 41911 - DNA, 25 bp, Probe Sequence
cgcatcttgagcaaattaactgata

SEQ ID NO: 41912 - DNA, 25 bp, Probe Sequence
aaatgaagatggagaagaagaactg

SEQ ID NO: 41913 - DNA, 25 bp, Probe Sequence
tacaaaggcgagacaatacacattc

SEQ ID NO: 41914 - DNA, 25 bp, Probe Sequence
actgaagtgggaactatgaatcttt

SEQ ID NO: 41915 - DNA, 25 bp, Probe Sequence
ggtgaatttaaggtgtcagagagat

SEQ ID NO: 41916 - DNA, 25 bp, Probe Sequence
tggataaatgaagatggagaagaag

SEQ ID NO: 41917 - DNA, 25 bp, Probe Sequence
ctggataaatgaagatggagaagaa

SEQ ID NO: 41918 - DNA, 25 bp, Probe Sequence
ggataaatgaagatggagaagaaga

SEQ ID NO: 41919 - DNA, 25 bp, Probe Sequence
ttgtttgcccagtttctgatatact

SEQ ID NO: 41920 - DNA, 25 bp, Probe Sequence
gttgtttgcccagtttctgatatac

SEQ ID NO: 41921 - DNA, 25 bp, Probe Sequence
tactggataaatgaagatggagaag

SEQ ID NO: 41922 - DNA, 25 bp, Probe Sequence
aaggcgagacaatacacattccaac

SEQ ID NO: 41923 - DNA, 25 bp, Probe Sequence
tgttgtttgcccagtttctgatata

SEQ ID NO: 41924 - DNA, 25 bp, Probe Sequence
catcattcttccaggagtgacaagg

SEQ ID NO: 41925 - DNA, 25 bp, Probe Sequence
gcatcttgagcaaattaactgatat

SEQ ID NO: 41926 - DNA, 25 bp, Probe Sequence
gactcttcacacattctacactcag

SEQ ID NO: 41927 - DNA, 25 bp, Probe Sequence
agactcttcacacattctacactca

SEQ ID NO: 41928 - DNA, 25 bp, Probe Sequence
gagactcttcacacattctacactc

SEQ ID NO: 41929 - DNA, 25 bp, Probe Sequence
ggagactcttcacacattctacact

SEQ ID NO: 41930 - DNA, 25 bp, Probe Sequence
actcttcacacattctacactcagc

SEQ ID NO: 41931 - DNA, 25 bp, Probe Sequence
aactgacatcatcctatggactgag

SEQ ID NO: 41932 - DNA, 25 bp, Probe Sequence
cctattctgaatccctgatgacatc

SEQ ID NO: 41933 - DNA, 25 bp, Probe Sequence
ctcttcacacattctacactcagct

SEQ ID NO: 41934 - DNA, 25 bp, Probe Sequence
agcctaaactgacatcatcctatgg

SEQ ID NO: 41935 - DNA, 25 bp, Probe Sequence
cagcctaaactgacatcatcctatg

SEQ ID NO: 41936 - DNA, 25 bp, Probe Sequence
cattggacaaactgggaagattgag

SEQ ID NO: 41937 - DNA, 25 bp, Probe Sequence
taaactgacatcatcctatggactg

SEQ ID NO: 41938 - DNA, 25 bp, Probe Sequence
ctaaactgacatcatcctatggact

SEQ ID NO: 41939 - DNA, 25 bp, Probe Sequence
cctaaactgacatcatcctatggac

SEQ ID NO: 41940 - DNA, 25 bp, Probe Sequence
gcctattctgaatccctgatgacat

SEQ ID NO: 41941 - DNA, 25 bp, Probe Sequence
aaactgacatcatcctatggactga

SEQ ID NO: 41942 - DNA, 25 bp, Probe Sequence
ccagcctaaactgacatcatcctat

SEQ ID NO: 41943 - DNA, 25 bp, Probe Sequence
gggagactcttcacacattctacac

SEQ ID NO: 41944 - DNA, 25 bp, Probe Sequence
gcctaaactgacatcatcctatgga

SEQ ID NO: 41945 - DNA, 25 bp, Probe Sequence
ggagccaagagaaatgctatttatt

SEQ ID NO: 41946 - DNA, 25 bp, Probe Sequence
actgacatcatcctatggactgagc

SEQ ID NO: 41947 - DNA, 25 bp, Probe Sequence
tccagcctaaactgacatcatccta

SEQ ID NO: 41948 - DNA, 25 bp, Probe Sequence
cggagccaagagaaatgctatttat

SEQ ID NO: 41949 - DNA, 25 bp, Probe Sequence
ctgtgacccttttctactggaatag

SEQ ID NO: 41950 - DNA, 25 bp, Probe Sequence
aacttctaaccgcaatagtgactct

SEQ ID NO: 41951 - DNA, 25 bp, Probe Sequence
caacttctaaccgcaatagtgactc

SEQ ID NO: 41952 - DNA, 25 bp, Probe Sequence
cttctaaccgcaatagtgactctgt

SEQ ID NO: 41953 - DNA, 25 bp, Probe Sequence
ttctaaccgcaatagtgactctgtg

SEQ ID NO: 41954 - DNA, 25 bp, Probe Sequence
acttctaaccgcaatagtgactctg

SEQ ID NO: 41955 - DNA, 25 bp, Probe Sequence
tgcttgtctgtttagttctgtgtat

SEQ ID NO: 41956 - DNA, 25 bp, Probe Sequence
ataaatggaatgttgtggagatgac

SEQ ID NO: 41957 - DNA, 25 bp, Probe Sequence
tgtgtataaatggaatgttgtggag

SEQ ID NO: 41958 - DNA, 25 bp, Probe Sequence
ctgtgtataaatggaatgttgtgga

SEQ ID NO: 41959 - DNA, 25 bp, Probe Sequence
tctgtgtataaatggaatgttgtgg

SEQ ID NO: 41960 - DNA, 25 bp, Probe Sequence
gtgtataaatggaatgttgtggaga

SEQ ID NO: 41961 - DNA, 25 bp, Probe Sequence
aatagtgactctgtgcttgtctgtt

SEQ ID NO: 41962 - DNA, 25 bp, Probe Sequence
taaatggaatgttgtggagatgacc

SEQ ID NO: 41963 - DNA, 25 bp, Probe Sequence
gcttgtctgtttagttctgtgtata

SEQ ID NO: 41964 - DNA, 25 bp, Probe Sequence
gtgcttgtctgtttagttctgtgta

SEQ ID NO: 41965 - DNA, 25 bp, Probe Sequence
ccaacttctaaccgcaatagtgact

SEQ ID NO: 41966 - DNA, 25 bp, Probe Sequence
tgtataaatggaatgttgtggagat

SEQ ID NO: 41967 - DNA, 25 bp, Probe Sequence
ctctgtgcttgtctgtttagttctg

SEQ ID NO: 41968 - DNA, 25 bp, Probe Sequence
caatagtgactctgtgcttgtctgt

SEQ ID NO: 41969 - DNA, 25 bp, Probe Sequence
tataaatggaatgttgtggagatga

SEQ ID NO: 41970 - DNA, 25 bp, Probe Sequence
gtataaatggaatgttgtggagatg

SEQ ID NO: 41971 - DNA, 25 bp, Probe Sequence
ctgtgcttgtctgtttagttctgtg

SEQ ID NO: 41972 - DNA, 25 bp, Probe Sequence
tctgtgcttgtctgtttagttctgt

SEQ ID NO: 41973 - DNA, 25 bp, Probe Sequence
ttctgtgtataaatggaatgttgtg

SEQ ID NO: 41974 - DNA, 25 bp, Probe Sequence
gtcttcatcatcttacctgtgcttg

SEQ ID NO: 41975 - DNA, 25 bp, Probe Sequence
tgtcttcatcatcttacctgtgctt

SEQ ID NO: 41976 - DNA, 25 bp, Probe Sequence
ttgctgtcttcatcatcttacctgt

SEQ ID NO: 41977 - DNA, 25 bp, Probe Sequence
ctatcacatcacaagataatgctgg

SEQ ID NO: 41978 - DNA, 25 bp, Probe Sequence
tatcacatcacaagataatgctggc

SEQ ID NO: 41979 - DNA, 25 bp, Probe Sequence
ctgtcttcatcatcttacctgtgct

SEQ ID NO: 41980 - DNA, 25 bp, Probe Sequence
tcttcatcatcttacctgtgcttgg

SEQ ID NO: 41981 - DNA, 25 bp, Probe Sequence
tgctgtcttcatcatcttacctgtg

SEQ ID NO: 41982 - DNA, 25 bp, Probe Sequence
atcacatcacaagataatgctggct

SEQ ID NO: 41983 - DNA, 25 bp, Probe Sequence
tttgctgtcttcatcatcttacctg

SEQ ID NO: 41984 - DNA, 25 bp, Probe Sequence
accaactctttgtataacctacctg

SEQ ID NO: 41985 - DNA, 25 bp, Probe Sequence
ccaactctttgtataacctacctga

SEQ ID NO: 41986 - DNA, 25 bp, Probe Sequence
gaccaactctttgtataacctacct

SEQ ID NO: 41987 - DNA, 25 bp, Probe Sequence
ggaccaactctttgtataacctacc

SEQ ID NO: 41988 - DNA, 25 bp, Probe Sequence
gggaccaactctttgtataacctac

SEQ ID NO: 41989 - DNA, 25 bp, Probe Sequence
agaggaagttaagggagagtcaatg

SEQ ID NO: 41990 - DNA, 25 bp, Probe Sequence
cagaggaagttaagggagagtcaat

SEQ ID NO: 41991 - DNA, 25 bp, Probe Sequence
tcacatcacaagataatgctggctc

SEQ ID NO: 41992 - DNA, 25 bp, Probe Sequence
ctctttgtataacctacctgaatgt

SEQ ID NO: 41993 - DNA, 25 bp, Probe Sequence
actctttgtataacctacctgaatg

SEQ ID NO: 41994 - DNA, 25 bp, Probe Sequence
caactctttgtataacctacctgaa

SEQ ID NO: 41995 - DNA, 25 bp, Probe Sequence
cgggaccaactctttgtataaccta

SEQ ID NO: 41996 - DNA, 25 bp, Probe Sequence
gctgtcttcatcatcttacctgtgc

SEQ ID NO: 41997 - DNA, 25 bp, Probe Sequence
catcacaagataatgctggctccaa

SEQ ID NO: 41998 - DNA, 25 bp, Probe Sequence
ctgctgtgatatggaggaagaagag

SEQ ID NO: 41999 - DNA, 25 bp, Probe Sequence
aatgtgaggaggtagagaaacagtc

SEQ ID NO: 42000 - DNA, 25 bp, Probe Sequence
ctgaatctgtctgtgtccctgttag

SEQ ID NO: 42001 - DNA, 25 bp, Probe Sequence
caatgtgaggaggtagagaaacagt

SEQ ID NO: 42002 - DNA, 25 bp, Probe Sequence
acaatgtgaggaggtagagaaacag

SEQ ID NO: 42003 - DNA, 25 bp, Probe Sequence
ttgctgctgtgatatggaggaagaa

SEQ ID NO: 42004 - DNA, 25 bp, Probe Sequence
tctgaatctgtctgtgtccctgtta

SEQ ID NO: 42005 - DNA, 25 bp, Probe Sequence
gttagcacaatgtgaggaggtagag

SEQ ID NO: 42006 - DNA, 25 bp, Probe Sequence
tagcacaatgtgaggaggtagagaa

SEQ ID NO: 42007 - DNA, 25 bp, Probe Sequence
ttagcacaatgtgaggaggtagaga

SEQ ID NO: 42008 - DNA, 25 bp, Probe Sequence
ctgttagcacaatgtgaggaggtag

SEQ ID NO: 42009 - DNA, 25 bp, Probe Sequence
gctgctgtgatatggaggaagaaga

SEQ ID NO: 42010 - DNA, 25 bp, Probe Sequence
gcaaggattatctcaccctgaatga

SEQ ID NO: 42011 - DNA, 25 bp, Probe Sequence
tgctgctgtgatatggaggaagaag

SEQ ID NO: 42012 - DNA, 25 bp, Probe Sequence
tgttagcacaatgtgaggaggtaga

SEQ ID NO: 42013 - DNA, 25 bp, Probe Sequence
gttccttccctgttctcttttctat

SEQ ID NO: 42014 - DNA, 25 bp, Probe Sequence
ttccttccctgttctcttttctatt

SEQ ID NO: 42015 - DNA, 25 bp, Probe Sequence
tccttccctgttctcttttctatta

SEQ ID NO: 42016 - DNA, 25 bp, Probe Sequence
tgttccttccctgttctcttttcta

SEQ ID NO: 42017 - DNA, 25 bp, Probe Sequence
gttgctgctgtgatatggaggaaga

SEQ ID NO: 42018 - DNA, 25 bp, Probe Sequence
gttctccttggatctgtggtctctg

SEQ ID NO: 42019 - DNA, 25 bp, Probe Sequence
cacaatgtgaggaggtagagaaaca

SEQ ID NO: 42020 - DNA, 25 bp, Probe Sequence
ctacgacggcaaggattatctcacc

SEQ ID NO: 42021 - DNA, 25 bp, Probe Sequence
ccttccctgttctcttttctattaa

SEQ ID NO: 42022 - DNA, 25 bp, Probe Sequence
ttgataactgtgtacttctggtgac

SEQ ID NO: 42023 - DNA, 25 bp, Probe Sequence
taactgtgtacttctggtgactgta

SEQ ID NO: 42024 - DNA, 25 bp, Probe Sequence
gataactgtgtacttctggtgactg

SEQ ID NO: 42025 - DNA, 25 bp, Probe Sequence
tgataactgtgtacttctggtgact

SEQ ID NO: 42026 - DNA, 25 bp, Probe Sequence
ataactgtgtacttctggtgactgt

SEQ ID NO: 42027 - DNA, 25 bp, Probe Sequence
attgaagaagggagtttgaaagttg

SEQ ID NO: 42028 - DNA, 25 bp, Probe Sequence
cattgaagaagggagtttgaaagtt

SEQ ID NO: 42029 - DNA, 25 bp, Probe Sequence
gaagggagtttgaaagttgttgtat

SEQ ID NO: 42030 - DNA, 25 bp, Probe Sequence
aatgtcaaccctcactctaaacttt

SEQ ID NO: 42031 - DNA, 25 bp, Probe Sequence
aaatgtcaaccctcactctaaactt

SEQ ID NO: 42032 - DNA, 25 bp, Probe Sequence
agaagggagtttgaaagttgttgta

SEQ ID NO: 42033 - DNA, 25 bp, Probe Sequence
taagggagataaagcaaaggtgaag

SEQ ID NO: 42034 - DNA, 25 bp, Probe Sequence
ctaagggagataaagcaaaggtgaa

SEQ ID NO: 42035 - DNA, 25 bp, Probe Sequence
ctttcagcatagacttaactccctt

SEQ ID NO: 42036 - DNA, 25 bp, Probe Sequence
gaagaagggagtttgaaagttgttg

SEQ ID NO: 42037 - DNA, 25 bp, Probe Sequence
atgtcaaccctcactctaaactttc

SEQ ID NO: 42038 - DNA, 25 bp, Probe Sequence
gaaatgtcaaccctcactctaaact

SEQ ID NO: 42039 - DNA, 25 bp, Probe Sequence
tgaagaagggagtttgaaagttgtt

SEQ ID NO: 42040 - DNA, 25 bp, Probe Sequence
ttgaagaagggagtttgaaagttgt

SEQ ID NO: 42041 - DNA, 25 bp, Probe Sequence
tttcagcatagacttaactccctta

SEQ ID NO: 42042 - DNA, 25 bp, Probe Sequence
atctttcagcatagacttaactccc

SEQ ID NO: 42043 - DNA, 25 bp, Probe Sequence
aagaagggagtttgaaagttgttgt

SEQ ID NO: 42044 - DNA, 25 bp, Probe Sequence
gtcactaatagaatgtctccaaagc

SEQ ID NO: 42045 - DNA, 25 bp, Probe Sequence
tccatctttcagcatagacttaact

SEQ ID NO: 42046 - DNA, 25 bp, Probe Sequence
gagttcttcttcagcgtctacatta

SEQ ID NO: 42047 - DNA, 25 bp, Probe Sequence
agttcttcttcagcgtctacattaa

SEQ ID NO: 42048 - DNA, 25 bp, Probe Sequence
tcttcttcagcgtctacattaacaa

SEQ ID NO: 42049 - DNA, 25 bp, Probe Sequence
ttcttcttcagcgtctacattaaca

SEQ ID NO: 42050 - DNA, 25 bp, Probe Sequence
gttcttcttcagcgtctacattaac

SEQ ID NO: 42051 - DNA, 25 bp, Probe Sequence
ctataccaagtaccagatccgagag

SEQ ID NO: 42052 - DNA, 25 bp, Probe Sequence
ggagttcttcttcagcgtctacatt

SEQ ID NO: 42053 - DNA, 25 bp, Probe Sequence
cttcttcagcgtctacattaacaaa

SEQ ID NO: 42054 - DNA, 25 bp, Probe Sequence
cctataccaagtaccagatccgaga

SEQ ID NO: 42055 - DNA, 25 bp, Probe Sequence
ttcttcagcgtctacattaacaaag

SEQ ID NO: 42056 - DNA, 25 bp, Probe Sequence
cagcgtctacattaacaaagagaag

SEQ ID NO: 42057 - DNA, 25 bp, Probe Sequence
cttcagcgtctacattaacaaagag

SEQ ID NO: 42058 - DNA, 25 bp, Probe Sequence
tcagcgtctacattaacaaagagaa

SEQ ID NO: 42059 - DNA, 25 bp, Probe Sequence
ttcagcgtctacattaacaaagaga

SEQ ID NO: 42060 - DNA, 25 bp, Probe Sequence
ctactcagcaaatccactcctctaa

SEQ ID NO: 42061 - DNA, 25 bp, Probe Sequence
tataccaagtaccagatccgagagc

SEQ ID NO: 42062 - DNA, 25 bp, Probe Sequence
agcgtctacattaacaaagagaagc

SEQ ID NO: 42063 - DNA, 25 bp, Probe Sequence
aattaacagagaccgtttacagtac

SEQ ID NO: 42064 - DNA, 25 bp, Probe Sequence
aaattaacagagaccgtttacagta

SEQ ID NO: 42065 - DNA, 25 bp, Probe Sequence
actactcagcaaatccactcctcta

SEQ ID NO: 42066 - DNA, 25 bp, Probe Sequence
tactactcagcaaatccactcctct

SEQ ID NO: 42067 - DNA, 25 bp, Probe Sequence
gcgtctacattaacaaagagaagcg

SEQ ID NO: 42068 - DNA, 25 bp, Probe Sequence
gtactactcagcaaatccactcctc

SEQ ID NO: 42069 - DNA, 25 bp, Probe Sequence
cagtctcgtccaatttctatagcac

SEQ ID NO: 42070 - DNA, 25 bp, Probe Sequence
atctaagaatgaatacctgtctgcc

SEQ ID NO: 42071 - DNA, 25 bp, Probe Sequence
ctaagaatgaatacctgtctgccat

SEQ ID NO: 42072 - DNA, 25 bp, Probe Sequence
catctaagaatgaatacctgtctgc

SEQ ID NO: 42073 - DNA, 25 bp, Probe Sequence
tctaagaatgaatacctgtctgcca

SEQ ID NO: 42074 - DNA, 25 bp, Probe Sequence
ccaatctgagccttgtatctcttaa

SEQ ID NO: 42075 - DNA, 25 bp, Probe Sequence
ggcatagaccataccagacctaatt

SEQ ID NO: 42076 - DNA, 25 bp, Probe Sequence
accaatctgagccttgtatctctta

SEQ ID NO: 42077 - DNA, 25 bp, Probe Sequence
taagaatgaatacctgtctgccatg

SEQ ID NO: 42078 - DNA, 25 bp, Probe Sequence
aaccaatctgagccttgtatctctt

SEQ ID NO: 42079 - DNA, 25 bp, Probe Sequence
agaatgaatacctgtctgccatgta

SEQ ID NO: 42080 - DNA, 25 bp, Probe Sequence
gaatgaatacctgtctgccatgtat

SEQ ID NO: 42081 - DNA, 25 bp, Probe Sequence
atagaccataccagacctaatttgc

SEQ ID NO: 42082 - DNA, 25 bp, Probe Sequence
gcatagaccataccagacctaattt

SEQ ID NO: 42083 - DNA, 25 bp, Probe Sequence
tattccttctaacgtgtgagatgtc

SEQ ID NO: 42084 - DNA, 25 bp, Probe Sequence
ttattccttctaacgtgtgagatgt

SEQ ID NO: 42085 - DNA, 25 bp, Probe Sequence
tagtcaatgatattggtgagcacaa

SEQ ID NO: 42086 - DNA, 25 bp, Probe Sequence
ttctagtcaatgatattggtgagca

SEQ ID NO: 42087 - DNA, 25 bp, Probe Sequence
caatgatattggtgagcacaatgta

SEQ ID NO: 42088 - DNA, 25 bp, Probe Sequence
tctagtcaatgatattggtgagcac

SEQ ID NO: 42089 - DNA, 25 bp, Probe Sequence
gatattggtgagcacaatgtattca

SEQ ID NO: 42090 - DNA, 25 bp, Probe Sequence
tgatattggtgagcacaatgtattc

SEQ ID NO: 42091 - DNA, 25 bp, Probe Sequence
ctagtcaatgatattggtgagcaca

SEQ ID NO: 42092 - DNA, 25 bp, Probe Sequence
aagaatgaatacctgtctgccatgt

SEQ ID NO: 42093 - DNA, 25 bp, Probe Sequence
gtcaatgatattggtgagcacaatg

SEQ ID NO: 42094 - DNA, 25 bp, Probe Sequence
gatggcttccttcctcttacccttc

SEQ ID NO: 42095 - DNA, 25 bp, Probe Sequence
atccaggatggcttccttcctctta

SEQ ID NO: 42096 - DNA, 25 bp, Probe Sequence
ccatcagaagagagacaaggaatta

SEQ ID NO: 42097 - DNA, 25 bp, Probe Sequence
catcagaagagagacaaggaattaa

SEQ ID NO: 42098 - DNA, 25 bp, Probe Sequence
gccatcagaagagagacaaggaatt

SEQ ID NO: 42099 - DNA, 25 bp, Probe Sequence
agccatcagaagagagacaaggaat

SEQ ID NO: 42100 - DNA, 25 bp, Probe Sequence
gttcagccatcagaagagagacaag

SEQ ID NO: 42101 - DNA, 25 bp, Probe Sequence
atcagaagagagacaaggaattaaa

SEQ ID NO: 42102 - DNA, 25 bp, Probe Sequence
aattcttgtgtgctgctttccattt

SEQ ID NO: 42103 - DNA, 25 bp, Probe Sequence
cagccatcagaagagagacaaggaa

SEQ ID NO: 42104 - DNA, 25 bp, Probe Sequence
tgttcagccatcagaagagagacaa

SEQ ID NO: 42105 - DNA, 25 bp, Probe Sequence
ttcagccatcagaagagagacaagg

SEQ ID NO: 42106 - DNA, 25 bp, Probe Sequence
attcttgtgtgctgctttccatttg

SEQ ID NO: 42107 - DNA, 25 bp, Probe Sequence
tataactcaggcgtctttgcatttc

SEQ ID NO: 42108 - DNA, 25 bp, Probe Sequence
gtataactcaggcgtctttgcattt

SEQ ID NO: 42109 - DNA, 25 bp, Probe Sequence
ctgttcagccatcagaagagagaca

SEQ ID NO: 42110 - DNA, 25 bp, Probe Sequence
tcagccatcagaagagagacaagga

SEQ ID NO: 42111 - DNA, 25 bp, Probe Sequence
aagttgtataactcaggcgtctttg

SEQ ID NO: 42112 - DNA, 25 bp, Probe Sequence
caagttgtataactcaggcgtcttt

SEQ ID NO: 42113 - DNA, 25 bp, Probe Sequence
ttcttgtgtgctgctttccatttga

SEQ ID NO: 42114 - DNA, 25 bp, Probe Sequence
aaagatcaaggtctgcaagggaatt

SEQ ID NO: 42115 - DNA, 25 bp, Probe Sequence
catttctgcgaaagatcaaggtctg

SEQ ID NO: 42116 - DNA, 25 bp, Probe Sequence
tgtataactcaggcgtctttgcatt

SEQ ID NO: 42117 - DNA, 25 bp, Probe Sequence
ttgtataactcaggcgtctttgcat

SEQ ID NO: 42118 - DNA, 25 bp, Probe Sequence
gcaagttgtataactcaggcgtctt

SEQ ID NO: 42119 - DNA, 25 bp, Probe Sequence
tcagaagagagacaaggaattaaaa

SEQ ID NO: 42120 - DNA, 25 bp, Probe Sequence
tacaatatgagccttctgaagcatc

SEQ ID NO: 42121 - DNA, 25 bp, Probe Sequence
ctacaatatgagccttctgaagcat

SEQ ID NO: 42122 - DNA, 25 bp, Probe Sequence
tctacaatatgagccttctgaagca

SEQ ID NO: 42123 - DNA, 25 bp, Probe Sequence
ctctacaatatgagccttctgaagc

SEQ ID NO: 42124 - DNA, 25 bp, Probe Sequence
caatatgagccttctgaagcatcaa

SEQ ID NO: 42125 - DNA, 25 bp, Probe Sequence
acaatatgagccttctgaagcatca

SEQ ID NO: 42126 - DNA, 25 bp, Probe Sequence
atcaaagccttagaccagatgaaga

SEQ ID NO: 42127 - DNA, 25 bp, Probe Sequence
ctgagaaggtgacagagttcatgtt

SEQ ID NO: 42128 - DNA, 25 bp, Probe Sequence
aaagccttagaccagatgaagactc

SEQ ID NO: 42129 - DNA, 25 bp, Probe Sequence
aatatgagccttctgaagcatcaaa

SEQ ID NO: 42130 - DNA, 25 bp, Probe Sequence
aagccttagaccagatgaagactcc

SEQ ID NO: 42131 - DNA, 25 bp, Probe Sequence
gagaaggtgacagagttcatgttgt

SEQ ID NO: 42132 - DNA, 25 bp, Probe Sequence
tgagaaggtgacagagttcatgttg

SEQ ID NO: 42133 - DNA, 25 bp, Probe Sequence
caaagccttagaccagatgaagact

SEQ ID NO: 42134 - DNA, 25 bp, Probe Sequence
atatgagccttctgaagcatcaaag

SEQ ID NO: 42135 - DNA, 25 bp, Probe Sequence
agaaggtgacagagttcatgttgtg

SEQ ID NO: 42136 - DNA, 25 bp, Probe Sequence
tcaaagccttagaccagatgaagac

SEQ ID NO: 42137 - DNA, 25 bp, Probe Sequence
gaaggtgacagagttcatgttgtgt

SEQ ID NO: 42138 - DNA, 25 bp, Probe Sequence
cttctgaagcatcaaagccttagac

SEQ ID NO: 42139 - DNA, 25 bp, Probe Sequence
gaagcatcaaagccttagaccagat

SEQ ID NO: 42140 - DNA, 25 bp, Probe Sequence
aaggtgacagagttcatgttgtgtg

SEQ ID NO: 42141 - DNA, 25 bp, Probe Sequence
cttagaccagatgaagactccagcc

SEQ ID NO: 42142 - DNA, 25 bp, Probe Sequence
ccttagaccagatgaagactccagc

SEQ ID NO: 42143 - DNA, 25 bp, Probe Sequence
gccttagaccagatgaagactccag

SEQ ID NO: 42144 - DNA, 25 bp, Probe Sequence
ttcggaactaaaggagaacttcatc

SEQ ID NO: 42145 - DNA, 25 bp, Probe Sequence
cttcggaactaaaggagaacttcat

SEQ ID NO: 42146 - DNA, 25 bp, Probe Sequence
aacttcatccgcttctccaaatatc

SEQ ID NO: 42147 - DNA, 25 bp, Probe Sequence
gacttcggaactaaaggagaacttc

SEQ ID NO: 42148 - DNA, 25 bp, Probe Sequence
gaacttcatccgcttctccaaatat

SEQ ID NO: 42149 - DNA, 25 bp, Probe Sequence
cttcatccgcttctccaaatatctg

SEQ ID NO: 42150 - DNA, 25 bp, Probe Sequence
gcaacattaagagttaccctggatt

SEQ ID NO: 42151 - DNA, 25 bp, Probe Sequence
acttcatccgcttctccaaatatct

SEQ ID NO: 42152 - DNA, 25 bp, Probe Sequence
acttcggaactaaaggagaacttca

SEQ ID NO: 42153 - DNA, 25 bp, Probe Sequence
tgacttcggaactaaaggagaactt

SEQ ID NO: 42154 - DNA, 25 bp, Probe Sequence
caacattaagagttaccctggatta

SEQ ID NO: 42155 - DNA, 25 bp, Probe Sequence
aagaagtgtgactactggatcagga

SEQ ID NO: 42156 - DNA, 25 bp, Probe Sequence
ctgacttcggaactaaaggagaact

SEQ ID NO: 42157 - DNA, 25 bp, Probe Sequence
ttaccctggattaacgagttacctc

SEQ ID NO: 42158 - DNA, 25 bp, Probe Sequence
ttaagagttaccctggattaacgag

SEQ ID NO: 42159 - DNA, 25 bp, Probe Sequence
ctgaaagaagacaagagctacaatg

SEQ ID NO: 42160 - DNA, 25 bp, Probe Sequence
gagttaccctggattaacgagttac

SEQ ID NO: 42161 - DNA, 25 bp, Probe Sequence
agagttaccctggattaacgagtta

SEQ ID NO: 42162 - DNA, 25 bp, Probe Sequence
taagagttaccctggattaacgagt

SEQ ID NO: 42163 - DNA, 25 bp, Probe Sequence
cattaagagttaccctggattaacg

SEQ ID NO: 42164 - DNA, 25 bp, Probe Sequence
attaagagttaccctggattaacga

SEQ ID NO: 42165 - DNA, 25 bp, Probe Sequence
tctatgagctgaaagaagacaagag

SEQ ID NO: 42166 - DNA, 25 bp, Probe Sequence
atctatgagctgaaagaagacaaga

SEQ ID NO: 42167 - DNA, 25 bp, Probe Sequence
catctatgagctgaaagaagacaag

SEQ ID NO: 42168 - DNA, 25 bp, Probe Sequence
gatgatgtcttccttagtgttcctt

SEQ ID NO: 42169 - DNA, 25 bp, Probe Sequence
atgatgtcttccttagtgttccttg

SEQ ID NO: 42170 - DNA, 25 bp, Probe Sequence
gcaaccaactatccaagtgttatac

SEQ ID NO: 42171 - DNA, 25 bp, Probe Sequence
tcttgtgtagtcttcaactggttag

SEQ ID NO: 42172 - DNA, 25 bp, Probe Sequence
tggcagagagtataatgaagaatct

SEQ ID NO: 42173 - DNA, 25 bp, Probe Sequence
aatcttgtgtagtcttcaactggtt

SEQ ID NO: 42174 - DNA, 25 bp, Probe Sequence
accaactatccaagtgttataccaa

SEQ ID NO: 42175 - DNA, 25 bp, Probe Sequence
aaccaactatccaagtgttatacca

SEQ ID NO: 42176 - DNA, 25 bp, Probe Sequence
cttgtgtagtcttcaactggttagt

SEQ ID NO: 42177 - DNA, 25 bp, Probe Sequence
atcttgtgtagtcttcaactggtta

SEQ ID NO: 42178 - DNA, 25 bp, Probe Sequence
taatcttgtgtagtcttcaactggt

SEQ ID NO: 42179 - DNA, 25 bp, Probe Sequence
tatataacttcctggctccttcact

SEQ ID NO: 42180 - DNA, 25 bp, Probe Sequence
ccaactatccaagtgttataccaac

SEQ ID NO: 42181 - DNA, 25 bp, Probe Sequence
caaccaactatccaagtgttatacc

SEQ ID NO: 42182 - DNA, 25 bp, Probe Sequence
ttggcagagagtataatgaagaatc

SEQ ID NO: 42183 - DNA, 25 bp, Probe Sequence
cctgtatggagtggaatgaatgttg

SEQ ID NO: 42184 - DNA, 25 bp, Probe Sequence
ttgtgtagtcttcaactggttagtg

SEQ ID NO: 42185 - DNA, 25 bp, Probe Sequence
atataacttcctggctccttcactg

SEQ ID NO: 42186 - DNA, 25 bp, Probe Sequence
tgtagtcttcaactggttagtgtga

SEQ ID NO: 42187 - DNA, 25 bp, Probe Sequence
gtgtagtcttcaactggttagtgtg

SEQ ID NO: 42188 - DNA, 25 bp, Probe Sequence
ttaatcttgtgtagtcttcaactgg

SEQ ID NO: 42189 - DNA, 25 bp, Probe Sequence
gagtataatgaagaatcttaggcgg

SEQ ID NO: 42190 - DNA, 25 bp, Probe Sequence
gaatggaatctcagaccttgtgaag

SEQ ID NO: 42191 - DNA, 25 bp, Probe Sequence
caactatccaagtgttataccaact

SEQ ID NO: 42192 - DNA, 25 bp, Probe Sequence
ttcattaaagaatgtttggaacttt

SEQ ID NO: 42193 - DNA, 25 bp, Probe Sequence
tttcattaaagaatgtttggaactt

SEQ ID NO: 42194 - DNA, 25 bp, Probe Sequence
ttttcattaaagaatgtttggaact

SEQ ID NO: 42195 - DNA, 25 bp, Probe Sequence
cttttcattaaagaatgtttggaac

SEQ ID NO: 42196 - DNA, 25 bp, Probe Sequence
tcttttcattaaagaatgtttggaa

SEQ ID NO: 42197 - DNA, 25 bp, Probe Sequence
atcttttcattaaagaatgtttgga

SEQ ID NO: 42198 - DNA, 25 bp, Probe Sequence
aatcttttcattaaagaatgtttgg

SEQ ID NO: 42199 - DNA, 25 bp, Probe Sequence
gcttcttattgatagatggcattgg

SEQ ID NO: 42200 - DNA, 25 bp, Probe Sequence
ttcagacagacctcatctataacct

SEQ ID NO: 42201 - DNA, 25 bp, Probe Sequence
ctgaagaatatggtaacgaagacaa

SEQ ID NO: 42202 - DNA, 25 bp, Probe Sequence
gctctgaagaatatggtaacgaaga

SEQ ID NO: 42203 - DNA, 25 bp, Probe Sequence
tctgaagaatatggtaacgaagaca

SEQ ID NO: 42204 - DNA, 25 bp, Probe Sequence
tctgctgcttcttattgatagatgg

SEQ ID NO: 42205 - DNA, 25 bp, Probe Sequence
ccatctgctgcttcttattgataga

SEQ ID NO: 42206 - DNA, 25 bp, Probe Sequence
tcagacagacctcatctataacctc

SEQ ID NO: 42207 - DNA, 25 bp, Probe Sequence
gacagacctcatctataacctcctt

SEQ ID NO: 42208 - DNA, 25 bp, Probe Sequence
ctctgaagaatatggtaacgaagac

SEQ ID NO: 42209 - DNA, 25 bp, Probe Sequence
agacctcatctataacctccttgaa

SEQ ID NO: 42210 - DNA, 25 bp, Probe Sequence
acagacctcatctataacctccttg

SEQ ID NO: 42211 - DNA, 25 bp, Probe Sequence
gagccaaccttatcaacaacatctt

SEQ ID NO: 42212 - DNA, 25 bp, Probe Sequence
cagacctcatctataacctccttga

SEQ ID NO: 42213 - DNA, 25 bp, Probe Sequence
cttcttattgatagatggcattgga

SEQ ID NO: 42214 - DNA, 25 bp, Probe Sequence
tgaagaatatggtaacgaagacaat

SEQ ID NO: 42215 - DNA, 25 bp, Probe Sequence
tattgatagatggcattggaatgtg

SEQ ID NO: 42216 - DNA, 25 bp, Probe Sequence
agacagacctcatctataacctcct

SEQ ID NO: 42217 - DNA, 25 bp, Probe Sequence
cagacagacctcatctataacctcc

SEQ ID NO: 42218 - DNA, 25 bp, Probe Sequence
gccatctgctgcttcttattgatag

SEQ ID NO: 42219 - DNA, 25 bp, Probe Sequence
ttcttattgatagatggcattggaa

SEQ ID NO: 42220 - DNA, 25 bp, Probe Sequence
attgatagatggcattggaatgtgg

SEQ ID NO: 42221 - DNA, 25 bp, Probe Sequence
ttattgatagatggcattggaatgt

SEQ ID NO: 42222 - DNA, 25 bp, Probe Sequence
ctgctgcttcttattgatagatggc

SEQ ID NO: 42223 - DNA, 25 bp, Probe Sequence
agtgaagcatcaacctacttagaag

SEQ ID NO: 42224 - DNA, 25 bp, Probe Sequence
gagtgaagcatcaacctacttagaa

SEQ ID NO: 42225 - DNA, 25 bp, Probe Sequence
agagtgaagcatcaacctacttaga

SEQ ID NO: 42226 - DNA, 25 bp, Probe Sequence
cagagtgaagcatcaacctacttag

SEQ ID NO: 42227 - DNA, 25 bp, Probe Sequence
acagagtgaagcatcaacctactta

SEQ ID NO: 42228 - DNA, 25 bp, Probe Sequence
gtgaagcatcaacctacttagaagc

SEQ ID NO: 42229 - DNA, 25 bp, Probe Sequence
cctccttctgaacaagactgtatgt

SEQ ID NO: 42230 - DNA, 25 bp, Probe Sequence
taatagacagcaatcaaacgaagac

SEQ ID NO: 42231 - DNA, 25 bp, Probe Sequence
gacagagtgaagcatcaacctactt

SEQ ID NO: 42232 - DNA, 25 bp, Probe Sequence
aatagacagcaatcaaacgaagaca

SEQ ID NO: 42233 - DNA, 25 bp, Probe Sequence
ggaaataatagacagcaatcaaacg

SEQ ID NO: 42234 - DNA, 25 bp, Probe Sequence
acttctgtggaggcaccttaatatc

SEQ ID NO: 42235 - DNA, 25 bp, Probe Sequence
ataatagacagcaatcaaacgaaga

SEQ ID NO: 42236 - DNA, 25 bp, Probe Sequence
cacttctgtggaggcaccttaatat

SEQ ID NO: 42237 - DNA, 25 bp, Probe Sequence
atagacagcaatcaaacgaagacac

SEQ ID NO: 42238 - DNA, 25 bp, Probe Sequence
gagacagagtgaagcatcaacctac

SEQ ID NO: 42239 - DNA, 25 bp, Probe Sequence
aattctgtattaaggtgtcatagct

SEQ ID NO: 42240 - DNA, 25 bp, Probe Sequence
caagaagtgaacctcgaatctcatg

SEQ ID NO: 42241 - DNA, 25 bp, Probe Sequence
agaagtgaacctcgaatctcatgtt

SEQ ID NO: 42242 - DNA, 25 bp, Probe Sequence
aagaagtgaacctcgaatctcatgt

SEQ ID NO: 42243 - DNA, 25 bp, Probe Sequence
aataatagacagcaatcaaacgaag

SEQ ID NO: 42244 - DNA, 25 bp, Probe Sequence
gaaataatagacagcaatcaaacga

SEQ ID NO: 42245 - DNA, 25 bp, Probe Sequence
agacagagtgaagcatcaacctact

SEQ ID NO: 42246 - DNA, 25 bp, Probe Sequence
aggtctgactgacaaattctgtatt

SEQ ID NO: 42247 - DNA, 25 bp, Probe Sequence
agcataaggcatcaggttgttagat

SEQ ID NO: 42248 - DNA, 25 bp, Probe Sequence
ttctgtaggaccaacttctctgatc

SEQ ID NO: 42249 - DNA, 25 bp, Probe Sequence
cagcataaggcatcaggttgttaga

SEQ ID NO: 42250 - DNA, 25 bp, Probe Sequence
tatttctgtaggaccaacttctctg

SEQ ID NO: 42251 - DNA, 25 bp, Probe Sequence
ttatttctgtaggaccaacttctct

SEQ ID NO: 42252 - DNA, 25 bp, Probe Sequence
tttctgtaggaccaacttctctgat

SEQ ID NO: 42253 - DNA, 25 bp, Probe Sequence
atttctgtaggaccaacttctctga

SEQ ID NO: 42254 - DNA, 25 bp, Probe Sequence
ccctatgaaagattccacagagatg

SEQ ID NO: 42255 - DNA, 25 bp, Probe Sequence
tccctatgaaagattccacagagat

SEQ ID NO: 42256 - DNA, 25 bp, Probe Sequence
tgttatttctgtaggaccaacttct

SEQ ID NO: 42257 - DNA, 25 bp, Probe Sequence
ttccctatgaaagattccacagaga

SEQ ID NO: 42258 - DNA, 25 bp, Probe Sequence
gttccctatgaaagattccacagag

SEQ ID NO: 42259 - DNA, 25 bp, Probe Sequence
cagagatgtttatggtgaggtttaa

SEQ ID NO: 42260 - DNA, 25 bp, Probe Sequence
aattgttccctatgaaagattccac

SEQ ID NO: 42261 - DNA, 25 bp, Probe Sequence
gttatttctgtaggaccaacttctc

SEQ ID NO: 42262 - DNA, 25 bp, Probe Sequence
ttgttatttctgtaggaccaacttc

SEQ ID NO: 42263 - DNA, 25 bp, Probe Sequence
cattgttatttctgtaggaccaact

SEQ ID NO: 42264 - DNA, 25 bp, Probe Sequence
cctatgaaagattccacagagatgt

SEQ ID NO: 42265 - DNA, 25 bp, Probe Sequence
attgttccctatgaaagattccaca

SEQ ID NO: 42266 - DNA, 25 bp, Probe Sequence
ggtggacttatcaacactataattg

SEQ ID NO: 42267 - DNA, 25 bp, Probe Sequence
acacattgttatttctgtaggacca

SEQ ID NO: 42268 - DNA, 25 bp, Probe Sequence
acagagatgtttatggtgaggttta

SEQ ID NO: 42269 - DNA, 25 bp, Probe Sequence
ttgttccctatgaaagattccacag

SEQ ID NO: 42270 - DNA, 25 bp, Probe Sequence
acattgttatttctgtaggaccaac

SEQ ID NO: 42271 - DNA, 25 bp, Probe Sequence
aggtctgttctatctgttgctgtaa

SEQ ID NO: 42272 - DNA, 25 bp, Probe Sequence
gaggtctgttctatctgttgctgta

SEQ ID NO: 42273 - DNA, 25 bp, Probe Sequence
gttaccaggttcatacattgctgag

SEQ ID NO: 42274 - DNA, 25 bp, Probe Sequence
ggtctgttctatctgttgctgtaaa

SEQ ID NO: 42275 - DNA, 25 bp, Probe Sequence
gtctgttctatctgttgctgtaaat

SEQ ID NO: 42276 - DNA, 25 bp, Probe Sequence
ttaccaggttcatacattgctgagg

SEQ ID NO: 42277 - DNA, 25 bp, Probe Sequence
ggttaccaggttcatacattgctga

SEQ ID NO: 42278 - DNA, 25 bp, Probe Sequence
tctgttctatctgttgctgtaaata

SEQ ID NO: 42279 - DNA, 25 bp, Probe Sequence
gaagcctgaactctttactgggtta

SEQ ID NO: 42280 - DNA, 25 bp, Probe Sequence
gttcatacattgctgaggacctgac

SEQ ID NO: 42281 - DNA, 25 bp, Probe Sequence
aagcctgaactctttactgggttac

SEQ ID NO: 42282 - DNA, 25 bp, Probe Sequence
taccaggttcatacattgctgagga

SEQ ID NO: 42283 - DNA, 25 bp, Probe Sequence
aagaagagtaagagcagcagcaaat

SEQ ID NO: 42284 - DNA, 25 bp, Probe Sequence
ctgttctatctgttgctgtaaataa

SEQ ID NO: 42285 - DNA, 25 bp, Probe Sequence
ggaggtctgttctatctgttgctgt

SEQ ID NO: 42286 - DNA, 25 bp, Probe Sequence
ttcatacattgctgaggacctgaca

SEQ ID NO: 42287 - DNA, 25 bp, Probe Sequence
agaagagtaagagcagcagcaaatc

SEQ ID NO: 42288 - DNA, 25 bp, Probe Sequence
tgttctatctgttgctgtaaataaa

SEQ ID NO: 42289 - DNA, 25 bp, Probe Sequence
caagaagagtaagagcagcagcaaa

SEQ ID NO: 42290 - DNA, 25 bp, Probe Sequence
tcatacattgctgaggacctgacag

SEQ ID NO: 42291 - DNA, 25 bp, Probe Sequence
agaagcctgaactctttactgggtt

SEQ ID NO: 42292 - DNA, 25 bp, Probe Sequence
gttctatctgttgctgtaaataaag

SEQ ID NO: 42293 - DNA, 25 bp, Probe Sequence
ggagggaggtctgttctatctgttg

SEQ ID NO: 42294 - DNA, 25 bp, Probe Sequence
gaagagtaagagcagcagcaaatcc

SEQ ID NO: 42295 - DNA, 25 bp, Probe Sequence
ttgctatgtgctcctaatgtatcta

SEQ ID NO: 42296 - DNA, 25 bp, Probe Sequence
atgtgctcctaatgtatctagtgtg

SEQ ID NO: 42297 - DNA, 25 bp, Probe Sequence
cctaatgtatctagtgtgtcctgtg

SEQ ID NO: 42298 - DNA, 25 bp, Probe Sequence
tcctaatgtatctagtgtgtcctgt

SEQ ID NO: 42299 - DNA, 25 bp, Probe Sequence
ctcctaatgtatctagtgtgtcctg

SEQ ID NO: 42300 - DNA, 25 bp, Probe Sequence
gtgctcctaatgtatctagtgtgtc

SEQ ID NO: 42301 - DNA, 25 bp, Probe Sequence
gctatgtgctcctaatgtatctagt

SEQ ID NO: 42302 - DNA, 25 bp, Probe Sequence
tgctatgtgctcctaatgtatctag

SEQ ID NO: 42303 - DNA, 25 bp, Probe Sequence
ctaatgtatctagtgtgtcctgtga

SEQ ID NO: 42304 - DNA, 25 bp, Probe Sequence
tgtgctcctaatgtatctagtgtgt

SEQ ID NO: 42305 - DNA, 25 bp, Probe Sequence
gctcctaatgtatctagtgtgtcct

SEQ ID NO: 42306 - DNA, 25 bp, Probe Sequence
caacactcatcacacttcattgtaa

SEQ ID NO: 42307 - DNA, 25 bp, Probe Sequence
tgctcctaatgtatctagtgtgtcc

SEQ ID NO: 42308 - DNA, 25 bp, Probe Sequence
tatgtgctcctaatgtatctagtgt

SEQ ID NO: 42309 - DNA, 25 bp, Probe Sequence
gatcttcttgaccttctccatcatc

SEQ ID NO: 42310 - DNA, 25 bp, Probe Sequence
taatgtatctagtgtgtcctgtgac

SEQ ID NO: 42311 - DNA, 25 bp, Probe Sequence
tgacaacactcatcacacttcattg

SEQ ID NO: 42312 - DNA, 25 bp, Probe Sequence
ctatgtgctcctaatgtatctagtg

SEQ ID NO: 42313 - DNA, 25 bp, Probe Sequence
atcttcttgaccttctccatcatcg

SEQ ID NO: 42314 - DNA, 25 bp, Probe Sequence
ttcctatagactgtaagctccatga

SEQ ID NO: 42315 - DNA, 25 bp, Probe Sequence
tttgctatgtgctcctaatgtatct

SEQ ID NO: 42316 - DNA, 25 bp, Probe Sequence
actttgctatgtgctcctaatgtat

SEQ ID NO: 42317 - DNA, 25 bp, Probe Sequence
ttactttgctatgtgctcctaatgt

SEQ ID NO: 42318 - DNA, 25 bp, Probe Sequence
gttactttgctatgtgctcctaatg

SEQ ID NO: 42319 - DNA, 25 bp, Probe Sequence
ggcatccaattctacactcagttaa

SEQ ID NO: 42320 - DNA, 25 bp, Probe Sequence
tgaagccatccagattgtaaataac

SEQ ID NO: 42321 - DNA, 25 bp, Probe Sequence
gccaaatatgacctgttacaaagag

SEQ ID NO: 42322 - DNA, 25 bp, Probe Sequence
aagccaaatatgacctgttacaaag

SEQ ID NO: 42323 - DNA, 25 bp, Probe Sequence
caagccaaatatgacctgttacaaa

SEQ ID NO: 42324 - DNA, 25 bp, Probe Sequence
tttgtttaagactgactccatcctg

SEQ ID NO: 42325 - DNA, 25 bp, Probe Sequence
gtttgtttaagactgactccatcct

SEQ ID NO: 42326 - DNA, 25 bp, Probe Sequence
agccaaatatgacctgttacaaaga

SEQ ID NO: 42327 - DNA, 25 bp, Probe Sequence
ctcagtggaaagaagaagatgctac

SEQ ID NO: 42328 - DNA, 25 bp, Probe Sequence
gcatccaattctacactcagttaaa

SEQ ID NO: 42329 - DNA, 25 bp, Probe Sequence
ttgtttaagactgactccatcctga

SEQ ID NO: 42330 - DNA, 25 bp, Probe Sequence
ccaattctacactcagttaaagacc

SEQ ID NO: 42331 - DNA, 25 bp, Probe Sequence
cgatgggattggaatacattgtaac

SEQ ID NO: 42332 - DNA, 25 bp, Probe Sequence
caagtttgtttaagactgactccat

SEQ ID NO: 42333 - DNA, 25 bp, Probe Sequence
agtttgtttaagactgactccatcc

SEQ ID NO: 42334 - DNA, 25 bp, Probe Sequence
tctcagtggaaagaagaagatgcta

SEQ ID NO: 42335 - DNA, 25 bp, Probe Sequence
tccatcctgagtaatctccctttat

SEQ ID NO: 42336 - DNA, 25 bp, Probe Sequence
aagtttgtttaagactgactccatc

SEQ ID NO: 42337 - DNA, 25 bp, Probe Sequence
tcaagccaaatatgacctgttacaa

SEQ ID NO: 42338 - DNA, 25 bp, Probe Sequence
ccatcctgagtaatctccctttatt

SEQ ID NO: 42339 - DNA, 25 bp, Probe Sequence
atgaagccatccagattgtaaataa

SEQ ID NO: 42340 - DNA, 25 bp, Probe Sequence
caattctacactcagttaaagacca

SEQ ID NO: 42341 - DNA, 25 bp, Probe Sequence
ctccatcctgagtaatctcccttta

SEQ ID NO: 42342 - DNA, 25 bp, Probe Sequence
agtggaaagaagaagatgctactct

SEQ ID NO: 42343 - DNA, 25 bp, Probe Sequence
ctgttactatgatgagaagaggtcc

SEQ ID NO: 42344 - DNA, 25 bp, Probe Sequence
gttactatgatgagaagaggtccac

SEQ ID NO: 42345 - DNA, 25 bp, Probe Sequence
tgttactatgatgagaagaggtcca

SEQ ID NO: 42346 - DNA, 25 bp, Probe Sequence
ctacgcctgttactatgatgagaag

SEQ ID NO: 42347 - DNA, 25 bp, Probe Sequence
tacgcctgttactatgatgagaaga

SEQ ID NO: 42348 - DNA, 25 bp, Probe Sequence
ttactatgatgagaagaggtccacg

SEQ ID NO: 42349 - DNA, 25 bp, Probe Sequence
cctacgcctgttactatgatgagaa

SEQ ID NO: 42350 - DNA, 25 bp, Probe Sequence
acgcctgttactatgatgagaagag

SEQ ID NO: 42351 - DNA, 25 bp, Probe Sequence
cctgttactatgatgagaagaggtc

SEQ ID NO: 42352 - DNA, 25 bp, Probe Sequence
tcctacgcctgttactatgatgaga

SEQ ID NO: 42353 - DNA, 25 bp, Probe Sequence
gtcctacgcctgttactatgatgag

SEQ ID NO: 42354 - DNA, 25 bp, Probe Sequence
tcattgagaagtcagtgcgtaagat

SEQ ID NO: 42355 - DNA, 25 bp, Probe Sequence
cattgagaagtcagtgcgtaagatc

SEQ ID NO: 42356 - DNA, 25 bp, Probe Sequence
gcctgttactatgatgagaagaggt

SEQ ID NO: 42357 - DNA, 25 bp, Probe Sequence
aagatggtgttctacattgaagcct

SEQ ID NO: 42358 - DNA, 25 bp, Probe Sequence
aaggaaactgatgaacaccaatgat

SEQ ID NO: 42359 - DNA, 25 bp, Probe Sequence
aaaggaaactgatgaacaccaatga

SEQ ID NO: 42360 - DNA, 25 bp, Probe Sequence
tatttgctttctaggaggtttgttg

SEQ ID NO: 42361 - DNA, 25 bp, Probe Sequence
ggtcatatttgctttctaggaggtt

SEQ ID NO: 42362 - DNA, 25 bp, Probe Sequence
ttctacattgaagcctgtgagtctg

SEQ ID NO: 42363 - DNA, 25 bp, Probe Sequence
gttctacattgaagcctgtgagtct

SEQ ID NO: 42364 - DNA, 25 bp, Probe Sequence
catatttgctttctaggaggtttgt

SEQ ID NO: 42365 - DNA, 25 bp, Probe Sequence
tgtattgagaagggtcatatttgct

SEQ ID NO: 42366 - DNA, 25 bp, Probe Sequence
ctgtattgagaagggtcatatttgc

SEQ ID NO: 42367 - DNA, 25 bp, Probe Sequence
aactaggcttcagtatatcagtgtt

SEQ ID NO: 42368 - DNA, 25 bp, Probe Sequence
tggctatattcttgtgtattctgtt

SEQ ID NO: 42369 - DNA, 25 bp, Probe Sequence
atcatcttcaacttgtagacacagc

SEQ ID NO: 42370 - DNA, 25 bp, Probe Sequence
atggctatattcttgtgtattctgt

SEQ ID NO: 42371 - DNA, 25 bp, Probe Sequence
tcctcagacatactccatagatatt

SEQ ID NO: 42372 - DNA, 25 bp, Probe Sequence
ttcctcagacatactccatagatat

SEQ ID NO: 42373 - DNA, 25 bp, Probe Sequence
acactactattaactaggcttcagt

SEQ ID NO: 42374 - DNA, 25 bp, Probe Sequence
taactaggcttcagtatatcagtgt

SEQ ID NO: 42375 - DNA, 25 bp, Probe Sequence
tatcatcttcaacttgtagacacag

SEQ ID NO: 42376 - DNA, 25 bp, Probe Sequence
ttaactaggcttcagtatatcagtg

SEQ ID NO: 42377 - DNA, 25 bp, Probe Sequence
ctttcctcagacatactccatagat

SEQ ID NO: 42378 - DNA, 25 bp, Probe Sequence
atatcatcttcaacttgtagacaca

SEQ ID NO: 42379 - DNA, 25 bp, Probe Sequence
tatgttggttgggaataagaaagac

SEQ ID NO: 42380 - DNA, 25 bp, Probe Sequence
cgttctccttgaagataaactatgc

SEQ ID NO: 42381 - DNA, 25 bp, Probe Sequence
cccgttctccttgaagataaactat

SEQ ID NO: 42382 - DNA, 25 bp, Probe Sequence
tctttcctcagacatactccataga

SEQ ID NO: 42383 - DNA, 25 bp, Probe Sequence
tctatctttcctcagacatactcca

SEQ ID NO: 42384 - DNA, 25 bp, Probe Sequence
aatggctatattcttgtgtattctg

SEQ ID NO: 42385 - DNA, 25 bp, Probe Sequence
ccgttctccttgaagataaactatg

SEQ ID NO: 42386 - DNA, 25 bp, Probe Sequence
atctttcctcagacatactccatag

SEQ ID NO: 42387 - DNA, 25 bp, Probe Sequence
ctatctttcctcagacatactccat

SEQ ID NO: 42388 - DNA, 25 bp, Probe Sequence
ttctatctttcctcagacatactcc

SEQ ID NO: 42389 - DNA, 25 bp, Probe Sequence
tacactactattaactaggcttcag

SEQ ID NO: 42390 - DNA, 25 bp, Probe Sequence
tcatcttcaacttgtagacacagcc

SEQ ID NO: 42391 - DNA, 25 bp, Probe Sequence
tgaaggagagaatgtatttggtgtc

SEQ ID NO: 42392 - DNA, 25 bp, Probe Sequence
ctgaaggagagaatgtatttggtgt

SEQ ID NO: 42393 - DNA, 25 bp, Probe Sequence
gaaggagagaatgtatttggtgtct

SEQ ID NO: 42394 - DNA, 25 bp, Probe Sequence
aaggagagaatgtatttggtgtctg

SEQ ID NO: 42395 - DNA, 25 bp, Probe Sequence
agaccgagatgaatcctcaccatat

SEQ ID NO: 42396 - DNA, 25 bp, Probe Sequence
aggtggctgaaggagagaatgtatt

SEQ ID NO: 42397 - DNA, 25 bp, Probe Sequence
gctgaaggagagaatgtatttggtg

SEQ ID NO: 42398 - DNA, 25 bp, Probe Sequence
gtggctgaaggagagaatgtatttg

SEQ ID NO: 42399 - DNA, 25 bp, Probe Sequence
tttgtccatgtcactgatctttctg

SEQ ID NO: 42400 - DNA, 25 bp, Probe Sequence
ggctgaaggagagaatgtatttggt

SEQ ID NO: 42401 - DNA, 25 bp, Probe Sequence
tggctgaaggagagaatgtatttgg

SEQ ID NO: 42402 - DNA, 25 bp, Probe Sequence
ggtggctgaaggagagaatgtattt

SEQ ID NO: 42403 - DNA, 25 bp, Probe Sequence
cagaccgagatgaatcctcaccata

SEQ ID NO: 42404 - DNA, 25 bp, Probe Sequence
gaatgtatttggtgtctgccatatc

SEQ ID NO: 42405 - DNA, 25 bp, Probe Sequence
atgaatcctcaccatatgctgctat

SEQ ID NO: 42406 - DNA, 25 bp, Probe Sequence
gtatttggtgtctgccatatctttg

SEQ ID NO: 42407 - DNA, 25 bp, Probe Sequence
atgtatttggtgtctgccatatctt

SEQ ID NO: 42408 - DNA, 25 bp, Probe Sequence
aatgtatttggtgtctgccatatct

SEQ ID NO: 42409 - DNA, 25 bp, Probe Sequence
agaatgtatttggtgtctgccatat

SEQ ID NO: 42410 - DNA, 25 bp, Probe Sequence
tgtatttggtgtctgccatatcttt

SEQ ID NO: 42411 - DNA, 25 bp, Probe Sequence
aggagagaatgtatttggtgtctgc

SEQ ID NO: 42412 - DNA, 25 bp, Probe Sequence
gagaatgtatttggtgtctgccata

SEQ ID NO: 42413 - DNA, 25 bp, Probe Sequence
aaagaaggaagaacaggtcatcagc

SEQ ID NO: 42414 - DNA, 25 bp, Probe Sequence
gatgaatcctcaccatatgctgcta

SEQ ID NO: 42415 - DNA, 25 bp, Probe Sequence
atgttacaacaccatgctggttatt

SEQ ID NO: 42416 - DNA, 25 bp, Probe Sequence
gatgttacaacaccatgctggttat

SEQ ID NO: 42417 - DNA, 25 bp, Probe Sequence
tgttacaacaccatgctggttattt

SEQ ID NO: 42418 - DNA, 25 bp, Probe Sequence
ggatgttacaacaccatgctggtta

SEQ ID NO: 42419 - DNA, 25 bp, Probe Sequence
ctggttattttggcggctgtagttg

SEQ ID NO: 42420 - DNA, 25 bp, Probe Sequence
ggcaggactcctccaaaattatgtg

SEQ ID NO: 42421 - DNA, 25 bp, Probe Sequence
gcaggactcctccaaaattatgtgg

SEQ ID NO: 42422 - DNA, 25 bp, Probe Sequence
gttattttggcggctgtagttgtgg

SEQ ID NO: 42423 - DNA, 25 bp, Probe Sequence
ggttattttggcggctgtagttgtg

SEQ ID NO: 42424 - DNA, 25 bp, Probe Sequence
ttacaacaccatgctggttattttg

SEQ ID NO: 42425 - DNA, 25 bp, Probe Sequence
gttacaacaccatgctggttatttt

SEQ ID NO: 42426 - DNA, 25 bp, Probe Sequence
gggcaggactcctccaaaattatgt

SEQ ID NO: 42427 - DNA, 25 bp, Probe Sequence
aggactcctccaaaattatgtggac

SEQ ID NO: 42428 - DNA, 25 bp, Probe Sequence
caggactcctccaaaattatgtgga

SEQ ID NO: 42429 - DNA, 25 bp, Probe Sequence
ctcctccaaaattatgtggaccgta

SEQ ID NO: 42430 - DNA, 25 bp, Probe Sequence
tacaacaccatgctggttattttgg

SEQ ID NO: 42431 - DNA, 25 bp, Probe Sequence
tcctccaaaattatgtggaccgtac

SEQ ID NO: 42432 - DNA, 25 bp, Probe Sequence
ggggcaggactcctccaaaattatg

SEQ ID NO: 42433 - DNA, 25 bp, Probe Sequence
ggactcctccaaaattatgtggacc

SEQ ID NO: 42434 - DNA, 25 bp, Probe Sequence
gactcctccaaaattatgtggaccg

SEQ ID NO: 42435 - DNA, 25 bp, Probe Sequence
actcctccaaaattatgtggaccgt

SEQ ID NO: 42436 - DNA, 25 bp, Probe Sequence
cacaggtcaccatggggaattctag

SEQ ID NO: 42437 - DNA, 25 bp, Probe Sequence
tcacaggtcaccatggggaattcta

SEQ ID NO: 42438 - DNA, 25 bp, Probe Sequence
acaacaccatgctggttattttggc

SEQ ID NO: 42439 - DNA, 25 bp, Probe Sequence
tatatcctccttctcctgttccatt

SEQ ID NO: 42440 - DNA, 25 bp, Probe Sequence
ttgttctcctatatcctccttctcc

SEQ ID NO: 42441 - DNA, 25 bp, Probe Sequence
ctatatcctccttctcctgttccat

SEQ ID NO: 42442 - DNA, 25 bp, Probe Sequence
ctcctatatcctccttctcctgttc

SEQ ID NO: 42443 - DNA, 25 bp, Probe Sequence
gttctcctatatcctccttctcctg

SEQ ID NO: 42444 - DNA, 25 bp, Probe Sequence
tctcctatatcctccttctcctgtt

SEQ ID NO: 42445 - DNA, 25 bp, Probe Sequence
ttctcctatatcctccttctcctgt

SEQ ID NO: 42446 - DNA, 25 bp, Probe Sequence
tgttctcctatatcctccttctcct

SEQ ID NO: 42447 - DNA, 25 bp, Probe Sequence
tcctatatcctccttctcctgttcc

SEQ ID NO: 42448 - DNA, 25 bp, Probe Sequence
cctatatcctccttctcctgttcca

SEQ ID NO: 42449 - DNA, 25 bp, Probe Sequence
gtcctctcttaataggtggcactac

SEQ ID NO: 42450 - DNA, 25 bp, Probe Sequence
atatcctccttctcctgttccattt

SEQ ID NO: 42451 - DNA, 25 bp, Probe Sequence
tttgttctcctatatcctccttctc

SEQ ID NO: 42452 - DNA, 25 bp, Probe Sequence
atcatctcttcctcacacccattta

SEQ ID NO: 42453 - DNA, 25 bp, Probe Sequence
tgtcctctcttaataggtggcacta

SEQ ID NO: 42454 - DNA, 25 bp, Probe Sequence
tatcctccttctcctgttccatttc

SEQ ID NO: 42455 - DNA, 25 bp, Probe Sequence
tcatctcttcctcacacccatttag

SEQ ID NO: 42456 - DNA, 25 bp, Probe Sequence
aagagaggaaccaataccttcaagg

SEQ ID NO: 42457 - DNA, 25 bp, Probe Sequence
catctcttcctcacacccatttagt

SEQ ID NO: 42458 - DNA, 25 bp, Probe Sequence
ctttcaagaatcagacagcaggaag

SEQ ID NO: 42459 - DNA, 25 bp, Probe Sequence
aataccttcaaggctcttcttcctc

SEQ ID NO: 42460 - DNA, 25 bp, Probe Sequence
tgtgtcattagtcctttgtctaagt

SEQ ID NO: 42461 - DNA, 25 bp, Probe Sequence
actgtgtcattagtcctttgtctaa

SEQ ID NO: 42462 - DNA, 25 bp, Probe Sequence
ctgttccatttcagttcagtttcag

SEQ ID NO: 42463 - DNA, 25 bp, Probe Sequence
caaaaccaaatctgggtgtcagagg

SEQ ID NO: 42464 - DNA, 25 bp, Probe Sequence
gcaaaaccaaatctgggtgtcagag

SEQ ID NO: 42465 - DNA, 25 bp, Probe Sequence
ataagaagcaggattgtataggcag

SEQ ID NO: 42466 - DNA, 25 bp, Probe Sequence
taatgctgtgtgttctgttaagttc

SEQ ID NO: 42467 - DNA, 25 bp, Probe Sequence
tataagaagcaggattgtataggca

SEQ ID NO: 42468 - DNA, 25 bp, Probe Sequence
taagaagcaggattgtataggcaga

SEQ ID NO: 42469 - DNA, 25 bp, Probe Sequence
atgctgtgtgttctgttaagttctt

SEQ ID NO: 42470 - DNA, 25 bp, Probe Sequence
aatgctgtgtgttctgttaagttct

SEQ ID NO: 42471 - DNA, 25 bp, Probe Sequence
ttaatgctgtgtgttctgttaagtt

SEQ ID NO: 42472 - DNA, 25 bp, Probe Sequence
ttatctggaaccacggaattactct

SEQ ID NO: 42473 - DNA, 25 bp, Probe Sequence
aagaagcaggattgtataggcagaa

SEQ ID NO: 42474 - DNA, 25 bp, Probe Sequence
cgtgagatcaataagaagaacctag

SEQ ID NO: 42475 - DNA, 25 bp, Probe Sequence
acagttgatggtgatctctatcctc

SEQ ID NO: 42476 - DNA, 25 bp, Probe Sequence
tatctggaaccacggaattactctg

SEQ ID NO: 42477 - DNA, 25 bp, Probe Sequence
aggattagcggaatgtatggttcaa

SEQ ID NO: 42478 - DNA, 25 bp, Probe Sequence
ggattagcggaatgtatggttcaac

SEQ ID NO: 42479 - DNA, 25 bp, Probe Sequence
aattcagaagcagattgacaacatg

SEQ ID NO: 42480 - DNA, 25 bp, Probe Sequence
attcagaagcagattgacaacatga

SEQ ID NO: 42481 - DNA, 25 bp, Probe Sequence
gttgatggtgatctctatcctcctg

SEQ ID NO: 42482 - DNA, 25 bp, Probe Sequence
agttgatggtgatctctatcctcct

SEQ ID NO: 42483 - DNA, 25 bp, Probe Sequence
cagttgatggtgatctctatcctcc

SEQ ID NO: 42484 - DNA, 25 bp, Probe Sequence
cagatgcttgtatccacagttgatg

SEQ ID NO: 42485 - DNA, 25 bp, Probe Sequence
agatattcaatgacctcagcagcag

SEQ ID NO: 42486 - DNA, 25 bp, Probe Sequence
gtgagatcaataagaagaacctagt

SEQ ID NO: 42487 - DNA, 25 bp, Probe Sequence
tcagatgcttgtatccacagttgat

SEQ ID NO: 42488 - DNA, 25 bp, Probe Sequence
caggattagcggaatgtatggttca

SEQ ID NO: 42489 - DNA, 25 bp, Probe Sequence
tcctacttatgtaatgaatgtggca

SEQ ID NO: 42490 - DNA, 25 bp, Probe Sequence
acgacttaatagacaccgaatcatt

SEQ ID NO: 42491 - DNA, 25 bp, Probe Sequence
gtcctacttatgtaatgaatgtggc

SEQ ID NO: 42492 - DNA, 25 bp, Probe Sequence
cgaagaatacatccttgagagagat

SEQ ID NO: 42493 - DNA, 25 bp, Probe Sequence
cctacttatgtaatgaatgtggcaa

SEQ ID NO: 42494 - DNA, 25 bp, Probe Sequence
cacgacttaatagacaccgaatcat

SEQ ID NO: 42495 - DNA, 25 bp, Probe Sequence
ttcacgacttaatagacaccgaatc

SEQ ID NO: 42496 - DNA, 25 bp, Probe Sequence
tcatcacttagtaatcaccagagaa

SEQ ID NO: 42497 - DNA, 25 bp, Probe Sequence
tcaacacttattattcacgagcgaa

SEQ ID NO: 42498 - DNA, 25 bp, Probe Sequence
atagacaccgaatcattcatactgg

SEQ ID NO: 42499 - DNA, 25 bp, Probe Sequence
cgacttaatagacaccgaatcattc

SEQ ID NO: 42500 - DNA, 25 bp, Probe Sequence
ccgaatcattcatactggagagaag

SEQ ID NO: 42501 - DNA, 25 bp, Probe Sequence
ccactcaacacttattattcacgag

SEQ ID NO: 42502 - DNA, 25 bp, Probe Sequence
aactcatcacttagtaatcaccaga

SEQ ID NO: 42503 - DNA, 25 bp, Probe Sequence
cactcaacacttattattcacgagc

SEQ ID NO: 42504 - DNA, 25 bp, Probe Sequence
tcacgacttaatagacaccgaatca

SEQ ID NO: 42505 - DNA, 25 bp, Probe Sequence
actcatcacttagtaatcaccagag

SEQ ID NO: 42506 - DNA, 25 bp, Probe Sequence
ctacttatgtaatgaatgtggcaac

SEQ ID NO: 42507 - DNA, 25 bp, Probe Sequence
cgaatcattcatactggagagaagt

SEQ ID NO: 42508 - DNA, 25 bp, Probe Sequence
tagacaccgaatcattcatactgga

SEQ ID NO: 42509 - DNA, 25 bp, Probe Sequence
ctcatcacttagtaatcaccagaga

SEQ ID NO: 42510 - DNA, 25 bp, Probe Sequence
aatagacaccgaatcattcatactg

SEQ ID NO: 42511 - DNA, 25 bp, Probe Sequence
accgaatcattcatactggagagaa

SEQ ID NO: 42512 - DNA, 25 bp, Probe Sequence
gacttaatagacaccgaatcattca

SEQ ID NO: 42513 - DNA, 25 bp, Probe Sequence
gaccagtccttgtggaataagattc

SEQ ID NO: 42514 - DNA, 25 bp, Probe Sequence
ctaattgtgctgtgttcgtgtcttg

SEQ ID NO: 42515 - DNA, 25 bp, Probe Sequence
agaccagtccttgtggaataagatt

SEQ ID NO: 42516 - DNA, 25 bp, Probe Sequence
ctatgtaggcaggttaatcctccac

SEQ ID NO: 42517 - DNA, 25 bp, Probe Sequence
cagcaatgtgagtattatttggagt

SEQ ID NO: 42518 - DNA, 25 bp, Probe Sequence
ggtgattgtagataagattagttcc

SEQ ID NO: 42519 - DNA, 25 bp, Probe Sequence
cagaccagtccttgtggaataagat

SEQ ID NO: 42520 - DNA, 25 bp, Probe Sequence
tatgtaggcaggttaatcctccact

SEQ ID NO: 42521 - DNA, 25 bp, Probe Sequence
aggttaatcctccacttctcatgtg

SEQ ID NO: 42522 - DNA, 25 bp, Probe Sequence
caggttaatcctccacttctcatgt

SEQ ID NO: 42523 - DNA, 25 bp, Probe Sequence
tagataagattagttccctgatccc

SEQ ID NO: 42524 - DNA, 25 bp, Probe Sequence
ctgattccctaattgtgctgtgttc

SEQ ID NO: 42525 - DNA, 25 bp, Probe Sequence
agcaatgtgagtattatttggagta

SEQ ID NO: 42526 - DNA, 25 bp, Probe Sequence
cctaattgtgctgtgttcgtgtctt

SEQ ID NO: 42527 - DNA, 25 bp, Probe Sequence
tggtgattgtagataagattagttc

SEQ ID NO: 42528 - DNA, 25 bp, Probe Sequence
gacagaccagtccttgtggaataag

SEQ ID NO: 42529 - DNA, 25 bp, Probe Sequence
ttgcttcctcctgattccctaattg

SEQ ID NO: 42530 - DNA, 25 bp, Probe Sequence
gttgcttcctcctgattccctaatt

SEQ ID NO: 42531 - DNA, 25 bp, Probe Sequence
taggcaggttaatcctccacttctc

SEQ ID NO: 42532 - DNA, 25 bp, Probe Sequence
atgtaggcaggttaatcctccactt

SEQ ID NO: 42533 - DNA, 25 bp, Probe Sequence
gtagataagattagttccctgatcc

SEQ ID NO: 42534 - DNA, 25 bp, Probe Sequence
gcaatgtgagtattatttggagtaa

SEQ ID NO: 42535 - DNA, 25 bp, Probe Sequence
acagaccagtccttgtggaataaga

SEQ ID NO: 42536 - DNA, 25 bp, Probe Sequence
atgacagaccagtccttgtggaata

SEQ ID NO: 42537 - DNA, 25 bp, Probe Sequence
atgattctacagctaggacttaacc

SEQ ID NO: 42538 - DNA, 25 bp, Probe Sequence
ataaccatgagcactactctaccat

SEQ ID NO: 42539 - DNA, 25 bp, Probe Sequence
atgaatgattctacagctaggactt

SEQ ID NO: 42540 - DNA, 25 bp, Probe Sequence
aatgaatgattctacagctaggact

SEQ ID NO: 42541 - DNA, 25 bp, Probe Sequence
tgaatgattctacagctaggactta

SEQ ID NO: 42542 - DNA, 25 bp, Probe Sequence
cataaccatgagcactactctacca

SEQ ID NO: 42543 - DNA, 25 bp, Probe Sequence
aatcaaggatgctcagtttaaggta

SEQ ID NO: 42544 - DNA, 25 bp, Probe Sequence
gaaatcaaggatgctcagtttaagg

SEQ ID NO: 42545 - DNA, 25 bp, Probe Sequence
ggaaatcaaggatgctcagtttaag

SEQ ID NO: 42546 - DNA, 25 bp, Probe Sequence
aaatcaaggatgctcagtttaaggt

SEQ ID NO: 42547 - DNA, 25 bp, Probe Sequence
ttaaccttgaaatggaaagtcttgc

SEQ ID NO: 42548 - DNA, 25 bp, Probe Sequence
ctccaagtagtccaccttcatttaa

SEQ ID NO: 42549 - DNA, 25 bp, Probe Sequence
tccaagtagtccaccttcatttaac

SEQ ID NO: 42550 - DNA, 25 bp, Probe Sequence
tctccaagtagtccaccttcattta

SEQ ID NO: 42551 - DNA, 25 bp, Probe Sequence
atgtctccaagtagtccaccttcat

SEQ ID NO: 42552 - DNA, 25 bp, Probe Sequence
aatgattctacagctaggacttaac

SEQ ID NO: 42553 - DNA, 25 bp, Probe Sequence
attctacagctaggacttaaccttg

SEQ ID NO: 42554 - DNA, 25 bp, Probe Sequence
gggaaatcaaggatgctcagtttaa

SEQ ID NO: 42555 - DNA, 25 bp, Probe Sequence
gattctacagctaggacttaacctt

SEQ ID NO: 42556 - DNA, 25 bp, Probe Sequence
tgattctacagctaggacttaacct

SEQ ID NO: 42557 - DNA, 25 bp, Probe Sequence
agtccaccttcatttaactctttga

SEQ ID NO: 42558 - DNA, 25 bp, Probe Sequence
tctacagctaggacttaaccttgaa

SEQ ID NO: 42559 - DNA, 25 bp, Probe Sequence
ttctacagctaggacttaaccttga

SEQ ID NO: 42560 - DNA, 25 bp, Probe Sequence
ccaagtagtccaccttcatttaact

SEQ ID NO: 42561 - DNA, 25 bp, Probe Sequence
ctcagccgacttaacattacctatc

SEQ ID NO: 42562 - DNA, 25 bp, Probe Sequence
actcagccgacttaacattacctat

SEQ ID NO: 42563 - DNA, 25 bp, Probe Sequence
aactcagccgacttaacattaccta

SEQ ID NO: 42564 - DNA, 25 bp, Probe Sequence
tcagccgacttaacattacctatcc

SEQ ID NO: 42565 - DNA, 25 bp, Probe Sequence
ctccaagagtaagttctgctacctc

SEQ ID NO: 42566 - DNA, 25 bp, Probe Sequence
atagactggatggaaagaagaaagg

SEQ ID NO: 42567 - DNA, 25 bp, Probe Sequence
caactcagccgacttaacattacct

SEQ ID NO: 42568 - DNA, 25 bp, Probe Sequence
gaccaactcagccgacttaacatta

SEQ ID NO: 42569 - DNA, 25 bp, Probe Sequence
gcaatagactggatggaaagaagaa

SEQ ID NO: 42570 - DNA, 25 bp, Probe Sequence
atgtggagaaaggagggaagataat

SEQ ID NO: 42571 - DNA, 25 bp, Probe Sequence
ggatgtgattgccattaactacaat

SEQ ID NO: 42572 - DNA, 25 bp, Probe Sequence
caatagactggatggaaagaagaaa

SEQ ID NO: 42573 - DNA, 25 bp, Probe Sequence
accaactcagccgacttaacattac

SEQ ID NO: 42574 - DNA, 25 bp, Probe Sequence
tgtgattgccattaactacaatgaa

SEQ ID NO: 42575 - DNA, 25 bp, Probe Sequence
tgtggagaaaggagggaagataatt

SEQ ID NO: 42576 - DNA, 25 bp, Probe Sequence
atgtgattgccattaactacaatga

SEQ ID NO: 42577 - DNA, 25 bp, Probe Sequence
aatagactggatggaaagaagaaag

SEQ ID NO: 42578 - DNA, 25 bp, Probe Sequence
gctgttcaaactgaccaataagaat

SEQ ID NO: 42579 - DNA, 25 bp, Probe Sequence
gatgtggagaaaggagggaagataa

SEQ ID NO: 42580 - DNA, 25 bp, Probe Sequence
gatgtgattgccattaactacaatg

SEQ ID NO: 42581 - DNA, 25 bp, Probe Sequence
ctaatgacaggtcagatgtggagaa

SEQ ID NO: 42582 - DNA, 25 bp, Probe Sequence
tagactggatggaaagaagaaaggg

SEQ ID NO: 42583 - DNA, 25 bp, Probe Sequence
atgctgttcaaactgaccaataaga

SEQ ID NO: 42584 - DNA, 25 bp, Probe Sequence
cagaacttactcttggaagaagacg

SEQ ID NO: 42585 - DNA, 25 bp, Probe Sequence
caagaacaggtgacatagttgaatt

SEQ ID NO: 42586 - DNA, 25 bp, Probe Sequence
gtatatgctccaggttcatcagttg

SEQ ID NO: 42587 - DNA, 25 bp, Probe Sequence
agtatatgctccaggttcatcagtt

SEQ ID NO: 42588 - DNA, 25 bp, Probe Sequence
ttgtcagtatatgctccaggttcat

SEQ ID NO: 42589 - DNA, 25 bp, Probe Sequence
tcagtatatgctccaggttcatcag

SEQ ID NO: 42590 - DNA, 25 bp, Probe Sequence
tattcaagaacaggtgacatagttg

SEQ ID NO: 42591 - DNA, 25 bp, Probe Sequence
ttcattcctgttgtcagtatatgct

SEQ ID NO: 42592 - DNA, 25 bp, Probe Sequence
cttcattcctgttgtcagtatatgc

SEQ ID NO: 42593 - DNA, 25 bp, Probe Sequence
tcattcctgttgtcagtatatgctc

SEQ ID NO: 42594 - DNA, 25 bp, Probe Sequence
acattacttcattcctgttgtcagt

SEQ ID NO: 42595 - DNA, 25 bp, Probe Sequence
cagtatatgctccaggttcatcagt

SEQ ID NO: 42596 - DNA, 25 bp, Probe Sequence
gtcagtatatgctccaggttcatca

SEQ ID NO: 42597 - DNA, 25 bp, Probe Sequence
tgtcagtatatgctccaggttcatc

SEQ ID NO: 42598 - DNA, 25 bp, Probe Sequence
gttgtcagtatatgctccaggttca

SEQ ID NO: 42599 - DNA, 25 bp, Probe Sequence
tgttgtcagtatatgctccaggttc

SEQ ID NO: 42600 - DNA, 25 bp, Probe Sequence
cattcctgttgtcagtatatgctcc

SEQ ID NO: 42601 - DNA, 25 bp, Probe Sequence
ttattcaagaacaggtgacatagtt

SEQ ID NO: 42602 - DNA, 25 bp, Probe Sequence
atggagacattacttcattcctgtt

SEQ ID NO: 42603 - DNA, 25 bp, Probe Sequence
acttcattcctgttgtcagtatatg

SEQ ID NO: 42604 - DNA, 25 bp, Probe Sequence
aacacatctggaaggtgatactgta

SEQ ID NO: 42605 - DNA, 25 bp, Probe Sequence
ggagacattacttcattcctgttgt

SEQ ID NO: 42606 - DNA, 25 bp, Probe Sequence
tggagacattacttcattcctgttg

SEQ ID NO: 42607 - DNA, 25 bp, Probe Sequence
attcctgttgtcagtatatgctcca

SEQ ID NO: 42608 - DNA, 25 bp, Probe Sequence
cagtgccagaacttgtatcaacttg

SEQ ID NO: 42609 - DNA, 25 bp, Probe Sequence
tgtgtgacccagagaaataaagatg

SEQ ID NO: 42610 - DNA, 25 bp, Probe Sequence
gtgtgacccagagaaataaagatgc

SEQ ID NO: 42611 - DNA, 25 bp, Probe Sequence
ctgtgtgacccagagaaataaagat

SEQ ID NO: 42612 - DNA, 25 bp, Probe Sequence
cagagttcatcttcttgacctttgg

SEQ ID NO: 42613 - DNA, 25 bp, Probe Sequence
cagagaaataaagatgcctcagtgg

SEQ ID NO: 42614 - DNA, 25 bp, Probe Sequence
ccagagaaataaagatgcctcagtg

SEQ ID NO: 42615 - DNA, 25 bp, Probe Sequence
gtgacccagagaaataaagatgcct

SEQ ID NO: 42616 - DNA, 25 bp, Probe Sequence
gcagagttcatcttcttgacctttg

SEQ ID NO: 42617 - DNA, 25 bp, Probe Sequence
tgtgacccagagaaataaagatgcc

SEQ ID NO: 42618 - DNA, 25 bp, Probe Sequence
cccagagaaataaagatgcctcagt

SEQ ID NO: 42619 - DNA, 25 bp, Probe Sequence
acccagagaaataaagatgcctcag

SEQ ID NO: 42620 - DNA, 25 bp, Probe Sequence
gacccagagaaataaagatgcctca

SEQ ID NO: 42621 - DNA, 25 bp, Probe Sequence
tgacccagagaaataaagatgcctc

SEQ ID NO: 42622 - DNA, 25 bp, Probe Sequence
agagttcatcttcttgacctttggc

SEQ ID NO: 42623 - DNA, 25 bp, Probe Sequence
ggcagagttcatcttcttgaccttt

SEQ ID NO: 42624 - DNA, 25 bp, Probe Sequence
ctaggatagtctcataaaggggagg

SEQ ID NO: 42625 - DNA, 25 bp, Probe Sequence
aagtctgggcagagttcatcttctt

SEQ ID NO: 42626 - DNA, 25 bp, Probe Sequence
taggatagtctcataaaggggaggc

SEQ ID NO: 42627 - DNA, 25 bp, Probe Sequence
tgtcaaaccctaggatagtctcata

SEQ ID NO: 42628 - DNA, 25 bp, Probe Sequence
tctgtgtgacccagagaaataaaga

SEQ ID NO: 42629 - DNA, 25 bp, Probe Sequence
cttcatctgggacttgctgtcaaac

SEQ ID NO: 42630 - DNA, 25 bp, Probe Sequence
gtcaaaccctaggatagtctcataa

SEQ ID NO: 42631 - DNA, 25 bp, Probe Sequence
ctgtcaaaccctaggatagtctcat

SEQ ID NO: 42632 - DNA, 25 bp, Probe Sequence
gttacagagcctggtgaaggagttg

SEQ ID NO: 42633 - DNA, 25 bp, Probe Sequence
tgtaataaaagctgaaaagtctgaa

SEQ ID NO: 42634 - DNA, 25 bp, Probe Sequence
ttgtaataaaagctgaaaagtctga

SEQ ID NO: 42635 - DNA, 25 bp, Probe Sequence
gtaataaaagctgaaaagtctgaaa

SEQ ID NO: 42636 - DNA, 25 bp, Probe Sequence
taataaaagctgaaaagtctgaaaa

SEQ ID NO: 42637 - DNA, 25 bp, Probe Sequence
ggacctcttaattactagacctcag

SEQ ID NO: 42638 - DNA, 25 bp, Probe Sequence
gacctcttaattactagacctcagt

SEQ ID NO: 42639 - DNA, 25 bp, Probe Sequence
tttacactatattcctgccaccaag

SEQ ID NO: 42640 - DNA, 25 bp, Probe Sequence
cactcagaaagactaaaggaaatgt

SEQ ID NO: 42641 - DNA, 25 bp, Probe Sequence
ttacactatattcctgccaccaagg

SEQ ID NO: 42642 - DNA, 25 bp, Probe Sequence
tcactcagaaagactaaaggaaatg

SEQ ID NO: 42643 - DNA, 25 bp, Probe Sequence
ctcactcagaaagactaaaggaaat

SEQ ID NO: 42644 - DNA, 25 bp, Probe Sequence
aggacctcactcagaaagactaaag

SEQ ID NO: 42645 - DNA, 25 bp, Probe Sequence
caggacctcactcagaaagactaaa

SEQ ID NO: 42646 - DNA, 25 bp, Probe Sequence
gtgctggtcccttataaactaatcc

SEQ ID NO: 42647 - DNA, 25 bp, Probe Sequence
ggtgctggtcccttataaactaatc

SEQ ID NO: 42648 - DNA, 25 bp, Probe Sequence
cctcactcagaaagactaaaggaaa

SEQ ID NO: 42649 - DNA, 25 bp, Probe Sequence
gtcttcctcttcctcgtcctctaac

SEQ ID NO: 42650 - DNA, 25 bp, Probe Sequence
gggacctcttaattactagacctca

SEQ ID NO: 42651 - DNA, 25 bp, Probe Sequence
atcaggacctcactcagaaagacta

SEQ ID NO: 42652 - DNA, 25 bp, Probe Sequence
actcagaaagactaaaggaaatgta

SEQ ID NO: 42653 - DNA, 25 bp, Probe Sequence
acctcactcagaaagactaaaggaa

SEQ ID NO: 42654 - DNA, 25 bp, Probe Sequence
tcaggacctcactcagaaagactaa

SEQ ID NO: 42655 - DNA, 25 bp, Probe Sequence
gacctcactcagaaagactaaagga

SEQ ID NO: 42656 - DNA, 25 bp, Probe Sequence
cgggacctcttaattactagacctc

SEQ ID NO: 42657 - DNA, 25 bp, Probe Sequence
gaatcaggacctcactcagaaagac

SEQ ID NO: 42658 - DNA, 25 bp, Probe Sequence
acctcttaattactagacctcagta

SEQ ID NO: 42659 - DNA, 25 bp, Probe Sequence
cctcttaattactagacctcagtac

SEQ ID NO: 42660 - DNA, 25 bp, Probe Sequence
tgctggtcccttataaactaatccg

SEQ ID NO: 42661 - DNA, 25 bp, Probe Sequence
aattatgatcagtatgtgaagacgc

SEQ ID NO: 42662 - DNA, 25 bp, Probe Sequence
attatgatcagtatgtgaagacgcg

SEQ ID NO: 42663 - DNA, 25 bp, Probe Sequence
acgggtaattatgatcagtatgtga

SEQ ID NO: 42664 - DNA, 25 bp, Probe Sequence
gagcatcatgaactcgtttgtaaac

SEQ ID NO: 42665 - DNA, 25 bp, Probe Sequence
tgagcatcatgaactcgtttgtaaa

SEQ ID NO: 42666 - DNA, 25 bp, Probe Sequence
ttatgatcagtatgtgaagacgcgg

SEQ ID NO: 42667 - DNA, 25 bp, Probe Sequence
cgggtaattatgatcagtatgtgaa

SEQ ID NO: 42668 - DNA, 25 bp, Probe Sequence
tacgggtaattatgatcagtatgtg

SEQ ID NO: 42669 - DNA, 25 bp, Probe Sequence
taattatgatcagtatgtgaagacg

SEQ ID NO: 42670 - DNA, 25 bp, Probe Sequence
ggtaattatgatcagtatgtgaaga

SEQ ID NO: 42671 - DNA, 25 bp, Probe Sequence
atgagcatcatgaactcgtttgtaa

SEQ ID NO: 42672 - DNA, 25 bp, Probe Sequence
gggtaattatgatcagtatgtgaag

SEQ ID NO: 42673 - DNA, 25 bp, Probe Sequence
atacgggtaattatgatcagtatgt

SEQ ID NO: 42674 - DNA, 25 bp, Probe Sequence
gtttgtaaacgacgtgtttgagcag

SEQ ID NO: 42675 - DNA, 25 bp, Probe Sequence
gtaattatgatcagtatgtgaagac

SEQ ID NO: 42676 - DNA, 25 bp, Probe Sequence
tatgatcagtatgtgaagacgcggc

SEQ ID NO: 42677 - DNA, 25 bp, Probe Sequence
gatcagtatgtgaagacgcggctag

SEQ ID NO: 42678 - DNA, 25 bp, Probe Sequence
tatacgggtaattatgatcagtatg

SEQ ID NO: 42679 - DNA, 25 bp, Probe Sequence
tttgtaaacgacgtgtttgagcagc

SEQ ID NO: 42680 - DNA, 25 bp, Probe Sequence
agcatcatgaactcgtttgtaaacg

SEQ ID NO: 42681 - DNA, 25 bp, Probe Sequence
cgtttgtaaacgacgtgtttgagca

SEQ ID NO: 42682 - DNA, 25 bp, Probe Sequence
atccaatgctcctcacatattaatt

SEQ ID NO: 42683 - DNA, 25 bp, Probe Sequence
aatccaatgctcctcacatattaat

SEQ ID NO: 42684 - DNA, 25 bp, Probe Sequence
caaatccaatgctcctcacatatta

SEQ ID NO: 42685 - DNA, 25 bp, Probe Sequence
taaggaatctcggaagctcattgtt

SEQ ID NO: 42686 - DNA, 25 bp, Probe Sequence
ccaaatccaatgctcctcacatatt

SEQ ID NO: 42687 - DNA, 25 bp, Probe Sequence
aaatccaatgctcctcacatattaa

SEQ ID NO: 42688 - DNA, 25 bp, Probe Sequence
gtaaggaatctcggaagctcattgt

SEQ ID NO: 42689 - DNA, 25 bp, Probe Sequence
accaaatccaatgctcctcacatat

SEQ ID NO: 42690 - DNA, 25 bp, Probe Sequence
ttctgagaagtcactggtctagatc

SEQ ID NO: 42691 - DNA, 25 bp, Probe Sequence
gttctgagaagtcactggtctagat

SEQ ID NO: 42692 - DNA, 25 bp, Probe Sequence
attcaactttgaccaggaaacagtg

SEQ ID NO: 42693 - DNA, 25 bp, Probe Sequence
cattcaactttgaccaggaaacagt

SEQ ID NO: 42694 - DNA, 25 bp, Probe Sequence
tccaatgctcctcacatattaattt

SEQ ID NO: 42695 - DNA, 25 bp, Probe Sequence
aaggaatctcggaagctcattgttc

SEQ ID NO: 42696 - DNA, 25 bp, Probe Sequence
cttaccatcctgtctaccagatgag

SEQ ID NO: 42697 - DNA, 25 bp, Probe Sequence
caactttgaccaggaaacagtgatc

SEQ ID NO: 42698 - DNA, 25 bp, Probe Sequence
caccaaatccaatgctcctcacata

SEQ ID NO: 42699 - DNA, 25 bp, Probe Sequence
atgaggaaatggcagttctgagaag

SEQ ID NO: 42700 - DNA, 25 bp, Probe Sequence
agttctgagaagtcactggtctaga

SEQ ID NO: 42701 - DNA, 25 bp, Probe Sequence
cgtaaggaatctcggaagctcattg

SEQ ID NO: 42702 - DNA, 25 bp, Probe Sequence
tcaactttgaccaggaaacagtgat

SEQ ID NO: 42703 - DNA, 25 bp, Probe Sequence
gatgaggaaatggcagttctgagaa

SEQ ID NO: 42704 - DNA, 25 bp, Probe Sequence
ttcaactttgaccaggaaacagtga

SEQ ID NO: 42705 - DNA, 25 bp, Probe Sequence
gagcattcaactttgaccaggaaac

SEQ ID NO: 42706 - DNA, 25 bp, Probe Sequence
tagatatgactactgacctacctcg

SEQ ID NO: 42707 - DNA, 25 bp, Probe Sequence
ggaagcaggtctcaattctgaatag

SEQ ID NO: 42708 - DNA, 25 bp, Probe Sequence
agatatgactactgacctacctcgc

SEQ ID NO: 42709 - DNA, 25 bp, Probe Sequence
gaagcaggtctcaattctgaatagc

SEQ ID NO: 42710 - DNA, 25 bp, Probe Sequence
gatatgactactgacctacctcgca

SEQ ID NO: 42711 - DNA, 25 bp, Probe Sequence
aggtctcaattctgaatagccagtg

SEQ ID NO: 42712 - DNA, 25 bp, Probe Sequence
caggtctcaattctgaatagccagt

SEQ ID NO: 42713 - DNA, 25 bp, Probe Sequence
tgtagatatgactactgacctacct

SEQ ID NO: 42714 - DNA, 25 bp, Probe Sequence
ctgtagatatgactactgacctacc

SEQ ID NO: 42715 - DNA, 25 bp, Probe Sequence
gtagatatgactactgacctacctc

SEQ ID NO: 42716 - DNA, 25 bp, Probe Sequence
ctgaaccaggatctgcctattactg

SEQ ID NO: 42717 - DNA, 25 bp, Probe Sequence
aagcaggtctcaattctgaatagcc

SEQ ID NO: 42718 - DNA, 25 bp, Probe Sequence
atatgactactgacctacctcgcag

SEQ ID NO: 42719 - DNA, 25 bp, Probe Sequence
actgtagatatgactactgacctac

SEQ ID NO: 42720 - DNA, 25 bp, Probe Sequence
tactgggacttggcatttaggattc

SEQ ID NO: 42721 - DNA, 25 bp, Probe Sequence
ggtctcaattctgaatagccagtgg

SEQ ID NO: 42722 - DNA, 25 bp, Probe Sequence
gaggcataagctgatgtttgtaaag

SEQ ID NO: 42723 - DNA, 25 bp, Probe Sequence
aactgtagatatgactactgaccta

SEQ ID NO: 42724 - DNA, 25 bp, Probe Sequence
tgtaaataaacgtgctctctgaatg

SEQ ID NO: 42725 - DNA, 25 bp, Probe Sequence
ctttgtaaataaacgtgctctctga

SEQ ID NO: 42726 - DNA, 25 bp, Probe Sequence
gtaaataaacgtgctctctgaatgc

SEQ ID NO: 42727 - DNA, 25 bp, Probe Sequence
tttgtaaataaacgtgctctctgaa

SEQ ID NO: 42728 - DNA, 25 bp, Probe Sequence
gcaggtctcaattctgaatagccag

SEQ ID NO: 42729 - DNA, 25 bp, Probe Sequence
ttgtaaataaacgtgctctctgaat

SEQ ID NO: 42730 - DNA, 25 bp, Probe Sequence
gatgatattgccacctacctcttac

SEQ ID NO: 42731 - DNA, 25 bp, Probe Sequence
gatattgccacctacctcttacatc

SEQ ID NO: 42732 - DNA, 25 bp, Probe Sequence
atattgccacctacctcttacatct

SEQ ID NO: 42733 - DNA, 25 bp, Probe Sequence
tattgccacctacctcttacatctt

SEQ ID NO: 42734 - DNA, 25 bp, Probe Sequence
tgatattgccacctacctcttacat

SEQ ID NO: 42735 - DNA, 25 bp, Probe Sequence
atgatattgccacctacctcttaca

SEQ ID NO: 42736 - DNA, 25 bp, Probe Sequence
cgatgatattgccacctacctctta

SEQ ID NO: 42737 - DNA, 25 bp, Probe Sequence
gtagatcggagtcagatgagtacat

SEQ ID NO: 42738 - DNA, 25 bp, Probe Sequence
gagtagatcggagtcagatgagtac

SEQ ID NO: 42739 - DNA, 25 bp, Probe Sequence
tagatcggagtcagatgagtacatg

SEQ ID NO: 42740 - DNA, 25 bp, Probe Sequence
agtagatcggagtcagatgagtaca

SEQ ID NO: 42741 - DNA, 25 bp, Probe Sequence
tgagtagatcggagtcagatgagta

SEQ ID NO: 42742 - DNA, 25 bp, Probe Sequence
ttgagtagatcggagtcagatgagt

SEQ ID NO: 42743 - DNA, 25 bp, Probe Sequence
attgccacctacctcttacatcttt

SEQ ID NO: 42744 - DNA, 25 bp, Probe Sequence
atttgagtagatcggagtcagatga

SEQ ID NO: 42745 - DNA, 25 bp, Probe Sequence
catttgagtagatcggagtcagatg

SEQ ID NO: 42746 - DNA, 25 bp, Probe Sequence
tcatttgagtagatcggagtcagat

SEQ ID NO: 42747 - DNA, 25 bp, Probe Sequence
ttcatttgagtagatcggagtcaga

SEQ ID NO: 42748 - DNA, 25 bp, Probe Sequence
gttcatttgagtagatcggagtcag

SEQ ID NO: 42749 - DNA, 25 bp, Probe Sequence
taggaatctttatctgagctgcttg

SEQ ID NO: 42750 - DNA, 25 bp, Probe Sequence
ataggaatctttatctgagctgctt

SEQ ID NO: 42751 - DNA, 25 bp, Probe Sequence
tttgagtagatcggagtcagatgag

SEQ ID NO: 42752 - DNA, 25 bp, Probe Sequence
gagttgcgatgatattgccacctac

SEQ ID NO: 42753 - DNA, 25 bp, Probe Sequence
tggttcatttgagtagatcggagtc

SEQ ID NO: 42754 - DNA, 25 bp, Probe Sequence
cacgacacataagaatccttccttg

SEQ ID NO: 42755 - DNA, 25 bp, Probe Sequence
atgatggagaacactggactgtata

SEQ ID NO: 42756 - DNA, 25 bp, Probe Sequence
acataagaatccttccttggtcctg

SEQ ID NO: 42757 - DNA, 25 bp, Probe Sequence
cacataagaatccttccttggtcct

SEQ ID NO: 42758 - DNA, 25 bp, Probe Sequence
gacacataagaatccttccttggtc

SEQ ID NO: 42759 - DNA, 25 bp, Probe Sequence
aatgatggagaacactggactgtat

SEQ ID NO: 42760 - DNA, 25 bp, Probe Sequence
aattatggtaggcaactaacggtgt

SEQ ID NO: 42761 - DNA, 25 bp, Probe Sequence
acacataagaatccttccttggtcc

SEQ ID NO: 42762 - DNA, 25 bp, Probe Sequence
acaatggttacaggtggatcttctt

SEQ ID NO: 42763 - DNA, 25 bp, Probe Sequence
attatggtaggcaactaacggtgtt

SEQ ID NO: 42764 - DNA, 25 bp, Probe Sequence
taagaatccttccttggtcctggta

SEQ ID NO: 42765 - DNA, 25 bp, Probe Sequence
caatggttacaggtggatcttcttg

SEQ ID NO: 42766 - DNA, 25 bp, Probe Sequence
cgacacataagaatccttccttggt

SEQ ID NO: 42767 - DNA, 25 bp, Probe Sequence
acgacacataagaatccttccttgg

SEQ ID NO: 42768 - DNA, 25 bp, Probe Sequence
cataagaatccttccttggtcctgg

SEQ ID NO: 42769 - DNA, 25 bp, Probe Sequence
cttacagcaatgatggagaacactg

SEQ ID NO: 42770 - DNA, 25 bp, Probe Sequence
atttcacaaccctcttccctatttc

SEQ ID NO: 42771 - DNA, 25 bp, Probe Sequence
caatgatggagaacactggactgta

SEQ ID NO: 42772 - DNA, 25 bp, Probe Sequence
ctcaaattatggtaggcaactaacg

SEQ ID NO: 42773 - DNA, 25 bp, Probe Sequence
gctcaaattatggtaggcaactaac

SEQ ID NO: 42774 - DNA, 25 bp, Probe Sequence
atggttacaggtggatcttcttgtt

SEQ ID NO: 42775 - DNA, 25 bp, Probe Sequence
aatggttacaggtggatcttcttgt

SEQ ID NO: 42776 - DNA, 25 bp, Probe Sequence
catttcacaaccctcttccctattt

SEQ ID NO: 42777 - DNA, 25 bp, Probe Sequence
tacatttcacaaccctcttccctat

SEQ ID NO: 42778 - DNA, 25 bp, Probe Sequence
gattgacaaggagatcagtgagatg

SEQ ID NO: 42779 - DNA, 25 bp, Probe Sequence
agattgacaaggagatcagtgagat

SEQ ID NO: 42780 - DNA, 25 bp, Probe Sequence
attgacaaggagatcagtgagatga

SEQ ID NO: 42781 - DNA, 25 bp, Probe Sequence
ttgacaaggagatcagtgagatgaa

SEQ ID NO: 42782 - DNA, 25 bp, Probe Sequence
gagattgacaaggagatcagtgaga

SEQ ID NO: 42783 - DNA, 25 bp, Probe Sequence
tgacaaggagatcagtgagatgaag

SEQ ID NO: 42784 - DNA, 25 bp, Probe Sequence
tcttgaaacttaaactctgtgcttg

SEQ ID NO: 42785 - DNA, 25 bp, Probe Sequence
gtcttgaaacttaaactctgtgctt

SEQ ID NO: 42786 - DNA, 25 bp, Probe Sequence
cttgaaacttaaactctgtgcttgt

SEQ ID NO: 42787 - DNA, 25 bp, Probe Sequence
tgaaacttaaactctgtgcttgtaa

SEQ ID NO: 42788 - DNA, 25 bp, Probe Sequence
ttgaaacttaaactctgtgcttgta

SEQ ID NO: 42789 - DNA, 25 bp, Probe Sequence
catggaggagattgacaaggagatc

SEQ ID NO: 42790 - DNA, 25 bp, Probe Sequence
ggagattgacaaggagatcagtgag

SEQ ID NO: 42791 - DNA, 25 bp, Probe Sequence
gaggagattgacaaggagatcagtg

SEQ ID NO: 42792 - DNA, 25 bp, Probe Sequence
cgtcttgaaacttaaactctgtgct

SEQ ID NO: 42793 - DNA, 25 bp, Probe Sequence
gaaacttaaactctgtgcttgtaaa

SEQ ID NO: 42794 - DNA, 25 bp, Probe Sequence
aggagattgacaaggagatcagtga

SEQ ID NO: 42795 - DNA, 25 bp, Probe Sequence
atggaggagattgacaaggagatca

SEQ ID NO: 42796 - DNA, 25 bp, Probe Sequence
gtggctgaagagttccttaagaatt

SEQ ID NO: 42797 - DNA, 25 bp, Probe Sequence
cttcatggaggagattgacaaggag

SEQ ID NO: 42798 - DNA, 25 bp, Probe Sequence
gagcagagaacttctttatccttcg

SEQ ID NO: 42799 - DNA, 25 bp, Probe Sequence
cgagcagagaacttctttatccttc

SEQ ID NO: 42800 - DNA, 25 bp, Probe Sequence
tcatggaggagattgacaaggagat

SEQ ID NO: 42801 - DNA, 25 bp, Probe Sequence
gacaaggagatcagtgagatgaagc

SEQ ID NO: 42802 - DNA, 25 bp, Probe Sequence
gaagatgaagtgatgagagcctatt

SEQ ID NO: 42803 - DNA, 25 bp, Probe Sequence
tgttgcctatcagaagtcaattcaa

SEQ ID NO: 42804 - DNA, 25 bp, Probe Sequence
ggaagatgaagtgatgagagcctat

SEQ ID NO: 42805 - DNA, 25 bp, Probe Sequence
agatacagatattgtggatgaagcc

SEQ ID NO: 42806 - DNA, 25 bp, Probe Sequence
aagatacagatattgtggatgaagc

SEQ ID NO: 42807 - DNA, 25 bp, Probe Sequence
ctgttgcctatcagaagtcaattca

SEQ ID NO: 42808 - DNA, 25 bp, Probe Sequence
actgttgcctatcagaagtcaattc

SEQ ID NO: 42809 - DNA, 25 bp, Probe Sequence
cactgttgcctatcagaagtcaatt

SEQ ID NO: 42810 - DNA, 25 bp, Probe Sequence
aacaggaagatgaagtgatgagagc

SEQ ID NO: 42811 - DNA, 25 bp, Probe Sequence
attaagaatgaagctgataggacct

SEQ ID NO: 42812 - DNA, 25 bp, Probe Sequence
tatacagaagagagaagagcatgtc

SEQ ID NO: 42813 - DNA, 25 bp, Probe Sequence
gaatgaagctgataggaccttgata

SEQ ID NO: 42814 - DNA, 25 bp, Probe Sequence
taagaatgaagctgataggaccttg

SEQ ID NO: 42815 - DNA, 25 bp, Probe Sequence
atacagaagagagaagagcatgtct

SEQ ID NO: 42816 - DNA, 25 bp, Probe Sequence
ttaagaatgaagctgataggacctt

SEQ ID NO: 42817 - DNA, 25 bp, Probe Sequence
atacagatattgtggatgaagccat

SEQ ID NO: 42818 - DNA, 25 bp, Probe Sequence
gatacagatattgtggatgaagcca

SEQ ID NO: 42819 - DNA, 25 bp, Probe Sequence
aatgaagctgataggaccttgatat

SEQ ID NO: 42820 - DNA, 25 bp, Probe Sequence
ttatacagaagagagaagagcatgt

SEQ ID NO: 42821 - DNA, 25 bp, Probe Sequence
aattaagaatgaagctgataggacc

SEQ ID NO: 42822 - DNA, 25 bp, Probe Sequence
aagtgatgagagcctatttacaaca

SEQ ID NO: 42823 - DNA, 25 bp, Probe Sequence
aaacaaacaggaagatgaagtgatg

SEQ ID NO: 42824 - DNA, 25 bp, Probe Sequence
caaacaaacaggaagatgaagtgat

SEQ ID NO: 42825 - DNA, 25 bp, Probe Sequence
agccaaggtgagaaagaaatgtata

SEQ ID NO: 42826 - DNA, 25 bp, Probe Sequence
gaatatgttgccttcatcctaactg

SEQ ID NO: 42827 - DNA, 25 bp, Probe Sequence
aatatgttgccttcatcctaactgc

SEQ ID NO: 42828 - DNA, 25 bp, Probe Sequence
atatgttgccttcatcctaactgct

SEQ ID NO: 42829 - DNA, 25 bp, Probe Sequence
ggaatatgttgccttcatcctaact

SEQ ID NO: 42830 - DNA, 25 bp, Probe Sequence
ctgtgaggaatatgttgccttcatc

SEQ ID NO: 42831 - DNA, 25 bp, Probe Sequence
ctaatggttgctttgctgaatgttt

SEQ ID NO: 42832 - DNA, 25 bp, Probe Sequence
tatgttgccttcatcctaactgctg

SEQ ID NO: 42833 - DNA, 25 bp, Probe Sequence
taatggttgctttgctgaatgtttc

SEQ ID NO: 42834 - DNA, 25 bp, Probe Sequence
cctgtgaggaatatgttgccttcat

SEQ ID NO: 42835 - DNA, 25 bp, Probe Sequence
atcaaatgacctgtgaggaatatgt

SEQ ID NO: 42836 - DNA, 25 bp, Probe Sequence
caaatgacctgtgaggaatatgttg

SEQ ID NO: 42837 - DNA, 25 bp, Probe Sequence
tcaaatgacctgtgaggaatatgtt

SEQ ID NO: 42838 - DNA, 25 bp, Probe Sequence
tgtgaggaatatgttgccttcatcc

SEQ ID NO: 42839 - DNA, 25 bp, Probe Sequence
aatgacctgtgaggaatatgttgcc

SEQ ID NO: 42840 - DNA, 25 bp, Probe Sequence
aatggttgctttgctgaatgtttct

SEQ ID NO: 42841 - DNA, 25 bp, Probe Sequence
aagatcaaatgacctgtgaggaata

SEQ ID NO: 42842 - DNA, 25 bp, Probe Sequence
gatcaaatgacctgtgaggaatatg

SEQ ID NO: 42843 - DNA, 25 bp, Probe Sequence
agatcaaatgacctgtgaggaatat

SEQ ID NO: 42844 - DNA, 25 bp, Probe Sequence
caagatcaaatgacctgtgaggaat

SEQ ID NO: 42845 - DNA, 25 bp, Probe Sequence
aaatgacctgtgaggaatatgttgc

SEQ ID NO: 42846 - DNA, 25 bp, Probe Sequence
gacctgtgaggaatatgttgccttc

SEQ ID NO: 42847 - DNA, 25 bp, Probe Sequence
gctaatggttgctttgctgaatgtt

SEQ ID NO: 42848 - DNA, 25 bp, Probe Sequence
atggttgctttgctgaatgtttctg

SEQ ID NO: 42849 - DNA, 25 bp, Probe Sequence
tcaagatcaaatgacctgtgaggaa

SEQ ID NO: 42850 - DNA, 25 bp, Probe Sequence
ttattccagaagcattaaggtaacc

SEQ ID NO: 42851 - DNA, 25 bp, Probe Sequence
aatcctgtcggtattccttggtatc

SEQ ID NO: 42852 - DNA, 25 bp, Probe Sequence
ctgtcggtattccttggtatctgaa

SEQ ID NO: 42853 - DNA, 25 bp, Probe Sequence
ctctaatgctgctagtcgtagtctt

SEQ ID NO: 42854 - DNA, 25 bp, Probe Sequence
cataactgttaattctcagccatct

SEQ ID NO: 42855 - DNA, 25 bp, Probe Sequence
tcataactgttaattctcagccatc

SEQ ID NO: 42856 - DNA, 25 bp, Probe Sequence
aataacattggaatacaggacttgt

SEQ ID NO: 42857 - DNA, 25 bp, Probe Sequence
atcctgtcggtattccttggtatct

SEQ ID NO: 42858 - DNA, 25 bp, Probe Sequence
aatcataactgttaattctcagcca

SEQ ID NO: 42859 - DNA, 25 bp, Probe Sequence
ttatgaatcctgtcggtattccttg

SEQ ID NO: 42860 - DNA, 25 bp, Probe Sequence
atcataactgttaattctcagccat

SEQ ID NO: 42861 - DNA, 25 bp, Probe Sequence
tggcagtaggttataattggtggtt

SEQ ID NO: 42862 - DNA, 25 bp, Probe Sequence
ataactgttaattctcagccatctt

SEQ ID NO: 42863 - DNA, 25 bp, Probe Sequence
aatcctatttatgaatcctgtcggt

SEQ ID NO: 42864 - DNA, 25 bp, Probe Sequence
gtattccattactatgtggcttagg

SEQ ID NO: 42865 - DNA, 25 bp, Probe Sequence
atgtggcttagggatttatttgttt

SEQ ID NO: 42866 - DNA, 25 bp, Probe Sequence
gctttgtttcttctaagtaggcatt

SEQ ID NO: 42867 - DNA, 25 bp, Probe Sequence
ctgctgctttgtttcttctaagtag

SEQ ID NO: 42868 - DNA, 25 bp, Probe Sequence
tctgctgctttgtttcttctaagta

SEQ ID NO: 42869 - DNA, 25 bp, Probe Sequence
acttcttagggaaatgttaggttca

SEQ ID NO: 42870 - DNA, 25 bp, Probe Sequence
taacccattgccaagtatcattctt

SEQ ID NO: 42871 - DNA, 25 bp, Probe Sequence
tcctatttatgaatcctgtcggtat

SEQ ID NO: 42872 - DNA, 25 bp, Probe Sequence
atcctatttatgaatcctgtcggta

SEQ ID NO: 42873 - DNA, 25 bp, Probe Sequence
attaaggtaacccattgccaagtat

SEQ ID NO: 42874 - DNA, 25 bp, Probe Sequence
tatggcgtatatcttggttcatctt

SEQ ID NO: 42875 - DNA, 25 bp, Probe Sequence
atatggcgtatatcttggttcatct

SEQ ID NO: 42876 - DNA, 25 bp, Probe Sequence
tataagacctacaatggaaccaacc

SEQ ID NO: 42877 - DNA, 25 bp, Probe Sequence
atggcgtatatcttggttcatcttc

SEQ ID NO: 42878 - DNA, 25 bp, Probe Sequence
gtataagacctacaatggaaccaac

SEQ ID NO: 42879 - DNA, 25 bp, Probe Sequence
ggcgtatatcttggttcatcttcaa

SEQ ID NO: 42880 - DNA, 25 bp, Probe Sequence
tggcgtatatcttggttcatcttca

SEQ ID NO: 42881 - DNA, 25 bp, Probe Sequence
cgagtcatgtagtgtggtagaatta

SEQ ID NO: 42882 - DNA, 25 bp, Probe Sequence
tactgtagtccaataagatagcagc

SEQ ID NO: 42883 - DNA, 25 bp, Probe Sequence
gagtcatgtagtgtggtagaattaa

SEQ ID NO: 42884 - DNA, 25 bp, Probe Sequence
gtgtgaggctctagtagtgaagaag

SEQ ID NO: 42885 - DNA, 25 bp, Probe Sequence
cctacttacctactacctgcgactt

SEQ ID NO: 42886 - DNA, 25 bp, Probe Sequence
agcattcagaaagtgtataagacct

SEQ ID NO: 42887 - DNA, 25 bp, Probe Sequence
cagcattcagaaagtgtataagacc

SEQ ID NO: 42888 - DNA, 25 bp, Probe Sequence
gcagcattcagaaagtgtataagac

SEQ ID NO: 42889 - DNA, 25 bp, Probe Sequence
ctggagttcatttagttaaagcaca

SEQ ID NO: 42890 - DNA, 25 bp, Probe Sequence
cctctggagttcatttagttaaagc

SEQ ID NO: 42891 - DNA, 25 bp, Probe Sequence
gcctctggagttcatttagttaaag

SEQ ID NO: 42892 - DNA, 25 bp, Probe Sequence
tgtagtgtggtagaattaaaggagg

SEQ ID NO: 42893 - DNA, 25 bp, Probe Sequence
tctggagttcatttagttaaagcac

SEQ ID NO: 42894 - DNA, 25 bp, Probe Sequence
atatgtttacagagcaaaggtggaa

SEQ ID NO: 42895 - DNA, 25 bp, Probe Sequence
tagtgtggtagaattaaaggaggac

SEQ ID NO: 42896 - DNA, 25 bp, Probe Sequence
gtagtgtggtagaattaaaggagga

SEQ ID NO: 42897 - DNA, 25 bp, Probe Sequence
atcgcagcattcagaaagtgtataa

SEQ ID NO: 42898 - DNA, 25 bp, Probe Sequence
aaggagttatcatcagaggacaagt

SEQ ID NO: 42899 - DNA, 25 bp, Probe Sequence
tcattggaattgtcggtattggaat

SEQ ID NO: 42900 - DNA, 25 bp, Probe Sequence
ctcattggaattgtcggtattggaa

SEQ ID NO: 42901 - DNA, 25 bp, Probe Sequence
aggagttatcatcagaggacaagtc

SEQ ID NO: 42902 - DNA, 25 bp, Probe Sequence
attgagaccataatcagtgttaagc

SEQ ID NO: 42903 - DNA, 25 bp, Probe Sequence
tatgaagaggcttacaatgattacc

SEQ ID NO: 42904 - DNA, 25 bp, Probe Sequence
attggaattgtcggtattggaattg

SEQ ID NO: 42905 - DNA, 25 bp, Probe Sequence
cattggaattgtcggtattggaatt

SEQ ID NO: 42906 - DNA, 25 bp, Probe Sequence
tgaagaggcttacaatgattacctt

SEQ ID NO: 42907 - DNA, 25 bp, Probe Sequence
atgaagaggcttacaatgattacct

SEQ ID NO: 42908 - DNA, 25 bp, Probe Sequence
gtatgaagaggcttacaatgattac

SEQ ID NO: 42909 - DNA, 25 bp, Probe Sequence
gaccataatcagtgttaagctccag

SEQ ID NO: 42910 - DNA, 25 bp, Probe Sequence
gaagaggcttacaatgattacctta

SEQ ID NO: 42911 - DNA, 25 bp, Probe Sequence
ttgagaccataatcagtgttaagct

SEQ ID NO: 42912 - DNA, 25 bp, Probe Sequence
agaccataatcagtgttaagctcca

SEQ ID NO: 42913 - DNA, 25 bp, Probe Sequence
aaaggagttatcatcagaggacaag

SEQ ID NO: 42914 - DNA, 25 bp, Probe Sequence
ctgctgaagtaaccactggagtatt

SEQ ID NO: 42915 - DNA, 25 bp, Probe Sequence
tgagaccataatcagtgttaagctc

SEQ ID NO: 42916 - DNA, 25 bp, Probe Sequence
tcagaccatgtatgaagaggcttac

SEQ ID NO: 42917 - DNA, 25 bp, Probe Sequence
catcacctttccacttcaacatttc

SEQ ID NO: 42918 - DNA, 25 bp, Probe Sequence
ttggaattgtcggtattggaattgc

SEQ ID NO: 42919 - DNA, 25 bp, Probe Sequence
tcatcacctttccacttcaacattt

SEQ ID NO: 42920 - DNA, 25 bp, Probe Sequence
taaaggagttatcatcagaggacaa

SEQ ID NO: 42921 - DNA, 25 bp, Probe Sequence
gagaccataatcagtgttaagctcc

SEQ ID NO: 42922 - DNA, 25 bp, Probe Sequence
aatggatgctattctattctgctgc

SEQ ID NO: 42923 - DNA, 25 bp, Probe Sequence
ctgactaccttgcttacagattcat

SEQ ID NO: 42924 - DNA, 25 bp, Probe Sequence
gactaccttgcttacagattcatgg

SEQ ID NO: 42925 - DNA, 25 bp, Probe Sequence
tgactaccttgcttacagattcatg

SEQ ID NO: 42926 - DNA, 25 bp, Probe Sequence
ccttactagagaggttgagtgaatt

SEQ ID NO: 42927 - DNA, 25 bp, Probe Sequence
ttcaggtcctcagtggattacttaa

SEQ ID NO: 42928 - DNA, 25 bp, Probe Sequence
cttcaggtcctcagtggattactta

SEQ ID NO: 42929 - DNA, 25 bp, Probe Sequence
atggatgctattctattctgctgcc

SEQ ID NO: 42930 - DNA, 25 bp, Probe Sequence
tcaggtcctcagtggattacttaac

SEQ ID NO: 42931 - DNA, 25 bp, Probe Sequence
tatgggattctgactaccttgctta

SEQ ID NO: 42932 - DNA, 25 bp, Probe Sequence
aaatggatgctattctattctgctg

SEQ ID NO: 42933 - DNA, 25 bp, Probe Sequence
ggaaatggatgctattctattctgc

SEQ ID NO: 42934 - DNA, 25 bp, Probe Sequence
ctctgggaaatggatgctattctat

SEQ ID NO: 42935 - DNA, 25 bp, Probe Sequence
atatttacattcagccagggaagag

SEQ ID NO: 42936 - DNA, 25 bp, Probe Sequence
gccaagtatatgagaaaggtaagtc

SEQ ID NO: 42937 - DNA, 25 bp, Probe Sequence
tgggaaatggatgctattctattct

SEQ ID NO: 42938 - DNA, 25 bp, Probe Sequence
tctgggaaatggatgctattctatt

SEQ ID NO: 42939 - DNA, 25 bp, Probe Sequence
gggaaatggatgctattctattctg

SEQ ID NO: 42940 - DNA, 25 bp, Probe Sequence
ctgggaaatggatgctattctattc

SEQ ID NO: 42941 - DNA, 25 bp, Probe Sequence
tctctgggaaatggatgctattcta

SEQ ID NO: 42942 - DNA, 25 bp, Probe Sequence
ctaccttgcttacagattcatggtt

SEQ ID NO: 42943 - DNA, 25 bp, Probe Sequence
acgccattaagtgtctgtttatatt

SEQ ID NO: 42944 - DNA, 25 bp, Probe Sequence
gaaatggatgctattctattctgct

SEQ ID NO: 42945 - DNA, 25 bp, Probe Sequence
tgtctctctgattgggcttctaaat

SEQ ID NO: 42946 - DNA, 25 bp, Probe Sequence
aatccagacttcacacagtattctc

SEQ ID NO: 42947 - DNA, 25 bp, Probe Sequence
caatccagacttcacacagtattct

SEQ ID NO: 42948 - DNA, 25 bp, Probe Sequence
ccaatccagacttcacacagtattc

SEQ ID NO: 42949 - DNA, 25 bp, Probe Sequence
atccagacttcacacagtattctcc

SEQ ID NO: 42950 - DNA, 25 bp, Probe Sequence
ctattacagagactggagtcaggag

SEQ ID NO: 42951 - DNA, 25 bp, Probe Sequence
tattacagagactggagtcaggaga

SEQ ID NO: 42952 - DNA, 25 bp, Probe Sequence
caagaagctattacagagactggag

SEQ ID NO: 42953 - DNA, 25 bp, Probe Sequence
aagaagctattacagagactggagt

SEQ ID NO: 42954 - DNA, 25 bp, Probe Sequence
agaagctattacagagactggagtc

SEQ ID NO: 42955 - DNA, 25 bp, Probe Sequence
aagctattacagagactggagtcag

SEQ ID NO: 42956 - DNA, 25 bp, Probe Sequence
gaagctattacagagactggagtca

SEQ ID NO: 42957 - DNA, 25 bp, Probe Sequence
ctgatcttgtgccattcttgacctt

SEQ ID NO: 42958 - DNA, 25 bp, Probe Sequence
acactaatgtttacagcacctaagc

SEQ ID NO: 42959 - DNA, 25 bp, Probe Sequence
tgccttgctacactaatgtttacag

SEQ ID NO: 42960 - DNA, 25 bp, Probe Sequence
ctgccttgctacactaatgtttaca

SEQ ID NO: 42961 - DNA, 25 bp, Probe Sequence
taaccaactcacctcccttctctta

SEQ ID NO: 42962 - DNA, 25 bp, Probe Sequence
tacactaatgtttacagcacctaag

SEQ ID NO: 42963 - DNA, 25 bp, Probe Sequence
ctacactaatgtttacagcacctaa

SEQ ID NO: 42964 - DNA, 25 bp, Probe Sequence
agtgtactgaaataaagtcgttccg

SEQ ID NO: 42965 - DNA, 25 bp, Probe Sequence
attacagagactggagtcaggagag

SEQ ID NO: 42966 - DNA, 25 bp, Probe Sequence
ccaagaagctattacagagactgga

SEQ ID NO: 42967 - DNA, 25 bp, Probe Sequence
tgatcttgtgccattcttgaccttg

SEQ ID NO: 42968 - DNA, 25 bp, Probe Sequence
cctgccttgctacactaatgtttac

SEQ ID NO: 42969 - DNA, 25 bp, Probe Sequence
tcctgccttgctacactaatgttta

SEQ ID NO: 42970 - DNA, 25 bp, Probe Sequence
atcagagaactcacacaggttagta

SEQ ID NO: 42971 - DNA, 25 bp, Probe Sequence
tcagagaactcacacaggttagtaa

SEQ ID NO: 42972 - DNA, 25 bp, Probe Sequence
gagaactcacacaggttagtaacag

SEQ ID NO: 42973 - DNA, 25 bp, Probe Sequence
cagagaactcacacaggttagtaac

SEQ ID NO: 42974 - DNA, 25 bp, Probe Sequence
agagaactcacacaggttagtaaca

SEQ ID NO: 42975 - DNA, 25 bp, Probe Sequence
tcatcagagaactcacacaggttag

SEQ ID NO: 42976 - DNA, 25 bp, Probe Sequence
agaactcacacaggttagtaacagt

SEQ ID NO: 42977 - DNA, 25 bp, Probe Sequence
gtcatcagagaactcacacaggtta

SEQ ID NO: 42978 - DNA, 25 bp, Probe Sequence
catcagagaactcacacaggttagt

SEQ ID NO: 42979 - DNA, 25 bp, Probe Sequence
ccgtcttatgagtcatcagagaact

SEQ ID NO: 42980 - DNA, 25 bp, Probe Sequence
gaactcacacaggttagtaacagtg

SEQ ID NO: 42981 - DNA, 25 bp, Probe Sequence
ataaccctttgtggagaatgagatt

SEQ ID NO: 42982 - DNA, 25 bp, Probe Sequence
gataaccctttgtggagaatgagat

SEQ ID NO: 42983 - DNA, 25 bp, Probe Sequence
accctataaatgttctgaatgtgga

SEQ ID NO: 42984 - DNA, 25 bp, Probe Sequence
acacaggagagaaaccgtataaatg

SEQ ID NO: 42985 - DNA, 25 bp, Probe Sequence
cacacaggagagaaaccgtataaat

SEQ ID NO: 42986 - DNA, 25 bp, Probe Sequence
ctttgaatgtttgacttgtgggaaa

SEQ ID NO: 42987 - DNA, 25 bp, Probe Sequence
gaccctataaatgttctgaatgtgg

SEQ ID NO: 42988 - DNA, 25 bp, Probe Sequence
caagggcaataataaggtggaattt

SEQ ID NO: 42989 - DNA, 25 bp, Probe Sequence
caatttaatcaggcaccagagaatc

SEQ ID NO: 42990 - DNA, 25 bp, Probe Sequence
ccctataaatgttctgaatgtggag

SEQ ID NO: 42991 - DNA, 25 bp, Probe Sequence
ctgataaccctttgtggagaatgag

SEQ ID NO: 42992 - DNA, 25 bp, Probe Sequence
ggagagagaccctataaatgttctg

SEQ ID NO: 42993 - DNA, 25 bp, Probe Sequence
tctttgaatgtttgacttgtgggaa

SEQ ID NO: 42994 - DNA, 25 bp, Probe Sequence
gacattctctacactcagatgactc

SEQ ID NO: 42995 - DNA, 25 bp, Probe Sequence
acattctctacactcagatgactct

SEQ ID NO: 42996 - DNA, 25 bp, Probe Sequence
ttctctacactcagatgactctacc

SEQ ID NO: 42997 - DNA, 25 bp, Probe Sequence
aaggcagaagtgatagttcaagtaa

SEQ ID NO: 42998 - DNA, 25 bp, Probe Sequence
ggcagaagtgatagttcaagtaaga

SEQ ID NO: 42999 - DNA, 25 bp, Probe Sequence
aggcagaagtgatagttcaagtaag

SEQ ID NO: 43000 - DNA, 25 bp, Probe Sequence
caaggcagaagtgatagttcaagta

SEQ ID NO: 43001 - DNA, 25 bp, Probe Sequence
attctctacactcagatgactctac

SEQ ID NO: 43002 - DNA, 25 bp, Probe Sequence
cattctctacactcagatgactcta

SEQ ID NO: 43003 - DNA, 25 bp, Probe Sequence
ctctacactcagatgactctaccag

SEQ ID NO: 43004 - DNA, 25 bp, Probe Sequence
ggacattctctacactcagatgact

SEQ ID NO: 43005 - DNA, 25 bp, Probe Sequence
agttcaagtaagaaggatgtgattg

SEQ ID NO: 43006 - DNA, 25 bp, Probe Sequence
tctctacactcagatgactctacca

SEQ ID NO: 43007 - DNA, 25 bp, Probe Sequence
tatctggaagttcttctgaagttgg

SEQ ID NO: 43008 - DNA, 25 bp, Probe Sequence
gcagaagtgatagttcaagtaagaa

SEQ ID NO: 43009 - DNA, 25 bp, Probe Sequence
aacaaggcagaagtgatagttcaag

SEQ ID NO: 43010 - DNA, 25 bp, Probe Sequence
tcttatctggaagttcttctgaagt

SEQ ID NO: 43011 - DNA, 25 bp, Probe Sequence
tgataagaatgttctggacagtgaa

SEQ ID NO: 43012 - DNA, 25 bp, Probe Sequence
ttgataagaatgttctggacagtga

SEQ ID NO: 43013 - DNA, 25 bp, Probe Sequence
taagaatgttctggacagtgaagat

SEQ ID NO: 43014 - DNA, 25 bp, Probe Sequence
ataagaatgttctggacagtgaaga

SEQ ID NO: 43015 - DNA, 25 bp, Probe Sequence
gaatgttctggacagtgaagatgtt

SEQ ID NO: 43016 - DNA, 25 bp, Probe Sequence
tctacactcagatgactctaccagt

SEQ ID NO: 43017 - DNA, 25 bp, Probe Sequence
ttatctggaagttcttctgaagttg

SEQ ID NO: 43018 - DNA, 25 bp, Probe Sequence
atcgactggattgaggagaccatag

SEQ ID NO: 43019 - DNA, 25 bp, Probe Sequence
catcgactggattgaggagaccata

SEQ ID NO: 43020 - DNA, 25 bp, Probe Sequence
cttcatcgactggattgaggagacc

SEQ ID NO: 43021 - DNA, 25 bp, Probe Sequence
ccttcatcgactggattgaggagac

SEQ ID NO: 43022 - DNA, 25 bp, Probe Sequence
atcaactctgagctgtttgtgcatc

SEQ ID NO: 43023 - DNA, 25 bp, Probe Sequence
catcaactctgagctgtttgtgcat

SEQ ID NO: 43024 - DNA, 25 bp, Probe Sequence
tcatcgactggattgaggagaccat

SEQ ID NO: 43025 - DNA, 25 bp, Probe Sequence
ttcatcgactggattgaggagacca

SEQ ID NO: 43026 - DNA, 25 bp, Probe Sequence
ctataagcactgctccaggtggaac

SEQ ID NO: 43027 - DNA, 25 bp, Probe Sequence
tgagtacaaccttgctgtgaaggag

SEQ ID NO: 43028 - DNA, 25 bp, Probe Sequence
gtgagtacaaccttgctgtgaagga

SEQ ID NO: 43029 - DNA, 25 bp, Probe Sequence
gagtacaaccttgctgtgaaggagg

SEQ ID NO: 43030 - DNA, 25 bp, Probe Sequence
gatccccatcaactctgagctgttt

SEQ ID NO: 43031 - DNA, 25 bp, Probe Sequence
ctttggctgcaacttcatctggaag

SEQ ID NO: 43032 - DNA, 25 bp, Probe Sequence
atccccatcaactctgagctgtttg

SEQ ID NO: 43033 - DNA, 25 bp, Probe Sequence
gaatcgctatctccttcctcaactg

SEQ ID NO: 43034 - DNA, 25 bp, Probe Sequence
ctaaagttcacaagaaatgctacct

SEQ ID NO: 43035 - DNA, 25 bp, Probe Sequence
actaaagttcacaagaaatgctacc

SEQ ID NO: 43036 - DNA, 25 bp, Probe Sequence
gaggcactaaagttcacaagaaatg

SEQ ID NO: 43037 - DNA, 25 bp, Probe Sequence
taaagttcacaagaaatgctacctt

SEQ ID NO: 43038 - DNA, 25 bp, Probe Sequence
atggcaaagaatggacttgtaattt

SEQ ID NO: 43039 - DNA, 25 bp, Probe Sequence
cactaaagttcacaagaaatgctac

SEQ ID NO: 43040 - DNA, 25 bp, Probe Sequence
caagagatacatatgcgagttcacc

SEQ ID NO: 43041 - DNA, 25 bp, Probe Sequence
gagatacatatgcgagttcaccatc

SEQ ID NO: 43042 - DNA, 25 bp, Probe Sequence
cgaggcactaaagttcacaagaaat

SEQ ID NO: 43043 - DNA, 25 bp, Probe Sequence
aagagatacatatgcgagttcacca

SEQ ID NO: 43044 - DNA, 25 bp, Probe Sequence
catggcaaagaatggacttgtaatt

SEQ ID NO: 43045 - DNA, 25 bp, Probe Sequence
agagatacatatgcgagttcaccat

SEQ ID NO: 43046 - DNA, 25 bp, Probe Sequence
aagaaatgctaccttgcttcagaag

SEQ ID NO: 43047 - DNA, 25 bp, Probe Sequence
aatcgctatctccttcctcaactgg

SEQ ID NO: 43048 - DNA, 25 bp, Probe Sequence
agaaggtttgaagcatttccatgag

SEQ ID NO: 43049 - DNA, 25 bp, Probe Sequence
cagaaggtttgaagcatttccatga

SEQ ID NO: 43050 - DNA, 25 bp, Probe Sequence
agatacatatgcgagttcaccatcc

SEQ ID NO: 43051 - DNA, 25 bp, Probe Sequence
tcagaaggtttgaagcatttccatg

SEQ ID NO: 43052 - DNA, 25 bp, Probe Sequence
gagagacaaggatggagatctgaag

SEQ ID NO: 43053 - DNA, 25 bp, Probe Sequence
cgagtgagagacaaggatggagatc

SEQ ID NO: 43054 - DNA, 25 bp, Probe Sequence
aaagaatggacttgtaatttgcatc

SEQ ID NO: 43055 - DNA, 25 bp, Probe Sequence
gagacaaggatggagatctgaagac

SEQ ID NO: 43056 - DNA, 25 bp, Probe Sequence
acttgtaatttgcatcctggtgatc

SEQ ID NO: 43057 - DNA, 25 bp, Probe Sequence
ctatcttgcttcctacctacatctg

SEQ ID NO: 43058 - DNA, 25 bp, Probe Sequence
tctatcttgcttcctacctacatct

SEQ ID NO: 43059 - DNA, 25 bp, Probe Sequence
gtctatcttgcttcctacctacatc

SEQ ID NO: 43060 - DNA, 25 bp, Probe Sequence
taggaacaggagagtagactaggat

SEQ ID NO: 43061 - DNA, 25 bp, Probe Sequence
ttaggaacaggagagtagactagga

SEQ ID NO: 43062 - DNA, 25 bp, Probe Sequence
tatcttgcttcctacctacatctgc

SEQ ID NO: 43063 - DNA, 25 bp, Probe Sequence
cagtgcctcaagtacatccttatta

SEQ ID NO: 43064 - DNA, 25 bp, Probe Sequence
agtgcctcaagtacatccttattag

SEQ ID NO: 43065 - DNA, 25 bp, Probe Sequence
gccttgattgctcctagttatatac

SEQ ID NO: 43066 - DNA, 25 bp, Probe Sequence
ggaacaggagagtagactaggattc

SEQ ID NO: 43067 - DNA, 25 bp, Probe Sequence
aggaacaggagagtagactaggatt

SEQ ID NO: 43068 - DNA, 25 bp, Probe Sequence
agtgaatgttggatctcagactaac

SEQ ID NO: 43069 - DNA, 25 bp, Probe Sequence
caagtgaatgttggatctcagacta

SEQ ID NO: 43070 - DNA, 25 bp, Probe Sequence
aagtgaatgttggatctcagactaa

SEQ ID NO: 43071 - DNA, 25 bp, Probe Sequence
acattgttgattgttatgactggta

SEQ ID NO: 43072 - DNA, 25 bp, Probe Sequence
tacattgttgattgttatgactggt

SEQ ID NO: 43073 - DNA, 25 bp, Probe Sequence
ttcaagtgaatgttggatctcagac

SEQ ID NO: 43074 - DNA, 25 bp, Probe Sequence
tgttgattgttatgactggtacact

SEQ ID NO: 43075 - DNA, 25 bp, Probe Sequence
tgattgttatgactggtacactctg

SEQ ID NO: 43076 - DNA, 25 bp, Probe Sequence
ttgattgttatgactggtacactct

SEQ ID NO: 43077 - DNA, 25 bp, Probe Sequence
gttgattgttatgactggtacactc

SEQ ID NO: 43078 - DNA, 25 bp, Probe Sequence
gtgaatgttggatctcagactaacc

SEQ ID NO: 43079 - DNA, 25 bp, Probe Sequence
cattgttgattgttatgactggtac

SEQ ID NO: 43080 - DNA, 25 bp, Probe Sequence
ttgttgattgttatgactggtacac

SEQ ID NO: 43081 - DNA, 25 bp, Probe Sequence
ctagccttgtggagtatatagatgc

SEQ ID NO: 43082 - DNA, 25 bp, Probe Sequence
gtagagttagtcactgtcaagtcat

SEQ ID NO: 43083 - DNA, 25 bp, Probe Sequence
gaacaattcagagatgcttctaaga

SEQ ID NO: 43084 - DNA, 25 bp, Probe Sequence
tagagttagtcactgtcaagtcatt

SEQ ID NO: 43085 - DNA, 25 bp, Probe Sequence
ataagcatctagccaaggatcattc

SEQ ID NO: 43086 - DNA, 25 bp, Probe Sequence
cataagcatctagccaaggatcatt

SEQ ID NO: 43087 - DNA, 25 bp, Probe Sequence
ttcagagatgcttctaagatccttg

SEQ ID NO: 43088 - DNA, 25 bp, Probe Sequence
gagatgcttctaagatccttgttga

SEQ ID NO: 43089 - DNA, 25 bp, Probe Sequence
agagatgcttctaagatccttgttg

SEQ ID NO: 43090 - DNA, 25 bp, Probe Sequence
cagagatgcttctaagatccttgtt

SEQ ID NO: 43091 - DNA, 25 bp, Probe Sequence
agatgcttctaagatccttgttgac

SEQ ID NO: 43092 - DNA, 25 bp, Probe Sequence
attcagagatgcttctaagatcctt

SEQ ID NO: 43093 - DNA, 25 bp, Probe Sequence
aattcagagatgcttctaagatcct

SEQ ID NO: 43094 - DNA, 25 bp, Probe Sequence
caattcagagatgcttctaagatcc

SEQ ID NO: 43095 - DNA, 25 bp, Probe Sequence
ggtagagttagtcactgtcaagtca

SEQ ID NO: 43096 - DNA, 25 bp, Probe Sequence
tggtagagttagtcactgtcaagtc

SEQ ID NO: 43097 - DNA, 25 bp, Probe Sequence
aatgttacctgtgccagaattagaa

SEQ ID NO: 43098 - DNA, 25 bp, Probe Sequence
taagcatctagccaaggatcattct

SEQ ID NO: 43099 - DNA, 25 bp, Probe Sequence
ttgaatgttacctgtgccagaatta

SEQ ID NO: 43100 - DNA, 25 bp, Probe Sequence
tcagagatgcttctaagatccttgt

SEQ ID NO: 43101 - DNA, 25 bp, Probe Sequence
aacaattcagagatgcttctaagat

SEQ ID NO: 43102 - DNA, 25 bp, Probe Sequence
tcataagcatctagccaaggatcat

SEQ ID NO: 43103 - DNA, 25 bp, Probe Sequence
gaatgttacctgtgccagaattaga

SEQ ID NO: 43104 - DNA, 25 bp, Probe Sequence
actagccttgtggagtatatagatg

SEQ ID NO: 43105 - DNA, 25 bp, Probe Sequence
catctagccaggaatctattgtgtt

SEQ ID NO: 43106 - DNA, 25 bp, Probe Sequence
tactatgattgtgtatgtgccgcta

SEQ ID NO: 43107 - DNA, 25 bp, Probe Sequence
ccatctagccaggaatctattgtgt

SEQ ID NO: 43108 - DNA, 25 bp, Probe Sequence
ttactatgattgtgtatgtgccgct

SEQ ID NO: 43109 - DNA, 25 bp, Probe Sequence
atttactatgattgtgtatgtgccg

SEQ ID NO: 43110 - DNA, 25 bp, Probe Sequence
actatgattgtgtatgtgccgctac

SEQ ID NO: 43111 - DNA, 25 bp, Probe Sequence
atctagccaggaatctattgtgttt

SEQ ID NO: 43112 - DNA, 25 bp, Probe Sequence
tttactatgattgtgtatgtgccgc

SEQ ID NO: 43113 - DNA, 25 bp, Probe Sequence
ctatgattgtgtatgtgccgctacc

SEQ ID NO: 43114 - DNA, 25 bp, Probe Sequence
aatttactatgattgtgtatgtgcc

SEQ ID NO: 43115 - DNA, 25 bp, Probe Sequence
cccatctagccaggaatctattgtg

SEQ ID NO: 43116 - DNA, 25 bp, Probe Sequence
tatgattgtgtatgtgccgctacca

SEQ ID NO: 43117 - DNA, 25 bp, Probe Sequence
tttcttctgccaatttactatgatt

SEQ ID NO: 43118 - DNA, 25 bp, Probe Sequence
ttctgccaatttactatgattgtgt

SEQ ID NO: 43119 - DNA, 25 bp, Probe Sequence
tctaccttggaactgtattagataa

SEQ ID NO: 43120 - DNA, 25 bp, Probe Sequence
ttctaccttggaactgtattagata

SEQ ID NO: 43121 - DNA, 25 bp, Probe Sequence
cttctgccaatttactatgattgtg

SEQ ID NO: 43122 - DNA, 25 bp, Probe Sequence
tcttctgccaatttactatgattgt

SEQ ID NO: 43123 - DNA, 25 bp, Probe Sequence
tctgccaatttactatgattgtgta

SEQ ID NO: 43124 - DNA, 25 bp, Probe Sequence
tctagccaggaatctattgtgtttt

SEQ ID NO: 43125 - DNA, 25 bp, Probe Sequence
gccaatttactatgattgtgtatgt

SEQ ID NO: 43126 - DNA, 25 bp, Probe Sequence
tgccaatttactatgattgtgtatg

SEQ ID NO: 43127 - DNA, 25 bp, Probe Sequence
tttcagtagaaacgggatttcacca

SEQ ID NO: 43128 - DNA, 25 bp, Probe Sequence
tttctaccttggaactgtattagat

SEQ ID NO: 43129 - DNA, 25 bp, Probe Sequence
ctcaccccaaagtattaaaagtagc

SEQ ID NO: 43130 - DNA, 25 bp, Probe Sequence
gctcaccccaaagtattaaaagtag

SEQ ID NO: 43131 - DNA, 25 bp, Probe Sequence
ggctcaccccaaagtattaaaagta

SEQ ID NO: 43132 - DNA, 25 bp, Probe Sequence
cgagaagaaggaggaacccaagtag

SEQ ID NO: 43133 - DNA, 25 bp, Probe Sequence
tcaccccaaagtattaaaagtagct

SEQ ID NO: 43134 - DNA, 25 bp, Probe Sequence
gagaagaaggaggaacccaagtagc

SEQ ID NO: 43135 - DNA, 25 bp, Probe Sequence
caccccaaagtattaaaagtagctt

SEQ ID NO: 43136 - DNA, 25 bp, Probe Sequence
aaaggcaaacgagaagaaggaggaa

SEQ ID NO: 43137 - DNA, 25 bp, Probe Sequence
aagaaggaggaacccaagtagcttt

SEQ ID NO: 43138 - DNA, 25 bp, Probe Sequence
aaacgagaagaaggaggaacccaag

SEQ ID NO: 43139 - DNA, 25 bp, Probe Sequence
acgagaagaaggaggaacccaagta

SEQ ID NO: 43140 - DNA, 25 bp, Probe Sequence
caaacgagaagaaggaggaacccaa

SEQ ID NO: 43141 - DNA, 25 bp, Probe Sequence
gaagaaggaggaacccaagtagctt

SEQ ID NO: 43142 - DNA, 25 bp, Probe Sequence
agaaggaggaacccaagtagctttg

SEQ ID NO: 43143 - DNA, 25 bp, Probe Sequence
aaggcaaacgagaagaaggaggaac

SEQ ID NO: 43144 - DNA, 25 bp, Probe Sequence
accccaaagtattaaaagtagcttt

SEQ ID NO: 43145 - DNA, 25 bp, Probe Sequence
gaaggaggaacccaagtagctttgt

SEQ ID NO: 43146 - DNA, 25 bp, Probe Sequence
agaagaaggaggaacccaagtagct

SEQ ID NO: 43147 - DNA, 25 bp, Probe Sequence
aaggaggaacccaagtagctttgtg

SEQ ID NO: 43148 - DNA, 25 bp, Probe Sequence
aaaaggcaaacgagaagaaggagga

SEQ ID NO: 43149 - DNA, 25 bp, Probe Sequence
gggctcaccccaaagtattaaaagt

SEQ ID NO: 43150 - DNA, 25 bp, Probe Sequence
gagatcatgcagcagaagcagaaaa

SEQ ID NO: 43151 - DNA, 25 bp, Probe Sequence
tatgcttactgttctaatctggtgg

SEQ ID NO: 43152 - DNA, 25 bp, Probe Sequence
tagcatattgtcagaaggaaggatg

SEQ ID NO: 43153 - DNA, 25 bp, Probe Sequence
tatatgagtagaccagtgatgagtg

SEQ ID NO: 43154 - DNA, 25 bp, Probe Sequence
gtatatgagtagaccagtgatgagt

SEQ ID NO: 43155 - DNA, 25 bp, Probe Sequence
atgctgaattacttgtgaagaatgc

SEQ ID NO: 43156 - DNA, 25 bp, Probe Sequence
ctagcatattgtcagaaggaaggat

SEQ ID NO: 43157 - DNA, 25 bp, Probe Sequence
tgcttactgttctaatctggtggta

SEQ ID NO: 43158 - DNA, 25 bp, Probe Sequence
ttatgcttactgttctaatctggtg

SEQ ID NO: 43159 - DNA, 25 bp, Probe Sequence
ttagaacaacacacagaagaattgg

SEQ ID NO: 43160 - DNA, 25 bp, Probe Sequence
acagaagaattggtccagttaagtg

SEQ ID NO: 43161 - DNA, 25 bp, Probe Sequence
cacagaagaattggtccagttaagt

SEQ ID NO: 43162 - DNA, 25 bp, Probe Sequence
acacagaagaattggtccagttaag

SEQ ID NO: 43163 - DNA, 25 bp, Probe Sequence
tagaacaacacacagaagaattggt

SEQ ID NO: 43164 - DNA, 25 bp, Probe Sequence
catattgtcagaaggaaggatggtg

SEQ ID NO: 43165 - DNA, 25 bp, Probe Sequence
cacacagaagaattggtccagttaa

SEQ ID NO: 43166 - DNA, 25 bp, Probe Sequence
aattgtataaccatcctgctgttcc

SEQ ID NO: 43167 - DNA, 25 bp, Probe Sequence
atgcttactgttctaatctggtggt

SEQ ID NO: 43168 - DNA, 25 bp, Probe Sequence
tctagcatattgtcagaaggaagga

SEQ ID NO: 43169 - DNA, 25 bp, Probe Sequence
cttagaacaacacacagaagaattg

SEQ ID NO: 43170 - DNA, 25 bp, Probe Sequence
attgtataaccatcctgctgttcct

SEQ ID NO: 43171 - DNA, 25 bp, Probe Sequence
agaacaacacacagaagaattggtc

SEQ ID NO: 43172 - DNA, 25 bp, Probe Sequence
gaacagccataatcctctgaatgat

SEQ ID NO: 43173 - DNA, 25 bp, Probe Sequence
ttgtataaccatcctgctgttcctt

SEQ ID NO: 43174 - DNA, 25 bp, Probe Sequence
aacagccataatcctctgaatgatg

SEQ ID NO: 43175 - DNA, 25 bp, Probe Sequence
gaacttcactgtctctgctcaataa

SEQ ID NO: 43176 - DNA, 25 bp, Probe Sequence
ccaggactaattcttaatcggcatt

SEQ ID NO: 43177 - DNA, 25 bp, Probe Sequence
ctcggttcttctgacattcttaatt

SEQ ID NO: 43178 - DNA, 25 bp, Probe Sequence
gctcggttcttctgacattcttaat

SEQ ID NO: 43179 - DNA, 25 bp, Probe Sequence
aactgcttattcattctggacactg

SEQ ID NO: 43180 - DNA, 25 bp, Probe Sequence
attccaggactaattcttaatcggc

SEQ ID NO: 43181 - DNA, 25 bp, Probe Sequence
gaactgcttattcattctggacact

SEQ ID NO: 43182 - DNA, 25 bp, Probe Sequence
cagatggatgaggatgaattggaac

SEQ ID NO: 43183 - DNA, 25 bp, Probe Sequence
caggactaattcttaatcggcatta

SEQ ID NO: 43184 - DNA, 25 bp, Probe Sequence
tccaggactaattcttaatcggcat

SEQ ID NO: 43185 - DNA, 25 bp, Probe Sequence
ttccaggactaattcttaatcggca

SEQ ID NO: 43186 - DNA, 25 bp, Probe Sequence
atcagatggatgaggatgaattgga

SEQ ID NO: 43187 - DNA, 25 bp, Probe Sequence
aataacagcataaggaacttcactg

SEQ ID NO: 43188 - DNA, 25 bp, Probe Sequence
tcagatggatgaggatgaattggaa

SEQ ID NO: 43189 - DNA, 25 bp, Probe Sequence
ataaggaacttcactgtctctgctc

SEQ ID NO: 43190 - DNA, 25 bp, Probe Sequence
gatcagatggatgaggatgaattgg

SEQ ID NO: 43191 - DNA, 25 bp, Probe Sequence
ggatcagatggatgaggatgaattg

SEQ ID NO: 43192 - DNA, 25 bp, Probe Sequence
ggaacttcactgtctctgctcaata

SEQ ID NO: 43193 - DNA, 25 bp, Probe Sequence
tattccaggactaattcttaatcgg

SEQ ID NO: 43194 - DNA, 25 bp, Probe Sequence
cataaggaacttcactgtctctgct

SEQ ID NO: 43195 - DNA, 25 bp, Probe Sequence
agcataaggaacttcactgtctctg

SEQ ID NO: 43196 - DNA, 25 bp, Probe Sequence
tggatcagatggatgaggatgaatt

SEQ ID NO: 43197 - DNA, 25 bp, Probe Sequence
aggactaattcttaatcggcattat

SEQ ID NO: 43198 - DNA, 25 bp, Probe Sequence
agatggatgaggatgaattggaacg

SEQ ID NO: 43199 - DNA, 25 bp, Probe Sequence
cagtctgaattatgggaaagttagc

SEQ ID NO: 43200 - DNA, 25 bp, Probe Sequence
gatgtactcatgctcatatgtgtgc

SEQ ID NO: 43201 - DNA, 25 bp, Probe Sequence
tatagtggaaagactgaggcttctg

SEQ ID NO: 43202 - DNA, 25 bp, Probe Sequence
gtatagtggaaagactgaggcttct

SEQ ID NO: 43203 - DNA, 25 bp, Probe Sequence
agtatagtggaaagactgaggcttc

SEQ ID NO: 43204 - DNA, 25 bp, Probe Sequence
ggatgtactcatgctcatatgtgtg

SEQ ID NO: 43205 - DNA, 25 bp, Probe Sequence
agtctgaattatgggaaagttagct

SEQ ID NO: 43206 - DNA, 25 bp, Probe Sequence
gtctgaattatgggaaagttagctc

SEQ ID NO: 43207 - DNA, 25 bp, Probe Sequence
tctgaattatgggaaagttagctct

SEQ ID NO: 43208 - DNA, 25 bp, Probe Sequence
gctagggatgtactcatgctcatat

SEQ ID NO: 43209 - DNA, 25 bp, Probe Sequence
tgaattatgggaaagttagctcttc

SEQ ID NO: 43210 - DNA, 25 bp, Probe Sequence
ctgaattatgggaaagttagctctt

SEQ ID NO: 43211 - DNA, 25 bp, Probe Sequence
tcagtctgaattatgggaaagttag

SEQ ID NO: 43212 - DNA, 25 bp, Probe Sequence
ccttatgccagttgagctgaatctt

SEQ ID NO: 43213 - DNA, 25 bp, Probe Sequence
ctagggatgtactcatgctcatatg

SEQ ID NO: 43214 - DNA, 25 bp, Probe Sequence
tagggatgtactcatgctcatatgt

SEQ ID NO: 43215 - DNA, 25 bp, Probe Sequence
cttatgccagttgagctgaatcttt

SEQ ID NO: 43216 - DNA, 25 bp, Probe Sequence
aaagttagctcttcccagacctaag

SEQ ID NO: 43217 - DNA, 25 bp, Probe Sequence
gaaagttagctcttcccagacctaa

SEQ ID NO: 43218 - DNA, 25 bp, Probe Sequence
tttctcagtttcccgttcgtttgtt

SEQ ID NO: 43219 - DNA, 25 bp, Probe Sequence
atgtactcatgctcatatgtgtgca

SEQ ID NO: 43220 - DNA, 25 bp, Probe Sequence
agggatgtactcatgctcatatgtg

SEQ ID NO: 43221 - DNA, 25 bp, Probe Sequence
ggctagggatgtactcatgctcata

SEQ ID NO: 43222 - DNA, 25 bp, Probe Sequence
gggatgtactcatgctcatatgtgt

SEQ ID NO: 43223 - DNA, 25 bp, Probe Sequence
cctaagagaatgttaccacctgaac

SEQ ID NO: 43224 - DNA, 25 bp, Probe Sequence
tatggagaagtaattcagctacagg

SEQ ID NO: 43225 - DNA, 25 bp, Probe Sequence
gtatcgtatgtccgctatccagaac

SEQ ID NO: 43226 - DNA, 25 bp, Probe Sequence
atatgccagttcctcgtagagattg

SEQ ID NO: 43227 - DNA, 25 bp, Probe Sequence
gaatcgtatcgtatgtccgctatcc

SEQ ID NO: 43228 - DNA, 25 bp, Probe Sequence
ccctaagattacaaacaactatggc

SEQ ID NO: 43229 - DNA, 25 bp, Probe Sequence
gccctaagattacaaacaactatgg

SEQ ID NO: 43230 - DNA, 25 bp, Probe Sequence
agagccctaagattacaaacaacta

SEQ ID NO: 43231 - DNA, 25 bp, Probe Sequence
cagagccctaagattacaaacaact

SEQ ID NO: 43232 - DNA, 25 bp, Probe Sequence
gttccctaccctaagagaatgttac

SEQ ID NO: 43233 - DNA, 25 bp, Probe Sequence
agttccctaccctaagagaatgtta

SEQ ID NO: 43234 - DNA, 25 bp, Probe Sequence
ctaccctaagagaatgttaccacct

SEQ ID NO: 43235 - DNA, 25 bp, Probe Sequence
cctcacagcttgtataatgtaacca

SEQ ID NO: 43236 - DNA, 25 bp, Probe Sequence
acctcacagcttgtataatgtaacc

SEQ ID NO: 43237 - DNA, 25 bp, Probe Sequence
taccctaagagaatgttaccacctg

SEQ ID NO: 43238 - DNA, 25 bp, Probe Sequence
agccctaagattacaaacaactatg

SEQ ID NO: 43239 - DNA, 25 bp, Probe Sequence
aacctcacagcttgtataatgtaac

SEQ ID NO: 43240 - DNA, 25 bp, Probe Sequence
ttccctaccctaagagaatgttacc

SEQ ID NO: 43241 - DNA, 25 bp, Probe Sequence
gagccctaagattacaaacaactat

SEQ ID NO: 43242 - DNA, 25 bp, Probe Sequence
ctcacagcttgtataatgtaaccat

SEQ ID NO: 43243 - DNA, 25 bp, Probe Sequence
gagttccctaccctaagagaatgtt

SEQ ID NO: 43244 - DNA, 25 bp, Probe Sequence
ccagagccctaagattacaaacaac

SEQ ID NO: 43245 - DNA, 25 bp, Probe Sequence
acaagggaacaaatctcaaactgat

SEQ ID NO: 43246 - DNA, 25 bp, Probe Sequence
ccctaagagaatgttaccacctgaa

SEQ ID NO: 43247 - DNA, 25 bp, Probe Sequence
atggcaataggtagagatacaacaa

SEQ ID NO: 43248 - DNA, 25 bp, Probe Sequence
aatggcaataggtagagatacaaca

SEQ ID NO: 43249 - DNA, 25 bp, Probe Sequence
tagaacagcaagagcaattactact

SEQ ID NO: 43250 - DNA, 25 bp, Probe Sequence
cctagtagaacagcaagagcaatta

SEQ ID NO: 43251 - DNA, 25 bp, Probe Sequence
ctagtagaacagcaagagcaattac

SEQ ID NO: 43252 - DNA, 25 bp, Probe Sequence
agaacagcaagagcaattactactc

SEQ ID NO: 43253 - DNA, 25 bp, Probe Sequence
taatggcaataggtagagatacaac

SEQ ID NO: 43254 - DNA, 25 bp, Probe Sequence
caagagcaattactactcgttctgg

SEQ ID NO: 43255 - DNA, 25 bp, Probe Sequence
taacattgatgtgcctagtagaaca

SEQ ID NO: 43256 - DNA, 25 bp, Probe Sequence
aacattgatgtgcctagtagaacag

SEQ ID NO: 43257 - DNA, 25 bp, Probe Sequence
gtacaactgtccttagactgatgag

SEQ ID NO: 43258 - DNA, 25 bp, Probe Sequence
aacctgacggctatgattactatgc

SEQ ID NO: 43259 - DNA, 25 bp, Probe Sequence
aattcaatattcacctgccagactg

SEQ ID NO: 43260 - DNA, 25 bp, Probe Sequence
agtagaacagcaagagcaattacta

SEQ ID NO: 43261 - DNA, 25 bp, Probe Sequence
tagtagaacagcaagagcaattact

SEQ ID NO: 43262 - DNA, 25 bp, Probe Sequence
gcaagagcaattactactcgttctg

SEQ ID NO: 43263 - DNA, 25 bp, Probe Sequence
agcaagagcaattactactcgttct

SEQ ID NO: 43264 - DNA, 25 bp, Probe Sequence
cagcaagagcaattactactcgttc

SEQ ID NO: 43265 - DNA, 25 bp, Probe Sequence
gaacagcaagagcaattactactcg

SEQ ID NO: 43266 - DNA, 25 bp, Probe Sequence
ataacattgatgtgcctagtagaac

SEQ ID NO: 43267 - DNA, 25 bp, Probe Sequence
tacaactgtccttagactgatgagc

SEQ ID NO: 43268 - DNA, 25 bp, Probe Sequence
atttcctctgtttattcctcctctc

SEQ ID NO: 43269 - DNA, 25 bp, Probe Sequence
tggcaataggtagagatacaacaaa

SEQ ID NO: 43270 - DNA, 25 bp, Probe Sequence
aaacctgacggctatgattactatg

SEQ ID NO: 43271 - DNA, 25 bp, Probe Sequence
tatttctccaaacacaattaggctg

SEQ ID NO: 43272 - DNA, 25 bp, Probe Sequence
atatttctccaaacacaattaggct

SEQ ID NO: 43273 - DNA, 25 bp, Probe Sequence
gaggtaaccaataaagtattagggc

SEQ ID NO: 43274 - DNA, 25 bp, Probe Sequence
cttcgccagatcactgttaatgatt

SEQ ID NO: 43275 - DNA, 25 bp, Probe Sequence
tggatgacagcaaggaatatttctc

SEQ ID NO: 43276 - DNA, 25 bp, Probe Sequence
gcctagaggtaaccaataaagtatt

SEQ ID NO: 43277 - DNA, 25 bp, Probe Sequence
ctccacctagaagctgaatagtgac

SEQ ID NO: 43278 - DNA, 25 bp, Probe Sequence
caattaggctggctaacggatagtg

SEQ ID NO: 43279 - DNA, 25 bp, Probe Sequence
cacaattaggctggctaacggatag

SEQ ID NO: 43280 - DNA, 25 bp, Probe Sequence
gtggatgacagcaaggaatatttct

SEQ ID NO: 43281 - DNA, 25 bp, Probe Sequence
aacgtggatgacagcaaggaatatt

SEQ ID NO: 43282 - DNA, 25 bp, Probe Sequence
aattaggctggctaacggatagtga

SEQ ID NO: 43283 - DNA, 25 bp, Probe Sequence
aatatttctccaaacacaattaggc

SEQ ID NO: 43284 - DNA, 25 bp, Probe Sequence
agaggtaaccaataaagtattaggg

SEQ ID NO: 43285 - DNA, 25 bp, Probe Sequence
acaattaggctggctaacggatagt

SEQ ID NO: 43286 - DNA, 25 bp, Probe Sequence
gaacgtggatgacagcaaggaatat

SEQ ID NO: 43287 - DNA, 25 bp, Probe Sequence
gcaaggaatatttctccaaacacaa

SEQ ID NO: 43288 - DNA, 25 bp, Probe Sequence
gacagcaaggaatatttctccaaac

SEQ ID NO: 43289 - DNA, 25 bp, Probe Sequence
atgacagcaaggaatatttctccaa

SEQ ID NO: 43290 - DNA, 25 bp, Probe Sequence
atttctccaaacacaattaggctgg

SEQ ID NO: 43291 - DNA, 25 bp, Probe Sequence
cagcaaggaatatttctccaaacac

SEQ ID NO: 43292 - DNA, 25 bp, Probe Sequence
tgacagcaaggaatatttctccaaa

SEQ ID NO: 43293 - DNA, 25 bp, Probe Sequence
gatgacagcaaggaatatttctcca

SEQ ID NO: 43294 - DNA, 25 bp, Probe Sequence
attaggctggctaacggatagtgag

SEQ ID NO: 43295 - DNA, 25 bp, Probe Sequence
tgtctcagatcaagtaattccttca

SEQ ID NO: 43296 - DNA, 25 bp, Probe Sequence
gtctcagatcaagtaattccttcac

SEQ ID NO: 43297 - DNA, 25 bp, Probe Sequence
tctcagatcaagtaattccttcact

SEQ ID NO: 43298 - DNA, 25 bp, Probe Sequence
tcaagtaattccttcactaggttgg

SEQ ID NO: 43299 - DNA, 25 bp, Probe Sequence
cctgtctcagatcaagtaattcctt

SEQ ID NO: 43300 - DNA, 25 bp, Probe Sequence
aacctgtctcagatcaagtaattcc

SEQ ID NO: 43301 - DNA, 25 bp, Probe Sequence
acctgtctcagatcaagtaattcct

SEQ ID NO: 43302 - DNA, 25 bp, Probe Sequence
ctgtctcagatcaagtaattccttc

SEQ ID NO: 43303 - DNA, 25 bp, Probe Sequence
agatcaagtaattccttcactaggt

SEQ ID NO: 43304 - DNA, 25 bp, Probe Sequence
atcaagtaattccttcactaggttg

SEQ ID NO: 43305 - DNA, 25 bp, Probe Sequence
ggagaacgataagaaatggaaagac

SEQ ID NO: 43306 - DNA, 25 bp, Probe Sequence
aggagaacgataagaaatggaaaga

SEQ ID NO: 43307 - DNA, 25 bp, Probe Sequence
cagatcaagtaattccttcactagg

SEQ ID NO: 43308 - DNA, 25 bp, Probe Sequence
cttctcaatcatctgtgggtcattt

SEQ ID NO: 43309 - DNA, 25 bp, Probe Sequence
agaacgataagaaatggaaagactc

SEQ ID NO: 43310 - DNA, 25 bp, Probe Sequence
gagaacgataagaaatggaaagact

SEQ ID NO: 43311 - DNA, 25 bp, Probe Sequence
tcagatcaagtaattccttcactag

SEQ ID NO: 43312 - DNA, 25 bp, Probe Sequence
ctcagatcaagtaattccttcacta

SEQ ID NO: 43313 - DNA, 25 bp, Probe Sequence
gatcaagtaattccttcactaggtt

SEQ ID NO: 43314 - DNA, 25 bp, Probe Sequence
taacctgtctcagatcaagtaattc

SEQ ID NO: 43315 - DNA, 25 bp, Probe Sequence
acttattgctctgtgtcaatgttaa

SEQ ID NO: 43316 - DNA, 25 bp, Probe Sequence
aacttattgctctgtgtcaatgtta

SEQ ID NO: 43317 - DNA, 25 bp, Probe Sequence
taggagaacgataagaaatggaaag

SEQ ID NO: 43318 - DNA, 25 bp, Probe Sequence
agttgaaatgaccattctgtgtagt

SEQ ID NO: 43319 - DNA, 25 bp, Probe Sequence
caacattcactacctctactactgg

SEQ ID NO: 43320 - DNA, 25 bp, Probe Sequence
gactatggcgtattagaagacttgt

SEQ ID NO: 43321 - DNA, 25 bp, Probe Sequence
tgactatggcgtattagaagacttg

SEQ ID NO: 43322 - DNA, 25 bp, Probe Sequence
acaacattcactacctctactactg

SEQ ID NO: 43323 - DNA, 25 bp, Probe Sequence
ttgactatggcgtattagaagactt

SEQ ID NO: 43324 - DNA, 25 bp, Probe Sequence
gactacaacattcactacctctact

SEQ ID NO: 43325 - DNA, 25 bp, Probe Sequence
gaccaagacacagaagatgatgaat

SEQ ID NO: 43326 - DNA, 25 bp, Probe Sequence
accaagacacagaagatgatgaatg

SEQ ID NO: 43327 - DNA, 25 bp, Probe Sequence
actatggcgtattagaagacttgta

SEQ ID NO: 43328 - DNA, 25 bp, Probe Sequence
aatcaagagaatgctatcatcctgc

SEQ ID NO: 43329 - DNA, 25 bp, Probe Sequence
tgactacaacattcactacctctac

SEQ ID NO: 43330 - DNA, 25 bp, Probe Sequence
tacaacattcactacctctactact

SEQ ID NO: 43331 - DNA, 25 bp, Probe Sequence
actacaacattcactacctctacta

SEQ ID NO: 43332 - DNA, 25 bp, Probe Sequence
atcaagagaatgctatcatcctgct

SEQ ID NO: 43333 - DNA, 25 bp, Probe Sequence
tgaccaagacacagaagatgatgaa

SEQ ID NO: 43334 - DNA, 25 bp, Probe Sequence
ctatggcgtattagaagacttgtat

SEQ ID NO: 43335 - DNA, 25 bp, Probe Sequence
ttgaccaagacacagaagatgatga

SEQ ID NO: 43336 - DNA, 25 bp, Probe Sequence
ctacaacattcactacctctactac

SEQ ID NO: 43337 - DNA, 25 bp, Probe Sequence
tcaagagaatgctatcatcctgctt

SEQ ID NO: 43338 - DNA, 25 bp, Probe Sequence
taatcaagagaatgctatcatcctg

SEQ ID NO: 43339 - DNA, 25 bp, Probe Sequence
gtaatcaagagaatgctatcatcct

SEQ ID NO: 43340 - DNA, 25 bp, Probe Sequence
agtaatcaagagaatgctatcatcc

SEQ ID NO: 43341 - DNA, 25 bp, Probe Sequence
ctgaacagttgtgtaatgaagaaga

SEQ ID NO: 43342 - DNA, 25 bp, Probe Sequence
tctgaacagttgtgtaatgaagaag

SEQ ID NO: 43343 - DNA, 25 bp, Probe Sequence
tttctctcctttcctcttctccttt

SEQ ID NO: 43344 - DNA, 25 bp, Probe Sequence
tcttctcctttggttcctcaattaa

SEQ ID NO: 43345 - DNA, 25 bp, Probe Sequence
ctcttctcctttggttcctcaatta

SEQ ID NO: 43346 - DNA, 25 bp, Probe Sequence
ttctctcctttcctcttctcctttg

SEQ ID NO: 43347 - DNA, 25 bp, Probe Sequence
ctttcctcttctcctttggttcctc

SEQ ID NO: 43348 - DNA, 25 bp, Probe Sequence
ctcctttcctcttctcctttggttc

SEQ ID NO: 43349 - DNA, 25 bp, Probe Sequence
cctcttctcctttggttcctcaatt

SEQ ID NO: 43350 - DNA, 25 bp, Probe Sequence
tctcctttcctcttctcctttggtt

SEQ ID NO: 43351 - DNA, 25 bp, Probe Sequence
tctctcctttcctcttctcctttgg

SEQ ID NO: 43352 - DNA, 25 bp, Probe Sequence
tttcctcttctcctttggttcctca

SEQ ID NO: 43353 - DNA, 25 bp, Probe Sequence
tcctcttctcctttggttcctcaat

SEQ ID NO: 43354 - DNA, 25 bp, Probe Sequence
gattttctctcctttcctcttctcc

SEQ ID NO: 43355 - DNA, 25 bp, Probe Sequence
ctctcctttcctcttctcctttggt

SEQ ID NO: 43356 - DNA, 25 bp, Probe Sequence
attttctctcctttcctcttctcct

SEQ ID NO: 43357 - DNA, 25 bp, Probe Sequence
ttcctcttctcctttggttcctcaa

SEQ ID NO: 43358 - DNA, 25 bp, Probe Sequence
ttttctctcctttcctcttctcctt

SEQ ID NO: 43359 - DNA, 25 bp, Probe Sequence
agattttctctcctttcctcttctc

SEQ ID NO: 43360 - DNA, 25 bp, Probe Sequence
gccagtatgtctttcattgctttgc

SEQ ID NO: 43361 - DNA, 25 bp, Probe Sequence
ttaccagaagctgctctaggagttc

SEQ ID NO: 43362 - DNA, 25 bp, Probe Sequence
ggctgagttttaagattttctctcc

SEQ ID NO: 43363 - DNA, 25 bp, Probe Sequence
gggctgagttttaagattttctctc

SEQ ID NO: 43364 - DNA, 25 bp, Probe Sequence
agggctgagttttaagattttctct

SEQ ID NO: 43365 - DNA, 25 bp, Probe Sequence
cagggctgagttttaagattttctc

SEQ ID NO: 43366 - DNA, 25 bp, Probe Sequence
ccagggctgagttttaagattttct

SEQ ID NO: 43367 - DNA, 25 bp, Probe Sequence
tctatgacgattgtattgtgactgt

SEQ ID NO: 43368 - DNA, 25 bp, Probe Sequence
atgacgattgtattgtgactgtagt

SEQ ID NO: 43369 - DNA, 25 bp, Probe Sequence
gattgtattgtgactgtagtggact

SEQ ID NO: 43370 - DNA, 25 bp, Probe Sequence
tgacgattgtattgtgactgtagtg

SEQ ID NO: 43371 - DNA, 25 bp, Probe Sequence
ttgtattgtgactgtagtggactaa

SEQ ID NO: 43372 - DNA, 25 bp, Probe Sequence
atctatgacgattgtattgtgactg

SEQ ID NO: 43373 - DNA, 25 bp, Probe Sequence
aagaagattccaactctctcactct

SEQ ID NO: 43374 - DNA, 25 bp, Probe Sequence
gacagattctatgatgacctccact

SEQ ID NO: 43375 - DNA, 25 bp, Probe Sequence
tgtattgtgactgtagtggactaat

SEQ ID NO: 43376 - DNA, 25 bp, Probe Sequence
attgtattgtgactgtagtggacta

SEQ ID NO: 43377 - DNA, 25 bp, Probe Sequence
tatgacgattgtattgtgactgtag

SEQ ID NO: 43378 - DNA, 25 bp, Probe Sequence
ctatgacgattgtattgtgactgta

SEQ ID NO: 43379 - DNA, 25 bp, Probe Sequence
cgattgtattgtgactgtagtggac

SEQ ID NO: 43380 - DNA, 25 bp, Probe Sequence
gacgattgtattgtgactgtagtgg

SEQ ID NO: 43381 - DNA, 25 bp, Probe Sequence
acgattgtattgtgactgtagtgga

SEQ ID NO: 43382 - DNA, 25 bp, Probe Sequence
aagattccaactctctcactctgaa

SEQ ID NO: 43383 - DNA, 25 bp, Probe Sequence
agaagattccaactctctcactctg

SEQ ID NO: 43384 - DNA, 25 bp, Probe Sequence
gaagattccaactctctcactctga

SEQ ID NO: 43385 - DNA, 25 bp, Probe Sequence
aattgtctacaagtcctgaatcctg

SEQ ID NO: 43386 - DNA, 25 bp, Probe Sequence
gaccattccatgtgtatcattccat

SEQ ID NO: 43387 - DNA, 25 bp, Probe Sequence
agattccaactctctcactctgaac

SEQ ID NO: 43388 - DNA, 25 bp, Probe Sequence
aatgtaccagtatcacacagaagag

SEQ ID NO: 43389 - DNA, 25 bp, Probe Sequence
caatgtaccagtatcacacagaaga

SEQ ID NO: 43390 - DNA, 25 bp, Probe Sequence
acaatgtaccagtatcacacagaag

SEQ ID NO: 43391 - DNA, 25 bp, Probe Sequence
gctctcactcactgataatgcttat

SEQ ID NO: 43392 - DNA, 25 bp, Probe Sequence
actgataatgcttattaccttctgg

SEQ ID NO: 43393 - DNA, 25 bp, Probe Sequence
cactcactgataatgcttattacct

SEQ ID NO: 43394 - DNA, 25 bp, Probe Sequence
ctctcactcactgataatgcttatt

SEQ ID NO: 43395 - DNA, 25 bp, Probe Sequence
tcactcactgataatgcttattacc

SEQ ID NO: 43396 - DNA, 25 bp, Probe Sequence
cactgcttcatatctctgtccactt

SEQ ID NO: 43397 - DNA, 25 bp, Probe Sequence
ttcactgcttcatatctctgtccac

SEQ ID NO: 43398 - DNA, 25 bp, Probe Sequence
atctgtgacttcatgctctgataac

SEQ ID NO: 43399 - DNA, 25 bp, Probe Sequence
actcactgataatgcttattacctt

SEQ ID NO: 43400 - DNA, 25 bp, Probe Sequence
tatctgtgacttcatgctctgataa

SEQ ID NO: 43401 - DNA, 25 bp, Probe Sequence
ttatctgtgacttcatgctctgata

SEQ ID NO: 43402 - DNA, 25 bp, Probe Sequence
cactgataatgcttattaccttctg

SEQ ID NO: 43403 - DNA, 25 bp, Probe Sequence
ctgtgacttcatgctctgataactg

SEQ ID NO: 43404 - DNA, 25 bp, Probe Sequence
tctgtgacttcatgctctgataact

SEQ ID NO: 43405 - DNA, 25 bp, Probe Sequence
tcactgataatgcttattaccttct

SEQ ID NO: 43406 - DNA, 25 bp, Probe Sequence
gcttattaccttctgggcatttatt

SEQ ID NO: 43407 - DNA, 25 bp, Probe Sequence
ctcactgataatgcttattaccttc

SEQ ID NO: 43408 - DNA, 25 bp, Probe Sequence
aagtgaaacattaaacattgccaac

SEQ ID NO: 43409 - DNA, 25 bp, Probe Sequence
tgtttcactgcttcatatctctgtc

SEQ ID NO: 43410 - DNA, 25 bp, Probe Sequence
atatctctgtccactttctgaatga

SEQ ID NO: 43411 - DNA, 25 bp, Probe Sequence
atgtttcactgcttcatatctctgt

SEQ ID NO: 43412 - DNA, 25 bp, Probe Sequence
ctcactcactgataatgcttattac

SEQ ID NO: 43413 - DNA, 25 bp, Probe Sequence
tcactgcttcatatctctgtccact

SEQ ID NO: 43414 - DNA, 25 bp, Probe Sequence
ttattaccttctgggcatttattcc

SEQ ID NO: 43415 - DNA, 25 bp, Probe Sequence
cattctctgctggtaattcctgaag

SEQ ID NO: 43416 - DNA, 25 bp, Probe Sequence
attctctgctggtaattcctgaaga

SEQ ID NO: 43417 - DNA, 25 bp, Probe Sequence
aaggaaataaagactcaaagaagcc

SEQ ID NO: 43418 - DNA, 25 bp, Probe Sequence
caccaaggaaataaagactcaaaga

SEQ ID NO: 43419 - DNA, 25 bp, Probe Sequence
tcaccaaggaaataaagactcaaag

SEQ ID NO: 43420 - DNA, 25 bp, Probe Sequence
ctcaccaaggaaataaagactcaaa

SEQ ID NO: 43421 - DNA, 25 bp, Probe Sequence
ggaaataaagactcaaagaagcctt

SEQ ID NO: 43422 - DNA, 25 bp, Probe Sequence
caaggaaataaagactcaaagaagc

SEQ ID NO: 43423 - DNA, 25 bp, Probe Sequence
attattgctactatcaagagggctg

SEQ ID NO: 43424 - DNA, 25 bp, Probe Sequence
accaaggaaataaagactcaaagaa

SEQ ID NO: 43425 - DNA, 25 bp, Probe Sequence
aattattgctactatcaagagggct

SEQ ID NO: 43426 - DNA, 25 bp, Probe Sequence
ccaaggaaataaagactcaaagaag

SEQ ID NO: 43427 - DNA, 25 bp, Probe Sequence
aggaaataaagactcaaagaagcct

SEQ ID NO: 43428 - DNA, 25 bp, Probe Sequence
ttattgctactatcaagagggctgg

SEQ ID NO: 43429 - DNA, 25 bp, Probe Sequence
cctcaccaaggaaataaagactcaa

SEQ ID NO: 43430 - DNA, 25 bp, Probe Sequence
taattattgctactatcaagagggc

SEQ ID NO: 43431 - DNA, 25 bp, Probe Sequence
ggtaattcctgaagaggcatgactg

SEQ ID NO: 43432 - DNA, 25 bp, Probe Sequence
ctggtaattcctgaagaggcatgac

SEQ ID NO: 43433 - DNA, 25 bp, Probe Sequence
tggtaattcctgaagaggcatgact

SEQ ID NO: 43434 - DNA, 25 bp, Probe Sequence
ttctctgctggtaattcctgaagag

SEQ ID NO: 43435 - DNA, 25 bp, Probe Sequence
gcctcaccaaggaaataaagactca

SEQ ID NO: 43436 - DNA, 25 bp, Probe Sequence
tgcctcaccaaggaaataaagactc

SEQ ID NO: 43437 - DNA, 25 bp, Probe Sequence
ctgcctcaccaaggaaataaagact

SEQ ID NO: 43438 - DNA, 25 bp, Probe Sequence
gaaataaagactcaaagaagccttt

SEQ ID NO: 43439 - DNA, 25 bp, Probe Sequence
tgtaataaaatccgtgagcacgaaa

SEQ ID NO: 43440 - DNA, 25 bp, Probe Sequence
gtgtaataaaatccgtgagcacgaa

SEQ ID NO: 43441 - DNA, 25 bp, Probe Sequence
tgtgtaataaaatccgtgagcacga

SEQ ID NO: 43442 - DNA, 25 bp, Probe Sequence
aacagttcatccccaacttggctat

SEQ ID NO: 43443 - DNA, 25 bp, Probe Sequence
cagttcatccccaacttggctatga

SEQ ID NO: 43444 - DNA, 25 bp, Probe Sequence
gaacagttcatccccaacttggcta

SEQ ID NO: 43445 - DNA, 25 bp, Probe Sequence
acagttcatccccaacttggctatg

SEQ ID NO: 43446 - DNA, 25 bp, Probe Sequence
gttcatccccaacttggctatgaag

SEQ ID NO: 43447 - DNA, 25 bp, Probe Sequence
agttcatccccaacttggctatgaa

SEQ ID NO: 43448 - DNA, 25 bp, Probe Sequence
ttcatccccaacttggctatgaagg

SEQ ID NO: 43449 - DNA, 25 bp, Probe Sequence
cccggcccctaaacatagtttatgt

SEQ ID NO: 43450 - DNA, 25 bp, Probe Sequence
gatgctcttcttctgtgtctctatt

SEQ ID NO: 43451 - DNA, 25 bp, Probe Sequence
ttctcactctgtctctgtctctatt

SEQ ID NO: 43452 - DNA, 25 bp, Probe Sequence
tgatgctcttcttctgtgtctctat

SEQ ID NO: 43453 - DNA, 25 bp, Probe Sequence
ctgatgctcttcttctgtgtctcta

SEQ ID NO: 43454 - DNA, 25 bp, Probe Sequence
gaatcaactcttcttatccgcactg

SEQ ID NO: 43455 - DNA, 25 bp, Probe Sequence
ttctgtctctgatgctcttcttctg

SEQ ID NO: 43456 - DNA, 25 bp, Probe Sequence
ctctgatgctcttcttctgtgtctc

SEQ ID NO: 43457 - DNA, 25 bp, Probe Sequence
atgattctggtggagattccttctt

SEQ ID NO: 43458 - DNA, 25 bp, Probe Sequence
tcttatttagtcttccttccacacc

SEQ ID NO: 43459 - DNA, 25 bp, Probe Sequence
gtctctatttctcttcctgtcactt

SEQ ID NO: 43460 - DNA, 25 bp, Probe Sequence
ttctgtgtctctatttctcttcctg

SEQ ID NO: 43461 - DNA, 25 bp, Probe Sequence
gctcttcttctgtgtctctatttct

SEQ ID NO: 43462 - DNA, 25 bp, Probe Sequence
ctatttctgtctctgatgctcttct

SEQ ID NO: 43463 - DNA, 25 bp, Probe Sequence
tctatttctgtctctgatgctcttc

SEQ ID NO: 43464 - DNA, 25 bp, Probe Sequence
ctctatttctgtctctgatgctctt

SEQ ID NO: 43465 - DNA, 25 bp, Probe Sequence
tgtctctgtctctatttctgtctct

SEQ ID NO: 43466 - DNA, 25 bp, Probe Sequence
ctgtctctgtctctatttctgtctc

SEQ ID NO: 43467 - DNA, 25 bp, Probe Sequence
tctgtctctgtctctatttctgtct

SEQ ID NO: 43468 - DNA, 25 bp, Probe Sequence
ctctgtctctgtctctatttctgtc

SEQ ID NO: 43469 - DNA, 25 bp, Probe Sequence
cactctgtctctgtctctatttctg

SEQ ID NO: 43470 - DNA, 25 bp, Probe Sequence
tcactctgtctctgtctctatttct

SEQ ID NO: 43471 - DNA, 25 bp, Probe Sequence
ctcactctgtctctgtctctatttc

SEQ ID NO: 43472 - DNA, 25 bp, Probe Sequence
tctcactctgtctctgtctctattt

SEQ ID NO: 43473 - DNA, 25 bp, Probe Sequence
tttctcactctgtctctgtctctat

SEQ ID NO: 43474 - DNA, 25 bp, Probe Sequence
ctatgggaactatggctatgctaat

SEQ ID NO: 43475 - DNA, 25 bp, Probe Sequence
tatgctaatagtgggtatagtgcct

SEQ ID NO: 43476 - DNA, 25 bp, Probe Sequence
ctgaaagtctgagaagcaaagtaac

SEQ ID NO: 43477 - DNA, 25 bp, Probe Sequence
taatagtgggtatagtgcctgtgaa

SEQ ID NO: 43478 - DNA, 25 bp, Probe Sequence
actatgggaactatggctatgctaa

SEQ ID NO: 43479 - DNA, 25 bp, Probe Sequence
aactatgggaactatggctatgcta

SEQ ID NO: 43480 - DNA, 25 bp, Probe Sequence
ttggattattaaactgaggtgatgc

SEQ ID NO: 43481 - DNA, 25 bp, Probe Sequence
ctaatagtgggtatagtgcctgtga

SEQ ID NO: 43482 - DNA, 25 bp, Probe Sequence
tatgggaactatggctatgctaata

SEQ ID NO: 43483 - DNA, 25 bp, Probe Sequence
gaaagtctgagaagcaaagtaactg

SEQ ID NO: 43484 - DNA, 25 bp, Probe Sequence
tgaaagtctgagaagcaaagtaact

SEQ ID NO: 43485 - DNA, 25 bp, Probe Sequence
actgaaagtctgagaagcaaagtaa

SEQ ID NO: 43486 - DNA, 25 bp, Probe Sequence
gattcacaatttgattccacaactg

SEQ ID NO: 43487 - DNA, 25 bp, Probe Sequence
atgctaatagtgggtatagtgcctg

SEQ ID NO: 43488 - DNA, 25 bp, Probe Sequence
cactgaaagtctgagaagcaaagta

SEQ ID NO: 43489 - DNA, 25 bp, Probe Sequence
aatagtgggtatagtgcctgtgaag

SEQ ID NO: 43490 - DNA, 25 bp, Probe Sequence
ctatgctaatagtgggtatagtgcc

SEQ ID NO: 43491 - DNA, 25 bp, Probe Sequence
ggctatgctaatagtgggtatagtg

SEQ ID NO: 43492 - DNA, 25 bp, Probe Sequence
cattcctagtgttcaaatactgtgg

SEQ ID NO: 43493 - DNA, 25 bp, Probe Sequence
tggctatgctaatagtgggtatagt

SEQ ID NO: 43494 - DNA, 25 bp, Probe Sequence
atgggaactatggctatgctaatag

SEQ ID NO: 43495 - DNA, 25 bp, Probe Sequence
gctatgctaatagtgggtatagtgc

SEQ ID NO: 43496 - DNA, 25 bp, Probe Sequence
atggctatgctaatagtgggtatag

SEQ ID NO: 43497 - DNA, 25 bp, Probe Sequence
ctatggctatgctaatagtgggtat

SEQ ID NO: 43498 - DNA, 25 bp, Probe Sequence
atcatcatcatcgtcatcatcatag

SEQ ID NO: 43499 - DNA, 25 bp, Probe Sequence
tcatcgtcatcatcataggtaacag

SEQ ID NO: 43500 - DNA, 25 bp, Probe Sequence
tcatcatcatcgtcatcatcatagg

SEQ ID NO: 43501 - DNA, 25 bp, Probe Sequence
agttagagcatcaagcagttagaat

SEQ ID NO: 43502 - DNA, 25 bp, Probe Sequence
catcgtcatcatcataggtaacagt

SEQ ID NO: 43503 - DNA, 25 bp, Probe Sequence
catcatcatcgtcatcatcataggt

SEQ ID NO: 43504 - DNA, 25 bp, Probe Sequence
gataccgacctactaagaactacct

SEQ ID NO: 43505 - DNA, 25 bp, Probe Sequence
agataccgacctactaagaactacc

SEQ ID NO: 43506 - DNA, 25 bp, Probe Sequence
cagataccgacctactaagaactac

SEQ ID NO: 43507 - DNA, 25 bp, Probe Sequence
atcatcgtcatcatcataggtaaca

SEQ ID NO: 43508 - DNA, 25 bp, Probe Sequence
ataccgacctactaagaactacctg

SEQ ID NO: 43509 - DNA, 25 bp, Probe Sequence
atcgtcatcatcataggtaacagtt

SEQ ID NO: 43510 - DNA, 25 bp, Probe Sequence
catcatcgtcatcatcataggtaac

SEQ ID NO: 43511 - DNA, 25 bp, Probe Sequence
tcatcatcgtcatcatcataggtaa

SEQ ID NO: 43512 - DNA, 25 bp, Probe Sequence
cagttagagcatcaagcagttagaa

SEQ ID NO: 43513 - DNA, 25 bp, Probe Sequence
gcagataccgacctactaagaacta

SEQ ID NO: 43514 - DNA, 25 bp, Probe Sequence
atcatcatcgtcatcatcataggta

SEQ ID NO: 43515 - DNA, 25 bp, Probe Sequence
gttagagcatcaagcagttagaatt

SEQ ID NO: 43516 - DNA, 25 bp, Probe Sequence
taccgacctactaagaactacctga

SEQ ID NO: 43517 - DNA, 25 bp, Probe Sequence
tcgtcatcatcataggtaacagtta

SEQ ID NO: 43518 - DNA, 25 bp, Probe Sequence
tatcatcatcatcgtcatcatcata

SEQ ID NO: 43519 - DNA, 25 bp, Probe Sequence
ttagagcatcaagcagttagaattg

SEQ ID NO: 43520 - DNA, 25 bp, Probe Sequence
ttgagaatctggaactaatgtcaca

SEQ ID NO: 43521 - DNA, 25 bp, Probe Sequence
tgtaggctgctgtggtaattctatt

SEQ ID NO: 43522 - DNA, 25 bp, Probe Sequence
tattcattcctcagtacagtgttcc

SEQ ID NO: 43523 - DNA, 25 bp, Probe Sequence
tctattcattcctcagtacagtgtt

SEQ ID NO: 43524 - DNA, 25 bp, Probe Sequence
ttctattcattcctcagtacagtgt

SEQ ID NO: 43525 - DNA, 25 bp, Probe Sequence
ctattcattcctcagtacagtgttc

SEQ ID NO: 43526 - DNA, 25 bp, Probe Sequence
aaacaacaacaacaacaacaacaaa

SEQ ID NO: 43527 - DNA, 25 bp, Probe Sequence
aagcctttctattcattcctcagta

SEQ ID NO: 43528 - DNA, 25 bp, Probe Sequence
catctggaagcctttctattcattc

SEQ ID NO: 43529 - DNA, 25 bp, Probe Sequence
acatctggaagcctttctattcatt

SEQ ID NO: 43530 - DNA, 25 bp, Probe Sequence
gaagcctttctattcattcctcagt

SEQ ID NO: 43531 - DNA, 25 bp, Probe Sequence
gacatctggaagcctttctattcat

SEQ ID NO: 43532 - DNA, 25 bp, Probe Sequence
agcctttctattcattcctcagtac

SEQ ID NO: 43533 - DNA, 25 bp, Probe Sequence
gcctttctattcattcctcagtaca

SEQ ID NO: 43534 - DNA, 25 bp, Probe Sequence
agacatctggaagcctttctattca

SEQ ID NO: 43535 - DNA, 25 bp, Probe Sequence
tggacaaacagcaaatactcaacag

SEQ ID NO: 43536 - DNA, 25 bp, Probe Sequence
cctttctattcattcctcagtacag

SEQ ID NO: 43537 - DNA, 25 bp, Probe Sequence
tttctattcattcctcagtacagtg

SEQ ID NO: 43538 - DNA, 25 bp, Probe Sequence
caaacagcaaatactcaacagggtt

SEQ ID NO: 43539 - DNA, 25 bp, Probe Sequence
tagacatctggaagcctttctattc

SEQ ID NO: 43540 - DNA, 25 bp, Probe Sequence
aactggacaaacagcaaatactcaa

SEQ ID NO: 43541 - DNA, 25 bp, Probe Sequence
ctttctattcattcctcagtacagt

SEQ ID NO: 43542 - DNA, 25 bp, Probe Sequence
ttagacatctggaagcctttctatt

SEQ ID NO: 43543 - DNA, 25 bp, Probe Sequence
tttagacatctggaagcctttctat

SEQ ID NO: 43544 - DNA, 25 bp, Probe Sequence
gacaaacagcaaatactcaacaggg

SEQ ID NO: 43545 - DNA, 25 bp, Probe Sequence
ggacaaacagcaaatactcaacagg

SEQ ID NO: 43546 - DNA, 25 bp, Probe Sequence
tggtatatgtgagattgatgctacg

SEQ ID NO: 43547 - DNA, 25 bp, Probe Sequence
ggtatatgtgagattgatgctacgg

SEQ ID NO: 43548 - DNA, 25 bp, Probe Sequence
cttctaccttccagagttacttcag

SEQ ID NO: 43549 - DNA, 25 bp, Probe Sequence
ttctaccttccagagttacttcagt

SEQ ID NO: 43550 - DNA, 25 bp, Probe Sequence
cacttctaccttccagagttacttc

SEQ ID NO: 43551 - DNA, 25 bp, Probe Sequence
acttctaccttccagagttacttca

SEQ ID NO: 43552 - DNA, 25 bp, Probe Sequence
tctaccttccagagttacttcagtg

SEQ ID NO: 43553 - DNA, 25 bp, Probe Sequence
atggtatatgtgagattgatgctac

SEQ ID NO: 43554 - DNA, 25 bp, Probe Sequence
tgaatctcgtcataagtgatctcag

SEQ ID NO: 43555 - DNA, 25 bp, Probe Sequence
gtgaatctcgtcataagtgatctca

SEQ ID NO: 43556 - DNA, 25 bp, Probe Sequence
gaatctcgtcataagtgatctcagg

SEQ ID NO: 43557 - DNA, 25 bp, Probe Sequence
ggtgaatctcgtcataagtgatctc

SEQ ID NO: 43558 - DNA, 25 bp, Probe Sequence
aggtgaatctcgtcataagtgatct

SEQ ID NO: 43559 - DNA, 25 bp, Probe Sequence
caggtgaatctcgtcataagtgatc

SEQ ID NO: 43560 - DNA, 25 bp, Probe Sequence
gcacttctaccttccagagttactt

SEQ ID NO: 43561 - DNA, 25 bp, Probe Sequence
ccaggtgaatctcgtcataagtgat

SEQ ID NO: 43562 - DNA, 25 bp, Probe Sequence
catggtatatgtgagattgatgcta

SEQ ID NO: 43563 - DNA, 25 bp, Probe Sequence
ctaccttccagagttacttcagtgc

SEQ ID NO: 43564 - DNA, 25 bp, Probe Sequence
atgttgtacgtgaagattctaggag

SEQ ID NO: 43565 - DNA, 25 bp, Probe Sequence
aatgttgtacgtgaagattctagga

SEQ ID NO: 43566 - DNA, 25 bp, Probe Sequence
cttccagagttacttcagtgcataa

SEQ ID NO: 43567 - DNA, 25 bp, Probe Sequence
ctgataggatgtgaaatggactctc

SEQ ID NO: 43568 - DNA, 25 bp, Probe Sequence
tctgataggatgtgaaatggactct

SEQ ID NO: 43569 - DNA, 25 bp, Probe Sequence
ttctgataggatgtgaaatggactc

SEQ ID NO: 43570 - DNA, 25 bp, Probe Sequence
tcttatcttctcctgaactgttgat

SEQ ID NO: 43571 - DNA, 25 bp, Probe Sequence
atcttatcttctcctgaactgttga

SEQ ID NO: 43572 - DNA, 25 bp, Probe Sequence
cttatcttctcctgaactgttgatt

SEQ ID NO: 43573 - DNA, 25 bp, Probe Sequence
actatcttatcttctcctgaactgt

SEQ ID NO: 43574 - DNA, 25 bp, Probe Sequence
acactatcttatcttctcctgaact

SEQ ID NO: 43575 - DNA, 25 bp, Probe Sequence
cactatcttatcttctcctgaactg

SEQ ID NO: 43576 - DNA, 25 bp, Probe Sequence
aacactatcttatcttctcctgaac

SEQ ID NO: 43577 - DNA, 25 bp, Probe Sequence
tatcttatcttctcctgaactgttg

SEQ ID NO: 43578 - DNA, 25 bp, Probe Sequence
ctatcttatcttctcctgaactgtt

SEQ ID NO: 43579 - DNA, 25 bp, Probe Sequence
aatactacctggagtcttgtcctct

SEQ ID NO: 43580 - DNA, 25 bp, Probe Sequence
cggaataaatactacctggagtctt

SEQ ID NO: 43581 - DNA, 25 bp, Probe Sequence
atactacctggagtcttgtcctctc

SEQ ID NO: 43582 - DNA, 25 bp, Probe Sequence
acatgactggaacgaagtatgagtg

SEQ ID NO: 43583 - DNA, 25 bp, Probe Sequence
cacatgactggaacgaagtatgagt

SEQ ID NO: 43584 - DNA, 25 bp, Probe Sequence
ttatcttctcctgaactgttgattt

SEQ ID NO: 43585 - DNA, 25 bp, Probe Sequence
ggaataaatactacctggagtcttg

SEQ ID NO: 43586 - DNA, 25 bp, Probe Sequence
taaatactacctggagtcttgtcct

SEQ ID NO: 43587 - DNA, 25 bp, Probe Sequence
ataaatactacctggagtcttgtcc

SEQ ID NO: 43588 - DNA, 25 bp, Probe Sequence
aataaatactacctggagtcttgtc

SEQ ID NO: 43589 - DNA, 25 bp, Probe Sequence
gaataaatactacctggagtcttgt

SEQ ID NO: 43590 - DNA, 25 bp, Probe Sequence
aaatactacctggagtcttgtcctc

SEQ ID NO: 43591 - DNA, 25 bp, Probe Sequence
aaacactatcttatcttctcctgaa

SEQ ID NO: 43592 - DNA, 25 bp, Probe Sequence
catgactggaacgaagtatgagtgc

SEQ ID NO: 43593 - DNA, 25 bp, Probe Sequence
gcacatgactggaacgaagtatgag

SEQ ID NO: 43594 - DNA, 25 bp, Probe Sequence
gagttaccaagacaatacctgctac

SEQ ID NO: 43595 - DNA, 25 bp, Probe Sequence
aatgagtgtgtgtgaggtataggaa

SEQ ID NO: 43596 - DNA, 25 bp, Probe Sequence
tgagttaccaagacaatacctgcta

SEQ ID NO: 43597 - DNA, 25 bp, Probe Sequence
atgttgttactcttcctctctcaag

SEQ ID NO: 43598 - DNA, 25 bp, Probe Sequence
catcgttgagttaccaagacaatac

SEQ ID NO: 43599 - DNA, 25 bp, Probe Sequence
agcacctattgagcaatgtctatta

SEQ ID NO: 43600 - DNA, 25 bp, Probe Sequence
aatgttgttactcttcctctctcaa

SEQ ID NO: 43601 - DNA, 25 bp, Probe Sequence
agttaccaagacaatacctgctaca

SEQ ID NO: 43602 - DNA, 25 bp, Probe Sequence
gcattcaagagtatccaacttcaag

SEQ ID NO: 43603 - DNA, 25 bp, Probe Sequence
atcgttgagttaccaagacaatacc

SEQ ID NO: 43604 - DNA, 25 bp, Probe Sequence
ccatcgttgagttaccaagacaata

SEQ ID NO: 43605 - DNA, 25 bp, Probe Sequence
cattcaagagtatccaacttcaagg

SEQ ID NO: 43606 - DNA, 25 bp, Probe Sequence
gcacctattgagcaatgtctattat

SEQ ID NO: 43607 - DNA, 25 bp, Probe Sequence
cagcacctattgagcaatgtctatt

SEQ ID NO: 43608 - DNA, 25 bp, Probe Sequence
cgttgagttaccaagacaatacctg

SEQ ID NO: 43609 - DNA, 25 bp, Probe Sequence
tcgttgagttaccaagacaatacct

SEQ ID NO: 43610 - DNA, 25 bp, Probe Sequence
taccaagacaatacctgctacagta

SEQ ID NO: 43611 - DNA, 25 bp, Probe Sequence
tacagttggtgaaggaagaggtaac

SEQ ID NO: 43612 - DNA, 25 bp, Probe Sequence
gttgagttaccaagacaatacctgc

SEQ ID NO: 43613 - DNA, 25 bp, Probe Sequence
ttacagaagtgtgttgagtacagtt

SEQ ID NO: 43614 - DNA, 25 bp, Probe Sequence
ttggatgaatagtatgaagacagtt

SEQ ID NO: 43615 - DNA, 25 bp, Probe Sequence
ttgagttaccaagacaatacctgct

SEQ ID NO: 43616 - DNA, 25 bp, Probe Sequence
gttaccaagacaatacctgctacag

SEQ ID NO: 43617 - DNA, 25 bp, Probe Sequence
acattggatgaatagtatgaagaca

SEQ ID NO: 43618 - DNA, 25 bp, Probe Sequence
ttcttctacaactcatacactcgta

SEQ ID NO: 43619 - DNA, 25 bp, Probe Sequence
tcttctacaactcatacactcgtat

SEQ ID NO: 43620 - DNA, 25 bp, Probe Sequence
atgatacttcgacactgttcttagc

SEQ ID NO: 43621 - DNA, 25 bp, Probe Sequence
cgtatgatacttcgacactgttctt

SEQ ID NO: 43622 - DNA, 25 bp, Probe Sequence
gatacttcgacactgttcttagctc

SEQ ID NO: 43623 - DNA, 25 bp, Probe Sequence
tttcttctacaactcatacactcgt

SEQ ID NO: 43624 - DNA, 25 bp, Probe Sequence
atacttcgacactgttcttagctca

SEQ ID NO: 43625 - DNA, 25 bp, Probe Sequence
tgatacttcgacactgttcttagct

SEQ ID NO: 43626 - DNA, 25 bp, Probe Sequence
tacttcgacactgttcttagctcaa

SEQ ID NO: 43627 - DNA, 25 bp, Probe Sequence
atttcttctacaactcatacactcg

SEQ ID NO: 43628 - DNA, 25 bp, Probe Sequence
gacacctaactcttctttcatttct

SEQ ID NO: 43629 - DNA, 25 bp, Probe Sequence
gtatgatacttcgacactgttctta

SEQ ID NO: 43630 - DNA, 25 bp, Probe Sequence
cttcgacactgttcttagctcaatg

SEQ ID NO: 43631 - DNA, 25 bp, Probe Sequence
tatgatacttcgacactgttcttag

SEQ ID NO: 43632 - DNA, 25 bp, Probe Sequence
acacctaactcttctttcatttctt

SEQ ID NO: 43633 - DNA, 25 bp, Probe Sequence
tgacacctaactcttctttcatttc

SEQ ID NO: 43634 - DNA, 25 bp, Probe Sequence
ctgacacctaactcttctttcattt

SEQ ID NO: 43635 - DNA, 25 bp, Probe Sequence
gctgacacctaactcttctttcatt

SEQ ID NO: 43636 - DNA, 25 bp, Probe Sequence
ttcgacactgttcttagctcaatga

SEQ ID NO: 43637 - DNA, 25 bp, Probe Sequence
acttcgacactgttcttagctcaat

SEQ ID NO: 43638 - DNA, 25 bp, Probe Sequence
cacctaactcttctttcatttcttc

SEQ ID NO: 43639 - DNA, 25 bp, Probe Sequence
acctaactcttctttcatttcttct

SEQ ID NO: 43640 - DNA, 25 bp, Probe Sequence
tcatttcttctacaactcatacact

SEQ ID NO: 43641 - DNA, 25 bp, Probe Sequence
catttcttctacaactcatacactc

SEQ ID NO: 43642 - DNA, 25 bp, Probe Sequence
ttatgctcttaattgccacctctaa

SEQ ID NO: 43643 - DNA, 25 bp, Probe Sequence
cttatgctcttaattgccacctcta

SEQ ID NO: 43644 - DNA, 25 bp, Probe Sequence
tatgctcttaattgccacctctaac

SEQ ID NO: 43645 - DNA, 25 bp, Probe Sequence
cttgtagttccacttatagcctctg

SEQ ID NO: 43646 - DNA, 25 bp, Probe Sequence
acttgtagttccacttatagcctct

SEQ ID NO: 43647 - DNA, 25 bp, Probe Sequence
tacttgtagttccacttatagcctc

SEQ ID NO: 43648 - DNA, 25 bp, Probe Sequence
ttgtagttccacttatagcctctgt

SEQ ID NO: 43649 - DNA, 25 bp, Probe Sequence
tagttccacttatagcctctgtctg

SEQ ID NO: 43650 - DNA, 25 bp, Probe Sequence
gtagttccacttatagcctctgtct

SEQ ID NO: 43651 - DNA, 25 bp, Probe Sequence
cttgtgatgtcatacagagaagtca

SEQ ID NO: 43652 - DNA, 25 bp, Probe Sequence
tgtagttccacttatagcctctgtc

SEQ ID NO: 43653 - DNA, 25 bp, Probe Sequence
ctctattatgaatgtgaagccttcc

SEQ ID NO: 43654 - DNA, 25 bp, Probe Sequence
ccttgtgatgtcatacagagaagtc

SEQ ID NO: 43655 - DNA, 25 bp, Probe Sequence
gtacttgtagttccacttatagcct

SEQ ID NO: 43656 - DNA, 25 bp, Probe Sequence
tagtgagcataggtgatccatgtaa

SEQ ID NO: 43657 - DNA, 25 bp, Probe Sequence
ttagtgagcataggtgatccatgta

SEQ ID NO: 43658 - DNA, 25 bp, Probe Sequence
atgctcttaattgccacctctaaca

SEQ ID NO: 43659 - DNA, 25 bp, Probe Sequence
tgatgtcatacagagaagtcacagg

SEQ ID NO: 43660 - DNA, 25 bp, Probe Sequence
tatgtctggttctcaattccaacag

SEQ ID NO: 43661 - DNA, 25 bp, Probe Sequence
gtatgtctggttctcaattccaaca

SEQ ID NO: 43662 - DNA, 25 bp, Probe Sequence
gagtgttccctatccaatcaatctt

SEQ ID NO: 43663 - DNA, 25 bp, Probe Sequence
tgagcataggtgatccatgtaactg

SEQ ID NO: 43664 - DNA, 25 bp, Probe Sequence
gtgagcataggtgatccatgtaact

SEQ ID NO: 43665 - DNA, 25 bp, Probe Sequence
agtgagcataggtgatccatgtaac

SEQ ID NO: 43666 - DNA, 25 bp, Probe Sequence
aagtcagttaaggttattgttgtgg

SEQ ID NO: 43667 - DNA, 25 bp, Probe Sequence
cttggtgtgactgctaatgatgtaa

SEQ ID NO: 43668 - DNA, 25 bp, Probe Sequence
gccaagaagtcagttaaggttattg

SEQ ID NO: 43669 - DNA, 25 bp, Probe Sequence
gttatctctgatggcaactcctatg

SEQ ID NO: 43670 - DNA, 25 bp, Probe Sequence
cgccaagaagtcagttaaggttatt

SEQ ID NO: 43671 - DNA, 25 bp, Probe Sequence
tgttatctctgatggcaactcctat

SEQ ID NO: 43672 - DNA, 25 bp, Probe Sequence
cctataattcttgtgctgttggata

SEQ ID NO: 43673 - DNA, 25 bp, Probe Sequence
gcctataattcttgtgctgttggat

SEQ ID NO: 43674 - DNA, 25 bp, Probe Sequence
gtaatcaagaataagacctggaagt

SEQ ID NO: 43675 - DNA, 25 bp, Probe Sequence
tgtaatcaagaataagacctggaag

SEQ ID NO: 43676 - DNA, 25 bp, Probe Sequence
ttatctctgatggcaactcctatgg

SEQ ID NO: 43677 - DNA, 25 bp, Probe Sequence
gaagtcagttaaggttattgttgtg

SEQ ID NO: 43678 - DNA, 25 bp, Probe Sequence
ccaagaagtcagttaaggttattgt

SEQ ID NO: 43679 - DNA, 25 bp, Probe Sequence
tgttgtaatcaagaataagacctgg

SEQ ID NO: 43680 - DNA, 25 bp, Probe Sequence
agaagtcagttaaggttattgttgt

SEQ ID NO: 43681 - DNA, 25 bp, Probe Sequence
tacgccaagaagtcagttaaggtta

SEQ ID NO: 43682 - DNA, 25 bp, Probe Sequence
acttggtgtgactgctaatgatgta

SEQ ID NO: 43683 - DNA, 25 bp, Probe Sequence
gttgtaatcaagaataagacctgga

SEQ ID NO: 43684 - DNA, 25 bp, Probe Sequence
cctgttgtaatcaagaataagacct

SEQ ID NO: 43685 - DNA, 25 bp, Probe Sequence
gcctgactagacaatgatgttacta

SEQ ID NO: 43686 - DNA, 25 bp, Probe Sequence
gtgttatctctgatggcaactccta

SEQ ID NO: 43687 - DNA, 25 bp, Probe Sequence
acgccaagaagtcagttaaggttat

SEQ ID NO: 43688 - DNA, 25 bp, Probe Sequence
atacgccaagaagtcagttaaggtt

SEQ ID NO: 43689 - DNA, 25 bp, Probe Sequence
aatacgccaagaagtcagttaaggt

SEQ ID NO: 43690 - DNA, 25 bp, Probe Sequence
aaggttgtgatgtggtagttattcc

SEQ ID NO: 43691 - DNA, 25 bp, Probe Sequence
tactgtattgacatcatcatgcctt

SEQ ID NO: 43692 - DNA, 25 bp, Probe Sequence
ttactgtattgacatcatcatgcct

SEQ ID NO: 43693 - DNA, 25 bp, Probe Sequence
aggttgtgatgtggtagttattccg

SEQ ID NO: 43694 - DNA, 25 bp, Probe Sequence
ttggtgatgattactgtattgacat

SEQ ID NO: 43695 - DNA, 25 bp, Probe Sequence
attactgtattgacatcatcatgcc

SEQ ID NO: 43696 - DNA, 25 bp, Probe Sequence
gtattgacatcatcatgccttccaa

SEQ ID NO: 43697 - DNA, 25 bp, Probe Sequence
actgtattgacatcatcatgccttc

SEQ ID NO: 43698 - DNA, 25 bp, Probe Sequence
tgaaaggttgtgatgtggtagttat

SEQ ID NO: 43699 - DNA, 25 bp, Probe Sequence
tgctttggtgatgattactgtattg

SEQ ID NO: 43700 - DNA, 25 bp, Probe Sequence
gctttggtgatgattactgtattga

SEQ ID NO: 43701 - DNA, 25 bp, Probe Sequence
gaatgttccttcgttaagtcacagg

SEQ ID NO: 43702 - DNA, 25 bp, Probe Sequence
ctgaaaggttgtgatgtggtagtta

SEQ ID NO: 43703 - DNA, 25 bp, Probe Sequence
aaaggttgtgatgtggtagttattc

SEQ ID NO: 43704 - DNA, 25 bp, Probe Sequence
gaaaggttgtgatgtggtagttatt

SEQ ID NO: 43705 - DNA, 25 bp, Probe Sequence
aatttgctttggtgatgattactgt

SEQ ID NO: 43706 - DNA, 25 bp, Probe Sequence
ttgctttggtgatgattactgtatt

SEQ ID NO: 43707 - DNA, 25 bp, Probe Sequence
tttgctttggtgatgattactgtat

SEQ ID NO: 43708 - DNA, 25 bp, Probe Sequence
atttgctttggtgatgattactgta

SEQ ID NO: 43709 - DNA, 25 bp, Probe Sequence
ctgtattgacatcatcatgccttcc

SEQ ID NO: 43710 - DNA, 25 bp, Probe Sequence
gattactgtattgacatcatcatgc

SEQ ID NO: 43711 - DNA, 25 bp, Probe Sequence
ttgtggaatgttccttcgttaagtc

SEQ ID NO: 43712 - DNA, 25 bp, Probe Sequence
tgtattgacatcatcatgccttcca

SEQ ID NO: 43713 - DNA, 25 bp, Probe Sequence
aatgaatggaaaggaaggtgttgtg

SEQ ID NO: 43714 - DNA, 25 bp, Probe Sequence
gatattacagccacctcattcttct

SEQ ID NO: 43715 - DNA, 25 bp, Probe Sequence
catatctcacctcaactctacacaa

SEQ ID NO: 43716 - DNA, 25 bp, Probe Sequence
gacatatctcacctcaactctacac

SEQ ID NO: 43717 - DNA, 25 bp, Probe Sequence
acatatctcacctcaactctacaca

SEQ ID NO: 43718 - DNA, 25 bp, Probe Sequence
tattacagccacctcattcttctaa

SEQ ID NO: 43719 - DNA, 25 bp, Probe Sequence
atattacagccacctcattcttcta

SEQ ID NO: 43720 - DNA, 25 bp, Probe Sequence
agacatatctcacctcaactctaca

SEQ ID NO: 43721 - DNA, 25 bp, Probe Sequence
aagacatatctcacctcaactctac

SEQ ID NO: 43722 - DNA, 25 bp, Probe Sequence
gaagacatatctcacctcaactcta

SEQ ID NO: 43723 - DNA, 25 bp, Probe Sequence
tgatattacagccacctcattcttc

SEQ ID NO: 43724 - DNA, 25 bp, Probe Sequence
ggaagacatatctcacctcaactct

SEQ ID NO: 43725 - DNA, 25 bp, Probe Sequence
tggaagacatatctcacctcaactc

SEQ ID NO: 43726 - DNA, 25 bp, Probe Sequence
ctaagtgatattacagccacctcat

SEQ ID NO: 43727 - DNA, 25 bp, Probe Sequence
taagtgatattacagccacctcatt

SEQ ID NO: 43728 - DNA, 25 bp, Probe Sequence
gtgatattacagccacctcattctt

SEQ ID NO: 43729 - DNA, 25 bp, Probe Sequence
aagtgatattacagccacctcattc

SEQ ID NO: 43730 - DNA, 25 bp, Probe Sequence
ctactgacagtggaagacatatctc

SEQ ID NO: 43731 - DNA, 25 bp, Probe Sequence
tactgacagtggaagacatatctca

SEQ ID NO: 43732 - DNA, 25 bp, Probe Sequence
agtgatattacagccacctcattct

SEQ ID NO: 43733 - DNA, 25 bp, Probe Sequence
cctactgacagtggaagacatatct

SEQ ID NO: 43734 - DNA, 25 bp, Probe Sequence
cctaagtgatattacagccacctca

SEQ ID NO: 43735 - DNA, 25 bp, Probe Sequence
attacagccacctcattcttctaaa

SEQ ID NO: 43736 - DNA, 25 bp, Probe Sequence
ttgaagattaactcgacaatatggc

SEQ ID NO: 43737 - DNA, 25 bp, Probe Sequence
ccatagtcattgctgtttcatctac

SEQ ID NO: 43738 - DNA, 25 bp, Probe Sequence
ttcattgttcgcttctgtaattctg

SEQ ID NO: 43739 - DNA, 25 bp, Probe Sequence
cattgttcgcttctgtaattctgaa

SEQ ID NO: 43740 - DNA, 25 bp, Probe Sequence
ttgtagttcttatgctgaatcttcc

SEQ ID NO: 43741 - DNA, 25 bp, Probe Sequence
ccacttgtagttcttatgctgaatc

SEQ ID NO: 43742 - DNA, 25 bp, Probe Sequence
ttgctgaggttccttctattctgat

SEQ ID NO: 43743 - DNA, 25 bp, Probe Sequence
tcattgttcgcttctgtaattctga

SEQ ID NO: 43744 - DNA, 25 bp, Probe Sequence
cacttgtagttcttatgctgaatct

SEQ ID NO: 43745 - DNA, 25 bp, Probe Sequence
aattcaaccacagacattctcaagg

SEQ ID NO: 43746 - DNA, 25 bp, Probe Sequence
tgctgaggttccttctattctgatg

SEQ ID NO: 43747 - DNA, 25 bp, Probe Sequence
acttgtagttcttatgctgaatctt

SEQ ID NO: 43748 - DNA, 25 bp, Probe Sequence
attcaaccacagacattctcaagga

SEQ ID NO: 43749 - DNA, 25 bp, Probe Sequence
cttgtagttcttatgctgaatcttc

SEQ ID NO: 43750 - DNA, 25 bp, Probe Sequence
aggttccttctattctgatggagta

SEQ ID NO: 43751 - DNA, 25 bp, Probe Sequence
gtccttctgttgatgacttcgtaag

SEQ ID NO: 43752 - DNA, 25 bp, Probe Sequence
ttcaaccacagacattctcaaggaa

SEQ ID NO: 43753 - DNA, 25 bp, Probe Sequence
gatattactcttacctcatgtccag

SEQ ID NO: 43754 - DNA, 25 bp, Probe Sequence
ggttccttctattctgatggagtac

SEQ ID NO: 43755 - DNA, 25 bp, Probe Sequence
gaggttccttctattctgatggagt

SEQ ID NO: 43756 - DNA, 25 bp, Probe Sequence
tgaggttccttctattctgatggag

SEQ ID NO: 43757 - DNA, 25 bp, Probe Sequence
ctgaggttccttctattctgatgga

SEQ ID NO: 43758 - DNA, 25 bp, Probe Sequence
atattactcttacctcatgtccaga

SEQ ID NO: 43759 - DNA, 25 bp, Probe Sequence
agatattactcttacctcatgtcca

SEQ ID NO: 43760 - DNA, 25 bp, Probe Sequence
gctgaggttccttctattctgatgg

SEQ ID NO: 43761 - DNA, 25 bp, Probe Sequence
ttgtttcattgttcgcttctgtaat

SEQ ID NO: 43762 - DNA, 25 bp, Probe Sequence
cagtgtgtataaaccttcttcttct

SEQ ID NO: 43763 - DNA, 25 bp, Probe Sequence
gaggattgtcattaaacacagttgt

SEQ ID NO: 43764 - DNA, 25 bp, Probe Sequence
tgaggattgtcattaaacacagttg

SEQ ID NO: 43765 - DNA, 25 bp, Probe Sequence
aaactgaggattgtcattaaacaca

SEQ ID NO: 43766 - DNA, 25 bp, Probe Sequence
ctgaggattgtcattaaacacagtt

SEQ ID NO: 43767 - DNA, 25 bp, Probe Sequence
aactgaggattgtcattaaacacag

SEQ ID NO: 43768 - DNA, 25 bp, Probe Sequence
agtgtgtataaaccttcttcttctt

SEQ ID NO: 43769 - DNA, 25 bp, Probe Sequence
acagtgtgtataaaccttcttcttc

SEQ ID NO: 43770 - DNA, 25 bp, Probe Sequence
ctgacaatcctggaaatctgttctc

SEQ ID NO: 43771 - DNA, 25 bp, Probe Sequence
gtgtgtataaaccttcttcttcttt

SEQ ID NO: 43772 - DNA, 25 bp, Probe Sequence
ctatcctccaaagccattgtaaatg

SEQ ID NO: 43773 - DNA, 25 bp, Probe Sequence
tatcctccaaagccattgtaaatgt

SEQ ID NO: 43774 - DNA, 25 bp, Probe Sequence
taaactgaggattgtcattaaacac

SEQ ID NO: 43775 - DNA, 25 bp, Probe Sequence
tccaaagccattgtaaatgtgtgta

SEQ ID NO: 43776 - DNA, 25 bp, Probe Sequence
ccaaagccattgtaaatgtgtgtac

SEQ ID NO: 43777 - DNA, 25 bp, Probe Sequence
gctatcctccaaagccattgtaaat

SEQ ID NO: 43778 - DNA, 25 bp, Probe Sequence
atcctccaaagccattgtaaatgtg

SEQ ID NO: 43779 - DNA, 25 bp, Probe Sequence
tgacaatcctggaaatctgttctcc

SEQ ID NO: 43780 - DNA, 25 bp, Probe Sequence
gtacagtgtgtataaaccttcttct

SEQ ID NO: 43781 - DNA, 25 bp, Probe Sequence
gctgacaatcctggaaatctgttct

SEQ ID NO: 43782 - DNA, 25 bp, Probe Sequence
ttaaactgaggattgtcattaaaca

SEQ ID NO: 43783 - DNA, 25 bp, Probe Sequence
ctccaaagccattgtaaatgtgtgt

SEQ ID NO: 43784 - DNA, 25 bp, Probe Sequence
tacagtgtgtataaaccttcttctt

SEQ ID NO: 43785 - DNA, 25 bp, Probe Sequence
cttctggctgacaatcctggaaatc

SEQ ID NO: 43786 - DNA, 25 bp, Probe Sequence
cctttgtctttctttgtcattcagt

SEQ ID NO: 43787 - DNA, 25 bp, Probe Sequence
gtcctttgtctttctttgtcattca

SEQ ID NO: 43788 - DNA, 25 bp, Probe Sequence
cagtcctttgtctttctttgtcatt

SEQ ID NO: 43789 - DNA, 25 bp, Probe Sequence
tcctttgtctttctttgtcattcag

SEQ ID NO: 43790 - DNA, 25 bp, Probe Sequence
agtcctttgtctttctttgtcattc

SEQ ID NO: 43791 - DNA, 25 bp, Probe Sequence
cttcagtcctttgtctttctttgtc

SEQ ID NO: 43792 - DNA, 25 bp, Probe Sequence
ttcttcagtcctttgtctttctttg

SEQ ID NO: 43793 - DNA, 25 bp, Probe Sequence
gttcttcagtcctttgtctttcttt

SEQ ID NO: 43794 - DNA, 25 bp, Probe Sequence
tcagtcctttgtctttctttgtcat

SEQ ID NO: 43795 - DNA, 25 bp, Probe Sequence
tcttcagtcctttgtctttctttgt

SEQ ID NO: 43796 - DNA, 25 bp, Probe Sequence
tgttcttcagtcctttgtctttctt

SEQ ID NO: 43797 - DNA, 25 bp, Probe Sequence
ttcagtcctttgtctttctttgtca

SEQ ID NO: 43798 - DNA, 25 bp, Probe Sequence
ttgtctttctttgtcattcagttct

SEQ ID NO: 43799 - DNA, 25 bp, Probe Sequence
cagtatctgctgttcttcagtcctt

SEQ ID NO: 43800 - DNA, 25 bp, Probe Sequence
ctttctttgtcattcagttctaggc

SEQ ID NO: 43801 - DNA, 25 bp, Probe Sequence
tttgtctttctttgtcattcagttc

SEQ ID NO: 43802 - DNA, 25 bp, Probe Sequence
tgtctttctttgtcattcagttcta

SEQ ID NO: 43803 - DNA, 25 bp, Probe Sequence
ctttgtctttctttgtcattcagtt

SEQ ID NO: 43804 - DNA, 25 bp, Probe Sequence
tcaggattaactaaagaagaggaga

SEQ ID NO: 43805 - DNA, 25 bp, Probe Sequence
tttgtcaggtgggagatttggaata

SEQ ID NO: 43806 - DNA, 25 bp, Probe Sequence
tctttctttgtcattcagttctagg

SEQ ID NO: 43807 - DNA, 25 bp, Probe Sequence
ctgttcttcagtcctttgtctttct

SEQ ID NO: 43808 - DNA, 25 bp, Probe Sequence
caggattaactaaagaagaggagaa

SEQ ID NO: 43809 - DNA, 25 bp, Probe Sequence
ttgtcaggtgggagatttggaatac

SEQ ID NO: 43810 - DNA, 25 bp, Probe Sequence
aagtacaaatagagtgacccgtaaa

SEQ ID NO: 43811 - DNA, 25 bp, Probe Sequence
caagtacaaatagagtgacccgtaa

SEQ ID NO: 43812 - DNA, 25 bp, Probe Sequence
ccaagtacaaatagagtgacccgta

SEQ ID NO: 43813 - DNA, 25 bp, Probe Sequence
ctgctcccaagtacaaatagagtga

SEQ ID NO: 43814 - DNA, 25 bp, Probe Sequence
tgctcccaagtacaaatagagtgac

SEQ ID NO: 43815 - DNA, 25 bp, Probe Sequence
ctcccaagtacaaatagagtgaccc

SEQ ID NO: 43816 - DNA, 25 bp, Probe Sequence
acaaatagagtgacccgtaaaatct

SEQ ID NO: 43817 - DNA, 25 bp, Probe Sequence
gctcccaagtacaaatagagtgacc

SEQ ID NO: 43818 - DNA, 25 bp, Probe Sequence
cctgctcccaagtacaaatagagtg

SEQ ID NO: 43819 - DNA, 25 bp, Probe Sequence
tacaaatagagtgacccgtaaaatc

SEQ ID NO: 43820 - DNA, 25 bp, Probe Sequence
agtacaaatagagtgacccgtaaaa

SEQ ID NO: 43821 - DNA, 25 bp, Probe Sequence
gtacaaatagagtgacccgtaaaat

SEQ ID NO: 43822 - DNA, 25 bp, Probe Sequence
tacaatcttgacccctttgctacat

SEQ ID NO: 43823 - DNA, 25 bp, Probe Sequence
ttttgctacaatcttgacccctttg

SEQ ID NO: 43824 - DNA, 25 bp, Probe Sequence
tcccaagtacaaatagagtgacccg

SEQ ID NO: 43825 - DNA, 25 bp, Probe Sequence
caatcttgacccctttgctacattc

SEQ ID NO: 43826 - DNA, 25 bp, Probe Sequence
tagagtgacccgtaaaatctaggat

SEQ ID NO: 43827 - DNA, 25 bp, Probe Sequence
atagagtgacccgtaaaatctagga

SEQ ID NO: 43828 - DNA, 25 bp, Probe Sequence
aatagagtgacccgtaaaatctagg

SEQ ID NO: 43829 - DNA, 25 bp, Probe Sequence
cccaagtacaaatagagtgacccgt

SEQ ID NO: 43830 - DNA, 25 bp, Probe Sequence
ccctgctcccaagtacaaatagagt

SEQ ID NO: 43831 - DNA, 25 bp, Probe Sequence
ctacaatcttgacccctttgctaca

SEQ ID NO: 43832 - DNA, 25 bp, Probe Sequence
agagtgacccgtaaaatctaggatt

SEQ ID NO: 43833 - DNA, 25 bp, Probe Sequence
cttctcgcttgggaactctagtctc

SEQ ID NO: 43834 - DNA, 25 bp, Probe Sequence
tttatgtttagatagggctgggcaa

SEQ ID NO: 43835 - DNA, 25 bp, Probe Sequence
taaagacaaccatatttagcagtgc

SEQ ID NO: 43836 - DNA, 25 bp, Probe Sequence
tagttaagttcagcacttgtctcat

SEQ ID NO: 43837 - DNA, 25 bp, Probe Sequence
atagttaagttcagcacttgtctca

SEQ ID NO: 43838 - DNA, 25 bp, Probe Sequence
acatagttaagttcagcacttgtct

SEQ ID NO: 43839 - DNA, 25 bp, Probe Sequence
catagttaagttcagcacttgtctc

SEQ ID NO: 43840 - DNA, 25 bp, Probe Sequence
aacatagttaagttcagcacttgtc

SEQ ID NO: 43841 - DNA, 25 bp, Probe Sequence
agttaagttcagcacttgtctcatt

SEQ ID NO: 43842 - DNA, 25 bp, Probe Sequence
ttatgtttagatagggctgggcaag

SEQ ID NO: 43843 - DNA, 25 bp, Probe Sequence
aatggattgttaatttcagtcctgt

SEQ ID NO: 43844 - DNA, 25 bp, Probe Sequence
ggattgttaatttcagtcctgtagt

SEQ ID NO: 43845 - DNA, 25 bp, Probe Sequence
tggattgttaatttcagtcctgtag

SEQ ID NO: 43846 - DNA, 25 bp, Probe Sequence
taacatagttaagttcagcacttgt

SEQ ID NO: 43847 - DNA, 25 bp, Probe Sequence
gattgttaatttcagtcctgtagtt

SEQ ID NO: 43848 - DNA, 25 bp, Probe Sequence
ataaagacaaccatatttagcagtg

SEQ ID NO: 43849 - DNA, 25 bp, Probe Sequence
aaagacaaccatatttagcagtgca

SEQ ID NO: 43850 - DNA, 25 bp, Probe Sequence
atggattgttaatttcagtcctgta

SEQ ID NO: 43851 - DNA, 25 bp, Probe Sequence
attgttaatttcagtcctgtagttt

SEQ ID NO: 43852 - DNA, 25 bp, Probe Sequence
attttatgtttagatagggctgggc

SEQ ID NO: 43853 - DNA, 25 bp, Probe Sequence
gttaagttcagcacttgtctcattt

SEQ ID NO: 43854 - DNA, 25 bp, Probe Sequence
aataaagacaaccatatttagcagt

SEQ ID NO: 43855 - DNA, 25 bp, Probe Sequence
taatggattgttaatttcagtcctg

SEQ ID NO: 43856 - DNA, 25 bp, Probe Sequence
tatgtttagatagggctgggcaagg

SEQ ID NO: 43857 - DNA, 25 bp, Probe Sequence
ttttatgtttagatagggctgggca

SEQ ID NO: 43858 - DNA, 25 bp, Probe Sequence
aagatgaagagcttggatgtgaatc

SEQ ID NO: 43859 - DNA, 25 bp, Probe Sequence
gaagatgaagagcttggatgtgaat

SEQ ID NO: 43860 - DNA, 25 bp, Probe Sequence
caaggaaatcaggaagaagaaagac

SEQ ID NO: 43861 - DNA, 25 bp, Probe Sequence
gatgagaagatgaagagcttggatg

SEQ ID NO: 43862 - DNA, 25 bp, Probe Sequence
aaggaaatcaggaagaagaaagacc

SEQ ID NO: 43863 - DNA, 25 bp, Probe Sequence
ccaaggaaatcaggaagaagaaaga

SEQ ID NO: 43864 - DNA, 25 bp, Probe Sequence
cttgatgagaagatgaagagcttgg

SEQ ID NO: 43865 - DNA, 25 bp, Probe Sequence
tgatgagaagatgaagagcttggat

SEQ ID NO: 43866 - DNA, 25 bp, Probe Sequence
atgagaagatgaagagcttggatgt

SEQ ID NO: 43867 - DNA, 25 bp, Probe Sequence
ttgatgagaagatgaagagcttgga

SEQ ID NO: 43868 - DNA, 25 bp, Probe Sequence
agaagatgaagagcttggatgtgaa

SEQ ID NO: 43869 - DNA, 25 bp, Probe Sequence
gatgaagagcttggatgtgaatcag

SEQ ID NO: 43870 - DNA, 25 bp, Probe Sequence
agatgaagagcttggatgtgaatca

SEQ ID NO: 43871 - DNA, 25 bp, Probe Sequence
gccaaggaaatcaggaagaagaaag

SEQ ID NO: 43872 - DNA, 25 bp, Probe Sequence
gagaagatgaagagcttggatgtga

SEQ ID NO: 43873 - DNA, 25 bp, Probe Sequence
tgagaagatgaagagcttggatgtg

SEQ ID NO: 43874 - DNA, 25 bp, Probe Sequence
tcttgatgagaagatgaagagcttg

SEQ ID NO: 43875 - DNA, 25 bp, Probe Sequence
aggaaatcaggaagaagaaagacct

SEQ ID NO: 43876 - DNA, 25 bp, Probe Sequence
tcaagttcaatgagtactggagatt

SEQ ID NO: 43877 - DNA, 25 bp, Probe Sequence
atgaagagcttggatgtgaatcagg

SEQ ID NO: 43878 - DNA, 25 bp, Probe Sequence
aggaagaagaaagacctgaagatca

SEQ ID NO: 43879 - DNA, 25 bp, Probe Sequence
gaagagcttggatgtgaatcaggac

SEQ ID NO: 43880 - DNA, 25 bp, Probe Sequence
tgaagatcaggaagaagtaaagccg

SEQ ID NO: 43881 - DNA, 25 bp, Probe Sequence
agaaccgcactcttcccaaataaag

SEQ ID NO: 43882 - DNA, 25 bp, Probe Sequence
ccagtttgagaaagtttagcgaata

SEQ ID NO: 43883 - DNA, 25 bp, Probe Sequence
gccaaacagaggaagaaacattaaa

SEQ ID NO: 43884 - DNA, 25 bp, Probe Sequence
aagccaaacagaggaagaaacatta

SEQ ID NO: 43885 - DNA, 25 bp, Probe Sequence
tccagtttgagaaagtttagcgaat

SEQ ID NO: 43886 - DNA, 25 bp, Probe Sequence
atccagtttgagaaagtttagcgaa

SEQ ID NO: 43887 - DNA, 25 bp, Probe Sequence
agccaaacagaggaagaaacattaa

SEQ ID NO: 43888 - DNA, 25 bp, Probe Sequence
ttcaaagaagcaatttcagttcctt

SEQ ID NO: 43889 - DNA, 25 bp, Probe Sequence
aagcaatttcagttcctttctaagc

SEQ ID NO: 43890 - DNA, 25 bp, Probe Sequence
attcaaagaagcaatttcagttcct

SEQ ID NO: 43891 - DNA, 25 bp, Probe Sequence
aaagccaaacagaggaagaaacatt

SEQ ID NO: 43892 - DNA, 25 bp, Probe Sequence
ccaagaactctttcctgtaataagc

SEQ ID NO: 43893 - DNA, 25 bp, Probe Sequence
gaagcaatttcagttcctttctaag

SEQ ID NO: 43894 - DNA, 25 bp, Probe Sequence
caagaactctttcctgtaataagca

SEQ ID NO: 43895 - DNA, 25 bp, Probe Sequence
cagtttgagaaagtttagcgaatat

SEQ ID NO: 43896 - DNA, 25 bp, Probe Sequence
gatccagtttgagaaagtttagcga

SEQ ID NO: 43897 - DNA, 25 bp, Probe Sequence
tattcaaagaagcaatttcagttcc

SEQ ID NO: 43898 - DNA, 25 bp, Probe Sequence
ccatattcaaagaagcaatttcagt

SEQ ID NO: 43899 - DNA, 25 bp, Probe Sequence
caaagccaaacagaggaagaaacat

SEQ ID NO: 43900 - DNA, 25 bp, Probe Sequence
caaccaagaactctttcctgtaata

SEQ ID NO: 43901 - DNA, 25 bp, Probe Sequence
gccctgtaatttaaccagtctttaa

SEQ ID NO: 43902 - DNA, 25 bp, Probe Sequence
acaaccaagaactctttcctgtaat

SEQ ID NO: 43903 - DNA, 25 bp, Probe Sequence
tccatattcaaagaagcaatttcag

SEQ ID NO: 43904 - DNA, 25 bp, Probe Sequence
accaagaactctttcctgtaataag

SEQ ID NO: 43905 - DNA, 25 bp, Probe Sequence
aacaaccaagaactctttcctgtaa

SEQ ID NO: 43906 - DNA, 25 bp, Probe Sequence
taatctcctcttctctccaactctt

SEQ ID NO: 43907 - DNA, 25 bp, Probe Sequence
ttaatctcctcttctctccaactct

SEQ ID NO: 43908 - DNA, 25 bp, Probe Sequence
cttaatctcctcttctctccaactc

SEQ ID NO: 43909 - DNA, 25 bp, Probe Sequence
gcttaatctcctcttctctccaact

SEQ ID NO: 43910 - DNA, 25 bp, Probe Sequence
agcttaatctcctcttctctccaac

SEQ ID NO: 43911 - DNA, 25 bp, Probe Sequence
aatctcctcttctctccaactcttt

SEQ ID NO: 43912 - DNA, 25 bp, Probe Sequence
aacaataactcctcctccaacaagc

SEQ ID NO: 43913 - DNA, 25 bp, Probe Sequence
aaacaataactcctcctccaacaag

SEQ ID NO: 43914 - DNA, 25 bp, Probe Sequence
gggacacttgtaaatagaaatcagg

SEQ ID NO: 43915 - DNA, 25 bp, Probe Sequence
atctcctcttctctccaactctttc

SEQ ID NO: 43916 - DNA, 25 bp, Probe Sequence
cgactagggacacttgtaaatagaa

SEQ ID NO: 43917 - DNA, 25 bp, Probe Sequence
tcttctctccaactctttccacttt

SEQ ID NO: 43918 - DNA, 25 bp, Probe Sequence
ggacacttgtaaatagaaatcagga

SEQ ID NO: 43919 - DNA, 25 bp, Probe Sequence
agggacacttgtaaatagaaatcag

SEQ ID NO: 43920 - DNA, 25 bp, Probe Sequence
caataactcctcctccaacaagcag

SEQ ID NO: 43921 - DNA, 25 bp, Probe Sequence
ctcttctctccaactctttccactt

SEQ ID NO: 43922 - DNA, 25 bp, Probe Sequence
ataactcctcctccaacaagcagaa

SEQ ID NO: 43923 - DNA, 25 bp, Probe Sequence
aataactcctcctccaacaagcaga

SEQ ID NO: 43924 - DNA, 25 bp, Probe Sequence
ggaatggtggactttcacaaatatc

SEQ ID NO: 43925 - DNA, 25 bp, Probe Sequence
aggaatggtggactttcacaaatat

SEQ ID NO: 43926 - DNA, 25 bp, Probe Sequence
gcgactagggacacttgtaaataga

SEQ ID NO: 43927 - DNA, 25 bp, Probe Sequence
agcgactagggacacttgtaaatag

SEQ ID NO: 43928 - DNA, 25 bp, Probe Sequence
aaggaatggtggactttcacaaata

SEQ ID NO: 43929 - DNA, 25 bp, Probe Sequence
gaatggtggactttcacaaatatct

SEQ ID NO: 43930 - DNA, 25 bp, Probe Sequence
ttgtaaggtttccatttagtttgct

SEQ ID NO: 43931 - DNA, 25 bp, Probe Sequence
ccatttagtttgcttccgatgatta

SEQ ID NO: 43932 - DNA, 25 bp, Probe Sequence
taaggtttccatttagtttgcttcc

SEQ ID NO: 43933 - DNA, 25 bp, Probe Sequence
tgtaaggtttccatttagtttgctt

SEQ ID NO: 43934 - DNA, 25 bp, Probe Sequence
ttctgctactgcgaattgatgacat

SEQ ID NO: 43935 - DNA, 25 bp, Probe Sequence
tccatttagtttgcttccgatgatt

SEQ ID NO: 43936 - DNA, 25 bp, Probe Sequence
ttccatttagtttgcttccgatgat

SEQ ID NO: 43937 - DNA, 25 bp, Probe Sequence
gtaaggtttccatttagtttgcttc

SEQ ID NO: 43938 - DNA, 25 bp, Probe Sequence
attgtaaggtttccatttagtttgc

SEQ ID NO: 43939 - DNA, 25 bp, Probe Sequence
tttccatttagtttgcttccgatga

SEQ ID NO: 43940 - DNA, 25 bp, Probe Sequence
gtttccatttagtttgcttccgatg

SEQ ID NO: 43941 - DNA, 25 bp, Probe Sequence
tgcttccgatgattaaatctaagtc

SEQ ID NO: 43942 - DNA, 25 bp, Probe Sequence
agtttgcttccgatgattaaatcta

SEQ ID NO: 43943 - DNA, 25 bp, Probe Sequence
tagtttgcttccgatgattaaatct

SEQ ID NO: 43944 - DNA, 25 bp, Probe Sequence
ttgcttccgatgattaaatctaagt

SEQ ID NO: 43945 - DNA, 25 bp, Probe Sequence
ggtttccatttagtttgcttccgat

SEQ ID NO: 43946 - DNA, 25 bp, Probe Sequence
gcttccgatgattaaatctaagtca

SEQ ID NO: 43947 - DNA, 25 bp, Probe Sequence
catttagtttgcttccgatgattaa

SEQ ID NO: 43948 - DNA, 25 bp, Probe Sequence
tctgctactgcgaattgatgacatc

SEQ ID NO: 43949 - DNA, 25 bp, Probe Sequence
gtttgcttccgatgattaaatctaa

SEQ ID NO: 43950 - DNA, 25 bp, Probe Sequence
ttagtttgcttccgatgattaaatc

SEQ ID NO: 43951 - DNA, 25 bp, Probe Sequence
aaggtttccatttagtttgcttccg

SEQ ID NO: 43952 - DNA, 25 bp, Probe Sequence
agttctgctactgcgaattgatgac

SEQ ID NO: 43953 - DNA, 25 bp, Probe Sequence
gttctgctactgcgaattgatgaca

SEQ ID NO: 43954 - DNA, 25 bp, Probe Sequence
ctgaggcaccaagtatagatgagaa

SEQ ID NO: 43955 - DNA, 25 bp, Probe Sequence
gactgaggcaccaagtatagatgag

SEQ ID NO: 43956 - DNA, 25 bp, Probe Sequence
tttctctgccatacactaactcaaa

SEQ ID NO: 43957 - DNA, 25 bp, Probe Sequence
ggcaccaagtatagatgagaaagta

SEQ ID NO: 43958 - DNA, 25 bp, Probe Sequence
ccctgatgaactaagatttaatgcg

SEQ ID NO: 43959 - DNA, 25 bp, Probe Sequence
gaggcaccaagtatagatgagaaag

SEQ ID NO: 43960 - DNA, 25 bp, Probe Sequence
cagactgaggcaccaagtatagatg

SEQ ID NO: 43961 - DNA, 25 bp, Probe Sequence
actgaggcaccaagtatagatgaga

SEQ ID NO: 43962 - DNA, 25 bp, Probe Sequence
agactgaggcaccaagtatagatga

SEQ ID NO: 43963 - DNA, 25 bp, Probe Sequence
tgaactaagatttaatgcgattgct

SEQ ID NO: 43964 - DNA, 25 bp, Probe Sequence
cctgatgaactaagatttaatgcga

SEQ ID NO: 43965 - DNA, 25 bp, Probe Sequence
attagaggatgccatagaagtttgc

SEQ ID NO: 43966 - DNA, 25 bp, Probe Sequence
accctgatgaactaagatttaatgc

SEQ ID NO: 43967 - DNA, 25 bp, Probe Sequence
gcgaccctgatgaactaagatttaa

SEQ ID NO: 43968 - DNA, 25 bp, Probe Sequence
gatgaaactttattagaggatgcca

SEQ ID NO: 43969 - DNA, 25 bp, Probe Sequence
tgatgaaactttattagaggatgcc

SEQ ID NO: 43970 - DNA, 25 bp, Probe Sequence
cagatacctggagaactatgatgcc

SEQ ID NO: 43971 - DNA, 25 bp, Probe Sequence
gaactaagatttaatgcgattgctc

SEQ ID NO: 43972 - DNA, 25 bp, Probe Sequence
agatttaatgcgattgctctttctg

SEQ ID NO: 43973 - DNA, 25 bp, Probe Sequence
gcaccaagtatagatgagaaagtag

SEQ ID NO: 43974 - DNA, 25 bp, Probe Sequence
aggcaccaagtatagatgagaaagt

SEQ ID NO: 43975 - DNA, 25 bp, Probe Sequence
tgaggcaccaagtatagatgagaaa

SEQ ID NO: 43976 - DNA, 25 bp, Probe Sequence
gatacctggagaactatgatgccat

SEQ ID NO: 43977 - DNA, 25 bp, Probe Sequence
cgaccctgatgaactaagatttaat

SEQ ID NO: 43978 - DNA, 25 bp, Probe Sequence
gcttctatgtaattcgcaatgattc

SEQ ID NO: 43979 - DNA, 25 bp, Probe Sequence
ttctatgtaattcgcaatgattcca

SEQ ID NO: 43980 - DNA, 25 bp, Probe Sequence
gaggaagaggaagaggaggaattag

SEQ ID NO: 43981 - DNA, 25 bp, Probe Sequence
tgtaattcgcaatgattccatctaa

SEQ ID NO: 43982 - DNA, 25 bp, Probe Sequence
cttctatgtaattcgcaatgattcc

SEQ ID NO: 43983 - DNA, 25 bp, Probe Sequence
atgtaattcgcaatgattccatcta

SEQ ID NO: 43984 - DNA, 25 bp, Probe Sequence
tatgtaattcgcaatgattccatct

SEQ ID NO: 43985 - DNA, 25 bp, Probe Sequence
tctatgtaattcgcaatgattccat

SEQ ID NO: 43986 - DNA, 25 bp, Probe Sequence
ctatgtaattcgcaatgattccatc

SEQ ID NO: 43987 - DNA, 25 bp, Probe Sequence
gaagaggaagaggaggaattagtgg

SEQ ID NO: 43988 - DNA, 25 bp, Probe Sequence
ggaagaggaagaggaggaattagtg

SEQ ID NO: 43989 - DNA, 25 bp, Probe Sequence
aggaagaggaagaggaggaattagt

SEQ ID NO: 43990 - DNA, 25 bp, Probe Sequence
agaggaagaggaggaattagtggat

SEQ ID NO: 43991 - DNA, 25 bp, Probe Sequence
gaggaagaggaggaattagtggatc

SEQ ID NO: 43992 - DNA, 25 bp, Probe Sequence
aagaggaagaggaggaattagtgga

SEQ ID NO: 43993 - DNA, 25 bp, Probe Sequence
ggtagcttctatgtaattcgcaatg

SEQ ID NO: 43994 - DNA, 25 bp, Probe Sequence
tggtagcttctatgtaattcgcaat

SEQ ID NO: 43995 - DNA, 25 bp, Probe Sequence
gtagcttctatgtaattcgcaatga

SEQ ID NO: 43996 - DNA, 25 bp, Probe Sequence
agcttctatgtaattcgcaatgatt

SEQ ID NO: 43997 - DNA, 25 bp, Probe Sequence
ctggtagcttctatgtaattcgcaa

SEQ ID NO: 43998 - DNA, 25 bp, Probe Sequence
ggaggaagaggaagaggaggaatta

SEQ ID NO: 43999 - DNA, 25 bp, Probe Sequence
actgtaagttcacatcaacctcatg

SEQ ID NO: 44000 - DNA, 25 bp, Probe Sequence
gattcctctcgatcacatacagaag

SEQ ID NO: 44001 - DNA, 25 bp, Probe Sequence
attcctctcgatcacatacagaaga

SEQ ID NO: 44002 - DNA, 25 bp, Probe Sequence
tgagatgaaggaaggactatgacaa

SEQ ID NO: 44003 - DNA, 25 bp, Probe Sequence
gtgagatgaaggaaggactatgaca

SEQ ID NO: 44004 - DNA, 25 bp, Probe Sequence
gagtgagatgaaggaaggactatga

SEQ ID NO: 44005 - DNA, 25 bp, Probe Sequence
aagagttggagtgagatgaaggaag

SEQ ID NO: 44006 - DNA, 25 bp, Probe Sequence
gaagagttggagtgagatgaaggaa

SEQ ID NO: 44007 - DNA, 25 bp, Probe Sequence
aagaagagttggagtgagatgaagg

SEQ ID NO: 44008 - DNA, 25 bp, Probe Sequence
agtgagatgaaggaaggactatgac

SEQ ID NO: 44009 - DNA, 25 bp, Probe Sequence
ggagtgagatgaaggaaggactatg

SEQ ID NO: 44010 - DNA, 25 bp, Probe Sequence
agaagagttggagtgagatgaagga

SEQ ID NO: 44011 - DNA, 25 bp, Probe Sequence
tggagtgagatgaaggaaggactat

SEQ ID NO: 44012 - DNA, 25 bp, Probe Sequence
tacctctacctgtgctatgtgtgaa

SEQ ID NO: 44013 - DNA, 25 bp, Probe Sequence
gagatgaaggaaggactatgacaaa

SEQ ID NO: 44014 - DNA, 25 bp, Probe Sequence
ttggagtgagatgaaggaaggacta

SEQ ID NO: 44015 - DNA, 25 bp, Probe Sequence
aaagaagagttggagtgagatgaag

SEQ ID NO: 44016 - DNA, 25 bp, Probe Sequence
gaaagaagagttggagtgagatgaa

SEQ ID NO: 44017 - DNA, 25 bp, Probe Sequence
agatgaaggaaggactatgacaaat

SEQ ID NO: 44018 - DNA, 25 bp, Probe Sequence
gatgaaggaaggactatgacaaata

SEQ ID NO: 44019 - DNA, 25 bp, Probe Sequence
ggaaagaagagttggagtgagatga

SEQ ID NO: 44020 - DNA, 25 bp, Probe Sequence
aggaaagaagagttggagtgagatg

SEQ ID NO: 44021 - DNA, 25 bp, Probe Sequence
caggaaagaagagttggagtgagat

SEQ ID NO: 44022 - DNA, 25 bp, Probe Sequence
gagttggagtgagatgaaggaagga

SEQ ID NO: 44023 - DNA, 25 bp, Probe Sequence
agagttggagtgagatgaaggaagg

SEQ ID NO: 44024 - DNA, 25 bp, Probe Sequence
tgaaggaaggactatgacaaataaa

SEQ ID NO: 44025 - DNA, 25 bp, Probe Sequence
atgaaggaaggactatgacaaataa

SEQ ID NO: 44026 - DNA, 25 bp, Probe Sequence
gtagacttcttagtggtatccagcg

SEQ ID NO: 44027 - DNA, 25 bp, Probe Sequence
taataaaagccatgtacagagggaa

SEQ ID NO: 44028 - DNA, 25 bp, Probe Sequence
aataaaagccatgtacagagggaaa

SEQ ID NO: 44029 - DNA, 25 bp, Probe Sequence
ataataaaagccatgtacagaggga

SEQ ID NO: 44030 - DNA, 25 bp, Probe Sequence
tagacttcttagtggtatccagcgc

SEQ ID NO: 44031 - DNA, 25 bp, Probe Sequence
cgtccaacctatactaacctgaata

SEQ ID NO: 44032 - DNA, 25 bp, Probe Sequence
tattgagcgtccaacctatactaac

SEQ ID NO: 44033 - DNA, 25 bp, Probe Sequence
gatattgagcgtccaacctatacta

SEQ ID NO: 44034 - DNA, 25 bp, Probe Sequence
atattgagcgtccaacctatactaa

SEQ ID NO: 44035 - DNA, 25 bp, Probe Sequence
aagaagatgctgccaataactatgc

SEQ ID NO: 44036 - DNA, 25 bp, Probe Sequence
tgctctcatatacaattactgacct

SEQ ID NO: 44037 - DNA, 25 bp, Probe Sequence
gcgtccaacctatactaacctgaat

SEQ ID NO: 44038 - DNA, 25 bp, Probe Sequence
cgatattgagcgtccaacctatact

SEQ ID NO: 44039 - DNA, 25 bp, Probe Sequence
atgctctcatatacaattactgacc

SEQ ID NO: 44040 - DNA, 25 bp, Probe Sequence
attgagcgtccaacctatactaacc

SEQ ID NO: 44041 - DNA, 25 bp, Probe Sequence
gtccaacctatactaacctgaatag

SEQ ID NO: 44042 - DNA, 25 bp, Probe Sequence
aaagaagatgctgccaataactatg

SEQ ID NO: 44043 - DNA, 25 bp, Probe Sequence
caaagaagatgctgccaataactat

SEQ ID NO: 44044 - DNA, 25 bp, Probe Sequence
gctctcatatacaattactgaccta

SEQ ID NO: 44045 - DNA, 25 bp, Probe Sequence
aggaagaaggagaggaatactaaag

SEQ ID NO: 44046 - DNA, 25 bp, Probe Sequence
gaggaagaaggagaggaatactaaa

SEQ ID NO: 44047 - DNA, 25 bp, Probe Sequence
caacttatcacaggcaaagaagatg

SEQ ID NO: 44048 - DNA, 25 bp, Probe Sequence
ggaagaaggagaggaatactaaagt

SEQ ID NO: 44049 - DNA, 25 bp, Probe Sequence
agcgtccaacctatactaacctgaa

SEQ ID NO: 44050 - DNA, 25 bp, Probe Sequence
atacaattactgacctatgctctaa

SEQ ID NO: 44051 - DNA, 25 bp, Probe Sequence
agaagatgctgccaataactatgcc

SEQ ID NO: 44052 - DNA, 25 bp, Probe Sequence
ttgagcgtccaacctatactaacct

SEQ ID NO: 44053 - DNA, 25 bp, Probe Sequence
tcagttaatttgtatgtagcagtgt

SEQ ID NO: 44054 - DNA, 25 bp, Probe Sequence
taggttaataggtcaaattgtgtcc

SEQ ID NO: 44055 - DNA, 25 bp, Probe Sequence
ctctataacatctacgccaagcaca

SEQ ID NO: 44056 - DNA, 25 bp, Probe Sequence
ctcaagaagcagctctataacatct

SEQ ID NO: 44057 - DNA, 25 bp, Probe Sequence
aagaagcagctctataacatctacg

SEQ ID NO: 44058 - DNA, 25 bp, Probe Sequence
tctataacatctacgccaagcacac

SEQ ID NO: 44059 - DNA, 25 bp, Probe Sequence
caagaagcagctctataacatctac

SEQ ID NO: 44060 - DNA, 25 bp, Probe Sequence
tcaagaagcagctctataacatcta

SEQ ID NO: 44061 - DNA, 25 bp, Probe Sequence
agaagcagctctataacatctacgc

SEQ ID NO: 44062 - DNA, 25 bp, Probe Sequence
ctataacatctacgccaagcacacc

SEQ ID NO: 44063 - DNA, 25 bp, Probe Sequence
catcttagacaaggttctggtccac

SEQ ID NO: 44064 - DNA, 25 bp, Probe Sequence
gagtttggcatcttagacaaggttc

SEQ ID NO: 44065 - DNA, 25 bp, Probe Sequence
gtttggcatcttagacaaggttctg

SEQ ID NO: 44066 - DNA, 25 bp, Probe Sequence
agtttggcatcttagacaaggttct

SEQ ID NO: 44067 - DNA, 25 bp, Probe Sequence
gaagcagctctataacatctacgcc

SEQ ID NO: 44068 - DNA, 25 bp, Probe Sequence
tataacatctacgccaagcacacca

SEQ ID NO: 44069 - DNA, 25 bp, Probe Sequence
ttggcatcttagacaaggttctggt

SEQ ID NO: 44070 - DNA, 25 bp, Probe Sequence
gctcaagaagcagctctataacatc

SEQ ID NO: 44071 - DNA, 25 bp, Probe Sequence
gcagctctataacatctacgccaag

SEQ ID NO: 44072 - DNA, 25 bp, Probe Sequence
tttggcatcttagacaaggttctgg

SEQ ID NO: 44073 - DNA, 25 bp, Probe Sequence
ggagtttggcatcttagacaaggtt

SEQ ID NO: 44074 - DNA, 25 bp, Probe Sequence
agcagctctataacatctacgccaa

SEQ ID NO: 44075 - DNA, 25 bp, Probe Sequence
aagcagctctataacatctacgcca

SEQ ID NO: 44076 - DNA, 25 bp, Probe Sequence
caggagtttggcatcttagacaagg

SEQ ID NO: 44077 - DNA, 25 bp, Probe Sequence
atcttagacaaggttctggtccacc

SEQ ID NO: 44078 - DNA, 25 bp, Probe Sequence
agaggagatcatgaagctcaagaag

SEQ ID NO: 44079 - DNA, 25 bp, Probe Sequence
agatgtctgacctgaactattgtag

SEQ ID NO: 44080 - DNA, 25 bp, Probe Sequence
ttagatgtctgacctgaactattgt

SEQ ID NO: 44081 - DNA, 25 bp, Probe Sequence
tgtctgacctgaactattgtagaac

SEQ ID NO: 44082 - DNA, 25 bp, Probe Sequence
gatgtctgacctgaactattgtaga

SEQ ID NO: 44083 - DNA, 25 bp, Probe Sequence
atgtctgacctgaactattgtagaa

SEQ ID NO: 44084 - DNA, 25 bp, Probe Sequence
cttagatgtctgacctgaactattg

SEQ ID NO: 44085 - DNA, 25 bp, Probe Sequence
tcttagatgtctgacctgaactatt

SEQ ID NO: 44086 - DNA, 25 bp, Probe Sequence
tagatgtctgacctgaactattgta

SEQ ID NO: 44087 - DNA, 25 bp, Probe Sequence
gatcttagatgtctgacctgaacta

SEQ ID NO: 44088 - DNA, 25 bp, Probe Sequence
gtctgacctgaactattgtagaaca

SEQ ID NO: 44089 - DNA, 25 bp, Probe Sequence
tctgacctgaactattgtagaacag

SEQ ID NO: 44090 - DNA, 25 bp, Probe Sequence
atcttagatgtctgacctgaactat

SEQ ID NO: 44091 - DNA, 25 bp, Probe Sequence
cttatgtcagttgtctactctggag

SEQ ID NO: 44092 - DNA, 25 bp, Probe Sequence
ggatcttagatgtctgacctgaact

SEQ ID NO: 44093 - DNA, 25 bp, Probe Sequence
ctgacctgaactattgtagaacagc

SEQ ID NO: 44094 - DNA, 25 bp, Probe Sequence
ccttatgtcagttgtctactctgga

SEQ ID NO: 44095 - DNA, 25 bp, Probe Sequence
gcctacagttgtgttgcttattaca

SEQ ID NO: 44096 - DNA, 25 bp, Probe Sequence
ttatgtcagttgtctactctggagc

SEQ ID NO: 44097 - DNA, 25 bp, Probe Sequence
ggtgattcttaccaatccacaataa

SEQ ID NO: 44098 - DNA, 25 bp, Probe Sequence
gggaaggagtttgatatagcagatt

SEQ ID NO: 44099 - DNA, 25 bp, Probe Sequence
cagtttacagccatttcttaggttt

SEQ ID NO: 44100 - DNA, 25 bp, Probe Sequence
tcagtttacagccatttcttaggtt

SEQ ID NO: 44101 - DNA, 25 bp, Probe Sequence
tctcagtttacagccatttcttagg

SEQ ID NO: 44102 - DNA, 25 bp, Probe Sequence
ttgatatagcagattaaccaccctc

SEQ ID NO: 44103 - DNA, 25 bp, Probe Sequence
actgctttggttcatttcataaaca

SEQ ID NO: 44104 - DNA, 25 bp, Probe Sequence
ggttcatttcataaacaaactctgc

SEQ ID NO: 44105 - DNA, 25 bp, Probe Sequence
aactgctttggttcatttcataaac

SEQ ID NO: 44106 - DNA, 25 bp, Probe Sequence
ctgctttggttcatttcataaacaa

SEQ ID NO: 44107 - DNA, 25 bp, Probe Sequence
aaactgctttggttcatttcataaa

SEQ ID NO: 44108 - DNA, 25 bp, Probe Sequence
tggttcatttcataaacaaactctg

SEQ ID NO: 44109 - DNA, 25 bp, Probe Sequence
tttctcctttagagggtcttcttca

SEQ ID NO: 44110 - DNA, 25 bp, Probe Sequence
tcctttagagggtcttcttcagttt

SEQ ID NO: 44111 - DNA, 25 bp, Probe Sequence
ttctcctttagagggtcttcttcag

SEQ ID NO: 44112 - DNA, 25 bp, Probe Sequence
ctcctttagagggtcttcttcagtt

SEQ ID NO: 44113 - DNA, 25 bp, Probe Sequence
ttggttcatttcataaacaaactct

SEQ ID NO: 44114 - DNA, 25 bp, Probe Sequence
tctcctttagagggtcttcttcagt

SEQ ID NO: 44115 - DNA, 25 bp, Probe Sequence
gttcatttcataaacaaactctgca

SEQ ID NO: 44116 - DNA, 25 bp, Probe Sequence
acaaactgctttggttcatttcata

SEQ ID NO: 44117 - DNA, 25 bp, Probe Sequence
taagaaatgacaaactgctttggtt

SEQ ID NO: 44118 - DNA, 25 bp, Probe Sequence
agtaagaaatgacaaactgctttgg

SEQ ID NO: 44119 - DNA, 25 bp, Probe Sequence
gtaagaaatgacaaactgctttggt

SEQ ID NO: 44120 - DNA, 25 bp, Probe Sequence
aagaaatgacaaactgctttggttc

SEQ ID NO: 44121 - DNA, 25 bp, Probe Sequence
caaactgctttggttcatttcataa

SEQ ID NO: 44122 - DNA, 25 bp, Probe Sequence
gacaaactgctttggttcatttcat

SEQ ID NO: 44123 - DNA, 25 bp, Probe Sequence
atgacaaactgctttggttcatttc

SEQ ID NO: 44124 - DNA, 25 bp, Probe Sequence
gaaatgacaaactgctttggttcat

SEQ ID NO: 44125 - DNA, 25 bp, Probe Sequence
gggtcttcttcagttttagaggttt

SEQ ID NO: 44126 - DNA, 25 bp, Probe Sequence
tagagggtcttcttcagttttagag

SEQ ID NO: 44127 - DNA, 25 bp, Probe Sequence
aaggttaatccgagaattagcatgg

SEQ ID NO: 44128 - DNA, 25 bp, Probe Sequence
cctctttcttctcaaacaatggatg

SEQ ID NO: 44129 - DNA, 25 bp, Probe Sequence
atttagttgtttcattggctgtctg

SEQ ID NO: 44130 - DNA, 25 bp, Probe Sequence
ttaagaatttggcacagttactcac

SEQ ID NO: 44131 - DNA, 25 bp, Probe Sequence
ctgaatacgctgaagtaaatccttg

SEQ ID NO: 44132 - DNA, 25 bp, Probe Sequence
aatttagttgtttcattggctgtct

SEQ ID NO: 44133 - DNA, 25 bp, Probe Sequence
aatacgctgaagtaaatccttgttc

SEQ ID NO: 44134 - DNA, 25 bp, Probe Sequence
gaatacgctgaagtaaatccttgtt

SEQ ID NO: 44135 - DNA, 25 bp, Probe Sequence
tgaatacgctgaagtaaatccttgt

SEQ ID NO: 44136 - DNA, 25 bp, Probe Sequence
ttgatgtatgcggtcagagaagaag

SEQ ID NO: 44137 - DNA, 25 bp, Probe Sequence
aaggtgtcactgtatttaactgttg

SEQ ID NO: 44138 - DNA, 25 bp, Probe Sequence
ctaggctatcttaccatgaaggttg

SEQ ID NO: 44139 - DNA, 25 bp, Probe Sequence
tttaagaatttggcacagttactca

SEQ ID NO: 44140 - DNA, 25 bp, Probe Sequence
tctgcatatcacctgtatagtagtt

SEQ ID NO: 44141 - DNA, 25 bp, Probe Sequence
ttctgcatatcacctgtatagtagt

SEQ ID NO: 44142 - DNA, 25 bp, Probe Sequence
taggctatcttaccatgaaggttgt

SEQ ID NO: 44143 - DNA, 25 bp, Probe Sequence
tttcttctcaaacaatggatgacac

SEQ ID NO: 44144 - DNA, 25 bp, Probe Sequence
cttctcaaacaatggatgacacaaa

SEQ ID NO: 44145 - DNA, 25 bp, Probe Sequence
ctttcttctcaaacaatggatgaca

SEQ ID NO: 44146 - DNA, 25 bp, Probe Sequence
gcctctttcttctcaaacaatggat

SEQ ID NO: 44147 - DNA, 25 bp, Probe Sequence
gtaaggtgtcactgtatttaactgt

SEQ ID NO: 44148 - DNA, 25 bp, Probe Sequence
tgtaaggtgtcactgtatttaactg

SEQ ID NO: 44149 - DNA, 25 bp, Probe Sequence
tctttcttctcaaacaatggatgac

SEQ ID NO: 44150 - DNA, 25 bp, Probe Sequence
gatgtatgcggtcagagaagaagtg

SEQ ID NO: 44151 - DNA, 25 bp, Probe Sequence
gaaaggaaaatggaagatggagcag

SEQ ID NO: 44152 - DNA, 25 bp, Probe Sequence
cagaaaggaaaatggaagatggagc

SEQ ID NO: 44153 - DNA, 25 bp, Probe Sequence
gcagaaaggaaaatggaagatggag

SEQ ID NO: 44154 - DNA, 25 bp, Probe Sequence
aaggaaaatggaagatggagcagat

SEQ ID NO: 44155 - DNA, 25 bp, Probe Sequence
cagcagaaaggaaaatggaagatgg

SEQ ID NO: 44156 - DNA, 25 bp, Probe Sequence
aaaggaaaatggaagatggagcaga

SEQ ID NO: 44157 - DNA, 25 bp, Probe Sequence
agaaaggaaaatggaagatggagca

SEQ ID NO: 44158 - DNA, 25 bp, Probe Sequence
agcagaaaggaaaatggaagatgga

SEQ ID NO: 44159 - DNA, 25 bp, Probe Sequence
aggaaaatggaagatggagcagatg

SEQ ID NO: 44160 - DNA, 25 bp, Probe Sequence
gaaaatggaagatggagcagatggt

SEQ ID NO: 44161 - DNA, 25 bp, Probe Sequence
aaaatggaagatggagcagatggtg

SEQ ID NO: 44162 - DNA, 25 bp, Probe Sequence
ccagcagaaaggaaaatggaagatg

SEQ ID NO: 44163 - DNA, 25 bp, Probe Sequence
ggaaaatggaagatggagcagatgg

SEQ ID NO: 44164 - DNA, 25 bp, Probe Sequence
tccagcagaaaggaaaatggaagat

SEQ ID NO: 44165 - DNA, 25 bp, Probe Sequence
atccagcagaaaggaaaatggaaga

SEQ ID NO: 44166 - DNA, 25 bp, Probe Sequence
gattcagcatcagaagaagaaggaa

SEQ ID NO: 44167 - DNA, 25 bp, Probe Sequence
attcagcatcagaagaagaaggaac

SEQ ID NO: 44168 - DNA, 25 bp, Probe Sequence
taagccttatccagcagccataatt

SEQ ID NO: 44169 - DNA, 25 bp, Probe Sequence
ttaagccttatccagcagccataat

SEQ ID NO: 44170 - DNA, 25 bp, Probe Sequence
aatgctgaatggagaagggtaatag

SEQ ID NO: 44171 - DNA, 25 bp, Probe Sequence
catcagaagaagaaggaacccatag

SEQ ID NO: 44172 - DNA, 25 bp, Probe Sequence
ttcagcatcagaagaagaaggaacc

SEQ ID NO: 44173 - DNA, 25 bp, Probe Sequence
ctgaatggagaagggtaataggttg

SEQ ID NO: 44174 - DNA, 25 bp, Probe Sequence
caatgctgaatggagaagggtaata

SEQ ID NO: 44175 - DNA, 25 bp, Probe Sequence
atccagcagccataatttgaataac

SEQ ID NO: 44176 - DNA, 25 bp, Probe Sequence
cagcagccataatttgaataactct

SEQ ID NO: 44177 - DNA, 25 bp, Probe Sequence
ccagcagccataatttgaataactc

SEQ ID NO: 44178 - DNA, 25 bp, Probe Sequence
ggtttagaaggttcaagtttccaat

SEQ ID NO: 44179 - DNA, 25 bp, Probe Sequence
tccagcagccataatttgaataact

SEQ ID NO: 44180 - DNA, 25 bp, Probe Sequence
aatggagaagggtaataggttggtt

SEQ ID NO: 44181 - DNA, 25 bp, Probe Sequence
aggttcaagtttccaattaaagtca

SEQ ID NO: 44182 - DNA, 25 bp, Probe Sequence
ggtgtgaactatggtttagaaggtt

SEQ ID NO: 44183 - DNA, 25 bp, Probe Sequence
cttatccagcagccataatttgaat

SEQ ID NO: 44184 - DNA, 25 bp, Probe Sequence
tatggtttagaaggttcaagtttcc

SEQ ID NO: 44185 - DNA, 25 bp, Probe Sequence
tacgagaccagagagactgtagttc

SEQ ID NO: 44186 - DNA, 25 bp, Probe Sequence
tatccagcagccataatttgaataa

SEQ ID NO: 44187 - DNA, 25 bp, Probe Sequence
gaatggagaagggtaataggttggt

SEQ ID NO: 44188 - DNA, 25 bp, Probe Sequence
tgaatggagaagggtaataggttgg

SEQ ID NO: 44189 - DNA, 25 bp, Probe Sequence
atttgaataactctacgagaccaga

SEQ ID NO: 44190 - DNA, 25 bp, Probe Sequence
acattccaaagtgtttaactctagt

SEQ ID NO: 44191 - DNA, 25 bp, Probe Sequence
agagagttagcttcataatctgtta

SEQ ID NO: 44192 - DNA, 25 bp, Probe Sequence
tagagagttagcttcataatctgtt

SEQ ID NO: 44193 - DNA, 25 bp, Probe Sequence
ttagagagttagcttcataatctgt

SEQ ID NO: 44194 - DNA, 25 bp, Probe Sequence
tttgttgttacgggtattcagcctt

SEQ ID NO: 44195 - DNA, 25 bp, Probe Sequence
cttcacaattgatggtgcttctatt

SEQ ID NO: 44196 - DNA, 25 bp, Probe Sequence
tcttcacaattgatggtgcttctat

SEQ ID NO: 44197 - DNA, 25 bp, Probe Sequence
ttcttcacaattgatggtgcttcta

SEQ ID NO: 44198 - DNA, 25 bp, Probe Sequence
attaattcactaagctgcctagcca

SEQ ID NO: 44199 - DNA, 25 bp, Probe Sequence
ttgttgttacgggtattcagccttc

SEQ ID NO: 44200 - DNA, 25 bp, Probe Sequence
ttcttcttcacaattgatggtgctt

SEQ ID NO: 44201 - DNA, 25 bp, Probe Sequence
gagagttagcttcataatctgttaa

SEQ ID NO: 44202 - DNA, 25 bp, Probe Sequence
cttcttcacaattgatggtgcttct

SEQ ID NO: 44203 - DNA, 25 bp, Probe Sequence
tcttcttcacaattgatggtgcttc

SEQ ID NO: 44204 - DNA, 25 bp, Probe Sequence
acaaagaaaagcacaacttgagatt

SEQ ID NO: 44205 - DNA, 25 bp, Probe Sequence
aacaaagaaaagcacaacttgagat

SEQ ID NO: 44206 - DNA, 25 bp, Probe Sequence
aaacaaagaaaagcacaacttgaga

SEQ ID NO: 44207 - DNA, 25 bp, Probe Sequence
aaaacaaagaaaagcacaacttgag

SEQ ID NO: 44208 - DNA, 25 bp, Probe Sequence
gttgttacgggtattcagccttcag

SEQ ID NO: 44209 - DNA, 25 bp, Probe Sequence
ttcttctcccctacctgttatattt

SEQ ID NO: 44210 - DNA, 25 bp, Probe Sequence
tttcttctcccctacctgttatatt

SEQ ID NO: 44211 - DNA, 25 bp, Probe Sequence
ttttcttctcccctacctgttatat

SEQ ID NO: 44212 - DNA, 25 bp, Probe Sequence
caaagaaaagcacaacttgagattt

SEQ ID NO: 44213 - DNA, 25 bp, Probe Sequence
cattccaaagtgtttaactctagta

SEQ ID NO: 44214 - DNA, 25 bp, Probe Sequence
ccatcttaatgtataaccaacacca

SEQ ID NO: 44215 - DNA, 25 bp, Probe Sequence
caatcggtagagaagagacagttta

SEQ ID NO: 44216 - DNA, 25 bp, Probe Sequence
acccagtcataaagtataagcatca

SEQ ID NO: 44217 - DNA, 25 bp, Probe Sequence
tttcactcgtctaaacactttcaat

SEQ ID NO: 44218 - DNA, 25 bp, Probe Sequence
atttcactcgtctaaacactttcaa

SEQ ID NO: 44219 - DNA, 25 bp, Probe Sequence
cccagtcataaagtataagcatcag

SEQ ID NO: 44220 - DNA, 25 bp, Probe Sequence
aatcggtagagaagagacagtttaa

SEQ ID NO: 44221 - DNA, 25 bp, Probe Sequence
tcactcgtctaaacactttcaattt

SEQ ID NO: 44222 - DNA, 25 bp, Probe Sequence
ttcactcgtctaaacactttcaatt

SEQ ID NO: 44223 - DNA, 25 bp, Probe Sequence
aatttcactcgtctaaacactttca

SEQ ID NO: 44224 - DNA, 25 bp, Probe Sequence
atcggtagagaagagacagtttaat

SEQ ID NO: 44225 - DNA, 25 bp, Probe Sequence
ccagtcataaagtataagcatcagt

SEQ ID NO: 44226 - DNA, 25 bp, Probe Sequence
tcggtagagaagagacagtttaata

SEQ ID NO: 44227 - DNA, 25 bp, Probe Sequence
catcttaatgtataaccaacaccaa

SEQ ID NO: 44228 - DNA, 25 bp, Probe Sequence
cttgaggttaaacatctctctctct

SEQ ID NO: 44229 - DNA, 25 bp, Probe Sequence
tcttgaggttaaacatctctctctc

SEQ ID NO: 44230 - DNA, 25 bp, Probe Sequence
taatgtataaccaacaccaaacacg

SEQ ID NO: 44231 - DNA, 25 bp, Probe Sequence
tgaggttaaacatctctctctcttt

SEQ ID NO: 44232 - DNA, 25 bp, Probe Sequence
ttgaggttaaacatctctctctctt

SEQ ID NO: 44233 - DNA, 25 bp, Probe Sequence
cccatcttaatgtataaccaacacc

SEQ ID NO: 44234 - DNA, 25 bp, Probe Sequence
atcttgaggttaaacatctctctct

SEQ ID NO: 44235 - DNA, 25 bp, Probe Sequence
ccaatcggtagagaagagacagttt

SEQ ID NO: 44236 - DNA, 25 bp, Probe Sequence
tacccagtcataaagtataagcatc

SEQ ID NO: 44237 - DNA, 25 bp, Probe Sequence
aagtataagcatcagttgtcattaa

SEQ ID NO: 44238 - DNA, 25 bp, Probe Sequence
cataacatagagcattggttgactg

SEQ ID NO: 44239 - DNA, 25 bp, Probe Sequence
aatagaagttggctactctcagaat

SEQ ID NO: 44240 - DNA, 25 bp, Probe Sequence
atagaagttggctactctcagaatt

SEQ ID NO: 44241 - DNA, 25 bp, Probe Sequence
ataacatagagcattggttgactgt

SEQ ID NO: 44242 - DNA, 25 bp, Probe Sequence
tacagaagactcactcaccaggata

SEQ ID NO: 44243 - DNA, 25 bp, Probe Sequence
acagaagactcactcaccaggataa

SEQ ID NO: 44244 - DNA, 25 bp, Probe Sequence
ttacagaagactcactcaccaggat

SEQ ID NO: 44245 - DNA, 25 bp, Probe Sequence
ttccataacatagagcattggttga

SEQ ID NO: 44246 - DNA, 25 bp, Probe Sequence
ccataacatagagcattggttgact

SEQ ID NO: 44247 - DNA, 25 bp, Probe Sequence
tccataacatagagcattggttgac

SEQ ID NO: 44248 - DNA, 25 bp, Probe Sequence
catagagcattggttgactgtttac

SEQ ID NO: 44249 - DNA, 25 bp, Probe Sequence
attagggtagccattcacatcattt

SEQ ID NO: 44250 - DNA, 25 bp, Probe Sequence
gtattagggtagccattcacatcat

SEQ ID NO: 44251 - DNA, 25 bp, Probe Sequence
aaacttgtattagggtagccattca

SEQ ID NO: 44252 - DNA, 25 bp, Probe Sequence
ggcataccattagagaaaccatttg

SEQ ID NO: 44253 - DNA, 25 bp, Probe Sequence
gcataccattagagaaaccatttgt

SEQ ID NO: 44254 - DNA, 25 bp, Probe Sequence
tattagggtagccattcacatcatt

SEQ ID NO: 44255 - DNA, 25 bp, Probe Sequence
aacttgtattagggtagccattcac

SEQ ID NO: 44256 - DNA, 25 bp, Probe Sequence
gccacgatttaggttagtcagttta

SEQ ID NO: 44257 - DNA, 25 bp, Probe Sequence
atgccctttactgtgtctattgatg

SEQ ID NO: 44258 - DNA, 25 bp, Probe Sequence
tggctactctcagaatttggtttaa

SEQ ID NO: 44259 - DNA, 25 bp, Probe Sequence
ttggctactctcagaatttggttta

SEQ ID NO: 44260 - DNA, 25 bp, Probe Sequence
tgtatagacagtcctgcttcagaag

SEQ ID NO: 44261 - DNA, 25 bp, Probe Sequence
atagagcattggttgactgtttaca

SEQ ID NO: 44262 - DNA, 25 bp, Probe Sequence
acagatacatacatagagagagaca

SEQ ID NO: 44263 - DNA, 25 bp, Probe Sequence
agatacatacatagagagagacagt

SEQ ID NO: 44264 - DNA, 25 bp, Probe Sequence
cagatacatacatagagagagacag

SEQ ID NO: 44265 - DNA, 25 bp, Probe Sequence
tctgaagtctcaagaactgccataa

SEQ ID NO: 44266 - DNA, 25 bp, Probe Sequence
cctgaacagatacatacatagagag

SEQ ID NO: 44267 - DNA, 25 bp, Probe Sequence
gaactcctagactcaagtgatcctc

SEQ ID NO: 44268 - DNA, 25 bp, Probe Sequence
aggtttgggatgtatattgctatgt

SEQ ID NO: 44269 - DNA, 25 bp, Probe Sequence
ctgtatgtacttccagtatcctgaa

SEQ ID NO: 44270 - DNA, 25 bp, Probe Sequence
atgtatgtttgctcctgttgttact

SEQ ID NO: 44271 - DNA, 25 bp, Probe Sequence
tgaactcctagactcaagtgatcct

SEQ ID NO: 44272 - DNA, 25 bp, Probe Sequence
gatacatacatagagagagacagtt

SEQ ID NO: 44273 - DNA, 25 bp, Probe Sequence
aacagatacatacatagagagagac

SEQ ID NO: 44274 - DNA, 25 bp, Probe Sequence
tgaacagatacatacatagagagag

SEQ ID NO: 44275 - DNA, 25 bp, Probe Sequence
aaggtttgggatgtatattgctatg

SEQ ID NO: 44276 - DNA, 25 bp, Probe Sequence
ccatttccctgaacagatacataca

SEQ ID NO: 44277 - DNA, 25 bp, Probe Sequence
ctgaacagatacatacatagagaga

SEQ ID NO: 44278 - DNA, 25 bp, Probe Sequence
ccctgaacagatacatacatagaga

SEQ ID NO: 44279 - DNA, 25 bp, Probe Sequence
tccctgaacagatacatacatagag

SEQ ID NO: 44280 - DNA, 25 bp, Probe Sequence
gctgtatgtacttccagtatcctga

SEQ ID NO: 44281 - DNA, 25 bp, Probe Sequence
tatctgagtcacttgaaacttggtt

SEQ ID NO: 44282 - DNA, 25 bp, Probe Sequence
ttatctgagtcacttgaaacttggt

SEQ ID NO: 44283 - DNA, 25 bp, Probe Sequence
cttatctgagtcacttgaaacttgg

SEQ ID NO: 44284 - DNA, 25 bp, Probe Sequence
tgtatgtttgctcctgttgttactg

SEQ ID NO: 44285 - DNA, 25 bp, Probe Sequence
tgacataatgccaagggtaaacaag

SEQ ID NO: 44286 - DNA, 25 bp, Probe Sequence
ctgctactatgtcctcaggttaatt

SEQ ID NO: 44287 - DNA, 25 bp, Probe Sequence
tctgctactatgtcctcaggttaat

SEQ ID NO: 44288 - DNA, 25 bp, Probe Sequence
ctgctagaactcatctgtagtcctt

SEQ ID NO: 44289 - DNA, 25 bp, Probe Sequence
ctctgctactatgtcctcaggttaa

SEQ ID NO: 44290 - DNA, 25 bp, Probe Sequence
ctaagtaagagcacctcattcctgt

SEQ ID NO: 44291 - DNA, 25 bp, Probe Sequence
actcaataccatcatctcttatctc

SEQ ID NO: 44292 - DNA, 25 bp, Probe Sequence
ccatcatctcttatctctatacagg

SEQ ID NO: 44293 - DNA, 25 bp, Probe Sequence
tactattgagctgtagacgaactgt

SEQ ID NO: 44294 - DNA, 25 bp, Probe Sequence
catactctgctactatgtcctcagg

SEQ ID NO: 44295 - DNA, 25 bp, Probe Sequence
atactctgctactatgtcctcaggt

SEQ ID NO: 44296 - DNA, 25 bp, Probe Sequence
ctcaataccatcatctcttatctct

SEQ ID NO: 44297 - DNA, 25 bp, Probe Sequence
gtcatttacatcctactgctcaaag

SEQ ID NO: 44298 - DNA, 25 bp, Probe Sequence
tcatcaagcagtgttcatttatcct

SEQ ID NO: 44299 - DNA, 25 bp, Probe Sequence
gtcatcaagcagtgttcatttatcc

SEQ ID NO: 44300 - DNA, 25 bp, Probe Sequence
ggtcatcaagcagtgttcatttatc

SEQ ID NO: 44301 - DNA, 25 bp, Probe Sequence
aggtcatcaagcagtgttcatttat

SEQ ID NO: 44302 - DNA, 25 bp, Probe Sequence
actctgctactatgtcctcaggtta

SEQ ID NO: 44303 - DNA, 25 bp, Probe Sequence
tactctgctactatgtcctcaggtt

SEQ ID NO: 44304 - DNA, 25 bp, Probe Sequence
aaggtcatcaagcagtgttcattta

SEQ ID NO: 44305 - DNA, 25 bp, Probe Sequence
aagtggcatcattgtttcagttcta

SEQ ID NO: 44306 - DNA, 25 bp, Probe Sequence
ttcatccacacaaacacaattagag

SEQ ID NO: 44307 - DNA, 25 bp, Probe Sequence
actattgagctgtagacgaactgtt

SEQ ID NO: 44308 - DNA, 25 bp, Probe Sequence
cagttagcaaattcatccacacaaa

SEQ ID NO: 44309 - DNA, 25 bp, Probe Sequence
gtcatcagttagcaaattcatccac

SEQ ID NO: 44310 - DNA, 25 bp, Probe Sequence
ttggagatatattgtgcctatgctt

SEQ ID NO: 44311 - DNA, 25 bp, Probe Sequence
attggagatatattgtgcctatgct

SEQ ID NO: 44312 - DNA, 25 bp, Probe Sequence
agatatattgtgcctatgcttacgg

SEQ ID NO: 44313 - DNA, 25 bp, Probe Sequence
gatatattgtgcctatgcttacggt

SEQ ID NO: 44314 - DNA, 25 bp, Probe Sequence
gagatatattgtgcctatgcttacg

SEQ ID NO: 44315 - DNA, 25 bp, Probe Sequence
atatattgtgcctatgcttacggtg

SEQ ID NO: 44316 - DNA, 25 bp, Probe Sequence
tggagatatattgtgcctatgctta

SEQ ID NO: 44317 - DNA, 25 bp, Probe Sequence
aattggagatatattgtgcctatgc

SEQ ID NO: 44318 - DNA, 25 bp, Probe Sequence
ggagatatattgtgcctatgcttac

SEQ ID NO: 44319 - DNA, 25 bp, Probe Sequence
cagattgatgacatactcagtgtgg

SEQ ID NO: 44320 - DNA, 25 bp, Probe Sequence
tatattgtgcctatgcttacggtgg

SEQ ID NO: 44321 - DNA, 25 bp, Probe Sequence
gcagattgatgacatactcagtgtg

SEQ ID NO: 44322 - DNA, 25 bp, Probe Sequence
ggaaagagggagttaataaagccat

SEQ ID NO: 44323 - DNA, 25 bp, Probe Sequence
gtggcttggaggtaactgcttatag

SEQ ID NO: 44324 - DNA, 25 bp, Probe Sequence
aaagagggagttaataaagccattg

SEQ ID NO: 44325 - DNA, 25 bp, Probe Sequence
gaatgctgatgggactatatgctac

SEQ ID NO: 44326 - DNA, 25 bp, Probe Sequence
agaatgctgatgggactatatgcta

SEQ ID NO: 44327 - DNA, 25 bp, Probe Sequence
tatcactccttctcgaatccttcag

SEQ ID NO: 44328 - DNA, 25 bp, Probe Sequence
aagtatcactccttctcgaatcctt

SEQ ID NO: 44329 - DNA, 25 bp, Probe Sequence
gaaagagggagttaataaagccatt

SEQ ID NO: 44330 - DNA, 25 bp, Probe Sequence
acaacggaaagagggagttaataaa

SEQ ID NO: 44331 - DNA, 25 bp, Probe Sequence
gagttaataaagccattggagcatc

SEQ ID NO: 44332 - DNA, 25 bp, Probe Sequence
caacggaaagagggagttaataaag

SEQ ID NO: 44333 - DNA, 25 bp, Probe Sequence
gtatcactccttctcgaatccttca

SEQ ID NO: 44334 - DNA, 25 bp, Probe Sequence
gagcatctcttgataaagtgaccat

SEQ ID NO: 44335 - DNA, 25 bp, Probe Sequence
ctggagcatctcttgataaagtgac

SEQ ID NO: 44336 - DNA, 25 bp, Probe Sequence
agcatctcttgataaagtgaccatg

SEQ ID NO: 44337 - DNA, 25 bp, Probe Sequence
ggagcatctcttgataaagtgacca

SEQ ID NO: 44338 - DNA, 25 bp, Probe Sequence
tggagcatctcttgataaagtgacc

SEQ ID NO: 44339 - DNA, 25 bp, Probe Sequence
atctcttgataaagtgaccatgcag

SEQ ID NO: 44340 - DNA, 25 bp, Probe Sequence
catctcttgataaagtgaccatgca

SEQ ID NO: 44341 - DNA, 25 bp, Probe Sequence
gctggagcatctcttgataaagtga

SEQ ID NO: 44342 - DNA, 25 bp, Probe Sequence
gcaataaacatccccaaagttaaaa

SEQ ID NO: 44343 - DNA, 25 bp, Probe Sequence
ggctggagcatctcttgataaagtg

SEQ ID NO: 44344 - DNA, 25 bp, Probe Sequence
tctcttgataaagtgaccatgcagc

SEQ ID NO: 44345 - DNA, 25 bp, Probe Sequence
tggctggagcatctcttgataaagt

SEQ ID NO: 44346 - DNA, 25 bp, Probe Sequence
tcttgataaagtgaccatgcagcag

SEQ ID NO: 44347 - DNA, 25 bp, Probe Sequence
ctcttgataaagtgaccatgcagca

SEQ ID NO: 44348 - DNA, 25 bp, Probe Sequence
tgcaataaacatccccaaagttaaa

SEQ ID NO: 44349 - DNA, 25 bp, Probe Sequence
cttgataaagtgaccatgcagcagg

SEQ ID NO: 44350 - DNA, 25 bp, Probe Sequence
ctgcttctggaagtagtctcccttc

SEQ ID NO: 44351 - DNA, 25 bp, Probe Sequence
gcatctcttgataaagtgaccatgc

SEQ ID NO: 44352 - DNA, 25 bp, Probe Sequence
ttgcaataaacatccccaaagttaa

SEQ ID NO: 44353 - DNA, 25 bp, Probe Sequence
ttgataaagtgaccatgcagcaggt

SEQ ID NO: 44354 - DNA, 25 bp, Probe Sequence
tttgcaataaacatccccaaagtta

SEQ ID NO: 44355 - DNA, 25 bp, Probe Sequence
gaggaagaaggagaggaatactaat

SEQ ID NO: 44356 - DNA, 25 bp, Probe Sequence
aggaagaaggagaggaatactaatt

SEQ ID NO: 44357 - DNA, 25 bp, Probe Sequence
ggaagaaggagaggaatactaatta

SEQ ID NO: 44358 - DNA, 25 bp, Probe Sequence
tccatcatatctcaaagtaaagtca

SEQ ID NO: 44359 - DNA, 25 bp, Probe Sequence
gaaggagaggaatactaattatcca

SEQ ID NO: 44360 - DNA, 25 bp, Probe Sequence
ccatcatatctcaaagtaaagtcat

SEQ ID NO: 44361 - DNA, 25 bp, Probe Sequence
agaaggagaggaatactaattatcc

SEQ ID NO: 44362 - DNA, 25 bp, Probe Sequence
ttccatcatatctcaaagtaaagtc

SEQ ID NO: 44363 - DNA, 25 bp, Probe Sequence
gctttctggttagattgttttcact

SEQ ID NO: 44364 - DNA, 25 bp, Probe Sequence
ttctggttagattgttttcacttgg

SEQ ID NO: 44365 - DNA, 25 bp, Probe Sequence
tctggttagattgttttcacttggt

SEQ ID NO: 44366 - DNA, 25 bp, Probe Sequence
tctcaaagtaaagtcattaacatca

SEQ ID NO: 44367 - DNA, 25 bp, Probe Sequence
aggagaggaatactaattatccatt

SEQ ID NO: 44368 - DNA, 25 bp, Probe Sequence
aaggagaggaatactaattatccat

SEQ ID NO: 44369 - DNA, 25 bp, Probe Sequence
gcttcagcttaactgacagatgtta

SEQ ID NO: 44370 - DNA, 25 bp, Probe Sequence
tgtcttttccatgtgtacctgtaat

SEQ ID NO: 44371 - DNA, 25 bp, Probe Sequence
cagaatttcagcttcagcttaactg

SEQ ID NO: 44372 - DNA, 25 bp, Probe Sequence
tttccatcatatctcaaagtaaagt

SEQ ID NO: 44373 - DNA, 25 bp, Probe Sequence
cttcagcttaactgacagatgttaa

SEQ ID NO: 44374 - DNA, 25 bp, Probe Sequence
atgtcttttccatgtgtacctgtaa

SEQ ID NO: 44375 - DNA, 25 bp, Probe Sequence
ggagaggaatactaattatccattc

SEQ ID NO: 44376 - DNA, 25 bp, Probe Sequence
tttctggttagattgttttcacttg

SEQ ID NO: 44377 - DNA, 25 bp, Probe Sequence
ctggttagattgttttcacttggtg

SEQ ID NO: 44378 - DNA, 25 bp, Probe Sequence
ccagaatttcagcttcagcttaact

SEQ ID NO: 44379 - DNA, 25 bp, Probe Sequence
attgagaagaggaagaagatggaag

SEQ ID NO: 44380 - DNA, 25 bp, Probe Sequence
ggatagtgatgaggaggtggattat

SEQ ID NO: 44381 - DNA, 25 bp, Probe Sequence
tagtgatgaggaggtggattatagc

SEQ ID NO: 44382 - DNA, 25 bp, Probe Sequence
cattgagaagaggaagaagatggaa

SEQ ID NO: 44383 - DNA, 25 bp, Probe Sequence
atcattgagaagaggaagaagatgg

SEQ ID NO: 44384 - DNA, 25 bp, Probe Sequence
atagtgatgaggaggtggattatag

SEQ ID NO: 44385 - DNA, 25 bp, Probe Sequence
gatagtgatgaggaggtggattata

SEQ ID NO: 44386 - DNA, 25 bp, Probe Sequence
tcattgagaagaggaagaagatgga

SEQ ID NO: 44387 - DNA, 25 bp, Probe Sequence
aatcattgagaagaggaagaagatg

SEQ ID NO: 44388 - DNA, 25 bp, Probe Sequence
gtgatgaggaggtggattatagcaa

SEQ ID NO: 44389 - DNA, 25 bp, Probe Sequence
gcaatcattgagaagaggaagaaga

SEQ ID NO: 44390 - DNA, 25 bp, Probe Sequence
tggatagtgatgaggaggtggatta

SEQ ID NO: 44391 - DNA, 25 bp, Probe Sequence
ttgagaagaggaagaagatggaagc

SEQ ID NO: 44392 - DNA, 25 bp, Probe Sequence
caggaagaatacagcgagtatatga

SEQ ID NO: 44393 - DNA, 25 bp, Probe Sequence
caatcattgagaagaggaagaagat

SEQ ID NO: 44394 - DNA, 25 bp, Probe Sequence
ccaggaagaatacagcgagtatatg

SEQ ID NO: 44395 - DNA, 25 bp, Probe Sequence
ggaagaatacagcgagtatatgaac

SEQ ID NO: 44396 - DNA, 25 bp, Probe Sequence
gaatacagcgagtatatgaacaaca

SEQ ID NO: 44397 - DNA, 25 bp, Probe Sequence
aggaagaatacagcgagtatatgaa

SEQ ID NO: 44398 - DNA, 25 bp, Probe Sequence
agtgatgaggaggtggattatagca

SEQ ID NO: 44399 - DNA, 25 bp, Probe Sequence
agaatacagcgagtatatgaacaac

SEQ ID NO: 44400 - DNA, 25 bp, Probe Sequence
aatacagcgagtatatgaacaacaa

SEQ ID NO: 44401 - DNA, 25 bp, Probe Sequence
gaagaatacagcgagtatatgaaca

SEQ ID NO: 44402 - DNA, 25 bp, Probe Sequence
cagcgagtatatgaacaacaaagaa

SEQ ID NO: 44403 - DNA, 25 bp, Probe Sequence
aagtagactcattcttcacacgatt

SEQ ID NO: 44404 - DNA, 25 bp, Probe Sequence
agtagactcattcttcacacgattg

SEQ ID NO: 44405 - DNA, 25 bp, Probe Sequence
ttctcagtagttgtccgtgataatc

SEQ ID NO: 44406 - DNA, 25 bp, Probe Sequence
attctcagtagttgtccgtgataat

SEQ ID NO: 44407 - DNA, 25 bp, Probe Sequence
gataattctcagtagttgtccgtga

SEQ ID NO: 44408 - DNA, 25 bp, Probe Sequence
aattctcagtagttgtccgtgataa

SEQ ID NO: 44409 - DNA, 25 bp, Probe Sequence
tagactcattcttcacacgattgac

SEQ ID NO: 44410 - DNA, 25 bp, Probe Sequence
gtagactcattcttcacacgattga

SEQ ID NO: 44411 - DNA, 25 bp, Probe Sequence
ataattctcagtagttgtccgtgat

SEQ ID NO: 44412 - DNA, 25 bp, Probe Sequence
tgataattctcagtagttgtccgtg

SEQ ID NO: 44413 - DNA, 25 bp, Probe Sequence
gtgataattctcagtagttgtccgt

SEQ ID NO: 44414 - DNA, 25 bp, Probe Sequence
tgtgataattctcagtagttgtccg

SEQ ID NO: 44415 - DNA, 25 bp, Probe Sequence
taattctcagtagttgtccgtgata

SEQ ID NO: 44416 - DNA, 25 bp, Probe Sequence
ttgtgataattctcagtagttgtcc

SEQ ID NO: 44417 - DNA, 25 bp, Probe Sequence
agtagttgtccgtgataatcgtgtc

SEQ ID NO: 44418 - DNA, 25 bp, Probe Sequence
tctcagtagttgtccgtgataatcg

SEQ ID NO: 44419 - DNA, 25 bp, Probe Sequence
cagtagttgtccgtgataatcgtgt

SEQ ID NO: 44420 - DNA, 25 bp, Probe Sequence
ctcagtagttgtccgtgataatcgt

SEQ ID NO: 44421 - DNA, 25 bp, Probe Sequence
tcagtagttgtccgtgataatcgtg

SEQ ID NO: 44422 - DNA, 25 bp, Probe Sequence
gatatacgccctctttcatctgtaa

SEQ ID NO: 44423 - DNA, 25 bp, Probe Sequence
tccacagaatcttatcacagtgaag

SEQ ID NO: 44424 - DNA, 25 bp, Probe Sequence
acctgtcctctttgtgataattctc

SEQ ID NO: 44425 - DNA, 25 bp, Probe Sequence
atatacgccctctttcatctgtaag

SEQ ID NO: 44426 - DNA, 25 bp, Probe Sequence
ttgacctgtcctctttgtgataatt

SEQ ID NO: 44427 - DNA, 25 bp, Probe Sequence
acaatttcatctttggtcagagtgg

SEQ ID NO: 44428 - DNA, 25 bp, Probe Sequence
gacaatttcatctttggtcagagtg

SEQ ID NO: 44429 - DNA, 25 bp, Probe Sequence
caatttcatctttggtcagagtggg

SEQ ID NO: 44430 - DNA, 25 bp, Probe Sequence
aaatctattgctgtcagataccctt

SEQ ID NO: 44431 - DNA, 25 bp, Probe Sequence
taaatctattgctgtcagataccct

SEQ ID NO: 44432 - DNA, 25 bp, Probe Sequence
ggtttgtgtttatattttcggggat

SEQ ID NO: 44433 - DNA, 25 bp, Probe Sequence
actggtttgtgtttatattttcggg

SEQ ID NO: 44434 - DNA, 25 bp, Probe Sequence
ctggtttgtgtttatattttcgggg

SEQ ID NO: 44435 - DNA, 25 bp, Probe Sequence
tggtttgtgtttatattttcgggga

SEQ ID NO: 44436 - DNA, 25 bp, Probe Sequence
ataaatctattgctgtcagataccc

SEQ ID NO: 44437 - DNA, 25 bp, Probe Sequence
agctgctcctgtctctgtcttattg

SEQ ID NO: 44438 - DNA, 25 bp, Probe Sequence
tgtgtttatattttcggggatactt

SEQ ID NO: 44439 - DNA, 25 bp, Probe Sequence
ttgtgtttatattttcggggatact

SEQ ID NO: 44440 - DNA, 25 bp, Probe Sequence
tactggtttgtgtttatattttcgg

SEQ ID NO: 44441 - DNA, 25 bp, Probe Sequence
gagctgctcctgtctctgtcttatt

SEQ ID NO: 44442 - DNA, 25 bp, Probe Sequence
tttgtgtttatattttcggggatac

SEQ ID NO: 44443 - DNA, 25 bp, Probe Sequence
gtttgtgtttatattttcggggata

SEQ ID NO: 44444 - DNA, 25 bp, Probe Sequence
acttaataaatctattgctgtcaga

SEQ ID NO: 44445 - DNA, 25 bp, Probe Sequence
cggggatacttaataaatctattgc

SEQ ID NO: 44446 - DNA, 25 bp, Probe Sequence
tcctgtctctgtcttattgcagctc

SEQ ID NO: 44447 - DNA, 25 bp, Probe Sequence
ctcctgtctctgtcttattgcagct

SEQ ID NO: 44448 - DNA, 25 bp, Probe Sequence
aataaatctattgctgtcagatacc

SEQ ID NO: 44449 - DNA, 25 bp, Probe Sequence
aatttcatctttggtcagagtgggg

SEQ ID NO: 44450 - DNA, 25 bp, Probe Sequence
tggaaaacacggatgaaacctactg

SEQ ID NO: 44451 - DNA, 25 bp, Probe Sequence
catgaatgacctggtatctgagtac

SEQ ID NO: 44452 - DNA, 25 bp, Probe Sequence
acatgaatgacctggtatctgagta

SEQ ID NO: 44453 - DNA, 25 bp, Probe Sequence
caacatgaatgacctggtatctgag

SEQ ID NO: 44454 - DNA, 25 bp, Probe Sequence
aacatgaatgacctggtatctgagt

SEQ ID NO: 44455 - DNA, 25 bp, Probe Sequence
gagcaacatgaatgacctggtatct

SEQ ID NO: 44456 - DNA, 25 bp, Probe Sequence
agagcaacatgaatgacctggtatc

SEQ ID NO: 44457 - DNA, 25 bp, Probe Sequence
gagagcaacatgaatgacctggtat

SEQ ID NO: 44458 - DNA, 25 bp, Probe Sequence
gcaacatgaatgacctggtatctga

SEQ ID NO: 44459 - DNA, 25 bp, Probe Sequence
agcaacatgaatgacctggtatctg

SEQ ID NO: 44460 - DNA, 25 bp, Probe Sequence
atgaatgacctggtatctgagtacc

SEQ ID NO: 44461 - DNA, 25 bp, Probe Sequence
cgagagcaacatgaatgacctggta

SEQ ID NO: 44462 - DNA, 25 bp, Probe Sequence
gtatctgagtaccagcagtaccagg

SEQ ID NO: 44463 - DNA, 25 bp, Probe Sequence
tatctgagtaccagcagtaccagga

SEQ ID NO: 44464 - DNA, 25 bp, Probe Sequence
ggtatctgagtaccagcagtaccag

SEQ ID NO: 44465 - DNA, 25 bp, Probe Sequence
atctgagtaccagcagtaccaggac

SEQ ID NO: 44466 - DNA, 25 bp, Probe Sequence
tttgcctaaatggaaacctgataaa

SEQ ID NO: 44467 - DNA, 25 bp, Probe Sequence
tcttgcccgctcatttgttaataaa

SEQ ID NO: 44468 - DNA, 25 bp, Probe Sequence
aacagagatttgcctaaatggaaac

SEQ ID NO: 44469 - DNA, 25 bp, Probe Sequence
ctcttgcccgctcatttgttaataa

SEQ ID NO: 44470 - DNA, 25 bp, Probe Sequence
gatttgcctaaatggaaacctgata

SEQ ID NO: 44471 - DNA, 25 bp, Probe Sequence
agatttgcctaaatggaaacctgat

SEQ ID NO: 44472 - DNA, 25 bp, Probe Sequence
cataacagagatttgcctaaatgga

SEQ ID NO: 44473 - DNA, 25 bp, Probe Sequence
atttgcctaaatggaaacctgataa

SEQ ID NO: 44474 - DNA, 25 bp, Probe Sequence
gagatttgcctaaatggaaacctga

SEQ ID NO: 44475 - DNA, 25 bp, Probe Sequence
agagatttgcctaaatggaaacctg

SEQ ID NO: 44476 - DNA, 25 bp, Probe Sequence
cagagatttgcctaaatggaaacct

SEQ ID NO: 44477 - DNA, 25 bp, Probe Sequence
taacagagatttgcctaaatggaaa

SEQ ID NO: 44478 - DNA, 25 bp, Probe Sequence
acagagatttgcctaaatggaaacc

SEQ ID NO: 44479 - DNA, 25 bp, Probe Sequence
ataacagagatttgcctaaatggaa

SEQ ID NO: 44480 - DNA, 25 bp, Probe Sequence
cctcttgcccgctcatttgttaata

SEQ ID NO: 44481 - DNA, 25 bp, Probe Sequence
ttgcctaaatggaaacctgataaaa

SEQ ID NO: 44482 - DNA, 25 bp, Probe Sequence
cttgcccgctcatttgttaataaaa

SEQ ID NO: 44483 - DNA, 25 bp, Probe Sequence
gcataacagagatttgcctaaatgg

SEQ ID NO: 44484 - DNA, 25 bp, Probe Sequence
tactagatcacttgtcctcttgccc

SEQ ID NO: 44485 - DNA, 25 bp, Probe Sequence
ttgcccgctcatttgttaataaaat

SEQ ID NO: 44486 - DNA, 25 bp, Probe Sequence
tgcccgctcatttgttaataaaata

SEQ ID NO: 44487 - DNA, 25 bp, Probe Sequence
gcccgctcatttgttaataaaatac

SEQ ID NO: 44488 - DNA, 25 bp, Probe Sequence
cccgctcatttgttaataaaatact

SEQ ID NO: 44489 - DNA, 25 bp, Probe Sequence
caacactggcataacagagatttgc

SEQ ID NO: 44490 - DNA, 25 bp, Probe Sequence
tgagagattggcttaaatccagttt

SEQ ID NO: 44491 - DNA, 25 bp, Probe Sequence
ttgagagattggcttaaatccagtt

SEQ ID NO: 44492 - DNA, 25 bp, Probe Sequence
tttgagagattggcttaaatccagt

SEQ ID NO: 44493 - DNA, 25 bp, Probe Sequence
caggaattttgagagattggcttaa

SEQ ID NO: 44494 - DNA, 25 bp, Probe Sequence
aggaattttgagagattggcttaaa

SEQ ID NO: 44495 - DNA, 25 bp, Probe Sequence
cttggtccaggaattttgagagatt

SEQ ID NO: 44496 - DNA, 25 bp, Probe Sequence
agaccaataaatttgtaactttgca

SEQ ID NO: 44497 - DNA, 25 bp, Probe Sequence
ttggtccaggaattttgagagattg

SEQ ID NO: 44498 - DNA, 25 bp, Probe Sequence
aaaatccttttcttcatttggggag

SEQ ID NO: 44499 - DNA, 25 bp, Probe Sequence
aacaaaatctcctggctttacagac

SEQ ID NO: 44500 - DNA, 25 bp, Probe Sequence
caacaaaatctcctggctttacaga

SEQ ID NO: 44501 - DNA, 25 bp, Probe Sequence
gagattggcttaaatccagttttca

SEQ ID NO: 44502 - DNA, 25 bp, Probe Sequence
agagattggcttaaatccagttttc

SEQ ID NO: 44503 - DNA, 25 bp, Probe Sequence
gagagattggcttaaatccagtttt

SEQ ID NO: 44504 - DNA, 25 bp, Probe Sequence
ttttgagagattggcttaaatccag

SEQ ID NO: 44505 - DNA, 25 bp, Probe Sequence
ggaattttgagagattggcttaaat

SEQ ID NO: 44506 - DNA, 25 bp, Probe Sequence
agattggcttaaatccagttttcaa

SEQ ID NO: 44507 - DNA, 25 bp, Probe Sequence
ccaggaattttgagagattggctta

SEQ ID NO: 44508 - DNA, 25 bp, Probe Sequence
aaatccttttcttcatttggggagg

SEQ ID NO: 44509 - DNA, 25 bp, Probe Sequence
attttgagagattggcttaaatcca

SEQ ID NO: 44510 - DNA, 25 bp, Probe Sequence
cggaaacaaaatccttttcttcatt

SEQ ID NO: 44511 - DNA, 25 bp, Probe Sequence
gcttggtccaggaattttgagagat

SEQ ID NO: 44512 - DNA, 25 bp, Probe Sequence
aattttgagagattggcttaaatcc

SEQ ID NO: 44513 - DNA, 25 bp, Probe Sequence
caaaatccttttcttcatttgggga

SEQ ID NO: 44514 - DNA, 25 bp, Probe Sequence
cattgtagatgaactgaagcaagaa

SEQ ID NO: 44515 - DNA, 25 bp, Probe Sequence
attgtagatgaactgaagcaagaag

SEQ ID NO: 44516 - DNA, 25 bp, Probe Sequence
ttgtagatgaactgaagcaagaagt

SEQ ID NO: 44517 - DNA, 25 bp, Probe Sequence
tgaagcaagaagttatcagtaccag

SEQ ID NO: 44518 - DNA, 25 bp, Probe Sequence
gaagcaagaagttatcagtaccagc

SEQ ID NO: 44519 - DNA, 25 bp, Probe Sequence
aagaagttatcagtaccagcagcaa

SEQ ID NO: 44520 - DNA, 25 bp, Probe Sequence
aagcaagaagttatcagtaccagca

SEQ ID NO: 44521 - DNA, 25 bp, Probe Sequence
agaagttatcagtaccagcagcaag

SEQ ID NO: 44522 - DNA, 25 bp, Probe Sequence
agcaagaagttatcagtaccagcag

SEQ ID NO: 44523 - DNA, 25 bp, Probe Sequence
caagaagttatcagtaccagcagca

SEQ ID NO: 44524 - DNA, 25 bp, Probe Sequence
ctgggatttagagggaaagatcatt

SEQ ID NO: 44525 - DNA, 25 bp, Probe Sequence
gggatttagagggaaagatcattgt

SEQ ID NO: 44526 - DNA, 25 bp, Probe Sequence
tgggatttagagggaaagatcattg

SEQ ID NO: 44527 - DNA, 25 bp, Probe Sequence
tcattgtagatgaactgaagcaaga

SEQ ID NO: 44528 - DNA, 25 bp, Probe Sequence
agatcattgtagatgaactgaagca

SEQ ID NO: 44529 - DNA, 25 bp, Probe Sequence
atcattgtagatgaactgaagcaag

SEQ ID NO: 44530 - DNA, 25 bp, Probe Sequence
gatcattgtagatgaactgaagcaa

SEQ ID NO: 44531 - DNA, 25 bp, Probe Sequence
tctgggatttagagggaaagatcat

SEQ ID NO: 44532 - DNA, 25 bp, Probe Sequence
aagatcattgtagatgaactgaagc

SEQ ID NO: 44533 - DNA, 25 bp, Probe Sequence
tgtagatgaactgaagcaagaagtt

SEQ ID NO: 44534 - DNA, 25 bp, Probe Sequence
gatgaactgaagcaagaagttatca

SEQ ID NO: 44535 - DNA, 25 bp, Probe Sequence
agatgaactgaagcaagaagttatc

SEQ ID NO: 44536 - DNA, 25 bp, Probe Sequence
gtagatgaactgaagcaagaagtta

SEQ ID NO: 44537 - DNA, 25 bp, Probe Sequence
gaagttatcagtaccagcagcaagg

SEQ ID NO: 44538 - DNA, 25 bp, Probe Sequence
ttcttcacatccattgtctcttcat

SEQ ID NO: 44539 - DNA, 25 bp, Probe Sequence
ttcttcttcacatccattgtctctt

SEQ ID NO: 44540 - DNA, 25 bp, Probe Sequence
tcttcttcacatccattgtctcttc

SEQ ID NO: 44541 - DNA, 25 bp, Probe Sequence
tgtctcttcatgtctattccattcc

SEQ ID NO: 44542 - DNA, 25 bp, Probe Sequence
tccattgtctcttcatgtctattcc

SEQ ID NO: 44543 - DNA, 25 bp, Probe Sequence
ccattgtctcttcatgtctattcca

SEQ ID NO: 44544 - DNA, 25 bp, Probe Sequence
cttcttcacatccattgtctcttca

SEQ ID NO: 44545 - DNA, 25 bp, Probe Sequence
cattgtctcttcatgtctattccat

SEQ ID NO: 44546 - DNA, 25 bp, Probe Sequence
catccattgtctcttcatgtctatt

SEQ ID NO: 44547 - DNA, 25 bp, Probe Sequence
ttgtctcttcatgtctattccattc

SEQ ID NO: 44548 - DNA, 25 bp, Probe Sequence
cagtatgacagaggaggatgtaagg

SEQ ID NO: 44549 - DNA, 25 bp, Probe Sequence
ccagtatgacagaggaggatgtaag

SEQ ID NO: 44550 - DNA, 25 bp, Probe Sequence
atccattgtctcttcatgtctattc

SEQ ID NO: 44551 - DNA, 25 bp, Probe Sequence
tcttcacatccattgtctcttcatg

SEQ ID NO: 44552 - DNA, 25 bp, Probe Sequence
ctattgcttgggtctctctctattt

SEQ ID NO: 44553 - DNA, 25 bp, Probe Sequence
ctctcttcttattacccaaacccat

SEQ ID NO: 44554 - DNA, 25 bp, Probe Sequence
ctctctcttcttattacccaaaccc

SEQ ID NO: 44555 - DNA, 25 bp, Probe Sequence
tgctctctcttcttattacccaaac

SEQ ID NO: 44556 - DNA, 25 bp, Probe Sequence
attgtctcttcatgtctattccatt

SEQ ID NO: 44557 - DNA, 25 bp, Probe Sequence
ggctctatttcttcttcacatccat

SEQ ID NO: 44558 - DNA, 25 bp, Probe Sequence
atgctctctcttcttattacccaaa

SEQ ID NO: 44559 - DNA, 25 bp, Probe Sequence
aatgctctctcttcttattacccaa

SEQ ID NO: 44560 - DNA, 25 bp, Probe Sequence
aaatgctctctcttcttattaccca

SEQ ID NO: 44561 - DNA, 25 bp, Probe Sequence
atcacctcactagatgaacaggatg

SEQ ID NO: 44562 - DNA, 25 bp, Probe Sequence
aaccaaccttacatcaactactcaa

SEQ ID NO: 44563 - DNA, 25 bp, Probe Sequence
gccttccagtattatcagttacaca

SEQ ID NO: 44564 - DNA, 25 bp, Probe Sequence
tgccttccagtattatcagttacac

SEQ ID NO: 44565 - DNA, 25 bp, Probe Sequence
gtgccttccagtattatcagttaca

SEQ ID NO: 44566 - DNA, 25 bp, Probe Sequence
taaccaaccttacatcaactactca

SEQ ID NO: 44567 - DNA, 25 bp, Probe Sequence
tccagtattatcagttacacaaggt

SEQ ID NO: 44568 - DNA, 25 bp, Probe Sequence
ggtgccttccagtattatcagttac

SEQ ID NO: 44569 - DNA, 25 bp, Probe Sequence
accaaccttacatcaactactcaag

SEQ ID NO: 44570 - DNA, 25 bp, Probe Sequence
atactgattccttcaacactgtagc

SEQ ID NO: 44571 - DNA, 25 bp, Probe Sequence
ataaccaaccttacatcaactactc

SEQ ID NO: 44572 - DNA, 25 bp, Probe Sequence
ttccagtattatcagttacacaagg

SEQ ID NO: 44573 - DNA, 25 bp, Probe Sequence
ccttccagtattatcagttacacaa

SEQ ID NO: 44574 - DNA, 25 bp, Probe Sequence
agatactgattccttcaacactgta

SEQ ID NO: 44575 - DNA, 25 bp, Probe Sequence
gatactgattccttcaacactgtag

SEQ ID NO: 44576 - DNA, 25 bp, Probe Sequence
cagatactgattccttcaacactgt

SEQ ID NO: 44577 - DNA, 25 bp, Probe Sequence
cttacatcaactactcaaggacggt

SEQ ID NO: 44578 - DNA, 25 bp, Probe Sequence
ccagtattatcagttacacaaggta

SEQ ID NO: 44579 - DNA, 25 bp, Probe Sequence
tactgattccttcaacactgtagca

SEQ ID NO: 44580 - DNA, 25 bp, Probe Sequence
ttacatcaactactcaaggacggtg

SEQ ID NO: 44581 - DNA, 25 bp, Probe Sequence
ccagatactgattccttcaacactg

SEQ ID NO: 44582 - DNA, 25 bp, Probe Sequence
atctacagtcctcacacaggtattc

SEQ ID NO: 44583 - DNA, 25 bp, Probe Sequence
attccttcaacactgtagcagagat

SEQ ID NO: 44584 - DNA, 25 bp, Probe Sequence
catctacagtcctcacacaggtatt

SEQ ID NO: 44585 - DNA, 25 bp, Probe Sequence
ctcccaccacatagaatcaacatat

SEQ ID NO: 44586 - DNA, 25 bp, Probe Sequence
tttcccaaccaataaagtaaccact

SEQ ID NO: 44587 - DNA, 25 bp, Probe Sequence
ctttcccaaccaataaagtaaccac

SEQ ID NO: 44588 - DNA, 25 bp, Probe Sequence
ctccctttcccaaccaataaagtaa

SEQ ID NO: 44589 - DNA, 25 bp, Probe Sequence
gcttctccctttcccaaccaataaa

SEQ ID NO: 44590 - DNA, 25 bp, Probe Sequence
tccctttcccaaccaataaagtaac

SEQ ID NO: 44591 - DNA, 25 bp, Probe Sequence
cctttcccaaccaataaagtaacca

SEQ ID NO: 44592 - DNA, 25 bp, Probe Sequence
tctccctttcccaaccaataaagta

SEQ ID NO: 44593 - DNA, 25 bp, Probe Sequence
cttctccctttcccaaccaataaag

SEQ ID NO: 44594 - DNA, 25 bp, Probe Sequence
cttctctgcccaaatgataaggagg

SEQ ID NO: 44595 - DNA, 25 bp, Probe Sequence
ctgagcagtgaggagagaaagtttc

SEQ ID NO: 44596 - DNA, 25 bp, Probe Sequence
ccctttcccaaccaataaagtaacc

SEQ ID NO: 44597 - DNA, 25 bp, Probe Sequence
ttcccaaccaataaagtaaccactt

SEQ ID NO: 44598 - DNA, 25 bp, Probe Sequence
ttctccctttcccaaccaataaagt

SEQ ID NO: 44599 - DNA, 25 bp, Probe Sequence
ctgccttctctgcccaaatgataag

SEQ ID NO: 44600 - DNA, 25 bp, Probe Sequence
tctgccttctctgcccaaatgataa

SEQ ID NO: 44601 - DNA, 25 bp, Probe Sequence
ttctgccttctctgcccaaatgata

SEQ ID NO: 44602 - DNA, 25 bp, Probe Sequence
tcctgtgtcactcccaatttctgag

SEQ ID NO: 44603 - DNA, 25 bp, Probe Sequence
agcttctccctttcccaaccaataa

SEQ ID NO: 44604 - DNA, 25 bp, Probe Sequence
gtcctgtgtcactcccaatttctga

SEQ ID NO: 44605 - DNA, 25 bp, Probe Sequence
tgtcctgtgtcactcccaatttctg

SEQ ID NO: 44606 - DNA, 25 bp, Probe Sequence
gagcagtgaggagagaaagtttctg

SEQ ID NO: 44607 - DNA, 25 bp, Probe Sequence
tgtgtcactcccaatttctgaggtc

SEQ ID NO: 44608 - DNA, 25 bp, Probe Sequence
ctgtgtcactcccaatttctgaggt

SEQ ID NO: 44609 - DNA, 25 bp, Probe Sequence
ccaggtgaacattaactttccccag

SEQ ID NO: 44610 - DNA, 25 bp, Probe Sequence
tatgaattattgcacctgactacca

SEQ ID NO: 44611 - DNA, 25 bp, Probe Sequence
gaattattgcacctgactaccatac

SEQ ID NO: 44612 - DNA, 25 bp, Probe Sequence
aattattgcacctgactaccatacc

SEQ ID NO: 44613 - DNA, 25 bp, Probe Sequence
tgtaaacttcattctgtgggctaat

SEQ ID NO: 44614 - DNA, 25 bp, Probe Sequence
atgaattattgcacctgactaccat

SEQ ID NO: 44615 - DNA, 25 bp, Probe Sequence
ctgtaaacttcattctgtgggctaa

SEQ ID NO: 44616 - DNA, 25 bp, Probe Sequence
attattgcacctgactaccatacct

SEQ ID NO: 44617 - DNA, 25 bp, Probe Sequence
aaaccacactgatgccttgataatt

SEQ ID NO: 44618 - DNA, 25 bp, Probe Sequence
aacttagggtcctgtatcatacttt

SEQ ID NO: 44619 - DNA, 25 bp, Probe Sequence
aaacttagggtcctgtatcatactt

SEQ ID NO: 44620 - DNA, 25 bp, Probe Sequence
atcaaggattcagtcaaactaagca

SEQ ID NO: 44621 - DNA, 25 bp, Probe Sequence
atgttaattagcagttagtgattgg

SEQ ID NO: 44622 - DNA, 25 bp, Probe Sequence
ttattgcacctgactaccatacctc

SEQ ID NO: 44623 - DNA, 25 bp, Probe Sequence
tcaaggattcagtcaaactaagcag

SEQ ID NO: 44624 - DNA, 25 bp, Probe Sequence
gttaattagcagttagtgattgggc

SEQ ID NO: 44625 - DNA, 25 bp, Probe Sequence
aggattcagtcaaactaagcaggta

SEQ ID NO: 44626 - DNA, 25 bp, Probe Sequence
attcagtcaaactaagcaggtactc

SEQ ID NO: 44627 - DNA, 25 bp, Probe Sequence
gattcagtcaaactaagcaggtact

SEQ ID NO: 44628 - DNA, 25 bp, Probe Sequence
tgttaattagcagttagtgattggg

SEQ ID NO: 44629 - DNA, 25 bp, Probe Sequence
caaggattcagtcaaactaagcagg

SEQ ID NO: 44630 - DNA, 25 bp, Probe Sequence
tcagtcaaactaagcaggtactcat

SEQ ID NO: 44631 - DNA, 25 bp, Probe Sequence
ggattcagtcaaactaagcaggtac

SEQ ID NO: 44632 - DNA, 25 bp, Probe Sequence
aaggattcagtcaaactaagcaggt

SEQ ID NO: 44633 - DNA, 25 bp, Probe Sequence
ttcagtcaaactaagcaggtactca

SEQ ID NO: 44634 - DNA, 25 bp, Probe Sequence
gatgaggaggaggatgatgatgatg

SEQ ID NO: 44635 - DNA, 25 bp, Probe Sequence
tggatgtgatgtgggaatataagtg

SEQ ID NO: 44636 - DNA, 25 bp, Probe Sequence
gtggatgtgatgtgggaatataagt

SEQ ID NO: 44637 - DNA, 25 bp, Probe Sequence
gatgtgggaatataagtgggagaac

SEQ ID NO: 44638 - DNA, 25 bp, Probe Sequence
cagtcaatttccctttcccaataaa

SEQ ID NO: 44639 - DNA, 25 bp, Probe Sequence
tcagtcaatttccctttcccaataa

SEQ ID NO: 44640 - DNA, 25 bp, Probe Sequence
ttcagtcaatttccctttcccaata

SEQ ID NO: 44641 - DNA, 25 bp, Probe Sequence
tgatgtgggaatataagtgggagaa

SEQ ID NO: 44642 - DNA, 25 bp, Probe Sequence
gatgtgatgtgggaatataagtggg

SEQ ID NO: 44643 - DNA, 25 bp, Probe Sequence
ggatgtgatgtgggaatataagtgg

SEQ ID NO: 44644 - DNA, 25 bp, Probe Sequence
ggtggatgtgatgtgggaatataag

SEQ ID NO: 44645 - DNA, 25 bp, Probe Sequence
atgtgatgtgggaatataagtggga

SEQ ID NO: 44646 - DNA, 25 bp, Probe Sequence
tttcagtcaatttccctttcccaat

SEQ ID NO: 44647 - DNA, 25 bp, Probe Sequence
gagatgaggaggatgaggatgaaat

SEQ ID NO: 44648 - DNA, 25 bp, Probe Sequence
agatgaggaggatgaggatgaaatc

SEQ ID NO: 44649 - DNA, 25 bp, Probe Sequence
tggtggatgtgatgtgggaatataa

SEQ ID NO: 44650 - DNA, 25 bp, Probe Sequence
atgaggaggaggatgatgatgatgg

SEQ ID NO: 44651 - DNA, 25 bp, Probe Sequence
gtgatgtgggaatataagtgggaga

SEQ ID NO: 44652 - DNA, 25 bp, Probe Sequence
cgatgaggaggaggatgatgatgat

SEQ ID NO: 44653 - DNA, 25 bp, Probe Sequence
tgtgatgtgggaatataagtgggag

SEQ ID NO: 44654 - DNA, 25 bp, Probe Sequence
ctggtggatgtgatgtgggaatata

SEQ ID NO: 44655 - DNA, 25 bp, Probe Sequence
ctcagaggatgtagaaggtcaggag

SEQ ID NO: 44656 - DNA, 25 bp, Probe Sequence
cattgactttgacctctacacctga

SEQ ID NO: 44657 - DNA, 25 bp, Probe Sequence
gatgaggaggatgaggatgaaatca

SEQ ID NO: 44658 - DNA, 25 bp, Probe Sequence
ccaccacttctgccttagataatat

SEQ ID NO: 44659 - DNA, 25 bp, Probe Sequence
caccacttctgccttagataatatg

SEQ ID NO: 44660 - DNA, 25 bp, Probe Sequence
accaccacttctgccttagataata

SEQ ID NO: 44661 - DNA, 25 bp, Probe Sequence
accacttctgccttagataatatga

SEQ ID NO: 44662 - DNA, 25 bp, Probe Sequence
taaccaccacttctgccttagataa

SEQ ID NO: 44663 - DNA, 25 bp, Probe Sequence
ggaggatctggatcaagaattactg

SEQ ID NO: 44664 - DNA, 25 bp, Probe Sequence
aaccaccacttctgccttagataat

SEQ ID NO: 44665 - DNA, 25 bp, Probe Sequence
gtaaccaccacttctgccttagata

SEQ ID NO: 44666 - DNA, 25 bp, Probe Sequence
gaggatctggatcaagaattactgc

SEQ ID NO: 44667 - DNA, 25 bp, Probe Sequence
aaggtattgctgtcatcattcagag

SEQ ID NO: 44668 - DNA, 25 bp, Probe Sequence
ccacttctgccttagataatatgat

SEQ ID NO: 44669 - DNA, 25 bp, Probe Sequence
caaggtattgctgtcatcattcaga

SEQ ID NO: 44670 - DNA, 25 bp, Probe Sequence
aatcgtattcttgccaagtaaccac

SEQ ID NO: 44671 - DNA, 25 bp, Probe Sequence
ccaaggtattgctgtcatcattcag

SEQ ID NO: 44672 - DNA, 25 bp, Probe Sequence
atggatttggtagaggtgaatgaag

SEQ ID NO: 44673 - DNA, 25 bp, Probe Sequence
tgctggctactttaatgatgaaatg

SEQ ID NO: 44674 - DNA, 25 bp, Probe Sequence
aatgatgctggctactttaatgatg

SEQ ID NO: 44675 - DNA, 25 bp, Probe Sequence
gatgctggctactttaatgatgaaa

SEQ ID NO: 44676 - DNA, 25 bp, Probe Sequence
atgatgctggctactttaatgatga

SEQ ID NO: 44677 - DNA, 25 bp, Probe Sequence
gctaatgatgctggctactttaatg

SEQ ID NO: 44678 - DNA, 25 bp, Probe Sequence
tgatgctggctactttaatgatgaa

SEQ ID NO: 44679 - DNA, 25 bp, Probe Sequence
ctggctactttaatgatgaaatggc

SEQ ID NO: 44680 - DNA, 25 bp, Probe Sequence
gctggctactttaatgatgaaatgg

SEQ ID NO: 44681 - DNA, 25 bp, Probe Sequence
ataacttcacaccactggcaagaat

SEQ ID NO: 44682 - DNA, 25 bp, Probe Sequence
atgatgaggaagaagaagaagaagg

SEQ ID NO: 44683 - DNA, 25 bp, Probe Sequence
gagatgaagatgatgatgaggaaga

SEQ ID NO: 44684 - DNA, 25 bp, Probe Sequence
tgaagatgatgatgaggaagaagaa

SEQ ID NO: 44685 - DNA, 25 bp, Probe Sequence
tgatgatgaggaagaagaagaagaa

SEQ ID NO: 44686 - DNA, 25 bp, Probe Sequence
atgaagatgatgatgaggaagaaga

SEQ ID NO: 44687 - DNA, 25 bp, Probe Sequence
agatgaagatgatgatgaggaagaa

SEQ ID NO: 44688 - DNA, 25 bp, Probe Sequence
ttggatatgtggaatagtgaactgg

SEQ ID NO: 44689 - DNA, 25 bp, Probe Sequence
atgatgatgaggaagaagaagaaga

SEQ ID NO: 44690 - DNA, 25 bp, Probe Sequence
agatgatgatgaggaagaagaagaa

SEQ ID NO: 44691 - DNA, 25 bp, Probe Sequence
aagatgatgatgaggaagaagaaga

SEQ ID NO: 44692 - DNA, 25 bp, Probe Sequence
gcttggatatgtggaatagtgaact

SEQ ID NO: 44693 - DNA, 25 bp, Probe Sequence
gatgaagatgatgatgaggaagaag

SEQ ID NO: 44694 - DNA, 25 bp, Probe Sequence
cgagatgaagatgatgatgaggaag

SEQ ID NO: 44695 - DNA, 25 bp, Probe Sequence
gatgatgatgaggaagaagaagaag

SEQ ID NO: 44696 - DNA, 25 bp, Probe Sequence
gaagatgatgatgaggaagaagaag

SEQ ID NO: 44697 - DNA, 25 bp, Probe Sequence
cttggatatgtggaatagtgaactg

SEQ ID NO: 44698 - DNA, 25 bp, Probe Sequence
gatgatgaggaagaagaagaagaag

SEQ ID NO: 44699 - DNA, 25 bp, Probe Sequence
ttcaatagcatcttcagcgatatgg

SEQ ID NO: 44700 - DNA, 25 bp, Probe Sequence
ggcttggatatgtggaatagtgaac

SEQ ID NO: 44701 - DNA, 25 bp, Probe Sequence
ttaagtatccagatagtcaccagcc

SEQ ID NO: 44702 - DNA, 25 bp, Probe Sequence
tagaaccagagaggacaatgatctt

SEQ ID NO: 44703 - DNA, 25 bp, Probe Sequence
ctagaaccagagaggacaatgatct

SEQ ID NO: 44704 - DNA, 25 bp, Probe Sequence
ccagagaggacaatgatcttgattc

SEQ ID NO: 44705 - DNA, 25 bp, Probe Sequence
accagagaggacaatgatcttgatt

SEQ ID NO: 44706 - DNA, 25 bp, Probe Sequence
ttacacgcactaagattgattggaa

SEQ ID NO: 44707 - DNA, 25 bp, Probe Sequence
gcactaagattgattggaacaagat

SEQ ID NO: 44708 - DNA, 25 bp, Probe Sequence
tacacgcactaagattgattggaac

SEQ ID NO: 44709 - DNA, 25 bp, Probe Sequence
gttacacgcactaagattgattgga

SEQ ID NO: 44710 - DNA, 25 bp, Probe Sequence
cagttacacgcactaagattgattg

SEQ ID NO: 44711 - DNA, 25 bp, Probe Sequence
gccatcagtgagaattatcagacaa

SEQ ID NO: 44712 - DNA, 25 bp, Probe Sequence
tacaatcactccttcaaccactcaa

SEQ ID NO: 44713 - DNA, 25 bp, Probe Sequence
ttacaatcactccttcaaccactca

SEQ ID NO: 44714 - DNA, 25 bp, Probe Sequence
ccatcagtgagaattatcagacaat

SEQ ID NO: 44715 - DNA, 25 bp, Probe Sequence
agttacacgcactaagattgattgg

SEQ ID NO: 44716 - DNA, 25 bp, Probe Sequence
ccagttacacgcactaagattgatt

SEQ ID NO: 44717 - DNA, 25 bp, Probe Sequence
cgcactaagattgattggaacaaga

SEQ ID NO: 44718 - DNA, 25 bp, Probe Sequence
acgcactaagattgattggaacaag

SEQ ID NO: 44719 - DNA, 25 bp, Probe Sequence
tgccatcagtgagaattatcagaca

SEQ ID NO: 44720 - DNA, 25 bp, Probe Sequence
ctgccatcagtgagaattatcagac

SEQ ID NO: 44721 - DNA, 25 bp, Probe Sequence
cacgcactaagattgattggaacaa

SEQ ID NO: 44722 - DNA, 25 bp, Probe Sequence
atcagtgagaattatcagacaatgt

SEQ ID NO: 44723 - DNA, 25 bp, Probe Sequence
catcagtgagaattatcagacaatg

SEQ ID NO: 44724 - DNA, 25 bp, Probe Sequence
gattgattggaacaagatccttagc

SEQ ID NO: 44725 - DNA, 25 bp, Probe Sequence
ggtaatgttcagctagtgagtcata

SEQ ID NO: 44726 - DNA, 25 bp, Probe Sequence
aagatggtaatgttcagctagtgag

SEQ ID NO: 44727 - DNA, 25 bp, Probe Sequence
aattatcagacaatgtcggacacta

SEQ ID NO: 44728 - DNA, 25 bp, Probe Sequence
cagtgagaattatcagacaatgtcg

SEQ ID NO: 44729 - DNA, 25 bp, Probe Sequence
gaagatggtaatgttcagctagtga

SEQ ID NO: 44730 - DNA, 25 bp, Probe Sequence
ctcttgattcgtaggaattgaggag

SEQ ID NO: 44731 - DNA, 25 bp, Probe Sequence
cttgattcgtaggaattgaggagtg

SEQ ID NO: 44732 - DNA, 25 bp, Probe Sequence
tcttgattcgtaggaattgaggagt

SEQ ID NO: 44733 - DNA, 25 bp, Probe Sequence
ttgattcgtaggaattgaggagtgt

SEQ ID NO: 44734 - DNA, 25 bp, Probe Sequence
attcgtaggaattgaggagtgtctc

SEQ ID NO: 44735 - DNA, 25 bp, Probe Sequence
gattcgtaggaattgaggagtgtct

SEQ ID NO: 44736 - DNA, 25 bp, Probe Sequence
catgtttcctctcaataaagttccc

SEQ ID NO: 44737 - DNA, 25 bp, Probe Sequence
ccatgtttcctctcaataaagttcc

SEQ ID NO: 44738 - DNA, 25 bp, Probe Sequence
tgattcgtaggaattgaggagtgtc

SEQ ID NO: 44739 - DNA, 25 bp, Probe Sequence
accatgtttcctctcaataaagttc

SEQ ID NO: 44740 - DNA, 25 bp, Probe Sequence
gaccatgtttcctctcaataaagtt

SEQ ID NO: 44741 - DNA, 25 bp, Probe Sequence
ctctcagtagcctataagaacgtgg

SEQ ID NO: 44742 - DNA, 25 bp, Probe Sequence
tgaccatgtttcctctcaataaagt

SEQ ID NO: 44743 - DNA, 25 bp, Probe Sequence
gtgaccatgtttcctctcaataaag

SEQ ID NO: 44744 - DNA, 25 bp, Probe Sequence
tgtgaccatgtttcctctcaataaa

SEQ ID NO: 44745 - DNA, 25 bp, Probe Sequence
tgcctcttgattcgtaggaattgag

SEQ ID NO: 44746 - DNA, 25 bp, Probe Sequence
ctgcctcttgattcgtaggaattga

SEQ ID NO: 44747 - DNA, 25 bp, Probe Sequence
ctcagtagcctataagaacgtggtg

SEQ ID NO: 44748 - DNA, 25 bp, Probe Sequence
gtgtgaccatgtttcctctcaataa

SEQ ID NO: 44749 - DNA, 25 bp, Probe Sequence
cctgctctcagtagcctataagaac

SEQ ID NO: 44750 - DNA, 25 bp, Probe Sequence
tctcagtagcctataagaacgtggt

SEQ ID NO: 44751 - DNA, 25 bp, Probe Sequence
acctgctctcagtagcctataagaa

SEQ ID NO: 44752 - DNA, 25 bp, Probe Sequence
aacctgctctcagtagcctataaga

SEQ ID NO: 44753 - DNA, 25 bp, Probe Sequence
ctgctctcagtagcctataagaacg

SEQ ID NO: 44754 - DNA, 25 bp, Probe Sequence
cctggtgtctatattcttctctcaa

SEQ ID NO: 44755 - DNA, 25 bp, Probe Sequence
gctaattcctgaagatgtctgtgaa

SEQ ID NO: 44756 - DNA, 25 bp, Probe Sequence
gcctggtgtctatattcttctctca

SEQ ID NO: 44757 - DNA, 25 bp, Probe Sequence
ctgagagaagtcaatatcaccatca

SEQ ID NO: 44758 - DNA, 25 bp, Probe Sequence
tctgagagaagtcaatatcaccatc

SEQ ID NO: 44759 - DNA, 25 bp, Probe Sequence
ctgctaattcctgaagatgtctgtg

SEQ ID NO: 44760 - DNA, 25 bp, Probe Sequence
tgagagaagtcaatatcaccatcat

SEQ ID NO: 44761 - DNA, 25 bp, Probe Sequence
ttctctcctgctaattcctgaagat

SEQ ID NO: 44762 - DNA, 25 bp, Probe Sequence
tgctaattcctgaagatgtctgtga

SEQ ID NO: 44763 - DNA, 25 bp, Probe Sequence
ctcctgctaattcctgaagatgtct

SEQ ID NO: 44764 - DNA, 25 bp, Probe Sequence
cctacatggtcctacttagtcttga

SEQ ID NO: 44765 - DNA, 25 bp, Probe Sequence
tctctcctgctaattcctgaagatg

SEQ ID NO: 44766 - DNA, 25 bp, Probe Sequence
atggtcctacttagtcttgacagaa

SEQ ID NO: 44767 - DNA, 25 bp, Probe Sequence
tctcctgctaattcctgaagatgtc

SEQ ID NO: 44768 - DNA, 25 bp, Probe Sequence
ctctcctgctaattcctgaagatgt

SEQ ID NO: 44769 - DNA, 25 bp, Probe Sequence
tcctgctaattcctgaagatgtctg

SEQ ID NO: 44770 - DNA, 25 bp, Probe Sequence
tccgatactctgagagaagtcaata

SEQ ID NO: 44771 - DNA, 25 bp, Probe Sequence
gagaagtcaatatcaccatcataga

SEQ ID NO: 44772 - DNA, 25 bp, Probe Sequence
agagaagtcaatatcaccatcatag

SEQ ID NO: 44773 - DNA, 25 bp, Probe Sequence
gagagaagtcaatatcaccatcata

SEQ ID NO: 44774 - DNA, 25 bp, Probe Sequence
ctctgagagaagtcaatatcaccat

SEQ ID NO: 44775 - DNA, 25 bp, Probe Sequence
atgtgactatccttcatctacctaa

SEQ ID NO: 44776 - DNA, 25 bp, Probe Sequence
agtcaatatcaccatcatagacaga

SEQ ID NO: 44777 - DNA, 25 bp, Probe Sequence
actctgagagaagtcaatatcacca

SEQ ID NO: 44778 - DNA, 25 bp, Probe Sequence
ttagactcattgtaagttgccactg

SEQ ID NO: 44779 - DNA, 25 bp, Probe Sequence
gctcagacctttagactcattgtaa

SEQ ID NO: 44780 - DNA, 25 bp, Probe Sequence
tgctcagacctttagactcattgta

SEQ ID NO: 44781 - DNA, 25 bp, Probe Sequence
ctttagactcattgtaagttgccac

SEQ ID NO: 44782 - DNA, 25 bp, Probe Sequence
gacctttagactcattgtaagttgc

SEQ ID NO: 44783 - DNA, 25 bp, Probe Sequence
tttagactcattgtaagttgccact

SEQ ID NO: 44784 - DNA, 25 bp, Probe Sequence
ctcagacctttagactcattgtaag

SEQ ID NO: 44785 - DNA, 25 bp, Probe Sequence
tcagacctttagactcattgtaagt

SEQ ID NO: 44786 - DNA, 25 bp, Probe Sequence
cctttagactcattgtaagttgcca

SEQ ID NO: 44787 - DNA, 25 bp, Probe Sequence
acctttagactcattgtaagttgcc

SEQ ID NO: 44788 - DNA, 25 bp, Probe Sequence
tagactcattgtaagttgccactgc

SEQ ID NO: 44789 - DNA, 25 bp, Probe Sequence
ctatggactctttcaaagggatctg

SEQ ID NO: 44790 - DNA, 25 bp, Probe Sequence
gactatggactctttcaaagggatc

SEQ ID NO: 44791 - DNA, 25 bp, Probe Sequence
actatggactctttcaaagggatct

SEQ ID NO: 44792 - DNA, 25 bp, Probe Sequence
ttcatggactatggactctttcaaa

SEQ ID NO: 44793 - DNA, 25 bp, Probe Sequence
tttcatggactatggactctttcaa

SEQ ID NO: 44794 - DNA, 25 bp, Probe Sequence
ttgtttcatggactatggactcttt

SEQ ID NO: 44795 - DNA, 25 bp, Probe Sequence
tttgtttcatggactatggactctt

SEQ ID NO: 44796 - DNA, 25 bp, Probe Sequence
tcatggactatggactctttcaaag

SEQ ID NO: 44797 - DNA, 25 bp, Probe Sequence
gtttcatggactatggactctttca

SEQ ID NO: 44798 - DNA, 25 bp, Probe Sequence
tgtttcatggactatggactctttc

SEQ ID NO: 44799 - DNA, 25 bp, Probe Sequence
agacctttagactcattgtaagttg

SEQ ID NO: 44800 - DNA, 25 bp, Probe Sequence
cagacctttagactcattgtaagtt

SEQ ID NO: 44801 - DNA, 25 bp, Probe Sequence
tatggactctttcaaagggatctga

SEQ ID NO: 44802 - DNA, 25 bp, Probe Sequence
gccaatactaagaataacaagaagc

SEQ ID NO: 44803 - DNA, 25 bp, Probe Sequence
ggccaatactaagaataacaagaag

SEQ ID NO: 44804 - DNA, 25 bp, Probe Sequence
gaatgtgaatataacttttgtgggc

SEQ ID NO: 44805 - DNA, 25 bp, Probe Sequence
tgggccaatactaagaataacaaga

SEQ ID NO: 44806 - DNA, 25 bp, Probe Sequence
gtgggccaatactaagaataacaag

SEQ ID NO: 44807 - DNA, 25 bp, Probe Sequence
gggccaatactaagaataacaagaa

SEQ ID NO: 44808 - DNA, 25 bp, Probe Sequence
tttgtgggccaatactaagaataac

SEQ ID NO: 44809 - DNA, 25 bp, Probe Sequence
tgtgggccaatactaagaataacaa

SEQ ID NO: 44810 - DNA, 25 bp, Probe Sequence
ttgtgggccaatactaagaataaca

SEQ ID NO: 44811 - DNA, 25 bp, Probe Sequence
agaatgtgaatataacttttgtggg

SEQ ID NO: 44812 - DNA, 25 bp, Probe Sequence
aatgtgaatataacttttgtgggcc

SEQ ID NO: 44813 - DNA, 25 bp, Probe Sequence
atgtgaatataacttttgtgggcca

SEQ ID NO: 44814 - DNA, 25 bp, Probe Sequence
gtgaatataacttttgtgggccaat

SEQ ID NO: 44815 - DNA, 25 bp, Probe Sequence
taacttttgtgggccaatactaaga

SEQ ID NO: 44816 - DNA, 25 bp, Probe Sequence
acttttgtgggccaatactaagaat

SEQ ID NO: 44817 - DNA, 25 bp, Probe Sequence
ataacttttgtgggccaatactaag

SEQ ID NO: 44818 - DNA, 25 bp, Probe Sequence
aacttttgtgggccaatactaagaa

SEQ ID NO: 44819 - DNA, 25 bp, Probe Sequence
cttttgtgggccaatactaagaata

SEQ ID NO: 44820 - DNA, 25 bp, Probe Sequence
tgtgaatataacttttgtgggccaa

SEQ ID NO: 44821 - DNA, 25 bp, Probe Sequence
aatataacttttgtgggccaatact

SEQ ID NO: 44822 - DNA, 25 bp, Probe Sequence
tgaatataacttttgtgggccaata

SEQ ID NO: 44823 - DNA, 25 bp, Probe Sequence
ttttgtgggccaatactaagaataa

SEQ ID NO: 44824 - DNA, 25 bp, Probe Sequence
gaatataacttttgtgggccaatac

SEQ ID NO: 44825 - DNA, 25 bp, Probe Sequence
tataacttttgtgggccaatactaa

SEQ ID NO: 44826 - DNA, 25 bp, Probe Sequence
atataacttttgtgggccaatacta

SEQ ID NO: 44827 - DNA, 25 bp, Probe Sequence
ggagtgtcagtatgttgaatcagta

SEQ ID NO: 44828 - DNA, 25 bp, Probe Sequence
attggagtgtcagtatgttgaatca

SEQ ID NO: 44829 - DNA, 25 bp, Probe Sequence
cattggagtgtcagtatgttgaatc

SEQ ID NO: 44830 - DNA, 25 bp, Probe Sequence
agtgtcagtatgttgaatcagtagt

SEQ ID NO: 44831 - DNA, 25 bp, Probe Sequence
ttggagtgtcagtatgttgaatcag

SEQ ID NO: 44832 - DNA, 25 bp, Probe Sequence
gagtgtcagtatgttgaatcagtag

SEQ ID NO: 44833 - DNA, 25 bp, Probe Sequence
gtgtcagtatgttgaatcagtagtt

SEQ ID NO: 44834 - DNA, 25 bp, Probe Sequence
tggagtgtcagtatgttgaatcagt

SEQ ID NO: 44835 - DNA, 25 bp, Probe Sequence
gcattggagtgtcagtatgttgaat

SEQ ID NO: 44836 - DNA, 25 bp, Probe Sequence
ttctgaagtggaagagctagatagt

SEQ ID NO: 44837 - DNA, 25 bp, Probe Sequence
attctgaagtggaagagctagatag

SEQ ID NO: 44838 - DNA, 25 bp, Probe Sequence
gattctgaagtggaagagctagata

SEQ ID NO: 44839 - DNA, 25 bp, Probe Sequence
tgattctgaagtggaagagctagat

SEQ ID NO: 44840 - DNA, 25 bp, Probe Sequence
agcattggagtgtcagtatgttgaa

SEQ ID NO: 44841 - DNA, 25 bp, Probe Sequence
aagcattggagtgtcagtatgttga

SEQ ID NO: 44842 - DNA, 25 bp, Probe Sequence
tctgaagtggaagagctagatagtg

SEQ ID NO: 44843 - DNA, 25 bp, Probe Sequence
caactcagcaccttatatctcgaag

SEQ ID NO: 44844 - DNA, 25 bp, Probe Sequence
acaactcagcaccttatatctcgaa

SEQ ID NO: 44845 - DNA, 25 bp, Probe Sequence
aacaactcagcaccttatatctcga

SEQ ID NO: 44846 - DNA, 25 bp, Probe Sequence
taagaataaagtggctgctcagaat

SEQ ID NO: 44847 - DNA, 25 bp, Probe Sequence
aaacaactcagcaccttatatctcg

SEQ ID NO: 44848 - DNA, 25 bp, Probe Sequence
aagaataaagtggctgctcagaatt

SEQ ID NO: 44849 - DNA, 25 bp, Probe Sequence
actcagcaccttatatctcgaagtt

SEQ ID NO: 44850 - DNA, 25 bp, Probe Sequence
aactcagcaccttatatctcgaagt

SEQ ID NO: 44851 - DNA, 25 bp, Probe Sequence
tgctttctgctctttacatttcttt

SEQ ID NO: 44852 - DNA, 25 bp, Probe Sequence
ttgctttctgctctttacatttctt

SEQ ID NO: 44853 - DNA, 25 bp, Probe Sequence
attgctttctgctctttacatttct

SEQ ID NO: 44854 - DNA, 25 bp, Probe Sequence
ttcactgtgatgtatattgtgttgc

SEQ ID NO: 44855 - DNA, 25 bp, Probe Sequence
atctgacaggtgaattggatggttc

SEQ ID NO: 44856 - DNA, 25 bp, Probe Sequence
ctgaattgctttctgctctttacat

SEQ ID NO: 44857 - DNA, 25 bp, Probe Sequence
tgaattgctttctgctctttacatt

SEQ ID NO: 44858 - DNA, 25 bp, Probe Sequence
aattgctttctgctctttacatttc

SEQ ID NO: 44859 - DNA, 25 bp, Probe Sequence
tagtcattaacccatctctgaactg

SEQ ID NO: 44860 - DNA, 25 bp, Probe Sequence
gaattgctttctgctctttacattt

SEQ ID NO: 44861 - DNA, 25 bp, Probe Sequence
caggtgaattggatggttctcagaa

SEQ ID NO: 44862 - DNA, 25 bp, Probe Sequence
aaattagtttgggttctctacatgc

SEQ ID NO: 44863 - DNA, 25 bp, Probe Sequence
ctagtcattaacccatctctgaact

SEQ ID NO: 44864 - DNA, 25 bp, Probe Sequence
ttcattctgttatctcaggtgagct

SEQ ID NO: 44865 - DNA, 25 bp, Probe Sequence
cctgaattgctttctgctctttaca

SEQ ID NO: 44866 - DNA, 25 bp, Probe Sequence
tcactgtgatgtatattgtgttgca

SEQ ID NO: 44867 - DNA, 25 bp, Probe Sequence
ctgacaggtgaattggatggttctc

SEQ ID NO: 44868 - DNA, 25 bp, Probe Sequence
agcctgtttctatcctgtttaataa

SEQ ID NO: 44869 - DNA, 25 bp, Probe Sequence
gacaggtgaattggatggttctcag

SEQ ID NO: 44870 - DNA, 25 bp, Probe Sequence
tcattctgttatctcaggtgagctg

SEQ ID NO: 44871 - DNA, 25 bp, Probe Sequence
cagcctgtttctatcctgtttaata

SEQ ID NO: 44872 - DNA, 25 bp, Probe Sequence
tctgacaggtgaattggatggttct

SEQ ID NO: 44873 - DNA, 25 bp, Probe Sequence
ttacttggtttgtgaatccatcttg

SEQ ID NO: 44874 - DNA, 25 bp, Probe Sequence
attaacccatctctgaactggtaga

SEQ ID NO: 44875 - DNA, 25 bp, Probe Sequence
ctactacatgattggtgagcagaag

SEQ ID NO: 44876 - DNA, 25 bp, Probe Sequence
gtgacctatgtgtgtgatcttgaag

SEQ ID NO: 44877 - DNA, 25 bp, Probe Sequence
ctacatgattggtgagcagaagttc

SEQ ID NO: 44878 - DNA, 25 bp, Probe Sequence
tactacatgattggtgagcagaagt

SEQ ID NO: 44879 - DNA, 25 bp, Probe Sequence
tacatgattggtgagcagaagttct

SEQ ID NO: 44880 - DNA, 25 bp, Probe Sequence
agagaaggaggagaagttgagacag

SEQ ID NO: 44881 - DNA, 25 bp, Probe Sequence
ggtgacctatgtgtgtgatcttgaa

SEQ ID NO: 44882 - DNA, 25 bp, Probe Sequence
ctcaagagcagctactacatgattg

SEQ ID NO: 44883 - DNA, 25 bp, Probe Sequence
cagagaaggaggagaagttgagaca

SEQ ID NO: 44884 - DNA, 25 bp, Probe Sequence
actacatgattggtgagcagaagtt

SEQ ID NO: 44885 - DNA, 25 bp, Probe Sequence
gtgacctcaattaaagcaattcctt

SEQ ID NO: 44886 - DNA, 25 bp, Probe Sequence
tgacctatgtgtgtgatcttgaagg

SEQ ID NO: 44887 - DNA, 25 bp, Probe Sequence
ctgtgatgcctgtgacctcaattaa

SEQ ID NO: 44888 - DNA, 25 bp, Probe Sequence
ctgtgacctcaattaaagcaattcc

SEQ ID NO: 44889 - DNA, 25 bp, Probe Sequence
cctgtgacctcaattaaagcaattc

SEQ ID NO: 44890 - DNA, 25 bp, Probe Sequence
tgtgacctcaattaaagcaattcct

SEQ ID NO: 44891 - DNA, 25 bp, Probe Sequence
aggtgatctcgcaaagttattcttc

SEQ ID NO: 44892 - DNA, 25 bp, Probe Sequence
ctatgtgtgtgatcttgaagggaac

SEQ ID NO: 44893 - DNA, 25 bp, Probe Sequence
aagagcagctactacatgattggtg

SEQ ID NO: 44894 - DNA, 25 bp, Probe Sequence
tgatctcgcaaagttattcttccac

SEQ ID NO: 44895 - DNA, 25 bp, Probe Sequence
gtgatctcgcaaagttattcttcca

SEQ ID NO: 44896 - DNA, 25 bp, Probe Sequence
tcaagagcagctactacatgattgg

SEQ ID NO: 44897 - DNA, 25 bp, Probe Sequence
gtggtgacctatgtgtgtgatcttg

SEQ ID NO: 44898 - DNA, 25 bp, Probe Sequence
gagaaggaggagaagttgagacagg

SEQ ID NO: 44899 - DNA, 25 bp, Probe Sequence
tgttatatcagcagacactccagtt

SEQ ID NO: 44900 - DNA, 25 bp, Probe Sequence
ttgttatatcagcagacactccagt

SEQ ID NO: 44901 - DNA, 25 bp, Probe Sequence
atcaatctggcttctgcattactat

SEQ ID NO: 44902 - DNA, 25 bp, Probe Sequence
tggcttctgcattactattaactct

SEQ ID NO: 44903 - DNA, 25 bp, Probe Sequence
tctggcttctgcattactattaact

SEQ ID NO: 44904 - DNA, 25 bp, Probe Sequence
tcaatctggcttctgcattactatt

SEQ ID NO: 44905 - DNA, 25 bp, Probe Sequence
aatcaatctggcttctgcattacta

SEQ ID NO: 44906 - DNA, 25 bp, Probe Sequence
ggcttctgcattactattaactctg

SEQ ID NO: 44907 - DNA, 25 bp, Probe Sequence
ctggcttctgcattactattaactc

SEQ ID NO: 44908 - DNA, 25 bp, Probe Sequence
aatctgtgaagcctttatctatggg

SEQ ID NO: 44909 - DNA, 25 bp, Probe Sequence
caatctgtgaagcctttatctatgg

SEQ ID NO: 44910 - DNA, 25 bp, Probe Sequence
ttcacttaaactttgtcacttctgc

SEQ ID NO: 44911 - DNA, 25 bp, Probe Sequence
cttaaactttgtcacttctgctgta

SEQ ID NO: 44912 - DNA, 25 bp, Probe Sequence
atctggcttctgcattactattaac

SEQ ID NO: 44913 - DNA, 25 bp, Probe Sequence
caatctggcttctgcattactatta

SEQ ID NO: 44914 - DNA, 25 bp, Probe Sequence
ttatatcagcagacactccagtttg

SEQ ID NO: 44915 - DNA, 25 bp, Probe Sequence
gttatatcagcagacactccagttt

SEQ ID NO: 44916 - DNA, 25 bp, Probe Sequence
cacttaaactttgtcacttctgctg

SEQ ID NO: 44917 - DNA, 25 bp, Probe Sequence
tcacttaaactttgtcacttctgct

SEQ ID NO: 44918 - DNA, 25 bp, Probe Sequence
atctgtgaagcctttatctatggga

SEQ ID NO: 44919 - DNA, 25 bp, Probe Sequence
acttaaactttgtcacttctgctgt

SEQ ID NO: 44920 - DNA, 25 bp, Probe Sequence
ttattatgaaccgcaatatgggagg

SEQ ID NO: 44921 - DNA, 25 bp, Probe Sequence
tttattatgaaccgcaatatgggag

SEQ ID NO: 44922 - DNA, 25 bp, Probe Sequence
ttgaatcaatctggcttctgcatta

SEQ ID NO: 44923 - DNA, 25 bp, Probe Sequence
cggttccatccaaatacactttctg

SEQ ID NO: 44924 - DNA, 25 bp, Probe Sequence
cttctggttgattaatgagggcatg

SEQ ID NO: 44925 - DNA, 25 bp, Probe Sequence
ggttccatccaaatacactttctgg

SEQ ID NO: 44926 - DNA, 25 bp, Probe Sequence
ttctggttgattaatgagggcatgg

SEQ ID NO: 44927 - DNA, 25 bp, Probe Sequence
gcttctggttgattaatgagggcat

SEQ ID NO: 44928 - DNA, 25 bp, Probe Sequence
ttccggttccatccaaatacacttt

SEQ ID NO: 44929 - DNA, 25 bp, Probe Sequence
ccaagcttctggttgattaatgagg

SEQ ID NO: 44930 - DNA, 25 bp, Probe Sequence
ccggttccatccaaatacactttct

SEQ ID NO: 44931 - DNA, 25 bp, Probe Sequence
tccggttccatccaaatacactttc

SEQ ID NO: 44932 - DNA, 25 bp, Probe Sequence
gccaagcttctggttgattaatgag

SEQ ID NO: 44933 - DNA, 25 bp, Probe Sequence
gttccggttccatccaaatacactt

SEQ ID NO: 44934 - DNA, 25 bp, Probe Sequence
caagcttctggttgattaatgaggg

SEQ ID NO: 44935 - DNA, 25 bp, Probe Sequence
agcttctggttgattaatgagggca

SEQ ID NO: 44936 - DNA, 25 bp, Probe Sequence
cctaccttttgtggaaccagtgatg

SEQ ID NO: 44937 - DNA, 25 bp, Probe Sequence
catccaaatacactttctggaacaa

SEQ ID NO: 44938 - DNA, 25 bp, Probe Sequence
tctggttgattaatgagggcatggg

SEQ ID NO: 44939 - DNA, 25 bp, Probe Sequence
atgttccggttccatccaaatacac

SEQ ID NO: 44940 - DNA, 25 bp, Probe Sequence
catgttccggttccatccaaataca

SEQ ID NO: 44941 - DNA, 25 bp, Probe Sequence
atccaaatacactttctggaacaaa

SEQ ID NO: 44942 - DNA, 25 bp, Probe Sequence
gaaccagtgatgcctcaaagacagt

SEQ ID NO: 44943 - DNA, 25 bp, Probe Sequence
tccatccaaatacactttctggaac

SEQ ID NO: 44944 - DNA, 25 bp, Probe Sequence
gttccatccaaatacactttctgga

SEQ ID NO: 44945 - DNA, 25 bp, Probe Sequence
ccatccaaatacactttctggaaca

SEQ ID NO: 44946 - DNA, 25 bp, Probe Sequence
ctcaagaccttcccctaccttttgt

SEQ ID NO: 44947 - DNA, 25 bp, Probe Sequence
ataacttaattggctgcataatcgg

SEQ ID NO: 44948 - DNA, 25 bp, Probe Sequence
tctacacaactttatcatccgctaa

SEQ ID NO: 44949 - DNA, 25 bp, Probe Sequence
ttctacacaactttatcatccgcta

SEQ ID NO: 44950 - DNA, 25 bp, Probe Sequence
tttctacacaactttatcatccgct

SEQ ID NO: 44951 - DNA, 25 bp, Probe Sequence
tacacaactttatcatccgctaaga

SEQ ID NO: 44952 - DNA, 25 bp, Probe Sequence
ctacacaactttatcatccgctaag

SEQ ID NO: 44953 - DNA, 25 bp, Probe Sequence
cacaactttatcatccgctaagaat

SEQ ID NO: 44954 - DNA, 25 bp, Probe Sequence
acacaactttatcatccgctaagaa

SEQ ID NO: 44955 - DNA, 25 bp, Probe Sequence
gtttctacacaactttatcatccgc

SEQ ID NO: 44956 - DNA, 25 bp, Probe Sequence
tgtgtaatttctggtcagtgattcc

SEQ ID NO: 44957 - DNA, 25 bp, Probe Sequence
aataacttaattggctgcataatcg

SEQ ID NO: 44958 - DNA, 25 bp, Probe Sequence
acaactttatcatccgctaagaatt

SEQ ID NO: 44959 - DNA, 25 bp, Probe Sequence
ccagtatctaatcaatgccaggctt

SEQ ID NO: 44960 - DNA, 25 bp, Probe Sequence
ccatgatccaactgtgtaatttctg

SEQ ID NO: 44961 - DNA, 25 bp, Probe Sequence
ctgtgtaatttctggtcagtgattc

SEQ ID NO: 44962 - DNA, 25 bp, Probe Sequence
ctctggtaggcaggttactatcact

SEQ ID NO: 44963 - DNA, 25 bp, Probe Sequence
cgataagaaatgtaagagtggaatg

SEQ ID NO: 44964 - DNA, 25 bp, Probe Sequence
cccatgatccaactgtgtaatttct

SEQ ID NO: 44965 - DNA, 25 bp, Probe Sequence
tcccatgatccaactgtgtaatttc

SEQ ID NO: 44966 - DNA, 25 bp, Probe Sequence
ctcccatgatccaactgtgtaattt

SEQ ID NO: 44967 - DNA, 25 bp, Probe Sequence
agtatctaatcaatgccaggctttc

SEQ ID NO: 44968 - DNA, 25 bp, Probe Sequence
cagtatctaatcaatgccaggcttt

SEQ ID NO: 44969 - DNA, 25 bp, Probe Sequence
caactttatcatccgctaagaattt

SEQ ID NO: 44970 - DNA, 25 bp, Probe Sequence
tctggtaggcaggttactatcactg

SEQ ID NO: 44971 - DNA, 25 bp, Probe Sequence
ggtatctcttagacttaggaatgtg

SEQ ID NO: 44972 - DNA, 25 bp, Probe Sequence
tctcttagacttaggaatgtgtcaa

SEQ ID NO: 44973 - DNA, 25 bp, Probe Sequence
atctcttagacttaggaatgtgtca

SEQ ID NO: 44974 - DNA, 25 bp, Probe Sequence
gtatctcttagacttaggaatgtgt

SEQ ID NO: 44975 - DNA, 25 bp, Probe Sequence
ttgaccactcttcagagaatggata

SEQ ID NO: 44976 - DNA, 25 bp, Probe Sequence
accactcttcagagaatggatacaa

SEQ ID NO: 44977 - DNA, 25 bp, Probe Sequence
gccatcttagatttctttgttcctg

SEQ ID NO: 44978 - DNA, 25 bp, Probe Sequence
agccatcttagatttctttgttcct

SEQ ID NO: 44979 - DNA, 25 bp, Probe Sequence
cagccatcttagatttctttgttcc

SEQ ID NO: 44980 - DNA, 25 bp, Probe Sequence
gctattactttgaccactcttcaga

SEQ ID NO: 44981 - DNA, 25 bp, Probe Sequence
agtgggtatctcttagacttaggaa

SEQ ID NO: 44982 - DNA, 25 bp, Probe Sequence
gcagccatcttagatttctttgttc

SEQ ID NO: 44983 - DNA, 25 bp, Probe Sequence
gggtatctcttagacttaggaatgt

SEQ ID NO: 44984 - DNA, 25 bp, Probe Sequence
tgggtatctcttagacttaggaatg

SEQ ID NO: 44985 - DNA, 25 bp, Probe Sequence
gtgggtatctcttagacttaggaat

SEQ ID NO: 44986 - DNA, 25 bp, Probe Sequence
agcagccatcttagatttctttgtt

SEQ ID NO: 44987 - DNA, 25 bp, Probe Sequence
gaccactcttcagagaatggataca

SEQ ID NO: 44988 - DNA, 25 bp, Probe Sequence
tgaccactcttcagagaatggatac

SEQ ID NO: 44989 - DNA, 25 bp, Probe Sequence
ccatcttagatttctttgttcctgt

SEQ ID NO: 44990 - DNA, 25 bp, Probe Sequence
ctgagcagccatcttagatttcttt

SEQ ID NO: 44991 - DNA, 25 bp, Probe Sequence
tagtgggtatctcttagacttagga

SEQ ID NO: 44992 - DNA, 25 bp, Probe Sequence
gagcagccatcttagatttctttgt

SEQ ID NO: 44993 - DNA, 25 bp, Probe Sequence
tgagcagccatcttagatttctttg

SEQ ID NO: 44994 - DNA, 25 bp, Probe Sequence
tagacttaggaatgtgtcaaatggg

SEQ ID NO: 44995 - DNA, 25 bp, Probe Sequence
aagtcatccagtctattcacagaag

SEQ ID NO: 44996 - DNA, 25 bp, Probe Sequence
gaagtcatccagtctattcacagaa

SEQ ID NO: 44997 - DNA, 25 bp, Probe Sequence
agtcatccagtctattcacagaagt

SEQ ID NO: 44998 - DNA, 25 bp, Probe Sequence
aatcttcaaggacagaccacagtag

SEQ ID NO: 44999 - DNA, 25 bp, Probe Sequence
gaatcttcaaggacagaccacagta

SEQ ID NO: 45000 - DNA, 25 bp, Probe Sequence
catccagtctattcacagaagtgtt

SEQ ID NO: 45001 - DNA, 25 bp, Probe Sequence
tccagtctattcacagaagtgttaa

SEQ ID NO: 45002 - DNA, 25 bp, Probe Sequence
atccagtctattcacagaagtgtta

SEQ ID NO: 45003 - DNA, 25 bp, Probe Sequence
gtcatccagtctattcacagaagtg

SEQ ID NO: 45004 - DNA, 25 bp, Probe Sequence
agagtgtcattacagtggaagactt

SEQ ID NO: 45005 - DNA, 25 bp, Probe Sequence
tcatccagtctattcacagaagtgt

SEQ ID NO: 45006 - DNA, 25 bp, Probe Sequence
aaggaagtcatccagtctattcaca

SEQ ID NO: 45007 - DNA, 25 bp, Probe Sequence
gagtgtcattacagtggaagacttc

SEQ ID NO: 45008 - DNA, 25 bp, Probe Sequence
gagacgattgatgcaggatattaca

SEQ ID NO: 45009 - DNA, 25 bp, Probe Sequence
ggaagtcatccagtctattcacaga

SEQ ID NO: 45010 - DNA, 25 bp, Probe Sequence
aggaagtcatccagtctattcacag

SEQ ID NO: 45011 - DNA, 25 bp, Probe Sequence
agacgattgatgcaggatattacat

SEQ ID NO: 45012 - DNA, 25 bp, Probe Sequence
cagagtgtcattacagtggaagact

SEQ ID NO: 45013 - DNA, 25 bp, Probe Sequence
gacgattgatgcaggatattacatt

SEQ ID NO: 45014 - DNA, 25 bp, Probe Sequence
aatgtaatgaacttatggaaagccc

SEQ ID NO: 45015 - DNA, 25 bp, Probe Sequence
ctcagaatcttcaaggacagaccac

SEQ ID NO: 45016 - DNA, 25 bp, Probe Sequence
cgagacgattgatgcaggatattac

SEQ ID NO: 45017 - DNA, 25 bp, Probe Sequence
cagaatcttcaaggacagaccacag

SEQ ID NO: 45018 - DNA, 25 bp, Probe Sequence
cttacctacatacgtgttcctagtt

SEQ ID NO: 45019 - DNA, 25 bp, Probe Sequence
ataatgaggaagaagtgagcaagag

SEQ ID NO: 45020 - DNA, 25 bp, Probe Sequence
gataatgaggaagaagtgagcaaga

SEQ ID NO: 45021 - DNA, 25 bp, Probe Sequence
tgataatgaggaagaagtgagcaag

SEQ ID NO: 45022 - DNA, 25 bp, Probe Sequence
gaggaagaagtgagcaagagatatg

SEQ ID NO: 45023 - DNA, 25 bp, Probe Sequence
gtgataatgaggaagaagtgagcaa

SEQ ID NO: 45024 - DNA, 25 bp, Probe Sequence
atgaggaagaagtgagcaagagata

SEQ ID NO: 45025 - DNA, 25 bp, Probe Sequence
tgaggaagaagtgagcaagagatat

SEQ ID NO: 45026 - DNA, 25 bp, Probe Sequence
taatgaggaagaagtgagcaagaga

SEQ ID NO: 45027 - DNA, 25 bp, Probe Sequence
cagtgataatgaggaagaagtgagc

SEQ ID NO: 45028 - DNA, 25 bp, Probe Sequence
gcagtgataatgaggaagaagtgag

SEQ ID NO: 45029 - DNA, 25 bp, Probe Sequence
gatggcagtgataatgaggaagaag

SEQ ID NO: 45030 - DNA, 25 bp, Probe Sequence
agtgataatgaggaagaagtgagca

SEQ ID NO: 45031 - DNA, 25 bp, Probe Sequence
aatgaggaagaagtgagcaagagat

SEQ ID NO: 45032 - DNA, 25 bp, Probe Sequence
atggcagtgataatgaggaagaagt

SEQ ID NO: 45033 - DNA, 25 bp, Probe Sequence
aggaagaagtgagcaagagatatgg

SEQ ID NO: 45034 - DNA, 25 bp, Probe Sequence
ggcagtgataatgaggaagaagtga

SEQ ID NO: 45035 - DNA, 25 bp, Probe Sequence
ggatggcagtgataatgaggaagaa

SEQ ID NO: 45036 - DNA, 25 bp, Probe Sequence
tggcagtgataatgaggaagaagtg

SEQ ID NO: 45037 - DNA, 25 bp, Probe Sequence
caggatggcagtgataatgaggaag

SEQ ID NO: 45038 - DNA, 25 bp, Probe Sequence
aggatggcagtgataatgaggaaga

SEQ ID NO: 45039 - DNA, 25 bp, Probe Sequence
agttactccaaagaagttcctgaaa

SEQ ID NO: 45040 - DNA, 25 bp, Probe Sequence
aagttactccaaagaagttcctgaa

SEQ ID NO: 45041 - DNA, 25 bp, Probe Sequence
aaagttactccaaagaagttcctga

SEQ ID NO: 45042 - DNA, 25 bp, Probe Sequence
gaaagttactccaaagaagttcctg

SEQ ID NO: 45043 - DNA, 25 bp, Probe Sequence
agatgctaatgaggtggaacaactt

SEQ ID NO: 45044 - DNA, 25 bp, Probe Sequence
tggctcctatgtattagatcagatt

SEQ ID NO: 45045 - DNA, 25 bp, Probe Sequence
gatgctaatgaggtggaacaacttg

SEQ ID NO: 45046 - DNA, 25 bp, Probe Sequence
gagatgctaatgaggtggaacaact

SEQ ID NO: 45047 - DNA, 25 bp, Probe Sequence
agagatgctaatgaggtggaacaac

SEQ ID NO: 45048 - DNA, 25 bp, Probe Sequence
cagagatgctaatgaggtggaacaa

SEQ ID NO: 45049 - DNA, 25 bp, Probe Sequence
ttctggctcctatgtattagatcag

SEQ ID NO: 45050 - DNA, 25 bp, Probe Sequence
ctggctcctatgtattagatcagat

SEQ ID NO: 45051 - DNA, 25 bp, Probe Sequence
gagattgaagaggttctgactccag

SEQ ID NO: 45052 - DNA, 25 bp, Probe Sequence
cccaaagacttctatgttgatgaga

SEQ ID NO: 45053 - DNA, 25 bp, Probe Sequence
tcccaaagacttctatgttgatgag

SEQ ID NO: 45054 - DNA, 25 bp, Probe Sequence
ctcccaaagacttctatgttgatga

SEQ ID NO: 45055 - DNA, 25 bp, Probe Sequence
actcccaaagacttctatgttgatg

SEQ ID NO: 45056 - DNA, 25 bp, Probe Sequence
aaatgagggagattgaagaggttct

SEQ ID NO: 45057 - DNA, 25 bp, Probe Sequence
catcttcccaagttctccatttctg

SEQ ID NO: 45058 - DNA, 25 bp, Probe Sequence
atgctaatgaggtggaacaacttgt

SEQ ID NO: 45059 - DNA, 25 bp, Probe Sequence
tttctggctcctatgtattagatca

SEQ ID NO: 45060 - DNA, 25 bp, Probe Sequence
catttctggctcctatgtattagat

SEQ ID NO: 45061 - DNA, 25 bp, Probe Sequence
aatgagggagattgaagaggttctg

SEQ ID NO: 45062 - DNA, 25 bp, Probe Sequence
ccatttctggctcctatgtattaga

SEQ ID NO: 45063 - DNA, 25 bp, Probe Sequence
tccatttctggctcctatgtattag

SEQ ID NO: 45064 - DNA, 25 bp, Probe Sequence
ctccatttctggctcctatgtatta

SEQ ID NO: 45065 - DNA, 25 bp, Probe Sequence
ctgactccagagatgctaatgaggt

SEQ ID NO: 45066 - DNA, 25 bp, Probe Sequence
ctacggatggattacaaaggagacg

SEQ ID NO: 45067 - DNA, 25 bp, Probe Sequence
atcttcttgtggagtcttctattgc

SEQ ID NO: 45068 - DNA, 25 bp, Probe Sequence
cttcttgtggagtcttctattgctg

SEQ ID NO: 45069 - DNA, 25 bp, Probe Sequence
tcttcttgtggagtcttctattgct

SEQ ID NO: 45070 - DNA, 25 bp, Probe Sequence
aatcttcttgtggagtcttctattg

SEQ ID NO: 45071 - DNA, 25 bp, Probe Sequence
gcagaaggtatggatatagaagaag

SEQ ID NO: 45072 - DNA, 25 bp, Probe Sequence
tgaagcataatccaacagaatcaat

SEQ ID NO: 45073 - DNA, 25 bp, Probe Sequence
atgaagcataatccaacagaatcaa

SEQ ID NO: 45074 - DNA, 25 bp, Probe Sequence
aggtatggatatagaagaagtggaa

SEQ ID NO: 45075 - DNA, 25 bp, Probe Sequence
aaggtatggatatagaagaagtgga

SEQ ID NO: 45076 - DNA, 25 bp, Probe Sequence
tcttgtggagtcttctattgctgtt

SEQ ID NO: 45077 - DNA, 25 bp, Probe Sequence
ttcttgtggagtcttctattgctgt

SEQ ID NO: 45078 - DNA, 25 bp, Probe Sequence
gaagcataatccaacagaatcaatt

SEQ ID NO: 45079 - DNA, 25 bp, Probe Sequence
caatcttcttgtggagtcttctatt

SEQ ID NO: 45080 - DNA, 25 bp, Probe Sequence
gaaggtatggatatagaagaagtgg

SEQ ID NO: 45081 - DNA, 25 bp, Probe Sequence
aagcataatccaacagaatcaattc

SEQ ID NO: 45082 - DNA, 25 bp, Probe Sequence
taatcagaagtcagtttgggagaag

SEQ ID NO: 45083 - DNA, 25 bp, Probe Sequence
tatgaagcataatccaacagaatca

SEQ ID NO: 45084 - DNA, 25 bp, Probe Sequence
gcaagaagaggaagtagaaataagc

SEQ ID NO: 45085 - DNA, 25 bp, Probe Sequence
ataatcagaagtcagtttgggagaa

SEQ ID NO: 45086 - DNA, 25 bp, Probe Sequence
aataatcagaagtcagtttgggaga

SEQ ID NO: 45087 - DNA, 25 bp, Probe Sequence
gaataatcagaagtcagtttgggag

SEQ ID NO: 45088 - DNA, 25 bp, Probe Sequence
cttgtcctggtgaatgctatttatt

SEQ ID NO: 45089 - DNA, 25 bp, Probe Sequence
caagaagaggaagtagaaataagcc

SEQ ID NO: 45090 - DNA, 25 bp, Probe Sequence
agaaggtatggatatagaagaagtg

SEQ ID NO: 45091 - DNA, 25 bp, Probe Sequence
ataagaccatcatcagagtgcctat

SEQ ID NO: 45092 - DNA, 25 bp, Probe Sequence
gataagaccatcatcagagtgccta

SEQ ID NO: 45093 - DNA, 25 bp, Probe Sequence
taagaccatcatcagagtgcctatg

SEQ ID NO: 45094 - DNA, 25 bp, Probe Sequence
catcatcaaggagtacatcaccaac

SEQ ID NO: 45095 - DNA, 25 bp, Probe Sequence
tcatcatcaaggagtacatcaccaa

SEQ ID NO: 45096 - DNA, 25 bp, Probe Sequence
ctggtcatcatcaaggagtacatca

SEQ ID NO: 45097 - DNA, 25 bp, Probe Sequence
atcatcaaggagtacatcaccaact

SEQ ID NO: 45098 - DNA, 25 bp, Probe Sequence
aagtatcagacagtcatgttcaacc

SEQ ID NO: 45099 - DNA, 25 bp, Probe Sequence
tcatcaaggagtacatcaccaactt

SEQ ID NO: 45100 - DNA, 25 bp, Probe Sequence
gtcatcatcaaggagtacatcacca

SEQ ID NO: 45101 - DNA, 25 bp, Probe Sequence
tggtcatcatcaaggagtacatcac

SEQ ID NO: 45102 - DNA, 25 bp, Probe Sequence
tctaagtatcagacagtcatgttca

SEQ ID NO: 45103 - DNA, 25 bp, Probe Sequence
catttctggaacctacaaactcaag

SEQ ID NO: 45104 - DNA, 25 bp, Probe Sequence
taagtatcagacagtcatgttcaac

SEQ ID NO: 45105 - DNA, 25 bp, Probe Sequence
aatatccagagagcctttgacataa

SEQ ID NO: 45106 - DNA, 25 bp, Probe Sequence
aaatatccagagagcctttgacata

SEQ ID NO: 45107 - DNA, 25 bp, Probe Sequence
ctaagtatcagacagtcatgttcaa

SEQ ID NO: 45108 - DNA, 25 bp, Probe Sequence
atatccagagagcctttgacataag

SEQ ID NO: 45109 - DNA, 25 bp, Probe Sequence
atttctggaacctacaaactcaaga

SEQ ID NO: 45110 - DNA, 25 bp, Probe Sequence
tttctggaacctacaaactcaagag

SEQ ID NO: 45111 - DNA, 25 bp, Probe Sequence
ttctggaacctacaaactcaagaga

SEQ ID NO: 45112 - DNA, 25 bp, Probe Sequence
cctggtcatcatcaaggagtacatc

SEQ ID NO: 45113 - DNA, 25 bp, Probe Sequence
atcaaggagtacatcaccaactttc

SEQ ID NO: 45114 - DNA, 25 bp, Probe Sequence
gtatcagacagtcatgttcaaccga

SEQ ID NO: 45115 - DNA, 25 bp, Probe Sequence
tcggagtaaatacatacacccagat

SEQ ID NO: 45116 - DNA, 25 bp, Probe Sequence
taaatacatacacccagatgacgag

SEQ ID NO: 45117 - DNA, 25 bp, Probe Sequence
gtaaatacatacacccagatgacga

SEQ ID NO: 45118 - DNA, 25 bp, Probe Sequence
agtaaatacatacacccagatgacg

SEQ ID NO: 45119 - DNA, 25 bp, Probe Sequence
ggagtaaatacatacacccagatga

SEQ ID NO: 45120 - DNA, 25 bp, Probe Sequence
cagagcagggattctatcaataagg

SEQ ID NO: 45121 - DNA, 25 bp, Probe Sequence
ccagagcagggattctatcaataag

SEQ ID NO: 45122 - DNA, 25 bp, Probe Sequence
cggagtaaatacatacacccagatg

SEQ ID NO: 45123 - DNA, 25 bp, Probe Sequence
gagtaaatacatacacccagatgac

SEQ ID NO: 45124 - DNA, 25 bp, Probe Sequence
ctcggagtaaatacatacacccaga

SEQ ID NO: 45125 - DNA, 25 bp, Probe Sequence
aggctgttaagatgctggatgagat

SEQ ID NO: 45126 - DNA, 25 bp, Probe Sequence
agagcagggattctatcaataaggc

SEQ ID NO: 45127 - DNA, 25 bp, Probe Sequence
ggctgttaagatgctggatgagatc

SEQ ID NO: 45128 - DNA, 25 bp, Probe Sequence
cctcggagtaaatacatacacccag

SEQ ID NO: 45129 - DNA, 25 bp, Probe Sequence
cattgtaaataaagcctggcacttg

SEQ ID NO: 45130 - DNA, 25 bp, Probe Sequence
tcctcggagtaaatacatacaccca

SEQ ID NO: 45131 - DNA, 25 bp, Probe Sequence
aaatacatacacccagatgacgagc

SEQ ID NO: 45132 - DNA, 25 bp, Probe Sequence
tttctggtggaggactattgctttg

SEQ ID NO: 45133 - DNA, 25 bp, Probe Sequence
gtttctggtggaggactattgcttt

SEQ ID NO: 45134 - DNA, 25 bp, Probe Sequence
gaggctgttaagatgctggatgaga

SEQ ID NO: 45135 - DNA, 25 bp, Probe Sequence
ggaagtttctggtggaggactattg

SEQ ID NO: 45136 - DNA, 25 bp, Probe Sequence
attgtaaataaagcctggcacttgc

SEQ ID NO: 45137 - DNA, 25 bp, Probe Sequence
gcattgtaaataaagcctggcactt

SEQ ID NO: 45138 - DNA, 25 bp, Probe Sequence
gcagtgtcggcattgtaaataaagc

SEQ ID NO: 45139 - DNA, 25 bp, Probe Sequence
taacgcagtaagaattaggtggaat

SEQ ID NO: 45140 - DNA, 25 bp, Probe Sequence
atgagagttgtatgtaaccagtgat

SEQ ID NO: 45141 - DNA, 25 bp, Probe Sequence
tgagagttgtatgtaaccagtgata

SEQ ID NO: 45142 - DNA, 25 bp, Probe Sequence
gaatgttcagttctagccaaggtag

SEQ ID NO: 45143 - DNA, 25 bp, Probe Sequence
aacgcagtaagaattaggtggaatt

SEQ ID NO: 45144 - DNA, 25 bp, Probe Sequence
gagttgtatgtaaccagtgatatga

SEQ ID NO: 45145 - DNA, 25 bp, Probe Sequence
catgagagttgtatgtaaccagtga

SEQ ID NO: 45146 - DNA, 25 bp, Probe Sequence
ctaacgcagtaagaattaggtggaa

SEQ ID NO: 45147 - DNA, 25 bp, Probe Sequence
agagttgtatgtaaccagtgatatg

SEQ ID NO: 45148 - DNA, 25 bp, Probe Sequence
ggactacgataatgtgtactatgac

SEQ ID NO: 45149 - DNA, 25 bp, Probe Sequence
cagaagtaagcctggacattgttaa

SEQ ID NO: 45150 - DNA, 25 bp, Probe Sequence
tctaacgcagtaagaattaggtgga

SEQ ID NO: 45151 - DNA, 25 bp, Probe Sequence
gagagttgtatgtaaccagtgatat

SEQ ID NO: 45152 - DNA, 25 bp, Probe Sequence
ttgtagaagtagctgtcatagagtg

SEQ ID NO: 45153 - DNA, 25 bp, Probe Sequence
aggtatgttcaagtcataagtaggt

SEQ ID NO: 45154 - DNA, 25 bp, Probe Sequence
tgaatgttcagttctagccaaggta

SEQ ID NO: 45155 - DNA, 25 bp, Probe Sequence
aattccttgctgttagaagaatgtg

SEQ ID NO: 45156 - DNA, 25 bp, Probe Sequence
gcatgagagttgtatgtaaccagtg

SEQ ID NO: 45157 - DNA, 25 bp, Probe Sequence
tattgaacagcttatcttccacttg

SEQ ID NO: 45158 - DNA, 25 bp, Probe Sequence
agttgtatgtaaccagtgatatgat

SEQ ID NO: 45159 - DNA, 25 bp, Probe Sequence
atgttcagttctagccaaggtagat

SEQ ID NO: 45160 - DNA, 25 bp, Probe Sequence
gaagtagctgtcatagagtgaagaa

SEQ ID NO: 45161 - DNA, 25 bp, Probe Sequence
tgtagaagtagctgtcatagagtga

SEQ ID NO: 45162 - DNA, 25 bp, Probe Sequence
agaagtagctgtcatagagtgaaga

SEQ ID NO: 45163 - DNA, 25 bp, Probe Sequence
ttctcgttctatatctcatcacagc

SEQ ID NO: 45164 - DNA, 25 bp, Probe Sequence
ttaggagttaagagagaagaggtga

SEQ ID NO: 45165 - DNA, 25 bp, Probe Sequence
aggagttaagagagaagaggtgata

SEQ ID NO: 45166 - DNA, 25 bp, Probe Sequence
taggagttaagagagaagaggtgat

SEQ ID NO: 45167 - DNA, 25 bp, Probe Sequence
atcattgaacacacataccagagat

SEQ ID NO: 45168 - DNA, 25 bp, Probe Sequence
tatcattgaacacacataccagaga

SEQ ID NO: 45169 - DNA, 25 bp, Probe Sequence
ggagttaagagagaagaggtgataa

SEQ ID NO: 45170 - DNA, 25 bp, Probe Sequence
attaggagttaagagagaagaggtg

SEQ ID NO: 45171 - DNA, 25 bp, Probe Sequence
tcattgaacacacataccagagatg

SEQ ID NO: 45172 - DNA, 25 bp, Probe Sequence
atatcattgaacacacataccagag

SEQ ID NO: 45173 - DNA, 25 bp, Probe Sequence
tctcgttctatatctcatcacagcg

SEQ ID NO: 45174 - DNA, 25 bp, Probe Sequence
aattaggagttaagagagaagaggt

SEQ ID NO: 45175 - DNA, 25 bp, Probe Sequence
tatgtagtagaagatggagcaacag

SEQ ID NO: 45176 - DNA, 25 bp, Probe Sequence
atgacaacaacattactaacctgtg

SEQ ID NO: 45177 - DNA, 25 bp, Probe Sequence
aacaacattactaacctgtggagtc

SEQ ID NO: 45178 - DNA, 25 bp, Probe Sequence
ttatgtagtagaagatggagcaaca

SEQ ID NO: 45179 - DNA, 25 bp, Probe Sequence
caacaacattactaacctgtggagt

SEQ ID NO: 45180 - DNA, 25 bp, Probe Sequence
acaacaacattactaacctgtggag

SEQ ID NO: 45181 - DNA, 25 bp, Probe Sequence
gacaacaacattactaacctgtgga

SEQ ID NO: 45182 - DNA, 25 bp, Probe Sequence
acagtagatggacttctcagaactt

SEQ ID NO: 45183 - DNA, 25 bp, Probe Sequence
gattctcgttctatatctcatcaca

SEQ ID NO: 45184 - DNA, 25 bp, Probe Sequence
attctcgttctatatctcatcacag

SEQ ID NO: 45185 - DNA, 25 bp, Probe Sequence
atgtagtagaagatggagcaacagt

SEQ ID NO: 45186 - DNA, 25 bp, Probe Sequence
tgacaacaacattactaacctgtgg

SEQ ID NO: 45187 - DNA, 25 bp, Probe Sequence
caatgcttatgctgtgttatatgac

SEQ ID NO: 45188 - DNA, 25 bp, Probe Sequence
gcttatgctgtgttatatgacatca

SEQ ID NO: 45189 - DNA, 25 bp, Probe Sequence
tgcttatgctgtgttatatgacatc

SEQ ID NO: 45190 - DNA, 25 bp, Probe Sequence
aatgcttatgctgtgttatatgaca

SEQ ID NO: 45191 - DNA, 25 bp, Probe Sequence
tatgacatcatcctgaagaacttcg

SEQ ID NO: 45192 - DNA, 25 bp, Probe Sequence
atgctgtgttatatgacatcatcct

SEQ ID NO: 45193 - DNA, 25 bp, Probe Sequence
atgcttatgctgtgttatatgacat

SEQ ID NO: 45194 - DNA, 25 bp, Probe Sequence
gctgtgttatatgacatcatcctga

SEQ ID NO: 45195 - DNA, 25 bp, Probe Sequence
tgctgtgttatatgacatcatcctg

SEQ ID NO: 45196 - DNA, 25 bp, Probe Sequence
tatgctgtgttatatgacatcatcc

SEQ ID NO: 45197 - DNA, 25 bp, Probe Sequence
atatgacatcatcctgaagaacttc

SEQ ID NO: 45198 - DNA, 25 bp, Probe Sequence
tgtgttatatgacatcatcctgaag

SEQ ID NO: 45199 - DNA, 25 bp, Probe Sequence
ctgtgttatatgacatcatcctgaa

SEQ ID NO: 45200 - DNA, 25 bp, Probe Sequence
gtgttatatgacatcatcctgaaga

SEQ ID NO: 45201 - DNA, 25 bp, Probe Sequence
catcatcctgaagaacttcgagaag

SEQ ID NO: 45202 - DNA, 25 bp, Probe Sequence
agtcaaggagaaagagaaagaggag

SEQ ID NO: 45203 - DNA, 25 bp, Probe Sequence
gcttccacactcaaatctctaagta

SEQ ID NO: 45204 - DNA, 25 bp, Probe Sequence
cagtcaaggagaaagagaaagagga

SEQ ID NO: 45205 - DNA, 25 bp, Probe Sequence
taagtatttctctgagcgtggtgat

SEQ ID NO: 45206 - DNA, 25 bp, Probe Sequence
atctctaagtatttctctgagcgtg

SEQ ID NO: 45207 - DNA, 25 bp, Probe Sequence
atgaagccaacttgagcaatctgaa

SEQ ID NO: 45208 - DNA, 25 bp, Probe Sequence
aatgaagccaacttgagcaatctga

SEQ ID NO: 45209 - DNA, 25 bp, Probe Sequence
gttatatgacatcatcctgaagaac

SEQ ID NO: 45210 - DNA, 25 bp, Probe Sequence
acatcatcctgaagaacttcgagaa

SEQ ID NO: 45211 - DNA, 25 bp, Probe Sequence
catccagttcatccagtcctacttc

SEQ ID NO: 45212 - DNA, 25 bp, Probe Sequence
ctattgaggactcctacacgaagat

SEQ ID NO: 45213 - DNA, 25 bp, Probe Sequence
tattgaggactcctacacgaagatc

SEQ ID NO: 45214 - DNA, 25 bp, Probe Sequence
actattgaggactcctacacgaaga

SEQ ID NO: 45215 - DNA, 25 bp, Probe Sequence
cactattgaggactcctacacgaag

SEQ ID NO: 45216 - DNA, 25 bp, Probe Sequence
ccatccagttcatccagtcctactt

SEQ ID NO: 45217 - DNA, 25 bp, Probe Sequence
atccagttcatccagtcctacttcg

SEQ ID NO: 45218 - DNA, 25 bp, Probe Sequence
cacatcacatacccacccttacttc

SEQ ID NO: 45219 - DNA, 25 bp, Probe Sequence
gttcatccagtcctacttcgtgtct

SEQ ID NO: 45220 - DNA, 25 bp, Probe Sequence
agttcatccagtcctacttcgtgtc

SEQ ID NO: 45221 - DNA, 25 bp, Probe Sequence
ttcatccagtcctacttcgtgtctg

SEQ ID NO: 45222 - DNA, 25 bp, Probe Sequence
cagttcatccagtcctacttcgtgt

SEQ ID NO: 45223 - DNA, 25 bp, Probe Sequence
acacatcacatacccacccttactt

SEQ ID NO: 45224 - DNA, 25 bp, Probe Sequence
aaataaatgtcactgccaacgaaaa

SEQ ID NO: 45225 - DNA, 25 bp, Probe Sequence
aaaataaatgtcactgccaacgaaa

SEQ ID NO: 45226 - DNA, 25 bp, Probe Sequence
ccactattgaggactcctacacgaa

SEQ ID NO: 45227 - DNA, 25 bp, Probe Sequence
atcacatacccacccttacttcctg

SEQ ID NO: 45228 - DNA, 25 bp, Probe Sequence
catcacatacccacccttacttcct

SEQ ID NO: 45229 - DNA, 25 bp, Probe Sequence
gaccatccagttcatccagtcctac

SEQ ID NO: 45230 - DNA, 25 bp, Probe Sequence
acatcacatacccacccttacttcc

SEQ ID NO: 45231 - DNA, 25 bp, Probe Sequence
gacacatcacatacccacccttact

SEQ ID NO: 45232 - DNA, 25 bp, Probe Sequence
accatccagttcatccagtcctact

SEQ ID NO: 45233 - DNA, 25 bp, Probe Sequence
ccagttcatccagtcctacttcgtg

SEQ ID NO: 45234 - DNA, 25 bp, Probe Sequence
catccagtcctacttcgtgtctgac

SEQ ID NO: 45235 - DNA, 25 bp, Probe Sequence
tttcattaaaggcttctctctcacc

SEQ ID NO: 45236 - DNA, 25 bp, Probe Sequence
ttcattaaaggcttctctctcacca

SEQ ID NO: 45237 - DNA, 25 bp, Probe Sequence
tcattaaaggcttctctctcaccag

SEQ ID NO: 45238 - DNA, 25 bp, Probe Sequence
gtgatgaaggagctagacgagaatg

SEQ ID NO: 45239 - DNA, 25 bp, Probe Sequence
ctttcattaaaggcttctctctcac

SEQ ID NO: 45240 - DNA, 25 bp, Probe Sequence
tctttcattaaaggcttctctctca

SEQ ID NO: 45241 - DNA, 25 bp, Probe Sequence
gcaactcatctttcattaaaggctt

SEQ ID NO: 45242 - DNA, 25 bp, Probe Sequence
agcctgcaactcatctttcattaaa

SEQ ID NO: 45243 - DNA, 25 bp, Probe Sequence
gcctgtaacaatttcttctgggaga

SEQ ID NO: 45244 - DNA, 25 bp, Probe Sequence
atgaaggagctagacgagaatggag

SEQ ID NO: 45245 - DNA, 25 bp, Probe Sequence
gatgaaggagctagacgagaatgga

SEQ ID NO: 45246 - DNA, 25 bp, Probe Sequence
actcatctttcattaaaggcttctc

SEQ ID NO: 45247 - DNA, 25 bp, Probe Sequence
aagcctgcaactcatctttcattaa

SEQ ID NO: 45248 - DNA, 25 bp, Probe Sequence
taacaatttcttctgggagaacagt

SEQ ID NO: 45249 - DNA, 25 bp, Probe Sequence
gtaacaatttcttctgggagaacag

SEQ ID NO: 45250 - DNA, 25 bp, Probe Sequence
tgtaacaatttcttctgggagaaca

SEQ ID NO: 45251 - DNA, 25 bp, Probe Sequence
ctgtaacaatttcttctgggagaac

SEQ ID NO: 45252 - DNA, 25 bp, Probe Sequence
catctttcattaaaggcttctctct

SEQ ID NO: 45253 - DNA, 25 bp, Probe Sequence
tcatctttcattaaaggcttctctc

SEQ ID NO: 45254 - DNA, 25 bp, Probe Sequence
ctcatctttcattaaaggcttctct

SEQ ID NO: 45255 - DNA, 25 bp, Probe Sequence
caagtacaagctgagcaagaaggag

SEQ ID NO: 45256 - DNA, 25 bp, Probe Sequence
aacaatttcttctgggagaacagtt

SEQ ID NO: 45257 - DNA, 25 bp, Probe Sequence
cctgtaacaatttcttctgggagaa

SEQ ID NO: 45258 - DNA, 25 bp, Probe Sequence
aactcatctttcattaaaggcttct

SEQ ID NO: 45259 - DNA, 25 bp, Probe Sequence
taacagtaacttaggagtcaggtct

SEQ ID NO: 45260 - DNA, 25 bp, Probe Sequence
ttaacagtaacttaggagtcaggtc

SEQ ID NO: 45261 - DNA, 25 bp, Probe Sequence
cttaggagtcaggtctcagtgataa

SEQ ID NO: 45262 - DNA, 25 bp, Probe Sequence
aacagtaacttaggagtcaggtctc

SEQ ID NO: 45263 - DNA, 25 bp, Probe Sequence
cagtaacttaggagtcaggtctcag

SEQ ID NO: 45264 - DNA, 25 bp, Probe Sequence
acttaggagtcaggtctcagtgata

SEQ ID NO: 45265 - DNA, 25 bp, Probe Sequence
taacttaggagtcaggtctcagtga

SEQ ID NO: 45266 - DNA, 25 bp, Probe Sequence
gtaacttaggagtcaggtctcagtg

SEQ ID NO: 45267 - DNA, 25 bp, Probe Sequence
agtaacttaggagtcaggtctcagt

SEQ ID NO: 45268 - DNA, 25 bp, Probe Sequence
acagtaacttaggagtcaggtctca

SEQ ID NO: 45269 - DNA, 25 bp, Probe Sequence
aaacaaagccttatccagcattatt

SEQ ID NO: 45270 - DNA, 25 bp, Probe Sequence
aacaaagccttatccagcattattt

SEQ ID NO: 45271 - DNA, 25 bp, Probe Sequence
aagccttatccagcattatttgaaa

SEQ ID NO: 45272 - DNA, 25 bp, Probe Sequence
aacttaggagtcaggtctcagtgat

SEQ ID NO: 45273 - DNA, 25 bp, Probe Sequence
aaagccttatccagcattatttgaa

SEQ ID NO: 45274 - DNA, 25 bp, Probe Sequence
cttagaggaaatcaaagagcaggag

SEQ ID NO: 45275 - DNA, 25 bp, Probe Sequence
ttaggagtcaggtctcagtgataaa

SEQ ID NO: 45276 - DNA, 25 bp, Probe Sequence
tgaacatgagtgagattagaaagca

SEQ ID NO: 45277 - DNA, 25 bp, Probe Sequence
taggagtcaggtctcagtgataaag

SEQ ID NO: 45278 - DNA, 25 bp, Probe Sequence
gaacatgagtgagattagaaagcag

SEQ ID NO: 45279 - DNA, 25 bp, Probe Sequence
ttgaacatgagtgagattagaaagc

SEQ ID NO: 45280 - DNA, 25 bp, Probe Sequence
ttagaggaaatcaaagagcaggagg

SEQ ID NO: 45281 - DNA, 25 bp, Probe Sequence
gagtgagattagaaagcagccaaac

SEQ ID NO: 45282 - DNA, 25 bp, Probe Sequence
atgagtgagattagaaagcagccaa

SEQ ID NO: 45283 - DNA, 25 bp, Probe Sequence
gactggctgaattatggttggtata

SEQ ID NO: 45284 - DNA, 25 bp, Probe Sequence
actggctgaattatggttggtataa

SEQ ID NO: 45285 - DNA, 25 bp, Probe Sequence
tatgtgtataactggcaggcttatt

SEQ ID NO: 45286 - DNA, 25 bp, Probe Sequence
ttatgtgtataactggcaggcttat

SEQ ID NO: 45287 - DNA, 25 bp, Probe Sequence
gaccgctagtatgttggaagttatt

SEQ ID NO: 45288 - DNA, 25 bp, Probe Sequence
gcatctggtagaccttagaatgtta

SEQ ID NO: 45289 - DNA, 25 bp, Probe Sequence
gtagcatctggtagaccttagaatg

SEQ ID NO: 45290 - DNA, 25 bp, Probe Sequence
tagcatctggtagaccttagaatgt

SEQ ID NO: 45291 - DNA, 25 bp, Probe Sequence
gaatgttacatagccagtaggttct

SEQ ID NO: 45292 - DNA, 25 bp, Probe Sequence
agaatgttacatagccagtaggttc

SEQ ID NO: 45293 - DNA, 25 bp, Probe Sequence
gaccttagaatgttacatagccagt

SEQ ID NO: 45294 - DNA, 25 bp, Probe Sequence
agaccttagaatgttacatagccag

SEQ ID NO: 45295 - DNA, 25 bp, Probe Sequence
aatgttacatagccagtaggttctt

SEQ ID NO: 45296 - DNA, 25 bp, Probe Sequence
tgaccgctagtatgttggaagttat

SEQ ID NO: 45297 - DNA, 25 bp, Probe Sequence
agcatctggtagaccttagaatgtt

SEQ ID NO: 45298 - DNA, 25 bp, Probe Sequence
atctggtagaccttagaatgttaca

SEQ ID NO: 45299 - DNA, 25 bp, Probe Sequence
tagaatgttacatagccagtaggtt

SEQ ID NO: 45300 - DNA, 25 bp, Probe Sequence
ttagaatgttacatagccagtaggt

SEQ ID NO: 45301 - DNA, 25 bp, Probe Sequence
accttagaatgttacatagccagta

SEQ ID NO: 45302 - DNA, 25 bp, Probe Sequence
ttgaccgctagtatgttggaagtta

SEQ ID NO: 45303 - DNA, 25 bp, Probe Sequence
catctggtagaccttagaatgttac

SEQ ID NO: 45304 - DNA, 25 bp, Probe Sequence
tgactggctgaattatggttggtat

SEQ ID NO: 45305 - DNA, 25 bp, Probe Sequence
tagaccttagaatgttacatagcca

SEQ ID NO: 45306 - DNA, 25 bp, Probe Sequence
ttgactggctgaattatggttggta

SEQ ID NO: 45307 - DNA, 25 bp, Probe Sequence
tatcaggattgtgttgtgtggaata

SEQ ID NO: 45308 - DNA, 25 bp, Probe Sequence
atcaggattgtgttgtgtggaatat

SEQ ID NO: 45309 - DNA, 25 bp, Probe Sequence
ctatcaggattgtgttgtgtggaat

SEQ ID NO: 45310 - DNA, 25 bp, Probe Sequence
gttctaatatggagatgttgtgtgc

SEQ ID NO: 45311 - DNA, 25 bp, Probe Sequence
cctggtcacatcattaactgctaat

SEQ ID NO: 45312 - DNA, 25 bp, Probe Sequence
tggtcacatcattaactgctaattc

SEQ ID NO: 45313 - DNA, 25 bp, Probe Sequence
ctggtcacatcattaactgctaatt

SEQ ID NO: 45314 - DNA, 25 bp, Probe Sequence
ggtcacatcattaactgctaattct

SEQ ID NO: 45315 - DNA, 25 bp, Probe Sequence
atccttgagtctccatagagtaaca

SEQ ID NO: 45316 - DNA, 25 bp, Probe Sequence
agttctaatatggagatgttgtgtg

SEQ ID NO: 45317 - DNA, 25 bp, Probe Sequence
tcctggtcacatcattaactgctaa

SEQ ID NO: 45318 - DNA, 25 bp, Probe Sequence
ttcctggtcacatcattaactgcta

SEQ ID NO: 45319 - DNA, 25 bp, Probe Sequence
aatccttgagtctccatagagtaac

SEQ ID NO: 45320 - DNA, 25 bp, Probe Sequence
tccttgagtctccatagagtaacag

SEQ ID NO: 45321 - DNA, 25 bp, Probe Sequence
ccttgagtctccatagagtaacagt

SEQ ID NO: 45322 - DNA, 25 bp, Probe Sequence
cttgagtctccatagagtaacagta

SEQ ID NO: 45323 - DNA, 25 bp, Probe Sequence
gtcacatcattaactgctaattctg

SEQ ID NO: 45324 - DNA, 25 bp, Probe Sequence
tcaggattgtgttgtgtggaatatt

SEQ ID NO: 45325 - DNA, 25 bp, Probe Sequence
ttgagtctccatagagtaacagtaa

SEQ ID NO: 45326 - DNA, 25 bp, Probe Sequence
gactactgctatcaggattgtgttg

SEQ ID NO: 45327 - DNA, 25 bp, Probe Sequence
gttgactactgctatcaggattgtg

SEQ ID NO: 45328 - DNA, 25 bp, Probe Sequence
tcacatcattaactgctaattctgt

SEQ ID NO: 45329 - DNA, 25 bp, Probe Sequence
ctgatgtaacagactctcctctcaa

SEQ ID NO: 45330 - DNA, 25 bp, Probe Sequence
aactgatgtaacagactctcctctc

SEQ ID NO: 45331 - DNA, 25 bp, Probe Sequence
gaagaagatcctggaatatgtcgag

SEQ ID NO: 45332 - DNA, 25 bp, Probe Sequence
ttggaagaagatcctggaatatgtc

SEQ ID NO: 45333 - DNA, 25 bp, Probe Sequence
aacagattctactacaattcagtca

SEQ ID NO: 45334 - DNA, 25 bp, Probe Sequence
acagattctactacaattcagtcat

SEQ ID NO: 45335 - DNA, 25 bp, Probe Sequence
gaacagattctactacaattcagtc

SEQ ID NO: 45336 - DNA, 25 bp, Probe Sequence
gccaatgagaacagattctactaca

SEQ ID NO: 45337 - DNA, 25 bp, Probe Sequence
tgccaatgagaacagattctactac

SEQ ID NO: 45338 - DNA, 25 bp, Probe Sequence
gtgccaatgagaacagattctacta

SEQ ID NO: 45339 - DNA, 25 bp, Probe Sequence
agatcctggaatatgtcgaggttat

SEQ ID NO: 45340 - DNA, 25 bp, Probe Sequence
gatcctggaatatgtcgaggttata

SEQ ID NO: 45341 - DNA, 25 bp, Probe Sequence
tggaagaagatcctggaatatgtcg

SEQ ID NO: 45342 - DNA, 25 bp, Probe Sequence
aagatcctggaatatgtcgaggtta

SEQ ID NO: 45343 - DNA, 25 bp, Probe Sequence
tacttccaaacaagaatgtctgagg

SEQ ID NO: 45344 - DNA, 25 bp, Probe Sequence
ttacttccaaacaagaatgtctgag

SEQ ID NO: 45345 - DNA, 25 bp, Probe Sequence
atcctggaatatgtcgaggttatat

SEQ ID NO: 45346 - DNA, 25 bp, Probe Sequence
gaacatttgtgaagatggtccgaat

SEQ ID NO: 45347 - DNA, 25 bp, Probe Sequence
tttacttccaaacaagaatgtctga

SEQ ID NO: 45348 - DNA, 25 bp, Probe Sequence
aagaagatcctggaatatgtcgagg

SEQ ID NO: 45349 - DNA, 25 bp, Probe Sequence
ccaatgagaacagattctactacaa

SEQ ID NO: 45350 - DNA, 25 bp, Probe Sequence
tgtcgaggttatattaccaggtatt

SEQ ID NO: 45351 - DNA, 25 bp, Probe Sequence
cagattctactacaattcagtcatt

SEQ ID NO: 45352 - DNA, 25 bp, Probe Sequence
atgtcgaggttatattaccaggtat

SEQ ID NO: 45353 - DNA, 25 bp, Probe Sequence
atatgtcgaggttatattaccaggt

SEQ ID NO: 45354 - DNA, 25 bp, Probe Sequence
gaagatcctggaatatgtcgaggtt

SEQ ID NO: 45355 - DNA, 25 bp, Probe Sequence
ctgtcaacgcaacccttatagatag

SEQ ID NO: 45356 - DNA, 25 bp, Probe Sequence
tttaatttggaagaatgtgccgaag

SEQ ID NO: 45357 - DNA, 25 bp, Probe Sequence
ctccaagatgattcaaacaccagat

SEQ ID NO: 45358 - DNA, 25 bp, Probe Sequence
ctttaatttggaagaatgtgccgaa

SEQ ID NO: 45359 - DNA, 25 bp, Probe Sequence
gctgggattcactttaatttggaag

SEQ ID NO: 45360 - DNA, 25 bp, Probe Sequence
caagtgctttggagaacagaataaa

SEQ ID NO: 45361 - DNA, 25 bp, Probe Sequence
ctgggattcactttaatttggaaga

SEQ ID NO: 45362 - DNA, 25 bp, Probe Sequence
tcaagtgctttggagaacagaataa

SEQ ID NO: 45363 - DNA, 25 bp, Probe Sequence
ttaatttggaagaatgtgccgaaga

SEQ ID NO: 45364 - DNA, 25 bp, Probe Sequence
tccaagatgattcaaacaccagatg

SEQ ID NO: 45365 - DNA, 25 bp, Probe Sequence
ttaagtgaattgccgtaactgattt

SEQ ID NO: 45366 - DNA, 25 bp, Probe Sequence
tgggattcactttaatttggaagaa

SEQ ID NO: 45367 - DNA, 25 bp, Probe Sequence
actttaatttggaagaatgtgccga

SEQ ID NO: 45368 - DNA, 25 bp, Probe Sequence
tgctctttcatgcctattatcagta

SEQ ID NO: 45369 - DNA, 25 bp, Probe Sequence
ctcaagtgctttggagaacagaata

SEQ ID NO: 45370 - DNA, 25 bp, Probe Sequence
taatttggaagaatgtgccgaagac

SEQ ID NO: 45371 - DNA, 25 bp, Probe Sequence
cttaagtgaattgccgtaactgatt

SEQ ID NO: 45372 - DNA, 25 bp, Probe Sequence
ctctccaagatgattcaaacaccag

SEQ ID NO: 45373 - DNA, 25 bp, Probe Sequence
gtgctctttcatgcctattatcagt

SEQ ID NO: 45374 - DNA, 25 bp, Probe Sequence
aatggtgctctttcatgcctattat

SEQ ID NO: 45375 - DNA, 25 bp, Probe Sequence
gctctttcatgcctattatcagtaa

SEQ ID NO: 45376 - DNA, 25 bp, Probe Sequence
atggtgctctttcatgcctattatc

SEQ ID NO: 45377 - DNA, 25 bp, Probe Sequence
tcactttaatttggaagaatgtgcc

SEQ ID NO: 45378 - DNA, 25 bp, Probe Sequence
tctccaagatgattcaaacaccaga

SEQ ID NO: 45379 - DNA, 25 bp, Probe Sequence
aacctcttcacaacagtatcaacac

SEQ ID NO: 45380 - DNA, 25 bp, Probe Sequence
gaacctcttcacaacagtatcaaca

SEQ ID NO: 45381 - DNA, 25 bp, Probe Sequence
ggcttaatacattagtggtaactgg

SEQ ID NO: 45382 - DNA, 25 bp, Probe Sequence
gcataactcaatctgaaccaaggat

SEQ ID NO: 45383 - DNA, 25 bp, Probe Sequence
ttcagaaggtcatcagattgtgaga

SEQ ID NO: 45384 - DNA, 25 bp, Probe Sequence
gcttaatacattagtggtaactggt

SEQ ID NO: 45385 - DNA, 25 bp, Probe Sequence
atcctactaataagcctcacctatt

SEQ ID NO: 45386 - DNA, 25 bp, Probe Sequence
acctcttcacaacagtatcaacact

SEQ ID NO: 45387 - DNA, 25 bp, Probe Sequence
gtatatcctactaataagcctcacc

SEQ ID NO: 45388 - DNA, 25 bp, Probe Sequence
tatcctactaataagcctcacctat

SEQ ID NO: 45389 - DNA, 25 bp, Probe Sequence
atatcctactaataagcctcaccta

SEQ ID NO: 45390 - DNA, 25 bp, Probe Sequence
tatatcctactaataagcctcacct

SEQ ID NO: 45391 - DNA, 25 bp, Probe Sequence
ctggtatcacatagttggagtcagt

SEQ ID NO: 45392 - DNA, 25 bp, Probe Sequence
atagctggtatcacatagttggagt

SEQ ID NO: 45393 - DNA, 25 bp, Probe Sequence
catagttggagtcagtgcataattc

SEQ ID NO: 45394 - DNA, 25 bp, Probe Sequence
acatagttggagtcagtgcataatt

SEQ ID NO: 45395 - DNA, 25 bp, Probe Sequence
tagctggtatcacatagttggagtc

SEQ ID NO: 45396 - DNA, 25 bp, Probe Sequence
cataactcaatctgaaccaaggatt

SEQ ID NO: 45397 - DNA, 25 bp, Probe Sequence
atagagcataacgaaactgtgaaac

SEQ ID NO: 45398 - DNA, 25 bp, Probe Sequence
tagagcataacgaaactgtgaaact

SEQ ID NO: 45399 - DNA, 25 bp, Probe Sequence
taacggtatttcagaaggtcatcag

SEQ ID NO: 45400 - DNA, 25 bp, Probe Sequence
ttaacggtatttcagaaggtcatca

SEQ ID NO: 45401 - DNA, 25 bp, Probe Sequence
atctcattcccttcttctttcccta

SEQ ID NO: 45402 - DNA, 25 bp, Probe Sequence
agaaggtcatcagattgtgagactg

SEQ ID NO: 45403 - DNA, 25 bp, Probe Sequence
gatacaggcaattcagtggactata

SEQ ID NO: 45404 - DNA, 25 bp, Probe Sequence
acaggcaattcagtggactataata

SEQ ID NO: 45405 - DNA, 25 bp, Probe Sequence
tacaggcaattcagtggactataat

SEQ ID NO: 45406 - DNA, 25 bp, Probe Sequence
atacaggcaattcagtggactataa

SEQ ID NO: 45407 - DNA, 25 bp, Probe Sequence
caggcaattcagtggactataataa

SEQ ID NO: 45408 - DNA, 25 bp, Probe Sequence
tgatacaggcaattcagtggactat

SEQ ID NO: 45409 - DNA, 25 bp, Probe Sequence
ttgatacaggcaattcagtggacta

SEQ ID NO: 45410 - DNA, 25 bp, Probe Sequence
aggcaattcagtggactataataat

SEQ ID NO: 45411 - DNA, 25 bp, Probe Sequence
taatagtggagggttgagatgtaga

SEQ ID NO: 45412 - DNA, 25 bp, Probe Sequence
cacagatgatgaagaaatgatggaa

SEQ ID NO: 45413 - DNA, 25 bp, Probe Sequence
ataatagtggagggttgagatgtag

SEQ ID NO: 45414 - DNA, 25 bp, Probe Sequence
cagatgatgaagaaatgatggaagt

SEQ ID NO: 45415 - DNA, 25 bp, Probe Sequence
acagatgatgaagaaatgatggaag

SEQ ID NO: 45416 - DNA, 25 bp, Probe Sequence
aatagtggagggttgagatgtagag

SEQ ID NO: 45417 - DNA, 25 bp, Probe Sequence
aataatagtggagggttgagatgta

SEQ ID NO: 45418 - DNA, 25 bp, Probe Sequence
taataatagtggagggttgagatgt

SEQ ID NO: 45419 - DNA, 25 bp, Probe Sequence
agatgatgaagaaatgatggaagtt

SEQ ID NO: 45420 - DNA, 25 bp, Probe Sequence
gatggaagttcatttggagagtcaa

SEQ ID NO: 45421 - DNA, 25 bp, Probe Sequence
atagtggagggttgagatgtagagt

SEQ ID NO: 45422 - DNA, 25 bp, Probe Sequence
cctgtgacttattccctgagacttt

SEQ ID NO: 45423 - DNA, 25 bp, Probe Sequence
ctgtcggatagtgatgactgaactg

SEQ ID NO: 45424 - DNA, 25 bp, Probe Sequence
gatgatgaagaaatgatggaagttc

SEQ ID NO: 45425 - DNA, 25 bp, Probe Sequence
tcactcttctgtaaatagatgacct

SEQ ID NO: 45426 - DNA, 25 bp, Probe Sequence
tttccttataaccctctgactatgc

SEQ ID NO: 45427 - DNA, 25 bp, Probe Sequence
catatctttaattgggtgttggtcc

SEQ ID NO: 45428 - DNA, 25 bp, Probe Sequence
aattggctataaaggtaggtctgtt

SEQ ID NO: 45429 - DNA, 25 bp, Probe Sequence
taatctagttcatgtgcattaggct

SEQ ID NO: 45430 - DNA, 25 bp, Probe Sequence
gcatatctttaattgggtgttggtc

SEQ ID NO: 45431 - DNA, 25 bp, Probe Sequence
ttggctataaaggtaggtctgttaa

SEQ ID NO: 45432 - DNA, 25 bp, Probe Sequence
attggctataaaggtaggtctgtta

SEQ ID NO: 45433 - DNA, 25 bp, Probe Sequence
aatctagttcatgtgcattaggctg

SEQ ID NO: 45434 - DNA, 25 bp, Probe Sequence
taactttctttgtgtgttcctgatg

SEQ ID NO: 45435 - DNA, 25 bp, Probe Sequence
ataatctagttcatgtgcattaggc

SEQ ID NO: 45436 - DNA, 25 bp, Probe Sequence
ttggataatctagttcatgtgcatt

SEQ ID NO: 45437 - DNA, 25 bp, Probe Sequence
ttaactttctttgtgtgttcctgat

SEQ ID NO: 45438 - DNA, 25 bp, Probe Sequence
cacttgagttcacttgagtttacat

SEQ ID NO: 45439 - DNA, 25 bp, Probe Sequence
actacctgagaaattgctttgtgtc

SEQ ID NO: 45440 - DNA, 25 bp, Probe Sequence
gactacctgagaaattgctttgtgt

SEQ ID NO: 45441 - DNA, 25 bp, Probe Sequence
tgagttcacttgagtttacatttga

SEQ ID NO: 45442 - DNA, 25 bp, Probe Sequence
ttgagttcacttgagtttacatttg

SEQ ID NO: 45443 - DNA, 25 bp, Probe Sequence
acttgagttcacttgagtttacatt

SEQ ID NO: 45444 - DNA, 25 bp, Probe Sequence
ccaggataaatgaggtatgttgatc

SEQ ID NO: 45445 - DNA, 25 bp, Probe Sequence
agcataaacaccttgaatttgattt

SEQ ID NO: 45446 - DNA, 25 bp, Probe Sequence
tactgctattgggatctattcttca

SEQ ID NO: 45447 - DNA, 25 bp, Probe Sequence
cttgagttcacttgagtttacattt

SEQ ID NO: 45448 - DNA, 25 bp, Probe Sequence
aactttctttgtgtgttcctgatgg

SEQ ID NO: 45449 - DNA, 25 bp, Probe Sequence
aagcataaacaccttgaatttgatt

SEQ ID NO: 45450 - DNA, 25 bp, Probe Sequence
aaagcataaacaccttgaatttgat

SEQ ID NO: 45451 - DNA, 25 bp, Probe Sequence
aatcactacaagcagcattaagact

SEQ ID NO: 45452 - DNA, 25 bp, Probe Sequence
ccaggagaagaaccatcagaatata

SEQ ID NO: 45453 - DNA, 25 bp, Probe Sequence
accaggagaagaaccatcagaatat

SEQ ID NO: 45454 - DNA, 25 bp, Probe Sequence
aaccaggagaagaaccatcagaata

SEQ ID NO: 45455 - DNA, 25 bp, Probe Sequence
tacagatgaagaagataccaaggat

SEQ ID NO: 45456 - DNA, 25 bp, Probe Sequence
atacagatgaagaagataccaagga

SEQ ID NO: 45457 - DNA, 25 bp, Probe Sequence
aggagaagaaccatcagaatataca

SEQ ID NO: 45458 - DNA, 25 bp, Probe Sequence
gtatggatgtgtctgaatgtgtgag

SEQ ID NO: 45459 - DNA, 25 bp, Probe Sequence
ggagaagaaccatcagaatatacag

SEQ ID NO: 45460 - DNA, 25 bp, Probe Sequence
caggagaagaaccatcagaatatac

SEQ ID NO: 45461 - DNA, 25 bp, Probe Sequence
acagatgaagaagataccaaggatc

SEQ ID NO: 45462 - DNA, 25 bp, Probe Sequence
agtatggatgtgtctgaatgtgtga

SEQ ID NO: 45463 - DNA, 25 bp, Probe Sequence
agcattaagactgaagttggaatat

SEQ ID NO: 45464 - DNA, 25 bp, Probe Sequence
gatgaagaagataccaaggatcaca

SEQ ID NO: 45465 - DNA, 25 bp, Probe Sequence
agatgaagaagataccaaggatcac

SEQ ID NO: 45466 - DNA, 25 bp, Probe Sequence
cagatgaagaagataccaaggatca

SEQ ID NO: 45467 - DNA, 25 bp, Probe Sequence
tgaagaagataccaaggatcacaat

SEQ ID NO: 45468 - DNA, 25 bp, Probe Sequence
atgaagaagataccaaggatcacaa

SEQ ID NO: 45469 - DNA, 25 bp, Probe Sequence
tacaagcagcattaagactgaagtt

SEQ ID NO: 45470 - DNA, 25 bp, Probe Sequence
cagcattaagactgaagttggaata

SEQ ID NO: 45471 - DNA, 25 bp, Probe Sequence
tatggatgtgtctgaatgtgtgagg

SEQ ID NO: 45472 - DNA, 25 bp, Probe Sequence
ctacaagcagcattaagactgaagt

SEQ ID NO: 45473 - DNA, 25 bp, Probe Sequence
actacaagcagcattaagactgaag

SEQ ID NO: 45474 - DNA, 25 bp, Probe Sequence
atcactacaagcagcattaagactg

SEQ ID NO: 45475 - DNA, 25 bp, Probe Sequence
tgttagatgcttagtgtgaagttga

SEQ ID NO: 45476 - DNA, 25 bp, Probe Sequence
atgttagatgcttagtgtgaagttg

SEQ ID NO: 45477 - DNA, 25 bp, Probe Sequence
agatgcttagtgtgaagttgatacg

SEQ ID NO: 45478 - DNA, 25 bp, Probe Sequence
gttagatgcttagtgtgaagttgat

SEQ ID NO: 45479 - DNA, 25 bp, Probe Sequence
gaatgttagatgcttagtgtgaagt

SEQ ID NO: 45480 - DNA, 25 bp, Probe Sequence
tgaatgttagatgcttagtgtgaag

SEQ ID NO: 45481 - DNA, 25 bp, Probe Sequence
ttgaatgttagatgcttagtgtgaa

SEQ ID NO: 45482 - DNA, 25 bp, Probe Sequence
aatatctaagcaagtgaactcatcc

SEQ ID NO: 45483 - DNA, 25 bp, Probe Sequence
aatgttagatgcttagtgtgaagtt

SEQ ID NO: 45484 - DNA, 25 bp, Probe Sequence
tagatgcttagtgtgaagttgatac

SEQ ID NO: 45485 - DNA, 25 bp, Probe Sequence
ttagatgcttagtgtgaagttgata

SEQ ID NO: 45486 - DNA, 25 bp, Probe Sequence
gatgcttagtgtgaagttgatacgc

SEQ ID NO: 45487 - DNA, 25 bp, Probe Sequence
gatgacaggtcagcagtattctatt

SEQ ID NO: 45488 - DNA, 25 bp, Probe Sequence
tgatgacaggtcagcagtattctat

SEQ ID NO: 45489 - DNA, 25 bp, Probe Sequence
atgatgacaggtcagcagtattcta

SEQ ID NO: 45490 - DNA, 25 bp, Probe Sequence
cttagtgtgaagttgatacgcaagc

SEQ ID NO: 45491 - DNA, 25 bp, Probe Sequence
gcttagtgtgaagttgatacgcaag

SEQ ID NO: 45492 - DNA, 25 bp, Probe Sequence
aggtcagcagtattctatttggtta

SEQ ID NO: 45493 - DNA, 25 bp, Probe Sequence
atatctaagcaagtgaactcatccc

SEQ ID NO: 45494 - DNA, 25 bp, Probe Sequence
ggtcagcagtattctatttggttag

SEQ ID NO: 45495 - DNA, 25 bp, Probe Sequence
caggtcagcagtattctatttggtt

SEQ ID NO: 45496 - DNA, 25 bp, Probe Sequence
tgtttgaatgttagatgcttagtgt

SEQ ID NO: 45497 - DNA, 25 bp, Probe Sequence
gtttgaatgttagatgcttagtgtg

SEQ ID NO: 45498 - DNA, 25 bp, Probe Sequence
tatctaagcaagtgaactcatccct

SEQ ID NO: 45499 - DNA, 25 bp, Probe Sequence
ctggagaagaatgatgtggagaaag

SEQ ID NO: 45500 - DNA, 25 bp, Probe Sequence
gagaagaatgatgtggagaaagtgg

SEQ ID NO: 45501 - DNA, 25 bp, Probe Sequence
ggagaagaatgatgtggagaaagtg

SEQ ID NO: 45502 - DNA, 25 bp, Probe Sequence
tgtgctgtgagttgtttcaataaag

SEQ ID NO: 45503 - DNA, 25 bp, Probe Sequence
ctgtgctgtgagttgtttcaataaa

SEQ ID NO: 45504 - DNA, 25 bp, Probe Sequence
tggagaagaatgatgtggagaaagt

SEQ ID NO: 45505 - DNA, 25 bp, Probe Sequence
tactgtgctgtgagttgtttcaata

SEQ ID NO: 45506 - DNA, 25 bp, Probe Sequence
cagtggagaaattcgtctttgagat

SEQ ID NO: 45507 - DNA, 25 bp, Probe Sequence
tgaatcagtatatccaggacacgct

SEQ ID NO: 45508 - DNA, 25 bp, Probe Sequence
gaagaatgatgtggagaaagtggtg

SEQ ID NO: 45509 - DNA, 25 bp, Probe Sequence
agaagaatgatgtggagaaagtggt

SEQ ID NO: 45510 - DNA, 25 bp, Probe Sequence
gagctgaatcagtatatccaggaca

SEQ ID NO: 45511 - DNA, 25 bp, Probe Sequence
gtgctgtgagttgtttcaataaagg

SEQ ID NO: 45512 - DNA, 25 bp, Probe Sequence
atactgtgctgtgagttgtttcaat

SEQ ID NO: 45513 - DNA, 25 bp, Probe Sequence
caaatactgtgctgtgagttgtttc

SEQ ID NO: 45514 - DNA, 25 bp, Probe Sequence
actgtgctgtgagttgtttcaataa

SEQ ID NO: 45515 - DNA, 25 bp, Probe Sequence
aatactgtgctgtgagttgtttcaa

SEQ ID NO: 45516 - DNA, 25 bp, Probe Sequence
aaatactgtgctgtgagttgtttca

SEQ ID NO: 45517 - DNA, 25 bp, Probe Sequence
tcaaatactgtgctgtgagttgttt

SEQ ID NO: 45518 - DNA, 25 bp, Probe Sequence
agctgaatcagtatatccaggacac

SEQ ID NO: 45519 - DNA, 25 bp, Probe Sequence
agtggagaaattcgtctttgagatc

SEQ ID NO: 45520 - DNA, 25 bp, Probe Sequence
caacactgtctgtctcaaatactgt

SEQ ID NO: 45521 - DNA, 25 bp, Probe Sequence
gaatcagtatatccaggacacgctg

SEQ ID NO: 45522 - DNA, 25 bp, Probe Sequence
tggagaaattcgtctttgagatcac

SEQ ID NO: 45523 - DNA, 25 bp, Probe Sequence
acttacatctaacagacacactaca

SEQ ID NO: 45524 - DNA, 25 bp, Probe Sequence
tctaacagacacactacaagttgaa

SEQ ID NO: 45525 - DNA, 25 bp, Probe Sequence
acatctaacagacacactacaagtt

SEQ ID NO: 45526 - DNA, 25 bp, Probe Sequence
atctaacagacacactacaagttga

SEQ ID NO: 45527 - DNA, 25 bp, Probe Sequence
catctaacagacacactacaagttg

SEQ ID NO: 45528 - DNA, 25 bp, Probe Sequence
actacttacatctaacagacacact

SEQ ID NO: 45529 - DNA, 25 bp, Probe Sequence
aacagacacactacaagttgaatca

SEQ ID NO: 45530 - DNA, 25 bp, Probe Sequence
tacatctaacagacacactacaagt

SEQ ID NO: 45531 - DNA, 25 bp, Probe Sequence
taacagacacactacaagttgaatc

SEQ ID NO: 45532 - DNA, 25 bp, Probe Sequence
ctaacagacacactacaagttgaat

SEQ ID NO: 45533 - DNA, 25 bp, Probe Sequence
tatagttcatactgtgtctgtgagt

SEQ ID NO: 45534 - DNA, 25 bp, Probe Sequence
ttacatctaacagacacactacaag

SEQ ID NO: 45535 - DNA, 25 bp, Probe Sequence
cttacatctaacagacacactacaa

SEQ ID NO: 45536 - DNA, 25 bp, Probe Sequence
tgaatgaagacatctcagtacactc

SEQ ID NO: 45537 - DNA, 25 bp, Probe Sequence
gaatgaagacatctcagtacactct

SEQ ID NO: 45538 - DNA, 25 bp, Probe Sequence
ttgaatgaagacatctcagtacact

SEQ ID NO: 45539 - DNA, 25 bp, Probe Sequence
cagacacactacaagttgaatcaat

SEQ ID NO: 45540 - DNA, 25 bp, Probe Sequence
acagacacactacaagttgaatcaa

SEQ ID NO: 45541 - DNA, 25 bp, Probe Sequence
attgaatgaagacatctcagtacac

SEQ ID NO: 45542 - DNA, 25 bp, Probe Sequence
agacacactacaagttgaatcaatt

SEQ ID NO: 45543 - DNA, 25 bp, Probe Sequence
aggtagcagtgagcattgttcatat

SEQ ID NO: 45544 - DNA, 25 bp, Probe Sequence
cactctccttacctagttatctaca

SEQ ID NO: 45545 - DNA, 25 bp, Probe Sequence
actgtgtctgtgagtatattcaatt

SEQ ID NO: 45546 - DNA, 25 bp, Probe Sequence
tgaattgaatgaagacatctcagta

SEQ ID NO: 45547 - DNA, 25 bp, Probe Sequence
actctctataagtgttcagtgttca

SEQ ID NO: 45548 - DNA, 25 bp, Probe Sequence
aactctctataagtgttcagtgttc

SEQ ID NO: 45549 - DNA, 25 bp, Probe Sequence
tctctataagtgttcagtgttcaca

SEQ ID NO: 45550 - DNA, 25 bp, Probe Sequence
ataagtgttcagtgttcacatagcc

SEQ ID NO: 45551 - DNA, 25 bp, Probe Sequence
tataagtgttcagtgttcacatagc

SEQ ID NO: 45552 - DNA, 25 bp, Probe Sequence
ctctctataagtgttcagtgttcac

SEQ ID NO: 45553 - DNA, 25 bp, Probe Sequence
ctctataagtgttcagtgttcacat

SEQ ID NO: 45554 - DNA, 25 bp, Probe Sequence
aacgctgtaatatggctgtatcaga

SEQ ID NO: 45555 - DNA, 25 bp, Probe Sequence
caacgctgtaatatggctgtatcag

SEQ ID NO: 45556 - DNA, 25 bp, Probe Sequence
aatgtttatgggatttcaaggttgg

SEQ ID NO: 45557 - DNA, 25 bp, Probe Sequence
taagtgttcagtgttcacatagcct

SEQ ID NO: 45558 - DNA, 25 bp, Probe Sequence
aggaagatgaagaccaggactacag

SEQ ID NO: 45559 - DNA, 25 bp, Probe Sequence
gaggaagatgaagaccaggactaca

SEQ ID NO: 45560 - DNA, 25 bp, Probe Sequence
acgctgtaatatggctgtatcagag

SEQ ID NO: 45561 - DNA, 25 bp, Probe Sequence
atgtttatgggatttcaaggttggg

SEQ ID NO: 45562 - DNA, 25 bp, Probe Sequence
tctataagtgttcagtgttcacata

SEQ ID NO: 45563 - DNA, 25 bp, Probe Sequence
tttatgggatttcaaggttgggaga

SEQ ID NO: 45564 - DNA, 25 bp, Probe Sequence
gtttatgggatttcaaggttgggag

SEQ ID NO: 45565 - DNA, 25 bp, Probe Sequence
aagtgttcagtgttcacatagcctt

SEQ ID NO: 45566 - DNA, 25 bp, Probe Sequence
gagccattgattcttcagaactttc

SEQ ID NO: 45567 - DNA, 25 bp, Probe Sequence
agccattgattcttcagaactttct

SEQ ID NO: 45568 - DNA, 25 bp, Probe Sequence
ctataagtgttcagtgttcacatag

SEQ ID NO: 45569 - DNA, 25 bp, Probe Sequence
gcaacgctgtaatatggctgtatca

SEQ ID NO: 45570 - DNA, 25 bp, Probe Sequence
tgagccattgattcttcagaacttt

SEQ ID NO: 45571 - DNA, 25 bp, Probe Sequence
tgataacttcgctacataacaagga

SEQ ID NO: 45572 - DNA, 25 bp, Probe Sequence
gataacttcgctacataacaaggaa

SEQ ID NO: 45573 - DNA, 25 bp, Probe Sequence
ttgataacttcgctacataacaagg

SEQ ID NO: 45574 - DNA, 25 bp, Probe Sequence
tgtactattggtgtgttggtgaatt

SEQ ID NO: 45575 - DNA, 25 bp, Probe Sequence
ttgtactattggtgtgttggtgaat

SEQ ID NO: 45576 - DNA, 25 bp, Probe Sequence
tgagcgttcttagaataactactgc

SEQ ID NO: 45577 - DNA, 25 bp, Probe Sequence
ttgagcgttcttagaataactactg

SEQ ID NO: 45578 - DNA, 25 bp, Probe Sequence
gttgagcgttcttagaataactact

SEQ ID NO: 45579 - DNA, 25 bp, Probe Sequence
agttgacaataggtcgttctctctt

SEQ ID NO: 45580 - DNA, 25 bp, Probe Sequence
aagttgacaataggtcgttctctct

SEQ ID NO: 45581 - DNA, 25 bp, Probe Sequence
caagttgacaataggtcgttctctc

SEQ ID NO: 45582 - DNA, 25 bp, Probe Sequence
attgataacttcgctacataacaag

SEQ ID NO: 45583 - DNA, 25 bp, Probe Sequence
gccttggagcattatctttagttac

SEQ ID NO: 45584 - DNA, 25 bp, Probe Sequence
acaagttgacaataggtcgttctct

SEQ ID NO: 45585 - DNA, 25 bp, Probe Sequence
cacaagttgacaataggtcgttctc

SEQ ID NO: 45586 - DNA, 25 bp, Probe Sequence
tacaaataaggtctatgggagtagc

SEQ ID NO: 45587 - DNA, 25 bp, Probe Sequence
atgtgtgttaatttggctgtaatgg

SEQ ID NO: 45588 - DNA, 25 bp, Probe Sequence
gccttaactactgtaaacatagcct

SEQ ID NO: 45589 - DNA, 25 bp, Probe Sequence
acaaataaggtctatgggagtagca

SEQ ID NO: 45590 - DNA, 25 bp, Probe Sequence
caaataaggtctatgggagtagcat

SEQ ID NO: 45591 - DNA, 25 bp, Probe Sequence
ggttagtagactatgtggattgcgg

SEQ ID NO: 45592 - DNA, 25 bp, Probe Sequence
tcgccttaactactgtaaacatagc

SEQ ID NO: 45593 - DNA, 25 bp, Probe Sequence
gagcgttcttagaataactactgca

SEQ ID NO: 45594 - DNA, 25 bp, Probe Sequence
cgttcttagaataactactgcacaa

SEQ ID NO: 45595 - DNA, 25 bp, Probe Sequence
gtggagataatcaacagtaaggatg

SEQ ID NO: 45596 - DNA, 25 bp, Probe Sequence
ttgtggagataatcaacagtaagga

SEQ ID NO: 45597 - DNA, 25 bp, Probe Sequence
gcattgtggagataatcaacagtaa

SEQ ID NO: 45598 - DNA, 25 bp, Probe Sequence
tggagataatcaacagtaaggatgt

SEQ ID NO: 45599 - DNA, 25 bp, Probe Sequence
tgtggagataatcaacagtaaggat

SEQ ID NO: 45600 - DNA, 25 bp, Probe Sequence
tcagaatgttcacactggttaatct

SEQ ID NO: 45601 - DNA, 25 bp, Probe Sequence
ggcattgtggagataatcaacagta

SEQ ID NO: 45602 - DNA, 25 bp, Probe Sequence
cagaatgttcacactggttaatctt

SEQ ID NO: 45603 - DNA, 25 bp, Probe Sequence
atcagaatgttcacactggttaatc

SEQ ID NO: 45604 - DNA, 25 bp, Probe Sequence
ggagataatcaacagtaaggatgtc

SEQ ID NO: 45605 - DNA, 25 bp, Probe Sequence
ttaacaatgagcatgaaggtagcag

SEQ ID NO: 45606 - DNA, 25 bp, Probe Sequence
attgtggagataatcaacagtaagg

SEQ ID NO: 45607 - DNA, 25 bp, Probe Sequence
agatcagaatgttcacactggttaa

SEQ ID NO: 45608 - DNA, 25 bp, Probe Sequence
gatcagaatgttcacactggttaat

SEQ ID NO: 45609 - DNA, 25 bp, Probe Sequence
cagatcagaatgttcacactggtta

SEQ ID NO: 45610 - DNA, 25 bp, Probe Sequence
gagataatcaacagtaaggatgtca

SEQ ID NO: 45611 - DNA, 25 bp, Probe Sequence
taacaatgagcatgaaggtagcaga

SEQ ID NO: 45612 - DNA, 25 bp, Probe Sequence
caaagttcaggtaatgggtaaagtg

SEQ ID NO: 45613 - DNA, 25 bp, Probe Sequence
tcaaagttcaggtaatgggtaaagt

SEQ ID NO: 45614 - DNA, 25 bp, Probe Sequence
gtcaaagttcaggtaatgggtaaag

SEQ ID NO: 45615 - DNA, 25 bp, Probe Sequence
atgtcaaagttcaggtaatgggtaa

SEQ ID NO: 45616 - DNA, 25 bp, Probe Sequence
cagtaaggatgtcaaagttcaggta

SEQ ID NO: 45617 - DNA, 25 bp, Probe Sequence
tgtcaaagttcaggtaatgggtaaa

SEQ ID NO: 45618 - DNA, 25 bp, Probe Sequence
attgtcctgtgatttctacccattt

SEQ ID NO: 45619 - DNA, 25 bp, Probe Sequence
ggaggttacagtggtcatcataatt

SEQ ID NO: 45620 - DNA, 25 bp, Probe Sequence
aggaggttacagtggtcatcataat

SEQ ID NO: 45621 - DNA, 25 bp, Probe Sequence
gaggttacagtggtcatcataattg

SEQ ID NO: 45622 - DNA, 25 bp, Probe Sequence
cacataataggcgatgaggagatac

SEQ ID NO: 45623 - DNA, 25 bp, Probe Sequence
ataataggcgatgaggagataccag

SEQ ID NO: 45624 - DNA, 25 bp, Probe Sequence
ggttacagtggtcatcataattgct

SEQ ID NO: 45625 - DNA, 25 bp, Probe Sequence
aggttacagtggtcatcataattgc

SEQ ID NO: 45626 - DNA, 25 bp, Probe Sequence
tggtcatcataattgctgaagagat

SEQ ID NO: 45627 - DNA, 25 bp, Probe Sequence
cataataggcgatgaggagatacca

SEQ ID NO: 45628 - DNA, 25 bp, Probe Sequence
acataataggcgatgaggagatacc

SEQ ID NO: 45629 - DNA, 25 bp, Probe Sequence
ccacataataggcgatgaggagata

SEQ ID NO: 45630 - DNA, 25 bp, Probe Sequence
gtggtcatcataattgctgaagaga

SEQ ID NO: 45631 - DNA, 25 bp, Probe Sequence
agtggtcatcataattgctgaagag

SEQ ID NO: 45632 - DNA, 25 bp, Probe Sequence
caggaggttacagtggtcatcataa

SEQ ID NO: 45633 - DNA, 25 bp, Probe Sequence
taataggcgatgaggagataccaga

SEQ ID NO: 45634 - DNA, 25 bp, Probe Sequence
tacagtggtcatcataattgctgaa

SEQ ID NO: 45635 - DNA, 25 bp, Probe Sequence
ttacagtggtcatcataattgctga

SEQ ID NO: 45636 - DNA, 25 bp, Probe Sequence
gttacagtggtcatcataattgctg

SEQ ID NO: 45637 - DNA, 25 bp, Probe Sequence
gtcatcataattgctgaagagatcc

SEQ ID NO: 45638 - DNA, 25 bp, Probe Sequence
ggtcatcataattgctgaagagatc

SEQ ID NO: 45639 - DNA, 25 bp, Probe Sequence
cagtggtcatcataattgctgaaga

SEQ ID NO: 45640 - DNA, 25 bp, Probe Sequence
acagtggtcatcataattgctgaag

SEQ ID NO: 45641 - DNA, 25 bp, Probe Sequence
aataggcgatgaggagataccagaa

SEQ ID NO: 45642 - DNA, 25 bp, Probe Sequence
cagattatgttagcaccatgtgatg

SEQ ID NO: 45643 - DNA, 25 bp, Probe Sequence
caagttgagtagagagtgtagagtg

SEQ ID NO: 45644 - DNA, 25 bp, Probe Sequence
aagttgagtagagagtgtagagtgc

SEQ ID NO: 45645 - DNA, 25 bp, Probe Sequence
ctgtcttcttatcctcacatctgtt

SEQ ID NO: 45646 - DNA, 25 bp, Probe Sequence
acaagttgagtagagagtgtagagt

SEQ ID NO: 45647 - DNA, 25 bp, Probe Sequence
aacaagttgagtagagagtgtagag

SEQ ID NO: 45648 - DNA, 25 bp, Probe Sequence
tacacctgtcttcttatcctcacat

SEQ ID NO: 45649 - DNA, 25 bp, Probe Sequence
ttacacctgtcttcttatcctcaca

SEQ ID NO: 45650 - DNA, 25 bp, Probe Sequence
cctgtcttcttatcctcacatctgt

SEQ ID NO: 45651 - DNA, 25 bp, Probe Sequence
acctgtcttcttatcctcacatctg

SEQ ID NO: 45652 - DNA, 25 bp, Probe Sequence
cacctgtcttcttatcctcacatct

SEQ ID NO: 45653 - DNA, 25 bp, Probe Sequence
gtctgacttgtaccaattctagcac

SEQ ID NO: 45654 - DNA, 25 bp, Probe Sequence
cttcctcatgttcacacttgtcttc

SEQ ID NO: 45655 - DNA, 25 bp, Probe Sequence
acacctgtcttcttatcctcacatc

SEQ ID NO: 45656 - DNA, 25 bp, Probe Sequence
tcttcctcatgttcacacttgtctt

SEQ ID NO: 45657 - DNA, 25 bp, Probe Sequence
tttacacctgtcttcttatcctcac

SEQ ID NO: 45658 - DNA, 25 bp, Probe Sequence
tcacctttacacctgtcttcttatc

SEQ ID NO: 45659 - DNA, 25 bp, Probe Sequence
ctcacctttacacctgtcttcttat

SEQ ID NO: 45660 - DNA, 25 bp, Probe Sequence
ctttacacctgtcttcttatcctca

SEQ ID NO: 45661 - DNA, 25 bp, Probe Sequence
cctttacacctgtcttcttatcctc

SEQ ID NO: 45662 - DNA, 25 bp, Probe Sequence
tctgacttgtaccaattctagcacc

SEQ ID NO: 45663 - DNA, 25 bp, Probe Sequence
acctttacacctgtcttcttatcct

SEQ ID NO: 45664 - DNA, 25 bp, Probe Sequence
cacctttacacctgtcttcttatcc

SEQ ID NO: 45665 - DNA, 25 bp, Probe Sequence
tctcacctttacacctgtcttctta

SEQ ID NO: 45666 - DNA, 25 bp, Probe Sequence
ttagttataagtctccgagttggaa

SEQ ID NO: 45667 - DNA, 25 bp, Probe Sequence
cataagaactgtgctgacttggaag

SEQ ID NO: 45668 - DNA, 25 bp, Probe Sequence
ataagaactgtgctgacttggaagg

SEQ ID NO: 45669 - DNA, 25 bp, Probe Sequence
atcaggtactgtgtctgctcataag

SEQ ID NO: 45670 - DNA, 25 bp, Probe Sequence
catcaggtactgtgtctgctcataa

SEQ ID NO: 45671 - DNA, 25 bp, Probe Sequence
caggtactgtgtctgctcataagta

SEQ ID NO: 45672 - DNA, 25 bp, Probe Sequence
tcaggtactgtgtctgctcataagt

SEQ ID NO: 45673 - DNA, 25 bp, Probe Sequence
ccataagaactgtgctgacttggaa

SEQ ID NO: 45674 - DNA, 25 bp, Probe Sequence
taagaactgtgctgacttggaaggt

SEQ ID NO: 45675 - DNA, 25 bp, Probe Sequence
gctccataagaactgtgctgacttg

SEQ ID NO: 45676 - DNA, 25 bp, Probe Sequence
ctccataagaactgtgctgacttgg

SEQ ID NO: 45677 - DNA, 25 bp, Probe Sequence
ccatcaggtactgtgtctgctcata

SEQ ID NO: 45678 - DNA, 25 bp, Probe Sequence
tgtgtcatccagaatgttttgtttt

SEQ ID NO: 45679 - DNA, 25 bp, Probe Sequence
ttgtgtcatccagaatgttttgttt

SEQ ID NO: 45680 - DNA, 25 bp, Probe Sequence
tacttgtgtcatccagaatgttttg

SEQ ID NO: 45681 - DNA, 25 bp, Probe Sequence
cttgtgtcatccagaatgttttgtt

SEQ ID NO: 45682 - DNA, 25 bp, Probe Sequence
acttgtgtcatccagaatgttttgt

SEQ ID NO: 45683 - DNA, 25 bp, Probe Sequence
agtacttgtgtcatccagaatgttt

SEQ ID NO: 45684 - DNA, 25 bp, Probe Sequence
atagatttgccttgtggtgttccat

SEQ ID NO: 45685 - DNA, 25 bp, Probe Sequence
gtacttgtgtcatccagaatgtttt

SEQ ID NO: 45686 - DNA, 25 bp, Probe Sequence
tagatttgccttgtggtgttccatc

SEQ ID NO: 45687 - DNA, 25 bp, Probe Sequence
aaattgaattacttgtttcctgaaa

SEQ ID NO: 45688 - DNA, 25 bp, Probe Sequence
catagatttgccttgtggtgttcca

SEQ ID NO: 45689 - DNA, 25 bp, Probe Sequence
cttgtggtgttccatcaggtactgt

SEQ ID NO: 45690 - DNA, 25 bp, Probe Sequence
ggtgttccatcaggtactgtgtctg

SEQ ID NO: 45691 - DNA, 25 bp, Probe Sequence
tggtgaatgttcaatctgtgtaaga

SEQ ID NO: 45692 - DNA, 25 bp, Probe Sequence
atggtgaatgttcaatctgtgtaag

SEQ ID NO: 45693 - DNA, 25 bp, Probe Sequence
ggtgaatgttcaatctgtgtaagaa

SEQ ID NO: 45694 - DNA, 25 bp, Probe Sequence
aatggtgaatgttcaatctgtgtaa

SEQ ID NO: 45695 - DNA, 25 bp, Probe Sequence
aactgtcataatggtgaatgttcaa

SEQ ID NO: 45696 - DNA, 25 bp, Probe Sequence
ataatggtgaatgttcaatctgtgt

SEQ ID NO: 45697 - DNA, 25 bp, Probe Sequence
actgtcataatggtgaatgttcaat

SEQ ID NO: 45698 - DNA, 25 bp, Probe Sequence
cataatggtgaatgttcaatctgtg

SEQ ID NO: 45699 - DNA, 25 bp, Probe Sequence
tcataatggtgaatgttcaatctgt

SEQ ID NO: 45700 - DNA, 25 bp, Probe Sequence
tgtcataatggtgaatgttcaatct

SEQ ID NO: 45701 - DNA, 25 bp, Probe Sequence
gtcataatggtgaatgttcaatctg

SEQ ID NO: 45702 - DNA, 25 bp, Probe Sequence
ctgtcataatggtgaatgttcaatc

SEQ ID NO: 45703 - DNA, 25 bp, Probe Sequence
taatggtgaatgttcaatctgtgta

SEQ ID NO: 45704 - DNA, 25 bp, Probe Sequence
gcttgacaattcagtgacttaatat

SEQ ID NO: 45705 - DNA, 25 bp, Probe Sequence
ttcagagtcacagttccctttattt

SEQ ID NO: 45706 - DNA, 25 bp, Probe Sequence
tttcagagtcacagttccctttatt

SEQ ID NO: 45707 - DNA, 25 bp, Probe Sequence
agaaatgtgtcaatgtaaagccaaa

SEQ ID NO: 45708 - DNA, 25 bp, Probe Sequence
gtacatacgttcactggtctctaag

SEQ ID NO: 45709 - DNA, 25 bp, Probe Sequence
agtcacagttccctttatttcacat

SEQ ID NO: 45710 - DNA, 25 bp, Probe Sequence
tatactactggtggttgattggttt

SEQ ID NO: 45711 - DNA, 25 bp, Probe Sequence
tcagagtcacagttccctttatttc

SEQ ID NO: 45712 - DNA, 25 bp, Probe Sequence
cagaaatgtgtcaatgtaaagccaa

SEQ ID NO: 45713 - DNA, 25 bp, Probe Sequence
gtagcttgacaattcagtgacttaa

SEQ ID NO: 45714 - DNA, 25 bp, Probe Sequence
agagtcacagttccctttatttcac

SEQ ID NO: 45715 - DNA, 25 bp, Probe Sequence
tctgtggttattattctgtgatgct

SEQ ID NO: 45716 - DNA, 25 bp, Probe Sequence
tgcttctgtggttattattctgtga

SEQ ID NO: 45717 - DNA, 25 bp, Probe Sequence
ttgcttctgtggttattattctgtg

SEQ ID NO: 45718 - DNA, 25 bp, Probe Sequence
gttgcttctgtggttattattctgt

SEQ ID NO: 45719 - DNA, 25 bp, Probe Sequence
tgttgcttctgtggttattattctg

SEQ ID NO: 45720 - DNA, 25 bp, Probe Sequence
ctgtggttattattctgtgatgctt

SEQ ID NO: 45721 - DNA, 25 bp, Probe Sequence
ttctgtggttattattctgtgatgc

SEQ ID NO: 45722 - DNA, 25 bp, Probe Sequence
attgtatgttgcttctgtggttatt

SEQ ID NO: 45723 - DNA, 25 bp, Probe Sequence
gcttctgtggttattattctgtgat

SEQ ID NO: 45724 - DNA, 25 bp, Probe Sequence
cattgtatgttgcttctgtggttat

SEQ ID NO: 45725 - DNA, 25 bp, Probe Sequence
tctgtgatgcttagactacttgaac

SEQ ID NO: 45726 - DNA, 25 bp, Probe Sequence
ttctgtgatgcttagactacttgaa

SEQ ID NO: 45727 - DNA, 25 bp, Probe Sequence
ctgtgatgcttagactacttgaacc

SEQ ID NO: 45728 - DNA, 25 bp, Probe Sequence
attctgtgatgcttagactacttga

SEQ ID NO: 45729 - DNA, 25 bp, Probe Sequence
cttcacggaatgttacaatgttact

SEQ ID NO: 45730 - DNA, 25 bp, Probe Sequence
atgttgcttctgtggttattattct

SEQ ID NO: 45731 - DNA, 25 bp, Probe Sequence
ttgtatgttgcttctgtggttatta

SEQ ID NO: 45732 - DNA, 25 bp, Probe Sequence
ttaggaagcagcaccaagtctatta

SEQ ID NO: 45733 - DNA, 25 bp, Probe Sequence
tgtatgttgcttctgtggttattat

SEQ ID NO: 45734 - DNA, 25 bp, Probe Sequence
gcttcacggaatgttacaatgttac

SEQ ID NO: 45735 - DNA, 25 bp, Probe Sequence
tgtggttattattctgtgatgctta

SEQ ID NO: 45736 - DNA, 25 bp, Probe Sequence
tcacggaatgttacaatgttactaa

SEQ ID NO: 45737 - DNA, 25 bp, Probe Sequence
ttcacggaatgttacaatgttacta

SEQ ID NO: 45738 - DNA, 25 bp, Probe Sequence
tccagttgctgttaagaatgatgta

SEQ ID NO: 45739 - DNA, 25 bp, Probe Sequence
ctacagaagagcagttgaagtgatt

SEQ ID NO: 45740 - DNA, 25 bp, Probe Sequence
cgtggttgataattgtcttcagttg

SEQ ID NO: 45741 - DNA, 25 bp, Probe Sequence
tggttgataattgtcttcagttgct

SEQ ID NO: 45742 - DNA, 25 bp, Probe Sequence
gtggttgataattgtcttcagttgc

SEQ ID NO: 45743 - DNA, 25 bp, Probe Sequence
ataattgtcttcagttgctgctaag

SEQ ID NO: 45744 - DNA, 25 bp, Probe Sequence
gataattgtcttcagttgctgctaa

SEQ ID NO: 45745 - DNA, 25 bp, Probe Sequence
aagaactctggatgaatacatggtg

SEQ ID NO: 45746 - DNA, 25 bp, Probe Sequence
tgataattgtcttcagttgctgcta

SEQ ID NO: 45747 - DNA, 25 bp, Probe Sequence
taattgtcttcagttgctgctaagt

SEQ ID NO: 45748 - DNA, 25 bp, Probe Sequence
ggttgataattgtcttcagttgctg

SEQ ID NO: 45749 - DNA, 25 bp, Probe Sequence
taagaactctggatgaatacatggt

SEQ ID NO: 45750 - DNA, 25 bp, Probe Sequence
actacagaagagcagttgaagtgat

SEQ ID NO: 45751 - DNA, 25 bp, Probe Sequence
aatccaagaactacagaagagcagt

SEQ ID NO: 45752 - DNA, 25 bp, Probe Sequence
ttgataattgtcttcagttgctgct

SEQ ID NO: 45753 - DNA, 25 bp, Probe Sequence
gttgataattgtcttcagttgctgc

SEQ ID NO: 45754 - DNA, 25 bp, Probe Sequence
ttaagaactctggatgaatacatgg

SEQ ID NO: 45755 - DNA, 25 bp, Probe Sequence
acagaagagcagttgaagtgattta

SEQ ID NO: 45756 - DNA, 25 bp, Probe Sequence
tacagaagagcagttgaagtgattt

SEQ ID NO: 45757 - DNA, 25 bp, Probe Sequence
agaactctggatgaatacatggtgg

SEQ ID NO: 45758 - DNA, 25 bp, Probe Sequence
agaaatccaagaactacagaagagc

SEQ ID NO: 45759 - DNA, 25 bp, Probe Sequence
aattgtcttcagttgctgctaagtg

SEQ ID NO: 45760 - DNA, 25 bp, Probe Sequence
agaagagcagttgaagtgatttatg

SEQ ID NO: 45761 - DNA, 25 bp, Probe Sequence
cagaagagcagttgaagtgatttat

SEQ ID NO: 45762 - DNA, 25 bp, Probe Sequence
aaatccaagaactacagaagagcag

SEQ ID NO: 45763 - DNA, 25 bp, Probe Sequence
ttctgtggctgactgtaatactgta

SEQ ID NO: 45764 - DNA, 25 bp, Probe Sequence
ttggttatcatcagaaggtggtctc

SEQ ID NO: 45765 - DNA, 25 bp, Probe Sequence
cttctgtggctgactgtaatactgt

SEQ ID NO: 45766 - DNA, 25 bp, Probe Sequence
tctgtggctgactgtaatactgtac

SEQ ID NO: 45767 - DNA, 25 bp, Probe Sequence
gttggttatcatcagaaggtggtct

SEQ ID NO: 45768 - DNA, 25 bp, Probe Sequence
cagcattgatgaacggatgaagaag

SEQ ID NO: 45769 - DNA, 25 bp, Probe Sequence
cagatgattgctaattccttgaagg

SEQ ID NO: 45770 - DNA, 25 bp, Probe Sequence
ggttggttatcatcagaaggtggtc

SEQ ID NO: 45771 - DNA, 25 bp, Probe Sequence
ccctttactataactctagcatccc

SEQ ID NO: 45772 - DNA, 25 bp, Probe Sequence
ctgtttctgaccattaaatgctgtt

SEQ ID NO: 45773 - DNA, 25 bp, Probe Sequence
aactgtttctgaccattaaatgctg

SEQ ID NO: 45774 - DNA, 25 bp, Probe Sequence
caactgtttctgaccattaaatgct

SEQ ID NO: 45775 - DNA, 25 bp, Probe Sequence
gtttctgaccattaaatgctgttgt

SEQ ID NO: 45776 - DNA, 25 bp, Probe Sequence
tgtttctgaccattaaatgctgttg

SEQ ID NO: 45777 - DNA, 25 bp, Probe Sequence
acaactgtttctgaccattaaatgc

SEQ ID NO: 45778 - DNA, 25 bp, Probe Sequence
tttctgaccattaaatgctgttgta

SEQ ID NO: 45779 - DNA, 25 bp, Probe Sequence
gaccattaaatgctgttgtactctg

SEQ ID NO: 45780 - DNA, 25 bp, Probe Sequence
ctgaccattaaatgctgttgtactc

SEQ ID NO: 45781 - DNA, 25 bp, Probe Sequence
ttctgaccattaaatgctgttgtac

SEQ ID NO: 45782 - DNA, 25 bp, Probe Sequence
ccattaaatgctgttgtactctgaa

SEQ ID NO: 45783 - DNA, 25 bp, Probe Sequence
accattaaatgctgttgtactctga

SEQ ID NO: 45784 - DNA, 25 bp, Probe Sequence
tgaccattaaatgctgttgtactct

SEQ ID NO: 45785 - DNA, 25 bp, Probe Sequence
tctgaccattaaatgctgttgtact

SEQ ID NO: 45786 - DNA, 25 bp, Probe Sequence
actgtttctgaccattaaatgctgt

SEQ ID NO: 45787 - DNA, 25 bp, Probe Sequence
atacaacattcaatacttccaggtg

SEQ ID NO: 45788 - DNA, 25 bp, Probe Sequence
attcaatacttccaggtgtgtcaga

SEQ ID NO: 45789 - DNA, 25 bp, Probe Sequence
cattcaatacttccaggtgtgtcag

SEQ ID NO: 45790 - DNA, 25 bp, Probe Sequence
aatacaacattcaatacttccaggt

SEQ ID NO: 45791 - DNA, 25 bp, Probe Sequence
tacaacattcaatacttccaggtgt

SEQ ID NO: 45792 - DNA, 25 bp, Probe Sequence
ttgctgaattagtctgataagtgaa

SEQ ID NO: 45793 - DNA, 25 bp, Probe Sequence
tgctgaattagtctgataagtgaat

SEQ ID NO: 45794 - DNA, 25 bp, Probe Sequence
aacattcaatacttccaggtgtgtc

SEQ ID NO: 45795 - DNA, 25 bp, Probe Sequence
gctgaattagtctgataagtgaatg

SEQ ID NO: 45796 - DNA, 25 bp, Probe Sequence
caacattcaatacttccaggtgtgt

SEQ ID NO: 45797 - DNA, 25 bp, Probe Sequence
acaacattcaatacttccaggtgtg

SEQ ID NO: 45798 - DNA, 25 bp, Probe Sequence
aatacttccaggtgtgtcagacttg

SEQ ID NO: 45799 - DNA, 25 bp, Probe Sequence
caatacttccaggtgtgtcagactt

SEQ ID NO: 45800 - DNA, 25 bp, Probe Sequence
ttcaatacttccaggtgtgtcagac

SEQ ID NO: 45801 - DNA, 25 bp, Probe Sequence
ttgctaagaacctaagaacgtgtat

SEQ ID NO: 45802 - DNA, 25 bp, Probe Sequence
ctaagaacctaagaacgtgtatgct

SEQ ID NO: 45803 - DNA, 25 bp, Probe Sequence
tagggtagaaagaagtaacacgaag

SEQ ID NO: 45804 - DNA, 25 bp, Probe Sequence
acattcaatacttccaggtgtgtca

SEQ ID NO: 45805 - DNA, 25 bp, Probe Sequence
tgctaagaacctaagaacgtgtatg

SEQ ID NO: 45806 - DNA, 25 bp, Probe Sequence
gggtagaaagaagtaacacgaagaa

SEQ ID NO: 45807 - DNA, 25 bp, Probe Sequence
aaccaaataaacaagtcatccacaa

SEQ ID NO: 45808 - DNA, 25 bp, Probe Sequence
ggtagaaagaagtaacacgaagaag

SEQ ID NO: 45809 - DNA, 25 bp, Probe Sequence
ggacgctgatataatagggtagaaa

SEQ ID NO: 45810 - DNA, 25 bp, Probe Sequence
accaaataaacaagtcatccacaat

SEQ ID NO: 45811 - DNA, 25 bp, Probe Sequence
attactctgaatgatcttcctgtgg

SEQ ID NO: 45812 - DNA, 25 bp, Probe Sequence
aattactctgaatgatcttcctgtg

SEQ ID NO: 45813 - DNA, 25 bp, Probe Sequence
cacactcttagaggtctcttcatta

SEQ ID NO: 45814 - DNA, 25 bp, Probe Sequence
ccacactcttagaggtctcttcatt

SEQ ID NO: 45815 - DNA, 25 bp, Probe Sequence
gttctcaataaagttcacggtttca

SEQ ID NO: 45816 - DNA, 25 bp, Probe Sequence
acactcttagaggtctcttcattat

SEQ ID NO: 45817 - DNA, 25 bp, Probe Sequence
agttctcaataaagttcacggtttc

SEQ ID NO: 45818 - DNA, 25 bp, Probe Sequence
tgattatcgtgggaaatacttggtt

SEQ ID NO: 45819 - DNA, 25 bp, Probe Sequence
aaagttctcaataaagttcacggtt

SEQ ID NO: 45820 - DNA, 25 bp, Probe Sequence
aagttctcaataaagttcacggttt

SEQ ID NO: 45821 - DNA, 25 bp, Probe Sequence
ctgattatcgtgggaaatacttggt

SEQ ID NO: 45822 - DNA, 25 bp, Probe Sequence
actgattatcgtgggaaatacttgg

SEQ ID NO: 45823 - DNA, 25 bp, Probe Sequence
tcttctacccacttgatttcacatt

SEQ ID NO: 45824 - DNA, 25 bp, Probe Sequence
ttcttctacccacttgatttcacat

SEQ ID NO: 45825 - DNA, 25 bp, Probe Sequence
ttcttcttctacccacttgatttca

SEQ ID NO: 45826 - DNA, 25 bp, Probe Sequence
gattatcgtgggaaatacttggttt

SEQ ID NO: 45827 - DNA, 25 bp, Probe Sequence
ttctacccacttgatttcacatttg

SEQ ID NO: 45828 - DNA, 25 bp, Probe Sequence
tcttcttctacccacttgatttcac

SEQ ID NO: 45829 - DNA, 25 bp, Probe Sequence
tctcaataaagttcacggtttcatt

SEQ ID NO: 45830 - DNA, 25 bp, Probe Sequence
ttctcaataaagttcacggtttcat

SEQ ID NO: 45831 - DNA, 25 bp, Probe Sequence
cttctacccacttgatttcacattt

SEQ ID NO: 45832 - DNA, 25 bp, Probe Sequence
aactgattatcgtgggaaatacttg

SEQ ID NO: 45833 - DNA, 25 bp, Probe Sequence
gaaagttctcaataaagttcacggt

SEQ ID NO: 45834 - DNA, 25 bp, Probe Sequence
cttcttctacccacttgatttcaca

SEQ ID NO: 45835 - DNA, 25 bp, Probe Sequence
atgtaacctgtattattctggacgg

SEQ ID NO: 45836 - DNA, 25 bp, Probe Sequence
cctgtattattctggacggacttat

SEQ ID NO: 45837 - DNA, 25 bp, Probe Sequence
acctgtattattctggacggactta

SEQ ID NO: 45838 - DNA, 25 bp, Probe Sequence
taacctgtattattctggacggact

SEQ ID NO: 45839 - DNA, 25 bp, Probe Sequence
gtaacctgtattattctggacggac

SEQ ID NO: 45840 - DNA, 25 bp, Probe Sequence
tgtaacctgtattattctggacgga

SEQ ID NO: 45841 - DNA, 25 bp, Probe Sequence
aacctgtattattctggacggactt

SEQ ID NO: 45842 - DNA, 25 bp, Probe Sequence
ttaagccagttgttcatacttcctt

SEQ ID NO: 45843 - DNA, 25 bp, Probe Sequence
gttaagccagttgttcatacttcct

SEQ ID NO: 45844 - DNA, 25 bp, Probe Sequence
tcctagaataagaagcaatgatgtg

SEQ ID NO: 45845 - DNA, 25 bp, Probe Sequence
gtcctagaataagaagcaatgatgt

SEQ ID NO: 45846 - DNA, 25 bp, Probe Sequence
tgtcctagaataagaagcaatgatg

SEQ ID NO: 45847 - DNA, 25 bp, Probe Sequence
ctgtattattctggacggacttatt

SEQ ID NO: 45848 - DNA, 25 bp, Probe Sequence
tctgtatgtcctagaataagaagca

SEQ ID NO: 45849 - DNA, 25 bp, Probe Sequence
tatgtaacctgtattattctggacg

SEQ ID NO: 45850 - DNA, 25 bp, Probe Sequence
gctatgtaacctgtattattctgga

SEQ ID NO: 45851 - DNA, 25 bp, Probe Sequence
ctgtatgtcctagaataagaagcaa

SEQ ID NO: 45852 - DNA, 25 bp, Probe Sequence
aactggagtggtacttactgaagaa

SEQ ID NO: 45853 - DNA, 25 bp, Probe Sequence
ctctgtatgtcctagaataagaagc

SEQ ID NO: 45854 - DNA, 25 bp, Probe Sequence
ggttaagccagttgttcatacttcc

SEQ ID NO: 45855 - DNA, 25 bp, Probe Sequence
caaggaggacaataatagctgatct

SEQ ID NO: 45856 - DNA, 25 bp, Probe Sequence
acaaggaggacaataatagctgatc

SEQ ID NO: 45857 - DNA, 25 bp, Probe Sequence
cacaaggaggacaataatagctgat

SEQ ID NO: 45858 - DNA, 25 bp, Probe Sequence
atgtcctagaataagaagcaatgat

SEQ ID NO: 45859 - DNA, 25 bp, Probe Sequence
gaataaagatgaatggacaactcca

SEQ ID NO: 45860 - DNA, 25 bp, Probe Sequence
ataaagatgaatggacaactccaaa

SEQ ID NO: 45861 - DNA, 25 bp, Probe Sequence
aataaagatgaatggacaactccaa

SEQ ID NO: 45862 - DNA, 25 bp, Probe Sequence
taaagatgaatggacaactccaaaa

SEQ ID NO: 45863 - DNA, 25 bp, Probe Sequence
catgaccacactggagaaatggttt

SEQ ID NO: 45864 - DNA, 25 bp, Probe Sequence
atgaccacactggagaaatggtttt

SEQ ID NO: 45865 - DNA, 25 bp, Probe Sequence
ccatgaccacactggagaaatggtt

SEQ ID NO: 45866 - DNA, 25 bp, Probe Sequence
tctcttcctatgtggtcttctctac

SEQ ID NO: 45867 - DNA, 25 bp, Probe Sequence
gtctcttcctatgtggtcttctcta

SEQ ID NO: 45868 - DNA, 25 bp, Probe Sequence
agtctcttcctatgtggtcttctct

SEQ ID NO: 45869 - DNA, 25 bp, Probe Sequence
gagtctcttcctatgtggtcttctc

SEQ ID NO: 45870 - DNA, 25 bp, Probe Sequence
ctcttcctatgtggtcttctctacc

SEQ ID NO: 45871 - DNA, 25 bp, Probe Sequence
cctctttggaatcttcaacttctga

SEQ ID NO: 45872 - DNA, 25 bp, Probe Sequence
ggagtctcttcctatgtggtcttct

SEQ ID NO: 45873 - DNA, 25 bp, Probe Sequence
ttctcctctttggaatcttcaactt

SEQ ID NO: 45874 - DNA, 25 bp, Probe Sequence
ctcctctttggaatcttcaacttct

SEQ ID NO: 45875 - DNA, 25 bp, Probe Sequence
tctcctctttggaatcttcaacttc

SEQ ID NO: 45876 - DNA, 25 bp, Probe Sequence
tcctctttggaatcttcaacttctg

SEQ ID NO: 45877 - DNA, 25 bp, Probe Sequence
ccacttattctcctctttggaatct

SEQ ID NO: 45878 - DNA, 25 bp, Probe Sequence
attctcctctttggaatcttcaact

SEQ ID NO: 45879 - DNA, 25 bp, Probe Sequence
tggagtctcttcctatgtggtcttc

SEQ ID NO: 45880 - DNA, 25 bp, Probe Sequence
cccacttattctcctctttggaatc

SEQ ID NO: 45881 - DNA, 25 bp, Probe Sequence
gtggagtctcttcctatgtggtctt

SEQ ID NO: 45882 - DNA, 25 bp, Probe Sequence
tattctcctctttggaatcttcaac

SEQ ID NO: 45883 - DNA, 25 bp, Probe Sequence
cacttattctcctctttggaatctt

SEQ ID NO: 45884 - DNA, 25 bp, Probe Sequence
cttattctcctctttggaatcttca

SEQ ID NO: 45885 - DNA, 25 bp, Probe Sequence
acttattctcctctttggaatcttc

SEQ ID NO: 45886 - DNA, 25 bp, Probe Sequence
ttattctcctctttggaatcttcaa

SEQ ID NO: 45887 - DNA, 25 bp, Probe Sequence
cagtggagtctcttcctatgtggtc

SEQ ID NO: 45888 - DNA, 25 bp, Probe Sequence
tcttcctatgtggtcttctctaccc

SEQ ID NO: 45889 - DNA, 25 bp, Probe Sequence
ctctttggaatcttcaacttctgaa

SEQ ID NO: 45890 - DNA, 25 bp, Probe Sequence
attacatctggtctcttccttcact

SEQ ID NO: 45891 - DNA, 25 bp, Probe Sequence
aattacatctggtctcttccttcac

SEQ ID NO: 45892 - DNA, 25 bp, Probe Sequence
ttacatctggtctcttccttcactg

SEQ ID NO: 45893 - DNA, 25 bp, Probe Sequence
tctcaatctcctgacctcatattcc

SEQ ID NO: 45894 - DNA, 25 bp, Probe Sequence
ctcaatctcctgacctcatattcca

SEQ ID NO: 45895 - DNA, 25 bp, Probe Sequence
gtctcaatctcctgacctcatattc

SEQ ID NO: 45896 - DNA, 25 bp, Probe Sequence
agtagagccagaggtataactgaat

SEQ ID NO: 45897 - DNA, 25 bp, Probe Sequence
gagccagaggtataactgaataaga

SEQ ID NO: 45898 - DNA, 25 bp, Probe Sequence
agagccagaggtataactgaataag

SEQ ID NO: 45899 - DNA, 25 bp, Probe Sequence
tcaatctcctgacctcatattccac

SEQ ID NO: 45900 - DNA, 25 bp, Probe Sequence
gagtagagccagaggtataactgaa

SEQ ID NO: 45901 - DNA, 25 bp, Probe Sequence
agccagaggtataactgaataagaa

SEQ ID NO: 45902 - DNA, 25 bp, Probe Sequence
gtagagccagaggtataactgaata

SEQ ID NO: 45903 - DNA, 25 bp, Probe Sequence
caatctcctgacctcatattccacc

SEQ ID NO: 45904 - DNA, 25 bp, Probe Sequence
tagagccagaggtataactgaataa

SEQ ID NO: 45905 - DNA, 25 bp, Probe Sequence
aatggagtagagccagaggtataac

SEQ ID NO: 45906 - DNA, 25 bp, Probe Sequence
caatggagtagagccagaggtataa

SEQ ID NO: 45907 - DNA, 25 bp, Probe Sequence
aaattacatctggtctcttccttca

SEQ ID NO: 45908 - DNA, 25 bp, Probe Sequence
gaatttgtggaaggagagaggatac

SEQ ID NO: 45909 - DNA, 25 bp, Probe Sequence
agaatttgtggaaggagagaggata

SEQ ID NO: 45910 - DNA, 25 bp, Probe Sequence
tagaatttgtggaaggagagaggat

SEQ ID NO: 45911 - DNA, 25 bp, Probe Sequence
atagaatttgtggaaggagagagga

SEQ ID NO: 45912 - DNA, 25 bp, Probe Sequence
gactggttatttctcctttgtgtaa

SEQ ID NO: 45913 - DNA, 25 bp, Probe Sequence
tttaagcaagagaaagacaactgtt

SEQ ID NO: 45914 - DNA, 25 bp, Probe Sequence
ttgattcagttaagcctaagcagaa

SEQ ID NO: 45915 - DNA, 25 bp, Probe Sequence
gattcagttaagcctaagcagaagt

SEQ ID NO: 45916 - DNA, 25 bp, Probe Sequence
tgattcagttaagcctaagcagaag

SEQ ID NO: 45917 - DNA, 25 bp, Probe Sequence
cttgattcagttaagcctaagcaga

SEQ ID NO: 45918 - DNA, 25 bp, Probe Sequence
attcagttaagcctaagcagaagtg

SEQ ID NO: 45919 - DNA, 25 bp, Probe Sequence
cacacttgattcagttaagcctaag

SEQ ID NO: 45920 - DNA, 25 bp, Probe Sequence
tcacacttgattcagttaagcctaa

SEQ ID NO: 45921 - DNA, 25 bp, Probe Sequence
ctcacacttgattcagttaagccta

SEQ ID NO: 45922 - DNA, 25 bp, Probe Sequence
tcacctcacacttgattcagttaag

SEQ ID NO: 45923 - DNA, 25 bp, Probe Sequence
acttgattcagttaagcctaagcag

SEQ ID NO: 45924 - DNA, 25 bp, Probe Sequence
cacttgattcagttaagcctaagca

SEQ ID NO: 45925 - DNA, 25 bp, Probe Sequence
acacttgattcagttaagcctaagc

SEQ ID NO: 45926 - DNA, 25 bp, Probe Sequence
ttcagttaagcctaagcagaagtgt

SEQ ID NO: 45927 - DNA, 25 bp, Probe Sequence
tcagttaagcctaagcagaagtgtc

SEQ ID NO: 45928 - DNA, 25 bp, Probe Sequence
cacctcacacttgattcagttaagc

SEQ ID NO: 45929 - DNA, 25 bp, Probe Sequence
gcattgctgttgatattagtgataa

SEQ ID NO: 45930 - DNA, 25 bp, Probe Sequence
aagctattggacttcagaagattga

SEQ ID NO: 45931 - DNA, 25 bp, Probe Sequence
accttgtaaagaagccttgaaacta

SEQ ID NO: 45932 - DNA, 25 bp, Probe Sequence
ccttgtaaagaagccttgaaactaa

SEQ ID NO: 45933 - DNA, 25 bp, Probe Sequence
gctgttagttctggtgtgtaaatca

SEQ ID NO: 45934 - DNA, 25 bp, Probe Sequence
tgctgttagttctggtgtgtaaatc

SEQ ID NO: 45935 - DNA, 25 bp, Probe Sequence
ctgctgttagttctggtgtgtaaat

SEQ ID NO: 45936 - DNA, 25 bp, Probe Sequence
cctcacacttgattcagttaagcct

SEQ ID NO: 45937 - DNA, 25 bp, Probe Sequence
aaagaaactgattccaaaccctaat

SEQ ID NO: 45938 - DNA, 25 bp, Probe Sequence
acctggaggcaattcatattatcaa

SEQ ID NO: 45939 - DNA, 25 bp, Probe Sequence
aacctggaggcaattcatattatca

SEQ ID NO: 45940 - DNA, 25 bp, Probe Sequence
caacctggaggcaattcatattatc

SEQ ID NO: 45941 - DNA, 25 bp, Probe Sequence
cctggaggcaattcatattatcaag

SEQ ID NO: 45942 - DNA, 25 bp, Probe Sequence
ctggaggcaattcatattatcaaga

SEQ ID NO: 45943 - DNA, 25 bp, Probe Sequence
gcaacctggaggcaattcatattat

SEQ ID NO: 45944 - DNA, 25 bp, Probe Sequence
gaggcaattcatattatcaagaagc

SEQ ID NO: 45945 - DNA, 25 bp, Probe Sequence
tggaggcaattcatattatcaagaa

SEQ ID NO: 45946 - DNA, 25 bp, Probe Sequence
ggaggcaattcatattatcaagaag

SEQ ID NO: 45947 - DNA, 25 bp, Probe Sequence
attatcaagaagctaggaggaagtt

SEQ ID NO: 45948 - DNA, 25 bp, Probe Sequence
aatctgtttatcggtgcccattata

SEQ ID NO: 45949 - DNA, 25 bp, Probe Sequence
atctgtttatcggtgcccattatat

SEQ ID NO: 45950 - DNA, 25 bp, Probe Sequence
tattatcaagaagctaggaggaagt

SEQ ID NO: 45951 - DNA, 25 bp, Probe Sequence
tctgtttatcggtgcccattatatc

SEQ ID NO: 45952 - DNA, 25 bp, Probe Sequence
tttatcggtgcccattatatcctta

SEQ ID NO: 45953 - DNA, 25 bp, Probe Sequence
gtttatcggtgcccattatatcctt

SEQ ID NO: 45954 - DNA, 25 bp, Probe Sequence
ggtctaatttatttgccgtgtcatt

SEQ ID NO: 45955 - DNA, 25 bp, Probe Sequence
ttatcggtgcccattatatccttaa

SEQ ID NO: 45956 - DNA, 25 bp, Probe Sequence
aggcaattcatattatcaagaagct

SEQ ID NO: 45957 - DNA, 25 bp, Probe Sequence
taggtctaatttatttgccgtgtca

SEQ ID NO: 45958 - DNA, 25 bp, Probe Sequence
cataggtctaatttatttgccgtgt

SEQ ID NO: 45959 - DNA, 25 bp, Probe Sequence
acataggtctaatttatttgccgtg

SEQ ID NO: 45960 - DNA, 25 bp, Probe Sequence
tcatattatcaagaagctaggagga

SEQ ID NO: 45961 - DNA, 25 bp, Probe Sequence
tagatgaaggcttcctgttggataa

SEQ ID NO: 45962 - DNA, 25 bp, Probe Sequence
cctgatggttgtaagagtggaatta

SEQ ID NO: 45963 - DNA, 25 bp, Probe Sequence
ctgatggttgtaagagtggaattaa

SEQ ID NO: 45964 - DNA, 25 bp, Probe Sequence
tgatggttgtaagagtggaattaac

SEQ ID NO: 45965 - DNA, 25 bp, Probe Sequence
atggttgtaagagtggaattaactg

SEQ ID NO: 45966 - DNA, 25 bp, Probe Sequence
ttctcatctctaagtgcctcattga

SEQ ID NO: 45967 - DNA, 25 bp, Probe Sequence
tggttgtaagagtggaattaactgc

SEQ ID NO: 45968 - DNA, 25 bp, Probe Sequence
gatggttgtaagagtggaattaact

SEQ ID NO: 45969 - DNA, 25 bp, Probe Sequence
ccttcaccagcaatattcagtctaa

SEQ ID NO: 45970 - DNA, 25 bp, Probe Sequence
ggttgtaagagtggaattaactgcc

SEQ ID NO: 45971 - DNA, 25 bp, Probe Sequence
tcaatgtcaccttcaccagcaatat

SEQ ID NO: 45972 - DNA, 25 bp, Probe Sequence
accttcaccagcaatattcagtcta

SEQ ID NO: 45973 - DNA, 25 bp, Probe Sequence
aatgtcaccttcaccagcaatattc

SEQ ID NO: 45974 - DNA, 25 bp, Probe Sequence
catctctaagtgcctcattgagttc

SEQ ID NO: 45975 - DNA, 25 bp, Probe Sequence
caatgtcaccttcaccagcaatatt

SEQ ID NO: 45976 - DNA, 25 bp, Probe Sequence
aatggtatccagtgattcgttgaag

SEQ ID NO: 45977 - DNA, 25 bp, Probe Sequence
tcatctctaagtgcctcattgagtt

SEQ ID NO: 45978 - DNA, 25 bp, Probe Sequence
tttctcatctctaagtgcctcattg

SEQ ID NO: 45979 - DNA, 25 bp, Probe Sequence
gtttctcatctctaagtgcctcatt

SEQ ID NO: 45980 - DNA, 25 bp, Probe Sequence
gcacttggttagcagatgtttaatt

SEQ ID NO: 45981 - DNA, 25 bp, Probe Sequence
caatggtatccagtgattcgttgaa

SEQ ID NO: 45982 - DNA, 25 bp, Probe Sequence
agcacttggttagcagatgtttaat

SEQ ID NO: 45983 - DNA, 25 bp, Probe Sequence
tatccagtgattcgttgaagaggag

SEQ ID NO: 45984 - DNA, 25 bp, Probe Sequence
ggtatccagtgattcgttgaagagg

SEQ ID NO: 45985 - DNA, 25 bp, Probe Sequence
gcctgatggttgtaagagtggaatt

SEQ ID NO: 45986 - DNA, 25 bp, Probe Sequence
tattccacttactccaccttccatt

SEQ ID NO: 45987 - DNA, 25 bp, Probe Sequence
gtattccacttactccaccttccat

SEQ ID NO: 45988 - DNA, 25 bp, Probe Sequence
cttgacctgtattccacttactcca

SEQ ID NO: 45989 - DNA, 25 bp, Probe Sequence
ttgacctgtattccacttactccac

SEQ ID NO: 45990 - DNA, 25 bp, Probe Sequence
attccacttactccaccttccattc

SEQ ID NO: 45991 - DNA, 25 bp, Probe Sequence
ctgtattccacttactccaccttcc

SEQ ID NO: 45992 - DNA, 25 bp, Probe Sequence
cctgtattccacttactccaccttc

SEQ ID NO: 45993 - DNA, 25 bp, Probe Sequence
ccttgacctgtattccacttactcc

SEQ ID NO: 45994 - DNA, 25 bp, Probe Sequence
gacctccacaccattaacaagatga

SEQ ID NO: 45995 - DNA, 25 bp, Probe Sequence
tgtattccacttactccaccttcca

SEQ ID NO: 45996 - DNA, 25 bp, Probe Sequence
acctgtattccacttactccacctt

SEQ ID NO: 45997 - DNA, 25 bp, Probe Sequence
tcctccctctcctaaagtaatttga

SEQ ID NO: 45998 - DNA, 25 bp, Probe Sequence
ttcctccctctcctaaagtaatttg

SEQ ID NO: 45999 - DNA, 25 bp, Probe Sequence
cctccctctcctaaagtaatttgat

SEQ ID NO: 46000 - DNA, 25 bp, Probe Sequence
acctccacaccattaacaagatgag

SEQ ID NO: 46001 - DNA, 25 bp, Probe Sequence
gatagatcaggaggcatcattgagg

SEQ ID NO: 46002 - DNA, 25 bp, Probe Sequence
tttcctccctctcctaaagtaattt

SEQ ID NO: 46003 - DNA, 25 bp, Probe Sequence
gacctgtattccacttactccacct

SEQ ID NO: 46004 - DNA, 25 bp, Probe Sequence
ccctctcctaaagtaatttgatcct

SEQ ID NO: 46005 - DNA, 25 bp, Probe Sequence
tccctctcctaaagtaatttgatcc

SEQ ID NO: 46006 - DNA, 25 bp, Probe Sequence
cgatagatcaggaggcatcattgag

SEQ ID NO: 46007 - DNA, 25 bp, Probe Sequence
ccacaccattaacaagatgagcctt

SEQ ID NO: 46008 - DNA, 25 bp, Probe Sequence
ccacgtactctatcttccattcctc

SEQ ID NO: 46009 - DNA, 25 bp, Probe Sequence
tgacctgtattccacttactccacc

SEQ ID NO: 46010 - DNA, 25 bp, Probe Sequence
accaatagaagtgtgaatagtagaa

SEQ ID NO: 46011 - DNA, 25 bp, Probe Sequence
aaccaatagaagtgtgaatagtaga

SEQ ID NO: 46012 - DNA, 25 bp, Probe Sequence
acatggatatggtgagaatagaatc

SEQ ID NO: 46013 - DNA, 25 bp, Probe Sequence
catggatatggtgagaatagaatca

SEQ ID NO: 46014 - DNA, 25 bp, Probe Sequence
cacatggatatggtgagaatagaat

SEQ ID NO: 46015 - DNA, 25 bp, Probe Sequence
tgagaatagaatcaccagaggaaat

SEQ ID NO: 46016 - DNA, 25 bp, Probe Sequence
gagaatagaatcaccagaggaaatt

SEQ ID NO: 46017 - DNA, 25 bp, Probe Sequence
tgagagtaaagcaaagtatgtgtat

SEQ ID NO: 46018 - DNA, 25 bp, Probe Sequence
atgagagtaaagcaaagtatgtgta

SEQ ID NO: 46019 - DNA, 25 bp, Probe Sequence
tatgagagtaaagcaaagtatgtgt

SEQ ID NO: 46020 - DNA, 25 bp, Probe Sequence
aacgacatgaaggtagatgaagtcc

SEQ ID NO: 46021 - DNA, 25 bp, Probe Sequence
ggtagatgaagtcctttacgaagac

SEQ ID NO: 46022 - DNA, 25 bp, Probe Sequence
aggtagatgaagtcctttacgaaga

SEQ ID NO: 46023 - DNA, 25 bp, Probe Sequence
tactacagccaaataatcagtgttt

SEQ ID NO: 46024 - DNA, 25 bp, Probe Sequence
ttactacagccaaataatcagtgtt

SEQ ID NO: 46025 - DNA, 25 bp, Probe Sequence
attactacagccaaataatcagtgt

SEQ ID NO: 46026 - DNA, 25 bp, Probe Sequence
aaacgacatgaaggtagatgaagtc

SEQ ID NO: 46027 - DNA, 25 bp, Probe Sequence
ccaatagaagtgtgaatagtagaat

SEQ ID NO: 46028 - DNA, 25 bp, Probe Sequence
gacttgatctcatcttcatgccagg

SEQ ID NO: 46029 - DNA, 25 bp, Probe Sequence
ggacttgatctcatcttcatgccag

SEQ ID NO: 46030 - DNA, 25 bp, Probe Sequence
gagagtaaagcaaagtatgtgtatt

SEQ ID NO: 46031 - DNA, 25 bp, Probe Sequence
gaagactcgtcaacagcttaaatct

SEQ ID NO: 46032 - DNA, 25 bp, Probe Sequence
acgacatgaaggtagatgaagtcct

SEQ ID NO: 46033 - DNA, 25 bp, Probe Sequence
cttaaatctggattactacagccaa

SEQ ID NO: 46034 - DNA, 25 bp, Probe Sequence
tgatgaagaggacgaagaagattac

SEQ ID NO: 46035 - DNA, 25 bp, Probe Sequence
ctgatgaagaggacgaagaagatta

SEQ ID NO: 46036 - DNA, 25 bp, Probe Sequence
gatgaagaggacgaagaagattacg

SEQ ID NO: 46037 - DNA, 25 bp, Probe Sequence
atgaagaggacgaagaagattacga

SEQ ID NO: 46038 - DNA, 25 bp, Probe Sequence
gaagaggacgaagaagattacgact

SEQ ID NO: 46039 - DNA, 25 bp, Probe Sequence
tgaagaggacgaagaagattacgac

SEQ ID NO: 46040 - DNA, 25 bp, Probe Sequence
aagaggacgaagaagattacgactc

SEQ ID NO: 46041 - DNA, 25 bp, Probe Sequence
gacgaagaagattacgactcctagc

SEQ ID NO: 46042 - DNA, 25 bp, Probe Sequence
cctgatgaagaggacgaagaagatt

SEQ ID NO: 46043 - DNA, 25 bp, Probe Sequence
ggacgaagaagattacgactcctag

SEQ ID NO: 46044 - DNA, 25 bp, Probe Sequence
acctgatgaagaggacgaagaagat

SEQ ID NO: 46045 - DNA, 25 bp, Probe Sequence
ggagagaaggtagagctgttcttaa

SEQ ID NO: 46046 - DNA, 25 bp, Probe Sequence
acgaagaagattacgactcctagcg

SEQ ID NO: 46047 - DNA, 25 bp, Probe Sequence
agaggacgaagaagattacgactcc

SEQ ID NO: 46048 - DNA, 25 bp, Probe Sequence
ccgagcaagaagaagaagtacaacg

SEQ ID NO: 46049 - DNA, 25 bp, Probe Sequence
aggagagaaggtagagctgttctta

SEQ ID NO: 46050 - DNA, 25 bp, Probe Sequence
cacctgatgaagaggacgaagaaga

SEQ ID NO: 46051 - DNA, 25 bp, Probe Sequence
ttttagttggttttagttgctctgg

SEQ ID NO: 46052 - DNA, 25 bp, Probe Sequence
ccttttagttggttttagttgctct

SEQ ID NO: 46053 - DNA, 25 bp, Probe Sequence
tagccccttttagttggttttagtt

SEQ ID NO: 46054 - DNA, 25 bp, Probe Sequence
atagccccttttagttggttttagt

SEQ ID NO: 46055 - DNA, 25 bp, Probe Sequence
catagccccttttagttggttttag

SEQ ID NO: 46056 - DNA, 25 bp, Probe Sequence
cccttttagttggttttagttgctc

SEQ ID NO: 46057 - DNA, 25 bp, Probe Sequence
gccgagcaagaagaagaagtacaac

SEQ ID NO: 46058 - DNA, 25 bp, Probe Sequence
acaatggaataacttacatctcacc

SEQ ID NO: 46059 - DNA, 25 bp, Probe Sequence
caatgttaagagtctcatcacttgt

SEQ ID NO: 46060 - DNA, 25 bp, Probe Sequence
tcaatgttaagagtctcatcacttg

SEQ ID NO: 46061 - DNA, 25 bp, Probe Sequence
cttcaatgttaagagtctcatcact

SEQ ID NO: 46062 - DNA, 25 bp, Probe Sequence
ggttatacgagcactaggaggaatt

SEQ ID NO: 46063 - DNA, 25 bp, Probe Sequence
tcaatggttatacgagcactaggag

SEQ ID NO: 46064 - DNA, 25 bp, Probe Sequence
aatgttaagagtctcatcacttgtt

SEQ ID NO: 46065 - DNA, 25 bp, Probe Sequence
cactcaatggttatacgagcactag

SEQ ID NO: 46066 - DNA, 25 bp, Probe Sequence
ttcaatgttaagagtctcatcactt

SEQ ID NO: 46067 - DNA, 25 bp, Probe Sequence
ctcaatggttatacgagcactagga

SEQ ID NO: 46068 - DNA, 25 bp, Probe Sequence
cctgaagtctagcttggatatatgc

SEQ ID NO: 46069 - DNA, 25 bp, Probe Sequence
gcctgaagtctagcttggatatatg

SEQ ID NO: 46070 - DNA, 25 bp, Probe Sequence
tgagtatcatacaggtagaggttaa

SEQ ID NO: 46071 - DNA, 25 bp, Probe Sequence
aagtgagagacatggttactgtgta

SEQ ID NO: 46072 - DNA, 25 bp, Probe Sequence
actcaatggttatacgagcactagg

SEQ ID NO: 46073 - DNA, 25 bp, Probe Sequence
cagcattgcattgattcagtaagat

SEQ ID NO: 46074 - DNA, 25 bp, Probe Sequence
aacaatggaataacttacatctcac

SEQ ID NO: 46075 - DNA, 25 bp, Probe Sequence
tggttatacgagcactaggaggaat

SEQ ID NO: 46076 - DNA, 25 bp, Probe Sequence
atggttatacgagcactaggaggaa

SEQ ID NO: 46077 - DNA, 25 bp, Probe Sequence
aatggttatacgagcactaggagga

SEQ ID NO: 46078 - DNA, 25 bp, Probe Sequence
caatggttatacgagcactaggagg

SEQ ID NO: 46079 - DNA, 25 bp, Probe Sequence
aacagcattgcattgattcagtaag

SEQ ID NO: 46080 - DNA, 25 bp, Probe Sequence
aataatccagtgacatctcatagag

SEQ ID NO: 46081 - DNA, 25 bp, Probe Sequence
gtgagagacatggttactgtgtaat

SEQ ID NO: 46082 - DNA, 25 bp, Probe Sequence
atctctctaatcttgttcttcacgg

SEQ ID NO: 46083 - DNA, 25 bp, Probe Sequence
catctctctaatcttgttcttcacg

SEQ ID NO: 46084 - DNA, 25 bp, Probe Sequence
tctctctaatcttgttcttcacggt

SEQ ID NO: 46085 - DNA, 25 bp, Probe Sequence
tcaatactgatgagtgttcaatcca

SEQ ID NO: 46086 - DNA, 25 bp, Probe Sequence
ctctctaatcttgttcttcacggtg

SEQ ID NO: 46087 - DNA, 25 bp, Probe Sequence
ttgtactattgaccatcctgaagac

SEQ ID NO: 46088 - DNA, 25 bp, Probe Sequence
aatactgatgagtgttcaatccaac

SEQ ID NO: 46089 - DNA, 25 bp, Probe Sequence
caatactgatgagtgttcaatccaa

SEQ ID NO: 46090 - DNA, 25 bp, Probe Sequence
ttcaatactgatgagtgttcaatcc

SEQ ID NO: 46091 - DNA, 25 bp, Probe Sequence
tcatctctctaatcttgttcttcac

SEQ ID NO: 46092 - DNA, 25 bp, Probe Sequence
gtcatctctctaatcttgttcttca

SEQ ID NO: 46093 - DNA, 25 bp, Probe Sequence
gctcctcctgttcttactcttcatt

SEQ ID NO: 46094 - DNA, 25 bp, Probe Sequence
ccatcctgaagacagtgaatatgaa

SEQ ID NO: 46095 - DNA, 25 bp, Probe Sequence
agtcatctctctaatcttgttcttc

SEQ ID NO: 46096 - DNA, 25 bp, Probe Sequence
atcctgaagacagtgaatatgaagc

SEQ ID NO: 46097 - DNA, 25 bp, Probe Sequence
tactattgaccatcctgaagacagt

SEQ ID NO: 46098 - DNA, 25 bp, Probe Sequence
caacatggataatgatctggaggtt

SEQ ID NO: 46099 - DNA, 25 bp, Probe Sequence
catcctgaagacagtgaatatgaag

SEQ ID NO: 46100 - DNA, 25 bp, Probe Sequence
gaccatcctgaagacagtgaatatg

SEQ ID NO: 46101 - DNA, 25 bp, Probe Sequence
accatcctgaagacagtgaatatga

SEQ ID NO: 46102 - DNA, 25 bp, Probe Sequence
tgaccatcctgaagacagtgaatat

SEQ ID NO: 46103 - DNA, 25 bp, Probe Sequence
ccttatatggagttgttgaacacag

SEQ ID NO: 46104 - DNA, 25 bp, Probe Sequence
gtactattgaccatcctgaagacag

SEQ ID NO: 46105 - DNA, 25 bp, Probe Sequence
tgtactattgaccatcctgaagaca

SEQ ID NO: 46106 - DNA, 25 bp, Probe Sequence
ctgaacccctggaaaacccataaag

SEQ ID NO: 46107 - DNA, 25 bp, Probe Sequence
tgaacccctggaaaacccataaagg

SEQ ID NO: 46108 - DNA, 25 bp, Probe Sequence
cctgaacccctggaaaacccataaa

SEQ ID NO: 46109 - DNA, 25 bp, Probe Sequence
ggcagcagcaagaactatttattaa

SEQ ID NO: 46110 - DNA, 25 bp, Probe Sequence
ggtgctcaataaatgtttgttgttg

SEQ ID NO: 46111 - DNA, 25 bp, Probe Sequence
aggtgctcaataaatgtttgttgtt

SEQ ID NO: 46112 - DNA, 25 bp, Probe Sequence
cagtaggtgctcaataaatgtttgt

SEQ ID NO: 46113 - DNA, 25 bp, Probe Sequence
ccagtaggtgctcaataaatgtttg

SEQ ID NO: 46114 - DNA, 25 bp, Probe Sequence
gggcagcagcaagaactatttatta

SEQ ID NO: 46115 - DNA, 25 bp, Probe Sequence
taggtgctcaataaatgtttgttgt

SEQ ID NO: 46116 - DNA, 25 bp, Probe Sequence
gtaggtgctcaataaatgtttgttg

SEQ ID NO: 46117 - DNA, 25 bp, Probe Sequence
agtaggtgctcaataaatgtttgtt

SEQ ID NO: 46118 - DNA, 25 bp, Probe Sequence
gcagcagcaagaactatttattaaa

SEQ ID NO: 46119 - DNA, 25 bp, Probe Sequence
cttctatgtctctggaccacaggat

SEQ ID NO: 46120 - DNA, 25 bp, Probe Sequence
accagtaggtgctcaataaatgttt

SEQ ID NO: 46121 - DNA, 25 bp, Probe Sequence
gaccagtaggtgctcaataaatgtt

SEQ ID NO: 46122 - DNA, 25 bp, Probe Sequence
ttctatgtctctggaccacaggatg

SEQ ID NO: 46123 - DNA, 25 bp, Probe Sequence
ctgaccagtaggtgctcaataaatg

SEQ ID NO: 46124 - DNA, 25 bp, Probe Sequence
tgggcagcagcaagaactatttatt

SEQ ID NO: 46125 - DNA, 25 bp, Probe Sequence
tgaccagtaggtgctcaataaatgt

SEQ ID NO: 46126 - DNA, 25 bp, Probe Sequence
cctgaccagtaggtgctcaataaat

SEQ ID NO: 46127 - DNA, 25 bp, Probe Sequence
ccatcctgccacttctatgtctctg

SEQ ID NO: 46128 - DNA, 25 bp, Probe Sequence
cacttctatgtctctggaccacagg

SEQ ID NO: 46129 - DNA, 25 bp, Probe Sequence
gtgctcaataaatgtttgttgttga

SEQ ID NO: 46130 - DNA, 25 bp, Probe Sequence
gaagagcactggactaagagtctag

SEQ ID NO: 46131 - DNA, 25 bp, Probe Sequence
gacagagcgagactccatctttaaa

SEQ ID NO: 46132 - DNA, 25 bp, Probe Sequence
acttctatgtctctggaccacagga

SEQ ID NO: 46133 - DNA, 25 bp, Probe Sequence
acaatcattatacggactcttcaga

SEQ ID NO: 46134 - DNA, 25 bp, Probe Sequence
gccacagtcttatcaagtatcctat

SEQ ID NO: 46135 - DNA, 25 bp, Probe Sequence
ttcagccacagtcttatcaagtatc

SEQ ID NO: 46136 - DNA, 25 bp, Probe Sequence
agccacagtcttatcaagtatccta

SEQ ID NO: 46137 - DNA, 25 bp, Probe Sequence
ggaacaatcattatacggactcttc

SEQ ID NO: 46138 - DNA, 25 bp, Probe Sequence
aacaatcattatacggactcttcag

SEQ ID NO: 46139 - DNA, 25 bp, Probe Sequence
gaacaatcattatacggactcttca

SEQ ID NO: 46140 - DNA, 25 bp, Probe Sequence
caatcattatacggactcttcagat

SEQ ID NO: 46141 - DNA, 25 bp, Probe Sequence
cagccacagtcttatcaagtatcct

SEQ ID NO: 46142 - DNA, 25 bp, Probe Sequence
tcagccacagtcttatcaagtatcc

SEQ ID NO: 46143 - DNA, 25 bp, Probe Sequence
aagtctgatgctaagatactgcctg

SEQ ID NO: 46144 - DNA, 25 bp, Probe Sequence
aacttacacttcatctgttccacct

SEQ ID NO: 46145 - DNA, 25 bp, Probe Sequence
ttcagatattaggactggaagagaa

SEQ ID NO: 46146 - DNA, 25 bp, Probe Sequence
ttacacttcatctgttccacctctc

SEQ ID NO: 46147 - DNA, 25 bp, Probe Sequence
cttacacttcatctgttccacctct

SEQ ID NO: 46148 - DNA, 25 bp, Probe Sequence
attcagatattaggactggaagaga

SEQ ID NO: 46149 - DNA, 25 bp, Probe Sequence
atgaatgaggaaagtctgatgctaa

SEQ ID NO: 46150 - DNA, 25 bp, Probe Sequence
gggaacaatcattatacggactctt

SEQ ID NO: 46151 - DNA, 25 bp, Probe Sequence
aatgttctccatatcaagatgtggc

SEQ ID NO: 46152 - DNA, 25 bp, Probe Sequence
taagtgggaacaatcattatacgga

SEQ ID NO: 46153 - DNA, 25 bp, Probe Sequence
agatattaggactggaagagaaagc

SEQ ID NO: 46154 - DNA, 25 bp, Probe Sequence
tgaatgaggaaagtctgatgctaag

SEQ ID NO: 46155 - DNA, 25 bp, Probe Sequence
acttacacttcatctgttccacctc

SEQ ID NO: 46156 - DNA, 25 bp, Probe Sequence
aagtgggaacaatcattatacggac

SEQ ID NO: 46157 - DNA, 25 bp, Probe Sequence
cattcttgtggctgtcctctatatc

SEQ ID NO: 46158 - DNA, 25 bp, Probe Sequence
cctctatatcgctcatcacaacaag

SEQ ID NO: 46159 - DNA, 25 bp, Probe Sequence
tcctctatatcgctcatcacaacaa

SEQ ID NO: 46160 - DNA, 25 bp, Probe Sequence
gtcctctatatcgctcatcacaaca

SEQ ID NO: 46161 - DNA, 25 bp, Probe Sequence
attcttgtggctgtcctctatatcg

SEQ ID NO: 46162 - DNA, 25 bp, Probe Sequence
aagtctaacctgtctagcatgagat

SEQ ID NO: 46163 - DNA, 25 bp, Probe Sequence
ttccacttagttgtaccgagcataa

SEQ ID NO: 46164 - DNA, 25 bp, Probe Sequence
agtctaacctgtctagcatgagatc

SEQ ID NO: 46165 - DNA, 25 bp, Probe Sequence
cagaagtcctaacagaatggtatat

SEQ ID NO: 46166 - DNA, 25 bp, Probe Sequence
ctgtcctctatatcgctcatcacaa

SEQ ID NO: 46167 - DNA, 25 bp, Probe Sequence
cttccacttagttgtaccgagcata

SEQ ID NO: 46168 - DNA, 25 bp, Probe Sequence
caagtctaacctgtctagcatgaga

SEQ ID NO: 46169 - DNA, 25 bp, Probe Sequence
ttggtgacattgttcttctgtgttc

SEQ ID NO: 46170 - DNA, 25 bp, Probe Sequence
ccagaagtcctaacagaatggtata

SEQ ID NO: 46171 - DNA, 25 bp, Probe Sequence
tgtcctctatatcgctcatcacaac

SEQ ID NO: 46172 - DNA, 25 bp, Probe Sequence
aagaggctgaagatgatgatacagg

SEQ ID NO: 46173 - DNA, 25 bp, Probe Sequence
ttctgtgttccctttatttatgctg

SEQ ID NO: 46174 - DNA, 25 bp, Probe Sequence
cattgttcttctgtgttccctttat

SEQ ID NO: 46175 - DNA, 25 bp, Probe Sequence
caaagaggctgaagatgatgataca

SEQ ID NO: 46176 - DNA, 25 bp, Probe Sequence
cttctgtgttccctttatttatgct

SEQ ID NO: 46177 - DNA, 25 bp, Probe Sequence
tcttctgtgttccctttatttatgc

SEQ ID NO: 46178 - DNA, 25 bp, Probe Sequence
tctgtgttccctttatttatgctgg

SEQ ID NO: 46179 - DNA, 25 bp, Probe Sequence
ttgttcttctgtgttccctttattt

SEQ ID NO: 46180 - DNA, 25 bp, Probe Sequence
ctgtgttccctttatttatgctggt

SEQ ID NO: 46181 - DNA, 25 bp, Probe Sequence
tatatactgtgaacatcctgtcagc

SEQ ID NO: 46182 - DNA, 25 bp, Probe Sequence
aagcacagttacaagaaatagagga

SEQ ID NO: 46183 - DNA, 25 bp, Probe Sequence
aggaagcacagttacaagaaataga

SEQ ID NO: 46184 - DNA, 25 bp, Probe Sequence
agaggaagcacagttacaagaaata

SEQ ID NO: 46185 - DNA, 25 bp, Probe Sequence
gcacagttacaagaaatagaggaga

SEQ ID NO: 46186 - DNA, 25 bp, Probe Sequence
agcacagttacaagaaatagaggag

SEQ ID NO: 46187 - DNA, 25 bp, Probe Sequence
gaagcacagttacaagaaatagagg

SEQ ID NO: 46188 - DNA, 25 bp, Probe Sequence
ggaagcacagttacaagaaatagag

SEQ ID NO: 46189 - DNA, 25 bp, Probe Sequence
gaggaagcacagttacaagaaatag

SEQ ID NO: 46190 - DNA, 25 bp, Probe Sequence
tgatagaaaggaggcaatttgaaac

SEQ ID NO: 46191 - DNA, 25 bp, Probe Sequence
gatagaaaggaggcaatttgaaacc

SEQ ID NO: 46192 - DNA, 25 bp, Probe Sequence
aagagcatagccaacttgatagaaa

SEQ ID NO: 46193 - DNA, 25 bp, Probe Sequence
aaaccaaagagaataagcgtctact

SEQ ID NO: 46194 - DNA, 25 bp, Probe Sequence
gaaaccaaagagaataagcgtctac

SEQ ID NO: 46195 - DNA, 25 bp, Probe Sequence
tgaaaccaaagagaataagcgtcta

SEQ ID NO: 46196 - DNA, 25 bp, Probe Sequence
atagaaaggaggcaatttgaaacca

SEQ ID NO: 46197 - DNA, 25 bp, Probe Sequence
cagaggaagcacagttacaagaaat

SEQ ID NO: 46198 - DNA, 25 bp, Probe Sequence
agagcatagccaacttgatagaaag

SEQ ID NO: 46199 - DNA, 25 bp, Probe Sequence
aaccaaagagaataagcgtctacta

SEQ ID NO: 46200 - DNA, 25 bp, Probe Sequence
catagccaacttgatagaaaggagg

SEQ ID NO: 46201 - DNA, 25 bp, Probe Sequence
cccatccaggaccttctatttatat

SEQ ID NO: 46202 - DNA, 25 bp, Probe Sequence
aacttgatagaaaggaggcaatttg

SEQ ID NO: 46203 - DNA, 25 bp, Probe Sequence
caacttgatagaaaggaggcaattt

SEQ ID NO: 46204 - DNA, 25 bp, Probe Sequence
acttgatagaaaggaggcaatttga

SEQ ID NO: 46205 - DNA, 25 bp, Probe Sequence
caccatacaggaagattacttgaga

SEQ ID NO: 46206 - DNA, 25 bp, Probe Sequence
atacaggaagattacttgagagagc

SEQ ID NO: 46207 - DNA, 25 bp, Probe Sequence
accatacaggaagattacttgagag

SEQ ID NO: 46208 - DNA, 25 bp, Probe Sequence
ccatacaggaagattacttgagaga

SEQ ID NO: 46209 - DNA, 25 bp, Probe Sequence
gcaccatacaggaagattacttgag

SEQ ID NO: 46210 - DNA, 25 bp, Probe Sequence
catacaggaagattacttgagagag

SEQ ID NO: 46211 - DNA, 25 bp, Probe Sequence
ggcaccatacaggaagattacttga

SEQ ID NO: 46212 - DNA, 25 bp, Probe Sequence
tacaggaagattacttgagagagct

SEQ ID NO: 46213 - DNA, 25 bp, Probe Sequence
gccaaagacaaagatgactgaaata

SEQ ID NO: 46214 - DNA, 25 bp, Probe Sequence
tggcaccatacaggaagattacttg

SEQ ID NO: 46215 - DNA, 25 bp, Probe Sequence
ataatttaacctaccagcccttctc

SEQ ID NO: 46216 - DNA, 25 bp, Probe Sequence
gataatttaacctaccagcccttct

SEQ ID NO: 46217 - DNA, 25 bp, Probe Sequence
agccaaagacaaagatgactgaaat

SEQ ID NO: 46218 - DNA, 25 bp, Probe Sequence
aaataacttcaaattccagccaacg

SEQ ID NO: 46219 - DNA, 25 bp, Probe Sequence
ggataatttaacctaccagcccttc

SEQ ID NO: 46220 - DNA, 25 bp, Probe Sequence
gaaataacttcaaattccagccaac

SEQ ID NO: 46221 - DNA, 25 bp, Probe Sequence
ctggcaccatacaggaagattactt

SEQ ID NO: 46222 - DNA, 25 bp, Probe Sequence
tataatcagactggaaacgggactt

SEQ ID NO: 46223 - DNA, 25 bp, Probe Sequence
gaagattacttgagagagctgctga

SEQ ID NO: 46224 - DNA, 25 bp, Probe Sequence
aactggcaccatacaggaagattac

SEQ ID NO: 46225 - DNA, 25 bp, Probe Sequence
caactggcaccatacaggaagatta

SEQ ID NO: 46226 - DNA, 25 bp, Probe Sequence
taatttaacctaccagcccttctcc

SEQ ID NO: 46227 - DNA, 25 bp, Probe Sequence
gaagatgtcatcagaaatgcctttg

SEQ ID NO: 46228 - DNA, 25 bp, Probe Sequence
aagattacttgagagagctgctgac

SEQ ID NO: 46229 - DNA, 25 bp, Probe Sequence
tggaattgattctaaggtgatgttc

SEQ ID NO: 46230 - DNA, 25 bp, Probe Sequence
cttggaattgattctaaggtgatgt

SEQ ID NO: 46231 - DNA, 25 bp, Probe Sequence
ggaattgattctaaggtgatgttct

SEQ ID NO: 46232 - DNA, 25 bp, Probe Sequence
ttggaattgattctaaggtgatgtt

SEQ ID NO: 46233 - DNA, 25 bp, Probe Sequence
ctcttcatgtaagtccttggaattg

SEQ ID NO: 46234 - DNA, 25 bp, Probe Sequence
tctcttcatgtaagtccttggaatt

SEQ ID NO: 46235 - DNA, 25 bp, Probe Sequence
ttctcttcatgtaagtccttggaat

SEQ ID NO: 46236 - DNA, 25 bp, Probe Sequence
catgtaagtccttggaattgattct

SEQ ID NO: 46237 - DNA, 25 bp, Probe Sequence
tcttcatgtaagtccttggaattga

SEQ ID NO: 46238 - DNA, 25 bp, Probe Sequence
tcatgtaagtccttggaattgattc

SEQ ID NO: 46239 - DNA, 25 bp, Probe Sequence
cttcatgtaagtccttggaattgat

SEQ ID NO: 46240 - DNA, 25 bp, Probe Sequence
tgtaagtccttggaattgattctaa

SEQ ID NO: 46241 - DNA, 25 bp, Probe Sequence
ttcatgtaagtccttggaattgatt

SEQ ID NO: 46242 - DNA, 25 bp, Probe Sequence
atgtaagtccttggaattgattcta

SEQ ID NO: 46243 - DNA, 25 bp, Probe Sequence
ctgtgttaggagatagggatattgg

SEQ ID NO: 46244 - DNA, 25 bp, Probe Sequence
tgagagttattacagccagaaagtg

SEQ ID NO: 46245 - DNA, 25 bp, Probe Sequence
gtaagtccttggaattgattctaag

SEQ ID NO: 46246 - DNA, 25 bp, Probe Sequence
gttcttagcactttaattcctgtca

SEQ ID NO: 46247 - DNA, 25 bp, Probe Sequence
tgttcttagcactttaattcctgtc

SEQ ID NO: 46248 - DNA, 25 bp, Probe Sequence
ctgaaactggtctactgtgtctcta

SEQ ID NO: 46249 - DNA, 25 bp, Probe Sequence
gaattgattctaaggtgatgttctt

SEQ ID NO: 46250 - DNA, 25 bp, Probe Sequence
tgtgttaggagatagggatattggc

SEQ ID NO: 46251 - DNA, 25 bp, Probe Sequence
atgttcttagcactttaattcctgt

SEQ ID NO: 46252 - DNA, 25 bp, Probe Sequence
ttcttagcactttaattcctgtcaa

SEQ ID NO: 46253 - DNA, 25 bp, Probe Sequence
gtaactaacactggaccattggatc

SEQ ID NO: 46254 - DNA, 25 bp, Probe Sequence
tgtaactaacactggaccattggat

SEQ ID NO: 46255 - DNA, 25 bp, Probe Sequence
ttggtggaatcatcgttgtggttat

SEQ ID NO: 46256 - DNA, 25 bp, Probe Sequence
attggtggaatcatcgttgtggtta

SEQ ID NO: 46257 - DNA, 25 bp, Probe Sequence
ttgtaactaacactggaccattgga

SEQ ID NO: 46258 - DNA, 25 bp, Probe Sequence
cttcattggtggaatcatcgttgtg

SEQ ID NO: 46259 - DNA, 25 bp, Probe Sequence
taactaacactggaccattggatcg

SEQ ID NO: 46260 - DNA, 25 bp, Probe Sequence
actgatttgtaactaacactggacc

SEQ ID NO: 46261 - DNA, 25 bp, Probe Sequence
tggtggaatcatcgttgtggttatg

SEQ ID NO: 46262 - DNA, 25 bp, Probe Sequence
tgatttgtaactaacactggaccat

SEQ ID NO: 46263 - DNA, 25 bp, Probe Sequence
aactgatttgtaactaacactggac

SEQ ID NO: 46264 - DNA, 25 bp, Probe Sequence
atttgtaactaacactggaccattg

SEQ ID NO: 46265 - DNA, 25 bp, Probe Sequence
cagacttggctcctctaaacatttg

SEQ ID NO: 46266 - DNA, 25 bp, Probe Sequence
gagaaagatggtttgtcaacagtga

SEQ ID NO: 46267 - DNA, 25 bp, Probe Sequence
aacagttgagaaagatggtttgtca

SEQ ID NO: 46268 - DNA, 25 bp, Probe Sequence
ctgatttgtaactaacactggacca

SEQ ID NO: 46269 - DNA, 25 bp, Probe Sequence
gatttgtaactaacactggaccatt

SEQ ID NO: 46270 - DNA, 25 bp, Probe Sequence
tgagaaagatggtttgtcaacagtg

SEQ ID NO: 46271 - DNA, 25 bp, Probe Sequence
gagacacacagacaacagttgagaa

SEQ ID NO: 46272 - DNA, 25 bp, Probe Sequence
tttgtaactaacactggaccattgg

SEQ ID NO: 46273 - DNA, 25 bp, Probe Sequence
tcgatattatatgctgtaaccatga

SEQ ID NO: 46274 - DNA, 25 bp, Probe Sequence
aaactgatttgtaactaacactgga

SEQ ID NO: 46275 - DNA, 25 bp, Probe Sequence
gacaacagttgagaaagatggtttg

SEQ ID NO: 46276 - DNA, 25 bp, Probe Sequence
agacaacagttgagaaagatggttt

SEQ ID NO: 46277 - DNA, 25 bp, Probe Sequence
cgagccttgtatgtatgttatggat

SEQ ID NO: 46278 - DNA, 25 bp, Probe Sequence
gagacacgagaagaacgaatcatta

SEQ ID NO: 46279 - DNA, 25 bp, Probe Sequence
agacacgagaagaacgaatcattac

SEQ ID NO: 46280 - DNA, 25 bp, Probe Sequence
gagaagaacgaatcattacaggtcc

SEQ ID NO: 46281 - DNA, 25 bp, Probe Sequence
acacgagaagaacgaatcattacag

SEQ ID NO: 46282 - DNA, 25 bp, Probe Sequence
gacacgagaagaacgaatcattaca

SEQ ID NO: 46283 - DNA, 25 bp, Probe Sequence
gaccgagccttgtatgtatgttatg

SEQ ID NO: 46284 - DNA, 25 bp, Probe Sequence
agaccgagccttgtatgtatgttat

SEQ ID NO: 46285 - DNA, 25 bp, Probe Sequence
cgagaagaacgaatcattacaggtc

SEQ ID NO: 46286 - DNA, 25 bp, Probe Sequence
aagaccgagccttgtatgtatgtta

SEQ ID NO: 46287 - DNA, 25 bp, Probe Sequence
agaagaacgaatcattacaggtcct

SEQ ID NO: 46288 - DNA, 25 bp, Probe Sequence
cacgagaagaacgaatcattacagg

SEQ ID NO: 46289 - DNA, 25 bp, Probe Sequence
gagccttgtatgtatgttatggata

SEQ ID NO: 46290 - DNA, 25 bp, Probe Sequence
acgagaagaacgaatcattacaggt

SEQ ID NO: 46291 - DNA, 25 bp, Probe Sequence
agagacacgagaagaacgaatcatt

SEQ ID NO: 46292 - DNA, 25 bp, Probe Sequence
aagagacacgagaagaacgaatcat

SEQ ID NO: 46293 - DNA, 25 bp, Probe Sequence
tgtcaccagattcattacaattcaa

SEQ ID NO: 46294 - DNA, 25 bp, Probe Sequence
aattgttacaagaagaggtcaccaa

SEQ ID NO: 46295 - DNA, 25 bp, Probe Sequence
ccgagccttgtatgtatgttatgga

SEQ ID NO: 46296 - DNA, 25 bp, Probe Sequence
attgttacaagaagaggtcaccaag

SEQ ID NO: 46297 - DNA, 25 bp, Probe Sequence
accgagccttgtatgtatgttatgg

SEQ ID NO: 46298 - DNA, 25 bp, Probe Sequence
aatccttgtcaccagattcattaca

SEQ ID NO: 46299 - DNA, 25 bp, Probe Sequence
agcacaaagaagcaatcatcaaata

SEQ ID NO: 46300 - DNA, 25 bp, Probe Sequence
agccttgtatgtatgttatggatac

SEQ ID NO: 46301 - DNA, 25 bp, Probe Sequence
ggactaatgaaatggtgttgttgat

SEQ ID NO: 46302 - DNA, 25 bp, Probe Sequence
tactgtggactaatgaaatggtgtt

SEQ ID NO: 46303 - DNA, 25 bp, Probe Sequence
atactgtggactaatgaaatggtgt

SEQ ID NO: 46304 - DNA, 25 bp, Probe Sequence
tggactaatgaaatggtgttgttga

SEQ ID NO: 46305 - DNA, 25 bp, Probe Sequence
gtggactaatgaaatggtgttgttg

SEQ ID NO: 46306 - DNA, 25 bp, Probe Sequence
tgtggactaatgaaatggtgttgtt

SEQ ID NO: 46307 - DNA, 25 bp, Probe Sequence
ctgtggactaatgaaatggtgttgt

SEQ ID NO: 46308 - DNA, 25 bp, Probe Sequence
actgtggactaatgaaatggtgttg

SEQ ID NO: 46309 - DNA, 25 bp, Probe Sequence
tatactgtggactaatgaaatggtg

SEQ ID NO: 46310 - DNA, 25 bp, Probe Sequence
cagggttggtagttgttactcattt

SEQ ID NO: 46311 - DNA, 25 bp, Probe Sequence
ctatactgtggactaatgaaatggt

SEQ ID NO: 46312 - DNA, 25 bp, Probe Sequence
caactgtagtctttctatactgtgg

SEQ ID NO: 46313 - DNA, 25 bp, Probe Sequence
acaatgtaaacagggttggtagttg

SEQ ID NO: 46314 - DNA, 25 bp, Probe Sequence
cacaatgtaaacagggttggtagtt

SEQ ID NO: 46315 - DNA, 25 bp, Probe Sequence
aactgtagtctttctatactgtgga

SEQ ID NO: 46316 - DNA, 25 bp, Probe Sequence
tctatactgtggactaatgaaatgg

SEQ ID NO: 46317 - DNA, 25 bp, Probe Sequence
actgtagtctttctatactgtggac

SEQ ID NO: 46318 - DNA, 25 bp, Probe Sequence
ggaaatgagacctggtggaatatta

SEQ ID NO: 46319 - DNA, 25 bp, Probe Sequence
ctggaaatgagacctggtggaatat

SEQ ID NO: 46320 - DNA, 25 bp, Probe Sequence
caatgtaaacagggttggtagttgt

SEQ ID NO: 46321 - DNA, 25 bp, Probe Sequence
gactaatgaaatggtgttgttgata

SEQ ID NO: 46322 - DNA, 25 bp, Probe Sequence
acagggttggtagttgttactcatt

SEQ ID NO: 46323 - DNA, 25 bp, Probe Sequence
tcatagcttacagatggtataactg

SEQ ID NO: 46324 - DNA, 25 bp, Probe Sequence
atgaaatggtgttgttgataaatct

SEQ ID NO: 46325 - DNA, 25 bp, Probe Sequence
atcaaagaagcagaagaagcaacat

SEQ ID NO: 46326 - DNA, 25 bp, Probe Sequence
cattgatgactgatgaaaccatgta

SEQ ID NO: 46327 - DNA, 25 bp, Probe Sequence
catcaaagaagcagaagaagcaaca

SEQ ID NO: 46328 - DNA, 25 bp, Probe Sequence
actgatgaaaccatgtaataaagca

SEQ ID NO: 46329 - DNA, 25 bp, Probe Sequence
ttgatgactgatgaaaccatgtaat

SEQ ID NO: 46330 - DNA, 25 bp, Probe Sequence
attgatgactgatgaaaccatgtaa

SEQ ID NO: 46331 - DNA, 25 bp, Probe Sequence
tgaaaccatgtaataaagcatctct

SEQ ID NO: 46332 - DNA, 25 bp, Probe Sequence
gactgatgaaaccatgtaataaagc

SEQ ID NO: 46333 - DNA, 25 bp, Probe Sequence
gaaaccatgtaataaagcatctctg

SEQ ID NO: 46334 - DNA, 25 bp, Probe Sequence
aaagaagcagaagaagcaacatgag

SEQ ID NO: 46335 - DNA, 25 bp, Probe Sequence
cttgaacattcctgcctccctattt

SEQ ID NO: 46336 - DNA, 25 bp, Probe Sequence
aagaagcagaagaagcaacatgagg

SEQ ID NO: 46337 - DNA, 25 bp, Probe Sequence
ccatcaaagaagcagaagaagcaac

SEQ ID NO: 46338 - DNA, 25 bp, Probe Sequence
tgatgactgatgaaaccatgtaata

SEQ ID NO: 46339 - DNA, 25 bp, Probe Sequence
catcactgtgcctgagaaattgaag

SEQ ID NO: 46340 - DNA, 25 bp, Probe Sequence
caaagaagcagaagaagcaacatga

SEQ ID NO: 46341 - DNA, 25 bp, Probe Sequence
tcaaagaagcagaagaagcaacatg

SEQ ID NO: 46342 - DNA, 25 bp, Probe Sequence
ctgatgaaaccatgtaataaagcat

SEQ ID NO: 46343 - DNA, 25 bp, Probe Sequence
gctttcatttctgtctgctgagatc

SEQ ID NO: 46344 - DNA, 25 bp, Probe Sequence
ttgaacattcctgcctccctatttg

SEQ ID NO: 46345 - DNA, 25 bp, Probe Sequence
aaaccatgtaataaagcatctctgg

SEQ ID NO: 46346 - DNA, 25 bp, Probe Sequence
atgaaaccatgtaataaagcatctc

SEQ ID NO: 46347 - DNA, 25 bp, Probe Sequence
aaccatgtaataaagcatctctggg

SEQ ID NO: 46348 - DNA, 25 bp, Probe Sequence
tgactgatgaaaccatgtaataaag

SEQ ID NO: 46349 - DNA, 25 bp, Probe Sequence
cacctcactcctgttacttacctaa

SEQ ID NO: 46350 - DNA, 25 bp, Probe Sequence
aagttatagtatatctggacaagcc

SEQ ID NO: 46351 - DNA, 25 bp, Probe Sequence
ccacctcactcctgttacttaccta

SEQ ID NO: 46352 - DNA, 25 bp, Probe Sequence
atagtatatctggacaagccaactt

SEQ ID NO: 46353 - DNA, 25 bp, Probe Sequence
gacattcaaggcatttctatcacat

SEQ ID NO: 46354 - DNA, 25 bp, Probe Sequence
acctcactcctgttacttacctaaa

SEQ ID NO: 46355 - DNA, 25 bp, Probe Sequence
tacaccacctcactcctgttactta

SEQ ID NO: 46356 - DNA, 25 bp, Probe Sequence
tatagtatatctggacaagccaact

SEQ ID NO: 46357 - DNA, 25 bp, Probe Sequence
agttatagtatatctggacaagcca

SEQ ID NO: 46358 - DNA, 25 bp, Probe Sequence
cctcactcctgttacttacctaaac

SEQ ID NO: 46359 - DNA, 25 bp, Probe Sequence
acattcaaggcatttctatcacata

SEQ ID NO: 46360 - DNA, 25 bp, Probe Sequence
tgacattcaaggcatttctatcaca

SEQ ID NO: 46361 - DNA, 25 bp, Probe Sequence
gccacactattaccatgagaagagg

SEQ ID NO: 46362 - DNA, 25 bp, Probe Sequence
cctgttgtgtatagatgcaagatat

SEQ ID NO: 46363 - DNA, 25 bp, Probe Sequence
ttatagtatatctggacaagccaac

SEQ ID NO: 46364 - DNA, 25 bp, Probe Sequence
gttatagtatatctggacaagccaa

SEQ ID NO: 46365 - DNA, 25 bp, Probe Sequence
atacaccacctcactcctgttactt

SEQ ID NO: 46366 - DNA, 25 bp, Probe Sequence
aatacaccacctcactcctgttact

SEQ ID NO: 46367 - DNA, 25 bp, Probe Sequence
taaatacaccacctcactcctgtta

SEQ ID NO: 46368 - DNA, 25 bp, Probe Sequence
aacttgtaaatacaccacctcactc

SEQ ID NO: 46369 - DNA, 25 bp, Probe Sequence
gatgggagtgagacagaagtaagtg

SEQ ID NO: 46370 - DNA, 25 bp, Probe Sequence
caacttgtaaatacaccacctcact

SEQ ID NO: 46371 - DNA, 25 bp, Probe Sequence
cctaaacagatataaatggctggtt

SEQ ID NO: 46372 - DNA, 25 bp, Probe Sequence
tgatccctgttacccagagaatata

SEQ ID NO: 46373 - DNA, 25 bp, Probe Sequence
tgccacttgtcttaactctgaatat

SEQ ID NO: 46374 - DNA, 25 bp, Probe Sequence
ttgccacttgtcttaactctgaata

SEQ ID NO: 46375 - DNA, 25 bp, Probe Sequence
ttgtctctagttcatcctctaacca

SEQ ID NO: 46376 - DNA, 25 bp, Probe Sequence
gttgccacttgtcttaactctgaat

SEQ ID NO: 46377 - DNA, 25 bp, Probe Sequence
tgtctctagttcatcctctaaccac

SEQ ID NO: 46378 - DNA, 25 bp, Probe Sequence
ctctagttcatcctctaaccaccag

SEQ ID NO: 46379 - DNA, 25 bp, Probe Sequence
gtctctagttcatcctctaaccacc

SEQ ID NO: 46380 - DNA, 25 bp, Probe Sequence
gccacttgtcttaactctgaatatt

SEQ ID NO: 46381 - DNA, 25 bp, Probe Sequence
tctctagttcatcctctaaccacca

SEQ ID NO: 46382 - DNA, 25 bp, Probe Sequence
tgtaattatgcagaagaatggagct

SEQ ID NO: 46383 - DNA, 25 bp, Probe Sequence
gtgtaattatgcagaagaatggagc

SEQ ID NO: 46384 - DNA, 25 bp, Probe Sequence
aaacttgctctactctctgaaatga

SEQ ID NO: 46385 - DNA, 25 bp, Probe Sequence
tgaaacttgctctactctctgaaat

SEQ ID NO: 46386 - DNA, 25 bp, Probe Sequence
acttgctctactctctgaaatgatt

SEQ ID NO: 46387 - DNA, 25 bp, Probe Sequence
aacttgctctactctctgaaatgat

SEQ ID NO: 46388 - DNA, 25 bp, Probe Sequence
gaaacttgctctactctctgaaatg

SEQ ID NO: 46389 - DNA, 25 bp, Probe Sequence
tagaacaaactttaagccaactcac

SEQ ID NO: 46390 - DNA, 25 bp, Probe Sequence
gtagaacaaactttaagccaactca

SEQ ID NO: 46391 - DNA, 25 bp, Probe Sequence
gtgaaacttgctctactctctgaaa

SEQ ID NO: 46392 - DNA, 25 bp, Probe Sequence
tgtgtaattatgcagaagaatggag

SEQ ID NO: 46393 - DNA, 25 bp, Probe Sequence
aattggtggtaacgcttatcaacac

SEQ ID NO: 46394 - DNA, 25 bp, Probe Sequence
cttgctctactctctgaaatgattc

SEQ ID NO: 46395 - DNA, 25 bp, Probe Sequence
ggagaataagaccatgtactgcatc

SEQ ID NO: 46396 - DNA, 25 bp, Probe Sequence
aatctgaaatctgctagtgtgaaac

SEQ ID NO: 46397 - DNA, 25 bp, Probe Sequence
catacctatatctggagtgagaggc

SEQ ID NO: 46398 - DNA, 25 bp, Probe Sequence
ccatacctatatctggagtgagagg

SEQ ID NO: 46399 - DNA, 25 bp, Probe Sequence
atacctatatctggagtgagaggcc

SEQ ID NO: 46400 - DNA, 25 bp, Probe Sequence
tccatacctatatctggagtgagag

SEQ ID NO: 46401 - DNA, 25 bp, Probe Sequence
ttccatacctatatctggagtgaga

SEQ ID NO: 46402 - DNA, 25 bp, Probe Sequence
tttccatacctatatctggagtgag

SEQ ID NO: 46403 - DNA, 25 bp, Probe Sequence
tacctatatctggagtgagaggccc

SEQ ID NO: 46404 - DNA, 25 bp, Probe Sequence
atgaattttccatacctatatctgg

SEQ ID NO: 46405 - DNA, 25 bp, Probe Sequence
ggatgaattttccatacctatatct

SEQ ID NO: 46406 - DNA, 25 bp, Probe Sequence
gatgaattttccatacctatatctg

SEQ ID NO: 46407 - DNA, 25 bp, Probe Sequence
ttttccatacctatatctggagtga

SEQ ID NO: 46408 - DNA, 25 bp, Probe Sequence
attttccatacctatatctggagtg

SEQ ID NO: 46409 - DNA, 25 bp, Probe Sequence
tgaattttccatacctatatctgga

SEQ ID NO: 46410 - DNA, 25 bp, Probe Sequence
aattttccatacctatatctggagt

SEQ ID NO: 46411 - DNA, 25 bp, Probe Sequence
gaattttccatacctatatctggag

SEQ ID NO: 46412 - DNA, 25 bp, Probe Sequence
tggatgaattttccatacctatatc

SEQ ID NO: 46413 - DNA, 25 bp, Probe Sequence
gttcctgtgaagaccaagtataatt

SEQ ID NO: 46414 - DNA, 25 bp, Probe Sequence
attgagaatgttgtccttgtggttc

SEQ ID NO: 46415 - DNA, 25 bp, Probe Sequence
tagatgtggattctcttacagacaa

SEQ ID NO: 46416 - DNA, 25 bp, Probe Sequence
atagatgtggattctcttacagaca

SEQ ID NO: 46417 - DNA, 25 bp, Probe Sequence
tgatagatgtggattctcttacaga

SEQ ID NO: 46418 - DNA, 25 bp, Probe Sequence
gatagatgtggattctcttacagac

SEQ ID NO: 46419 - DNA, 25 bp, Probe Sequence
ggttcctgtgaagaccaagtataat

SEQ ID NO: 46420 - DNA, 25 bp, Probe Sequence
atgatagatgtggattctcttacag

SEQ ID NO: 46421 - DNA, 25 bp, Probe Sequence
ctgacctttgaacctctaacattgg

SEQ ID NO: 46422 - DNA, 25 bp, Probe Sequence
cctgacctttgaacctctaacattg

SEQ ID NO: 46423 - DNA, 25 bp, Probe Sequence
aatgatagatgtggattctcttaca

SEQ ID NO: 46424 - DNA, 25 bp, Probe Sequence
agatgtggattctcttacagacaaa

SEQ ID NO: 46425 - DNA, 25 bp, Probe Sequence
gatgtggattctcttacagacaaag

SEQ ID NO: 46426 - DNA, 25 bp, Probe Sequence
ttgagaatgttgtccttgtggttcc

SEQ ID NO: 46427 - DNA, 25 bp, Probe Sequence
aattcgcattgagaatgttgtcctt

SEQ ID NO: 46428 - DNA, 25 bp, Probe Sequence
cattgagaatgttgtccttgtggtt

SEQ ID NO: 46429 - DNA, 25 bp, Probe Sequence
ttcctgtgaagaccaagtataattt

SEQ ID NO: 46430 - DNA, 25 bp, Probe Sequence
ctacgagaaggaatgcttcacatat

SEQ ID NO: 46431 - DNA, 25 bp, Probe Sequence
attcgcattgagaatgttgtccttg

SEQ ID NO: 46432 - DNA, 25 bp, Probe Sequence
gagaatgttgtccttgtggttcctg

SEQ ID NO: 46433 - DNA, 25 bp, Probe Sequence
ctctaacattggttccaattcagac

SEQ ID NO: 46434 - DNA, 25 bp, Probe Sequence
cctctaacattggttccaattcaga

SEQ ID NO: 46435 - DNA, 25 bp, Probe Sequence
gcctgacctttgaacctctaacatt

SEQ ID NO: 46436 - DNA, 25 bp, Probe Sequence
acctctaacattggttccaattcag

SEQ ID NO: 46437 - DNA, 25 bp, Probe Sequence
tgaagaataatatgacagcatgagg

SEQ ID NO: 46438 - DNA, 25 bp, Probe Sequence
tctgccaatgtgactcgctattatt

SEQ ID NO: 46439 - DNA, 25 bp, Probe Sequence
gaagaataatatgacagcatgagga

SEQ ID NO: 46440 - DNA, 25 bp, Probe Sequence
ctctgccaatgtgactcgctattat

SEQ ID NO: 46441 - DNA, 25 bp, Probe Sequence
aagaataatatgacagcatgaggaa

SEQ ID NO: 46442 - DNA, 25 bp, Probe Sequence
ttgtttgtctttatggcttatttgc

SEQ ID NO: 46443 - DNA, 25 bp, Probe Sequence
gtcatcttgtttgtctttatggctt

SEQ ID NO: 46444 - DNA, 25 bp, Probe Sequence
atgtcatcttgtttgtctttatggc

SEQ ID NO: 46445 - DNA, 25 bp, Probe Sequence
tgcctttatggttgtatctgaagaa

SEQ ID NO: 46446 - DNA, 25 bp, Probe Sequence
ttgcctttatggttgtatctgaaga

SEQ ID NO: 46447 - DNA, 25 bp, Probe Sequence
tttgcctttatggttgtatctgaag

SEQ ID NO: 46448 - DNA, 25 bp, Probe Sequence
atttgcctttatggttgtatctgaa

SEQ ID NO: 46449 - DNA, 25 bp, Probe Sequence
gcttatttgcctttatggttgtatc

SEQ ID NO: 46450 - DNA, 25 bp, Probe Sequence
tgtcatcttgtttgtctttatggct

SEQ ID NO: 46451 - DNA, 25 bp, Probe Sequence
gcctttatggttgtatctgaagaat

SEQ ID NO: 46452 - DNA, 25 bp, Probe Sequence
attgagaacaggtttccagatgaag

SEQ ID NO: 46453 - DNA, 25 bp, Probe Sequence
gattgagaacaggtttccagatgaa

SEQ ID NO: 46454 - DNA, 25 bp, Probe Sequence
tttatggttcaactgtttgtgagac

SEQ ID NO: 46455 - DNA, 25 bp, Probe Sequence
tgctattcaaatgtgagtctaccat

SEQ ID NO: 46456 - DNA, 25 bp, Probe Sequence
tcatcttgtttgtctttatggctta

SEQ ID NO: 46457 - DNA, 25 bp, Probe Sequence
ctgctattcaaatgtgagtctacca

SEQ ID NO: 46458 - DNA, 25 bp, Probe Sequence
ctgccaatgtgactcgctattattt

SEQ ID NO: 46459 - DNA, 25 bp, Probe Sequence
atttatggttcaactgtttgtgaga

SEQ ID NO: 46460 - DNA, 25 bp, Probe Sequence
tatttgcctttatggttgtatctga

SEQ ID NO: 46461 - DNA, 25 bp, Probe Sequence
cgttcagggagattactatggagat

SEQ ID NO: 46462 - DNA, 25 bp, Probe Sequence
gttcagggagattactatggagatc

SEQ ID NO: 46463 - DNA, 25 bp, Probe Sequence
aagacagacaaatgggatttctact

SEQ ID NO: 46464 - DNA, 25 bp, Probe Sequence
tgaagacagacaaatgggatttcta

SEQ ID NO: 46465 - DNA, 25 bp, Probe Sequence
gaagacagacaaatgggatttctac

SEQ ID NO: 46466 - DNA, 25 bp, Probe Sequence
atgtgaagacagacaaatgggattt

SEQ ID NO: 46467 - DNA, 25 bp, Probe Sequence
agacagacaaatgggatttctactg

SEQ ID NO: 46468 - DNA, 25 bp, Probe Sequence
gtgaagacagacaaatgggatttct

SEQ ID NO: 46469 - DNA, 25 bp, Probe Sequence
gatgtgaagacagacaaatgggatt

SEQ ID NO: 46470 - DNA, 25 bp, Probe Sequence
tgtgaagacagacaaatgggatttc

SEQ ID NO: 46471 - DNA, 25 bp, Probe Sequence
cttggtgtcatcatcttgctgtctg

SEQ ID NO: 46472 - DNA, 25 bp, Probe Sequence
gacagacaaatgggatttctactgc

SEQ ID NO: 46473 - DNA, 25 bp, Probe Sequence
ccaagtggtgtatgtcttctccaag

SEQ ID NO: 46474 - DNA, 25 bp, Probe Sequence
gtttatgcaaatacaatcagcccag

SEQ ID NO: 46475 - DNA, 25 bp, Probe Sequence
ccttgggtttatgcaaatacaatca

SEQ ID NO: 46476 - DNA, 25 bp, Probe Sequence
tccttgggtttatgcaaatacaatc

SEQ ID NO: 46477 - DNA, 25 bp, Probe Sequence
ctccttgggtttatgcaaatacaat

SEQ ID NO: 46478 - DNA, 25 bp, Probe Sequence
tttatgcaaatacaatcagcccagt

SEQ ID NO: 46479 - DNA, 25 bp, Probe Sequence
ttgggtttatgcaaatacaatcagc

SEQ ID NO: 46480 - DNA, 25 bp, Probe Sequence
cttgggtttatgcaaatacaatcag

SEQ ID NO: 46481 - DNA, 25 bp, Probe Sequence
aaagtcgatgtgaagacagacaaat

SEQ ID NO: 46482 - DNA, 25 bp, Probe Sequence
ttatgcaaatacaatcagcccagtg

SEQ ID NO: 46483 - DNA, 25 bp, Probe Sequence
cctccttgggtttatgcaaatacaa

SEQ ID NO: 46484 - DNA, 25 bp, Probe Sequence
caagtggtgtatgtcttctccaagc

SEQ ID NO: 46485 - DNA, 25 bp, Probe Sequence
taccgacttagaagaacttgatgag

SEQ ID NO: 46486 - DNA, 25 bp, Probe Sequence
atctactgttgtcacggctatattc

SEQ ID NO: 46487 - DNA, 25 bp, Probe Sequence
cgacttagaagaacttgatgagaca

SEQ ID NO: 46488 - DNA, 25 bp, Probe Sequence
catctactgttgtcacggctatatt

SEQ ID NO: 46489 - DNA, 25 bp, Probe Sequence
ttaccgacttagaagaacttgatga

SEQ ID NO: 46490 - DNA, 25 bp, Probe Sequence
acttagaagaacttgatgagacaga

SEQ ID NO: 46491 - DNA, 25 bp, Probe Sequence
ccgacttagaagaacttgatgagac

SEQ ID NO: 46492 - DNA, 25 bp, Probe Sequence
aatcatcattcaccaaccataccag

SEQ ID NO: 46493 - DNA, 25 bp, Probe Sequence
agatattccaagtcagttcagaagt

SEQ ID NO: 46494 - DNA, 25 bp, Probe Sequence
gacttagaagaacttgatgagacag

SEQ ID NO: 46495 - DNA, 25 bp, Probe Sequence
accgacttagaagaacttgatgaga

SEQ ID NO: 46496 - DNA, 25 bp, Probe Sequence
agatgtgttccttattgtgaagagc

SEQ ID NO: 46497 - DNA, 25 bp, Probe Sequence
aagatgtgttccttattgtgaagag

SEQ ID NO: 46498 - DNA, 25 bp, Probe Sequence
cttagaagaacttgatgagacagag

SEQ ID NO: 46499 - DNA, 25 bp, Probe Sequence
attccaagtcagttcagaagtaagc

SEQ ID NO: 46500 - DNA, 25 bp, Probe Sequence
caagatgtgttccttattgtgaaga

SEQ ID NO: 46501 - DNA, 25 bp, Probe Sequence
gcaagatgtgttccttattgtgaag

SEQ ID NO: 46502 - DNA, 25 bp, Probe Sequence
tcaatggtagtgacttactgaacat

SEQ ID NO: 46503 - DNA, 25 bp, Probe Sequence
ggcatcattaagtagaccaggtaat

SEQ ID NO: 46504 - DNA, 25 bp, Probe Sequence
ctataatggacatcaggttgactct

SEQ ID NO: 46505 - DNA, 25 bp, Probe Sequence
agcaagatgtgttccttattgtgaa

SEQ ID NO: 46506 - DNA, 25 bp, Probe Sequence
aagcaagatgtgttccttattgtga

SEQ ID NO: 46507 - DNA, 25 bp, Probe Sequence
aatggtacttactagagcctgagaa

SEQ ID NO: 46508 - DNA, 25 bp, Probe Sequence
ataatggacatcaggttgactctaa

SEQ ID NO: 46509 - DNA, 25 bp, Probe Sequence
ttagagacattcagattcagaagcc

SEQ ID NO: 46510 - DNA, 25 bp, Probe Sequence
tagagacattcagattcagaagcca

SEQ ID NO: 46511 - DNA, 25 bp, Probe Sequence
agagacattcagattcagaagccat

SEQ ID NO: 46512 - DNA, 25 bp, Probe Sequence
cacttaggtcactgtaaggttctag

SEQ ID NO: 46513 - DNA, 25 bp, Probe Sequence
acttaggtcactgtaaggttctagg

SEQ ID NO: 46514 - DNA, 25 bp, Probe Sequence
attcagaagccatgagttcagttag

SEQ ID NO: 46515 - DNA, 25 bp, Probe Sequence
gattcagaagccatgagttcagtta

SEQ ID NO: 46516 - DNA, 25 bp, Probe Sequence
attcagattcagaagccatgagttc

SEQ ID NO: 46517 - DNA, 25 bp, Probe Sequence
cattcagattcagaagccatgagtt

SEQ ID NO: 46518 - DNA, 25 bp, Probe Sequence
gagacattcagattcagaagccatg

SEQ ID NO: 46519 - DNA, 25 bp, Probe Sequence
gcacttaggtcactgtaaggttcta

SEQ ID NO: 46520 - DNA, 25 bp, Probe Sequence
gacattcagattcagaagccatgag

SEQ ID NO: 46521 - DNA, 25 bp, Probe Sequence
tatgttcctgttagaaatggtgtgg

SEQ ID NO: 46522 - DNA, 25 bp, Probe Sequence
agacattcagattcagaagccatga

SEQ ID NO: 46523 - DNA, 25 bp, Probe Sequence
ttatgttcctgttagaaatggtgtg

SEQ ID NO: 46524 - DNA, 25 bp, Probe Sequence
cttgtgatggatgaggaaaggtatc

SEQ ID NO: 46525 - DNA, 25 bp, Probe Sequence
tttagagacattcagattcagaagc

SEQ ID NO: 46526 - DNA, 25 bp, Probe Sequence
agattcagaagccatgagttcagtt

SEQ ID NO: 46527 - DNA, 25 bp, Probe Sequence
ttcagattcagaagccatgagttca

SEQ ID NO: 46528 - DNA, 25 bp, Probe Sequence
acattcagattcagaagccatgagt

SEQ ID NO: 46529 - DNA, 25 bp, Probe Sequence
tttatgttcctgttagaaatggtgt

SEQ ID NO: 46530 - DNA, 25 bp, Probe Sequence
tcagattcagaagccatgagttcag

SEQ ID NO: 46531 - DNA, 25 bp, Probe Sequence
cagattcagaagccatgagttcagt

SEQ ID NO: 46532 - DNA, 25 bp, Probe Sequence
catggcgaaacctcatatctacaaa

SEQ ID NO: 46533 - DNA, 25 bp, Probe Sequence
aactagaacttgctgtctgatgtta

SEQ ID NO: 46534 - DNA, 25 bp, Probe Sequence
taactagaacttgctgtctgatgtt

SEQ ID NO: 46535 - DNA, 25 bp, Probe Sequence
ttaactagaacttgctgtctgatgt

SEQ ID NO: 46536 - DNA, 25 bp, Probe Sequence
actagaacttgctgtctgatgttag

SEQ ID NO: 46537 - DNA, 25 bp, Probe Sequence
ttggatcacaatcatgtagcagaat

SEQ ID NO: 46538 - DNA, 25 bp, Probe Sequence
atgttgacaaggaattggatcacaa

SEQ ID NO: 46539 - DNA, 25 bp, Probe Sequence
aatgttgacaaggaattggatcaca

SEQ ID NO: 46540 - DNA, 25 bp, Probe Sequence
tggatcacaatcatgtagcagaatg

SEQ ID NO: 46541 - DNA, 25 bp, Probe Sequence
gccagcatttgaaccttgtataatt

SEQ ID NO: 46542 - DNA, 25 bp, Probe Sequence
tttaccaaacataccgagaacgaaa

SEQ ID NO: 46543 - DNA, 25 bp, Probe Sequence
agccagcatttgaaccttgtataat

SEQ ID NO: 46544 - DNA, 25 bp, Probe Sequence
ggatcacaatcatgtagcagaatgg

SEQ ID NO: 46545 - DNA, 25 bp, Probe Sequence
gttaaggcagaagggtgattatgag

SEQ ID NO: 46546 - DNA, 25 bp, Probe Sequence
tgtgatttaactagaacttgctgtc

SEQ ID NO: 46547 - DNA, 25 bp, Probe Sequence
gttgacaaggaattggatcacaatc

SEQ ID NO: 46548 - DNA, 25 bp, Probe Sequence
catacttgggaaggacttagagttt

SEQ ID NO: 46549 - DNA, 25 bp, Probe Sequence
ttaaggcagaagggtgattatgagt

SEQ ID NO: 46550 - DNA, 25 bp, Probe Sequence
tgacaaggaattggatcacaatcat

SEQ ID NO: 46551 - DNA, 25 bp, Probe Sequence
gactctgtagtgtgtaaatgttgac

SEQ ID NO: 46552 - DNA, 25 bp, Probe Sequence
agactctgtagtgtgtaaatgttga

SEQ ID NO: 46553 - DNA, 25 bp, Probe Sequence
gagccagcatttgaaccttgtataa

SEQ ID NO: 46554 - DNA, 25 bp, Probe Sequence
ttgacaaggaattggatcacaatca

SEQ ID NO: 46555 - DNA, 25 bp, Probe Sequence
gaattggatcacaatcatgtagcag

SEQ ID NO: 46556 - DNA, 25 bp, Probe Sequence
gacaaggaattggatcacaatcatg

SEQ ID NO: 46557 - DNA, 25 bp, Probe Sequence
tacagtaacaggttatggaatggtc

SEQ ID NO: 46558 - DNA, 25 bp, Probe Sequence
ctacagtaacaggttatggaatggt

SEQ ID NO: 46559 - DNA, 25 bp, Probe Sequence
gtaacaggttatggaatggtctctt

SEQ ID NO: 46560 - DNA, 25 bp, Probe Sequence
agtaacaggttatggaatggtctct

SEQ ID NO: 46561 - DNA, 25 bp, Probe Sequence
cagtaacaggttatggaatggtctc

SEQ ID NO: 46562 - DNA, 25 bp, Probe Sequence
tatatgagttggctgattgagactg

SEQ ID NO: 46563 - DNA, 25 bp, Probe Sequence
ggatatatgagttggctgattgaga

SEQ ID NO: 46564 - DNA, 25 bp, Probe Sequence
aggatatatgagttggctgattgag

SEQ ID NO: 46565 - DNA, 25 bp, Probe Sequence
acagtaacaggttatggaatggtct

SEQ ID NO: 46566 - DNA, 25 bp, Probe Sequence
gatatatgagttggctgattgagac

SEQ ID NO: 46567 - DNA, 25 bp, Probe Sequence
tgaattgtggtcacgattgtatgaa

SEQ ID NO: 46568 - DNA, 25 bp, Probe Sequence
aactgaattgtggtcacgattgtat

SEQ ID NO: 46569 - DNA, 25 bp, Probe Sequence
tatactattcatctcctgtccttca

SEQ ID NO: 46570 - DNA, 25 bp, Probe Sequence
tactattcatctcctgtccttcagt

SEQ ID NO: 46571 - DNA, 25 bp, Probe Sequence
ctgaattgtggtcacgattgtatga

SEQ ID NO: 46572 - DNA, 25 bp, Probe Sequence
actattcatctcctgtccttcagtt

SEQ ID NO: 46573 - DNA, 25 bp, Probe Sequence
atactattcatctcctgtccttcag

SEQ ID NO: 46574 - DNA, 25 bp, Probe Sequence
atatatgagttggctgattgagact

SEQ ID NO: 46575 - DNA, 25 bp, Probe Sequence
tctatactattcatctcctgtcctt

SEQ ID NO: 46576 - DNA, 25 bp, Probe Sequence
ttctatactattcatctcctgtcct

SEQ ID NO: 46577 - DNA, 25 bp, Probe Sequence
actgaattgtggtcacgattgtatg

SEQ ID NO: 46578 - DNA, 25 bp, Probe Sequence
ctatactattcatctcctgtccttc

SEQ ID NO: 46579 - DNA, 25 bp, Probe Sequence
caactgaattgtggtcacgattgta

SEQ ID NO: 46580 - DNA, 25 bp, Probe Sequence
caggatatatgagttggctgattga

SEQ ID NO: 46581 - DNA, 25 bp, Probe Sequence
aacaccgtattctctatctcttcta

SEQ ID NO: 46582 - DNA, 25 bp, Probe Sequence
ttgtattcttagtagagacgaggtt

SEQ ID NO: 46583 - DNA, 25 bp, Probe Sequence
acaccgtattctctatctcttctat

SEQ ID NO: 46584 - DNA, 25 bp, Probe Sequence
accgtattctctatctcttctatga

SEQ ID NO: 46585 - DNA, 25 bp, Probe Sequence
caccgtattctctatctcttctatg

SEQ ID NO: 46586 - DNA, 25 bp, Probe Sequence
aatgcttcagtcctcacatgataat

SEQ ID NO: 46587 - DNA, 25 bp, Probe Sequence
gcttcagtcctcacatgataataca

SEQ ID NO: 46588 - DNA, 25 bp, Probe Sequence
tgcttcagtcctcacatgataatac

SEQ ID NO: 46589 - DNA, 25 bp, Probe Sequence
atgcttcagtcctcacatgataata

SEQ ID NO: 46590 - DNA, 25 bp, Probe Sequence
ttcagtcctcacatgataatacact

SEQ ID NO: 46591 - DNA, 25 bp, Probe Sequence
cttcagtcctcacatgataatacac

SEQ ID NO: 46592 - DNA, 25 bp, Probe Sequence
tcactaggtacaatcctggtatcat

SEQ ID NO: 46593 - DNA, 25 bp, Probe Sequence
atcactaggtacaatcctggtatca

SEQ ID NO: 46594 - DNA, 25 bp, Probe Sequence
gtcctcacatgataatacactaaca

SEQ ID NO: 46595 - DNA, 25 bp, Probe Sequence
cactaggtacaatcctggtatcatt

SEQ ID NO: 46596 - DNA, 25 bp, Probe Sequence
aatcactaggtacaatcctggtatc

SEQ ID NO: 46597 - DNA, 25 bp, Probe Sequence
cctggtatcattgccaattatcatc

SEQ ID NO: 46598 - DNA, 25 bp, Probe Sequence
tcctggtatcattgccaattatcat

SEQ ID NO: 46599 - DNA, 25 bp, Probe Sequence
atcctggtatcattgccaattatca

SEQ ID NO: 46600 - DNA, 25 bp, Probe Sequence
tcagtcctcacatgataatacacta

SEQ ID NO: 46601 - DNA, 25 bp, Probe Sequence
ttctctatctcttctatgaggacat

SEQ ID NO: 46602 - DNA, 25 bp, Probe Sequence
attctctatctcttctatgaggaca

SEQ ID NO: 46603 - DNA, 25 bp, Probe Sequence
ctggtatcattgccaattatcatca

SEQ ID NO: 46604 - DNA, 25 bp, Probe Sequence
aatcctggtatcattgccaattatc

SEQ ID NO: 46605 - DNA, 25 bp, Probe Sequence
attaagccaaccaagtgtagatgta

SEQ ID NO: 46606 - DNA, 25 bp, Probe Sequence
ttaagccaaccaagtgtagatgtag

SEQ ID NO: 46607 - DNA, 25 bp, Probe Sequence
gattaagccaaccaagtgtagatgt

SEQ ID NO: 46608 - DNA, 25 bp, Probe Sequence
tgattaagccaaccaagtgtagatg

SEQ ID NO: 46609 - DNA, 25 bp, Probe Sequence
ttgattaagccaaccaagtgtagat

SEQ ID NO: 46610 - DNA, 25 bp, Probe Sequence
aaccaagtgtagatgtagcattgtt

SEQ ID NO: 46611 - DNA, 25 bp, Probe Sequence
gaagattctggacaagtgtaatgaa

SEQ ID NO: 46612 - DNA, 25 bp, Probe Sequence
caagtgtagatgtagcattgttcca

SEQ ID NO: 46613 - DNA, 25 bp, Probe Sequence
accaagtgtagatgtagcattgttc

SEQ ID NO: 46614 - DNA, 25 bp, Probe Sequence
agaagattctggacaagtgtaatga

SEQ ID NO: 46615 - DNA, 25 bp, Probe Sequence
aacttcaaggcaagattaacgatga

SEQ ID NO: 46616 - DNA, 25 bp, Probe Sequence
caaccaagtgtagatgtagcattgt

SEQ ID NO: 46617 - DNA, 25 bp, Probe Sequence
acttcaaggcaagattaacgatgag

SEQ ID NO: 46618 - DNA, 25 bp, Probe Sequence
ccaagtgtagatgtagcattgttcc

SEQ ID NO: 46619 - DNA, 25 bp, Probe Sequence
ccaaccaagtgtagatgtagcattg

SEQ ID NO: 46620 - DNA, 25 bp, Probe Sequence
aattcacttgagtcctatgccttca

SEQ ID NO: 46621 - DNA, 25 bp, Probe Sequence
aagtgtagatgtagcattgttccac

SEQ ID NO: 46622 - DNA, 25 bp, Probe Sequence
taagccaaccaagtgtagatgtagc

SEQ ID NO: 46623 - DNA, 25 bp, Probe Sequence
cttcaaggcaagattaacgatgagg

SEQ ID NO: 46624 - DNA, 25 bp, Probe Sequence
aaggcaagattaacgatgaggacaa

SEQ ID NO: 46625 - DNA, 25 bp, Probe Sequence
ttcaaggcaagattaacgatgagga

SEQ ID NO: 46626 - DNA, 25 bp, Probe Sequence
tatactcaatgtctctgctgtggac

SEQ ID NO: 46627 - DNA, 25 bp, Probe Sequence
taacgatgaggacaaacagaagatt

SEQ ID NO: 46628 - DNA, 25 bp, Probe Sequence
gattaacgatgaggacaaacagaag

SEQ ID NO: 46629 - DNA, 25 bp, Probe Sequence
agaagatcaataagatggagtggtg

SEQ ID NO: 46630 - DNA, 25 bp, Probe Sequence
gagaagatcaataagatggagtggt

SEQ ID NO: 46631 - DNA, 25 bp, Probe Sequence
tggagaagatcaataagatggagtg

SEQ ID NO: 46632 - DNA, 25 bp, Probe Sequence
cctgagatcaacaccaagaagatta

SEQ ID NO: 46633 - DNA, 25 bp, Probe Sequence
gagatcaacaccaagaagattaacc

SEQ ID NO: 46634 - DNA, 25 bp, Probe Sequence
ctggagaagatcaataagatggagt

SEQ ID NO: 46635 - DNA, 25 bp, Probe Sequence
ggagaagatcaataagatggagtgg

SEQ ID NO: 46636 - DNA, 25 bp, Probe Sequence
gaagatcaataagatggagtggtgg

SEQ ID NO: 46637 - DNA, 25 bp, Probe Sequence
tgagatcaacaccaagaagattaac

SEQ ID NO: 46638 - DNA, 25 bp, Probe Sequence
tctggagaagatcaataagatggag

SEQ ID NO: 46639 - DNA, 25 bp, Probe Sequence
ctgagatcaacaccaagaagattaa

SEQ ID NO: 46640 - DNA, 25 bp, Probe Sequence
aagatcaataagatggagtggtgga

SEQ ID NO: 46641 - DNA, 25 bp, Probe Sequence
agatcaataagatggagtggtggag

SEQ ID NO: 46642 - DNA, 25 bp, Probe Sequence
ctacaatgaagtgaaggtggaggag

SEQ ID NO: 46643 - DNA, 25 bp, Probe Sequence
tacaatgaagtgaaggtggaggaga

SEQ ID NO: 46644 - DNA, 25 bp, Probe Sequence
tctacaatgaagtgaaggtggagga

SEQ ID NO: 46645 - DNA, 25 bp, Probe Sequence
caccaagaagattaaccctgagaat

SEQ ID NO: 46646 - DNA, 25 bp, Probe Sequence
accaagaagattaaccctgagaatt

SEQ ID NO: 46647 - DNA, 25 bp, Probe Sequence
ctctacaatgaagtgaaggtggagg

SEQ ID NO: 46648 - DNA, 25 bp, Probe Sequence
atcaacaccaagaagattaaccctg

SEQ ID NO: 46649 - DNA, 25 bp, Probe Sequence
caactttctttcccactcttctctg

SEQ ID NO: 46650 - DNA, 25 bp, Probe Sequence
acaccaagaagattaaccctgagaa

SEQ ID NO: 46651 - DNA, 25 bp, Probe Sequence
aacaccaagaagattaaccctgaga

SEQ ID NO: 46652 - DNA, 25 bp, Probe Sequence
caacaccaagaagattaaccctgag

SEQ ID NO: 46653 - DNA, 25 bp, Probe Sequence
aagcattcatcattactgtggacat

SEQ ID NO: 46654 - DNA, 25 bp, Probe Sequence
gagaagcattcatcattactgtgga

SEQ ID NO: 46655 - DNA, 25 bp, Probe Sequence
agaagcattcatcattactgtggac

SEQ ID NO: 46656 - DNA, 25 bp, Probe Sequence
gaagcattcatcattactgtggaca

SEQ ID NO: 46657 - DNA, 25 bp, Probe Sequence
cgagaagcattcatcattactgtgg

SEQ ID NO: 46658 - DNA, 25 bp, Probe Sequence
agcattcatcattactgtggacatg

SEQ ID NO: 46659 - DNA, 25 bp, Probe Sequence
cctggatcgagaacataattagtga

SEQ ID NO: 46660 - DNA, 25 bp, Probe Sequence
tcgagaagcattcatcattactgtg

SEQ ID NO: 46661 - DNA, 25 bp, Probe Sequence
cattcatcattactgtggacatggc

SEQ ID NO: 46662 - DNA, 25 bp, Probe Sequence
gcattcatcattactgtggacatgg

SEQ ID NO: 46663 - DNA, 25 bp, Probe Sequence
ctggatcgagaacataattagtgat

SEQ ID NO: 46664 - DNA, 25 bp, Probe Sequence
tagatagtgaaacagagaggtggtt

SEQ ID NO: 46665 - DNA, 25 bp, Probe Sequence
tttaattccagccttacccattgac

SEQ ID NO: 46666 - DNA, 25 bp, Probe Sequence
gtttaattccagccttacccattga

SEQ ID NO: 46667 - DNA, 25 bp, Probe Sequence
agtttaattccagccttacccattg

SEQ ID NO: 46668 - DNA, 25 bp, Probe Sequence
cagtttaattccagccttacccatt

SEQ ID NO: 46669 - DNA, 25 bp, Probe Sequence
tttagaaatgcctgtgaagaccttg

SEQ ID NO: 46670 - DNA, 25 bp, Probe Sequence
atttctccacttgccagtttaattc

SEQ ID NO: 46671 - DNA, 25 bp, Probe Sequence
attcatcattactgtggacatggca

SEQ ID NO: 46672 - DNA, 25 bp, Probe Sequence
catttctccacttgccagtttaatt

SEQ ID NO: 46673 - DNA, 25 bp, Probe Sequence
ctagatagtgaaacagagaggtggt

SEQ ID NO: 46674 - DNA, 25 bp, Probe Sequence
tcatttctccacttgccagtttaat

SEQ ID NO: 46675 - DNA, 25 bp, Probe Sequence
caggtcagtatggagtctacacaaa

SEQ ID NO: 46676 - DNA, 25 bp, Probe Sequence
tggatcgagaacataattagtgatt

SEQ ID NO: 46677 - DNA, 25 bp, Probe Sequence
atgtctacctatgaactacggactg

SEQ ID NO: 46678 - DNA, 25 bp, Probe Sequence
aacaaggagttcattcatctcaata

SEQ ID NO: 46679 - DNA, 25 bp, Probe Sequence
acaaggagttcattcatctcaatat

SEQ ID NO: 46680 - DNA, 25 bp, Probe Sequence
catgtctacctatgaactacggact

SEQ ID NO: 46681 - DNA, 25 bp, Probe Sequence
gaccttgaccttcagaacttctctt

SEQ ID NO: 46682 - DNA, 25 bp, Probe Sequence
aattcaagaagctaagcctgatctc

SEQ ID NO: 46683 - DNA, 25 bp, Probe Sequence
caccatgtctacctatgaactacgg

SEQ ID NO: 46684 - DNA, 25 bp, Probe Sequence
accttgaccttcagaacttctcttg

SEQ ID NO: 46685 - DNA, 25 bp, Probe Sequence
accatgtctacctatgaactacgga

SEQ ID NO: 46686 - DNA, 25 bp, Probe Sequence
cttcagaacttctcttggtgtggaa

SEQ ID NO: 46687 - DNA, 25 bp, Probe Sequence
ggcaccatgtctacctatgaactac

SEQ ID NO: 46688 - DNA, 25 bp, Probe Sequence
atctgggaagaatgaaatgaactca

SEQ ID NO: 46689 - DNA, 25 bp, Probe Sequence
ccatgtctacctatgaactacggac

SEQ ID NO: 46690 - DNA, 25 bp, Probe Sequence
ttcagaacttctcttggtgtggaac

SEQ ID NO: 46691 - DNA, 25 bp, Probe Sequence
tgatctgggaagaatgaaatgaact

SEQ ID NO: 46692 - DNA, 25 bp, Probe Sequence
gcaccatgtctacctatgaactacg

SEQ ID NO: 46693 - DNA, 25 bp, Probe Sequence
gatctgggaagaatgaaatgaactc

SEQ ID NO: 46694 - DNA, 25 bp, Probe Sequence
atttgacaatgaacatctgaggctg

SEQ ID NO: 46695 - DNA, 25 bp, Probe Sequence
ttgatctgggaagaatgaaatgaac

SEQ ID NO: 46696 - DNA, 25 bp, Probe Sequence
cttgatctgggaagaatgaaatgaa

SEQ ID NO: 46697 - DNA, 25 bp, Probe Sequence
ccttgaccttcagaacttctcttgg

SEQ ID NO: 46698 - DNA, 25 bp, Probe Sequence
tctgggaagaatgaaatgaactcag

SEQ ID NO: 46699 - DNA, 25 bp, Probe Sequence
cttgaccttcagaacttctcttggt

SEQ ID NO: 46700 - DNA, 25 bp, Probe Sequence
ctctcagtacaaagaacaaggagtt

SEQ ID NO: 46701 - DNA, 25 bp, Probe Sequence
ttattcctacaagtggtctcagtgg

SEQ ID NO: 46702 - DNA, 25 bp, Probe Sequence
aatggatcaggttaattggcaacaa

SEQ ID NO: 46703 - DNA, 25 bp, Probe Sequence
tattcctacaagtggtctcagtggt

SEQ ID NO: 46704 - DNA, 25 bp, Probe Sequence
ggatcaggttaattggcaacaagaa

SEQ ID NO: 46705 - DNA, 25 bp, Probe Sequence
atggatcaggttaattggcaacaag

SEQ ID NO: 46706 - DNA, 25 bp, Probe Sequence
tttattcctacaagtggtctcagtg

SEQ ID NO: 46707 - DNA, 25 bp, Probe Sequence
aacaaattgattcctttaagcctcc

SEQ ID NO: 46708 - DNA, 25 bp, Probe Sequence
tttagattatgtgtgtccgatgttt

SEQ ID NO: 46709 - DNA, 25 bp, Probe Sequence
tgaaaccacaaccaaagttattaca

SEQ ID NO: 46710 - DNA, 25 bp, Probe Sequence
atcaggttaattggcaacaagaaag

SEQ ID NO: 46711 - DNA, 25 bp, Probe Sequence
agaacaaattgattcctttaagcct

SEQ ID NO: 46712 - DNA, 25 bp, Probe Sequence
gaacaaattgattcctttaagcctc

SEQ ID NO: 46713 - DNA, 25 bp, Probe Sequence
agaaaggtttcaagagattactgga

SEQ ID NO: 46714 - DNA, 25 bp, Probe Sequence
tggatcaggttaattggcaacaaga

SEQ ID NO: 46715 - DNA, 25 bp, Probe Sequence
ggttaattggcaacaagaaaggttt

SEQ ID NO: 46716 - DNA, 25 bp, Probe Sequence
acaaattgattcctttaagcctccc

SEQ ID NO: 46717 - DNA, 25 bp, Probe Sequence
gcaacaagaaaggtttcaagagatt

SEQ ID NO: 46718 - DNA, 25 bp, Probe Sequence
taattggcaacaagaaaggtttcaa

SEQ ID NO: 46719 - DNA, 25 bp, Probe Sequence
ttaattggcaacaagaaaggtttca

SEQ ID NO: 46720 - DNA, 25 bp, Probe Sequence
gttaattggcaacaagaaaggtttc

SEQ ID NO: 46721 - DNA, 25 bp, Probe Sequence
gaaaggtttcaagagattactggaa

SEQ ID NO: 46722 - DNA, 25 bp, Probe Sequence
aagaaaggtttcaagagattactgg

SEQ ID NO: 46723 - DNA, 25 bp, Probe Sequence
tatgacaaagtttgaaaccacaacc

SEQ ID NO: 46724 - DNA, 25 bp, Probe Sequence
gtatgacaaagtttgaaaccacaac

SEQ ID NO: 46725 - DNA, 25 bp, Probe Sequence
ttacacagagcatgaaattagatgg

SEQ ID NO: 46726 - DNA, 25 bp, Probe Sequence
tacacagagcatgaaattagatggc

SEQ ID NO: 46727 - DNA, 25 bp, Probe Sequence
gcagaaatttacacagagcatgaaa

SEQ ID NO: 46728 - DNA, 25 bp, Probe Sequence
tgacttcaatggtttctacacggag

SEQ ID NO: 46729 - DNA, 25 bp, Probe Sequence
cttgacttcaatggtttctacacgg

SEQ ID NO: 46730 - DNA, 25 bp, Probe Sequence
caggcttgacttcaatggtttctac

SEQ ID NO: 46731 - DNA, 25 bp, Probe Sequence
catctatagcaccagtgactgtgag

SEQ ID NO: 46732 - DNA, 25 bp, Probe Sequence
ggcttgacttcaatggtttctacac

SEQ ID NO: 46733 - DNA, 25 bp, Probe Sequence
aggcttgacttcaatggtttctaca

SEQ ID NO: 46734 - DNA, 25 bp, Probe Sequence
tttacacagagcatgaaattagatg

SEQ ID NO: 46735 - DNA, 25 bp, Probe Sequence
ttgacttcaatggtttctacacgga

SEQ ID NO: 46736 - DNA, 25 bp, Probe Sequence
gcttgacttcaatggtttctacacg

SEQ ID NO: 46737 - DNA, 25 bp, Probe Sequence
cagaaatttacacagagcatgaaat

SEQ ID NO: 46738 - DNA, 25 bp, Probe Sequence
accatcaacaagtttgacaagaact

SEQ ID NO: 46739 - DNA, 25 bp, Probe Sequence
caccatcaacaagtttgacaagaac

SEQ ID NO: 46740 - DNA, 25 bp, Probe Sequence
acagagcatgaaattagatggcgag

SEQ ID NO: 46741 - DNA, 25 bp, Probe Sequence
gacttcaatggtttctacacggagc

SEQ ID NO: 46742 - DNA, 25 bp, Probe Sequence
gaaggtcttctccaagctcatgtct

SEQ ID NO: 46743 - DNA, 25 bp, Probe Sequence
caaatgggtccagaattttcaaatc

SEQ ID NO: 46744 - DNA, 25 bp, Probe Sequence
ctgagcatctatagcaccagtgact

SEQ ID NO: 46745 - DNA, 25 bp, Probe Sequence
cacagagcatgaaattagatggcga

SEQ ID NO: 46746 - DNA, 25 bp, Probe Sequence
gcaaatgggtccagaattttcaaat

SEQ ID NO: 46747 - DNA, 25 bp, Probe Sequence
ccaggcttgacttcaatggtttcta

SEQ ID NO: 46748 - DNA, 25 bp, Probe Sequence
atttacacagagcatgaaattagat

SEQ ID NO: 46749 - DNA, 25 bp, Probe Sequence
ggatgaagtagataagattggcagt

SEQ ID NO: 46750 - DNA, 25 bp, Probe Sequence
tggatgaagtagataagattggcag

SEQ ID NO: 46751 - DNA, 25 bp, Probe Sequence
ctggatgaagtagataagattggca

SEQ ID NO: 46752 - DNA, 25 bp, Probe Sequence
atgaagtagataagattggcagtgt

SEQ ID NO: 46753 - DNA, 25 bp, Probe Sequence
tgaagtagataagattggcagtgtg

SEQ ID NO: 46754 - DNA, 25 bp, Probe Sequence
gatgaagtagataagattggcagtg

SEQ ID NO: 46755 - DNA, 25 bp, Probe Sequence
ctggatatgtaggcgaagatattga

SEQ ID NO: 46756 - DNA, 25 bp, Probe Sequence
tggatatgtaggcgaagatattgaa

SEQ ID NO: 46757 - DNA, 25 bp, Probe Sequence
tctggatgaagtagataagattggc

SEQ ID NO: 46758 - DNA, 25 bp, Probe Sequence
tgtgaactgaatgttactgaggatg

SEQ ID NO: 46759 - DNA, 25 bp, Probe Sequence
gtgtgaactgaatgttactgaggat

SEQ ID NO: 46760 - DNA, 25 bp, Probe Sequence
gctggatatgtaggcgaagatattg

SEQ ID NO: 46761 - DNA, 25 bp, Probe Sequence
gaactgaatgttactgaggatgctt

SEQ ID NO: 46762 - DNA, 25 bp, Probe Sequence
cgaatactcaccaagacattgaaga

SEQ ID NO: 46763 - DNA, 25 bp, Probe Sequence
aagtgtgaactgaatgttactgagg

SEQ ID NO: 46764 - DNA, 25 bp, Probe Sequence
ggatatgtaggcgaagatattgaat

SEQ ID NO: 46765 - DNA, 25 bp, Probe Sequence
tggataagtgtgaactgaatgttac

SEQ ID NO: 46766 - DNA, 25 bp, Probe Sequence
gaatactcaccaagacattgaagaa

SEQ ID NO: 46767 - DNA, 25 bp, Probe Sequence
aactgtcatattgctgtcttgtata

SEQ ID NO: 46768 - DNA, 25 bp, Probe Sequence
taagtgtgaactgaatgttactgag

SEQ ID NO: 46769 - DNA, 25 bp, Probe Sequence
ggataagtgtgaactgaatgttact

SEQ ID NO: 46770 - DNA, 25 bp, Probe Sequence
atatcatacatggtcagagaagcct

SEQ ID NO: 46771 - DNA, 25 bp, Probe Sequence
tagaaggcacaatagtcaatgttcc

SEQ ID NO: 46772 - DNA, 25 bp, Probe Sequence
tatcatacatggtcagagaagcctt

SEQ ID NO: 46773 - DNA, 25 bp, Probe Sequence
aagtagtagtcaagtgtctaggtct

SEQ ID NO: 46774 - DNA, 25 bp, Probe Sequence
agtagtagtcaagtgtctaggtctt

SEQ ID NO: 46775 - DNA, 25 bp, Probe Sequence
tatgatgaagattgtaggactgtct

SEQ ID NO: 46776 - DNA, 25 bp, Probe Sequence
atatgatgaagattgtaggactgtc

SEQ ID NO: 46777 - DNA, 25 bp, Probe Sequence
gacatacagaataggaacaggtgtt

SEQ ID NO: 46778 - DNA, 25 bp, Probe Sequence
ggacatacagaataggaacaggtgt

SEQ ID NO: 46779 - DNA, 25 bp, Probe Sequence
accctcacaaacacagtagtctata

SEQ ID NO: 46780 - DNA, 25 bp, Probe Sequence
agcattcagtggaagtatatctatt

SEQ ID NO: 46781 - DNA, 25 bp, Probe Sequence
aagcattcagtggaagtatatctat

SEQ ID NO: 46782 - DNA, 25 bp, Probe Sequence
aaatgagggagggacatacagaata

SEQ ID NO: 46783 - DNA, 25 bp, Probe Sequence
gtgtctaggtctttgatattgctct

SEQ ID NO: 46784 - DNA, 25 bp, Probe Sequence
agtgtctaggtctttgatattgctc

SEQ ID NO: 46785 - DNA, 25 bp, Probe Sequence
gtgtactcagatgaggaagaaccaa

SEQ ID NO: 46786 - DNA, 25 bp, Probe Sequence
tgtctaggtctttgatattgctctt

SEQ ID NO: 46787 - DNA, 25 bp, Probe Sequence
aatgagggagggacatacagaatag

SEQ ID NO: 46788 - DNA, 25 bp, Probe Sequence
actgtgtactcagatgaggaagaac

SEQ ID NO: 46789 - DNA, 25 bp, Probe Sequence
cactgtgtactcagatgaggaagaa

SEQ ID NO: 46790 - DNA, 25 bp, Probe Sequence
aaagtagtagtcaagtgtctaggtc

SEQ ID NO: 46791 - DNA, 25 bp, Probe Sequence
aaatgatgtgctttggtcagttaat

SEQ ID NO: 46792 - DNA, 25 bp, Probe Sequence
aagtgtctaggtctttgatattgct

SEQ ID NO: 46793 - DNA, 25 bp, Probe Sequence
atgatgaagattgtaggactgtctt

SEQ ID NO: 46794 - DNA, 25 bp, Probe Sequence
tatatgatgaagattgtaggactgt

SEQ ID NO: 46795 - DNA, 25 bp, Probe Sequence
tgatgtgctttggtcagttaataaa

SEQ ID NO: 46796 - DNA, 25 bp, Probe Sequence
gtagtagtcaagtgtctaggtcttt

SEQ ID NO: 46797 - DNA, 25 bp, Probe Sequence
cgtctttgtttctatcagtctttgt

SEQ ID NO: 46798 - DNA, 25 bp, Probe Sequence
gcgtctttgtttctatcagtctttg

SEQ ID NO: 46799 - DNA, 25 bp, Probe Sequence
gaagactctggactcattgctgatt

SEQ ID NO: 46800 - DNA, 25 bp, Probe Sequence
tgcgtctttgtttctatcagtcttt

SEQ ID NO: 46801 - DNA, 25 bp, Probe Sequence
cactactgcgtctttgtttctatca

SEQ ID NO: 46802 - DNA, 25 bp, Probe Sequence
ctatcagtctttgtagaagcaggtg

SEQ ID NO: 46803 - DNA, 25 bp, Probe Sequence
aatatatgcacttcaggcttgttga

SEQ ID NO: 46804 - DNA, 25 bp, Probe Sequence
aagactctggactcattgctgattg

SEQ ID NO: 46805 - DNA, 25 bp, Probe Sequence
acactactgcgtctttgtttctatc

SEQ ID NO: 46806 - DNA, 25 bp, Probe Sequence
actactgcgtctttgtttctatcag

SEQ ID NO: 46807 - DNA, 25 bp, Probe Sequence
cacactactgcgtctttgtttctat

SEQ ID NO: 46808 - DNA, 25 bp, Probe Sequence
tatcagtctttgtagaagcaggtgg

SEQ ID NO: 46809 - DNA, 25 bp, Probe Sequence
ctgcgtctttgtttctatcagtctt

SEQ ID NO: 46810 - DNA, 25 bp, Probe Sequence
tgaagactctggactcattgctgat

SEQ ID NO: 46811 - DNA, 25 bp, Probe Sequence
tctatcagtctttgtagaagcaggt

SEQ ID NO: 46812 - DNA, 25 bp, Probe Sequence
cagcagttcatcttcatgggaaatt

SEQ ID NO: 46813 - DNA, 25 bp, Probe Sequence
ctctggactcattgctgattggaac

SEQ ID NO: 46814 - DNA, 25 bp, Probe Sequence
aaatatatgcacttcaggcttgttg

SEQ ID NO: 46815 - DNA, 25 bp, Probe Sequence
atgtctgtgctgtctagtttgtgtt

SEQ ID NO: 46816 - DNA, 25 bp, Probe Sequence
gtctttgtttctatcagtctttgta

SEQ ID NO: 46817 - DNA, 25 bp, Probe Sequence
cgaccaagactctgtgacgttaatt

SEQ ID NO: 46818 - DNA, 25 bp, Probe Sequence
ctgatgctaaagaagacagactttc

SEQ ID NO: 46819 - DNA, 25 bp, Probe Sequence
atgatgaaacagggatacctcacag

SEQ ID NO: 46820 - DNA, 25 bp, Probe Sequence
gatgatgaaacagggatacctcaca

SEQ ID NO: 46821 - DNA, 25 bp, Probe Sequence
atgtatgtcaacttcacttctcact

SEQ ID NO: 46822 - DNA, 25 bp, Probe Sequence
aacttcacttctcactcttatggtc

SEQ ID NO: 46823 - DNA, 25 bp, Probe Sequence
tcaacttcacttctcactcttatgg

SEQ ID NO: 46824 - DNA, 25 bp, Probe Sequence
gtatgtcaacttcacttctcactct

SEQ ID NO: 46825 - DNA, 25 bp, Probe Sequence
cttcacttctcactcttatggtctc

SEQ ID NO: 46826 - DNA, 25 bp, Probe Sequence
tgtcaacttcacttctcactcttat

SEQ ID NO: 46827 - DNA, 25 bp, Probe Sequence
atgtcaacttcacttctcactctta

SEQ ID NO: 46828 - DNA, 25 bp, Probe Sequence
tatgtcaacttcacttctcactctt

SEQ ID NO: 46829 - DNA, 25 bp, Probe Sequence
caacttcacttctcactcttatggt

SEQ ID NO: 46830 - DNA, 25 bp, Probe Sequence
tgtatgtcaacttcacttctcactc

SEQ ID NO: 46831 - DNA, 25 bp, Probe Sequence
ctacgaatgctacgatggatatgaa

SEQ ID NO: 46832 - DNA, 25 bp, Probe Sequence
gtcaacttcacttctcactcttatg

SEQ ID NO: 46833 - DNA, 25 bp, Probe Sequence
aatgtatgtcaacttcacttctcac

SEQ ID NO: 46834 - DNA, 25 bp, Probe Sequence
tcacttctcactcttatggtctcaa

SEQ ID NO: 46835 - DNA, 25 bp, Probe Sequence
ttcacttctcactcttatggtctca

SEQ ID NO: 46836 - DNA, 25 bp, Probe Sequence
acttcacttctcactcttatggtct

SEQ ID NO: 46837 - DNA, 25 bp, Probe Sequence
gactacgaatgctacgatggatatg

SEQ ID NO: 46838 - DNA, 25 bp, Probe Sequence
actacgaatgctacgatggatatga

SEQ ID NO: 46839 - DNA, 25 bp, Probe Sequence
atgcgaatacatcagttctatcatt

SEQ ID NO: 46840 - DNA, 25 bp, Probe Sequence
aatgcgaatacatcagttctatcat

SEQ ID NO: 46841 - DNA, 25 bp, Probe Sequence
ggactacgaatgctacgatggatat

SEQ ID NO: 46842 - DNA, 25 bp, Probe Sequence
taatgcgaatacatcagttctatca

SEQ ID NO: 46843 - DNA, 25 bp, Probe Sequence
ggatataatgcgaatacatcagttc

SEQ ID NO: 46844 - DNA, 25 bp, Probe Sequence
atgtagtaatggagagtggtcggaa

SEQ ID NO: 46845 - DNA, 25 bp, Probe Sequence
cctgggcaaactactccctacttaa

SEQ ID NO: 46846 - DNA, 25 bp, Probe Sequence
ctgggcaaactactccctacttaag

SEQ ID NO: 46847 - DNA, 25 bp, Probe Sequence
acccgtgtcacatcgtgaatattta

SEQ ID NO: 46848 - DNA, 25 bp, Probe Sequence
ctacttaagggaataggccaggctc

SEQ ID NO: 46849 - DNA, 25 bp, Probe Sequence
tcctgggcaaactactccctactta

SEQ ID NO: 46850 - DNA, 25 bp, Probe Sequence
tgggcaaactactccctacttaagg

SEQ ID NO: 46851 - DNA, 25 bp, Probe Sequence
gacccgtgtcacatcgtgaatattt

SEQ ID NO: 46852 - DNA, 25 bp, Probe Sequence
tctcttcggagacccaggatttagg

SEQ ID NO: 46853 - DNA, 25 bp, Probe Sequence
tacttaagggaataggccaggctcc

SEQ ID NO: 46854 - DNA, 25 bp, Probe Sequence
ggacccgtgtcacatcgtgaatatt

SEQ ID NO: 46855 - DNA, 25 bp, Probe Sequence
cctacttaagggaataggccaggct

SEQ ID NO: 46856 - DNA, 25 bp, Probe Sequence
atcttcgcttgtcttgtcatcattc

SEQ ID NO: 46857 - DNA, 25 bp, Probe Sequence
gatcttcgcttgtcttgtcatcatt

SEQ ID NO: 46858 - DNA, 25 bp, Probe Sequence
cctgatagatcctctgctccaatag

SEQ ID NO: 46859 - DNA, 25 bp, Probe Sequence
tcctgatagatcctctgctccaata

SEQ ID NO: 46860 - DNA, 25 bp, Probe Sequence
ctgatagatcctctgctccaatagg

SEQ ID NO: 46861 - DNA, 25 bp, Probe Sequence
cctatctcagacagtgaaagtgaaa

SEQ ID NO: 46862 - DNA, 25 bp, Probe Sequence
atctcagacagtgaaagtgaaatgg

SEQ ID NO: 46863 - DNA, 25 bp, Probe Sequence
agtgaaagtgaaatggactgatttg

SEQ ID NO: 46864 - DNA, 25 bp, Probe Sequence
tatctcagacagtgaaagtgaaatg

SEQ ID NO: 46865 - DNA, 25 bp, Probe Sequence
ctatctcagacagtgaaagtgaaat

SEQ ID NO: 46866 - DNA, 25 bp, Probe Sequence
ccctatctcagacagtgaaagtgaa

SEQ ID NO: 46867 - DNA, 25 bp, Probe Sequence
aatcgagtccatatagctacattcc

SEQ ID NO: 46868 - DNA, 25 bp, Probe Sequence
gtgaaagtgaaatggactgatttgc

SEQ ID NO: 46869 - DNA, 25 bp, Probe Sequence
tcttcgcttgtcttgtcatcattcg

SEQ ID NO: 46870 - DNA, 25 bp, Probe Sequence
atcacatgcagctcatctaagagaa

SEQ ID NO: 46871 - DNA, 25 bp, Probe Sequence
aatcacatgcagctcatctaagaga

SEQ ID NO: 46872 - DNA, 25 bp, Probe Sequence
gtcctgatagatcctctgctccaat

SEQ ID NO: 46873 - DNA, 25 bp, Probe Sequence
ctcagacagtgaaagtgaaatggac

SEQ ID NO: 46874 - DNA, 25 bp, Probe Sequence
tctcagacagtgaaagtgaaatgga

SEQ ID NO: 46875 - DNA, 25 bp, Probe Sequence
atcgagtccatatagctacattcca

SEQ ID NO: 46876 - DNA, 25 bp, Probe Sequence
gaagagtttgtggtagcagaagagt

SEQ ID NO: 46877 - DNA, 25 bp, Probe Sequence
tcagacagtgaaagtgaaatggact

SEQ ID NO: 46878 - DNA, 25 bp, Probe Sequence
ttcgcttgtcttgtcatcattcgtc

SEQ ID NO: 46879 - DNA, 25 bp, Probe Sequence
cttcgcttgtcttgtcatcattcgt

SEQ ID NO: 46880 - DNA, 25 bp, Probe Sequence
tcctgagagccactaatgtaagata

SEQ ID NO: 46881 - DNA, 25 bp, Probe Sequence
cctgagagccactaatgtaagatac

SEQ ID NO: 46882 - DNA, 25 bp, Probe Sequence
ttaataatctggatggagcctgtca

SEQ ID NO: 46883 - DNA, 25 bp, Probe Sequence
cctcagcattccttactatgtgata

SEQ ID NO: 46884 - DNA, 25 bp, Probe Sequence
aatagtgtgagtatatccattgctg

SEQ ID NO: 46885 - DNA, 25 bp, Probe Sequence
acctcagcattccttactatgtgat

SEQ ID NO: 46886 - DNA, 25 bp, Probe Sequence
ctcctgagagccactaatgtaagat

SEQ ID NO: 46887 - DNA, 25 bp, Probe Sequence
ggcatattagaacaaggatggcaag

SEQ ID NO: 46888 - DNA, 25 bp, Probe Sequence
gatctatacaaccatcaacgctcac

SEQ ID NO: 46889 - DNA, 25 bp, Probe Sequence
ctcagcattccttactatgtgataa

SEQ ID NO: 46890 - DNA, 25 bp, Probe Sequence
atcactctgagttcaagattcatct

SEQ ID NO: 46891 - DNA, 25 bp, Probe Sequence
aggcatattagaacaaggatggcaa

SEQ ID NO: 46892 - DNA, 25 bp, Probe Sequence
aaggcatattagaacaaggatggca

SEQ ID NO: 46893 - DNA, 25 bp, Probe Sequence
taagcacctcagcattccttactat

SEQ ID NO: 46894 - DNA, 25 bp, Probe Sequence
ttaagcacctcagcattccttacta

SEQ ID NO: 46895 - DNA, 25 bp, Probe Sequence
taataatctggatggagcctgtcag

SEQ ID NO: 46896 - DNA, 25 bp, Probe Sequence
atagtgtgagtatatccattgctgg

SEQ ID NO: 46897 - DNA, 25 bp, Probe Sequence
atattagaacaaggatggcaagctg

SEQ ID NO: 46898 - DNA, 25 bp, Probe Sequence
ccaattatggaagcacttagagatg

SEQ ID NO: 46899 - DNA, 25 bp, Probe Sequence
gcatattagaacaaggatggcaagc

SEQ ID NO: 46900 - DNA, 25 bp, Probe Sequence
atctatacaaccatcaacgctcacc

SEQ ID NO: 46901 - DNA, 25 bp, Probe Sequence
aagcacctcagcattccttactatg

SEQ ID NO: 46902 - DNA, 25 bp, Probe Sequence
gccaattatggaagcacttagagat

SEQ ID NO: 46903 - DNA, 25 bp, Probe Sequence
catattagaacaaggatggcaagct

SEQ ID NO: 46904 - DNA, 25 bp, Probe Sequence
aagaggaatgaagatgttgtatgac

SEQ ID NO: 46905 - DNA, 25 bp, Probe Sequence
gtagtgtagtatcaggagtggagac

SEQ ID NO: 46906 - DNA, 25 bp, Probe Sequence
agaggaatgaagatgttgtatgaca

SEQ ID NO: 46907 - DNA, 25 bp, Probe Sequence
ggtagtgtagtatcaggagtggaga

SEQ ID NO: 46908 - DNA, 25 bp, Probe Sequence
aggtagtgtagtatcaggagtggag

SEQ ID NO: 46909 - DNA, 25 bp, Probe Sequence
caggtagtgtagtatcaggagtgga

SEQ ID NO: 46910 - DNA, 25 bp, Probe Sequence
tagtgtagtatcaggagtggagaca

SEQ ID NO: 46911 - DNA, 25 bp, Probe Sequence
aatctgctatatcaaactccttccc

SEQ ID NO: 46912 - DNA, 25 bp, Probe Sequence
agtgtagtatcaggagtggagacaa

SEQ ID NO: 46913 - DNA, 25 bp, Probe Sequence
ttgtttgatttggctcttgttcttt

SEQ ID NO: 46914 - DNA, 25 bp, Probe Sequence
gagggtggttaatctgctatatcaa

SEQ ID NO: 46915 - DNA, 25 bp, Probe Sequence
tgacaagaaggaaagttactgagaa

SEQ ID NO: 46916 - DNA, 25 bp, Probe Sequence
cttgtttgatttggctcttgttctt

SEQ ID NO: 46917 - DNA, 25 bp, Probe Sequence
agggtggttaatctgctatatcaaa

SEQ ID NO: 46918 - DNA, 25 bp, Probe Sequence
atctgctatatcaaactccttccct

SEQ ID NO: 46919 - DNA, 25 bp, Probe Sequence
atgacaagaaggaaagttactgaga

SEQ ID NO: 46920 - DNA, 25 bp, Probe Sequence
tgtttgatttggctcttgttctttg

SEQ ID NO: 46921 - DNA, 25 bp, Probe Sequence
aaggagggtggttaatctgctatat

SEQ ID NO: 46922 - DNA, 25 bp, Probe Sequence
agattggtgagataggacacttgtg

SEQ ID NO: 46923 - DNA, 25 bp, Probe Sequence
cagattggtgagataggacacttgt

SEQ ID NO: 46924 - DNA, 25 bp, Probe Sequence
gtaagaatcaccaggaaaccattaa

SEQ ID NO: 46925 - DNA, 25 bp, Probe Sequence
gtttattgtggatgggtaagaatca

SEQ ID NO: 46926 - DNA, 25 bp, Probe Sequence
tgtttattgtggatgggtaagaatc

SEQ ID NO: 46927 - DNA, 25 bp, Probe Sequence
acaagaaggaaagttactgagaaca

SEQ ID NO: 46928 - DNA, 25 bp, Probe Sequence
aagaacatgattatccagcggtatt

SEQ ID NO: 46929 - DNA, 25 bp, Probe Sequence
caagaacatgattatccagcggtat

SEQ ID NO: 46930 - DNA, 25 bp, Probe Sequence
tcaagaacatgattatccagcggta

SEQ ID NO: 46931 - DNA, 25 bp, Probe Sequence
agaacatgattatccagcggtattt

SEQ ID NO: 46932 - DNA, 25 bp, Probe Sequence
gtatcaagaacatgattatccagcg

SEQ ID NO: 46933 - DNA, 25 bp, Probe Sequence
tatcaagaacatgattatccagcgg

SEQ ID NO: 46934 - DNA, 25 bp, Probe Sequence
tgtatcaagaacatgattatccagc

SEQ ID NO: 46935 - DNA, 25 bp, Probe Sequence
aatgtcgatgttgagaatggtattt

SEQ ID NO: 46936 - DNA, 25 bp, Probe Sequence
aaatgtcgatgttgagaatggtatt

SEQ ID NO: 46937 - DNA, 25 bp, Probe Sequence
atgtcgatgttgagaatggtatttc

SEQ ID NO: 46938 - DNA, 25 bp, Probe Sequence
caaatgtcgatgttgagaatggtat

SEQ ID NO: 46939 - DNA, 25 bp, Probe Sequence
atcaagaacatgattatccagcggt

SEQ ID NO: 46940 - DNA, 25 bp, Probe Sequence
cgatgttgagaatggtatttcttca

SEQ ID NO: 46941 - DNA, 25 bp, Probe Sequence
gcaaatgtcgatgttgagaatggta

SEQ ID NO: 46942 - DNA, 25 bp, Probe Sequence
tgttgagaatggtatttcttcagtt

SEQ ID NO: 46943 - DNA, 25 bp, Probe Sequence
atgttgagaatggtatttcttcagt

SEQ ID NO: 46944 - DNA, 25 bp, Probe Sequence
tccagcggtattttctaattcagat

SEQ ID NO: 46945 - DNA, 25 bp, Probe Sequence
atccagcggtattttctaattcaga

SEQ ID NO: 46946 - DNA, 25 bp, Probe Sequence
tatccagcggtattttctaattcag

SEQ ID NO: 46947 - DNA, 25 bp, Probe Sequence
gatgttgagaatggtatttcttcag

SEQ ID NO: 46948 - DNA, 25 bp, Probe Sequence
tgtcgatgttgagaatggtatttct

SEQ ID NO: 46949 - DNA, 25 bp, Probe Sequence
aacatgattatccagcggtattttc

SEQ ID NO: 46950 - DNA, 25 bp, Probe Sequence
gaacatgattatccagcggtatttt

SEQ ID NO: 46951 - DNA, 25 bp, Probe Sequence
ccagcggtattttctaattcagatc

SEQ ID NO: 46952 - DNA, 25 bp, Probe Sequence
aagattccagactctgattcattaa

SEQ ID NO: 46953 - DNA, 25 bp, Probe Sequence
ttaagattccagactctgattcatt

SEQ ID NO: 46954 - DNA, 25 bp, Probe Sequence
taggagtttaatttgcccttctctc

SEQ ID NO: 46955 - DNA, 25 bp, Probe Sequence
ttaggagtttaatttgcccttctct

SEQ ID NO: 46956 - DNA, 25 bp, Probe Sequence
tcttaggagtttaatttgcccttct

SEQ ID NO: 46957 - DNA, 25 bp, Probe Sequence
cttaggagtttaatttgcccttctc

SEQ ID NO: 46958 - DNA, 25 bp, Probe Sequence
ccttcattacacataaagatacacg

SEQ ID NO: 46959 - DNA, 25 bp, Probe Sequence
gcttaagattccagactctgattca

SEQ ID NO: 46960 - DNA, 25 bp, Probe Sequence
atcttaggagtttaatttgcccttc

SEQ ID NO: 46961 - DNA, 25 bp, Probe Sequence
ggcttaagattccagactctgattc

SEQ ID NO: 46962 - DNA, 25 bp, Probe Sequence
tttatcttaggagtttaatttgccc

SEQ ID NO: 46963 - DNA, 25 bp, Probe Sequence
taagattccagactctgattcatta

SEQ ID NO: 46964 - DNA, 25 bp, Probe Sequence
cttaagattccagactctgattcat

SEQ ID NO: 46965 - DNA, 25 bp, Probe Sequence
tatcttaggagtttaatttgccctt

SEQ ID NO: 46966 - DNA, 25 bp, Probe Sequence
ttatcttaggagtttaatttgccct

SEQ ID NO: 46967 - DNA, 25 bp, Probe Sequence
accttcattacacataaagatacac

SEQ ID NO: 46968 - DNA, 25 bp, Probe Sequence
attccagactctgattcattaaact

SEQ ID NO: 46969 - DNA, 25 bp, Probe Sequence
gattccagactctgattcattaaac

SEQ ID NO: 46970 - DNA, 25 bp, Probe Sequence
agattccagactctgattcattaaa

SEQ ID NO: 46971 - DNA, 25 bp, Probe Sequence
gttcccataaaaccttcattacaca

SEQ ID NO: 46972 - DNA, 25 bp, Probe Sequence
agttcccataaaaccttcattacac

SEQ ID NO: 46973 - DNA, 25 bp, Probe Sequence
cagttcccataaaaccttcattaca

SEQ ID NO: 46974 - DNA, 25 bp, Probe Sequence
ttcccataaaaccttcattacacat

SEQ ID NO: 46975 - DNA, 25 bp, Probe Sequence
cctcagttcccataaaaccttcatt

SEQ ID NO: 46976 - DNA, 25 bp, Probe Sequence
caatgtatagccagagaaggagaag

SEQ ID NO: 46977 - DNA, 25 bp, Probe Sequence
cttaggatggaattagagacaggtg

SEQ ID NO: 46978 - DNA, 25 bp, Probe Sequence
ttaggatggaattagagacaggtga

SEQ ID NO: 46979 - DNA, 25 bp, Probe Sequence
agaagaatgagagagaggaagactg

SEQ ID NO: 46980 - DNA, 25 bp, Probe Sequence
cagaagaatgagagagaggaagact

SEQ ID NO: 46981 - DNA, 25 bp, Probe Sequence
taggatggaattagagacaggtgag

SEQ ID NO: 46982 - DNA, 25 bp, Probe Sequence
acaatgtatagccagagaaggagaa

SEQ ID NO: 46983 - DNA, 25 bp, Probe Sequence
atggcttaggatggaattagagaca

SEQ ID NO: 46984 - DNA, 25 bp, Probe Sequence
cacataagcattccgtccatctaag

SEQ ID NO: 46985 - DNA, 25 bp, Probe Sequence
tcacataagcattccgtccatctaa

SEQ ID NO: 46986 - DNA, 25 bp, Probe Sequence
cacaatgtatagccagagaaggaga

SEQ ID NO: 46987 - DNA, 25 bp, Probe Sequence
gcttaggatggaattagagacaggt

SEQ ID NO: 46988 - DNA, 25 bp, Probe Sequence
tggcttaggatggaattagagacag

SEQ ID NO: 46989 - DNA, 25 bp, Probe Sequence
ccagaagaatgagagagaggaagac

SEQ ID NO: 46990 - DNA, 25 bp, Probe Sequence
aatgtatagccagagaaggagaagc

SEQ ID NO: 46991 - DNA, 25 bp, Probe Sequence
catggcttaggatggaattagagac

SEQ ID NO: 46992 - DNA, 25 bp, Probe Sequence
tcatggcttaggatggaattagaga

SEQ ID NO: 46993 - DNA, 25 bp, Probe Sequence
ctcatcgtgctactggtatgtgtat

SEQ ID NO: 46994 - DNA, 25 bp, Probe Sequence
ctcacataagcattccgtccatcta

SEQ ID NO: 46995 - DNA, 25 bp, Probe Sequence
cattaagtcctctgttaggtgtcag

SEQ ID NO: 46996 - DNA, 25 bp, Probe Sequence
aacacaatgtatagccagagaagga

SEQ ID NO: 46997 - DNA, 25 bp, Probe Sequence
ggcttaggatggaattagagacagg

SEQ ID NO: 46998 - DNA, 25 bp, Probe Sequence
tcatcgtgctactggtatgtgtatg

SEQ ID NO: 46999 - DNA, 25 bp, Probe Sequence
gaagaatgagagagaggaagactgc

SEQ ID NO: 47000 - DNA, 25 bp, Probe Sequence
agatcatatacctaccacctgtctt

SEQ ID NO: 47001 - DNA, 25 bp, Probe Sequence
ataggcttgctatgtaagtagaacg

SEQ ID NO: 47002 - DNA, 25 bp, Probe Sequence
gtgaggtatatgatgagtgtattgt

SEQ ID NO: 47003 - DNA, 25 bp, Probe Sequence
gcacacacatataggtatattctga

SEQ ID NO: 47004 - DNA, 25 bp, Probe Sequence
tgaggtatatgatgagtgtattgtc

SEQ ID NO: 47005 - DNA, 25 bp, Probe Sequence
agtgaggtatatgatgagtgtattg

SEQ ID NO: 47006 - DNA, 25 bp, Probe Sequence
cctaagtgaggtatatgatgagtgt

SEQ ID NO: 47007 - DNA, 25 bp, Probe Sequence
aataggcttgctatgtaagtagaac

SEQ ID NO: 47008 - DNA, 25 bp, Probe Sequence
gatatgatctgttatgctagtggtt

SEQ ID NO: 47009 - DNA, 25 bp, Probe Sequence
gtacagatcatatacctaccacctg

SEQ ID NO: 47010 - DNA, 25 bp, Probe Sequence
cagatcatatacctaccacctgtct

SEQ ID NO: 47011 - DNA, 25 bp, Probe Sequence
gaggtatatgatgagtgtattgtct

SEQ ID NO: 47012 - DNA, 25 bp, Probe Sequence
acagggattcaggtttcttattctt

SEQ ID NO: 47013 - DNA, 25 bp, Probe Sequence
cctacacagtccatcaaatacatct

SEQ ID NO: 47014 - DNA, 25 bp, Probe Sequence
gtgatatttgtttcctgtcctttgt

SEQ ID NO: 47015 - DNA, 25 bp, Probe Sequence
atcatatacctaccacctgtctttg

SEQ ID NO: 47016 - DNA, 25 bp, Probe Sequence
atatttgtttcctgtcctttgttgc

SEQ ID NO: 47017 - DNA, 25 bp, Probe Sequence
agtgatatttgtttcctgtcctttg

SEQ ID NO: 47018 - DNA, 25 bp, Probe Sequence
tgggcattacctcttagtgatattt

SEQ ID NO: 47019 - DNA, 25 bp, Probe Sequence
tatacctaccacctgtctttgctta

SEQ ID NO: 47020 - DNA, 25 bp, Probe Sequence
gggcattacctcttagtgatatttg

SEQ ID NO: 47021 - DNA, 25 bp, Probe Sequence
atgggcattacctcttagtgatatt

SEQ ID NO: 47022 - DNA, 25 bp, Probe Sequence
gtatgggcattacctcttagtgata

SEQ ID NO: 47023 - DNA, 25 bp, Probe Sequence
tacagggattcaggtttcttattct

SEQ ID NO: 47024 - DNA, 25 bp, Probe Sequence
ttaaatgtccgtgttaagaattggc

SEQ ID NO: 47025 - DNA, 25 bp, Probe Sequence
tctgtaactaaccgtgatcatcatt

SEQ ID NO: 47026 - DNA, 25 bp, Probe Sequence
ttctgtcatgagtgagattgttgaa

SEQ ID NO: 47027 - DNA, 25 bp, Probe Sequence
tttaaatgtccgtgttaagaattgg

SEQ ID NO: 47028 - DNA, 25 bp, Probe Sequence
tctgtcatgagtgagattgttgaac

SEQ ID NO: 47029 - DNA, 25 bp, Probe Sequence
ctgtcatgagtgagattgttgaaca

SEQ ID NO: 47030 - DNA, 25 bp, Probe Sequence
gcaaagatgaaaacttcccactatt

SEQ ID NO: 47031 - DNA, 25 bp, Probe Sequence
tgtataattcattaaagctgtggtc

SEQ ID NO: 47032 - DNA, 25 bp, Probe Sequence
taccaactcacctctattttgtcag

SEQ ID NO: 47033 - DNA, 25 bp, Probe Sequence
aattcattaaagctgtggtctttcc

SEQ ID NO: 47034 - DNA, 25 bp, Probe Sequence
gtataattcattaaagctgtggtct

SEQ ID NO: 47035 - DNA, 25 bp, Probe Sequence
ttcattaaagctgtggtctttccat

SEQ ID NO: 47036 - DNA, 25 bp, Probe Sequence
attcattaaagctgtggtctttcca

SEQ ID NO: 47037 - DNA, 25 bp, Probe Sequence
ggcaaagatgaaaacttcccactat

SEQ ID NO: 47038 - DNA, 25 bp, Probe Sequence
ataggcaaagatgaaaacttcccac

SEQ ID NO: 47039 - DNA, 25 bp, Probe Sequence
cataggcaaagatgaaaacttccca

SEQ ID NO: 47040 - DNA, 25 bp, Probe Sequence
tgtcagttcatagttgaagatttgt

SEQ ID NO: 47041 - DNA, 25 bp, Probe Sequence
ttgtataattcattaaagctgtggt

SEQ ID NO: 47042 - DNA, 25 bp, Probe Sequence
gtaccaactcacctctattttgtca

SEQ ID NO: 47043 - DNA, 25 bp, Probe Sequence
tcattaaagctgtggtctttccatg

SEQ ID NO: 47044 - DNA, 25 bp, Probe Sequence
attaaagctgtggtctttccatgtg

SEQ ID NO: 47045 - DNA, 25 bp, Probe Sequence
cattaaagctgtggtctttccatgt

SEQ ID NO: 47046 - DNA, 25 bp, Probe Sequence
caaagatgaaaacttcccactattt

SEQ ID NO: 47047 - DNA, 25 bp, Probe Sequence
taaatgtccgtgttaagaattggcc

SEQ ID NO: 47048 - DNA, 25 bp, Probe Sequence
gaggaagaggaagttcaagaagaca

SEQ ID NO: 47049 - DNA, 25 bp, Probe Sequence
aggaagaggaagttcaagaagacac

SEQ ID NO: 47050 - DNA, 25 bp, Probe Sequence
ggaggaagaggaagttcaagaagac

SEQ ID NO: 47051 - DNA, 25 bp, Probe Sequence
aggaggaagaggaagttcaagaaga

SEQ ID NO: 47052 - DNA, 25 bp, Probe Sequence
caggaggaagaggaagttcaagaag

SEQ ID NO: 47053 - DNA, 25 bp, Probe Sequence
ggaagaggaagttcaagaagacacc

SEQ ID NO: 47054 - DNA, 25 bp, Probe Sequence
gagcagtacgaagaagaagaggaag

SEQ ID NO: 47055 - DNA, 25 bp, Probe Sequence
cgagagatgaagaagaagattctgg

SEQ ID NO: 47056 - DNA, 25 bp, Probe Sequence
ccgagagatgaagaagaagattctg

SEQ ID NO: 47057 - DNA, 25 bp, Probe Sequence
gagagatgaagaagaagattctggc

SEQ ID NO: 47058 - DNA, 25 bp, Probe Sequence
gatgaagaagaagattctggctgag

SEQ ID NO: 47059 - DNA, 25 bp, Probe Sequence
gagatgaagaagaagattctggctg

SEQ ID NO: 47060 - DNA, 25 bp, Probe Sequence
agagatgaagaagaagattctggct

SEQ ID NO: 47061 - DNA, 25 bp, Probe Sequence
gaagaggaagttcaagaagacaccg

SEQ ID NO: 47062 - DNA, 25 bp, Probe Sequence
atgaagaagaagattctggctgaga

SEQ ID NO: 47063 - DNA, 25 bp, Probe Sequence
agatgaagaagaagattctggctga

SEQ ID NO: 47064 - DNA, 25 bp, Probe Sequence
gaagaagaagattctggctgagaga

SEQ ID NO: 47065 - DNA, 25 bp, Probe Sequence
tgaaacgccagaaatatgacatcac

SEQ ID NO: 47066 - DNA, 25 bp, Probe Sequence
ccaggaggaagaggaagttcaagaa

SEQ ID NO: 47067 - DNA, 25 bp, Probe Sequence
aagaagaagattctggctgagagac

SEQ ID NO: 47068 - DNA, 25 bp, Probe Sequence
tgaagaagaagattctggctgagag

SEQ ID NO: 47069 - DNA, 25 bp, Probe Sequence
gaaacgccagaaatatgacatcacc

SEQ ID NO: 47070 - DNA, 25 bp, Probe Sequence
ctgaaacgccagaaatatgacatca

SEQ ID NO: 47071 - DNA, 25 bp, Probe Sequence
ggagcagtacgaagaagaagaggaa

SEQ ID NO: 47072 - DNA, 25 bp, Probe Sequence
tggagcagtattagagaacaagata

SEQ ID NO: 47073 - DNA, 25 bp, Probe Sequence
ggagcagtattagagaacaagatag

SEQ ID NO: 47074 - DNA, 25 bp, Probe Sequence
ctggagcagtattagagaacaagat

SEQ ID NO: 47075 - DNA, 25 bp, Probe Sequence
agcagtattagagaacaagatagtg

SEQ ID NO: 47076 - DNA, 25 bp, Probe Sequence
ttagagaacaagatagtgtctggaa

SEQ ID NO: 47077 - DNA, 25 bp, Probe Sequence
agatatgcttgaattggatcacctc

SEQ ID NO: 47078 - DNA, 25 bp, Probe Sequence
gatatgcttgaattggatcacctca

SEQ ID NO: 47079 - DNA, 25 bp, Probe Sequence
cagatatgcttgaattggatcacct

SEQ ID NO: 47080 - DNA, 25 bp, Probe Sequence
attagagaacaagatagtgtctgga

SEQ ID NO: 47081 - DNA, 25 bp, Probe Sequence
gagcagtattagagaacaagatagt

SEQ ID NO: 47082 - DNA, 25 bp, Probe Sequence
atatgcttgaattggatcacctcac

SEQ ID NO: 47083 - DNA, 25 bp, Probe Sequence
cctggagcagtattagagaacaaga

SEQ ID NO: 47084 - DNA, 25 bp, Probe Sequence
gcagtattagagaacaagatagtgt

SEQ ID NO: 47085 - DNA, 25 bp, Probe Sequence
acctggagcagtattagagaacaag

SEQ ID NO: 47086 - DNA, 25 bp, Probe Sequence
acgaaggttcaagattatctaagaa

SEQ ID NO: 47087 - DNA, 25 bp, Probe Sequence
taccagatatgcttgaattggatca

SEQ ID NO: 47088 - DNA, 25 bp, Probe Sequence
tcattaaagggaacggttatcatca

SEQ ID NO: 47089 - DNA, 25 bp, Probe Sequence
cacctggagcagtattagagaacaa

SEQ ID NO: 47090 - DNA, 25 bp, Probe Sequence
ttaaagggaacggttatcatcattg

SEQ ID NO: 47091 - DNA, 25 bp, Probe Sequence
cattaaagggaacggttatcatcat

SEQ ID NO: 47092 - DNA, 25 bp, Probe Sequence
ctgtggacacttaaataatgggcta

SEQ ID NO: 47093 - DNA, 25 bp, Probe Sequence
tatgcttgaattggatcacctcaca

SEQ ID NO: 47094 - DNA, 25 bp, Probe Sequence
accagatatgcttgaattggatcac

SEQ ID NO: 47095 - DNA, 25 bp, Probe Sequence
gtttcattaaagggaacggttatca

SEQ ID NO: 47096 - DNA, 25 bp, Probe Sequence
agacactaacaggactacatagagg

SEQ ID NO: 47097 - DNA, 25 bp, Probe Sequence
aagacactaacaggactacatagag

SEQ ID NO: 47098 - DNA, 25 bp, Probe Sequence
aagccattagacttataggtgatgc

SEQ ID NO: 47099 - DNA, 25 bp, Probe Sequence
gcatctaagagagaggttaatcaca

SEQ ID NO: 47100 - DNA, 25 bp, Probe Sequence
agcatctaagagagaggttaatcac

SEQ ID NO: 47101 - DNA, 25 bp, Probe Sequence
gcaagcatctaagagagaggttaat

SEQ ID NO: 47102 - DNA, 25 bp, Probe Sequence
cactaacaggactacatagaggctt

SEQ ID NO: 47103 - DNA, 25 bp, Probe Sequence
aatcagtgagacataagccaacaag

SEQ ID NO: 47104 - DNA, 25 bp, Probe Sequence
tatagaggcataagtggtatcagtt

SEQ ID NO: 47105 - DNA, 25 bp, Probe Sequence
aagcatctaagagagaggttaatca

SEQ ID NO: 47106 - DNA, 25 bp, Probe Sequence
caagcatctaagagagaggttaatc

SEQ ID NO: 47107 - DNA, 25 bp, Probe Sequence
tgataatctgacactatggacttca

SEQ ID NO: 47108 - DNA, 25 bp, Probe Sequence
agttaatctgttgtgacattctgga

SEQ ID NO: 47109 - DNA, 25 bp, Probe Sequence
catctaagagagaggttaatcacac

SEQ ID NO: 47110 - DNA, 25 bp, Probe Sequence
gacactaacaggactacatagaggc

SEQ ID NO: 47111 - DNA, 25 bp, Probe Sequence
agtgagacataagccaacaagagaa

SEQ ID NO: 47112 - DNA, 25 bp, Probe Sequence
aagttaatctgttgtgacattctgg

SEQ ID NO: 47113 - DNA, 25 bp, Probe Sequence
atctaagagagaggttaatcacact

SEQ ID NO: 47114 - DNA, 25 bp, Probe Sequence
ttaatctgttgtgacattctggatg

SEQ ID NO: 47115 - DNA, 25 bp, Probe Sequence
gttaatctgttgtgacattctggat

SEQ ID NO: 47116 - DNA, 25 bp, Probe Sequence
atcagtgagacataagccaacaaga

SEQ ID NO: 47117 - DNA, 25 bp, Probe Sequence
taagacactaacaggactacataga

SEQ ID NO: 47118 - DNA, 25 bp, Probe Sequence
acactaacaggactacatagaggct

SEQ ID NO: 47119 - DNA, 25 bp, Probe Sequence
tattcgcttaggtcttgctctcaat

SEQ ID NO: 47120 - DNA, 25 bp, Probe Sequence
caagtaccacggctatccttatagt

SEQ ID NO: 47121 - DNA, 25 bp, Probe Sequence
taccacggctatccttatagtgatc

SEQ ID NO: 47122 - DNA, 25 bp, Probe Sequence
ggctatccttatagtgatctggact

SEQ ID NO: 47123 - DNA, 25 bp, Probe Sequence
gctatccttatagtgatctggactt

SEQ ID NO: 47124 - DNA, 25 bp, Probe Sequence
gtgtctctgtgtatagtctttgcta

SEQ ID NO: 47125 - DNA, 25 bp, Probe Sequence
atggtgtctctgtgtatagtctttg

SEQ ID NO: 47126 - DNA, 25 bp, Probe Sequence
gtaccacggctatccttatagtgat

SEQ ID NO: 47127 - DNA, 25 bp, Probe Sequence
tttgagtgagaagatgtgatttgga

SEQ ID NO: 47128 - DNA, 25 bp, Probe Sequence
aagtaccacggctatccttatagtg

SEQ ID NO: 47129 - DNA, 25 bp, Probe Sequence
ctttgagtgagaagatgtgatttgg

SEQ ID NO: 47130 - DNA, 25 bp, Probe Sequence
ttgagtgagaagatgtgatttggac

SEQ ID NO: 47131 - DNA, 25 bp, Probe Sequence
actttgagtgagaagatgtgatttg

SEQ ID NO: 47132 - DNA, 25 bp, Probe Sequence
gactttgagtgagaagatgtgattt

SEQ ID NO: 47133 - DNA, 25 bp, Probe Sequence
ggactttgagtgagaagatgtgatt

SEQ ID NO: 47134 - DNA, 25 bp, Probe Sequence
cggctatccttatagtgatctggac

SEQ ID NO: 47135 - DNA, 25 bp, Probe Sequence
cacggctatccttatagtgatctgg

SEQ ID NO: 47136 - DNA, 25 bp, Probe Sequence
ccacggctatccttatagtgatctg

SEQ ID NO: 47137 - DNA, 25 bp, Probe Sequence
agtaccacggctatccttatagtga

SEQ ID NO: 47138 - DNA, 25 bp, Probe Sequence
catggtgtctctgtgtatagtcttt

SEQ ID NO: 47139 - DNA, 25 bp, Probe Sequence
acggctatccttatagtgatctgga

SEQ ID NO: 47140 - DNA, 25 bp, Probe Sequence
ggtgtctctgtgtatagtctttgct

SEQ ID NO: 47141 - DNA, 25 bp, Probe Sequence
accacggctatccttatagtgatct

SEQ ID NO: 47142 - DNA, 25 bp, Probe Sequence
tgtctctgtgtatagtctttgctat

SEQ ID NO: 47143 - DNA, 25 bp, Probe Sequence
ccttatagtgatctggactttgagt

SEQ ID NO: 47144 - DNA, 25 bp, Probe Sequence
ttggaccttgacagtatctaatgac

SEQ ID NO: 47145 - DNA, 25 bp, Probe Sequence
cttggaccttgacagtatctaatga

SEQ ID NO: 47146 - DNA, 25 bp, Probe Sequence
tcttggaccttgacagtatctaatg

SEQ ID NO: 47147 - DNA, 25 bp, Probe Sequence
gcatataagtcatacatacgagcct

SEQ ID NO: 47148 - DNA, 25 bp, Probe Sequence
agcatataagtcatacatacgagcc

SEQ ID NO: 47149 - DNA, 25 bp, Probe Sequence
ttcttggaccttgacagtatctaat

SEQ ID NO: 47150 - DNA, 25 bp, Probe Sequence
caatccaaggttccattaagtgaat

SEQ ID NO: 47151 - DNA, 25 bp, Probe Sequence
acaatccaaggttccattaagtgaa

SEQ ID NO: 47152 - DNA, 25 bp, Probe Sequence
aacaatccaaggttccattaagtga

SEQ ID NO: 47153 - DNA, 25 bp, Probe Sequence
aagcatataagtcatacatacgagc

SEQ ID NO: 47154 - DNA, 25 bp, Probe Sequence
ttgacagtatctaatgactcctcct

SEQ ID NO: 47155 - DNA, 25 bp, Probe Sequence
cttgacagtatctaatgactcctcc

SEQ ID NO: 47156 - DNA, 25 bp, Probe Sequence
ccttgacagtatctaatgactcctc

SEQ ID NO: 47157 - DNA, 25 bp, Probe Sequence
gaccttgacagtatctaatgactcc

SEQ ID NO: 47158 - DNA, 25 bp, Probe Sequence
ggaccttgacagtatctaatgactc

SEQ ID NO: 47159 - DNA, 25 bp, Probe Sequence
accttgacagtatctaatgactcct

SEQ ID NO: 47160 - DNA, 25 bp, Probe Sequence
tggaccttgacagtatctaatgact

SEQ ID NO: 47161 - DNA, 25 bp, Probe Sequence
aatccaaggttccattaagtgaatt

SEQ ID NO: 47162 - DNA, 25 bp, Probe Sequence
cactgagcactgttacttctatcac

SEQ ID NO: 47163 - DNA, 25 bp, Probe Sequence
ggaagcatataagtcatacatacga

SEQ ID NO: 47164 - DNA, 25 bp, Probe Sequence
aggaagcatataagtcatacatacg

SEQ ID NO: 47165 - DNA, 25 bp, Probe Sequence
acagtatctaatgactcctcctgaa

SEQ ID NO: 47166 - DNA, 25 bp, Probe Sequence
aagcactgagcactgttacttctat

SEQ ID NO: 47167 - DNA, 25 bp, Probe Sequence
gacagtatctaatgactcctcctga

SEQ ID NO: 47168 - DNA, 25 bp, Probe Sequence
cttactatgagaccagcaagatgaa

SEQ ID NO: 47169 - DNA, 25 bp, Probe Sequence
agatattgttaatcctgccagtctt

SEQ ID NO: 47170 - DNA, 25 bp, Probe Sequence
tagatattgttaatcctgccagtct

SEQ ID NO: 47171 - DNA, 25 bp, Probe Sequence
ttagatattgttaatcctgccagtc

SEQ ID NO: 47172 - DNA, 25 bp, Probe Sequence
tactatgagaccagcaagatgaaag

SEQ ID NO: 47173 - DNA, 25 bp, Probe Sequence
ttactatgagaccagcaagatgaaa

SEQ ID NO: 47174 - DNA, 25 bp, Probe Sequence
tattgttaatcctgccagtctttct

SEQ ID NO: 47175 - DNA, 25 bp, Probe Sequence
atattgttaatcctgccagtctttc

SEQ ID NO: 47176 - DNA, 25 bp, Probe Sequence
attgttaatcctgccagtctttctc

SEQ ID NO: 47177 - DNA, 25 bp, Probe Sequence
gatattgttaatcctgccagtcttt

SEQ ID NO: 47178 - DNA, 25 bp, Probe Sequence
ctcttactatgagaccagcaagatg

SEQ ID NO: 47179 - DNA, 25 bp, Probe Sequence
tcttactatgagaccagcaagatga

SEQ ID NO: 47180 - DNA, 25 bp, Probe Sequence
gttaatcctgccagtctttctcttc

SEQ ID NO: 47181 - DNA, 25 bp, Probe Sequence
taatcctgccagtctttctcttcaa

SEQ ID NO: 47182 - DNA, 25 bp, Probe Sequence
ttaatcctgccagtctttctcttca

SEQ ID NO: 47183 - DNA, 25 bp, Probe Sequence
atcctcagaaacctatccaacacag

SEQ ID NO: 47184 - DNA, 25 bp, Probe Sequence
gtaccagtaccaataacagtgccag

SEQ ID NO: 47185 - DNA, 25 bp, Probe Sequence
cagtaccagtaccaataacagtgcc

SEQ ID NO: 47186 - DNA, 25 bp, Probe Sequence
ccagtaccagtaccaataacagtgc

SEQ ID NO: 47187 - DNA, 25 bp, Probe Sequence
gccagtaccagtaccaataacagtg

SEQ ID NO: 47188 - DNA, 25 bp, Probe Sequence
gtgccagtaccagtaccaataacag

SEQ ID NO: 47189 - DNA, 25 bp, Probe Sequence
tgttaatcctgccagtctttctctt

SEQ ID NO: 47190 - DNA, 25 bp, Probe Sequence
ttgttaatcctgccagtctttctct

SEQ ID NO: 47191 - DNA, 25 bp, Probe Sequence
gaaacctatccaacacagcactcta

SEQ ID NO: 47192 - DNA, 25 bp, Probe Sequence
ttaggctgtgactctctctctaatg

SEQ ID NO: 47193 - DNA, 25 bp, Probe Sequence
ctatactacgaggagaagttggcag

SEQ ID NO: 47194 - DNA, 25 bp, Probe Sequence
tatactacgaggagaagttggcaga

SEQ ID NO: 47195 - DNA, 25 bp, Probe Sequence
tttatttaggctgtgactctctctc

SEQ ID NO: 47196 - DNA, 25 bp, Probe Sequence
gtttatttaggctgtgactctctct

SEQ ID NO: 47197 - DNA, 25 bp, Probe Sequence
atgctgtagtttatttaggctgtga

SEQ ID NO: 47198 - DNA, 25 bp, Probe Sequence
tatttaggctgtgactctctctcta

SEQ ID NO: 47199 - DNA, 25 bp, Probe Sequence
ttatttaggctgtgactctctctct

SEQ ID NO: 47200 - DNA, 25 bp, Probe Sequence
tgctgtagtttatttaggctgtgac

SEQ ID NO: 47201 - DNA, 25 bp, Probe Sequence
acatgcctgtcttcctaataccatt

SEQ ID NO: 47202 - DNA, 25 bp, Probe Sequence
atgcctgtcttcctaataccatttg

SEQ ID NO: 47203 - DNA, 25 bp, Probe Sequence
tgactctctctctaatgctgctctc

SEQ ID NO: 47204 - DNA, 25 bp, Probe Sequence
taggctgtgactctctctctaatgc

SEQ ID NO: 47205 - DNA, 25 bp, Probe Sequence
agtttatttaggctgtgactctctc

SEQ ID NO: 47206 - DNA, 25 bp, Probe Sequence
aacatttgacaccaaccaatcatac

SEQ ID NO: 47207 - DNA, 25 bp, Probe Sequence
caacatttgacaccaaccaatcata

SEQ ID NO: 47208 - DNA, 25 bp, Probe Sequence
tgtagtttatttaggctgtgactct

SEQ ID NO: 47209 - DNA, 25 bp, Probe Sequence
catttgacaccaaccaatcatactg

SEQ ID NO: 47210 - DNA, 25 bp, Probe Sequence
ctgtagtttatttaggctgtgactc

SEQ ID NO: 47211 - DNA, 25 bp, Probe Sequence
gctgtagtttatttaggctgtgact

SEQ ID NO: 47212 - DNA, 25 bp, Probe Sequence
acatttgacaccaaccaatcatact

SEQ ID NO: 47213 - DNA, 25 bp, Probe Sequence
gtgactctctctctaatgctgctct

SEQ ID NO: 47214 - DNA, 25 bp, Probe Sequence
gtagtttatttaggctgtgactctc

SEQ ID NO: 47215 - DNA, 25 bp, Probe Sequence
tcatgctgtagtttatttaggctgt

SEQ ID NO: 47216 - DNA, 25 bp, Probe Sequence
cacagataataaggagtatgcggtt

SEQ ID NO: 47217 - DNA, 25 bp, Probe Sequence
aacacagataataaggagtatgcgg

SEQ ID NO: 47218 - DNA, 25 bp, Probe Sequence
taaggagtatgcggttaatgaagtt

SEQ ID NO: 47219 - DNA, 25 bp, Probe Sequence
ataaggagtatgcggttaatgaagt

SEQ ID NO: 47220 - DNA, 25 bp, Probe Sequence
acagataataaggagtatgcggtta

SEQ ID NO: 47221 - DNA, 25 bp, Probe Sequence
aataaggagtatgcggttaatgaag

SEQ ID NO: 47222 - DNA, 25 bp, Probe Sequence
acacagataataaggagtatgcggt

SEQ ID NO: 47223 - DNA, 25 bp, Probe Sequence
aaggagtatgcggttaatgaagttg

SEQ ID NO: 47224 - DNA, 25 bp, Probe Sequence
cagataataaggagtatgcggttaa

SEQ ID NO: 47225 - DNA, 25 bp, Probe Sequence
tcatccatgttgttacttaggcatt

SEQ ID NO: 47226 - DNA, 25 bp, Probe Sequence
taataaggagtatgcggttaatgaa

SEQ ID NO: 47227 - DNA, 25 bp, Probe Sequence
gcttatacacctctggatgagaaga

SEQ ID NO: 47228 - DNA, 25 bp, Probe Sequence
gagtatgcggttaatgaagttgtgg

SEQ ID NO: 47229 - DNA, 25 bp, Probe Sequence
ggagtatgcggttaatgaagttgtg

SEQ ID NO: 47230 - DNA, 25 bp, Probe Sequence
aggagtatgcggttaatgaagttgt

SEQ ID NO: 47231 - DNA, 25 bp, Probe Sequence
gtcatccatgttgttacttaggcat

SEQ ID NO: 47232 - DNA, 25 bp, Probe Sequence
aattgttgaagaatggtggcttgtt

SEQ ID NO: 47233 - DNA, 25 bp, Probe Sequence
ataataaggagtatgcggttaatga

SEQ ID NO: 47234 - DNA, 25 bp, Probe Sequence
atataactgaacacactcatccatt

SEQ ID NO: 47235 - DNA, 25 bp, Probe Sequence
aatgttggcttatacacctctggat

SEQ ID NO: 47236 - DNA, 25 bp, Probe Sequence
gataataaggagtatgcggttaatg

SEQ ID NO: 47237 - DNA, 25 bp, Probe Sequence
agataataaggagtatgcggttaat

SEQ ID NO: 47238 - DNA, 25 bp, Probe Sequence
gtatataactgaacacactcatcca

SEQ ID NO: 47239 - DNA, 25 bp, Probe Sequence
ggcttatacacctctggatgagaag

SEQ ID NO: 47240 - DNA, 25 bp, Probe Sequence
ggctgtgaaattaaattggagtctt

SEQ ID NO: 47241 - DNA, 25 bp, Probe Sequence
gatgggctgtgaaattaaattggag

SEQ ID NO: 47242 - DNA, 25 bp, Probe Sequence
gctgtgaaattaaattggagtcttg

SEQ ID NO: 47243 - DNA, 25 bp, Probe Sequence
agatgggctgtgaaattaaattgga

SEQ ID NO: 47244 - DNA, 25 bp, Probe Sequence
atgggctgtgaaattaaattggagt

SEQ ID NO: 47245 - DNA, 25 bp, Probe Sequence
gggctgtgaaattaaattggagtct

SEQ ID NO: 47246 - DNA, 25 bp, Probe Sequence
tgggctgtgaaattaaattggagtc

SEQ ID NO: 47247 - DNA, 25 bp, Probe Sequence
tctacctatgaagaatttgtggaag

SEQ ID NO: 47248 - DNA, 25 bp, Probe Sequence
cactcttcattcctgtttctcctca

SEQ ID NO: 47249 - DNA, 25 bp, Probe Sequence
cagatgggctgtgaaattaaattgg

SEQ ID NO: 47250 - DNA, 25 bp, Probe Sequence
ctgtgaaattaaattggagtcttga

SEQ ID NO: 47251 - DNA, 25 bp, Probe Sequence
tacctatgaagaatttgtggaaggc

SEQ ID NO: 47252 - DNA, 25 bp, Probe Sequence
ctacctatgaagaatttgtggaagg

SEQ ID NO: 47253 - DNA, 25 bp, Probe Sequence
cttcattcctgtttctcctcagttc

SEQ ID NO: 47254 - DNA, 25 bp, Probe Sequence
gcagatgggctgtgaaattaaattg

SEQ ID NO: 47255 - DNA, 25 bp, Probe Sequence
ctatgaagaatttgtggaaggcact

SEQ ID NO: 47256 - DNA, 25 bp, Probe Sequence
tcttcattcctgtttctcctcagtt

SEQ ID NO: 47257 - DNA, 25 bp, Probe Sequence
atctacctatgaagaatttgtggaa

SEQ ID NO: 47258 - DNA, 25 bp, Probe Sequence
aatctacctatgaagaatttgtgga

SEQ ID NO: 47259 - DNA, 25 bp, Probe Sequence
tatgaagaatttgtggaaggcactg

SEQ ID NO: 47260 - DNA, 25 bp, Probe Sequence
ctcttcattcctgtttctcctcagt

SEQ ID NO: 47261 - DNA, 25 bp, Probe Sequence
actcttcattcctgtttctcctcag

SEQ ID NO: 47262 - DNA, 25 bp, Probe Sequence
ccactcttcattcctgtttctcctc

SEQ ID NO: 47263 - DNA, 25 bp, Probe Sequence
tgtgaaattaaattggagtcttgat

SEQ ID NO: 47264 - DNA, 25 bp, Probe Sequence
gtaacaagaatggactgtggtatca

SEQ ID NO: 47265 - DNA, 25 bp, Probe Sequence
tgtaacaagaatggactgtggtatc

SEQ ID NO: 47266 - DNA, 25 bp, Probe Sequence
ctgtaacaagaatggactgtggtat

SEQ ID NO: 47267 - DNA, 25 bp, Probe Sequence
taacaagaatggactgtggtatcag

SEQ ID NO: 47268 - DNA, 25 bp, Probe Sequence
aagaatggactgtggtatcagattg

SEQ ID NO: 47269 - DNA, 25 bp, Probe Sequence
caagaatggactgtggtatcagatt

SEQ ID NO: 47270 - DNA, 25 bp, Probe Sequence
acaagaatggactgtggtatcagat

SEQ ID NO: 47271 - DNA, 25 bp, Probe Sequence
aacaagaatggactgtggtatcaga

SEQ ID NO: 47272 - DNA, 25 bp, Probe Sequence
aatggactgtggtatcagattggag

SEQ ID NO: 47273 - DNA, 25 bp, Probe Sequence
gaatggactgtggtatcagattgga

SEQ ID NO: 47274 - DNA, 25 bp, Probe Sequence
agaatggactgtggtatcagattgg

SEQ ID NO: 47275 - DNA, 25 bp, Probe Sequence
cctgtaacaagaatggactgtggta

SEQ ID NO: 47276 - DNA, 25 bp, Probe Sequence
gttctcttctgtcttgtttggtaat

SEQ ID NO: 47277 - DNA, 25 bp, Probe Sequence
ggttctcttctgtcttgtttggtaa

SEQ ID NO: 47278 - DNA, 25 bp, Probe Sequence
taataaacacattccagttgatgcc

SEQ ID NO: 47279 - DNA, 25 bp, Probe Sequence
gtaataaacacattccagttgatgc

SEQ ID NO: 47280 - DNA, 25 bp, Probe Sequence
ataaacacattccagttgatgcctt

SEQ ID NO: 47281 - DNA, 25 bp, Probe Sequence
aataaacacattccagttgatgcct

SEQ ID NO: 47282 - DNA, 25 bp, Probe Sequence
tggttctcttctgtcttgtttggta

SEQ ID NO: 47283 - DNA, 25 bp, Probe Sequence
aggtcgccatcataaacaactctat

SEQ ID NO: 47284 - DNA, 25 bp, Probe Sequence
ggtaataaacacattccagttgatg

SEQ ID NO: 47285 - DNA, 25 bp, Probe Sequence
tctacaccaatatcagccaccactt

SEQ ID NO: 47286 - DNA, 25 bp, Probe Sequence
cctactacacccgttacttcgtatc

SEQ ID NO: 47287 - DNA, 25 bp, Probe Sequence
tctcttctgtcttgtttggtaataa

SEQ ID NO: 47288 - DNA, 25 bp, Probe Sequence
ctctatctcttcaactggatctggc

SEQ ID NO: 47289 - DNA, 25 bp, Probe Sequence
gctctatctcttcaactggatctgg

SEQ ID NO: 47290 - DNA, 25 bp, Probe Sequence
tctactgcgatttcttctacctcta

SEQ ID NO: 47291 - DNA, 25 bp, Probe Sequence
tctacctctatatcaccaaagtcct

SEQ ID NO: 47292 - DNA, 25 bp, Probe Sequence
ctactgcgatttcttctacctctat

SEQ ID NO: 47293 - DNA, 25 bp, Probe Sequence
ttctacctctatatcaccaaagtcc

SEQ ID NO: 47294 - DNA, 25 bp, Probe Sequence
cgctctatctcttcaactggatctg

SEQ ID NO: 47295 - DNA, 25 bp, Probe Sequence
actgcgatttcttctacctctatat

SEQ ID NO: 47296 - DNA, 25 bp, Probe Sequence
tctatatcaccaaagtcctaaaggg

SEQ ID NO: 47297 - DNA, 25 bp, Probe Sequence
tgcgatttcttctacctctatatca

SEQ ID NO: 47298 - DNA, 25 bp, Probe Sequence
ctctactgcgatttcttctacctct

SEQ ID NO: 47299 - DNA, 25 bp, Probe Sequence
acctctatatcaccaaagtcctaaa

SEQ ID NO: 47300 - DNA, 25 bp, Probe Sequence
gcgatttcttctacctctatatcac

SEQ ID NO: 47301 - DNA, 25 bp, Probe Sequence
cacgctctatctcttcaactggatc

SEQ ID NO: 47302 - DNA, 25 bp, Probe Sequence
tactgcgatttcttctacctctata

SEQ ID NO: 47303 - DNA, 25 bp, Probe Sequence
ctgcgatttcttctacctctatatc

SEQ ID NO: 47304 - DNA, 25 bp, Probe Sequence
acgctctatctcttcaactggatct

SEQ ID NO: 47305 - DNA, 25 bp, Probe Sequence
ctacctctatatcaccaaagtccta

SEQ ID NO: 47306 - DNA, 25 bp, Probe Sequence
cctctatatcaccaaagtcctaaag

SEQ ID NO: 47307 - DNA, 25 bp, Probe Sequence
cgatttcttctacctctatatcacc

SEQ ID NO: 47308 - DNA, 25 bp, Probe Sequence
tcttctacctctatatcaccaaagt

SEQ ID NO: 47309 - DNA, 25 bp, Probe Sequence
ctctatatcaccaaagtcctaaagg

SEQ ID NO: 47310 - DNA, 25 bp, Probe Sequence
tacctctatatcaccaaagtcctaa

SEQ ID NO: 47311 - DNA, 25 bp, Probe Sequence
cctctactgcgatttcttctacctc

SEQ ID NO: 47312 - DNA, 25 bp, Probe Sequence
tgacactgaggaagaatatgaagac

SEQ ID NO: 47313 - DNA, 25 bp, Probe Sequence
gacactgaggaagaatatgaagact

SEQ ID NO: 47314 - DNA, 25 bp, Probe Sequence
ctgacactgaggaagaatatgaaga

SEQ ID NO: 47315 - DNA, 25 bp, Probe Sequence
aggaagaatatgaagactcaagtgg

SEQ ID NO: 47316 - DNA, 25 bp, Probe Sequence
acactgaggaagaatatgaagactc

SEQ ID NO: 47317 - DNA, 25 bp, Probe Sequence
caactcagtgcttcaggtcttaatg

SEQ ID NO: 47318 - DNA, 25 bp, Probe Sequence
gtgaataagaagacatacgaggatc

SEQ ID NO: 47319 - DNA, 25 bp, Probe Sequence
ttgtgaataagaagacatacgagga

SEQ ID NO: 47320 - DNA, 25 bp, Probe Sequence
gttgtgaataagaagacatacgagg

SEQ ID NO: 47321 - DNA, 25 bp, Probe Sequence
gaggaagaatatgaagactcaagtg

SEQ ID NO: 47322 - DNA, 25 bp, Probe Sequence
tgtgaataagaagacatacgaggat

SEQ ID NO: 47323 - DNA, 25 bp, Probe Sequence
tgttgtgaataagaagacatacgag

SEQ ID NO: 47324 - DNA, 25 bp, Probe Sequence
ataagaagacatacgaggatctgaa

SEQ ID NO: 47325 - DNA, 25 bp, Probe Sequence
aataagaagacatacgaggatctga

SEQ ID NO: 47326 - DNA, 25 bp, Probe Sequence
tgaataagaagacatacgaggatct

SEQ ID NO: 47327 - DNA, 25 bp, Probe Sequence
gaataagaagacatacgaggatctg

SEQ ID NO: 47328 - DNA, 25 bp, Probe Sequence
cctgacactgaggaagaatatgaag

SEQ ID NO: 47329 - DNA, 25 bp, Probe Sequence
cttaatgcctccatacctcttcctc

SEQ ID NO: 47330 - DNA, 25 bp, Probe Sequence
gtcttaatgcctccatacctcttcc

SEQ ID NO: 47331 - DNA, 25 bp, Probe Sequence
tcttaatgcctccatacctcttcct

SEQ ID NO: 47332 - DNA, 25 bp, Probe Sequence
ccaactcagtgcttcaggtcttaat

SEQ ID NO: 47333 - DNA, 25 bp, Probe Sequence
gtgggaatgttgtgaataagaagac

SEQ ID NO: 47334 - DNA, 25 bp, Probe Sequence
agtgggaatgttgtgaataagaaga

SEQ ID NO: 47335 - DNA, 25 bp, Probe Sequence
tacctcttcctcaccaactttacta

SEQ ID NO: 47336 - DNA, 25 bp, Probe Sequence
ttgttgtaaggacttgataacctgg

SEQ ID NO: 47337 - DNA, 25 bp, Probe Sequence
ttgtaaggacttgataacctggcta

SEQ ID NO: 47338 - DNA, 25 bp, Probe Sequence
taaggacttgataacctggctacag

SEQ ID NO: 47339 - DNA, 25 bp, Probe Sequence
gtaaggacttgataacctggctaca

SEQ ID NO: 47340 - DNA, 25 bp, Probe Sequence
tgtaaggacttgataacctggctac

SEQ ID NO: 47341 - DNA, 25 bp, Probe Sequence
actttgttgtaaggacttgataacc

SEQ ID NO: 47342 - DNA, 25 bp, Probe Sequence
tattattacttggaccttggtcgtt

SEQ ID NO: 47343 - DNA, 25 bp, Probe Sequence
ttattattacttggaccttggtcgt

SEQ ID NO: 47344 - DNA, 25 bp, Probe Sequence
cagtaatagtggaccttacagaggc

SEQ ID NO: 47345 - DNA, 25 bp, Probe Sequence
gcagtaatagtggaccttacagagg

SEQ ID NO: 47346 - DNA, 25 bp, Probe Sequence
gttgtaaggacttgataacctggct

SEQ ID NO: 47347 - DNA, 25 bp, Probe Sequence
cgcagtaatagtggaccttacagag

SEQ ID NO: 47348 - DNA, 25 bp, Probe Sequence
tgttgtaaggacttgataacctggc

SEQ ID NO: 47349 - DNA, 25 bp, Probe Sequence
tcgcagtaatagtggaccttacaga

SEQ ID NO: 47350 - DNA, 25 bp, Probe Sequence
gtcgcagtaatagtggaccttacag

SEQ ID NO: 47351 - DNA, 25 bp, Probe Sequence
tttgttgtaaggacttgataacctg

SEQ ID NO: 47352 - DNA, 25 bp, Probe Sequence
gggtagtttactttgttgtaaggac

SEQ ID NO: 47353 - DNA, 25 bp, Probe Sequence
ctttgttgtaaggacttgataacct

SEQ ID NO: 47354 - DNA, 25 bp, Probe Sequence
ttaataaatcattgtgtttgaccgt

SEQ ID NO: 47355 - DNA, 25 bp, Probe Sequence
ggtagtttactttgttgtaaggact

SEQ ID NO: 47356 - DNA, 25 bp, Probe Sequence
agtttactttgttgtaaggacttga

SEQ ID NO: 47357 - DNA, 25 bp, Probe Sequence
agtaatagtggaccttacagaggcg

SEQ ID NO: 47358 - DNA, 25 bp, Probe Sequence
attattacttggaccttggtcgttt

SEQ ID NO: 47359 - DNA, 25 bp, Probe Sequence
tactttgttgtaaggacttgataac

SEQ ID NO: 47360 - DNA, 25 bp, Probe Sequence
actaagcctgttcataagttaccaa

SEQ ID NO: 47361 - DNA, 25 bp, Probe Sequence
gactaagcctgttcataagttacca

SEQ ID NO: 47362 - DNA, 25 bp, Probe Sequence
ggactaagcctgttcataagttacc

SEQ ID NO: 47363 - DNA, 25 bp, Probe Sequence
aggactaagcctgttcataagttac

SEQ ID NO: 47364 - DNA, 25 bp, Probe Sequence
aaggactaagcctgttcataagtta

SEQ ID NO: 47365 - DNA, 25 bp, Probe Sequence
agttctacttgtcttgacaccatag

SEQ ID NO: 47366 - DNA, 25 bp, Probe Sequence
gagttctacttgtcttgacaccata

SEQ ID NO: 47367 - DNA, 25 bp, Probe Sequence
cattctgccttagaggtgctaattc

SEQ ID NO: 47368 - DNA, 25 bp, Probe Sequence
atcattctgccttagaggtgctaat

SEQ ID NO: 47369 - DNA, 25 bp, Probe Sequence
gtggtagaggaggtaagacagtagg

SEQ ID NO: 47370 - DNA, 25 bp, Probe Sequence
ggtggtagaggaggtaagacagtag

SEQ ID NO: 47371 - DNA, 25 bp, Probe Sequence
tgaaagtctgaaacctataagccaa

SEQ ID NO: 47372 - DNA, 25 bp, Probe Sequence
accataaataaggactgtgagagac

SEQ ID NO: 47373 - DNA, 25 bp, Probe Sequence
aagatgacaagaactaacgctcctg

SEQ ID NO: 47374 - DNA, 25 bp, Probe Sequence
tcattctgccttagaggtgctaatt

SEQ ID NO: 47375 - DNA, 25 bp, Probe Sequence
ctgtgaaagtctgaaacctataagc

SEQ ID NO: 47376 - DNA, 25 bp, Probe Sequence
gctgtgaaagtctgaaacctataag

SEQ ID NO: 47377 - DNA, 25 bp, Probe Sequence
aaataaggactgtgagagactgttt

SEQ ID NO: 47378 - DNA, 25 bp, Probe Sequence
gaaagtctgaaacctataagccaag

SEQ ID NO: 47379 - DNA, 25 bp, Probe Sequence
ccataaataaggactgtgagagact

SEQ ID NO: 47380 - DNA, 25 bp, Probe Sequence
gttcataagttaccaaagttgccat

SEQ ID NO: 47381 - DNA, 25 bp, Probe Sequence
agcctgttcataagttaccaaagtt

SEQ ID NO: 47382 - DNA, 25 bp, Probe Sequence
aagcctgttcataagttaccaaagt

SEQ ID NO: 47383 - DNA, 25 bp, Probe Sequence
catagaggtggcttgagaagatgtc

SEQ ID NO: 47384 - DNA, 25 bp, Probe Sequence
aggtgagattgaataatgcttgatg

SEQ ID NO: 47385 - DNA, 25 bp, Probe Sequence
ggtgagattgaataatgcttgatgc

SEQ ID NO: 47386 - DNA, 25 bp, Probe Sequence
gaaggtgagattgaataatgcttga

SEQ ID NO: 47387 - DNA, 25 bp, Probe Sequence
agaaggtgagattgaataatgcttg

SEQ ID NO: 47388 - DNA, 25 bp, Probe Sequence
cagaaggtgagattgaataatgctt

SEQ ID NO: 47389 - DNA, 25 bp, Probe Sequence
tcagaaggtgagattgaataatgct

SEQ ID NO: 47390 - DNA, 25 bp, Probe Sequence
aaggtgagattgaataatgcttgat

SEQ ID NO: 47391 - DNA, 25 bp, Probe Sequence
atcagaaggtgagattgaataatgc

SEQ ID NO: 47392 - DNA, 25 bp, Probe Sequence
ctaaggatatagcacaaagggaaca

SEQ ID NO: 47393 - DNA, 25 bp, Probe Sequence
aggatatagcacaaagggaacattt

SEQ ID NO: 47394 - DNA, 25 bp, Probe Sequence
aaggatatagcacaaagggaacatt

SEQ ID NO: 47395 - DNA, 25 bp, Probe Sequence
tctaaggatatagcacaaagggaac

SEQ ID NO: 47396 - DNA, 25 bp, Probe Sequence
taaggatatagcacaaagggaacat

SEQ ID NO: 47397 - DNA, 25 bp, Probe Sequence
acttctaaggatatagcacaaaggg

SEQ ID NO: 47398 - DNA, 25 bp, Probe Sequence
cttctaaggatatagcacaaaggga

SEQ ID NO: 47399 - DNA, 25 bp, Probe Sequence
ttctaaggatatagcacaaagggaa

SEQ ID NO: 47400 - DNA, 25 bp, Probe Sequence
gcaggtttatatcagaaggtgagat

SEQ ID NO: 47401 - DNA, 25 bp, Probe Sequence
ggtttatatcagaaggtgagattga

SEQ ID NO: 47402 - DNA, 25 bp, Probe Sequence
aggtttatatcagaaggtgagattg

SEQ ID NO: 47403 - DNA, 25 bp, Probe Sequence
caggtttatatcagaaggtgagatt

SEQ ID NO: 47404 - DNA, 25 bp, Probe Sequence
tacttctaaggatatagcacaaagg

SEQ ID NO: 47405 - DNA, 25 bp, Probe Sequence
tatcagaaggtgagattgaataatg

SEQ ID NO: 47406 - DNA, 25 bp, Probe Sequence
tgtatgcaggtttatatcagaaggt

SEQ ID NO: 47407 - DNA, 25 bp, Probe Sequence
gtatgcaggtttatatcagaaggtg

SEQ ID NO: 47408 - DNA, 25 bp, Probe Sequence
agaacatcatccaggagacagagaa

SEQ ID NO: 47409 - DNA, 25 bp, Probe Sequence
gagaacatcatccaggagacagaga

SEQ ID NO: 47410 - DNA, 25 bp, Probe Sequence
ttctaaataaacaactggaccatca

SEQ ID NO: 47411 - DNA, 25 bp, Probe Sequence
gaacatcatccaggagacagagaaa

SEQ ID NO: 47412 - DNA, 25 bp, Probe Sequence
ggagaacatcatccaggagacagag

SEQ ID NO: 47413 - DNA, 25 bp, Probe Sequence
tggagaacatcatccaggagacaga

SEQ ID NO: 47414 - DNA, 25 bp, Probe Sequence
ttgaatgtgtgactaggagatgatt

SEQ ID NO: 47415 - DNA, 25 bp, Probe Sequence
tttgacttctactttactggctgag

SEQ ID NO: 47416 - DNA, 25 bp, Probe Sequence
tactgaacaactcctattcccattt

SEQ ID NO: 47417 - DNA, 25 bp, Probe Sequence
ttactgaacaactcctattcccatt

SEQ ID NO: 47418 - DNA, 25 bp, Probe Sequence
attactgaacaactcctattcccat

SEQ ID NO: 47419 - DNA, 25 bp, Probe Sequence
atgtttgaatgtgtgactaggagat

SEQ ID NO: 47420 - DNA, 25 bp, Probe Sequence
aattactgaacaactcctattccca

SEQ ID NO: 47421 - DNA, 25 bp, Probe Sequence
tgaatgtgtgactaggagatgattt

SEQ ID NO: 47422 - DNA, 25 bp, Probe Sequence
tttgaatgtgtgactaggagatgat

SEQ ID NO: 47423 - DNA, 25 bp, Probe Sequence
gtttgaatgtgtgactaggagatga

SEQ ID NO: 47424 - DNA, 25 bp, Probe Sequence
tgtttgaatgtgtgactaggagatg

SEQ ID NO: 47425 - DNA, 25 bp, Probe Sequence
aaattactgaacaactcctattccc

SEQ ID NO: 47426 - DNA, 25 bp, Probe Sequence
ttgactctttgtgtgtgactgtttc

SEQ ID NO: 47427 - DNA, 25 bp, Probe Sequence
cttgactctttgtgtgtgactgttt

SEQ ID NO: 47428 - DNA, 25 bp, Probe Sequence
aatctgaaattactgaacaactcct

SEQ ID NO: 47429 - DNA, 25 bp, Probe Sequence
ttgacttctactttactggctgagt

SEQ ID NO: 47430 - DNA, 25 bp, Probe Sequence
gactctttgtgtgtgactgtttctc

SEQ ID NO: 47431 - DNA, 25 bp, Probe Sequence
ctctttgtgtgtgactgtttctcat

SEQ ID NO: 47432 - DNA, 25 bp, Probe Sequence
catgtttgaatgtgtgactaggaga

SEQ ID NO: 47433 - DNA, 25 bp, Probe Sequence
gtttctcatgtttgaatgtgtgact

SEQ ID NO: 47434 - DNA, 25 bp, Probe Sequence
ctgtttctcatgtttgaatgtgtga

SEQ ID NO: 47435 - DNA, 25 bp, Probe Sequence
gactgtttctcatgtttgaatgtgt

SEQ ID NO: 47436 - DNA, 25 bp, Probe Sequence
tgactgtttctcatgtttgaatgtg

SEQ ID NO: 47437 - DNA, 25 bp, Probe Sequence
gtgactgtttctcatgtttgaatgt

SEQ ID NO: 47438 - DNA, 25 bp, Probe Sequence
aacaccttggtcataataatgtcat

SEQ ID NO: 47439 - DNA, 25 bp, Probe Sequence
acaccttggtcataataatgtcatt

SEQ ID NO: 47440 - DNA, 25 bp, Probe Sequence
tggagattacaggaccagataacaa

SEQ ID NO: 47441 - DNA, 25 bp, Probe Sequence
ctcttgttctagttgccatgacatt

SEQ ID NO: 47442 - DNA, 25 bp, Probe Sequence
gattacaggaccagataacaaagga

SEQ ID NO: 47443 - DNA, 25 bp, Probe Sequence
agattacaggaccagataacaaagg

SEQ ID NO: 47444 - DNA, 25 bp, Probe Sequence
ggagattacaggaccagataacaaa

SEQ ID NO: 47445 - DNA, 25 bp, Probe Sequence
ttacaggaccagataacaaaggaat

SEQ ID NO: 47446 - DNA, 25 bp, Probe Sequence
attacaggaccagataacaaaggaa

SEQ ID NO: 47447 - DNA, 25 bp, Probe Sequence
tcttgttctagttgccatgacattg

SEQ ID NO: 47448 - DNA, 25 bp, Probe Sequence
ggagagaatacacagagccatcaac

SEQ ID NO: 47449 - DNA, 25 bp, Probe Sequence
acaggaccagataacaaaggaattt

SEQ ID NO: 47450 - DNA, 25 bp, Probe Sequence
aggaatttacaaaggagacagagaa

SEQ ID NO: 47451 - DNA, 25 bp, Probe Sequence
aaggaatttacaaaggagacagaga

SEQ ID NO: 47452 - DNA, 25 bp, Probe Sequence
tacaggaccagataacaaaggaatt

SEQ ID NO: 47453 - DNA, 25 bp, Probe Sequence
aaggacaagatatggaaacagaagc

SEQ ID NO: 47454 - DNA, 25 bp, Probe Sequence
aaaggacaagatatggaaacagaag

SEQ ID NO: 47455 - DNA, 25 bp, Probe Sequence
acaaaggaatttacaaaggagacag

SEQ ID NO: 47456 - DNA, 25 bp, Probe Sequence
gagattacaggaccagataacaaag

SEQ ID NO: 47457 - DNA, 25 bp, Probe Sequence
gtggagattacaggaccagataaca

SEQ ID NO: 47458 - DNA, 25 bp, Probe Sequence
caaaggaatttacaaaggagacaga

SEQ ID NO: 47459 - DNA, 25 bp, Probe Sequence
aacaaaggaatttacaaaggagaca

SEQ ID NO: 47460 - DNA, 25 bp, Probe Sequence
ggaccagataacaaaggaatttaca

SEQ ID NO: 47461 - DNA, 25 bp, Probe Sequence
aaaggaatttacaaaggagacagag

SEQ ID NO: 47462 - DNA, 25 bp, Probe Sequence
tgattgagaagaacaagatgagtga

SEQ ID NO: 47463 - DNA, 25 bp, Probe Sequence
gattgagaagaacaagatgagtgac

SEQ ID NO: 47464 - DNA, 25 bp, Probe Sequence
ctgattgagaagaacaagatgagtg

SEQ ID NO: 47465 - DNA, 25 bp, Probe Sequence
attgagaagaacaagatgagtgacg

SEQ ID NO: 47466 - DNA, 25 bp, Probe Sequence
gctgattgagaagaacaagatgagt

SEQ ID NO: 47467 - DNA, 25 bp, Probe Sequence
ggctgattgagaagaacaagatgag

SEQ ID NO: 47468 - DNA, 25 bp, Probe Sequence
gcaagataacctctcaagtgtgaag

SEQ ID NO: 47469 - DNA, 25 bp, Probe Sequence
aggctgattgagaagaacaagatga

SEQ ID NO: 47470 - DNA, 25 bp, Probe Sequence
caggctgattgagaagaacaagatg

SEQ ID NO: 47471 - DNA, 25 bp, Probe Sequence
aagtgtgaaggagactcagaagaag

SEQ ID NO: 47472 - DNA, 25 bp, Probe Sequence
ctggacattgatgctaacatgacat

SEQ ID NO: 47473 - DNA, 25 bp, Probe Sequence
tatgcctggacattgatgctaacat

SEQ ID NO: 47474 - DNA, 25 bp, Probe Sequence
aagataacctctcaagtgtgaagga

SEQ ID NO: 47475 - DNA, 25 bp, Probe Sequence
caagataacctctcaagtgtgaagg

SEQ ID NO: 47476 - DNA, 25 bp, Probe Sequence
tggacattgatgctaacatgacatg

SEQ ID NO: 47477 - DNA, 25 bp, Probe Sequence
caagtgtgaaggagactcagaagaa

SEQ ID NO: 47478 - DNA, 25 bp, Probe Sequence
agataacctctcaagtgtgaaggag

SEQ ID NO: 47479 - DNA, 25 bp, Probe Sequence
gagtatgcctggacattgatgctaa

SEQ ID NO: 47480 - DNA, 25 bp, Probe Sequence
gacattgatgctaacatgacatgct

SEQ ID NO: 47481 - DNA, 25 bp, Probe Sequence
ttgagaagaacaagatgagtgacgg

SEQ ID NO: 47482 - DNA, 25 bp, Probe Sequence
ctcaagtgtgaaggagactcagaag

SEQ ID NO: 47483 - DNA, 25 bp, Probe Sequence
agtatgcctggacattgatgctaac

SEQ ID NO: 47484 - DNA, 25 bp, Probe Sequence
ccaggctgattgagaagaacaagat

SEQ ID NO: 47485 - DNA, 25 bp, Probe Sequence
ggcaagataacctctcaagtgtgaa

SEQ ID NO: 47486 - DNA, 25 bp, Probe Sequence
tacacatctccattccttattccac

SEQ ID NO: 47487 - DNA, 25 bp, Probe Sequence
attgctgaacttgatacactgaatg

SEQ ID NO: 47488 - DNA, 25 bp, Probe Sequence
cattgctgaacttgatacactgaat

SEQ ID NO: 47489 - DNA, 25 bp, Probe Sequence
acatctccattccttattccacttg

SEQ ID NO: 47490 - DNA, 25 bp, Probe Sequence
cacatctccattccttattccactt

SEQ ID NO: 47491 - DNA, 25 bp, Probe Sequence
ttacacatctccattccttattcca

SEQ ID NO: 47492 - DNA, 25 bp, Probe Sequence
gtgtgttgctaatcattgactgtag

SEQ ID NO: 47493 - DNA, 25 bp, Probe Sequence
tgctgaacttgatacactgaatgaa

SEQ ID NO: 47494 - DNA, 25 bp, Probe Sequence
ttgctgaacttgatacactgaatga

SEQ ID NO: 47495 - DNA, 25 bp, Probe Sequence
attgtgtgttgctaatcattgactg

SEQ ID NO: 47496 - DNA, 25 bp, Probe Sequence
tgtgttgctaatcattgactgtagt

SEQ ID NO: 47497 - DNA, 25 bp, Probe Sequence
gctgaacttgatacactgaatgaag

SEQ ID NO: 47498 - DNA, 25 bp, Probe Sequence
tgtgtgttgctaatcattgactgta

SEQ ID NO: 47499 - DNA, 25 bp, Probe Sequence
tattgtgtgttgctaatcattgact

SEQ ID NO: 47500 - DNA, 25 bp, Probe Sequence
actattgtgtgttgctaatcattga

SEQ ID NO: 47501 - DNA, 25 bp, Probe Sequence
tgaacttgatacactgaatgaagac

SEQ ID NO: 47502 - DNA, 25 bp, Probe Sequence
ctattgtgtgttgctaatcattgac

SEQ ID NO: 47503 - DNA, 25 bp, Probe Sequence
acacatctccattccttattccact

SEQ ID NO: 47504 - DNA, 25 bp, Probe Sequence
ccattgctgaacttgatacactgaa

SEQ ID NO: 47505 - DNA, 25 bp, Probe Sequence
acttgatacactgaatgaagactca

SEQ ID NO: 47506 - DNA, 25 bp, Probe Sequence
aacttgatacactgaatgaagactc

SEQ ID NO: 47507 - DNA, 25 bp, Probe Sequence
gaacttgatacactgaatgaagact

SEQ ID NO: 47508 - DNA, 25 bp, Probe Sequence
ctgaacttgatacactgaatgaaga

SEQ ID NO: 47509 - DNA, 25 bp, Probe Sequence
ttgtgtgttgctaatcattgactgt

SEQ ID NO: 47510 - DNA, 25 bp, Probe Sequence
cacccttaactttctctttaccctt

SEQ ID NO: 47511 - DNA, 25 bp, Probe Sequence
aacacccttaactttctctttaccc

SEQ ID NO: 47512 - DNA, 25 bp, Probe Sequence
acatagcttctggtgatatcttctc

SEQ ID NO: 47513 - DNA, 25 bp, Probe Sequence
ccttaactttctctttacccttagc

SEQ ID NO: 47514 - DNA, 25 bp, Probe Sequence
aaacacccttaactttctctttacc

SEQ ID NO: 47515 - DNA, 25 bp, Probe Sequence
acccttaactttctctttaccctta

SEQ ID NO: 47516 - DNA, 25 bp, Probe Sequence
ggttacctagataatgccaaagtca

SEQ ID NO: 47517 - DNA, 25 bp, Probe Sequence
acacccttaactttctctttaccct

SEQ ID NO: 47518 - DNA, 25 bp, Probe Sequence
ttacctagataatgccaaagtcagc

SEQ ID NO: 47519 - DNA, 25 bp, Probe Sequence
gttacctagataatgccaaagtcag

SEQ ID NO: 47520 - DNA, 25 bp, Probe Sequence
gggttacctagataatgccaaagtc

SEQ ID NO: 47521 - DNA, 25 bp, Probe Sequence
tagcttctggtgatatcttctcatg

SEQ ID NO: 47522 - DNA, 25 bp, Probe Sequence
catagcttctggtgatatcttctca

SEQ ID NO: 47523 - DNA, 25 bp, Probe Sequence
tacatagcttctggtgatatcttct

SEQ ID NO: 47524 - DNA, 25 bp, Probe Sequence
cccttaactttctctttacccttag

SEQ ID NO: 47525 - DNA, 25 bp, Probe Sequence
tgtgtgatctgtttggactatgttt

SEQ ID NO: 47526 - DNA, 25 bp, Probe Sequence
ttgtgtgatctgtttggactatgtt

SEQ ID NO: 47527 - DNA, 25 bp, Probe Sequence
cttgtgtgatctgtttggactatgt

SEQ ID NO: 47528 - DNA, 25 bp, Probe Sequence
atagcttctggtgatatcttctcat

SEQ ID NO: 47529 - DNA, 25 bp, Probe Sequence
ttacatagcttctggtgatatcttc

SEQ ID NO: 47530 - DNA, 25 bp, Probe Sequence
ccttgtgtgatctgtttggactatg

SEQ ID NO: 47531 - DNA, 25 bp, Probe Sequence
gacttcatttggattgccctctttc

SEQ ID NO: 47532 - DNA, 25 bp, Probe Sequence
cttcatttggattgccctctttcaa

SEQ ID NO: 47533 - DNA, 25 bp, Probe Sequence
tctctttacccttagctgaaatgtt

SEQ ID NO: 47534 - DNA, 25 bp, Probe Sequence
ctgaaatgatagcagggagacttgg

SEQ ID NO: 47535 - DNA, 25 bp, Probe Sequence
gaaatgatagcagggagacttgggt

SEQ ID NO: 47536 - DNA, 25 bp, Probe Sequence
tgaaatgatagcagggagacttggg

SEQ ID NO: 47537 - DNA, 25 bp, Probe Sequence
aaatgatagcagggagacttgggtg

SEQ ID NO: 47538 - DNA, 25 bp, Probe Sequence
gaaaccatcgacaagactgctaacc

SEQ ID NO: 47539 - DNA, 25 bp, Probe Sequence
ggaaaccatcgacaagactgctaac

SEQ ID NO: 47540 - DNA, 25 bp, Probe Sequence
aggaaaccatcgacaagactgctaa

SEQ ID NO: 47541 - DNA, 25 bp, Probe Sequence
ctcattaaaattcacgttcccaccc

SEQ ID NO: 47542 - DNA, 25 bp, Probe Sequence
cctcattaaaattcacgttcccacc

SEQ ID NO: 47543 - DNA, 25 bp, Probe Sequence
ccctcattaaaattcacgttcccac

SEQ ID NO: 47544 - DNA, 25 bp, Probe Sequence
aaccatcgacaagactgctaaccag

SEQ ID NO: 47545 - DNA, 25 bp, Probe Sequence
aatgatagcagggagacttgggtga

SEQ ID NO: 47546 - DNA, 25 bp, Probe Sequence
cattaaaattcacgttcccaccctg

SEQ ID NO: 47547 - DNA, 25 bp, Probe Sequence
tcattaaaattcacgttcccaccct

SEQ ID NO: 47548 - DNA, 25 bp, Probe Sequence
aaaccatcgacaagactgctaacca

SEQ ID NO: 47549 - DNA, 25 bp, Probe Sequence
attaaaattcacgttcccaccctga

SEQ ID NO: 47550 - DNA, 25 bp, Probe Sequence
cccctcattaaaattcacgttccca

SEQ ID NO: 47551 - DNA, 25 bp, Probe Sequence
caggaaaccatcgacaagactgcta

SEQ ID NO: 47552 - DNA, 25 bp, Probe Sequence
taaaattcacgttcccaccctgaaa

SEQ ID NO: 47553 - DNA, 25 bp, Probe Sequence
ttaaaattcacgttcccaccctgaa

SEQ ID NO: 47554 - DNA, 25 bp, Probe Sequence
cctgaaatgatagcagggagacttg

SEQ ID NO: 47555 - DNA, 25 bp, Probe Sequence
tcctgaaatgatagcagggagactt

SEQ ID NO: 47556 - DNA, 25 bp, Probe Sequence
ctcctgaaatgatagcagggagact

SEQ ID NO: 47557 - DNA, 25 bp, Probe Sequence
aaaattcggcctcctgaaatgacag

SEQ ID NO: 47558 - DNA, 25 bp, Probe Sequence
cctcctgaaatgatagcagggagac

SEQ ID NO: 47559 - DNA, 25 bp, Probe Sequence
ggaagaatatcagaattggtagaca

SEQ ID NO: 47560 - DNA, 25 bp, Probe Sequence
cttaaagcaacgaacattcactctc

SEQ ID NO: 47561 - DNA, 25 bp, Probe Sequence
catttcaaactgtcacattagggat

SEQ ID NO: 47562 - DNA, 25 bp, Probe Sequence
ttaaagcaacgaacattcactctct

SEQ ID NO: 47563 - DNA, 25 bp, Probe Sequence
gaaatggctcataagtagtatctgc

SEQ ID NO: 47564 - DNA, 25 bp, Probe Sequence
tttcaaactgtcacattagggatac

SEQ ID NO: 47565 - DNA, 25 bp, Probe Sequence
aacgaacattcactctctcacagtc

SEQ ID NO: 47566 - DNA, 25 bp, Probe Sequence
taaagcaacgaacattcactctctc

SEQ ID NO: 47567 - DNA, 25 bp, Probe Sequence
gggaagaatatcagaattggtagac

SEQ ID NO: 47568 - DNA, 25 bp, Probe Sequence
agggaagaatatcagaattggtaga

SEQ ID NO: 47569 - DNA, 25 bp, Probe Sequence
tgaagggaagaatatcagaattggt

SEQ ID NO: 47570 - DNA, 25 bp, Probe Sequence
tcaaactgtcacattagggatacaa

SEQ ID NO: 47571 - DNA, 25 bp, Probe Sequence
ttcaaactgtcacattagggataca

SEQ ID NO: 47572 - DNA, 25 bp, Probe Sequence
caacgaacattcactctctcacagt

SEQ ID NO: 47573 - DNA, 25 bp, Probe Sequence
acatttcaaactgtcacattaggga

SEQ ID NO: 47574 - DNA, 25 bp, Probe Sequence
atttcaaactgtcacattagggata

SEQ ID NO: 47575 - DNA, 25 bp, Probe Sequence
ttgaagggaagaatatcagaattgg

SEQ ID NO: 47576 - DNA, 25 bp, Probe Sequence
tcagaattggtagacatttcaaact

SEQ ID NO: 47577 - DNA, 25 bp, Probe Sequence
caaactgtcacattagggatacaaa

SEQ ID NO: 47578 - DNA, 25 bp, Probe Sequence
gaacattcactctctcacagtctgt

SEQ ID NO: 47579 - DNA, 25 bp, Probe Sequence
tgacagaaactgcctatttgaaatg

SEQ ID NO: 47580 - DNA, 25 bp, Probe Sequence
ctgacagaaactgcctatttgaaat

SEQ ID NO: 47581 - DNA, 25 bp, Probe Sequence
aagggaagaatatcagaattggtag

SEQ ID NO: 47582 - DNA, 25 bp, Probe Sequence
gaagggaagaatatcagaattggta

SEQ ID NO: 47583 - DNA, 25 bp, Probe Sequence
atattattacaccaaggaggagcag

SEQ ID NO: 47584 - DNA, 25 bp, Probe Sequence
accgtggaagagaagattatcattg

SEQ ID NO: 47585 - DNA, 25 bp, Probe Sequence
cgtggaagagaagattatcattgac

SEQ ID NO: 47586 - DNA, 25 bp, Probe Sequence
ccgtggaagagaagattatcattga

SEQ ID NO: 47587 - DNA, 25 bp, Probe Sequence
tattattacaccaaggaggagcagt

SEQ ID NO: 47588 - DNA, 25 bp, Probe Sequence
caccgtggaagagaagattatcatt

SEQ ID NO: 47589 - DNA, 25 bp, Probe Sequence
gtggaagagaagattatcattgaca

SEQ ID NO: 47590 - DNA, 25 bp, Probe Sequence
attattacaccaaggaggagcagtt

SEQ ID NO: 47591 - DNA, 25 bp, Probe Sequence
acaccgtggaagagaagattatcat

SEQ ID NO: 47592 - DNA, 25 bp, Probe Sequence
tggaagagaagattatcattgacaa

SEQ ID NO: 47593 - DNA, 25 bp, Probe Sequence
aatattattacaccaaggaggagca

SEQ ID NO: 47594 - DNA, 25 bp, Probe Sequence
gaatattattacaccaaggaggagc

SEQ ID NO: 47595 - DNA, 25 bp, Probe Sequence
agagaagattatcattgacaaggaa

SEQ ID NO: 47596 - DNA, 25 bp, Probe Sequence
aagagaagattatcattgacaagga

SEQ ID NO: 47597 - DNA, 25 bp, Probe Sequence
cttgtcattctcaacatctcagacc

SEQ ID NO: 47598 - DNA, 25 bp, Probe Sequence
ccttgtcattctcaacatctcagac

SEQ ID NO: 47599 - DNA, 25 bp, Probe Sequence
aggaatattattacaccaaggagga

SEQ ID NO: 47600 - DNA, 25 bp, Probe Sequence
gaagagaagattatcattgacaagg

SEQ ID NO: 47601 - DNA, 25 bp, Probe Sequence
ggaagagaagattatcattgacaag

SEQ ID NO: 47602 - DNA, 25 bp, Probe Sequence
agcacagacaagttcaagacagatt

SEQ ID NO: 47603 - DNA, 25 bp, Probe Sequence
ggaatattattacaccaaggaggag

SEQ ID NO: 47604 - DNA, 25 bp, Probe Sequence
ttgtcattctcaacatctcagacca

SEQ ID NO: 47605 - DNA, 25 bp, Probe Sequence
aaggaatattattacaccaaggagg

SEQ ID NO: 47606 - DNA, 25 bp, Probe Sequence
ctctttctgaagttgaaccctatga

SEQ ID NO: 47607 - DNA, 25 bp, Probe Sequence
gactgttgaggaagatgagagaatt

SEQ ID NO: 47608 - DNA, 25 bp, Probe Sequence
agactgttgaggaagatgagagaat

SEQ ID NO: 47609 - DNA, 25 bp, Probe Sequence
ttaccaagcaactacttcactgtat

SEQ ID NO: 47610 - DNA, 25 bp, Probe Sequence
taccaagcaactacttcactgtatg

SEQ ID NO: 47611 - DNA, 25 bp, Probe Sequence
cttaccaagcaactacttcactgta

SEQ ID NO: 47612 - DNA, 25 bp, Probe Sequence
aagactgttgaggaagatgagagaa

SEQ ID NO: 47613 - DNA, 25 bp, Probe Sequence
agtggatgacttctatgatggaatc

SEQ ID NO: 47614 - DNA, 25 bp, Probe Sequence
acggctctataatgaagataatgtc

SEQ ID NO: 47615 - DNA, 25 bp, Probe Sequence
caagactgttgaggaagatgagaga

SEQ ID NO: 47616 - DNA, 25 bp, Probe Sequence
cggctctataatgaagataatgtct

SEQ ID NO: 47617 - DNA, 25 bp, Probe Sequence
aacggctctataatgaagataatgt

SEQ ID NO: 47618 - DNA, 25 bp, Probe Sequence
tccttaccaagcaactacttcactg

SEQ ID NO: 47619 - DNA, 25 bp, Probe Sequence
gtccttaccaagcaactacttcact

SEQ ID NO: 47620 - DNA, 25 bp, Probe Sequence
ccttaccaagcaactacttcactgt

SEQ ID NO: 47621 - DNA, 25 bp, Probe Sequence
ccaagactgttgaggaagatgagag

SEQ ID NO: 47622 - DNA, 25 bp, Probe Sequence
agtccttaccaagcaactacttcac

SEQ ID NO: 47623 - DNA, 25 bp, Probe Sequence
cagtccttaccaagcaactacttca

SEQ ID NO: 47624 - DNA, 25 bp, Probe Sequence
aaagtagaggaaatggaagtggatg

SEQ ID NO: 47625 - DNA, 25 bp, Probe Sequence
caaagtagaggaaatggaagtggat

SEQ ID NO: 47626 - DNA, 25 bp, Probe Sequence
gatggaatcaaacggctctataatg

SEQ ID NO: 47627 - DNA, 25 bp, Probe Sequence
taaacgcaaagtagaggaaatggaa

SEQ ID NO: 47628 - DNA, 25 bp, Probe Sequence
taaaggtattggcaagagacagttt

SEQ ID NO: 47629 - DNA, 25 bp, Probe Sequence
tactaaaggtattggcaagagacag

SEQ ID NO: 47630 - DNA, 25 bp, Probe Sequence
ctaaaggtattggcaagagacagtt

SEQ ID NO: 47631 - DNA, 25 bp, Probe Sequence
gaagtataaggtgctctgaagtgtc

SEQ ID NO: 47632 - DNA, 25 bp, Probe Sequence
tagaagtataaggtgctctgaagtg

SEQ ID NO: 47633 - DNA, 25 bp, Probe Sequence
ttagaagtataaggtgctctgaagt

SEQ ID NO: 47634 - DNA, 25 bp, Probe Sequence
agaagtataaggtgctctgaagtgt

SEQ ID NO: 47635 - DNA, 25 bp, Probe Sequence
tgattagaagtataaggtgctctga

SEQ ID NO: 47636 - DNA, 25 bp, Probe Sequence
ctgattagaagtataaggtgctctg

SEQ ID NO: 47637 - DNA, 25 bp, Probe Sequence
ggattgatgtctcaggttattaagg

SEQ ID NO: 47638 - DNA, 25 bp, Probe Sequence
tctgattagaagtataaggtgctct

SEQ ID NO: 47639 - DNA, 25 bp, Probe Sequence
aagtataaggtgctctgaagtgtcc

SEQ ID NO: 47640 - DNA, 25 bp, Probe Sequence
tggattgatgtctcaggttattaag

SEQ ID NO: 47641 - DNA, 25 bp, Probe Sequence
tataaggtgctctgaagtgtcctaa

SEQ ID NO: 47642 - DNA, 25 bp, Probe Sequence
attagaagtataaggtgctctgaag

SEQ ID NO: 47643 - DNA, 25 bp, Probe Sequence
gattagaagtataaggtgctctgaa

SEQ ID NO: 47644 - DNA, 25 bp, Probe Sequence
gattgatgtctcaggttattaagga

SEQ ID NO: 47645 - DNA, 25 bp, Probe Sequence
gttcttctagcttgcttactaatgc

SEQ ID NO: 47646 - DNA, 25 bp, Probe Sequence
tgagtaccagactattccacttaat

SEQ ID NO: 47647 - DNA, 25 bp, Probe Sequence
ctgagtaccagactattccacttaa

SEQ ID NO: 47648 - DNA, 25 bp, Probe Sequence
atctgattagaagtataaggtgctc

SEQ ID NO: 47649 - DNA, 25 bp, Probe Sequence
gtataaggtgctctgaagtgtccta

SEQ ID NO: 47650 - DNA, 25 bp, Probe Sequence
ttgatccaacaagaacaatatccgc

SEQ ID NO: 47651 - DNA, 25 bp, Probe Sequence
atggattgatgtctcaggttattaa

SEQ ID NO: 47652 - DNA, 25 bp, Probe Sequence
gcttactaatgcagactataccact

SEQ ID NO: 47653 - DNA, 25 bp, Probe Sequence
gatccaacaagaacaatatccgcag

SEQ ID NO: 47654 - DNA, 25 bp, Probe Sequence
catggattgatgtctcaggttatta

SEQ ID NO: 47655 - DNA, 25 bp, Probe Sequence
aatacttgatggctctgaagaatct

SEQ ID NO: 47656 - DNA, 25 bp, Probe Sequence
atacttgatggctctgaagaatctg

SEQ ID NO: 47657 - DNA, 25 bp, Probe Sequence
cctgaatgactactggatacataac

SEQ ID NO: 47658 - DNA, 25 bp, Probe Sequence
tacttgatggctctgaagaatctgt

SEQ ID NO: 47659 - DNA, 25 bp, Probe Sequence
gcattgtagatccatatccaccatt

SEQ ID NO: 47660 - DNA, 25 bp, Probe Sequence
ctgaatgactactggatacataaca

SEQ ID NO: 47661 - DNA, 25 bp, Probe Sequence
tccatatccaccattatgtgacatt

SEQ ID NO: 47662 - DNA, 25 bp, Probe Sequence
gatccatatccaccattatgtgaca

SEQ ID NO: 47663 - DNA, 25 bp, Probe Sequence
agatccatatccaccattatgtgac

SEQ ID NO: 47664 - DNA, 25 bp, Probe Sequence
atccatatccaccattatgtgacat

SEQ ID NO: 47665 - DNA, 25 bp, Probe Sequence
tgaatgactactggatacataacaa

SEQ ID NO: 47666 - DNA, 25 bp, Probe Sequence
ctcctgaatgactactggatacata

SEQ ID NO: 47667 - DNA, 25 bp, Probe Sequence
cattgtagatccatatccaccatta

SEQ ID NO: 47668 - DNA, 25 bp, Probe Sequence
ttgccatattcttacttgaatgctt

SEQ ID NO: 47669 - DNA, 25 bp, Probe Sequence
attgccatattcttacttgaatgct

SEQ ID NO: 47670 - DNA, 25 bp, Probe Sequence
ggcattgtagatccatatccaccat

SEQ ID NO: 47671 - DNA, 25 bp, Probe Sequence
ccatcagagaatactacaaacacct

SEQ ID NO: 47672 - DNA, 25 bp, Probe Sequence
acagaaataaaccaccatcagagaa

SEQ ID NO: 47673 - DNA, 25 bp, Probe Sequence
accatcagagaatactacaaacacc

SEQ ID NO: 47674 - DNA, 25 bp, Probe Sequence
ccaccatcagagaatactacaaaca

SEQ ID NO: 47675 - DNA, 25 bp, Probe Sequence
accaccatcagagaatactacaaac

SEQ ID NO: 47676 - DNA, 25 bp, Probe Sequence
tgtagatccatatccaccattatgt

SEQ ID NO: 47677 - DNA, 25 bp, Probe Sequence
aaccaccatcagagaatactacaaa

SEQ ID NO: 47678 - DNA, 25 bp, Probe Sequence
aaaccaccatcagagaatactacaa

SEQ ID NO: 47679 - DNA, 25 bp, Probe Sequence
agatagaagaagtcagagatgccat

SEQ ID NO: 47680 - DNA, 25 bp, Probe Sequence
aagatagaagaagtcagagatgcca

SEQ ID NO: 47681 - DNA, 25 bp, Probe Sequence
aagccaactgttctgataatgaatt

SEQ ID NO: 47682 - DNA, 25 bp, Probe Sequence
gatagaagaagtcagagatgccatg

SEQ ID NO: 47683 - DNA, 25 bp, Probe Sequence
tacaagaacaggaattgaagtctga

SEQ ID NO: 47684 - DNA, 25 bp, Probe Sequence
ggtacaagaacaggaattgaagtct

SEQ ID NO: 47685 - DNA, 25 bp, Probe Sequence
caagaacaggaattgaagtctgaat

SEQ ID NO: 47686 - DNA, 25 bp, Probe Sequence
acaagaacaggaattgaagtctgaa

SEQ ID NO: 47687 - DNA, 25 bp, Probe Sequence
aagaacaggaattgaagtctgaatt

SEQ ID NO: 47688 - DNA, 25 bp, Probe Sequence
gtacaagaacaggaattgaagtctg

SEQ ID NO: 47689 - DNA, 25 bp, Probe Sequence
gcaaactgaataaagcaacaagatg

SEQ ID NO: 47690 - DNA, 25 bp, Probe Sequence
agcaaactgaataaagcaacaagat

SEQ ID NO: 47691 - DNA, 25 bp, Probe Sequence
aaagatagaagaagtcagagatgcc

SEQ ID NO: 47692 - DNA, 25 bp, Probe Sequence
tctggatataaatactgcctatgcc

SEQ ID NO: 47693 - DNA, 25 bp, Probe Sequence
gagcaaactgaataaagcaacaaga

SEQ ID NO: 47694 - DNA, 25 bp, Probe Sequence
tgaacaggacagaaagatagaagaa

SEQ ID NO: 47695 - DNA, 25 bp, Probe Sequence
aacaggacagaaagatagaagaagt

SEQ ID NO: 47696 - DNA, 25 bp, Probe Sequence
agaaacgaaacagatagtggaaatc

SEQ ID NO: 47697 - DNA, 25 bp, Probe Sequence
caaagccaactgttctgataatgaa

SEQ ID NO: 47698 - DNA, 25 bp, Probe Sequence
gaaagatagaagaagtcagagatgc

SEQ ID NO: 47699 - DNA, 25 bp, Probe Sequence
gaacaggacagaaagatagaagaag

SEQ ID NO: 47700 - DNA, 25 bp, Probe Sequence
attacaatttcgtcgtctcagtcaa

SEQ ID NO: 47701 - DNA, 25 bp, Probe Sequence
aattacaatttcgtcgtctcagtca

SEQ ID NO: 47702 - DNA, 25 bp, Probe Sequence
tgaacaagaattacaatttcgtcgt

SEQ ID NO: 47703 - DNA, 25 bp, Probe Sequence
ttgatacattcgtcagacacaagat

SEQ ID NO: 47704 - DNA, 25 bp, Probe Sequence
caagatcatcatcgtcaatcgtaat

SEQ ID NO: 47705 - DNA, 25 bp, Probe Sequence
aagatcatcatcgtcaatcgtaatc

SEQ ID NO: 47706 - DNA, 25 bp, Probe Sequence
agatcatcatcgtcaatcgtaatcg

SEQ ID NO: 47707 - DNA, 25 bp, Probe Sequence
gatacattcgtcagacacaagatcc

SEQ ID NO: 47708 - DNA, 25 bp, Probe Sequence
tgatacattcgtcagacacaagatc

SEQ ID NO: 47709 - DNA, 25 bp, Probe Sequence
gcaagatcatcatcgtcaatcgtaa

SEQ ID NO: 47710 - DNA, 25 bp, Probe Sequence
gatcatcatcgtcaatcgtaatcgg

SEQ ID NO: 47711 - DNA, 25 bp, Probe Sequence
agcaagatcatcatcgtcaatcgta

SEQ ID NO: 47712 - DNA, 25 bp, Probe Sequence
atttgatacattcgtcagacacaag

SEQ ID NO: 47713 - DNA, 25 bp, Probe Sequence
tttgatacattcgtcagacacaaga

SEQ ID NO: 47714 - DNA, 25 bp, Probe Sequence
aatttgatacattcgtcagacacaa

SEQ ID NO: 47715 - DNA, 25 bp, Probe Sequence
tcaatcgtaatcgggaagagatgtt

SEQ ID NO: 47716 - DNA, 25 bp, Probe Sequence
aacgctacctgacaactcaattctg

SEQ ID NO: 47717 - DNA, 25 bp, Probe Sequence
caatcgtaatcgggaagagatgttg

SEQ ID NO: 47718 - DNA, 25 bp, Probe Sequence
gaagagatgttgctcaactcagaca

SEQ ID NO: 47719 - DNA, 25 bp, Probe Sequence
gtcaatcgtaatcgggaagagatgt

SEQ ID NO: 47720 - DNA, 25 bp, Probe Sequence
gacaactcaattctggtggtggatg

SEQ ID NO: 47721 - DNA, 25 bp, Probe Sequence
gaatttgatacattcgtcagacaca

SEQ ID NO: 47722 - DNA, 25 bp, Probe Sequence
cagcaagatcatcatcgtcaatcgt

SEQ ID NO: 47723 - DNA, 25 bp, Probe Sequence
agcagcaagatcatcatcgtcaatc

SEQ ID NO: 47724 - DNA, 25 bp, Probe Sequence
atcatcgtcaatcgtaatcgggaag

SEQ ID NO: 47725 - DNA, 25 bp, Probe Sequence
ctacctgacaactcaattctggtgg

SEQ ID NO: 47726 - DNA, 25 bp, Probe Sequence
tacagcctcatcgaatttgatacat

SEQ ID NO: 47727 - DNA, 25 bp, Probe Sequence
atcacctaccttcaccatctgtata

SEQ ID NO: 47728 - DNA, 25 bp, Probe Sequence
tcacctaccttcaccatctgtatat

SEQ ID NO: 47729 - DNA, 25 bp, Probe Sequence
aatcacctaccttcaccatctgtat

SEQ ID NO: 47730 - DNA, 25 bp, Probe Sequence
gaatcacctaccttcaccatctgta

SEQ ID NO: 47731 - DNA, 25 bp, Probe Sequence
cacctaccttcaccatctgtatata

SEQ ID NO: 47732 - DNA, 25 bp, Probe Sequence
ataaggaacaatgaactcatctgcc

SEQ ID NO: 47733 - DNA, 25 bp, Probe Sequence
tataaggaacaatgaactcatctgc

SEQ ID NO: 47734 - DNA, 25 bp, Probe Sequence
aagaggatgaagacaggagcaatac

SEQ ID NO: 47735 - DNA, 25 bp, Probe Sequence
agatggcaagacacatggtaataag

SEQ ID NO: 47736 - DNA, 25 bp, Probe Sequence
aatgtcctgattacaatgctgtctg

SEQ ID NO: 47737 - DNA, 25 bp, Probe Sequence
gatggcaagacacatggtaataagt

SEQ ID NO: 47738 - DNA, 25 bp, Probe Sequence
cagatggcaagacacatggtaataa

SEQ ID NO: 47739 - DNA, 25 bp, Probe Sequence
ttcctcctagaatctgtgatctgag

SEQ ID NO: 47740 - DNA, 25 bp, Probe Sequence
gacgaatgacaggaagattgttgaa

SEQ ID NO: 47741 - DNA, 25 bp, Probe Sequence
acaacaatcagtgtaccatgtgtaa

SEQ ID NO: 47742 - DNA, 25 bp, Probe Sequence
gatgaagacaggagcaatacaggag

SEQ ID NO: 47743 - DNA, 25 bp, Probe Sequence
gaggatgaagacaggagcaatacag

SEQ ID NO: 47744 - DNA, 25 bp, Probe Sequence
aatgagtattctcgctccagatcaa

SEQ ID NO: 47745 - DNA, 25 bp, Probe Sequence
gattacaatgctgtctgtccaactg

SEQ ID NO: 47746 - DNA, 25 bp, Probe Sequence
ctgattacaatgctgtctgtccaac

SEQ ID NO: 47747 - DNA, 25 bp, Probe Sequence
aatacaggagaaaggagcaatacag

SEQ ID NO: 47748 - DNA, 25 bp, Probe Sequence
gtgatgagtttagaagccaaatgaa

SEQ ID NO: 47749 - DNA, 25 bp, Probe Sequence
atgtgatgagtttagaagccaaatg

SEQ ID NO: 47750 - DNA, 25 bp, Probe Sequence
atcaagtagcaagccctcaaataat

SEQ ID NO: 47751 - DNA, 25 bp, Probe Sequence
agcaagacatcctacaagagaatac

SEQ ID NO: 47752 - DNA, 25 bp, Probe Sequence
cagcaagacatcctacaagagaata

SEQ ID NO: 47753 - DNA, 25 bp, Probe Sequence
gcaagacatcctacaagagaatacg

SEQ ID NO: 47754 - DNA, 25 bp, Probe Sequence
tcagcaagacatcctacaagagaat

SEQ ID NO: 47755 - DNA, 25 bp, Probe Sequence
tattagcaagtacgaggcaatgttc

SEQ ID NO: 47756 - DNA, 25 bp, Probe Sequence
gaggcaatgttcattccaatcagat

SEQ ID NO: 47757 - DNA, 25 bp, Probe Sequence
caaggtgctggtacttattggtatt

SEQ ID NO: 47758 - DNA, 25 bp, Probe Sequence
gtattagcaagtacgaggcaatgtt

SEQ ID NO: 47759 - DNA, 25 bp, Probe Sequence
aggcaatgttcattccaatcagatg

SEQ ID NO: 47760 - DNA, 25 bp, Probe Sequence
acaaggtgctggtacttattggtat

SEQ ID NO: 47761 - DNA, 25 bp, Probe Sequence
ctcagcaagacatcctacaagagaa

SEQ ID NO: 47762 - DNA, 25 bp, Probe Sequence
gtacgaggcaatgttcattccaatc

SEQ ID NO: 47763 - DNA, 25 bp, Probe Sequence
tatcagtgtctttatggaaggaagc

SEQ ID NO: 47764 - DNA, 25 bp, Probe Sequence
taacatcacaaggtgctggtactta

SEQ ID NO: 47765 - DNA, 25 bp, Probe Sequence
tacgaggcaatgttcattccaatca

SEQ ID NO: 47766 - DNA, 25 bp, Probe Sequence
agtacgaggcaatgttcattccaat

SEQ ID NO: 47767 - DNA, 25 bp, Probe Sequence
tctatcagtgtctttatggaaggaa

SEQ ID NO: 47768 - DNA, 25 bp, Probe Sequence
ttctatcagtgtctttatggaagga

SEQ ID NO: 47769 - DNA, 25 bp, Probe Sequence
catcacaaggtgctggtacttattg

SEQ ID NO: 47770 - DNA, 25 bp, Probe Sequence
tagcaagtacgaggcaatgttcatt

SEQ ID NO: 47771 - DNA, 25 bp, Probe Sequence
attagcaagtacgaggcaatgttca

SEQ ID NO: 47772 - DNA, 25 bp, Probe Sequence
ctatcagtgtctttatggaaggaag

SEQ ID NO: 47773 - DNA, 25 bp, Probe Sequence
ggtgctggtacttattggtatttac

SEQ ID NO: 47774 - DNA, 25 bp, Probe Sequence
aggtgctggtacttattggtattta

SEQ ID NO: 47775 - DNA, 25 bp, Probe Sequence
taaccagtctcttcaaggcattatc

SEQ ID NO: 47776 - DNA, 25 bp, Probe Sequence
tggttcctgttcactctgttaataa

SEQ ID NO: 47777 - DNA, 25 bp, Probe Sequence
ttggttcctgttcactctgttaata

SEQ ID NO: 47778 - DNA, 25 bp, Probe Sequence
gtaaccagtctcttcaaggcattat

SEQ ID NO: 47779 - DNA, 25 bp, Probe Sequence
atgctgtcacttaataatcaacctg

SEQ ID NO: 47780 - DNA, 25 bp, Probe Sequence
ggttcctgttcactctgttaataag

SEQ ID NO: 47781 - DNA, 25 bp, Probe Sequence
aggagatgctgtcacttaataatca

SEQ ID NO: 47782 - DNA, 25 bp, Probe Sequence
gagacgatgaagaacaattagactg

SEQ ID NO: 47783 - DNA, 25 bp, Probe Sequence
ggagacgatgaagaacaattagact

SEQ ID NO: 47784 - DNA, 25 bp, Probe Sequence
aggagacgatgaagaacaattagac

SEQ ID NO: 47785 - DNA, 25 bp, Probe Sequence
caggagacgatgaagaacaattaga

SEQ ID NO: 47786 - DNA, 25 bp, Probe Sequence
gacgatgaagaacaattagactgga

SEQ ID NO: 47787 - DNA, 25 bp, Probe Sequence
agacgatgaagaacaattagactgg

SEQ ID NO: 47788 - DNA, 25 bp, Probe Sequence
tgctgtcacttaataatcaacctgg

SEQ ID NO: 47789 - DNA, 25 bp, Probe Sequence
acgatgaagaacaattagactggac

SEQ ID NO: 47790 - DNA, 25 bp, Probe Sequence
gatgctgtcacttaataatcaacct

SEQ ID NO: 47791 - DNA, 25 bp, Probe Sequence
agatgctgtcacttaataatcaacc

SEQ ID NO: 47792 - DNA, 25 bp, Probe Sequence
ggagatgctgtcacttaataatcaa

SEQ ID NO: 47793 - DNA, 25 bp, Probe Sequence
ccaggagacgatgaagaacaattag

SEQ ID NO: 47794 - DNA, 25 bp, Probe Sequence
cgatgaagaacaattagactggacc

SEQ ID NO: 47795 - DNA, 25 bp, Probe Sequence
tgtaaccagtctcttcaaggcatta

SEQ ID NO: 47796 - DNA, 25 bp, Probe Sequence
aaccagtctcttcaaggcattatct

SEQ ID NO: 47797 - DNA, 25 bp, Probe Sequence
tccaggagacgatgaagaacaatta

SEQ ID NO: 47798 - DNA, 25 bp, Probe Sequence
gttcctgttcactctgttaataaga

SEQ ID NO: 47799 - DNA, 25 bp, Probe Sequence
gacttcttctacttgtatgtgacca

SEQ ID NO: 47800 - DNA, 25 bp, Probe Sequence
tgacttcttctacttgtatgtgacc

SEQ ID NO: 47801 - DNA, 25 bp, Probe Sequence
aaccatcttctactgtgacttcttc

SEQ ID NO: 47802 - DNA, 25 bp, Probe Sequence
cttcatctccatctacaacacagta

SEQ ID NO: 47803 - DNA, 25 bp, Probe Sequence
aacttcatctccatctacaacacag

SEQ ID NO: 47804 - DNA, 25 bp, Probe Sequence
tgtgacttcttctacttgtatgtga

SEQ ID NO: 47805 - DNA, 25 bp, Probe Sequence
actgtgacttcttctacttgtatgt

SEQ ID NO: 47806 - DNA, 25 bp, Probe Sequence
ccatcttctactgtgacttcttcta

SEQ ID NO: 47807 - DNA, 25 bp, Probe Sequence
ttcatctccatctacaacacagtaa

SEQ ID NO: 47808 - DNA, 25 bp, Probe Sequence
caacttcatctccatctacaacaca

SEQ ID NO: 47809 - DNA, 25 bp, Probe Sequence
gtgacttcttctacttgtatgtgac

SEQ ID NO: 47810 - DNA, 25 bp, Probe Sequence
ctgtgacttcttctacttgtatgtg

SEQ ID NO: 47811 - DNA, 25 bp, Probe Sequence
ttctactgtgacttcttctacttgt

SEQ ID NO: 47812 - DNA, 25 bp, Probe Sequence
accatcttctactgtgacttcttct

SEQ ID NO: 47813 - DNA, 25 bp, Probe Sequence
tcatctccatctacaacacagtaat

SEQ ID NO: 47814 - DNA, 25 bp, Probe Sequence
tccatctacaacacagtaatgaagg

SEQ ID NO: 47815 - DNA, 25 bp, Probe Sequence
ccatctacaacacagtaatgaaggt

SEQ ID NO: 47816 - DNA, 25 bp, Probe Sequence
tctccatctacaacacagtaatgaa

SEQ ID NO: 47817 - DNA, 25 bp, Probe Sequence
gaccataactactcactacctgttc

SEQ ID NO: 47818 - DNA, 25 bp, Probe Sequence
ttaagtcttccaatgccaatctgag

SEQ ID NO: 47819 - DNA, 25 bp, Probe Sequence
aagttaagtcttccaatgccaatct

SEQ ID NO: 47820 - DNA, 25 bp, Probe Sequence
accataactactcactacctgttct

SEQ ID NO: 47821 - DNA, 25 bp, Probe Sequence
agaccataactactcactacctgtt

SEQ ID NO: 47822 - DNA, 25 bp, Probe Sequence
catctccatctacaacacagtaatg

SEQ ID NO: 47823 - DNA, 25 bp, Probe Sequence
ctactgtaaatgtgccttagcctaa

SEQ ID NO: 47824 - DNA, 25 bp, Probe Sequence
tctactgtaaatgtgccttagccta

SEQ ID NO: 47825 - DNA, 25 bp, Probe Sequence
ctctactgtaaatgtgccttagcct

SEQ ID NO: 47826 - DNA, 25 bp, Probe Sequence
tactgtaaatgtgccttagcctaag

SEQ ID NO: 47827 - DNA, 25 bp, Probe Sequence
cctctactgtaaatgtgccttagcc

SEQ ID NO: 47828 - DNA, 25 bp, Probe Sequence
ccctctactgtaaatgtgccttagc

SEQ ID NO: 47829 - DNA, 25 bp, Probe Sequence
cagaagcctcctataacaaagggtg

SEQ ID NO: 47830 - DNA, 25 bp, Probe Sequence
cccctctactgtaaatgtgccttag

SEQ ID NO: 47831 - DNA, 25 bp, Probe Sequence
actgtaaatgtgccttagcctaagc

SEQ ID NO: 47832 - DNA, 25 bp, Probe Sequence
agaagcctcctataacaaagggtgg

SEQ ID NO: 47833 - DNA, 25 bp, Probe Sequence
caggttgaggtctggtaacagaatg

SEQ ID NO: 47834 - DNA, 25 bp, Probe Sequence
gtaaatgtgccttagcctaagcctc

SEQ ID NO: 47835 - DNA, 25 bp, Probe Sequence
gaagcctcctataacaaagggtggt

SEQ ID NO: 47836 - DNA, 25 bp, Probe Sequence
tccccaattttagtttcctgccaaa

SEQ ID NO: 47837 - DNA, 25 bp, Probe Sequence
ctgtaaatgtgccttagcctaagcc

SEQ ID NO: 47838 - DNA, 25 bp, Probe Sequence
ccccaattttagtttcctgccaaaa

SEQ ID NO: 47839 - DNA, 25 bp, Probe Sequence
gtccctccccaattttagtttcctg

SEQ ID NO: 47840 - DNA, 25 bp, Probe Sequence
aagcctcctataacaaagggtggtg

SEQ ID NO: 47841 - DNA, 25 bp, Probe Sequence
gcagaagcctcctataacaaagggt

SEQ ID NO: 47842 - DNA, 25 bp, Probe Sequence
tgtaaatgtgccttagcctaagcct

SEQ ID NO: 47843 - DNA, 25 bp, Probe Sequence
cccaattttagtttcctgccaaaac

SEQ ID NO: 47844 - DNA, 25 bp, Probe Sequence
ctccccaattttagtttcctgccaa

SEQ ID NO: 47845 - DNA, 25 bp, Probe Sequence
caattttagtttcctgccaaaacgg

SEQ ID NO: 47846 - DNA, 25 bp, Probe Sequence
ccaattttagtttcctgccaaaacg

SEQ ID NO: 47847 - DNA, 25 bp, Probe Sequence
acatcattggaatacaggaagtagc

SEQ ID NO: 47848 - DNA, 25 bp, Probe Sequence
cacatcattggaatacaggaagtag

SEQ ID NO: 47849 - DNA, 25 bp, Probe Sequence
gcacatcattggaatacaggaagta

SEQ ID NO: 47850 - DNA, 25 bp, Probe Sequence
gattaagttaggcagtcttctacca

SEQ ID NO: 47851 - DNA, 25 bp, Probe Sequence
aatcattgtgtgtcttcaggagaat

SEQ ID NO: 47852 - DNA, 25 bp, Probe Sequence
attaagttaggcagtcttctaccaa

SEQ ID NO: 47853 - DNA, 25 bp, Probe Sequence
agattaagttaggcagtcttctacc

SEQ ID NO: 47854 - DNA, 25 bp, Probe Sequence
catcattggaatacaggaagtagcc

SEQ ID NO: 47855 - DNA, 25 bp, Probe Sequence
aacagaatattgacaagctaggaca

SEQ ID NO: 47856 - DNA, 25 bp, Probe Sequence
acagaatattgacaagctaggacac

SEQ ID NO: 47857 - DNA, 25 bp, Probe Sequence
cttccttgagctaagcagaataatg

SEQ ID NO: 47858 - DNA, 25 bp, Probe Sequence
tcttccttgagctaagcagaataat

SEQ ID NO: 47859 - DNA, 25 bp, Probe Sequence
cttgagctaagcagaataatggaat

SEQ ID NO: 47860 - DNA, 25 bp, Probe Sequence
ccttgagctaagcagaataatggaa

SEQ ID NO: 47861 - DNA, 25 bp, Probe Sequence
ttccttgagctaagcagaataatgg

SEQ ID NO: 47862 - DNA, 25 bp, Probe Sequence
cagaatattgacaagctaggacacc

SEQ ID NO: 47863 - DNA, 25 bp, Probe Sequence
catcttggaaatcattgtgtgtctt

SEQ ID NO: 47864 - DNA, 25 bp, Probe Sequence
aggcacatcattggaatacaggaag

SEQ ID NO: 47865 - DNA, 25 bp, Probe Sequence
gcagtcttctaccaaatgtgtaatg

SEQ ID NO: 47866 - DNA, 25 bp, Probe Sequence
acctcagcatttactttgtttcttt

SEQ ID NO: 47867 - DNA, 25 bp, Probe Sequence
gattgtcgctatgctttgtatgatg

SEQ ID NO: 47868 - DNA, 25 bp, Probe Sequence
agattgtcgctatgctttgtatgat

SEQ ID NO: 47869 - DNA, 25 bp, Probe Sequence
gcttaggaaattgctcataatctgg

SEQ ID NO: 47870 - DNA, 25 bp, Probe Sequence
atcttggaaatcattgtgtgtcttc

SEQ ID NO: 47871 - DNA, 25 bp, Probe Sequence
atgctacatttccaaggtgaagatg

SEQ ID NO: 47872 - DNA, 25 bp, Probe Sequence
aggaataatctaccctgactaaagc

SEQ ID NO: 47873 - DNA, 25 bp, Probe Sequence
ggaataatctaccctgactaaagct

SEQ ID NO: 47874 - DNA, 25 bp, Probe Sequence
aaagaaggaataatctaccctgact

SEQ ID NO: 47875 - DNA, 25 bp, Probe Sequence
tgagagatgcactgaagacagaatt

SEQ ID NO: 47876 - DNA, 25 bp, Probe Sequence
agaaggaataatctaccctgactaa

SEQ ID NO: 47877 - DNA, 25 bp, Probe Sequence
aagaaggaataatctaccctgacta

SEQ ID NO: 47878 - DNA, 25 bp, Probe Sequence
aatcctgtcttgttcataaattgac

SEQ ID NO: 47879 - DNA, 25 bp, Probe Sequence
gagagatgcactgaagacagaattc

SEQ ID NO: 47880 - DNA, 25 bp, Probe Sequence
aatgctacatttccaaggtgaagat

SEQ ID NO: 47881 - DNA, 25 bp, Probe Sequence
gtgagagatgcactgaagacagaat

SEQ ID NO: 47882 - DNA, 25 bp, Probe Sequence
aaatcctgtcttgttcataaattga

SEQ ID NO: 47883 - DNA, 25 bp, Probe Sequence
aaggaataatctaccctgactaaag

SEQ ID NO: 47884 - DNA, 25 bp, Probe Sequence
gaaggaataatctaccctgactaaa

SEQ ID NO: 47885 - DNA, 25 bp, Probe Sequence
taaagaaggaataatctaccctgac

SEQ ID NO: 47886 - DNA, 25 bp, Probe Sequence
gtaaagaaggaataatctaccctga

SEQ ID NO: 47887 - DNA, 25 bp, Probe Sequence
agtaaagaaggaataatctaccctg

SEQ ID NO: 47888 - DNA, 25 bp, Probe Sequence
aattgaaatatggttcactgccaaa

SEQ ID NO: 47889 - DNA, 25 bp, Probe Sequence
aaattgaaatatggttcactgccaa

SEQ ID NO: 47890 - DNA, 25 bp, Probe Sequence
taaattgaaatatggttcactgcca

SEQ ID NO: 47891 - DNA, 25 bp, Probe Sequence
ctacatttccaaggtgaagatgtgt

SEQ ID NO: 47892 - DNA, 25 bp, Probe Sequence
atgttatggcagattgaaaaggatc

SEQ ID NO: 47893 - DNA, 25 bp, Probe Sequence
tacatttccaaggtgaagatgtgtg

SEQ ID NO: 47894 - DNA, 25 bp, Probe Sequence
catgttatggcagattgaaaaggat

SEQ ID NO: 47895 - DNA, 25 bp, Probe Sequence
gcagttagagagagtaaggaatacc

SEQ ID NO: 47896 - DNA, 25 bp, Probe Sequence
catctatccgttcttcacttagcag

SEQ ID NO: 47897 - DNA, 25 bp, Probe Sequence
gtcatctatccgttcttcacttagc

SEQ ID NO: 47898 - DNA, 25 bp, Probe Sequence
cagttagagagagtaaggaatacca

SEQ ID NO: 47899 - DNA, 25 bp, Probe Sequence
tcatctatccgttcttcacttagca

SEQ ID NO: 47900 - DNA, 25 bp, Probe Sequence
agtcatctatccgttcttcacttag

SEQ ID NO: 47901 - DNA, 25 bp, Probe Sequence
cgttcttcacttagcaggaatatga

SEQ ID NO: 47902 - DNA, 25 bp, Probe Sequence
ttagtcatctatccgttcttcactt

SEQ ID NO: 47903 - DNA, 25 bp, Probe Sequence
ccgttcttcacttagcaggaatatg

SEQ ID NO: 47904 - DNA, 25 bp, Probe Sequence
atctatccgttcttcacttagcagg

SEQ ID NO: 47905 - DNA, 25 bp, Probe Sequence
tagtcatctatccgttcttcactta

SEQ ID NO: 47906 - DNA, 25 bp, Probe Sequence
agttagagagagtaaggaataccat

SEQ ID NO: 47907 - DNA, 25 bp, Probe Sequence
ggacttgaccaactacattaccatg

SEQ ID NO: 47908 - DNA, 25 bp, Probe Sequence
gttagagagagtaaggaataccatt

SEQ ID NO: 47909 - DNA, 25 bp, Probe Sequence
gaattgcagttagagagagtaagga

SEQ ID NO: 47910 - DNA, 25 bp, Probe Sequence
cttgaccaactacattaccatgctg

SEQ ID NO: 47911 - DNA, 25 bp, Probe Sequence
gacttgaccaactacattaccatgc

SEQ ID NO: 47912 - DNA, 25 bp, Probe Sequence
aattgcagttagagagagtaaggaa

SEQ ID NO: 47913 - DNA, 25 bp, Probe Sequence
accatttagtcatctatccgttctt

SEQ ID NO: 47914 - DNA, 25 bp, Probe Sequence
tgcagttagagagagtaaggaatac

SEQ ID NO: 47915 - DNA, 25 bp, Probe Sequence
ggaattgcagttagagagagtaagg

SEQ ID NO: 47916 - DNA, 25 bp, Probe Sequence
ttagcaggaatatgaaagaaaggca

SEQ ID NO: 47917 - DNA, 25 bp, Probe Sequence
tccgttcttcacttagcaggaatat

SEQ ID NO: 47918 - DNA, 25 bp, Probe Sequence
atccgttcttcacttagcaggaata

SEQ ID NO: 47919 - DNA, 25 bp, Probe Sequence
ctttcttctctgctcccaaaccatg

SEQ ID NO: 47920 - DNA, 25 bp, Probe Sequence
tttcttctctgctcccaaaccatgt

SEQ ID NO: 47921 - DNA, 25 bp, Probe Sequence
ttcttctctgctcccaaaccatgtc

SEQ ID NO: 47922 - DNA, 25 bp, Probe Sequence
catgtcaggaccaccttcctctaga

SEQ ID NO: 47923 - DNA, 25 bp, Probe Sequence
caagaagattatgacagattacgcc

SEQ ID NO: 47924 - DNA, 25 bp, Probe Sequence
acaagaagattatgacagattacgc

SEQ ID NO: 47925 - DNA, 25 bp, Probe Sequence
gctggacaagaagattatgacagat

SEQ ID NO: 47926 - DNA, 25 bp, Probe Sequence
gacaagaagattatgacagattacg

SEQ ID NO: 47927 - DNA, 25 bp, Probe Sequence
ctggacaagaagattatgacagatt

SEQ ID NO: 47928 - DNA, 25 bp, Probe Sequence
tggacaagaagattatgacagatta

SEQ ID NO: 47929 - DNA, 25 bp, Probe Sequence
tgacaattattctgccaatgttatg

SEQ ID NO: 47930 - DNA, 25 bp, Probe Sequence
ggacaagaagattatgacagattac

SEQ ID NO: 47931 - DNA, 25 bp, Probe Sequence
acaattattctgccaatgttatggt

SEQ ID NO: 47932 - DNA, 25 bp, Probe Sequence
attctgccaatgttatggtagatgg

SEQ ID NO: 47933 - DNA, 25 bp, Probe Sequence
gacaattattctgccaatgttatgg

SEQ ID NO: 47934 - DNA, 25 bp, Probe Sequence
aagaagattatgacagattacgccc

SEQ ID NO: 47935 - DNA, 25 bp, Probe Sequence
tattctgccaatgttatggtagatg

SEQ ID NO: 47936 - DNA, 25 bp, Probe Sequence
tctgccaatgttatggtagatggaa

SEQ ID NO: 47937 - DNA, 25 bp, Probe Sequence
ttctgccaatgttatggtagatgga

SEQ ID NO: 47938 - DNA, 25 bp, Probe Sequence
ttgacaattattctgccaatgttat

SEQ ID NO: 47939 - DNA, 25 bp, Probe Sequence
ttattctgccaatgttatggtagat

SEQ ID NO: 47940 - DNA, 25 bp, Probe Sequence
attattctgccaatgttatggtaga

SEQ ID NO: 47941 - DNA, 25 bp, Probe Sequence
agctggacaagaagattatgacaga

SEQ ID NO: 47942 - DNA, 25 bp, Probe Sequence
tctttgacaattattctgccaatgt

SEQ ID NO: 47943 - DNA, 25 bp, Probe Sequence
caattattctgccaatgttatggta

SEQ ID NO: 47944 - DNA, 25 bp, Probe Sequence
gtctttgacaattattctgccaatg

SEQ ID NO: 47945 - DNA, 25 bp, Probe Sequence
ctttgacaattattctgccaatgtt

SEQ ID NO: 47946 - DNA, 25 bp, Probe Sequence
aattattctgccaatgttatggtag

SEQ ID NO: 47947 - DNA, 25 bp, Probe Sequence
agactccgaagactgacaatactaa

SEQ ID NO: 47948 - DNA, 25 bp, Probe Sequence
gagactccgaagactgacaatacta

SEQ ID NO: 47949 - DNA, 25 bp, Probe Sequence
cctgttagagatgaaccaatggatg

SEQ ID NO: 47950 - DNA, 25 bp, Probe Sequence
cacacctgttagagatgaaccaatg

SEQ ID NO: 47951 - DNA, 25 bp, Probe Sequence
acctgttagagatgaaccaatggat

SEQ ID NO: 47952 - DNA, 25 bp, Probe Sequence
ctgttagagatgaaccaatggatgc

SEQ ID NO: 47953 - DNA, 25 bp, Probe Sequence
cacctgttagagatgaaccaatgga

SEQ ID NO: 47954 - DNA, 25 bp, Probe Sequence
gactccgaagactgacaatactaaa

SEQ ID NO: 47955 - DNA, 25 bp, Probe Sequence
acaagagagaaagggataaaccaaa

SEQ ID NO: 47956 - DNA, 25 bp, Probe Sequence
aagacaagagagaaagggataaacc

SEQ ID NO: 47957 - DNA, 25 bp, Probe Sequence
ccacacctgttagagatgaaccaat

SEQ ID NO: 47958 - DNA, 25 bp, Probe Sequence
gacaagagagaaagggataaaccaa

SEQ ID NO: 47959 - DNA, 25 bp, Probe Sequence
tagagatgatgccacacctgttaga

SEQ ID NO: 47960 - DNA, 25 bp, Probe Sequence
gtagagatgatgccacacctgttag

SEQ ID NO: 47961 - DNA, 25 bp, Probe Sequence
actccgaagactgacaatactaaat

SEQ ID NO: 47962 - DNA, 25 bp, Probe Sequence
ctccgaagactgacaatactaaatc

SEQ ID NO: 47963 - DNA, 25 bp, Probe Sequence
acacctgttagagatgaaccaatgg

SEQ ID NO: 47964 - DNA, 25 bp, Probe Sequence
agacaagagagaaagggataaacca

SEQ ID NO: 47965 - DNA, 25 bp, Probe Sequence
ccagagttattagagacttctagga

SEQ ID NO: 47966 - DNA, 25 bp, Probe Sequence
ctcctcgatctgaacctccaattaa

SEQ ID NO: 47967 - DNA, 25 bp, Probe Sequence
aaagacaagagagaaagggataaac

SEQ ID NO: 47968 - DNA, 25 bp, Probe Sequence
agtagagatgatgccacacctgtta

SEQ ID NO: 47969 - DNA, 25 bp, Probe Sequence
ctcattgtttgttctcccaagtaga

SEQ ID NO: 47970 - DNA, 25 bp, Probe Sequence
tccgaagactgacaatactaaatca

SEQ ID NO: 47971 - DNA, 25 bp, Probe Sequence
taatatatgtttggagactgctcgg

SEQ ID NO: 47972 - DNA, 25 bp, Probe Sequence
gtaatatatgtttggagactgctcg

SEQ ID NO: 47973 - DNA, 25 bp, Probe Sequence
aacggcaagagtgtccagtatgtaa

SEQ ID NO: 47974 - DNA, 25 bp, Probe Sequence
tgtaatatatgtttggagactgctc

SEQ ID NO: 47975 - DNA, 25 bp, Probe Sequence
atgtaatatatgtttggagactgct

SEQ ID NO: 47976 - DNA, 25 bp, Probe Sequence
cctgtttctcgccatcttcttcttt

SEQ ID NO: 47977 - DNA, 25 bp, Probe Sequence
aatgtaatatatgtttggagactgc

SEQ ID NO: 47978 - DNA, 25 bp, Probe Sequence
gaacggcaagagtgtccagtatgta

SEQ ID NO: 47979 - DNA, 25 bp, Probe Sequence
aatatatgtttggagactgctcggg

SEQ ID NO: 47980 - DNA, 25 bp, Probe Sequence
caagagtgtccagtatgtaaagctg

SEQ ID NO: 47981 - DNA, 25 bp, Probe Sequence
cggcaagagtgtccagtatgtaaag

SEQ ID NO: 47982 - DNA, 25 bp, Probe Sequence
acttctcatttggtgttggtgcttt

SEQ ID NO: 47983 - DNA, 25 bp, Probe Sequence
cttcctgtttctcgccatcttcttc

SEQ ID NO: 47984 - DNA, 25 bp, Probe Sequence
ggcaagagtgtccagtatgtaaagc

SEQ ID NO: 47985 - DNA, 25 bp, Probe Sequence
cgaatgtaatatatgtttggagact

SEQ ID NO: 47986 - DNA, 25 bp, Probe Sequence
gcaagagtgtccagtatgtaaagct

SEQ ID NO: 47987 - DNA, 25 bp, Probe Sequence
tatatgtttggagactgctcgggaa

SEQ ID NO: 47988 - DNA, 25 bp, Probe Sequence
ctgtttctcgccatcttcttctttt

SEQ ID NO: 47989 - DNA, 25 bp, Probe Sequence
atatatgtttggagactgctcggga

SEQ ID NO: 47990 - DNA, 25 bp, Probe Sequence
tcctgtttctcgccatcttcttctt

SEQ ID NO: 47991 - DNA, 25 bp, Probe Sequence
ttcctgtttctcgccatcttcttct

SEQ ID NO: 47992 - DNA, 25 bp, Probe Sequence
tcttcctgtttctcgccatcttctt

SEQ ID NO: 47993 - DNA, 25 bp, Probe Sequence
acggcaagagtgtccagtatgtaaa

SEQ ID NO: 47994 - DNA, 25 bp, Probe Sequence
tcgaatgtaatatatgtttggagac

SEQ ID NO: 47995 - DNA, 25 bp, Probe Sequence
cagttatgtgaaggagatgacagag

SEQ ID NO: 47996 - DNA, 25 bp, Probe Sequence
ctcagttatgtgaaggagatgacag

SEQ ID NO: 47997 - DNA, 25 bp, Probe Sequence
tctccatacagtcaagatacatagt

SEQ ID NO: 47998 - DNA, 25 bp, Probe Sequence
tcagttatgtgaaggagatgacaga

SEQ ID NO: 47999 - DNA, 25 bp, Probe Sequence
agttatgtgaaggagatgacagagg

SEQ ID NO: 48000 - DNA, 25 bp, Probe Sequence
tattaatggctcagctcatcataca

SEQ ID NO: 48001 - DNA, 25 bp, Probe Sequence
attaatggctcagctcatcatacag

SEQ ID NO: 48002 - DNA, 25 bp, Probe Sequence
ttattaatggctcagctcatcatac

SEQ ID NO: 48003 - DNA, 25 bp, Probe Sequence
gctcagttatgtgaaggagatgaca

SEQ ID NO: 48004 - DNA, 25 bp, Probe Sequence
ttaatggctcagctcatcatacaga

SEQ ID NO: 48005 - DNA, 25 bp, Probe Sequence
cagctcatcatacagaccaccatat

SEQ ID NO: 48006 - DNA, 25 bp, Probe Sequence
ctccatacagtcaagatacatagta

SEQ ID NO: 48007 - DNA, 25 bp, Probe Sequence
caacttgtatttctagcagcagatc

SEQ ID NO: 48008 - DNA, 25 bp, Probe Sequence
taatggctcagctcatcatacagac

SEQ ID NO: 48009 - DNA, 25 bp, Probe Sequence
tttgatgtttgaagttacaacctgt

SEQ ID NO: 48010 - DNA, 25 bp, Probe Sequence
ccaacttgtatttctagcagcagat

SEQ ID NO: 48011 - DNA, 25 bp, Probe Sequence
tcaggaaatggctgtaagaatgaaa

SEQ ID NO: 48012 - DNA, 25 bp, Probe Sequence
cttcaggaaatggctgtaagaatga

SEQ ID NO: 48013 - DNA, 25 bp, Probe Sequence
cgctcagttatgtgaaggagatgac

SEQ ID NO: 48014 - DNA, 25 bp, Probe Sequence
tcagctcatcatacagaccaccata

SEQ ID NO: 48015 - DNA, 25 bp, Probe Sequence
atttcactttgtgggataggattgg

SEQ ID NO: 48016 - DNA, 25 bp, Probe Sequence
catcatacagaccaccatatgttct

SEQ ID NO: 48017 - DNA, 25 bp, Probe Sequence
tcatcatacagaccaccatatgttc

SEQ ID NO: 48018 - DNA, 25 bp, Probe Sequence
ctcatcatacagaccaccatatgtt

SEQ ID NO: 48019 - DNA, 25 bp, Probe Sequence
atacagatgatgaggcaatacacat

SEQ ID NO: 48020 - DNA, 25 bp, Probe Sequence
atacaagtccatacagatgatgagg

SEQ ID NO: 48021 - DNA, 25 bp, Probe Sequence
catacagatgatgaggcaatacaca

SEQ ID NO: 48022 - DNA, 25 bp, Probe Sequence
acatacaagtccatacagatgatga

SEQ ID NO: 48023 - DNA, 25 bp, Probe Sequence
gtccatacagatgatgaggcaatac

SEQ ID NO: 48024 - DNA, 25 bp, Probe Sequence
agtccatacagatgatgaggcaata

SEQ ID NO: 48025 - DNA, 25 bp, Probe Sequence
catacaagtccatacagatgatgag

SEQ ID NO: 48026 - DNA, 25 bp, Probe Sequence
cggatcatcacctacttcaactaat

SEQ ID NO: 48027 - DNA, 25 bp, Probe Sequence
ccatacagatgatgaggcaatacac

SEQ ID NO: 48028 - DNA, 25 bp, Probe Sequence
tccatacagatgatgaggcaataca

SEQ ID NO: 48029 - DNA, 25 bp, Probe Sequence
tcggatcatcacctacttcaactaa

SEQ ID NO: 48030 - DNA, 25 bp, Probe Sequence
ttcggatcatcacctacttcaacta

SEQ ID NO: 48031 - DNA, 25 bp, Probe Sequence
aagtccatacagatgatgaggcaat

SEQ ID NO: 48032 - DNA, 25 bp, Probe Sequence
ggatcatcacctacttcaactaatg

SEQ ID NO: 48033 - DNA, 25 bp, Probe Sequence
gattcggatcatcacctacttcaac

SEQ ID NO: 48034 - DNA, 25 bp, Probe Sequence
tacaagtccatacagatgatgaggc

SEQ ID NO: 48035 - DNA, 25 bp, Probe Sequence
attcggatcatcacctacttcaact

SEQ ID NO: 48036 - DNA, 25 bp, Probe Sequence
tacatacaagtccatacagatgatg

SEQ ID NO: 48037 - DNA, 25 bp, Probe Sequence
acaagaatacatacaagtccataca

SEQ ID NO: 48038 - DNA, 25 bp, Probe Sequence
ctaattcctgaaggtaatattggca

SEQ ID NO: 48039 - DNA, 25 bp, Probe Sequence
ctgtagtaggattcggatcatcacc

SEQ ID NO: 48040 - DNA, 25 bp, Probe Sequence
ggattcggatcatcacctacttcaa

SEQ ID NO: 48041 - DNA, 25 bp, Probe Sequence
caagaatacatacaagtccatacag

SEQ ID NO: 48042 - DNA, 25 bp, Probe Sequence
caagtccatacagatgatgaggcaa

SEQ ID NO: 48043 - DNA, 25 bp, Probe Sequence
acctgccgtataatctgttcttcta

SEQ ID NO: 48044 - DNA, 25 bp, Probe Sequence
gacctgccgtataatctgttcttct

SEQ ID NO: 48045 - DNA, 25 bp, Probe Sequence
ggacctgccgtataatctgttcttc

SEQ ID NO: 48046 - DNA, 25 bp, Probe Sequence
cgttagccaattgttcttgatgaat

SEQ ID NO: 48047 - DNA, 25 bp, Probe Sequence
ttagccaattgttcttgatgaatct

SEQ ID NO: 48048 - DNA, 25 bp, Probe Sequence
gttagccaattgttcttgatgaatc

SEQ ID NO: 48049 - DNA, 25 bp, Probe Sequence
agccaattgttcttgatgaatctat

SEQ ID NO: 48050 - DNA, 25 bp, Probe Sequence
acgttagccaattgttcttgatgaa

SEQ ID NO: 48051 - DNA, 25 bp, Probe Sequence
tagccaattgttcttgatgaatcta

SEQ ID NO: 48052 - DNA, 25 bp, Probe Sequence
cacgttagccaattgttcttgatga

SEQ ID NO: 48053 - DNA, 25 bp, Probe Sequence
tcttctattcccacgttagccaatt

SEQ ID NO: 48054 - DNA, 25 bp, Probe Sequence
ttcttctattcccacgttagccaat

SEQ ID NO: 48055 - DNA, 25 bp, Probe Sequence
gccaattgttcttgatgaatctata

SEQ ID NO: 48056 - DNA, 25 bp, Probe Sequence
tttgggacctgccgtataatctgtt

SEQ ID NO: 48057 - DNA, 25 bp, Probe Sequence
ccacgttagccaattgttcttgatg

SEQ ID NO: 48058 - DNA, 25 bp, Probe Sequence
gttcttctattcccacgttagccaa

SEQ ID NO: 48059 - DNA, 25 bp, Probe Sequence
attagcagtgatgattttgggacct

SEQ ID NO: 48060 - DNA, 25 bp, Probe Sequence
atgattttgggacctgccgtataat

SEQ ID NO: 48061 - DNA, 25 bp, Probe Sequence
cattagcagtgatgattttgggacc

SEQ ID NO: 48062 - DNA, 25 bp, Probe Sequence
gggacctgccgtataatctgttctt

SEQ ID NO: 48063 - DNA, 25 bp, Probe Sequence
cttctattcccacgttagccaattg

SEQ ID NO: 48064 - DNA, 25 bp, Probe Sequence
ctattcccacgttagccaattgttc

SEQ ID NO: 48065 - DNA, 25 bp, Probe Sequence
ttgggacctgccgtataatctgttc

SEQ ID NO: 48066 - DNA, 25 bp, Probe Sequence
attttgggacctgccgtataatctg

SEQ ID NO: 48067 - DNA, 25 bp, Probe Sequence
tgcttctgatgaatgattatggtct

SEQ ID NO: 48068 - DNA, 25 bp, Probe Sequence
ttgcttctgatgaatgattatggtc

SEQ ID NO: 48069 - DNA, 25 bp, Probe Sequence
cagttatgttgtcgtgtataagagc

SEQ ID NO: 48070 - DNA, 25 bp, Probe Sequence
gcagttatgttgtcgtgtataagag

SEQ ID NO: 48071 - DNA, 25 bp, Probe Sequence
gcttctgatgaatgattatggtcta

SEQ ID NO: 48072 - DNA, 25 bp, Probe Sequence
ttcatagttctgcctattgtccttc

SEQ ID NO: 48073 - DNA, 25 bp, Probe Sequence
atgttgtcgtgtataagagctactt

SEQ ID NO: 48074 - DNA, 25 bp, Probe Sequence
tgttgtcgtgtataagagctacttc

SEQ ID NO: 48075 - DNA, 25 bp, Probe Sequence
tcatagttctgcctattgtccttcc

SEQ ID NO: 48076 - DNA, 25 bp, Probe Sequence
tatgttgtcgtgtataagagctact

SEQ ID NO: 48077 - DNA, 25 bp, Probe Sequence
agttatgttgtcgtgtataagagct

SEQ ID NO: 48078 - DNA, 25 bp, Probe Sequence
gtcgtgtataagagctacttccaag

SEQ ID NO: 48079 - DNA, 25 bp, Probe Sequence
gttgtcgtgtataagagctacttcc

SEQ ID NO: 48080 - DNA, 25 bp, Probe Sequence
tgtataagagctacttccaagtgtg

SEQ ID NO: 48081 - DNA, 25 bp, Probe Sequence
gtgtataagagctacttccaagtgt

SEQ ID NO: 48082 - DNA, 25 bp, Probe Sequence
ttgcttgaaatcttgctgaaatgtt

SEQ ID NO: 48083 - DNA, 25 bp, Probe Sequence
tgtcgtgtataagagctacttccaa

SEQ ID NO: 48084 - DNA, 25 bp, Probe Sequence
ttgtcgtgtataagagctacttcca

SEQ ID NO: 48085 - DNA, 25 bp, Probe Sequence
tttgttggctctgttgtgtttattc

SEQ ID NO: 48086 - DNA, 25 bp, Probe Sequence
gtttgttggctctgttgtgtttatt

SEQ ID NO: 48087 - DNA, 25 bp, Probe Sequence
tgttctcatttcctgtttgctgtat

SEQ ID NO: 48088 - DNA, 25 bp, Probe Sequence
cgtgtataagagctacttccaagtg

SEQ ID NO: 48089 - DNA, 25 bp, Probe Sequence
tcgtgtataagagctacttccaagt

SEQ ID NO: 48090 - DNA, 25 bp, Probe Sequence
tgcagttatgttgtcgtgtataaga

SEQ ID NO: 48091 - DNA, 25 bp, Probe Sequence
ttaagattaagaggcatacaccact

SEQ ID NO: 48092 - DNA, 25 bp, Probe Sequence
taagattaagaggcatacaccactt

SEQ ID NO: 48093 - DNA, 25 bp, Probe Sequence
ccacatcctgactactaccgtatag

SEQ ID NO: 48094 - DNA, 25 bp, Probe Sequence
accacatcctgactactaccgtata

SEQ ID NO: 48095 - DNA, 25 bp, Probe Sequence
gattaagaggcatacaccacttagt

SEQ ID NO: 48096 - DNA, 25 bp, Probe Sequence
agattaagaggcatacaccacttag

SEQ ID NO: 48097 - DNA, 25 bp, Probe Sequence
aagattaagaggcatacaccactta

SEQ ID NO: 48098 - DNA, 25 bp, Probe Sequence
ttaagaggcatacaccacttagtaa

SEQ ID NO: 48099 - DNA, 25 bp, Probe Sequence
attaagaggcatacaccacttagta

SEQ ID NO: 48100 - DNA, 25 bp, Probe Sequence
attgtcaatgaggcagatcagattc

SEQ ID NO: 48101 - DNA, 25 bp, Probe Sequence
gattgtcaatgaggcagatcagatt

SEQ ID NO: 48102 - DNA, 25 bp, Probe Sequence
acatcctgactactaccgtatagtt

SEQ ID NO: 48103 - DNA, 25 bp, Probe Sequence
cacatcctgactactaccgtatagt

SEQ ID NO: 48104 - DNA, 25 bp, Probe Sequence
aactaatgaaagcctattgtgaacg

SEQ ID NO: 48105 - DNA, 25 bp, Probe Sequence
tggaaatggaggatgaagatacaat

SEQ ID NO: 48106 - DNA, 25 bp, Probe Sequence
agttggaaatggaggatgaagatac

SEQ ID NO: 48107 - DNA, 25 bp, Probe Sequence
cagttggaaatggaggatgaagata

SEQ ID NO: 48108 - DNA, 25 bp, Probe Sequence
ctaatgaaagcctattgtgaacgac

SEQ ID NO: 48109 - DNA, 25 bp, Probe Sequence
gttggaaatggaggatgaagataca

SEQ ID NO: 48110 - DNA, 25 bp, Probe Sequence
actaatgaaagcctattgtgaacga

SEQ ID NO: 48111 - DNA, 25 bp, Probe Sequence
tccattcagcccttaaacctttata

SEQ ID NO: 48112 - DNA, 25 bp, Probe Sequence
ctccattcagcccttaaacctttat

SEQ ID NO: 48113 - DNA, 25 bp, Probe Sequence
gcagtttaagattaagaggcataca

SEQ ID NO: 48114 - DNA, 25 bp, Probe Sequence
aagaggcatacaccacttagtaaac

SEQ ID NO: 48115 - DNA, 25 bp, Probe Sequence
agaagatgacgatgatgatgaagat

SEQ ID NO: 48116 - DNA, 25 bp, Probe Sequence
gagaagatgacgatgatgatgaaga

SEQ ID NO: 48117 - DNA, 25 bp, Probe Sequence
gaatggagaagatgacgatgatgat

SEQ ID NO: 48118 - DNA, 25 bp, Probe Sequence
aatggagaagatgacgatgatgatg

SEQ ID NO: 48119 - DNA, 25 bp, Probe Sequence
ctcttggaatgaactactggtcttg

SEQ ID NO: 48120 - DNA, 25 bp, Probe Sequence
ggagaagatgacgatgatgatgaag

SEQ ID NO: 48121 - DNA, 25 bp, Probe Sequence
agaatggagaagatgacgatgatga

SEQ ID NO: 48122 - DNA, 25 bp, Probe Sequence
cagaatggagaagatgacgatgatg

SEQ ID NO: 48123 - DNA, 25 bp, Probe Sequence
atggagaagatgacgatgatgatga

SEQ ID NO: 48124 - DNA, 25 bp, Probe Sequence
cagacgagtccataagtgaacaatt

SEQ ID NO: 48125 - DNA, 25 bp, Probe Sequence
gaagatgacgatgatgatgaagata

SEQ ID NO: 48126 - DNA, 25 bp, Probe Sequence
tggagaagatgacgatgatgatgaa

SEQ ID NO: 48127 - DNA, 25 bp, Probe Sequence
aagagttgaggtcctagatgagaac

SEQ ID NO: 48128 - DNA, 25 bp, Probe Sequence
ttgaggtcctagatgagaacaactt

SEQ ID NO: 48129 - DNA, 25 bp, Probe Sequence
tgacgatgatgatgaagatattgat

SEQ ID NO: 48130 - DNA, 25 bp, Probe Sequence
atgacgatgatgatgaagatattga

SEQ ID NO: 48131 - DNA, 25 bp, Probe Sequence
tgaggtcctagatgagaacaacttg

SEQ ID NO: 48132 - DNA, 25 bp, Probe Sequence
gatgacgatgatgatgaagatattg

SEQ ID NO: 48133 - DNA, 25 bp, Probe Sequence
agatgacgatgatgatgaagatatt

SEQ ID NO: 48134 - DNA, 25 bp, Probe Sequence
aagatgacgatgatgatgaagatat

SEQ ID NO: 48135 - DNA, 25 bp, Probe Sequence
gagttgaggtcctagatgagaacaa

SEQ ID NO: 48136 - DNA, 25 bp, Probe Sequence
tcagacgagtccataagtgaacaat

SEQ ID NO: 48137 - DNA, 25 bp, Probe Sequence
gctcttggaatgaactactggtctt

SEQ ID NO: 48138 - DNA, 25 bp, Probe Sequence
gaggtcctagatgagaacaacttgg

SEQ ID NO: 48139 - DNA, 25 bp, Probe Sequence
ttgttgcttaggatatgaatggctg

SEQ ID NO: 48140 - DNA, 25 bp, Probe Sequence
ccttggttacttatcattactgtgt

SEQ ID NO: 48141 - DNA, 25 bp, Probe Sequence
gttgcttaggatatgaatggctgag

SEQ ID NO: 48142 - DNA, 25 bp, Probe Sequence
tccttggttacttatcattactgtg

SEQ ID NO: 48143 - DNA, 25 bp, Probe Sequence
gtccttggttacttatcattactgt

SEQ ID NO: 48144 - DNA, 25 bp, Probe Sequence
tgttgcttaggatatgaatggctga

SEQ ID NO: 48145 - DNA, 25 bp, Probe Sequence
atccgtaagatgaaggtgacaacaa

SEQ ID NO: 48146 - DNA, 25 bp, Probe Sequence
aatccgtaagatgaaggtgacaaca

SEQ ID NO: 48147 - DNA, 25 bp, Probe Sequence
agtccttggttacttatcattactg

SEQ ID NO: 48148 - DNA, 25 bp, Probe Sequence
ctttactttatggagacaggtggaa

SEQ ID NO: 48149 - DNA, 25 bp, Probe Sequence
tttactttatggagacaggtggaaa

SEQ ID NO: 48150 - DNA, 25 bp, Probe Sequence
ttactttatggagacaggtggaaac

SEQ ID NO: 48151 - DNA, 25 bp, Probe Sequence
cttggttacttatcattactgtgtt

SEQ ID NO: 48152 - DNA, 25 bp, Probe Sequence
tttgttgcttaggatatgaatggct

SEQ ID NO: 48153 - DNA, 25 bp, Probe Sequence
atctttactttatggagacaggtgg

SEQ ID NO: 48154 - DNA, 25 bp, Probe Sequence
cttacctttgtgtgtctttcctgaa

SEQ ID NO: 48155 - DNA, 25 bp, Probe Sequence
acatctttactttatggagacaggt

SEQ ID NO: 48156 - DNA, 25 bp, Probe Sequence
aacttacctttgtgtgtctttcctg

SEQ ID NO: 48157 - DNA, 25 bp, Probe Sequence
tctttactttatggagacaggtgga

SEQ ID NO: 48158 - DNA, 25 bp, Probe Sequence
catctttactttatggagacaggtg

SEQ ID NO: 48159 - DNA, 25 bp, Probe Sequence
aaatccgtaagatgaaggtgacaac

SEQ ID NO: 48160 - DNA, 25 bp, Probe Sequence
ttacctttgtgtgtctttcctgaag

SEQ ID NO: 48161 - DNA, 25 bp, Probe Sequence
gacatctttactttatggagacagg

SEQ ID NO: 48162 - DNA, 25 bp, Probe Sequence
ctctgcttgggttatcaatactctg

SEQ ID NO: 48163 - DNA, 25 bp, Probe Sequence
ttgagtgagatgttggatattgcta

SEQ ID NO: 48164 - DNA, 25 bp, Probe Sequence
tgagtgagatgttggatattgctat

SEQ ID NO: 48165 - DNA, 25 bp, Probe Sequence
gttgagtgagatgttggatattgct

SEQ ID NO: 48166 - DNA, 25 bp, Probe Sequence
agtgagatgttggatattgctatca

SEQ ID NO: 48167 - DNA, 25 bp, Probe Sequence
ggttgagtgagatgttggatattgc

SEQ ID NO: 48168 - DNA, 25 bp, Probe Sequence
gagtgagatgttggatattgctatc

SEQ ID NO: 48169 - DNA, 25 bp, Probe Sequence
gtgagatgttggatattgctatcaa

SEQ ID NO: 48170 - DNA, 25 bp, Probe Sequence
gttcctaccatgagactagcaagat

SEQ ID NO: 48171 - DNA, 25 bp, Probe Sequence
acacctgtatattctcatcagtacc

SEQ ID NO: 48172 - DNA, 25 bp, Probe Sequence
cctaccatgagactagcaagatgaa

SEQ ID NO: 48173 - DNA, 25 bp, Probe Sequence
ttcctaccatgagactagcaagatg

SEQ ID NO: 48174 - DNA, 25 bp, Probe Sequence
tttatttgctgttccttgtctactg

SEQ ID NO: 48175 - DNA, 25 bp, Probe Sequence
cacctatgagtttgtaaagcagaaa

SEQ ID NO: 48176 - DNA, 25 bp, Probe Sequence
agaaattgacaaagaagaacacctg

SEQ ID NO: 48177 - DNA, 25 bp, Probe Sequence
tcctaccatgagactagcaagatga

SEQ ID NO: 48178 - DNA, 25 bp, Probe Sequence
aagaaattgacaaagaagaacacct

SEQ ID NO: 48179 - DNA, 25 bp, Probe Sequence
gatgttggatattgctatcaatcgc

SEQ ID NO: 48180 - DNA, 25 bp, Probe Sequence
atttatttgctgttccttgtctact

SEQ ID NO: 48181 - DNA, 25 bp, Probe Sequence
gaacacctgtatattctcatcagta

SEQ ID NO: 48182 - DNA, 25 bp, Probe Sequence
acctatgagtttgtaaagcagaaat

SEQ ID NO: 48183 - DNA, 25 bp, Probe Sequence
gaaagagcaaataagttggtcaagt

SEQ ID NO: 48184 - DNA, 25 bp, Probe Sequence
atgagtttgtaaagcagaaatacct

SEQ ID NO: 48185 - DNA, 25 bp, Probe Sequence
cttcaggaaagagcaaataagttgg

SEQ ID NO: 48186 - DNA, 25 bp, Probe Sequence
agatgttggatattgctatcaatcg

SEQ ID NO: 48187 - DNA, 25 bp, Probe Sequence
attaacctctgagcagtgatatagc

SEQ ID NO: 48188 - DNA, 25 bp, Probe Sequence
ggattattaacctctgagcagtgat

SEQ ID NO: 48189 - DNA, 25 bp, Probe Sequence
cctctgagcagtgatatagcataat

SEQ ID NO: 48190 - DNA, 25 bp, Probe Sequence
acctctgagcagtgatatagcataa

SEQ ID NO: 48191 - DNA, 25 bp, Probe Sequence
aacctctgagcagtgatatagcata

SEQ ID NO: 48192 - DNA, 25 bp, Probe Sequence
taacctctgagcagtgatatagcat

SEQ ID NO: 48193 - DNA, 25 bp, Probe Sequence
ttaacctctgagcagtgatatagca

SEQ ID NO: 48194 - DNA, 25 bp, Probe Sequence
atcagtacaatcacacaaggaggat

SEQ ID NO: 48195 - DNA, 25 bp, Probe Sequence
gattattaacctctgagcagtgata

SEQ ID NO: 48196 - DNA, 25 bp, Probe Sequence
aatcagtacaatcacacaaggagga

SEQ ID NO: 48197 - DNA, 25 bp, Probe Sequence
tagaggagacacaatgagcttagta

SEQ ID NO: 48198 - DNA, 25 bp, Probe Sequence
aggattattaacctctgagcagtga

SEQ ID NO: 48199 - DNA, 25 bp, Probe Sequence
acttcagattgttcaacatgagaga

SEQ ID NO: 48200 - DNA, 25 bp, Probe Sequence
aacttcagattgttcaacatgagag

SEQ ID NO: 48201 - DNA, 25 bp, Probe Sequence
ctctgagcagtgatatagcataata

SEQ ID NO: 48202 - DNA, 25 bp, Probe Sequence
cttcagattgttcaacatgagagaa

SEQ ID NO: 48203 - DNA, 25 bp, Probe Sequence
agtacaatcacacaaggaggatgaa

SEQ ID NO: 48204 - DNA, 25 bp, Probe Sequence
gtaaccagtgaggtgtatcagtaag

SEQ ID NO: 48205 - DNA, 25 bp, Probe Sequence
agtaaccagtgaggtgtatcagtaa

SEQ ID NO: 48206 - DNA, 25 bp, Probe Sequence
ctagaggagacacaatgagcttagt

SEQ ID NO: 48207 - DNA, 25 bp, Probe Sequence
tcagtacaatcacacaaggaggatg

SEQ ID NO: 48208 - DNA, 25 bp, Probe Sequence
tataagtattggtttgggtgttcct

SEQ ID NO: 48209 - DNA, 25 bp, Probe Sequence
gcagtgatatagcataataaagccc

SEQ ID NO: 48210 - DNA, 25 bp, Probe Sequence
agaggagacacaatgagcttagtac

SEQ ID NO: 48211 - DNA, 25 bp, Probe Sequence
ggttgtcaagttctagttgttcaat

SEQ ID NO: 48212 - DNA, 25 bp, Probe Sequence
tggttgtcaagttctagttgttcaa

SEQ ID NO: 48213 - DNA, 25 bp, Probe Sequence
aagtggttgtcaagttctagttgtt

SEQ ID NO: 48214 - DNA, 25 bp, Probe Sequence
agtggttgtcaagttctagttgttc

SEQ ID NO: 48215 - DNA, 25 bp, Probe Sequence
caagtggttgtcaagttctagttgt

SEQ ID NO: 48216 - DNA, 25 bp, Probe Sequence
gtggttgtcaagttctagttgttca

SEQ ID NO: 48217 - DNA, 25 bp, Probe Sequence
aacaaccaatcagaaccataagcta

SEQ ID NO: 48218 - DNA, 25 bp, Probe Sequence
agagaataacctcatagtaccaaca

SEQ ID NO: 48219 - DNA, 25 bp, Probe Sequence
aaccaatcagaaccataagctacag

SEQ ID NO: 48220 - DNA, 25 bp, Probe Sequence
caaccaatcagaaccataagctaca

SEQ ID NO: 48221 - DNA, 25 bp, Probe Sequence
acaaccaatcagaaccataagctac

SEQ ID NO: 48222 - DNA, 25 bp, Probe Sequence
acagcaataactaacattaacagag

SEQ ID NO: 48223 - DNA, 25 bp, Probe Sequence
agaataacctcatagtaccaacatg

SEQ ID NO: 48224 - DNA, 25 bp, Probe Sequence
taatgccacagatggatctcatatc

SEQ ID NO: 48225 - DNA, 25 bp, Probe Sequence
ctataatgccacagatggatctcat

SEQ ID NO: 48226 - DNA, 25 bp, Probe Sequence
ttctataatgccacagatggatctc

SEQ ID NO: 48227 - DNA, 25 bp, Probe Sequence
gagagaataacctcatagtaccaac

SEQ ID NO: 48228 - DNA, 25 bp, Probe Sequence
gttctataatgccacagatggatct

SEQ ID NO: 48229 - DNA, 25 bp, Probe Sequence
cagcaataactaacattaacagaga

SEQ ID NO: 48230 - DNA, 25 bp, Probe Sequence
ataatgccacagatggatctcatat

SEQ ID NO: 48231 - DNA, 25 bp, Probe Sequence
ttctctgagcctctatatcctgttt

SEQ ID NO: 48232 - DNA, 25 bp, Probe Sequence
tttctctgagcctctatatcctgtt

SEQ ID NO: 48233 - DNA, 25 bp, Probe Sequence
tctataatgccacagatggatctca

SEQ ID NO: 48234 - DNA, 25 bp, Probe Sequence
gcactgaagcactttactgatattc

SEQ ID NO: 48235 - DNA, 25 bp, Probe Sequence
cacatagaactccaacaacatcaat

SEQ ID NO: 48236 - DNA, 25 bp, Probe Sequence
aatctatggctgaatctaatgctcc

SEQ ID NO: 48237 - DNA, 25 bp, Probe Sequence
gaatctatggctgaatctaatgctc

SEQ ID NO: 48238 - DNA, 25 bp, Probe Sequence
acacatagaactccaacaacatcaa

SEQ ID NO: 48239 - DNA, 25 bp, Probe Sequence
agaatctatggctgaatctaatgct

SEQ ID NO: 48240 - DNA, 25 bp, Probe Sequence
cacacatagaactccaacaacatca

SEQ ID NO: 48241 - DNA, 25 bp, Probe Sequence
acacacatagaactccaacaacatc

SEQ ID NO: 48242 - DNA, 25 bp, Probe Sequence
acatagaactccaacaacatcaatt

SEQ ID NO: 48243 - DNA, 25 bp, Probe Sequence
cacacacatagaactccaacaacat

SEQ ID NO: 48244 - DNA, 25 bp, Probe Sequence
gtcacagaatctatggctgaatcta

SEQ ID NO: 48245 - DNA, 25 bp, Probe Sequence
cagaatctatggctgaatctaatgc

SEQ ID NO: 48246 - DNA, 25 bp, Probe Sequence
tcacagaatctatggctgaatctaa

SEQ ID NO: 48247 - DNA, 25 bp, Probe Sequence
ttgtcacagaatctatggctgaatc

SEQ ID NO: 48248 - DNA, 25 bp, Probe Sequence
acagaatctatggctgaatctaatg

SEQ ID NO: 48249 - DNA, 25 bp, Probe Sequence
cacagaatctatggctgaatctaat

SEQ ID NO: 48250 - DNA, 25 bp, Probe Sequence
tgtcacagaatctatggctgaatct

SEQ ID NO: 48251 - DNA, 25 bp, Probe Sequence
atctatggctgaatctaatgctcca

SEQ ID NO: 48252 - DNA, 25 bp, Probe Sequence
tctatggctgaatctaatgctccaa

SEQ ID NO: 48253 - DNA, 25 bp, Probe Sequence
agaactccaacaacatcaatttcat

SEQ ID NO: 48254 - DNA, 25 bp, Probe Sequence
ccacacacatagaactccaacaaca

SEQ ID NO: 48255 - DNA, 25 bp, Probe Sequence
tagaactccaacaacatcaatttca

SEQ ID NO: 48256 - DNA, 25 bp, Probe Sequence
gaactccaacaacatcaatttcatt

SEQ ID NO: 48257 - DNA, 25 bp, Probe Sequence
catagaactccaacaacatcaattt

SEQ ID NO: 48258 - DNA, 25 bp, Probe Sequence
taccaacattgttatgccagaaatt

SEQ ID NO: 48259 - DNA, 25 bp, Probe Sequence
aagttggttgttgtttgttaggttt

SEQ ID NO: 48260 - DNA, 25 bp, Probe Sequence
aaagttggttgttgtttgttaggtt

SEQ ID NO: 48261 - DNA, 25 bp, Probe Sequence
gaaagttggttgttgtttgttaggt

SEQ ID NO: 48262 - DNA, 25 bp, Probe Sequence
tgaaagttggttgttgtttgttagg

SEQ ID NO: 48263 - DNA, 25 bp, Probe Sequence
agttggttgttgtttgttaggtttg

SEQ ID NO: 48264 - DNA, 25 bp, Probe Sequence
ttgaaagttggttgttgtttgttag

SEQ ID NO: 48265 - DNA, 25 bp, Probe Sequence
gccagttaattcattctcagcaaat

SEQ ID NO: 48266 - DNA, 25 bp, Probe Sequence
cttgaaagttggttgttgtttgtta

SEQ ID NO: 48267 - DNA, 25 bp, Probe Sequence
gttggttgttgtttgttaggtttgc

SEQ ID NO: 48268 - DNA, 25 bp, Probe Sequence
acttgaaagttggttgttgtttgtt

SEQ ID NO: 48269 - DNA, 25 bp, Probe Sequence
cctccagactttgtccatgttataa

SEQ ID NO: 48270 - DNA, 25 bp, Probe Sequence
gttgtttgttaggtttgccaggttt

SEQ ID NO: 48271 - DNA, 25 bp, Probe Sequence
ccagactttgtccatgttataaact

SEQ ID NO: 48272 - DNA, 25 bp, Probe Sequence
tccagactttgtccatgttataaac

SEQ ID NO: 48273 - DNA, 25 bp, Probe Sequence
ctccagactttgtccatgttataaa

SEQ ID NO: 48274 - DNA, 25 bp, Probe Sequence
ttggttgttgtttgttaggtttgcc

SEQ ID NO: 48275 - DNA, 25 bp, Probe Sequence
ccctccagactttgtccatgttata

SEQ ID NO: 48276 - DNA, 25 bp, Probe Sequence
ccagttaattcattctcagcaaatg

SEQ ID NO: 48277 - DNA, 25 bp, Probe Sequence
ctcagcaaatgaaggtttgtctaag

SEQ ID NO: 48278 - DNA, 25 bp, Probe Sequence
gttgttgtttgttaggtttgccagg

SEQ ID NO: 48279 - DNA, 25 bp, Probe Sequence
ggttgttgtttgttaggtttgccag

SEQ ID NO: 48280 - DNA, 25 bp, Probe Sequence
tctcagcaaatgaaggtttgtctaa

SEQ ID NO: 48281 - DNA, 25 bp, Probe Sequence
ttctcagcaaatgaaggtttgtcta

SEQ ID NO: 48282 - DNA, 25 bp, Probe Sequence
attctcagcaaatgaaggtttgtct

SEQ ID NO: 48283 - DNA, 25 bp, Probe Sequence
aatctgttgtatagaatgtaggcgg

SEQ ID NO: 48284 - DNA, 25 bp, Probe Sequence
tcacgaaggaatctgttgtatagaa

SEQ ID NO: 48285 - DNA, 25 bp, Probe Sequence
gaatctgttgtatagaatgtaggcg

SEQ ID NO: 48286 - DNA, 25 bp, Probe Sequence
atcacgaaggaatctgttgtataga

SEQ ID NO: 48287 - DNA, 25 bp, Probe Sequence
ggaatctgttgtatagaatgtaggc

SEQ ID NO: 48288 - DNA, 25 bp, Probe Sequence
atctgttgtatagaatgtaggcgga

SEQ ID NO: 48289 - DNA, 25 bp, Probe Sequence
aagccttcaatcctgataatcctta

SEQ ID NO: 48290 - DNA, 25 bp, Probe Sequence
ctggaggagagaagtgctacattaa

SEQ ID NO: 48291 - DNA, 25 bp, Probe Sequence
agccttcaatcctgataatccttat

SEQ ID NO: 48292 - DNA, 25 bp, Probe Sequence
ggatcacgaaggaatctgttgtata

SEQ ID NO: 48293 - DNA, 25 bp, Probe Sequence
caagccttcaatcctgataatcctt

SEQ ID NO: 48294 - DNA, 25 bp, Probe Sequence
tcacaagccttcaatcctgataatc

SEQ ID NO: 48295 - DNA, 25 bp, Probe Sequence
ctcacaagccttcaatcctgataat

SEQ ID NO: 48296 - DNA, 25 bp, Probe Sequence
cgaaggaatctgttgtatagaatgt

SEQ ID NO: 48297 - DNA, 25 bp, Probe Sequence
acgaaggaatctgttgtatagaatg

SEQ ID NO: 48298 - DNA, 25 bp, Probe Sequence
cacgaaggaatctgttgtatagaat

SEQ ID NO: 48299 - DNA, 25 bp, Probe Sequence
gatcacgaaggaatctgttgtatag

SEQ ID NO: 48300 - DNA, 25 bp, Probe Sequence
gagcggttattcttgacactcttaa

SEQ ID NO: 48301 - DNA, 25 bp, Probe Sequence
tctgttgtatagaatgtaggcggag

SEQ ID NO: 48302 - DNA, 25 bp, Probe Sequence
acaagccttcaatcctgataatcct

SEQ ID NO: 48303 - DNA, 25 bp, Probe Sequence
cacaagccttcaatcctgataatcc

SEQ ID NO: 48304 - DNA, 25 bp, Probe Sequence
tgagcggttattcttgacactctta

SEQ ID NO: 48305 - DNA, 25 bp, Probe Sequence
actcacaagccttcaatcctgataa

SEQ ID NO: 48306 - DNA, 25 bp, Probe Sequence
ataagaactagctgaagagacaacc

SEQ ID NO: 48307 - DNA, 25 bp, Probe Sequence
aatactgctctgaatcctgttctat

SEQ ID NO: 48308 - DNA, 25 bp, Probe Sequence
gtcaagcacatcagcaatcatagat

SEQ ID NO: 48309 - DNA, 25 bp, Probe Sequence
gtaattgctaatggagacatcagaa

SEQ ID NO: 48310 - DNA, 25 bp, Probe Sequence
atactgctctgaatcctgttctata

SEQ ID NO: 48311 - DNA, 25 bp, Probe Sequence
taattgctaatggagacatcagaag

SEQ ID NO: 48312 - DNA, 25 bp, Probe Sequence
tgtaattgctaatggagacatcaga

SEQ ID NO: 48313 - DNA, 25 bp, Probe Sequence
tacctgtaattgctaatggagacat

SEQ ID NO: 48314 - DNA, 25 bp, Probe Sequence
atacctgtaattgctaatggagaca

SEQ ID NO: 48315 - DNA, 25 bp, Probe Sequence
cctgtaattgctaatggagacatca

SEQ ID NO: 48316 - DNA, 25 bp, Probe Sequence
acctgtaattgctaatggagacatc

SEQ ID NO: 48317 - DNA, 25 bp, Probe Sequence
ctgtaattgctaatggagacatcag

SEQ ID NO: 48318 - DNA, 25 bp, Probe Sequence
tatacctgtaattgctaatggagac

SEQ ID NO: 48319 - DNA, 25 bp, Probe Sequence
ccgtgataataagtatattgttgcc

SEQ ID NO: 48320 - DNA, 25 bp, Probe Sequence
ggtgtcaacctggagatgattatat

SEQ ID NO: 48321 - DNA, 25 bp, Probe Sequence
aagcacatcagcaatcatagattac

SEQ ID NO: 48322 - DNA, 25 bp, Probe Sequence
caagcacatcagcaatcatagatta

SEQ ID NO: 48323 - DNA, 25 bp, Probe Sequence
tcaagcacatcagcaatcatagatt

SEQ ID NO: 48324 - DNA, 25 bp, Probe Sequence
tggtgtcaacctggagatgattata

SEQ ID NO: 48325 - DNA, 25 bp, Probe Sequence
gcaatcatagattaccttacagacc

SEQ ID NO: 48326 - DNA, 25 bp, Probe Sequence
gaacaaataccaacatccatccaaa

SEQ ID NO: 48327 - DNA, 25 bp, Probe Sequence
cacatcagcaatcatagattacctt

SEQ ID NO: 48328 - DNA, 25 bp, Probe Sequence
gcacatcagcaatcatagattacct

SEQ ID NO: 48329 - DNA, 25 bp, Probe Sequence
agcacatcagcaatcatagattacc

SEQ ID NO: 48330 - DNA, 25 bp, Probe Sequence
cgtgataataagtatattgttgcca

SEQ ID NO: 48331 - DNA, 25 bp, Probe Sequence
cagcgtgagtctaatggttgaataa

SEQ ID NO: 48332 - DNA, 25 bp, Probe Sequence
aagtgaagttacagtggaaatgagt

SEQ ID NO: 48333 - DNA, 25 bp, Probe Sequence
caaagtgaagttacagtggaaatga

SEQ ID NO: 48334 - DNA, 25 bp, Probe Sequence
agcgtgagtctaatggttgaataaa

SEQ ID NO: 48335 - DNA, 25 bp, Probe Sequence
aaagtgaagttacagtggaaatgag

SEQ ID NO: 48336 - DNA, 25 bp, Probe Sequence
agtgaagttacagtggaaatgagtg

SEQ ID NO: 48337 - DNA, 25 bp, Probe Sequence
ccaaggaggacaaattaaaggaagt

SEQ ID NO: 48338 - DNA, 25 bp, Probe Sequence
accaaggaggacaaattaaaggaag

SEQ ID NO: 48339 - DNA, 25 bp, Probe Sequence
gaccaaggaggacaaattaaaggaa

SEQ ID NO: 48340 - DNA, 25 bp, Probe Sequence
gaagttacagtggaaatgagtggag

SEQ ID NO: 48341 - DNA, 25 bp, Probe Sequence
gcagcgtgagtctaatggttgaata

SEQ ID NO: 48342 - DNA, 25 bp, Probe Sequence
gacttcagagatgacaggatcaagg

SEQ ID NO: 48343 - DNA, 25 bp, Probe Sequence
ggacttcagagatgacaggatcaag

SEQ ID NO: 48344 - DNA, 25 bp, Probe Sequence
agaagaaggaaagaggcaagtagag

SEQ ID NO: 48345 - DNA, 25 bp, Probe Sequence
gagaagaaggaaagaggcaagtaga

SEQ ID NO: 48346 - DNA, 25 bp, Probe Sequence
agaccaaggaggacaaattaaagga

SEQ ID NO: 48347 - DNA, 25 bp, Probe Sequence
cagaccaaggaggacaaattaaagg

SEQ ID NO: 48348 - DNA, 25 bp, Probe Sequence
tgaagttacagtggaaatgagtgga

SEQ ID NO: 48349 - DNA, 25 bp, Probe Sequence
gtgaagttacagtggaaatgagtgg

SEQ ID NO: 48350 - DNA, 25 bp, Probe Sequence
ggtgaaatcctgtctgtactagaaa

SEQ ID NO: 48351 - DNA, 25 bp, Probe Sequence
ttaagtaacatatttcagcattggc

SEQ ID NO: 48352 - DNA, 25 bp, Probe Sequence
gaaatcctgtctgtactagaaatgc

SEQ ID NO: 48353 - DNA, 25 bp, Probe Sequence
catggtgaaatcctgtctgtactag

SEQ ID NO: 48354 - DNA, 25 bp, Probe Sequence
tattgaccagcatgagatatttgtg

SEQ ID NO: 48355 - DNA, 25 bp, Probe Sequence
agctgtcagtctaggttattctctt

SEQ ID NO: 48356 - DNA, 25 bp, Probe Sequence
gagagaggagaggaggaagattgag

SEQ ID NO: 48357 - DNA, 25 bp, Probe Sequence
agcaattacccagtttccttatcta

SEQ ID NO: 48358 - DNA, 25 bp, Probe Sequence
aagcaattacccagtttccttatct

SEQ ID NO: 48359 - DNA, 25 bp, Probe Sequence
caagcaattacccagtttccttatc

SEQ ID NO: 48360 - DNA, 25 bp, Probe Sequence
gagctgtcagtctaggttattctct

SEQ ID NO: 48361 - DNA, 25 bp, Probe Sequence
gctgtcagtctaggttattctcttt

SEQ ID NO: 48362 - DNA, 25 bp, Probe Sequence
acaagcaattacccagtttccttat

SEQ ID NO: 48363 - DNA, 25 bp, Probe Sequence
cagagagaggagaggaggaagattg

SEQ ID NO: 48364 - DNA, 25 bp, Probe Sequence
ttatgagcactgtagacaaatgttt

SEQ ID NO: 48365 - DNA, 25 bp, Probe Sequence
tttatgagcactgtagacaaatgtt

SEQ ID NO: 48366 - DNA, 25 bp, Probe Sequence
tgagctgtcagtctaggttattctc

SEQ ID NO: 48367 - DNA, 25 bp, Probe Sequence
tttctgtcttctgttaagtgtgttt

SEQ ID NO: 48368 - DNA, 25 bp, Probe Sequence
gtgagctgtcagtctaggttattct

SEQ ID NO: 48369 - DNA, 25 bp, Probe Sequence
tttcagacaagcaattacccagttt

SEQ ID NO: 48370 - DNA, 25 bp, Probe Sequence
aaagtttcagacaagcaattaccca

SEQ ID NO: 48371 - DNA, 25 bp, Probe Sequence
agagagaggagaggaggaagattga

SEQ ID NO: 48372 - DNA, 25 bp, Probe Sequence
gcaattacccagtttccttatctat

SEQ ID NO: 48373 - DNA, 25 bp, Probe Sequence
gacaagcaattacccagtttcctta

SEQ ID NO: 48374 - DNA, 25 bp, Probe Sequence
tgtgagctgtcagtctaggttattc

SEQ ID NO: 48375 - DNA, 25 bp, Probe Sequence
gcatttatgagcactgtagacaaat

SEQ ID NO: 48376 - DNA, 25 bp, Probe Sequence
ttcagacaagcaattacccagtttc

SEQ ID NO: 48377 - DNA, 25 bp, Probe Sequence
aagtttcagacaagcaattacccag

SEQ ID NO: 48378 - DNA, 25 bp, Probe Sequence
tatgagcactgtagacaaatgtttg

SEQ ID NO: 48379 - DNA, 25 bp, Probe Sequence
ttaagtgtttctcacggatggaatt

SEQ ID NO: 48380 - DNA, 25 bp, Probe Sequence
gttaagtgtttctcacggatggaat

SEQ ID NO: 48381 - DNA, 25 bp, Probe Sequence
tttcagtgacgttaagtgtttctca

SEQ ID NO: 48382 - DNA, 25 bp, Probe Sequence
taagtgtttctcacggatggaattc

SEQ ID NO: 48383 - DNA, 25 bp, Probe Sequence
ttttcagtgacgttaagtgtttctc

SEQ ID NO: 48384 - DNA, 25 bp, Probe Sequence
cgttaagtgtttctcacggatggaa

SEQ ID NO: 48385 - DNA, 25 bp, Probe Sequence
ttcagtgacgttaagtgtttctcac

SEQ ID NO: 48386 - DNA, 25 bp, Probe Sequence
tgacgttaagtgtttctcacggatg

SEQ ID NO: 48387 - DNA, 25 bp, Probe Sequence
gacgttaagtgtttctcacggatgg

SEQ ID NO: 48388 - DNA, 25 bp, Probe Sequence
acgttaagtgtttctcacggatgga

SEQ ID NO: 48389 - DNA, 25 bp, Probe Sequence
tcagtgacgttaagtgtttctcacg

SEQ ID NO: 48390 - DNA, 25 bp, Probe Sequence
gtgacgttaagtgtttctcacggat

SEQ ID NO: 48391 - DNA, 25 bp, Probe Sequence
cagtgacgttaagtgtttctcacgg

SEQ ID NO: 48392 - DNA, 25 bp, Probe Sequence
agtgacgttaagtgtttctcacgga

SEQ ID NO: 48393 - DNA, 25 bp, Probe Sequence
cgggttcaattaaaggcataagtta

SEQ ID NO: 48394 - DNA, 25 bp, Probe Sequence
tcgggttcaattaaaggcataagtt

SEQ ID NO: 48395 - DNA, 25 bp, Probe Sequence
ctcgggttcaattaaaggcataagt

SEQ ID NO: 48396 - DNA, 25 bp, Probe Sequence
tacaccttctttgttcctaatgacg

SEQ ID NO: 48397 - DNA, 25 bp, Probe Sequence
atacaccttctttgttcctaatgac

SEQ ID NO: 48398 - DNA, 25 bp, Probe Sequence
gggttcaattaaaggcataagttaa

SEQ ID NO: 48399 - DNA, 25 bp, Probe Sequence
gctcgggttcaattaaaggcataag

SEQ ID NO: 48400 - DNA, 25 bp, Probe Sequence
aatacaccttctttgttcctaatga

SEQ ID NO: 48401 - DNA, 25 bp, Probe Sequence
aagagagagcaaccaccaacatcat

SEQ ID NO: 48402 - DNA, 25 bp, Probe Sequence
aaatacaccttctttgttcctaatg

SEQ ID NO: 48403 - DNA, 25 bp, Probe Sequence
attcattatgatcaacagacctcac

SEQ ID NO: 48404 - DNA, 25 bp, Probe Sequence
gtcaaatacaccttctttgttccta

SEQ ID NO: 48405 - DNA, 25 bp, Probe Sequence
agagagagcaaccaccaacatcatc

SEQ ID NO: 48406 - DNA, 25 bp, Probe Sequence
tttgttcctaatgacgtggacttta

SEQ ID NO: 48407 - DNA, 25 bp, Probe Sequence
aattcattatgatcaacagacctca

SEQ ID NO: 48408 - DNA, 25 bp, Probe Sequence
ttgttcctaatgacgtggactttag

SEQ ID NO: 48409 - DNA, 25 bp, Probe Sequence
tcaaatacaccttctttgttcctaa

SEQ ID NO: 48410 - DNA, 25 bp, Probe Sequence
ctttgttcctaatgacgtggacttt

SEQ ID NO: 48411 - DNA, 25 bp, Probe Sequence
cttctttgttcctaatgacgtggac

SEQ ID NO: 48412 - DNA, 25 bp, Probe Sequence
acaccttctttgttcctaatgacgt

SEQ ID NO: 48413 - DNA, 25 bp, Probe Sequence
ggttcaattaaaggcataagttaaa

SEQ ID NO: 48414 - DNA, 25 bp, Probe Sequence
accttctttgttcctaatgacgtgg

SEQ ID NO: 48415 - DNA, 25 bp, Probe Sequence
caccttctttgttcctaatgacgtg

SEQ ID NO: 48416 - DNA, 25 bp, Probe Sequence
caaagagagagcaaccaccaacatc

SEQ ID NO: 48417 - DNA, 25 bp, Probe Sequence
ctggagaagatgatatggattggaa

SEQ ID NO: 48418 - DNA, 25 bp, Probe Sequence
gtctcctactctgcttctcttacta

SEQ ID NO: 48419 - DNA, 25 bp, Probe Sequence
tctcctactctgcttctcttactat

SEQ ID NO: 48420 - DNA, 25 bp, Probe Sequence
ttgtctcctactctgcttctcttac

SEQ ID NO: 48421 - DNA, 25 bp, Probe Sequence
gttgtctcctactctgcttctctta

SEQ ID NO: 48422 - DNA, 25 bp, Probe Sequence
cctggagaagatgatatggattgga

SEQ ID NO: 48423 - DNA, 25 bp, Probe Sequence
tacaactcaatctaagtcagtccac

SEQ ID NO: 48424 - DNA, 25 bp, Probe Sequence
actagattgactgaggaatgtatgt

SEQ ID NO: 48425 - DNA, 25 bp, Probe Sequence
cctactctgcttctcttactatact

SEQ ID NO: 48426 - DNA, 25 bp, Probe Sequence
tcctactctgcttctcttactatac

SEQ ID NO: 48427 - DNA, 25 bp, Probe Sequence
atacaactcaatctaagtcagtcca

SEQ ID NO: 48428 - DNA, 25 bp, Probe Sequence
actctgcttctcttactatactcat

SEQ ID NO: 48429 - DNA, 25 bp, Probe Sequence
cactagattgactgaggaatgtatg

SEQ ID NO: 48430 - DNA, 25 bp, Probe Sequence
ctcctactctgcttctcttactata

SEQ ID NO: 48431 - DNA, 25 bp, Probe Sequence
tgtctcctactctgcttctcttact

SEQ ID NO: 48432 - DNA, 25 bp, Probe Sequence
acaactcaatctaagtcagtccact

SEQ ID NO: 48433 - DNA, 25 bp, Probe Sequence
agagaattaggagagaggttaatgt

SEQ ID NO: 48434 - DNA, 25 bp, Probe Sequence
tactctgcttctcttactatactca

SEQ ID NO: 48435 - DNA, 25 bp, Probe Sequence
tcactagattgactgaggaatgtat

SEQ ID NO: 48436 - DNA, 25 bp, Probe Sequence
ggagtgttcaatagataccacgaat

SEQ ID NO: 48437 - DNA, 25 bp, Probe Sequence
tagttgtctcctactctgcttctct

SEQ ID NO: 48438 - DNA, 25 bp, Probe Sequence
ttcctggagaagatgatatggattg

SEQ ID NO: 48439 - DNA, 25 bp, Probe Sequence
agattgactgaggaatgtatgtcta

SEQ ID NO: 48440 - DNA, 25 bp, Probe Sequence
tagattgactgaggaatgtatgtct

SEQ ID NO: 48441 - DNA, 25 bp, Probe Sequence
catcaagataaggcatttctttccc

SEQ ID NO: 48442 - DNA, 25 bp, Probe Sequence
tcatcaagataaggcatttctttcc

SEQ ID NO: 48443 - DNA, 25 bp, Probe Sequence
atcaagataaggcatttctttcccg

SEQ ID NO: 48444 - DNA, 25 bp, Probe Sequence
tatttcatcaagataaggcatttct

SEQ ID NO: 48445 - DNA, 25 bp, Probe Sequence
ttcatcaagataaggcatttctttc

SEQ ID NO: 48446 - DNA, 25 bp, Probe Sequence
tgttttactgtctacttttcagggt

SEQ ID NO: 48447 - DNA, 25 bp, Probe Sequence
ctgttttactgtctacttttcaggg

SEQ ID NO: 48448 - DNA, 25 bp, Probe Sequence
gttttactgtctacttttcagggtt

SEQ ID NO: 48449 - DNA, 25 bp, Probe Sequence
tttcatcaagataaggcatttcttt

SEQ ID NO: 48450 - DNA, 25 bp, Probe Sequence
atatttcatcaagataaggcatttc

SEQ ID NO: 48451 - DNA, 25 bp, Probe Sequence
atttcatcaagataaggcatttctt

SEQ ID NO: 48452 - DNA, 25 bp, Probe Sequence
gatatttcatcaagataaggcattt

SEQ ID NO: 48453 - DNA, 25 bp, Probe Sequence
ttactgtctacttttcagggttaaa

SEQ ID NO: 48454 - DNA, 25 bp, Probe Sequence
tttactgtctacttttcagggttaa

SEQ ID NO: 48455 - DNA, 25 bp, Probe Sequence
ttttactgtctacttttcagggtta

SEQ ID NO: 48456 - DNA, 25 bp, Probe Sequence
tactgtctacttttcagggttaaaa

SEQ ID NO: 48457 - DNA, 25 bp, Probe Sequence
ataaggcatttctttcccggagttc

SEQ ID NO: 48458 - DNA, 25 bp, Probe Sequence
gataaggcatttctttcccggagtt

SEQ ID NO: 48459 - DNA, 25 bp, Probe Sequence
tgatatttcatcaagataaggcatt

SEQ ID NO: 48460 - DNA, 25 bp, Probe Sequence
agataaggcatttctttcccggagt

SEQ ID NO: 48461 - DNA, 25 bp, Probe Sequence
aagataaggcatttctttcccggag

SEQ ID NO: 48462 - DNA, 25 bp, Probe Sequence
caagataaggcatttctttcccgga

SEQ ID NO: 48463 - DNA, 25 bp, Probe Sequence
tcaagataaggcatttctttcccgg

SEQ ID NO: 48464 - DNA, 25 bp, Probe Sequence
taaggcatttctttcccggagttca

SEQ ID NO: 48465 - DNA, 25 bp, Probe Sequence
ttatggaaggctgggttaaagttat

SEQ ID NO: 48466 - DNA, 25 bp, Probe Sequence
tatggaaggctgggttaaagttatg

SEQ ID NO: 48467 - DNA, 25 bp, Probe Sequence
gttatggaaggctgggttaaagtta

SEQ ID NO: 48468 - DNA, 25 bp, Probe Sequence
gcttccaaatcctgaaatagatgtt

SEQ ID NO: 48469 - DNA, 25 bp, Probe Sequence
ttgcagtgtcatgttctgtaataga

SEQ ID NO: 48470 - DNA, 25 bp, Probe Sequence
attgcagtgtcatgttctgtaatag

SEQ ID NO: 48471 - DNA, 25 bp, Probe Sequence
ctattattgcagtgtcatgttctgt

SEQ ID NO: 48472 - DNA, 25 bp, Probe Sequence
gctattattgcagtgtcatgttctg

SEQ ID NO: 48473 - DNA, 25 bp, Probe Sequence
ttattgcagtgtcatgttctgtaat

SEQ ID NO: 48474 - DNA, 25 bp, Probe Sequence
attattgcagtgtcatgttctgtaa

SEQ ID NO: 48475 - DNA, 25 bp, Probe Sequence
gaaggctgggttaaagttatggttc

SEQ ID NO: 48476 - DNA, 25 bp, Probe Sequence
gggttaaagttatggttccagaagc

SEQ ID NO: 48477 - DNA, 25 bp, Probe Sequence
ctgaagcggttcattgctattattg

SEQ ID NO: 48478 - DNA, 25 bp, Probe Sequence
tgttatggaaggctgggttaaagtt

SEQ ID NO: 48479 - DNA, 25 bp, Probe Sequence
tattgcagtgtcatgttctgtaata

SEQ ID NO: 48480 - DNA, 25 bp, Probe Sequence
tattattgcagtgtcatgttctgta

SEQ ID NO: 48481 - DNA, 25 bp, Probe Sequence
agcttccaaatcctgaaatagatgt

SEQ ID NO: 48482 - DNA, 25 bp, Probe Sequence
ggttaaagttatggttccagaagct

SEQ ID NO: 48483 - DNA, 25 bp, Probe Sequence
cttccaaatcctgaaatagatgttt

SEQ ID NO: 48484 - DNA, 25 bp, Probe Sequence
tgggttaaagttatggttccagaag

SEQ ID NO: 48485 - DNA, 25 bp, Probe Sequence
atggaaggctgggttaaagttatgg

SEQ ID NO: 48486 - DNA, 25 bp, Probe Sequence
ctgttatggaaggctgggttaaagt

SEQ ID NO: 48487 - DNA, 25 bp, Probe Sequence
actgttatggaaggctgggttaaag

SEQ ID NO: 48488 - DNA, 25 bp, Probe Sequence
gactgttatggaaggctgggttaaa

SEQ ID NO: 48489 - DNA, 25 bp, Probe Sequence
tcttcgtccgataccaataagtcag

SEQ ID NO: 48490 - DNA, 25 bp, Probe Sequence
agtcttcgtccgataccaataagtc

SEQ ID NO: 48491 - DNA, 25 bp, Probe Sequence
gagtcttcgtccgataccaataagt

SEQ ID NO: 48492 - DNA, 25 bp, Probe Sequence
gtcttcgtccgataccaataagtca

SEQ ID NO: 48493 - DNA, 25 bp, Probe Sequence
aataagtcagcctgatgctctaatg

SEQ ID NO: 48494 - DNA, 25 bp, Probe Sequence
caataagtcagcctgatgctctaat

SEQ ID NO: 48495 - DNA, 25 bp, Probe Sequence
aataagcctaagagagagcctccag

SEQ ID NO: 48496 - DNA, 25 bp, Probe Sequence
aggctccaccttgttaaataaattg

SEQ ID NO: 48497 - DNA, 25 bp, Probe Sequence
tgaggctccaccttgttaaataaat

SEQ ID NO: 48498 - DNA, 25 bp, Probe Sequence
atgaggctccaccttgttaaataaa

SEQ ID NO: 48499 - DNA, 25 bp, Probe Sequence
ggagtcttcgtccgataccaataag

SEQ ID NO: 48500 - DNA, 25 bp, Probe Sequence
gaggctccaccttgttaaataaatt

SEQ ID NO: 48501 - DNA, 25 bp, Probe Sequence
gatgaggctccaccttgttaaataa

SEQ ID NO: 48502 - DNA, 25 bp, Probe Sequence
cttcgtccgataccaataagtcagc

SEQ ID NO: 48503 - DNA, 25 bp, Probe Sequence
ccgataccaataagtcagcctgatg

SEQ ID NO: 48504 - DNA, 25 bp, Probe Sequence
aggagtcttcgtccgataccaataa

SEQ ID NO: 48505 - DNA, 25 bp, Probe Sequence
agatgaggctccaccttgttaaata

SEQ ID NO: 48506 - DNA, 25 bp, Probe Sequence
ggctccaccttgttaaataaattgg

SEQ ID NO: 48507 - DNA, 25 bp, Probe Sequence
tccgataccaataagtcagcctgat

SEQ ID NO: 48508 - DNA, 25 bp, Probe Sequence
gaaataagcctaagagagagcctcc

SEQ ID NO: 48509 - DNA, 25 bp, Probe Sequence
ggaaataagcctaagagagagcctc

SEQ ID NO: 48510 - DNA, 25 bp, Probe Sequence
ataagtcagcctgatgctctaatgg

SEQ ID NO: 48511 - DNA, 25 bp, Probe Sequence
gaggagtcttcgtccgataccaata

SEQ ID NO: 48512 - DNA, 25 bp, Probe Sequence
ccaataagtcagcctgatgctctaa

SEQ ID NO: 48513 - DNA, 25 bp, Probe Sequence
catcattattattgctctccactgt

SEQ ID NO: 48514 - DNA, 25 bp, Probe Sequence
tcatcattattattgctctccactg

SEQ ID NO: 48515 - DNA, 25 bp, Probe Sequence
attattattgctctccactgtatcc

SEQ ID NO: 48516 - DNA, 25 bp, Probe Sequence
atcatcattattattgctctccact

SEQ ID NO: 48517 - DNA, 25 bp, Probe Sequence
ggcaacattaagcaacttacataac

SEQ ID NO: 48518 - DNA, 25 bp, Probe Sequence
tcattattattgctctccactgtat

SEQ ID NO: 48519 - DNA, 25 bp, Probe Sequence
atcattattattgctctccactgta

SEQ ID NO: 48520 - DNA, 25 bp, Probe Sequence
atgtgcttgtcaagttctagttgtt

SEQ ID NO: 48521 - DNA, 25 bp, Probe Sequence
cattattattgctctccactgtatc

SEQ ID NO: 48522 - DNA, 25 bp, Probe Sequence
gcaacattaagcaacttacataact

SEQ ID NO: 48523 - DNA, 25 bp, Probe Sequence
tgtgcttgtcaagttctagttgttc

SEQ ID NO: 48524 - DNA, 25 bp, Probe Sequence
catgtgcttgtcaagttctagttgt

SEQ ID NO: 48525 - DNA, 25 bp, Probe Sequence
ttattattgctctccactgtatccc

SEQ ID NO: 48526 - DNA, 25 bp, Probe Sequence
ggtagtctcatttagcaagtatgga

SEQ ID NO: 48527 - DNA, 25 bp, Probe Sequence
agtctcatttagcaagtatggaagt

SEQ ID NO: 48528 - DNA, 25 bp, Probe Sequence
tcgggtagtctcatttagcaagtat

SEQ ID NO: 48529 - DNA, 25 bp, Probe Sequence
gggtagtctcatttagcaagtatgg

SEQ ID NO: 48530 - DNA, 25 bp, Probe Sequence
gtctcatttagcaagtatggaagtt

SEQ ID NO: 48531 - DNA, 25 bp, Probe Sequence
ttagcaagtatggaagttgaggcag

SEQ ID NO: 48532 - DNA, 25 bp, Probe Sequence
catttagcaagtatggaagttgagg

SEQ ID NO: 48533 - DNA, 25 bp, Probe Sequence
cgggtagtctcatttagcaagtatg

SEQ ID NO: 48534 - DNA, 25 bp, Probe Sequence
gataaggatcactgtaggtggttgt

SEQ ID NO: 48535 - DNA, 25 bp, Probe Sequence
actgaagcactttactgatactcat

SEQ ID NO: 48536 - DNA, 25 bp, Probe Sequence
tctcatttagcaagtatggaagttg

SEQ ID NO: 48537 - DNA, 25 bp, Probe Sequence
aatggatggacatcttcagagagtg

SEQ ID NO: 48538 - DNA, 25 bp, Probe Sequence
catcaagctgaacaacaaggtaatg

SEQ ID NO: 48539 - DNA, 25 bp, Probe Sequence
aaactcaagaaatggatggacatct

SEQ ID NO: 48540 - DNA, 25 bp, Probe Sequence
gaccatgttcacattctttctaacc

SEQ ID NO: 48541 - DNA, 25 bp, Probe Sequence
gatggacatcttcagagagtgtgac

SEQ ID NO: 48542 - DNA, 25 bp, Probe Sequence
gaaatggatggacatcttcagagag

SEQ ID NO: 48543 - DNA, 25 bp, Probe Sequence
ccatgttcacattctttctaaccat

SEQ ID NO: 48544 - DNA, 25 bp, Probe Sequence
accatgttcacattctttctaacca

SEQ ID NO: 48545 - DNA, 25 bp, Probe Sequence
agaccatgttcacattctttctaac

SEQ ID NO: 48546 - DNA, 25 bp, Probe Sequence
atcaagctgaacaacaaggtaatgc

SEQ ID NO: 48547 - DNA, 25 bp, Probe Sequence
gcatcaagctgaacaacaaggtaat

SEQ ID NO: 48548 - DNA, 25 bp, Probe Sequence
agaaatggatggacatcttcagaga

SEQ ID NO: 48549 - DNA, 25 bp, Probe Sequence
aaatggatggacatcttcagagagt

SEQ ID NO: 48550 - DNA, 25 bp, Probe Sequence
atggatggacatcttcagagagtgt

SEQ ID NO: 48551 - DNA, 25 bp, Probe Sequence
gatcaacctcatggataaagatggc

SEQ ID NO: 48552 - DNA, 25 bp, Probe Sequence
atcaacctcatggataaagatggct

SEQ ID NO: 48553 - DNA, 25 bp, Probe Sequence
atcatagactttgacagcttcatca

SEQ ID NO: 48554 - DNA, 25 bp, Probe Sequence
gaggctaaagaccatgttcacattc

SEQ ID NO: 48555 - DNA, 25 bp, Probe Sequence
gatcatagactttgacagcttcatc

SEQ ID NO: 48556 - DNA, 25 bp, Probe Sequence
tcatagactttgacagcttcatcag

SEQ ID NO: 48557 - DNA, 25 bp, Probe Sequence
aggctaaagaccatgttcacattct

SEQ ID NO: 48558 - DNA, 25 bp, Probe Sequence
ttctagagttcaagatcctgtggaa

SEQ ID NO: 48559 - DNA, 25 bp, Probe Sequence
atggacatcttcagagagtgtgacc

SEQ ID NO: 48560 - DNA, 25 bp, Probe Sequence
tcaacctcatggataaagatggctc

SEQ ID NO: 48561 - DNA, 25 bp, Probe Sequence
tctggacctaatagctgttccttag

SEQ ID NO: 48562 - DNA, 25 bp, Probe Sequence
ctctggacctaatagctgttcctta

SEQ ID NO: 48563 - DNA, 25 bp, Probe Sequence
actctggacctaatagctgttcctt

SEQ ID NO: 48564 - DNA, 25 bp, Probe Sequence
gaggatgatgaggtcaaggtgtgag

SEQ ID NO: 48565 - DNA, 25 bp, Probe Sequence
cactctggacctaatagctgttcct

SEQ ID NO: 48566 - DNA, 25 bp, Probe Sequence
ctgaggaggatgatgaggtcaaggt

SEQ ID NO: 48567 - DNA, 25 bp, Probe Sequence
atgctgaggaggatgatgaggtcaa

SEQ ID NO: 48568 - DNA, 25 bp, Probe Sequence
aaacacctttgaatttgcggatgct

SEQ ID NO: 48569 - DNA, 25 bp, Probe Sequence
ccactctggacctaatagctgttcc

SEQ ID NO: 48570 - DNA, 25 bp, Probe Sequence
ctttgaatttgcggatgctgaggag

SEQ ID NO: 48571 - DNA, 25 bp, Probe Sequence
gtgcaagcaaacacctttgaatttg

SEQ ID NO: 48572 - DNA, 25 bp, Probe Sequence
agtgcaagcaaacacctttgaattt

SEQ ID NO: 48573 - DNA, 25 bp, Probe Sequence
gccactctggacctaatagctgttc

SEQ ID NO: 48574 - DNA, 25 bp, Probe Sequence
aacacctttgaatttgcggatgctg

SEQ ID NO: 48575 - DNA, 25 bp, Probe Sequence
ctggacctaatagctgttccttagg

SEQ ID NO: 48576 - DNA, 25 bp, Probe Sequence
cagtgcaagcaaacacctttgaatt

SEQ ID NO: 48577 - DNA, 25 bp, Probe Sequence
caaacacctttgaatttgcggatgc

SEQ ID NO: 48578 - DNA, 25 bp, Probe Sequence
acagtgcaagcaaacacctttgaat

SEQ ID NO: 48579 - DNA, 25 bp, Probe Sequence
tggacctaatagctgttccttaggc

SEQ ID NO: 48580 - DNA, 25 bp, Probe Sequence
cacagtgcaagcaaacacctttgaa

SEQ ID NO: 48581 - DNA, 25 bp, Probe Sequence
taatagctgttccttaggccccact

SEQ ID NO: 48582 - DNA, 25 bp, Probe Sequence
ctaatagctgttccttaggccccac

SEQ ID NO: 48583 - DNA, 25 bp, Probe Sequence
ggacctaatagctgttccttaggcc

SEQ ID NO: 48584 - DNA, 25 bp, Probe Sequence
gacctaatagctgttccttaggccc

SEQ ID NO: 48585 - DNA, 25 bp, Probe Sequence
cttcactaagattaagacagccgat

SEQ ID NO: 48586 - DNA, 25 bp, Probe Sequence
ttcactaagattaagacagccgatc

SEQ ID NO: 48587 - DNA, 25 bp, Probe Sequence
gtctgctgtctgtgtcttctatttg

SEQ ID NO: 48588 - DNA, 25 bp, Probe Sequence
ttcttcactaagattaagacagccg

SEQ ID NO: 48589 - DNA, 25 bp, Probe Sequence
gttcttcactaagattaagacagcc

SEQ ID NO: 48590 - DNA, 25 bp, Probe Sequence
ggcagttcttcactaagattaagac

SEQ ID NO: 48591 - DNA, 25 bp, Probe Sequence
cggcagttcttcactaagattaaga

SEQ ID NO: 48592 - DNA, 25 bp, Probe Sequence
gcaaacagcaatgatcttccaataa

SEQ ID NO: 48593 - DNA, 25 bp, Probe Sequence
aatacgagaaacagatcaagcactt

SEQ ID NO: 48594 - DNA, 25 bp, Probe Sequence
aaatacgagaaacagatcaagcact

SEQ ID NO: 48595 - DNA, 25 bp, Probe Sequence
atacgagaaacagatcaagcacttt

SEQ ID NO: 48596 - DNA, 25 bp, Probe Sequence
gcagttcttcactaagattaagaca

SEQ ID NO: 48597 - DNA, 25 bp, Probe Sequence
cttctatttggcaaacagcaatgat

SEQ ID NO: 48598 - DNA, 25 bp, Probe Sequence
tcttcactaagattaagacagccga

SEQ ID NO: 48599 - DNA, 25 bp, Probe Sequence
tatttggcaaacagcaatgatcttc

SEQ ID NO: 48600 - DNA, 25 bp, Probe Sequence
ctatttggcaaacagcaatgatctt

SEQ ID NO: 48601 - DNA, 25 bp, Probe Sequence
ttctatttggcaaacagcaatgatc

SEQ ID NO: 48602 - DNA, 25 bp, Probe Sequence
agttcttcactaagattaagacagc

SEQ ID NO: 48603 - DNA, 25 bp, Probe Sequence
caaacagcaatgatcttccaataaa

SEQ ID NO: 48604 - DNA, 25 bp, Probe Sequence
tcgtctgctgtctgtgtcttctatt

SEQ ID NO: 48605 - DNA, 25 bp, Probe Sequence
ttcgtctgctgtctgtgtcttctat

SEQ ID NO: 48606 - DNA, 25 bp, Probe Sequence
ctgtctgtgtcttctatttggcaaa

SEQ ID NO: 48607 - DNA, 25 bp, Probe Sequence
tgtctgtgtcttctatttggcaaac

SEQ ID NO: 48608 - DNA, 25 bp, Probe Sequence
tctatttggcaaacagcaatgatct

SEQ ID NO: 48609 - DNA, 25 bp, Probe Sequence
ttcaagacactgtaaccacaagatg

SEQ ID NO: 48610 - DNA, 25 bp, Probe Sequence
caagacactgtaaccacaagatgtt

SEQ ID NO: 48611 - DNA, 25 bp, Probe Sequence
agacactgtaaccacaagatgttat

SEQ ID NO: 48612 - DNA, 25 bp, Probe Sequence
aagacactgtaaccacaagatgtta

SEQ ID NO: 48613 - DNA, 25 bp, Probe Sequence
gacactgtaaccacaagatgttatt

SEQ ID NO: 48614 - DNA, 25 bp, Probe Sequence
atatggagagagctgacaatcaatt

SEQ ID NO: 48615 - DNA, 25 bp, Probe Sequence
gatatggagagagctgacaatcaat

SEQ ID NO: 48616 - DNA, 25 bp, Probe Sequence
tatggagagagctgacaatcaattc

SEQ ID NO: 48617 - DNA, 25 bp, Probe Sequence
tcaagacactgtaaccacaagatgt

SEQ ID NO: 48618 - DNA, 25 bp, Probe Sequence
agagagctgacaatcaattcacatt

SEQ ID NO: 48619 - DNA, 25 bp, Probe Sequence
agatatggagagagctgacaatcaa

SEQ ID NO: 48620 - DNA, 25 bp, Probe Sequence
gagagagctgacaatcaattcacat

SEQ ID NO: 48621 - DNA, 25 bp, Probe Sequence
aggaaataaatgccgatgatttgtg

SEQ ID NO: 48622 - DNA, 25 bp, Probe Sequence
caggaaataaatgccgatgatttgt

SEQ ID NO: 48623 - DNA, 25 bp, Probe Sequence
tttcaagacactgtaaccacaagat

SEQ ID NO: 48624 - DNA, 25 bp, Probe Sequence
atggagagagctgacaatcaattca

SEQ ID NO: 48625 - DNA, 25 bp, Probe Sequence
ggaaataaatgccgatgatttgtgt

SEQ ID NO: 48626 - DNA, 25 bp, Probe Sequence
cagatatggagagagctgacaatca

SEQ ID NO: 48627 - DNA, 25 bp, Probe Sequence
ccaggaaataaatgccgatgatttg

SEQ ID NO: 48628 - DNA, 25 bp, Probe Sequence
ctttcaagacactgtaaccacaaga

SEQ ID NO: 48629 - DNA, 25 bp, Probe Sequence
actttcaagacactgtaaccacaag

SEQ ID NO: 48630 - DNA, 25 bp, Probe Sequence
gaaataaatgccgatgatttgtgta

SEQ ID NO: 48631 - DNA, 25 bp, Probe Sequence
cactttcaagacactgtaaccacaa

SEQ ID NO: 48632 - DNA, 25 bp, Probe Sequence
aattcccgtactgattagtcaacag

SEQ ID NO: 48633 - DNA, 25 bp, Probe Sequence
gaagaaggaattgctgtatgatgtg

SEQ ID NO: 48634 - DNA, 25 bp, Probe Sequence
gtgaagaaggaattgctgtatgatg

SEQ ID NO: 48635 - DNA, 25 bp, Probe Sequence
tgaagaaggaattgctgtatgatgt

SEQ ID NO: 48636 - DNA, 25 bp, Probe Sequence
aagaaggaattgctgtatgatgtgg

SEQ ID NO: 48637 - DNA, 25 bp, Probe Sequence
cgtgaagaaggaattgctgtatgat

SEQ ID NO: 48638 - DNA, 25 bp, Probe Sequence
atcgtgaagaaggaattgctgtatg

SEQ ID NO: 48639 - DNA, 25 bp, Probe Sequence
catcgtgaagaaggaattgctgtat

SEQ ID NO: 48640 - DNA, 25 bp, Probe Sequence
tcgtgaagaaggaattgctgtatga

SEQ ID NO: 48641 - DNA, 25 bp, Probe Sequence
ccttattggagtcatgttctcaaga

SEQ ID NO: 48642 - DNA, 25 bp, Probe Sequence
atctatgttggcgatggatatgtgg

SEQ ID NO: 48643 - DNA, 25 bp, Probe Sequence
cttattggagtcatgttctcaagaa

SEQ ID NO: 48644 - DNA, 25 bp, Probe Sequence
gccttattggagtcatgttctcaag

SEQ ID NO: 48645 - DNA, 25 bp, Probe Sequence
gttaatgacaataaatccctgctcc

SEQ ID NO: 48646 - DNA, 25 bp, Probe Sequence
taagcctggagacctgattgagatt

SEQ ID NO: 48647 - DNA, 25 bp, Probe Sequence
tatgttggcgatggatatgtggttc

SEQ ID NO: 48648 - DNA, 25 bp, Probe Sequence
ctatgttggcgatggatatgtggtt

SEQ ID NO: 48649 - DNA, 25 bp, Probe Sequence
ttaatgacaataaatccctgctccc

SEQ ID NO: 48650 - DNA, 25 bp, Probe Sequence
agccttattggagtcatgttctcaa

SEQ ID NO: 48651 - DNA, 25 bp, Probe Sequence
tggtttgtggatttcattgtgattt

SEQ ID NO: 48652 - DNA, 25 bp, Probe Sequence
ttggtttgtggatttcattgtgatt

SEQ ID NO: 48653 - DNA, 25 bp, Probe Sequence
tttggtttgtggatttcattgtgat

SEQ ID NO: 48654 - DNA, 25 bp, Probe Sequence
ccatcgtgaagaaggaattgctgta

SEQ ID NO: 48655 - DNA, 25 bp, Probe Sequence
ggtttggtttgtggatttcattgtg

SEQ ID NO: 48656 - DNA, 25 bp, Probe Sequence
gtttggtttgtggatttcattgtga

SEQ ID NO: 48657 - DNA, 25 bp, Probe Sequence
aagactggacgtgtggacaagaatg

SEQ ID NO: 48658 - DNA, 25 bp, Probe Sequence
caagactggacgtgtggacaagaat

SEQ ID NO: 48659 - DNA, 25 bp, Probe Sequence
aaaatggctttattttctggtaaaa

SEQ ID NO: 48660 - DNA, 25 bp, Probe Sequence
gttgtgacaacgtgatcatggtgtg

SEQ ID NO: 48661 - DNA, 25 bp, Probe Sequence
taaaatggctttattttctggtaaa

SEQ ID NO: 48662 - DNA, 25 bp, Probe Sequence
ataaaatggctttattttctggtaa

SEQ ID NO: 48663 - DNA, 25 bp, Probe Sequence
aataaaatggctttattttctggta

SEQ ID NO: 48664 - DNA, 25 bp, Probe Sequence
taataaaatggctttattttctggt

SEQ ID NO: 48665 - DNA, 25 bp, Probe Sequence
atagttaggaatacacaagccgtaa

SEQ ID NO: 48666 - DNA, 25 bp, Probe Sequence
tatagttaggaatacacaagccgta

SEQ ID NO: 48667 - DNA, 25 bp, Probe Sequence
ctatagttaggaatacacaagccgt

SEQ ID NO: 48668 - DNA, 25 bp, Probe Sequence
tagttaggaatacacaagccgtaaa

SEQ ID NO: 48669 - DNA, 25 bp, Probe Sequence
agttcctatttcagcataaagaggc

SEQ ID NO: 48670 - DNA, 25 bp, Probe Sequence
tttgaggaatagtttggaccttgtg

SEQ ID NO: 48671 - DNA, 25 bp, Probe Sequence
aagttcctatttcagcataaagagg

SEQ ID NO: 48672 - DNA, 25 bp, Probe Sequence
aaagttcctatttcagcataaagag

SEQ ID NO: 48673 - DNA, 25 bp, Probe Sequence
agctatagttaggaatacacaagcc

SEQ ID NO: 48674 - DNA, 25 bp, Probe Sequence
tcttctaggtaaagctgagatcaca

SEQ ID NO: 48675 - DNA, 25 bp, Probe Sequence
ctcttctaggtaaagctgagatcac

SEQ ID NO: 48676 - DNA, 25 bp, Probe Sequence
gactacaagaagagcttcctttaaa

SEQ ID NO: 48677 - DNA, 25 bp, Probe Sequence
gctatagttaggaatacacaagccg

SEQ ID NO: 48678 - DNA, 25 bp, Probe Sequence
cttctaggtaaagctgagatcacag

SEQ ID NO: 48679 - DNA, 25 bp, Probe Sequence
ccatttggactacaagaagagcttc

SEQ ID NO: 48680 - DNA, 25 bp, Probe Sequence
ggactacaagaagagcttcctttaa

SEQ ID NO: 48681 - DNA, 25 bp, Probe Sequence
gttcctatttcagcataaagaggct

SEQ ID NO: 48682 - DNA, 25 bp, Probe Sequence
gttaggaatacacaagccgtaaaat

SEQ ID NO: 48683 - DNA, 25 bp, Probe Sequence
agttaggaatacacaagccgtaaaa

SEQ ID NO: 48684 - DNA, 25 bp, Probe Sequence
gctattcattccagattttcgtgta

SEQ ID NO: 48685 - DNA, 25 bp, Probe Sequence
ttaggaatacacaagccgtaaaatc

SEQ ID NO: 48686 - DNA, 25 bp, Probe Sequence
ctaggtaaagctgagatcacaggaa

SEQ ID NO: 48687 - DNA, 25 bp, Probe Sequence
ttctaggtaaagctgagatcacagg

SEQ ID NO: 48688 - DNA, 25 bp, Probe Sequence
tggactacaagaagagcttccttta

SEQ ID NO: 48689 - DNA, 25 bp, Probe Sequence
gatatacagaggaaagtcacctata

SEQ ID NO: 48690 - DNA, 25 bp, Probe Sequence
ttttacagtaaaggctgaatgacat

SEQ ID NO: 48691 - DNA, 25 bp, Probe Sequence
atatacagaggaaagtcacctatag

SEQ ID NO: 48692 - DNA, 25 bp, Probe Sequence
ctaggggaatagtttggaccttgtg

SEQ ID NO: 48693 - DNA, 25 bp, Probe Sequence
gctaggggaatagtttggaccttgt

SEQ ID NO: 48694 - DNA, 25 bp, Probe Sequence
taggggaatagtttggaccttgtgc

SEQ ID NO: 48695 - DNA, 25 bp, Probe Sequence
ggctaggggaatagtttggaccttg

SEQ ID NO: 48696 - DNA, 25 bp, Probe Sequence
gtagtcaaacttcaagaaacaatct

SEQ ID NO: 48697 - DNA, 25 bp, Probe Sequence
agtagtcaaacttcaagaaacaatc

SEQ ID NO: 48698 - DNA, 25 bp, Probe Sequence
tggaataccaaagattaaatccttg

SEQ ID NO: 48699 - DNA, 25 bp, Probe Sequence
accaaagattaaatccttgacataa

SEQ ID NO: 48700 - DNA, 25 bp, Probe Sequence
aataccaaagattaaatccttgaca

SEQ ID NO: 48701 - DNA, 25 bp, Probe Sequence
tccttgacataagatctcatttgca

SEQ ID NO: 48702 - DNA, 25 bp, Probe Sequence
ggaataccaaagattaaatccttga

SEQ ID NO: 48703 - DNA, 25 bp, Probe Sequence
atccttgacataagatctcatttgc

SEQ ID NO: 48704 - DNA, 25 bp, Probe Sequence
ataccaaagattaaatccttgacat

SEQ ID NO: 48705 - DNA, 25 bp, Probe Sequence
gaataccaaagattaaatccttgac

SEQ ID NO: 48706 - DNA, 25 bp, Probe Sequence
ccaaagattaaatccttgacataag

SEQ ID NO: 48707 - DNA, 25 bp, Probe Sequence
taccaaagattaaatccttgacata

SEQ ID NO: 48708 - DNA, 25 bp, Probe Sequence
aagtagtcaaacttcaagaaacaat

SEQ ID NO: 48709 - DNA, 25 bp, Probe Sequence
taagtagtcaaacttcaagaaacaa

SEQ ID NO: 48710 - DNA, 25 bp, Probe Sequence
ttaagtagtcaaacttcaagaaaca

SEQ ID NO: 48711 - DNA, 25 bp, Probe Sequence
aatccttgacataagatctcatttg

SEQ ID NO: 48712 - DNA, 25 bp, Probe Sequence
caaagattaaatccttgacataaga

SEQ ID NO: 48713 - DNA, 25 bp, Probe Sequence
aaatccttgacataagatctcattt

SEQ ID NO: 48714 - DNA, 25 bp, Probe Sequence
tttaagtagtcaaacttcaagaaac

SEQ ID NO: 48715 - DNA, 25 bp, Probe Sequence
taaatccttgacataagatctcatt

SEQ ID NO: 48716 - DNA, 25 bp, Probe Sequence
ttaaatccttgacataagatctcat

SEQ ID NO: 48717 - DNA, 25 bp, Probe Sequence
attaaatccttgacataagatctca

SEQ ID NO: 48718 - DNA, 25 bp, Probe Sequence
ttggaataccaaagattaaatcctt

SEQ ID NO: 48719 - DNA, 25 bp, Probe Sequence
gattaaatccttgacataagatctc

SEQ ID NO: 48720 - DNA, 25 bp, Probe Sequence
ggcaccaaactattcaacatctctg

SEQ ID NO: 48721 - DNA, 25 bp, Probe Sequence
aggcaccaaactattcaacatctct

SEQ ID NO: 48722 - DNA, 25 bp, Probe Sequence
caggcaccaaactattcaacatctc

SEQ ID NO: 48723 - DNA, 25 bp, Probe Sequence
ctcaggcaccaaactattcaacatc

SEQ ID NO: 48724 - DNA, 25 bp, Probe Sequence
tcaggcaccaaactattcaacatct

SEQ ID NO: 48725 - DNA, 25 bp, Probe Sequence
tgactggtacaagacaaaggagatc

SEQ ID NO: 48726 - DNA, 25 bp, Probe Sequence
caactcaggcaccaaactattcaac

SEQ ID NO: 48727 - DNA, 25 bp, Probe Sequence
actcaggcaccaaactattcaacat

SEQ ID NO: 48728 - DNA, 25 bp, Probe Sequence
gtgactggtacaagacaaaggagat

SEQ ID NO: 48729 - DNA, 25 bp, Probe Sequence
aactcaggcaccaaactattcaaca

SEQ ID NO: 48730 - DNA, 25 bp, Probe Sequence
gactggtacaagacaaaggagatcc

SEQ ID NO: 48731 - DNA, 25 bp, Probe Sequence
caccaaactattcaacatctctggc

SEQ ID NO: 48732 - DNA, 25 bp, Probe Sequence
gcaccaaactattcaacatctctgg

SEQ ID NO: 48733 - DNA, 25 bp, Probe Sequence
caagcagatagaaggccatacgatt

SEQ ID NO: 48734 - DNA, 25 bp, Probe Sequence
ccatgtggaatgctggacaataaag

SEQ ID NO: 48735 - DNA, 25 bp, Probe Sequence
ctggtacaagacaaaggagatcctg

SEQ ID NO: 48736 - DNA, 25 bp, Probe Sequence
gcaactcaggcaccaaactattcaa

SEQ ID NO: 48737 - DNA, 25 bp, Probe Sequence
cagatagaaggccatacgatttgtg

SEQ ID NO: 48738 - DNA, 25 bp, Probe Sequence
actggtacaagacaaaggagatcct

SEQ ID NO: 48739 - DNA, 25 bp, Probe Sequence
tgtggactggatgaacaaggtgatg

SEQ ID NO: 48740 - DNA, 25 bp, Probe Sequence
gtgtggactggatgaacaaggtgat

SEQ ID NO: 48741 - DNA, 25 bp, Probe Sequence
ggtgactggtacaagacaaaggaga

SEQ ID NO: 48742 - DNA, 25 bp, Probe Sequence
aggtgactggtacaagacaaaggag

SEQ ID NO: 48743 - DNA, 25 bp, Probe Sequence
gaggtgactggtacaagacaaagga

SEQ ID NO: 48744 - DNA, 25 bp, Probe Sequence
ggcaccaaactattcaacatctctg

SEQ ID NO: 48745 - DNA, 25 bp, Probe Sequence
aggcaccaaactattcaacatctct

SEQ ID NO: 48746 - DNA, 25 bp, Probe Sequence
caggcaccaaactattcaacatctc

SEQ ID NO: 48747 - DNA, 25 bp, Probe Sequence
ctcaggcaccaaactattcaacatc

SEQ ID NO: 48748 - DNA, 25 bp, Probe Sequence
tcaggcaccaaactattcaacatct

SEQ ID NO: 48749 - DNA, 25 bp, Probe Sequence
tgactggtacaagacaaaggagatc

SEQ ID NO: 48750 - DNA, 25 bp, Probe Sequence
caactcaggcaccaaactattcaac

SEQ ID NO: 48751 - DNA, 25 bp, Probe Sequence
actcaggcaccaaactattcaacat

SEQ ID NO: 48752 - DNA, 25 bp, Probe Sequence
gtgactggtacaagacaaaggagat

SEQ ID NO: 48753 - DNA, 25 bp, Probe Sequence
aactcaggcaccaaactattcaaca

SEQ ID NO: 48754 - DNA, 25 bp, Probe Sequence
gactggtacaagacaaaggagatcc

SEQ ID NO: 48755 - DNA, 25 bp, Probe Sequence
caccaaactattcaacatctctggc

SEQ ID NO: 48756 - DNA, 25 bp, Probe Sequence
gcaccaaactattcaacatctctgg

SEQ ID NO: 48757 - DNA, 25 bp, Probe Sequence
caagcagatagaaggccatacgatt

SEQ ID NO: 48758 - DNA, 25 bp, Probe Sequence
ccatgtggaatgctggacaataaag

SEQ ID NO: 48759 - DNA, 25 bp, Probe Sequence
ctggtacaagacaaaggagatcctg

SEQ ID NO: 48760 - DNA, 25 bp, Probe Sequence
gcaactcaggcaccaaactattcaa

SEQ ID NO: 48761 - DNA, 25 bp, Probe Sequence
cagatagaaggccatacgatttgtg

SEQ ID NO: 48762 - DNA, 25 bp, Probe Sequence
actggtacaagacaaaggagatcct

SEQ ID NO: 48763 - DNA, 25 bp, Probe Sequence
tgtggactggatgaacaaggtgatg

SEQ ID NO: 48764 - DNA, 25 bp, Probe Sequence
gtgtggactggatgaacaaggtgat

SEQ ID NO: 48765 - DNA, 25 bp, Probe Sequence
ggtgactggtacaagacaaaggaga

SEQ ID NO: 48766 - DNA, 25 bp, Probe Sequence
aggtgactggtacaagacaaaggag

SEQ ID NO: 48767 - DNA, 25 bp, Probe Sequence
gaggtgactggtacaagacaaagga

SEQ ID NO: 48768 - DNA, 25 bp, Probe Sequence
aatgaagaaggtgttatgtctggct

SEQ ID NO: 48769 - DNA, 25 bp, Probe Sequence
aagaaggtgttatgtctggctgtag

SEQ ID NO: 48770 - DNA, 25 bp, Probe Sequence
gaagaaggtgttatgtctggctgta

SEQ ID NO: 48771 - DNA, 25 bp, Probe Sequence
tataacattcacctggctgtcaact

SEQ ID NO: 48772 - DNA, 25 bp, Probe Sequence
gtataacattcacctggctgtcaac

SEQ ID NO: 48773 - DNA, 25 bp, Probe Sequence
tgtataacattcacctggctgtcaa

SEQ ID NO: 48774 - DNA, 25 bp, Probe Sequence
cttgtgtataacattcacctggctg

SEQ ID NO: 48775 - DNA, 25 bp, Probe Sequence
gacgatgagcttgtgtataacattc

SEQ ID NO: 48776 - DNA, 25 bp, Probe Sequence
agacgatgagcttgtgtataacatt

SEQ ID NO: 48777 - DNA, 25 bp, Probe Sequence
gttccaaatgaagaaggtgttatgt

SEQ ID NO: 48778 - DNA, 25 bp, Probe Sequence
caagttccaaatgaagaaggtgtta

SEQ ID NO: 48779 - DNA, 25 bp, Probe Sequence
ttccaaatgaagaaggtgttatgtc

SEQ ID NO: 48780 - DNA, 25 bp, Probe Sequence
agttccaaatgaagaaggtgttatg

SEQ ID NO: 48781 - DNA, 25 bp, Probe Sequence
acgatgagcttgtgtataacattca

SEQ ID NO: 48782 - DNA, 25 bp, Probe Sequence
atgaagaaggtgttatgtctggctg

SEQ ID NO: 48783 - DNA, 25 bp, Probe Sequence
caaatgaagaaggtgttatgtctgg

SEQ ID NO: 48784 - DNA, 25 bp, Probe Sequence
ccaaatgaagaaggtgttatgtctg

SEQ ID NO: 48785 - DNA, 25 bp, Probe Sequence
tccaaatgaagaaggtgttatgtct

SEQ ID NO: 48786 - DNA, 25 bp, Probe Sequence
gaagtccacaatcaagttccaaatg

SEQ ID NO: 48787 - DNA, 25 bp, Probe Sequence
cagacgatgagcttgtgtataacat

SEQ ID NO: 48788 - DNA, 25 bp, Probe Sequence
atgagcttgtgtataacattcacct

SEQ ID NO: 48789 - DNA, 25 bp, Probe Sequence
gatgagcttgtgtataacattcacc

SEQ ID NO: 48790 - DNA, 25 bp, Probe Sequence
cgatgagcttgtgtataacattcac

SEQ ID NO: 48791 - DNA, 25 bp, Probe Sequence
aatcaagttccaaatgaagaaggtg

SEQ ID NO: 48792 - DNA, 25 bp, Probe Sequence
acagtatctaacattaccattcacg

SEQ ID NO: 48793 - DNA, 25 bp, Probe Sequence
catcgtgaccaatgttacagtaatt

SEQ ID NO: 48794 - DNA, 25 bp, Probe Sequence
tcatcgtgaccaatgttacagtaat

SEQ ID NO: 48795 - DNA, 25 bp, Probe Sequence
atacgattcctcatatccaaggcta

SEQ ID NO: 48796 - DNA, 25 bp, Probe Sequence
aatacgattcctcatatccaaggct

SEQ ID NO: 48797 - DNA, 25 bp, Probe Sequence
tacgattcctcatatccaaggctac

SEQ ID NO: 48798 - DNA, 25 bp, Probe Sequence
ataaagcctgaatgatgagcctatg

SEQ ID NO: 48799 - DNA, 25 bp, Probe Sequence
cgattcctcatatccaaggctactt

SEQ ID NO: 48800 - DNA, 25 bp, Probe Sequence
cgtgaccaatgttacagtaatttct

SEQ ID NO: 48801 - DNA, 25 bp, Probe Sequence
tcgtgaccaatgttacagtaatttc

SEQ ID NO: 48802 - DNA, 25 bp, Probe Sequence
cataaagcctgaatgatgagcctat

SEQ ID NO: 48803 - DNA, 25 bp, Probe Sequence
cagtatctaacattaccattcacgt

SEQ ID NO: 48804 - DNA, 25 bp, Probe Sequence
atcgtgaccaatgttacagtaattt

SEQ ID NO: 48805 - DNA, 25 bp, Probe Sequence
atgtctccctgatctgaactatttg

SEQ ID NO: 48806 - DNA, 25 bp, Probe Sequence
ttacctaaattgtcctgaactttgt

SEQ ID NO: 48807 - DNA, 25 bp, Probe Sequence
ctccctgatctgaactatttgcttt

SEQ ID NO: 48808 - DNA, 25 bp, Probe Sequence
cctgatctgaactatttgctttctc

SEQ ID NO: 48809 - DNA, 25 bp, Probe Sequence
taaagcctgaatgatgagcctatgt

SEQ ID NO: 48810 - DNA, 25 bp, Probe Sequence
catgtctccctgatctgaactattt

SEQ ID NO: 48811 - DNA, 25 bp, Probe Sequence
ccctgatctgaactatttgctttct

SEQ ID NO: 48812 - DNA, 25 bp, Probe Sequence
tccctgatctgaactatttgctttc

SEQ ID NO: 48813 - DNA, 25 bp, Probe Sequence
acctaaattgtcctgaactttgtta

SEQ ID NO: 48814 - DNA, 25 bp, Probe Sequence
tacctaaattgtcctgaactttgtt

SEQ ID NO: 48815 - DNA, 25 bp, Probe Sequence
gagctgcatagatccagtaatgtac

SEQ ID NO: 48816 - DNA, 25 bp, Probe Sequence
aatgatgatgacctgtatggctaag

SEQ ID NO: 48817 - DNA, 25 bp, Probe Sequence
tacacagaagacaatgatgatgacc

SEQ ID NO: 48818 - DNA, 25 bp, Probe Sequence
caatgatgatgacctgtatggctaa

SEQ ID NO: 48819 - DNA, 25 bp, Probe Sequence
atacacagaagacaatgatgatgac

SEQ ID NO: 48820 - DNA, 25 bp, Probe Sequence
atgatgatgacctgtatggctaagt

SEQ ID NO: 48821 - DNA, 25 bp, Probe Sequence
caatgacattcggaagtatgagatg

SEQ ID NO: 48822 - DNA, 25 bp, Probe Sequence
acaatgacattcggaagtatgagat

SEQ ID NO: 48823 - DNA, 25 bp, Probe Sequence
gacaatgacattcggaagtatgaga

SEQ ID NO: 48824 - DNA, 25 bp, Probe Sequence
cagtgacaatgacattcggaagtat

SEQ ID NO: 48825 - DNA, 25 bp, Probe Sequence
tgacaatgacattcggaagtatgag

SEQ ID NO: 48826 - DNA, 25 bp, Probe Sequence
acacagaagacaatgatgatgacct

SEQ ID NO: 48827 - DNA, 25 bp, Probe Sequence
gaagacaatgatgatgacctgtatg

SEQ ID NO: 48828 - DNA, 25 bp, Probe Sequence
agaagacaatgatgatgacctgtat

SEQ ID NO: 48829 - DNA, 25 bp, Probe Sequence
gtgacaatgacattcggaagtatga

SEQ ID NO: 48830 - DNA, 25 bp, Probe Sequence
agtgacaatgacattcggaagtatg

SEQ ID NO: 48831 - DNA, 25 bp, Probe Sequence
aagacaatgatgatgacctgtatgg

SEQ ID NO: 48832 - DNA, 25 bp, Probe Sequence
cagaagacaatgatgatgacctgta

SEQ ID NO: 48833 - DNA, 25 bp, Probe Sequence
tgatgatgacctgtatggctaagtg

SEQ ID NO: 48834 - DNA, 25 bp, Probe Sequence
tatacacagaagacaatgatgatga

SEQ ID NO: 48835 - DNA, 25 bp, Probe Sequence
acaatgatgatgacctgtatggcta

SEQ ID NO: 48836 - DNA, 25 bp, Probe Sequence
cacagaagacaatgatgatgacctg

SEQ ID NO: 48837 - DNA, 25 bp, Probe Sequence
gatgatgacctgtatggctaagtgg

SEQ ID NO: 48838 - DNA, 25 bp, Probe Sequence
tcagtgacaatgacattcggaagta

SEQ ID NO: 48839 - DNA, 25 bp, Probe Sequence
cctatgccatttctgttgtagtttg

SEQ ID NO: 48840 - DNA, 25 bp, Probe Sequence
gcatataggagtcagttagaattgt

SEQ ID NO: 48841 - DNA, 25 bp, Probe Sequence
tgaatgtccagaaattgctaagaac

SEQ ID NO: 48842 - DNA, 25 bp, Probe Sequence
gttgaatgtccagaaattgctaaga

SEQ ID NO: 48843 - DNA, 25 bp, Probe Sequence
tgttgaatgtccagaaattgctaag

SEQ ID NO: 48844 - DNA, 25 bp, Probe Sequence
gttgttgaatgtccagaaattgcta

SEQ ID NO: 48845 - DNA, 25 bp, Probe Sequence
ttgttgaatgtccagaaattgctaa

SEQ ID NO: 48846 - DNA, 25 bp, Probe Sequence
ttgaatgtccagaaattgctaagaa

SEQ ID NO: 48847 - DNA, 25 bp, Probe Sequence
tgcatataggagtcagttagaattg

SEQ ID NO: 48848 - DNA, 25 bp, Probe Sequence
gctgcatataggagtcagttagaat

SEQ ID NO: 48849 - DNA, 25 bp, Probe Sequence
agaaattgctaagaacagtgccttt

SEQ ID NO: 48850 - DNA, 25 bp, Probe Sequence
aatgtccagaaattgctaagaacag

SEQ ID NO: 48851 - DNA, 25 bp, Probe Sequence
gaatgtccagaaattgctaagaaca

SEQ ID NO: 48852 - DNA, 25 bp, Probe Sequence
catgattccaactggctgcatatag

SEQ ID NO: 48853 - DNA, 25 bp, Probe Sequence
atgtccagaaattgctaagaacagt

SEQ ID NO: 48854 - DNA, 25 bp, Probe Sequence
cagaaattgctaagaacagtgcctt

SEQ ID NO: 48855 - DNA, 25 bp, Probe Sequence
tgtccagaaattgctaagaacagtg

SEQ ID NO: 48856 - DNA, 25 bp, Probe Sequence
ggctgcatataggagtcagttagaa

SEQ ID NO: 48857 - DNA, 25 bp, Probe Sequence
gtccagaaattgctaagaacagtgc

SEQ ID NO: 48858 - DNA, 25 bp, Probe Sequence
ctgcatataggagtcagttagaatt

SEQ ID NO: 48859 - DNA, 25 bp, Probe Sequence
cctttgcatcatttatcttgtggaa

SEQ ID NO: 48860 - DNA, 25 bp, Probe Sequence
atgattccaactggctgcatatagg

SEQ ID NO: 48861 - DNA, 25 bp, Probe Sequence
cgttgttgaatgtccagaaattgct

SEQ ID NO: 48862 - DNA, 25 bp, Probe Sequence
catataggagtcagttagaattgtt

SEQ ID NO: 48863 - DNA, 25 bp, Probe Sequence
ctggctgcatataggagtcagttag

SEQ ID NO: 48864 - DNA, 25 bp, Probe Sequence
gaagatgtggtcaggtttgaggttg

SEQ ID NO: 48865 - DNA, 25 bp, Probe Sequence
ttatcacaccatcgtggacttccat

SEQ ID NO: 48866 - DNA, 25 bp, Probe Sequence
agaagatgtggtcaggtttgaggtt

SEQ ID NO: 48867 - DNA, 25 bp, Probe Sequence
tatcacaccatcgtggacttccatg

SEQ ID NO: 48868 - DNA, 25 bp, Probe Sequence
cttatcacaccatcgtggacttcca

SEQ ID NO: 48869 - DNA, 25 bp, Probe Sequence
cagaagatgtggtcaggtttgaggt

SEQ ID NO: 48870 - DNA, 25 bp, Probe Sequence
ccttatcacaccatcgtggacttcc

SEQ ID NO: 48871 - DNA, 25 bp, Probe Sequence
acagaagatgtggtcaggtttgagg

SEQ ID NO: 48872 - DNA, 25 bp, Probe Sequence
aagatgtggtcaggtttgaggttgg

SEQ ID NO: 48873 - DNA, 25 bp, Probe Sequence
gactttctctctgcgtctgatggag

SEQ ID NO: 48874 - DNA, 25 bp, Probe Sequence
ctgactttctctctgcgtctgatgg

SEQ ID NO: 48875 - DNA, 25 bp, Probe Sequence
cccttatcacaccatcgtggacttc

SEQ ID NO: 48876 - DNA, 25 bp, Probe Sequence
gaatgcctccccttatcacaccatc

SEQ ID NO: 48877 - DNA, 25 bp, Probe Sequence
cacagaagatgtggtcaggtttgag

SEQ ID NO: 48878 - DNA, 25 bp, Probe Sequence
ctctgatggtcatggtcagcaaaga

SEQ ID NO: 48879 - DNA, 25 bp, Probe Sequence
caggtaccatggagctgagctatag

SEQ ID NO: 48880 - DNA, 25 bp, Probe Sequence
gacacagaagatgtggtcaggtttg

SEQ ID NO: 48881 - DNA, 25 bp, Probe Sequence
tctgatggtcatggtcagcaaagac

SEQ ID NO: 48882 - DNA, 25 bp, Probe Sequence
actctgatggtcatggtcagcaaag

SEQ ID NO: 48883 - DNA, 25 bp, Probe Sequence
acacagaagatgtggtcaggtttga

SEQ ID NO: 48884 - DNA, 25 bp, Probe Sequence
catggacacagaagatgtggtcagg

SEQ ID NO: 48885 - DNA, 25 bp, Probe Sequence
cactctgatggtcatggtcagcaaa

SEQ ID NO: 48886 - DNA, 25 bp, Probe Sequence
ggacacagaagatgtggtcaggttt

SEQ ID NO: 48887 - DNA, 25 bp, Probe Sequence
aggtaccatggagctgagctatagg

SEQ ID NO: 48888 - DNA, 25 bp, Probe Sequence
caatcgcttgaagaatatcactctg

SEQ ID NO: 48889 - DNA, 25 bp, Probe Sequence
gcttgaagaatatcactctggatga

SEQ ID NO: 48890 - DNA, 25 bp, Probe Sequence
aatcgcttgaagaatatcactctgg

SEQ ID NO: 48891 - DNA, 25 bp, Probe Sequence
cgcttgaagaatatcactctggatg

SEQ ID NO: 48892 - DNA, 25 bp, Probe Sequence
tcgcttgaagaatatcactctggat

SEQ ID NO: 48893 - DNA, 25 bp, Probe Sequence
atcgcttgaagaatatcactctgga

SEQ ID NO: 48894 - DNA, 25 bp, Probe Sequence
aagcacaccattaatccactatgat

SEQ ID NO: 48895 - DNA, 25 bp, Probe Sequence
taattacttctggcaagatgttctg

SEQ ID NO: 48896 - DNA, 25 bp, Probe Sequence
accttcattaattacttctggcaag

SEQ ID NO: 48897 - DNA, 25 bp, Probe Sequence
agcacaccattaatccactatgatc

SEQ ID NO: 48898 - DNA, 25 bp, Probe Sequence
ccttcattaattacttctggcaaga

SEQ ID NO: 48899 - DNA, 25 bp, Probe Sequence
ctaccttcattaattacttctggca

SEQ ID NO: 48900 - DNA, 25 bp, Probe Sequence
tctaccttcattaattacttctggc

SEQ ID NO: 48901 - DNA, 25 bp, Probe Sequence
ttaattacttctggcaagatgttct

SEQ ID NO: 48902 - DNA, 25 bp, Probe Sequence
tcattaattacttctggcaagatgt

SEQ ID NO: 48903 - DNA, 25 bp, Probe Sequence
taccttcattaattacttctggcaa

SEQ ID NO: 48904 - DNA, 25 bp, Probe Sequence
cgaaagaatggaagcgaataaagtt

SEQ ID NO: 48905 - DNA, 25 bp, Probe Sequence
ttctgttcaactttatatcacggga

SEQ ID NO: 48906 - DNA, 25 bp, Probe Sequence
cttctgttcaactttatatcacggg

SEQ ID NO: 48907 - DNA, 25 bp, Probe Sequence
gcttctgttcaactttatatcacgg

SEQ ID NO: 48908 - DNA, 25 bp, Probe Sequence
caactttatatcacgggaatggatg

SEQ ID NO: 48909 - DNA, 25 bp, Probe Sequence
tcaactttatatcacgggaatggat

SEQ ID NO: 48910 - DNA, 25 bp, Probe Sequence
aactttatatcacgggaatggatgg

SEQ ID NO: 48911 - DNA, 25 bp, Probe Sequence
ttcaactttatatcacgggaatgga

SEQ ID NO: 48912 - DNA, 25 bp, Probe Sequence
tatgtagtcaccattccagaacctc

SEQ ID NO: 48913 - DNA, 25 bp, Probe Sequence
gtatgtagtcaccattccagaacct

SEQ ID NO: 48914 - DNA, 25 bp, Probe Sequence
tgtatgtagtcaccattccagaacc

SEQ ID NO: 48915 - DNA, 25 bp, Probe Sequence
gtgtatgtagtcaccattccagaac

SEQ ID NO: 48916 - DNA, 25 bp, Probe Sequence
tagtcaccattccagaacctctctt

SEQ ID NO: 48917 - DNA, 25 bp, Probe Sequence
atgtctcctaagtttccctgtctaa

SEQ ID NO: 48918 - DNA, 25 bp, Probe Sequence
tgtctcctaagtttccctgtctaaa

SEQ ID NO: 48919 - DNA, 25 bp, Probe Sequence
gatgtctcctaagtttccctgtcta

SEQ ID NO: 48920 - DNA, 25 bp, Probe Sequence
caggataagagaccacttagccttc

SEQ ID NO: 48921 - DNA, 25 bp, Probe Sequence
atgtagtcaccattccagaacctct

SEQ ID NO: 48922 - DNA, 25 bp, Probe Sequence
aagaagcgtgtatgtagtcaccatt

SEQ ID NO: 48923 - DNA, 25 bp, Probe Sequence
cgtgtatgtagtcaccattccagaa

SEQ ID NO: 48924 - DNA, 25 bp, Probe Sequence
gtagtcaccattccagaacctctct

SEQ ID NO: 48925 - DNA, 25 bp, Probe Sequence
agaagcgtgtatgtagtcaccattc

SEQ ID NO: 48926 - DNA, 25 bp, Probe Sequence
taagcctcatccttaaagagaagtc

SEQ ID NO: 48927 - DNA, 25 bp, Probe Sequence
cgaaataagcctcatccttaaagag

SEQ ID NO: 48928 - DNA, 25 bp, Probe Sequence
aagcctcatccttaaagagaagtca

SEQ ID NO: 48929 - DNA, 25 bp, Probe Sequence
ataagcctcatccttaaagagaagt

SEQ ID NO: 48930 - DNA, 25 bp, Probe Sequence
ttctaagatgcacaacacttatcaa

SEQ ID NO: 48931 - DNA, 25 bp, Probe Sequence
tgtagtcaccattccagaacctctc

SEQ ID NO: 48932 - DNA, 25 bp, Probe Sequence
acatcagtgtaaattcaggcttcag

SEQ ID NO: 48933 - DNA, 25 bp, Probe Sequence
gcgaaataagcctcatccttaaaga

SEQ ID NO: 48934 - DNA, 25 bp, Probe Sequence
gactttatacccttagctttcccat

SEQ ID NO: 48935 - DNA, 25 bp, Probe Sequence
tgcgaaataagcctcatccttaaag

SEQ ID NO: 48936 - DNA, 25 bp, Probe Sequence
ctaagacacagggagtatttcagag

SEQ ID NO: 48937 - DNA, 25 bp, Probe Sequence
taagacacagggagtatttcagagg

SEQ ID NO: 48938 - DNA, 25 bp, Probe Sequence
aactaagacacagggagtatttcag

SEQ ID NO: 48939 - DNA, 25 bp, Probe Sequence
gaactaagacacagggagtatttca

SEQ ID NO: 48940 - DNA, 25 bp, Probe Sequence
tgaactaagacacagggagtatttc

SEQ ID NO: 48941 - DNA, 25 bp, Probe Sequence
actaagacacagggagtatttcaga

SEQ ID NO: 48942 - DNA, 25 bp, Probe Sequence
ctgaactaagacacagggagtattt

SEQ ID NO: 48943 - DNA, 25 bp, Probe Sequence
ttctcgacaataaagatattccgtg

SEQ ID NO: 48944 - DNA, 25 bp, Probe Sequence
tctcgacaataaagatattccgtgt

SEQ ID NO: 48945 - DNA, 25 bp, Probe Sequence
tttctcgacaataaagatattccgt

SEQ ID NO: 48946 - DNA, 25 bp, Probe Sequence
ataaagatattccgtgtcttcaccc

SEQ ID NO: 48947 - DNA, 25 bp, Probe Sequence
aataaagatattccgtgtcttcacc

SEQ ID NO: 48948 - DNA, 25 bp, Probe Sequence
gaaatcttcctcgtcagtggtcaag

SEQ ID NO: 48949 - DNA, 25 bp, Probe Sequence
acaataaagatattccgtgtcttca

SEQ ID NO: 48950 - DNA, 25 bp, Probe Sequence
caataaagatattccgtgtcttcac

SEQ ID NO: 48951 - DNA, 25 bp, Probe Sequence
aagacacagggagtatttcagaggc

SEQ ID NO: 48952 - DNA, 25 bp, Probe Sequence
tggtcaaggtgtgtcatccatacag

SEQ ID NO: 48953 - DNA, 25 bp, Probe Sequence
agtggtcaaggtgtgtcatccatac

SEQ ID NO: 48954 - DNA, 25 bp, Probe Sequence
cagtggtcaaggtgtgtcatccata

SEQ ID NO: 48955 - DNA, 25 bp, Probe Sequence
tgaaatcttcctcgtcagtggtcaa

SEQ ID NO: 48956 - DNA, 25 bp, Probe Sequence
gtggtcaaggtgtgtcatccataca

SEQ ID NO: 48957 - DNA, 25 bp, Probe Sequence
tcaaggtgtgtcatccatacagctc

SEQ ID NO: 48958 - DNA, 25 bp, Probe Sequence
agtgaaatcttcctcgtcagtggtc

SEQ ID NO: 48959 - DNA, 25 bp, Probe Sequence
gagtgaaatcttcctcgtcagtggt

SEQ ID NO: 48960 - DNA, 25 bp, Probe Sequence
gtgtgtgtgtgtaaggtgtcttata

SEQ ID NO: 48961 - DNA, 25 bp, Probe Sequence
tgtgtgtgtgtaaggtgtcttataa

SEQ ID NO: 48962 - DNA, 25 bp, Probe Sequence
ctatgtgaggatgtggaagagacag

SEQ ID NO: 48963 - DNA, 25 bp, Probe Sequence
tgtgtgtgtgtgtaaggtgtcttat

SEQ ID NO: 48964 - DNA, 25 bp, Probe Sequence
gtgtgtgtgtaaggtgtcttataat

SEQ ID NO: 48965 - DNA, 25 bp, Probe Sequence
tcagaatcactcctctcaaatatgc

SEQ ID NO: 48966 - DNA, 25 bp, Probe Sequence
tctatgtgaggatgtggaagagaca

SEQ ID NO: 48967 - DNA, 25 bp, Probe Sequence
tgtgtgtgtaaggtgtcttataatc

SEQ ID NO: 48968 - DNA, 25 bp, Probe Sequence
tgctattggattaaaggaaactacc

SEQ ID NO: 48969 - DNA, 25 bp, Probe Sequence
tgtcagaatcactcctctcaaatat

SEQ ID NO: 48970 - DNA, 25 bp, Probe Sequence
ctgtcagaatcactcctctcaaata

SEQ ID NO: 48971 - DNA, 25 bp, Probe Sequence
gcaagatgactggctttactatttg

SEQ ID NO: 48972 - DNA, 25 bp, Probe Sequence
catttaagcagtttgaaggcatact

SEQ ID NO: 48973 - DNA, 25 bp, Probe Sequence
tcatttaagcagtttgaaggcatac

SEQ ID NO: 48974 - DNA, 25 bp, Probe Sequence
gtcagaatcactcctctcaaatatg

SEQ ID NO: 48975 - DNA, 25 bp, Probe Sequence
tttaagcagtttgaaggcatacttt

SEQ ID NO: 48976 - DNA, 25 bp, Probe Sequence
gtgtgtgtaaggtgtcttataatct

SEQ ID NO: 48977 - DNA, 25 bp, Probe Sequence
ggtctatgtgaggatgtggaagaga

SEQ ID NO: 48978 - DNA, 25 bp, Probe Sequence
caagatgactggctttactatttga

SEQ ID NO: 48979 - DNA, 25 bp, Probe Sequence
atttaagcagtttgaaggcatactt

SEQ ID NO: 48980 - DNA, 25 bp, Probe Sequence
agatgactggctttactatttgaaa

SEQ ID NO: 48981 - DNA, 25 bp, Probe Sequence
atcatttaagcagtttgaaggcata

SEQ ID NO: 48982 - DNA, 25 bp, Probe Sequence
tatcatttaagcagtttgaaggcat

SEQ ID NO: 48983 - DNA, 25 bp, Probe Sequence
atatcatttaagcagtttgaaggca

SEQ ID NO: 48984 - DNA, 25 bp, Probe Sequence
aaccatgatctgatgcttcttcaac

SEQ ID NO: 48985 - DNA, 25 bp, Probe Sequence
caaccatgatctgatgcttcttcaa

SEQ ID NO: 48986 - DNA, 25 bp, Probe Sequence
ccatgatctgatgcttcttcaactg

SEQ ID NO: 48987 - DNA, 25 bp, Probe Sequence
cacaaccatgatctgatgcttcttc

SEQ ID NO: 48988 - DNA, 25 bp, Probe Sequence
tctcccttaataaactcacaactct

SEQ ID NO: 48989 - DNA, 25 bp, Probe Sequence
gaccacagcctacagaataaagatg

SEQ ID NO: 48990 - DNA, 25 bp, Probe Sequence
agaccacagcctacagaataaagat

SEQ ID NO: 48991 - DNA, 25 bp, Probe Sequence
ctcccttaataaactcacaactctc

SEQ ID NO: 48992 - DNA, 25 bp, Probe Sequence
atcaagaagatcataggcagcaagg

SEQ ID NO: 48993 - DNA, 25 bp, Probe Sequence
accatgatctgatgcttcttcaact

SEQ ID NO: 48994 - DNA, 25 bp, Probe Sequence
cagaagaagtgtgaggatgcttacc

SEQ ID NO: 48995 - DNA, 25 bp, Probe Sequence
ccagaagaagtgtgaggatgcttac

SEQ ID NO: 48996 - DNA, 25 bp, Probe Sequence
acaaccatgatctgatgcttcttca

SEQ ID NO: 48997 - DNA, 25 bp, Probe Sequence
atctcccttaataaactcacaactc

SEQ ID NO: 48998 - DNA, 25 bp, Probe Sequence
gagaccacagcctacagaataaaga

SEQ ID NO: 48999 - DNA, 25 bp, Probe Sequence
catgatctgatgcttcttcaactgc

SEQ ID NO: 49000 - DNA, 25 bp, Probe Sequence
ctggactggatcaagaagatcatag

SEQ ID NO: 49001 - DNA, 25 bp, Probe Sequence
gatctcccttaataaactcacaact

SEQ ID NO: 49002 - DNA, 25 bp, Probe Sequence
tggactggatcaagaagatcatagg

SEQ ID NO: 49003 - DNA, 25 bp, Probe Sequence
cctggactggatcaagaagatcata

SEQ ID NO: 49004 - DNA, 25 bp, Probe Sequence
ggagaccacagcctacagaataaag

SEQ ID NO: 49005 - DNA, 25 bp, Probe Sequence
gatcaagaagatcataggcagcaag

SEQ ID NO: 49006 - DNA, 25 bp, Probe Sequence
ccacaaccatgatctgatgcttctt

SEQ ID NO: 49007 - DNA, 25 bp, Probe Sequence
gctacctggactggatcaagaagat

SEQ ID NO: 49008 - DNA, 25 bp, Probe Sequence
ttagagttggtcttattgccttgaa

SEQ ID NO: 49009 - DNA, 25 bp, Probe Sequence
tagagttggtcttattgccttgaag

SEQ ID NO: 49010 - DNA, 25 bp, Probe Sequence
attcattaagcagttggtctctgat

SEQ ID NO: 49011 - DNA, 25 bp, Probe Sequence
tggtcacattacttcaggtacaaga

SEQ ID NO: 49012 - DNA, 25 bp, Probe Sequence
gtggtcacattacttcaggtacaag

SEQ ID NO: 49013 - DNA, 25 bp, Probe Sequence
attaagcagttggtctctgatgaag

SEQ ID NO: 49014 - DNA, 25 bp, Probe Sequence
cattaagcagttggtctctgatgaa

SEQ ID NO: 49015 - DNA, 25 bp, Probe Sequence
ttcattaagcagttggtctctgatg

SEQ ID NO: 49016 - DNA, 25 bp, Probe Sequence
cattcattaagcagttggtctctga

SEQ ID NO: 49017 - DNA, 25 bp, Probe Sequence
cattacttcaggtacaagactgtca

SEQ ID NO: 49018 - DNA, 25 bp, Probe Sequence
acattacttcaggtacaagactgtc

SEQ ID NO: 49019 - DNA, 25 bp, Probe Sequence
tcacattacttcaggtacaagactg

SEQ ID NO: 49020 - DNA, 25 bp, Probe Sequence
gtcacattacttcaggtacaagact

SEQ ID NO: 49021 - DNA, 25 bp, Probe Sequence
cacattacttcaggtacaagactgt

SEQ ID NO: 49022 - DNA, 25 bp, Probe Sequence
attacttcaggtacaagactgtcat

SEQ ID NO: 49023 - DNA, 25 bp, Probe Sequence
tatacaggacagaatatggactgaa

SEQ ID NO: 49024 - DNA, 25 bp, Probe Sequence
agcagttggtctctgatgaagataa

SEQ ID NO: 49025 - DNA, 25 bp, Probe Sequence
aagcagttggtctctgatgaagata

SEQ ID NO: 49026 - DNA, 25 bp, Probe Sequence
taagcagttggtctctgatgaagat

SEQ ID NO: 49027 - DNA, 25 bp, Probe Sequence
ttacttcaggtacaagactgtcatg

SEQ ID NO: 49028 - DNA, 25 bp, Probe Sequence
ttaagcagttggtctctgatgaaga

SEQ ID NO: 49029 - DNA, 25 bp, Probe Sequence
gatgaagaggaactgccagaagatt

SEQ ID NO: 49030 - DNA, 25 bp, Probe Sequence
atatacaggacagaatatggactga

SEQ ID NO: 49031 - DNA, 25 bp, Probe Sequence
ggtcacattacttcaggtacaagac

SEQ ID NO: 49032 - DNA, 25 bp, Probe Sequence
ctcacagttattaaccagactcaga

SEQ ID NO: 49033 - DNA, 25 bp, Probe Sequence
tctcacagttattaaccagactcag

SEQ ID NO: 49034 - DNA, 25 bp, Probe Sequence
tcacagttattaaccagactcagaa

SEQ ID NO: 49035 - DNA, 25 bp, Probe Sequence
ttctcacagttattaaccagactca

SEQ ID NO: 49036 - DNA, 25 bp, Probe Sequence
gttctcacagttattaaccagactc

SEQ ID NO: 49037 - DNA, 25 bp, Probe Sequence
tgttctcacagttattaaccagact

SEQ ID NO: 49038 - DNA, 25 bp, Probe Sequence
gtgttctcacagttattaaccagac

SEQ ID NO: 49039 - DNA, 25 bp, Probe Sequence
cgtgttctcacagttattaaccaga

SEQ ID NO: 49040 - DNA, 25 bp, Probe Sequence
ccgtgttctcacagttattaaccag

SEQ ID NO: 49041 - DNA, 25 bp, Probe Sequence
cacagttattaaccagactcagaaa

SEQ ID NO: 49042 - DNA, 25 bp, Probe Sequence
acagttattaaccagactcagaaag

SEQ ID NO: 49043 - DNA, 25 bp, Probe Sequence
cagttattaaccagactcagaaaga

SEQ ID NO: 49044 - DNA, 25 bp, Probe Sequence
ctcaggaaattctacaagggcaaga

SEQ ID NO: 49045 - DNA, 25 bp, Probe Sequence
agttattaaccagactcagaaagaa

SEQ ID NO: 49046 - DNA, 25 bp, Probe Sequence
ggaaattctacaagggcaagaagta

SEQ ID NO: 49047 - DNA, 25 bp, Probe Sequence
aattctacaagggcaagaagtacaa

SEQ ID NO: 49048 - DNA, 25 bp, Probe Sequence
aaattctacaagggcaagaagtaca

SEQ ID NO: 49049 - DNA, 25 bp, Probe Sequence
gaaattctacaagggcaagaagtac

SEQ ID NO: 49050 - DNA, 25 bp, Probe Sequence
attctacaagggcaagaagtacaag

SEQ ID NO: 49051 - DNA, 25 bp, Probe Sequence
taaccagactcagaaagaaaacctc

SEQ ID NO: 49052 - DNA, 25 bp, Probe Sequence
gttattaaccagactcagaaagaaa

SEQ ID NO: 49053 - DNA, 25 bp, Probe Sequence
ttaaccagactcagaaagaaaacct

SEQ ID NO: 49054 - DNA, 25 bp, Probe Sequence
attgcccgtgttctcacagttatta

SEQ ID NO: 49055 - DNA, 25 bp, Probe Sequence
ttgcccgtgttctcacagttattaa

SEQ ID NO: 49056 - DNA, 25 bp, Probe Sequence
ttggttgtgtaatcctttgtgaaat

SEQ ID NO: 49057 - DNA, 25 bp, Probe Sequence
attggttgtgtaatcctttgtgaaa

SEQ ID NO: 49058 - DNA, 25 bp, Probe Sequence
gctttgtgcttagagaatgtatgtg

SEQ ID NO: 49059 - DNA, 25 bp, Probe Sequence
ctttgtgcttagagaatgtatgtgt

SEQ ID NO: 49060 - DNA, 25 bp, Probe Sequence
aggtatttgatagggtattgagtgt

SEQ ID NO: 49061 - DNA, 25 bp, Probe Sequence
ttgtgcttagagaatgtatgtgttt

SEQ ID NO: 49062 - DNA, 25 bp, Probe Sequence
tttgtgcttagagaatgtatgtgtt

SEQ ID NO: 49063 - DNA, 25 bp, Probe Sequence
ttgatgacattagattagtagttgc

SEQ ID NO: 49064 - DNA, 25 bp, Probe Sequence
tattggttgtgtaatcctttgtgaa

SEQ ID NO: 49065 - DNA, 25 bp, Probe Sequence
ttattggttgtgtaatcctttgtga

SEQ ID NO: 49066 - DNA, 25 bp, Probe Sequence
tggttgtgtaatcctttgtgaaata

SEQ ID NO: 49067 - DNA, 25 bp, Probe Sequence
tctgtcagtatgggaggatataaac

SEQ ID NO: 49068 - DNA, 25 bp, Probe Sequence
aggctttgggtacttagttctaaat

SEQ ID NO: 49069 - DNA, 25 bp, Probe Sequence
aaggctttgggtacttagttctaaa

SEQ ID NO: 49070 - DNA, 25 bp, Probe Sequence
gaaggctttgggtacttagttctaa

SEQ ID NO: 49071 - DNA, 25 bp, Probe Sequence
atggtaacatatacatagccacatt

SEQ ID NO: 49072 - DNA, 25 bp, Probe Sequence
ctgtcagtatgggaggatataaact

SEQ ID NO: 49073 - DNA, 25 bp, Probe Sequence
ggctttgggtacttagttctaaatt

SEQ ID NO: 49074 - DNA, 25 bp, Probe Sequence
ctttaagcagagagttatttgtgac

SEQ ID NO: 49075 - DNA, 25 bp, Probe Sequence
tgtctttaagcagagagttatttgt

SEQ ID NO: 49076 - DNA, 25 bp, Probe Sequence
atctgtcagtatgggaggatataaa

SEQ ID NO: 49077 - DNA, 25 bp, Probe Sequence
tgaaggctttgggtacttagttcta

SEQ ID NO: 49078 - DNA, 25 bp, Probe Sequence
tctttaagcagagagttatttgtga

SEQ ID NO: 49079 - DNA, 25 bp, Probe Sequence
gtctttaagcagagagttatttgtg

SEQ ID NO: 49080 - DNA, 25 bp, Probe Sequence
cataagttggcattctctcacattc

SEQ ID NO: 49081 - DNA, 25 bp, Probe Sequence
tctgatactggtggcttatgttatt

SEQ ID NO: 49082 - DNA, 25 bp, Probe Sequence
ttctgatactggtggcttatgttat

SEQ ID NO: 49083 - DNA, 25 bp, Probe Sequence
tcataagttggcattctctcacatt

SEQ ID NO: 49084 - DNA, 25 bp, Probe Sequence
tatcttggtcataagttggcattct

SEQ ID NO: 49085 - DNA, 25 bp, Probe Sequence
ataagttggcattctctcacattcc

SEQ ID NO: 49086 - DNA, 25 bp, Probe Sequence
gtcataagttggcattctctcacat

SEQ ID NO: 49087 - DNA, 25 bp, Probe Sequence
ttatcttggtcataagttggcattc

SEQ ID NO: 49088 - DNA, 25 bp, Probe Sequence
atcttggtcataagttggcattctc

SEQ ID NO: 49089 - DNA, 25 bp, Probe Sequence
ctgatactggtggcttatgttatta

SEQ ID NO: 49090 - DNA, 25 bp, Probe Sequence
cttggtcataagttggcattctctc

SEQ ID NO: 49091 - DNA, 25 bp, Probe Sequence
acatcgctcaagttgataatctctt

SEQ ID NO: 49092 - DNA, 25 bp, Probe Sequence
aacatcgctcaagttgataatctct

SEQ ID NO: 49093 - DNA, 25 bp, Probe Sequence
tcttggtcataagttggcattctct

SEQ ID NO: 49094 - DNA, 25 bp, Probe Sequence
cagataggaaggagcagacattaat

SEQ ID NO: 49095 - DNA, 25 bp, Probe Sequence
gcagataggaaggagcagacattaa

SEQ ID NO: 49096 - DNA, 25 bp, Probe Sequence
gtaacatcgctcaagttgataatct

SEQ ID NO: 49097 - DNA, 25 bp, Probe Sequence
agtaacatcgctcaagttgataatc

SEQ ID NO: 49098 - DNA, 25 bp, Probe Sequence
ttggtcataagttggcattctctca

SEQ ID NO: 49099 - DNA, 25 bp, Probe Sequence
agaactgatgttgaggaaggtgtag

SEQ ID NO: 49100 - DNA, 25 bp, Probe Sequence
tgatactggtggcttatgttattaa

SEQ ID NO: 49101 - DNA, 25 bp, Probe Sequence
taacatcgctcaagttgataatctc

SEQ ID NO: 49102 - DNA, 25 bp, Probe Sequence
aagtaacatcgctcaagttgataat

SEQ ID NO: 49103 - DNA, 25 bp, Probe Sequence
gatacaacagctccactcatagatt

SEQ ID NO: 49104 - DNA, 25 bp, Probe Sequence
ttatgaatcgtaggactgctgtgaa

SEQ ID NO: 49105 - DNA, 25 bp, Probe Sequence
tatgaatcgtaggactgctgtgaag

SEQ ID NO: 49106 - DNA, 25 bp, Probe Sequence
tatgatgtttgagtcgggaagtaaa

SEQ ID NO: 49107 - DNA, 25 bp, Probe Sequence
ttggagttgtaatgtttggaaatgg

SEQ ID NO: 49108 - DNA, 25 bp, Probe Sequence
gctggaagacatttatgaatcgtag

SEQ ID NO: 49109 - DNA, 25 bp, Probe Sequence
ctatgatgtttgagtcgggaagtaa

SEQ ID NO: 49110 - DNA, 25 bp, Probe Sequence
tggaagacatttatgaatcgtagga

SEQ ID NO: 49111 - DNA, 25 bp, Probe Sequence
gacatttatgaatcgtaggactgct

SEQ ID NO: 49112 - DNA, 25 bp, Probe Sequence
agacatttatgaatcgtaggactgc

SEQ ID NO: 49113 - DNA, 25 bp, Probe Sequence
ggaagacatttatgaatcgtaggac

SEQ ID NO: 49114 - DNA, 25 bp, Probe Sequence
ctggaagacatttatgaatcgtagg

SEQ ID NO: 49115 - DNA, 25 bp, Probe Sequence
atttatgaatcgtaggactgctgtg

SEQ ID NO: 49116 - DNA, 25 bp, Probe Sequence
ggctggaagacatttatgaatcgta

SEQ ID NO: 49117 - DNA, 25 bp, Probe Sequence
catttatgaatcgtaggactgctgt

SEQ ID NO: 49118 - DNA, 25 bp, Probe Sequence
acatttatgaatcgtaggactgctg

SEQ ID NO: 49119 - DNA, 25 bp, Probe Sequence
tttggagttgtaatgtttggaaatg

SEQ ID NO: 49120 - DNA, 25 bp, Probe Sequence
aagacatttatgaatcgtaggactg

SEQ ID NO: 49121 - DNA, 25 bp, Probe Sequence
gagccgcttacaagaaataaatgat

SEQ ID NO: 49122 - DNA, 25 bp, Probe Sequence
agccgcttacaagaaataaatgatg

SEQ ID NO: 49123 - DNA, 25 bp, Probe Sequence
gaagacatttatgaatcgtaggact

SEQ ID NO: 49124 - DNA, 25 bp, Probe Sequence
tggagttgtaatgtttggaaatggg

SEQ ID NO: 49125 - DNA, 25 bp, Probe Sequence
atggctggaagacatttatgaatcg

SEQ ID NO: 49126 - DNA, 25 bp, Probe Sequence
tttatgaatcgtaggactgctgtga

SEQ ID NO: 49127 - DNA, 25 bp, Probe Sequence
gccgcttacaagaaataaatgatgt

SEQ ID NO: 49128 - DNA, 25 bp, Probe Sequence
atcattaagaagcaaccagtagagg

SEQ ID NO: 49129 - DNA, 25 bp, Probe Sequence
ggatcattaagaagcaaccagtaga

SEQ ID NO: 49130 - DNA, 25 bp, Probe Sequence
gatcattaagaagcaaccagtagag

SEQ ID NO: 49131 - DNA, 25 bp, Probe Sequence
gtctgtcacctggatcattaagaag

SEQ ID NO: 49132 - DNA, 25 bp, Probe Sequence
agtctgtcacctggatcattaagaa

SEQ ID NO: 49133 - DNA, 25 bp, Probe Sequence
gagtctgtcacctggatcattaaga

SEQ ID NO: 49134 - DNA, 25 bp, Probe Sequence
gtcacctggatcattaagaagcaac

SEQ ID NO: 49135 - DNA, 25 bp, Probe Sequence
tgtcacctggatcattaagaagcaa

SEQ ID NO: 49136 - DNA, 25 bp, Probe Sequence
tggatcattaagaagcaaccagtag

SEQ ID NO: 49137 - DNA, 25 bp, Probe Sequence
tcattaagaagcaaccagtagaggt

SEQ ID NO: 49138 - DNA, 25 bp, Probe Sequence
ctgtcacctggatcattaagaagca

SEQ ID NO: 49139 - DNA, 25 bp, Probe Sequence
tctgtcacctggatcattaagaagc

SEQ ID NO: 49140 - DNA, 25 bp, Probe Sequence
tcacctggatcattaagaagcaacc

SEQ ID NO: 49141 - DNA, 25 bp, Probe Sequence
cgagtctgtcacctggatcattaag

SEQ ID NO: 49142 - DNA, 25 bp, Probe Sequence
tagtggatactttgccgtcaattaa

SEQ ID NO: 49143 - DNA, 25 bp, Probe Sequence
ttagtggatactttgccgtcaatta

SEQ ID NO: 49144 - DNA, 25 bp, Probe Sequence
atggtttggctgtgataggagtatt

SEQ ID NO: 49145 - DNA, 25 bp, Probe Sequence
aatggtttggctgtgataggagtat

SEQ ID NO: 49146 - DNA, 25 bp, Probe Sequence
attagtggatactttgccgtcaatt

SEQ ID NO: 49147 - DNA, 25 bp, Probe Sequence
aattagtggatactttgccgtcaat

SEQ ID NO: 49148 - DNA, 25 bp, Probe Sequence
aaattagtggatactttgccgtcaa

SEQ ID NO: 49149 - DNA, 25 bp, Probe Sequence
tggtttggctgtgataggagtattt

SEQ ID NO: 49150 - DNA, 25 bp, Probe Sequence
aaatggtttggctgtgataggagta

SEQ ID NO: 49151 - DNA, 25 bp, Probe Sequence
agaaattagtggatactttgccgtc

SEQ ID NO: 49152 - DNA, 25 bp, Probe Sequence
caataaacagttgatctcgtgcata

SEQ ID NO: 49153 - DNA, 25 bp, Probe Sequence
tcaataaacagttgatctcgtgcat

SEQ ID NO: 49154 - DNA, 25 bp, Probe Sequence
aatcaataaacagttgatctcgtgc

SEQ ID NO: 49155 - DNA, 25 bp, Probe Sequence
atcaataaacagttgatctcgtgca

SEQ ID NO: 49156 - DNA, 25 bp, Probe Sequence
gaagttctagtattctggatcaccg

SEQ ID NO: 49157 - DNA, 25 bp, Probe Sequence
cgaagttctagtattctggatcacc

SEQ ID NO: 49158 - DNA, 25 bp, Probe Sequence
aagttctagtattctggatcaccgt

SEQ ID NO: 49159 - DNA, 25 bp, Probe Sequence
tatcattcatggcagattgttagtg

SEQ ID NO: 49160 - DNA, 25 bp, Probe Sequence
cttcttatcattcatggcagattgt

SEQ ID NO: 49161 - DNA, 25 bp, Probe Sequence
gcttcttatcattcatggcagattg

SEQ ID NO: 49162 - DNA, 25 bp, Probe Sequence
agttctagtattctggatcaccgtg

SEQ ID NO: 49163 - DNA, 25 bp, Probe Sequence
ttcttatcattcatggcagattgtt

SEQ ID NO: 49164 - DNA, 25 bp, Probe Sequence
ttatcattcatggcagattgttagt

SEQ ID NO: 49165 - DNA, 25 bp, Probe Sequence
tcgaagttctagtattctggatcac

SEQ ID NO: 49166 - DNA, 25 bp, Probe Sequence
ttctagtattctggatcaccgtgaa

SEQ ID NO: 49167 - DNA, 25 bp, Probe Sequence
cttatcattcatggcagattgttag

SEQ ID NO: 49168 - DNA, 25 bp, Probe Sequence
tcttatcattcatggcagattgtta

SEQ ID NO: 49169 - DNA, 25 bp, Probe Sequence
gaatgacaccatcttccatgcttac

SEQ ID NO: 49170 - DNA, 25 bp, Probe Sequence
tgatgtaacctggaaactatgcttt

SEQ ID NO: 49171 - DNA, 25 bp, Probe Sequence
ttgatgtaacctggaaactatgctt

SEQ ID NO: 49172 - DNA, 25 bp, Probe Sequence
cacttgatgtaacctggaaactatg

SEQ ID NO: 49173 - DNA, 25 bp, Probe Sequence
tctagtattctggatcaccgtgaag

SEQ ID NO: 49174 - DNA, 25 bp, Probe Sequence
agaatgacaccatcttccatgctta

SEQ ID NO: 49175 - DNA, 25 bp, Probe Sequence
cttgatgtaacctggaaactatgct

SEQ ID NO: 49176 - DNA, 25 bp, Probe Sequence
tcacttgatgtaacctggaaactat

SEQ ID NO: 49177 - DNA, 25 bp, Probe Sequence
gttctagtattctggatcaccgtga

SEQ ID NO: 49178 - DNA, 25 bp, Probe Sequence
acttgatgtaacctggaaactatgc

SEQ ID NO: 49179 - DNA, 25 bp, Probe Sequence
gatgtaacctggaaactatgcttta

SEQ ID NO: 49180 - DNA, 25 bp, Probe Sequence
atggtctgttatatgttgttggagg

SEQ ID NO: 49181 - DNA, 25 bp, Probe Sequence
gaaggaggatgaagtaatgtgtgtt

SEQ ID NO: 49182 - DNA, 25 bp, Probe Sequence
ttgtgaaggaggatgaagtaatgtg

SEQ ID NO: 49183 - DNA, 25 bp, Probe Sequence
gaggatgaagtaatgtgtgttcttg

SEQ ID NO: 49184 - DNA, 25 bp, Probe Sequence
aatggtctgttatatgttgttggag

SEQ ID NO: 49185 - DNA, 25 bp, Probe Sequence
aggatgaagtaatgtgtgttcttgt

SEQ ID NO: 49186 - DNA, 25 bp, Probe Sequence
ggaggatgaagtaatgtgtgttctt

SEQ ID NO: 49187 - DNA, 25 bp, Probe Sequence
aaggaggatgaagtaatgtgtgttc

SEQ ID NO: 49188 - DNA, 25 bp, Probe Sequence
ggatgaagtaatgtgtgttcttgta

SEQ ID NO: 49189 - DNA, 25 bp, Probe Sequence
gtgaaggaggatgaagtaatgtgtg

SEQ ID NO: 49190 - DNA, 25 bp, Probe Sequence
tgaaggaggatgaagtaatgtgtgt

SEQ ID NO: 49191 - DNA, 25 bp, Probe Sequence
tgtgaaggaggatgaagtaatgtgt

SEQ ID NO: 49192 - DNA, 25 bp, Probe Sequence
gaatctagcacttctccacttgtag

SEQ ID NO: 49193 - DNA, 25 bp, Probe Sequence
aggaggatgaagtaatgtgtgttct

SEQ ID NO: 49194 - DNA, 25 bp, Probe Sequence
ttaagtctcagcagaagatacgatc

SEQ ID NO: 49195 - DNA, 25 bp, Probe Sequence
ttattgtatgctgtaggaggtcatg

SEQ ID NO: 49196 - DNA, 25 bp, Probe Sequence
gctgctattaacagaagagagaact

SEQ ID NO: 49197 - DNA, 25 bp, Probe Sequence
ctgtaacttggcgtcagtagaatat

SEQ ID NO: 49198 - DNA, 25 bp, Probe Sequence
ttgtgaagtgactgagaatctagca

SEQ ID NO: 49199 - DNA, 25 bp, Probe Sequence
taatggtctgttatatgttgttgga

SEQ ID NO: 49200 - DNA, 25 bp, Probe Sequence
tgtaacttggcgtcagtagaatatt

SEQ ID NO: 49201 - DNA, 25 bp, Probe Sequence
aaccattatgagcctgaaggacatt

SEQ ID NO: 49202 - DNA, 25 bp, Probe Sequence
gatgaagtaatgtgtgttcttgtaa

SEQ ID NO: 49203 - DNA, 25 bp, Probe Sequence
aatctagcacttctccacttgtagc

SEQ ID NO: 49204 - DNA, 25 bp, Probe Sequence
cttgttgtgtcctggattccgataa

SEQ ID NO: 49205 - DNA, 25 bp, Probe Sequence
tcttgttgtgtcctggattccgata

SEQ ID NO: 49206 - DNA, 25 bp, Probe Sequence
ttgttgtgtcctggattccgataaa

SEQ ID NO: 49207 - DNA, 25 bp, Probe Sequence
gttgtgtctcgtcttctgtctccat

SEQ ID NO: 49208 - DNA, 25 bp, Probe Sequence
ttcttgttgtgtcctggattccgat

SEQ ID NO: 49209 - DNA, 25 bp, Probe Sequence
tgtgtcctggattccgataaaatta

SEQ ID NO: 49210 - DNA, 25 bp, Probe Sequence
ttgtgtcctggattccgataaaatt

SEQ ID NO: 49211 - DNA, 25 bp, Probe Sequence
gtgtcctggattccgataaaattaa

SEQ ID NO: 49212 - DNA, 25 bp, Probe Sequence
actcactcaggacctcactcactag

SEQ ID NO: 49213 - DNA, 25 bp, Probe Sequence
ttgtgtctcgtcttctgtctccatg

SEQ ID NO: 49214 - DNA, 25 bp, Probe Sequence
gttgtgtcctggattccgataaaat

SEQ ID NO: 49215 - DNA, 25 bp, Probe Sequence
cactcactcaggacctcactcacta

SEQ ID NO: 49216 - DNA, 25 bp, Probe Sequence
tgtcctggattccgataaaattaaa

SEQ ID NO: 49217 - DNA, 25 bp, Probe Sequence
gagttgtgtctcgtcttctgtctcc

SEQ ID NO: 49218 - DNA, 25 bp, Probe Sequence
ggagttgtgtctcgtcttctgtctc

SEQ ID NO: 49219 - DNA, 25 bp, Probe Sequence
gaggagttgtgtctcgtcttctgtc

SEQ ID NO: 49220 - DNA, 25 bp, Probe Sequence
tcctggattccgataaaattaaaga

SEQ ID NO: 49221 - DNA, 25 bp, Probe Sequence
gtcctggattccgataaaattaaag

SEQ ID NO: 49222 - DNA, 25 bp, Probe Sequence
aaattaaagaaattgcttcctcaaa

SEQ ID NO: 49223 - DNA, 25 bp, Probe Sequence
aactgattctgcccagataatcgtg

SEQ ID NO: 49224 - DNA, 25 bp, Probe Sequence
caactgattctgcccagataatcgt

SEQ ID NO: 49225 - DNA, 25 bp, Probe Sequence
tgttgtgtcctggattccgataaaa

SEQ ID NO: 49226 - DNA, 25 bp, Probe Sequence
aggagttgtgtctcgtcttctgtct

SEQ ID NO: 49227 - DNA, 25 bp, Probe Sequence
gattctgcccagataatcgtgtctc

SEQ ID NO: 49228 - DNA, 25 bp, Probe Sequence
agtggtaggttaatgtgttcagaag

SEQ ID NO: 49229 - DNA, 25 bp, Probe Sequence
tggtaggttaatgtgttcagaagtc

SEQ ID NO: 49230 - DNA, 25 bp, Probe Sequence
gtggtaggttaatgtgttcagaagt

SEQ ID NO: 49231 - DNA, 25 bp, Probe Sequence
cagtggtaggttaatgtgttcagaa

SEQ ID NO: 49232 - DNA, 25 bp, Probe Sequence
ggtaggttaatgtgttcagaagtcg

SEQ ID NO: 49233 - DNA, 25 bp, Probe Sequence
ttaggaatccattctcactgtgttc

SEQ ID NO: 49234 - DNA, 25 bp, Probe Sequence
aagtatggaagtcacaactacacag

SEQ ID NO: 49235 - DNA, 25 bp, Probe Sequence
gaagtatggaagtcacaactacaca

SEQ ID NO: 49236 - DNA, 25 bp, Probe Sequence
gttaggaatccattctcactgtgtt

SEQ ID NO: 49237 - DNA, 25 bp, Probe Sequence
gtcattacacctactctgagaatcg

SEQ ID NO: 49238 - DNA, 25 bp, Probe Sequence
tatggaagtcacaactacacagaga

SEQ ID NO: 49239 - DNA, 25 bp, Probe Sequence
gtatggaagtcacaactacacagag

SEQ ID NO: 49240 - DNA, 25 bp, Probe Sequence
tcattacacctactctgagaatcgt

SEQ ID NO: 49241 - DNA, 25 bp, Probe Sequence
agtatggaagtcacaactacacaga

SEQ ID NO: 49242 - DNA, 25 bp, Probe Sequence
ggaagtatggaagtcacaactacac

SEQ ID NO: 49243 - DNA, 25 bp, Probe Sequence
gtaggttaatgtgttcagaagtcgc

SEQ ID NO: 49244 - DNA, 25 bp, Probe Sequence
atggaagtcacaactacacagagat

SEQ ID NO: 49245 - DNA, 25 bp, Probe Sequence
taggttaatgtgttcagaagtcgct

SEQ ID NO: 49246 - DNA, 25 bp, Probe Sequence
tggaagtcacaactacacagagatt

SEQ ID NO: 49247 - DNA, 25 bp, Probe Sequence
cattacacctactctgagaatcgtg

SEQ ID NO: 49248 - DNA, 25 bp, Probe Sequence
acagtggtaggttaatgtgttcaga

SEQ ID NO: 49249 - DNA, 25 bp, Probe Sequence
ggtcattacacctactctgagaatc

SEQ ID NO: 49250 - DNA, 25 bp, Probe Sequence
taggaatccattctcactgtgttcg

SEQ ID NO: 49251 - DNA, 25 bp, Probe Sequence
cggaagtatggaagtcacaactaca

SEQ ID NO: 49252 - DNA, 25 bp, Probe Sequence
atgcctactacatcttccaggagat

SEQ ID NO: 49253 - DNA, 25 bp, Probe Sequence
ctccatctatctccacgaccagaac

SEQ ID NO: 49254 - DNA, 25 bp, Probe Sequence
gtcttcctgtatagagcgtacctgg

SEQ ID NO: 49255 - DNA, 25 bp, Probe Sequence
cgtcttcctgtatagagcgtacctg

SEQ ID NO: 49256 - DNA, 25 bp, Probe Sequence
gatgcctactacatcttccaggaga

SEQ ID NO: 49257 - DNA, 25 bp, Probe Sequence
cctccatctatctccacgaccagaa

SEQ ID NO: 49258 - DNA, 25 bp, Probe Sequence
ctagacaaggatagtggctacccag

SEQ ID NO: 49259 - DNA, 25 bp, Probe Sequence
ggatgcctactacatcttccaggag

SEQ ID NO: 49260 - DNA, 25 bp, Probe Sequence
tagacaaggatagtggctacccaga

SEQ ID NO: 49261 - DNA, 25 bp, Probe Sequence
cccatctgttaataaatatctcaac

SEQ ID NO: 49262 - DNA, 25 bp, Probe Sequence
caggatgcctactacatcttccagg

SEQ ID NO: 49263 - DNA, 25 bp, Probe Sequence
tctgttaataaatatctcaactcca

SEQ ID NO: 49264 - DNA, 25 bp, Probe Sequence
aggatgcctactacatcttccagga

SEQ ID NO: 49265 - DNA, 25 bp, Probe Sequence
ccccatctgttaataaatatctcaa

SEQ ID NO: 49266 - DNA, 25 bp, Probe Sequence
gcaggatgcctactacatcttccag

SEQ ID NO: 49267 - DNA, 25 bp, Probe Sequence
acgtcttcctgtatagagcgtacct

SEQ ID NO: 49268 - DNA, 25 bp, Probe Sequence
cttcatcaaggagtaccaggccaag

SEQ ID NO: 49269 - DNA, 25 bp, Probe Sequence
gacaaggatagtggctacccagaga

SEQ ID NO: 49270 - DNA, 25 bp, Probe Sequence
agacaaggatagtggctacccagag

SEQ ID NO: 49271 - DNA, 25 bp, Probe Sequence
gaagctatcaagcccagagagagac

SEQ ID NO: 49272 - DNA, 25 bp, Probe Sequence
gacgtaaagaacgccttctacatcg

SEQ ID NO: 49273 - DNA, 25 bp, Probe Sequence
cgacgtaaagaacgccttctacatc

SEQ ID NO: 49274 - DNA, 25 bp, Probe Sequence
acaaggatagtggctacccagagac

SEQ ID NO: 49275 - DNA, 25 bp, Probe Sequence
gctagacaaggatagtggctaccca

SEQ ID NO: 49276 - DNA, 25 bp, Probe Sequence
tactccttccagttctactcaacaa

SEQ ID NO: 49277 - DNA, 25 bp, Probe Sequence
aatgagagtgacatgattcgtaact

SEQ ID NO: 49278 - DNA, 25 bp, Probe Sequence
atcctgtgaagttattattggttct

SEQ ID NO: 49279 - DNA, 25 bp, Probe Sequence
atgagagtgacatgattcgtaactg

SEQ ID NO: 49280 - DNA, 25 bp, Probe Sequence
gtactccttccagttctactcaaca

SEQ ID NO: 49281 - DNA, 25 bp, Probe Sequence
cctgtgaagttattattggttctac

SEQ ID NO: 49282 - DNA, 25 bp, Probe Sequence
tcagtattaatggaactacggaaga

SEQ ID NO: 49283 - DNA, 25 bp, Probe Sequence
tcttcagtattaatggaactacgga

SEQ ID NO: 49284 - DNA, 25 bp, Probe Sequence
tcctgtgaagttattattggttcta

SEQ ID NO: 49285 - DNA, 25 bp, Probe Sequence
gctgaataaacccaaggataaagtc

SEQ ID NO: 49286 - DNA, 25 bp, Probe Sequence
agatgctgaataaacccaaggataa

SEQ ID NO: 49287 - DNA, 25 bp, Probe Sequence
aagatgctgaataaacccaaggata

SEQ ID NO: 49288 - DNA, 25 bp, Probe Sequence
taaagatgctgaataaacccaagga

SEQ ID NO: 49289 - DNA, 25 bp, Probe Sequence
gctgttggatgatataaagatgctg

SEQ ID NO: 49290 - DNA, 25 bp, Probe Sequence
tgctgaataaacccaaggataaagt

SEQ ID NO: 49291 - DNA, 25 bp, Probe Sequence
aatcctgtgaagttattattggttc

SEQ ID NO: 49292 - DNA, 25 bp, Probe Sequence
atgctgaataaacccaaggataaag

SEQ ID NO: 49293 - DNA, 25 bp, Probe Sequence
gatgctgaataaacccaaggataaa

SEQ ID NO: 49294 - DNA, 25 bp, Probe Sequence
aaagatgctgaataaacccaaggat

SEQ ID NO: 49295 - DNA, 25 bp, Probe Sequence
ataaagatgctgaataaacccaagg

SEQ ID NO: 49296 - DNA, 25 bp, Probe Sequence
aagatattatggaggatgctattga

SEQ ID NO: 49297 - DNA, 25 bp, Probe Sequence
atattgctgctgctttgtagatgat

SEQ ID NO: 49298 - DNA, 25 bp, Probe Sequence
agtgacatgattcgtaactggagtt

SEQ ID NO: 49299 - DNA, 25 bp, Probe Sequence
cagtattaatggaactacggaagaa

SEQ ID NO: 49300 - DNA, 25 bp, Probe Sequence
aacagcaataaacttccttctcctc

SEQ ID NO: 49301 - DNA, 25 bp, Probe Sequence
caacagcaataaacttccttctcct

SEQ ID NO: 49302 - DNA, 25 bp, Probe Sequence
gcaacagcaataaacttccttctcc

SEQ ID NO: 49303 - DNA, 25 bp, Probe Sequence
acagcaataaacttccttctcctcg

SEQ ID NO: 49304 - DNA, 25 bp, Probe Sequence
cagcaataaacttccttctcctcgg

SEQ ID NO: 49305 - DNA, 25 bp, Probe Sequence
gatctccctccagtacctcaagaac

SEQ ID NO: 49306 - DNA, 25 bp, Probe Sequence
agcaataaacttccttctcctcggg

SEQ ID NO: 49307 - DNA, 25 bp, Probe Sequence
ctacatcgactggatcaacgagaaa

SEQ ID NO: 49308 - DNA, 25 bp, Probe Sequence
tgcaacagcaataaacttccttctc

SEQ ID NO: 49309 - DNA, 25 bp, Probe Sequence
ctgcaacagcaataaacttccttct

SEQ ID NO: 49310 - DNA, 25 bp, Probe Sequence
cctacatcgactggatcaacgagaa

SEQ ID NO: 49311 - DNA, 25 bp, Probe Sequence
cctgcaacagcaataaacttccttc

SEQ ID NO: 49312 - DNA, 25 bp, Probe Sequence
agatctccctccagtacctcaagaa

SEQ ID NO: 49313 - DNA, 25 bp, Probe Sequence
atctccctccagtacctcaagaacg

SEQ ID NO: 49314 - DNA, 25 bp, Probe Sequence
gaaagaacaacctggaggtggaaga

SEQ ID NO: 49315 - DNA, 25 bp, Probe Sequence
tacatcgactggatcaacgagaaaa

SEQ ID NO: 49316 - DNA, 25 bp, Probe Sequence
caatgatattgccctcatcaagctt

SEQ ID NO: 49317 - DNA, 25 bp, Probe Sequence
catcgactggatcaacgagaaaatg

SEQ ID NO: 49318 - DNA, 25 bp, Probe Sequence
aaagaacaacctggaggtggaagac

SEQ ID NO: 49319 - DNA, 25 bp, Probe Sequence
agtccctgcaacagcaataaacttc

SEQ ID NO: 49320 - DNA, 25 bp, Probe Sequence
gagtccctgcaacagcaataaactt

SEQ ID NO: 49321 - DNA, 25 bp, Probe Sequence
acatcgactggatcaacgagaaaat

SEQ ID NO: 49322 - DNA, 25 bp, Probe Sequence
cagatctccctccagtacctcaaga

SEQ ID NO: 49323 - DNA, 25 bp, Probe Sequence
ccctgcaacagcaataaacttcctt

SEQ ID NO: 49324 - DNA, 25 bp, Probe Sequence
cttggattaaggaagactgaagact

SEQ ID NO: 49325 - DNA, 25 bp, Probe Sequence
ccacatcacagaatcgtatctatct

SEQ ID NO: 49326 - DNA, 25 bp, Probe Sequence
tcacagaatcgtatctatctcacag

SEQ ID NO: 49327 - DNA, 25 bp, Probe Sequence
gattaaggaagactgaagactagcc

SEQ ID NO: 49328 - DNA, 25 bp, Probe Sequence
ggattaaggaagactgaagactagc

SEQ ID NO: 49329 - DNA, 25 bp, Probe Sequence
ttggattaaggaagactgaagacta

SEQ ID NO: 49330 - DNA, 25 bp, Probe Sequence
tggattaaggaagactgaagactag

SEQ ID NO: 49331 - DNA, 25 bp, Probe Sequence
cacagaatcgtatctatctcacagc

SEQ ID NO: 49332 - DNA, 25 bp, Probe Sequence
atcacagaatcgtatctatctcaca

SEQ ID NO: 49333 - DNA, 25 bp, Probe Sequence
acatcacagaatcgtatctatctca

SEQ ID NO: 49334 - DNA, 25 bp, Probe Sequence
gccacatcacagaatcgtatctatc

SEQ ID NO: 49335 - DNA, 25 bp, Probe Sequence
catcacagaatcgtatctatctcac

SEQ ID NO: 49336 - DNA, 25 bp, Probe Sequence
cacatcacagaatcgtatctatctc

SEQ ID NO: 49337 - DNA, 25 bp, Probe Sequence
acagaatcgtatctatctcacagct

SEQ ID NO: 49338 - DNA, 25 bp, Probe Sequence
cgccacatcacagaatcgtatctat

SEQ ID NO: 49339 - DNA, 25 bp, Probe Sequence
tttctcagtgatttcctacagtgtt

SEQ ID NO: 49340 - DNA, 25 bp, Probe Sequence
atttctcagtgatttcctacagtgt

SEQ ID NO: 49341 - DNA, 25 bp, Probe Sequence
gatttctcagtgatttcctacagtg

SEQ ID NO: 49342 - DNA, 25 bp, Probe Sequence
ttctcagtgatttcctacagtgttg

SEQ ID NO: 49343 - DNA, 25 bp, Probe Sequence
attactttcctcctccctgtgttaa

SEQ ID NO: 49344 - DNA, 25 bp, Probe Sequence
aagacctacagatggtgaatatctc

SEQ ID NO: 49345 - DNA, 25 bp, Probe Sequence
aattactttcctcctccctgtgtta

SEQ ID NO: 49346 - DNA, 25 bp, Probe Sequence
agacctacagatggtgaatatctcc

SEQ ID NO: 49347 - DNA, 25 bp, Probe Sequence
tcttggattaaggaagactgaagac

SEQ ID NO: 49348 - DNA, 25 bp, Probe Sequence
catcctgctgtagacttcttgattg

SEQ ID NO: 49349 - DNA, 25 bp, Probe Sequence
atcctgctgtagacttcttgattgt

SEQ ID NO: 49350 - DNA, 25 bp, Probe Sequence
taatggtggagttggcatcttgtaa

SEQ ID NO: 49351 - DNA, 25 bp, Probe Sequence
ccatcctgctgtagacttcttgatt

SEQ ID NO: 49352 - DNA, 25 bp, Probe Sequence
cttcttgattgtcagtctgtgtcac

SEQ ID NO: 49353 - DNA, 25 bp, Probe Sequence
ctgctgtagacttcttgattgtcag

SEQ ID NO: 49354 - DNA, 25 bp, Probe Sequence
acttcttgattgtcagtctgtgtca

SEQ ID NO: 49355 - DNA, 25 bp, Probe Sequence
catcaataaagaggaaaccaccaag

SEQ ID NO: 49356 - DNA, 25 bp, Probe Sequence
tgctgtagacttcttgattgtcagt

SEQ ID NO: 49357 - DNA, 25 bp, Probe Sequence
cttgtaactctcctttctcctttct

SEQ ID NO: 49358 - DNA, 25 bp, Probe Sequence
tcttgtaactctcctttctcctttc

SEQ ID NO: 49359 - DNA, 25 bp, Probe Sequence
catcttgtaactctcctttctcctt

SEQ ID NO: 49360 - DNA, 25 bp, Probe Sequence
acatcaataaagaggaaaccaccaa

SEQ ID NO: 49361 - DNA, 25 bp, Probe Sequence
atcttgtaactctcctttctccttt

SEQ ID NO: 49362 - DNA, 25 bp, Probe Sequence
gtaatggtggagttggcatcttgta

SEQ ID NO: 49363 - DNA, 25 bp, Probe Sequence
cacatcaataaagaggaaaccacca

SEQ ID NO: 49364 - DNA, 25 bp, Probe Sequence
taggaggcacatcaataaagaggaa

SEQ ID NO: 49365 - DNA, 25 bp, Probe Sequence
gaaggtaggaggcacatcaataaag

SEQ ID NO: 49366 - DNA, 25 bp, Probe Sequence
atcccttcctttcactaccttcttt

SEQ ID NO: 49367 - DNA, 25 bp, Probe Sequence
aatcccttcctttcactaccttctt

SEQ ID NO: 49368 - DNA, 25 bp, Probe Sequence
tcctgctgtagacttcttgattgtc

SEQ ID NO: 49369 - DNA, 25 bp, Probe Sequence
aaggtaggaggcacatcaataaaga

SEQ ID NO: 49370 - DNA, 25 bp, Probe Sequence
atcaataaagaggaaaccaccaagc

SEQ ID NO: 49371 - DNA, 25 bp, Probe Sequence
cctgctgtagacttcttgattgtca

SEQ ID NO: 49372 - DNA, 25 bp, Probe Sequence
atcttcatgtattctggagaacacc

SEQ ID NO: 49373 - DNA, 25 bp, Probe Sequence
aatcttcatgtattctggagaacac

SEQ ID NO: 49374 - DNA, 25 bp, Probe Sequence
ttcatgtattctggagaacaccatt

SEQ ID NO: 49375 - DNA, 25 bp, Probe Sequence
tattctggagaacaccattcctgat

SEQ ID NO: 49376 - DNA, 25 bp, Probe Sequence
tcatgtattctggagaacaccattc

SEQ ID NO: 49377 - DNA, 25 bp, Probe Sequence
cttcatgtattctggagaacaccat

SEQ ID NO: 49378 - DNA, 25 bp, Probe Sequence
tgagatgatctgttactgcaacttc

SEQ ID NO: 49379 - DNA, 25 bp, Probe Sequence
atgtattctggagaacaccattcct

SEQ ID NO: 49380 - DNA, 25 bp, Probe Sequence
gatgtgagatgatctgttactgcaa

SEQ ID NO: 49381 - DNA, 25 bp, Probe Sequence
gtgagatgatctgttactgcaactt

SEQ ID NO: 49382 - DNA, 25 bp, Probe Sequence
atgtgagatgatctgttactgcaac

SEQ ID NO: 49383 - DNA, 25 bp, Probe Sequence
gagatgatctgttactgcaacttca

SEQ ID NO: 49384 - DNA, 25 bp, Probe Sequence
tccctgaggttcttgtatagactag

SEQ ID NO: 49385 - DNA, 25 bp, Probe Sequence
tgagtgtgagcatttaagaagcatc

SEQ ID NO: 49386 - DNA, 25 bp, Probe Sequence
catgtattctggagaacaccattcc

SEQ ID NO: 49387 - DNA, 25 bp, Probe Sequence
tcttcatgtattctggagaacacca

SEQ ID NO: 49388 - DNA, 25 bp, Probe Sequence
gaatcttcatgtattctggagaaca

SEQ ID NO: 49389 - DNA, 25 bp, Probe Sequence
attctggagaacaccattcctgatt

SEQ ID NO: 49390 - DNA, 25 bp, Probe Sequence
ctccctgaggttcttgtatagacta

SEQ ID NO: 49391 - DNA, 25 bp, Probe Sequence
gtattctggagaacaccattcctga

SEQ ID NO: 49392 - DNA, 25 bp, Probe Sequence
gtgagtgtgagcatttaagaagcat

SEQ ID NO: 49393 - DNA, 25 bp, Probe Sequence
ccagtgagtgtgagcatttaagaag

SEQ ID NO: 49394 - DNA, 25 bp, Probe Sequence
agatgatctgttactgcaacttcag

SEQ ID NO: 49395 - DNA, 25 bp, Probe Sequence
gaagggatgtgagatgatctgttac

SEQ ID NO: 49396 - DNA, 25 bp, Probe Sequence
taatagactggtgctgtaactcaag

SEQ ID NO: 49397 - DNA, 25 bp, Probe Sequence
ctatgaggaagacgacaatgaagat

SEQ ID NO: 49398 - DNA, 25 bp, Probe Sequence
atgaggaagacgacaatgaagatac

SEQ ID NO: 49399 - DNA, 25 bp, Probe Sequence
ataatagactggtgctgtaactcaa

SEQ ID NO: 49400 - DNA, 25 bp, Probe Sequence
aataatagactggtgctgtaactca

SEQ ID NO: 49401 - DNA, 25 bp, Probe Sequence
gaagacgacaatgaagatactgaca

SEQ ID NO: 49402 - DNA, 25 bp, Probe Sequence
tatgaggaagacgacaatgaagata

SEQ ID NO: 49403 - DNA, 25 bp, Probe Sequence
gttgttgagttggaatatgttctgg

SEQ ID NO: 49404 - DNA, 25 bp, Probe Sequence
gaggaagacgacaatgaagatactg

SEQ ID NO: 49405 - DNA, 25 bp, Probe Sequence
gactatgaggaagacgacaatgaag

SEQ ID NO: 49406 - DNA, 25 bp, Probe Sequence
agttgttgagttggaatatgttctg

SEQ ID NO: 49407 - DNA, 25 bp, Probe Sequence
aagacgacaatgaagatactgacag

SEQ ID NO: 49408 - DNA, 25 bp, Probe Sequence
gagttgttgagttggaatatgttct

SEQ ID NO: 49409 - DNA, 25 bp, Probe Sequence
agagttgttgagttggaatatgttc

SEQ ID NO: 49410 - DNA, 25 bp, Probe Sequence
ggaagacgacaatgaagatactgac

SEQ ID NO: 49411 - DNA, 25 bp, Probe Sequence
aggaagacgacaatgaagatactga

SEQ ID NO: 49412 - DNA, 25 bp, Probe Sequence
tgaggaagacgacaatgaagatact

SEQ ID NO: 49413 - DNA, 25 bp, Probe Sequence
actatgaggaagacgacaatgaaga

SEQ ID NO: 49414 - DNA, 25 bp, Probe Sequence
agactatgaggaagacgacaatgaa

SEQ ID NO: 49415 - DNA, 25 bp, Probe Sequence
ttgagttggaatatgttctggcatt

SEQ ID NO: 49416 - DNA, 25 bp, Probe Sequence
ttacctagagttgttgagttggaat

SEQ ID NO: 49417 - DNA, 25 bp, Probe Sequence
gttacctagagttgttgagttggaa

SEQ ID NO: 49418 - DNA, 25 bp, Probe Sequence
aagttacctagagttgttgagttgg

SEQ ID NO: 49419 - DNA, 25 bp, Probe Sequence
acctagagttgttgagttggaatat

SEQ ID NO: 49420 - DNA, 25 bp, Probe Sequence
ccaggacaagactctcaagatttat

SEQ ID NO: 49421 - DNA, 25 bp, Probe Sequence
caggacaagactctcaagatttatg

SEQ ID NO: 49422 - DNA, 25 bp, Probe Sequence
agactctcaagatttatgaaggtgc

SEQ ID NO: 49423 - DNA, 25 bp, Probe Sequence
ctctcaagatttatgaaggtgccta

SEQ ID NO: 49424 - DNA, 25 bp, Probe Sequence
tctcaagatttatgaaggtgcctac

SEQ ID NO: 49425 - DNA, 25 bp, Probe Sequence
aggacaagactctcaagatttatga

SEQ ID NO: 49426 - DNA, 25 bp, Probe Sequence
caactccgtcttccatgaaataaac

SEQ ID NO: 49427 - DNA, 25 bp, Probe Sequence
gactctcaagatttatgaaggtgcc

SEQ ID NO: 49428 - DNA, 25 bp, Probe Sequence
ggacaagactctcaagatttatgaa

SEQ ID NO: 49429 - DNA, 25 bp, Probe Sequence
actccgtcttccatgaaataaacat

SEQ ID NO: 49430 - DNA, 25 bp, Probe Sequence
aagactctcaagatttatgaaggtg

SEQ ID NO: 49431 - DNA, 25 bp, Probe Sequence
caagactctcaagatttatgaaggt

SEQ ID NO: 49432 - DNA, 25 bp, Probe Sequence
acaagactctcaagatttatgaagg

SEQ ID NO: 49433 - DNA, 25 bp, Probe Sequence
aactccgtcttccatgaaataaaca

SEQ ID NO: 49434 - DNA, 25 bp, Probe Sequence
gccaggacaagactctcaagattta

SEQ ID NO: 49435 - DNA, 25 bp, Probe Sequence
actctcaagatttatgaaggtgcct

SEQ ID NO: 49436 - DNA, 25 bp, Probe Sequence
ccaactccgtcttccatgaaataaa

SEQ ID NO: 49437 - DNA, 25 bp, Probe Sequence
ttatgaaggtgcctaccatgttctc

SEQ ID NO: 49438 - DNA, 25 bp, Probe Sequence
caagatttatgaaggtgcctaccat

SEQ ID NO: 49439 - DNA, 25 bp, Probe Sequence
ctcaagatttatgaaggtgcctacc

SEQ ID NO: 49440 - DNA, 25 bp, Probe Sequence
gacaagactctcaagatttatgaag

SEQ ID NO: 49441 - DNA, 25 bp, Probe Sequence
accaactccgtcttccatgaaataa

SEQ ID NO: 49442 - DNA, 25 bp, Probe Sequence
aagatttatgaaggtgcctaccatg

SEQ ID NO: 49443 - DNA, 25 bp, Probe Sequence
caatcctgaatctgcaacaactttc

SEQ ID NO: 49444 - DNA, 25 bp, Probe Sequence
ttatgcttgaagtgttagatggcta

SEQ ID NO: 49445 - DNA, 25 bp, Probe Sequence
ccgtaactgcttgtgtatcttgtaa

SEQ ID NO: 49446 - DNA, 25 bp, Probe Sequence
gttatgcttgaagtgttagatggct

SEQ ID NO: 49447 - DNA, 25 bp, Probe Sequence
cagaacctcttcacatagacctatt

SEQ ID NO: 49448 - DNA, 25 bp, Probe Sequence
tataccagaacctcttcacatagac

SEQ ID NO: 49449 - DNA, 25 bp, Probe Sequence
gaacacttgcttcactagaatatgc

SEQ ID NO: 49450 - DNA, 25 bp, Probe Sequence
tcagaacacttgcttcactagaata

SEQ ID NO: 49451 - DNA, 25 bp, Probe Sequence
ccagaacctcttcacatagacctat

SEQ ID NO: 49452 - DNA, 25 bp, Probe Sequence
ataccagaacctcttcacatagacc

SEQ ID NO: 49453 - DNA, 25 bp, Probe Sequence
gtcagaacacttgcttcactagaat

SEQ ID NO: 49454 - DNA, 25 bp, Probe Sequence
agaacacttgcttcactagaatatg

SEQ ID NO: 49455 - DNA, 25 bp, Probe Sequence
cagaacacttgcttcactagaatat

SEQ ID NO: 49456 - DNA, 25 bp, Probe Sequence
ctagaatatgccaactgccaatcat

SEQ ID NO: 49457 - DNA, 25 bp, Probe Sequence
ttataccagaacctcttcacataga

SEQ ID NO: 49458 - DNA, 25 bp, Probe Sequence
aacacttgcttcactagaatatgcc

SEQ ID NO: 49459 - DNA, 25 bp, Probe Sequence
accgtaactgcttgtgtatcttgta

SEQ ID NO: 49460 - DNA, 25 bp, Probe Sequence
cttgcttcactagaatatgccaact

SEQ ID NO: 49461 - DNA, 25 bp, Probe Sequence
tatgcttgaagtgttagatggctaa

SEQ ID NO: 49462 - DNA, 25 bp, Probe Sequence
aacctcttcacatagacctattagt

SEQ ID NO: 49463 - DNA, 25 bp, Probe Sequence
gcttgaagtgttagatggctaagta

SEQ ID NO: 49464 - DNA, 25 bp, Probe Sequence
ttgcttcactagaatatgccaactg

SEQ ID NO: 49465 - DNA, 25 bp, Probe Sequence
acttgcttcactagaatatgccaac

SEQ ID NO: 49466 - DNA, 25 bp, Probe Sequence
cacttgcttcactagaatatgccaa

SEQ ID NO: 49467 - DNA, 25 bp, Probe Sequence
gttattataccagaacctcttcaca

SEQ ID NO: 49468 - DNA, 25 bp, Probe Sequence
ggagttaaggtcagtatggaagata

SEQ ID NO: 49469 - DNA, 25 bp, Probe Sequence
agttaaggtcagtatggaagatagg

SEQ ID NO: 49470 - DNA, 25 bp, Probe Sequence
agaaggtgctcttactcagttaatg

SEQ ID NO: 49471 - DNA, 25 bp, Probe Sequence
aggtgctcttactcagttaatgatg

SEQ ID NO: 49472 - DNA, 25 bp, Probe Sequence
aaggtgctcttactcagttaatgat

SEQ ID NO: 49473 - DNA, 25 bp, Probe Sequence
gaaggtgctcttactcagttaatga

SEQ ID NO: 49474 - DNA, 25 bp, Probe Sequence
aggaatatggctgagttctgtagtt

SEQ ID NO: 49475 - DNA, 25 bp, Probe Sequence
ggtgctcttactcagttaatgatga

SEQ ID NO: 49476 - DNA, 25 bp, Probe Sequence
gagaaggtgctcttactcagttaat

SEQ ID NO: 49477 - DNA, 25 bp, Probe Sequence
gaggaatatggctgagttctgtagt

SEQ ID NO: 49478 - DNA, 25 bp, Probe Sequence
gagttaaggtcagtatggaagatag

SEQ ID NO: 49479 - DNA, 25 bp, Probe Sequence
ggaggaatatggctgagttctgtag

SEQ ID NO: 49480 - DNA, 25 bp, Probe Sequence
gagagaagagatacagagctaccat

SEQ ID NO: 49481 - DNA, 25 bp, Probe Sequence
gaggttcagaatattagcttcagga

SEQ ID NO: 49482 - DNA, 25 bp, Probe Sequence
agaggttcagaatattagcttcagg

SEQ ID NO: 49483 - DNA, 25 bp, Probe Sequence
agagaagagatacagagctaccatg

SEQ ID NO: 49484 - DNA, 25 bp, Probe Sequence
aggttcagaatattagcttcaggat

SEQ ID NO: 49485 - DNA, 25 bp, Probe Sequence
ggttcagaatattagcttcaggatc

SEQ ID NO: 49486 - DNA, 25 bp, Probe Sequence
taaggtcagtatggaagatagggtt

SEQ ID NO: 49487 - DNA, 25 bp, Probe Sequence
gggaaagagagagacaaagagttac

SEQ ID NO: 49488 - DNA, 25 bp, Probe Sequence
ttaaggtcagtatggaagatagggt

SEQ ID NO: 49489 - DNA, 25 bp, Probe Sequence
gttaaggtcagtatggaagataggg

SEQ ID NO: 49490 - DNA, 25 bp, Probe Sequence
ccataagagaattataaggcagtga

SEQ ID NO: 49491 - DNA, 25 bp, Probe Sequence
aatatggctgagttctgtagtttcc

SEQ ID NO: 49492 - DNA, 25 bp, Probe Sequence
cctaccctggaaagattaccaacag

SEQ ID NO: 49493 - DNA, 25 bp, Probe Sequence
aaagcctcctaccctggaaagatta

SEQ ID NO: 49494 - DNA, 25 bp, Probe Sequence
taaagcctcctaccctggaaagatt

SEQ ID NO: 49495 - DNA, 25 bp, Probe Sequence
ctaccctggaaagattaccaacagc

SEQ ID NO: 49496 - DNA, 25 bp, Probe Sequence
gtaaagcctcctaccctggaaagat

SEQ ID NO: 49497 - DNA, 25 bp, Probe Sequence
taccctggaaagattaccaacagca

SEQ ID NO: 49498 - DNA, 25 bp, Probe Sequence
accctggaaagattaccaacagcat

SEQ ID NO: 49499 - DNA, 25 bp, Probe Sequence
gtgtaaagcctcctaccctggaaag

SEQ ID NO: 49500 - DNA, 25 bp, Probe Sequence
tgtaaagcctcctaccctggaaaga

SEQ ID NO: 49501 - DNA, 25 bp, Probe Sequence
agtgtaaagcctcctaccctggaaa

SEQ ID NO: 49502 - DNA, 25 bp, Probe Sequence
caataaagtggccctgctctcaaaa

SEQ ID NO: 49503 - DNA, 25 bp, Probe Sequence
attatgaagacgatagtgaaggagg

SEQ ID NO: 49504 - DNA, 25 bp, Probe Sequence
ttatgaagacgatagtgaaggagga

SEQ ID NO: 49505 - DNA, 25 bp, Probe Sequence
gatagtgaaggaggaggacatagaa

SEQ ID NO: 49506 - DNA, 25 bp, Probe Sequence
tatgaagacgatagtgaaggaggag

SEQ ID NO: 49507 - DNA, 25 bp, Probe Sequence
attctaaccaagaggatgactaatg

SEQ ID NO: 49508 - DNA, 25 bp, Probe Sequence
cgatagtgaaggaggaggacataga

SEQ ID NO: 49509 - DNA, 25 bp, Probe Sequence
tattatgaagacgatagtgaaggag

SEQ ID NO: 49510 - DNA, 25 bp, Probe Sequence
acgatagtgaaggaggaggacatag

SEQ ID NO: 49511 - DNA, 25 bp, Probe Sequence
gacgatagtgaaggaggaggacata

SEQ ID NO: 49512 - DNA, 25 bp, Probe Sequence
ttctaaccaagaggatgactaatgg

SEQ ID NO: 49513 - DNA, 25 bp, Probe Sequence
atagtgaaggaggaggacatagaaa

SEQ ID NO: 49514 - DNA, 25 bp, Probe Sequence
ggatgactaatggtcggcgtatata

SEQ ID NO: 49515 - DNA, 25 bp, Probe Sequence
ttattatgaagacgatagtgaagga

SEQ ID NO: 49516 - DNA, 25 bp, Probe Sequence
aattctaaccaagaggatgactaat

SEQ ID NO: 49517 - DNA, 25 bp, Probe Sequence
atgaagacgatagtgaaggaggagg

SEQ ID NO: 49518 - DNA, 25 bp, Probe Sequence
ccacagacaagcccagaataatatg

SEQ ID NO: 49519 - DNA, 25 bp, Probe Sequence
tacctttatgagacgactctacctt

SEQ ID NO: 49520 - DNA, 25 bp, Probe Sequence
gactacctttatgagacgactctac

SEQ ID NO: 49521 - DNA, 25 bp, Probe Sequence
ggacagaaattctaaccaagaggat

SEQ ID NO: 49522 - DNA, 25 bp, Probe Sequence
ctacctttatgagacgactctacct

SEQ ID NO: 49523 - DNA, 25 bp, Probe Sequence
acagaaattctaaccaagaggatga

SEQ ID NO: 49524 - DNA, 25 bp, Probe Sequence
cctttatgagacgactctacctttg

SEQ ID NO: 49525 - DNA, 25 bp, Probe Sequence
agaaattctaaccaagaggatgact

SEQ ID NO: 49526 - DNA, 25 bp, Probe Sequence
cagaaattctaaccaagaggatgac

SEQ ID NO: 49527 - DNA, 25 bp, Probe Sequence
attgactggattgaggagaccatag

SEQ ID NO: 49528 - DNA, 25 bp, Probe Sequence
cattgactggattgaggagaccata

SEQ ID NO: 49529 - DNA, 25 bp, Probe Sequence
cttcattgactggattgaggagacc

SEQ ID NO: 49530 - DNA, 25 bp, Probe Sequence
ccttcattgactggattgaggagac

SEQ ID NO: 49531 - DNA, 25 bp, Probe Sequence
tcgatcccacatcctgaataaagaa

SEQ ID NO: 49532 - DNA, 25 bp, Probe Sequence
tcattgactggattgaggagaccat

SEQ ID NO: 49533 - DNA, 25 bp, Probe Sequence
ttcattgactggattgaggagacca

SEQ ID NO: 49534 - DNA, 25 bp, Probe Sequence
ttgactggattgaggagaccatagc

SEQ ID NO: 49535 - DNA, 25 bp, Probe Sequence
accatagcaagccactagaaccaag

SEQ ID NO: 49536 - DNA, 25 bp, Probe Sequence
gaccatagcaagccactagaaccaa

SEQ ID NO: 49537 - DNA, 25 bp, Probe Sequence
gccttcattgactggattgaggaga

SEQ ID NO: 49538 - DNA, 25 bp, Probe Sequence
gagaccatagcaagccactagaacc

SEQ ID NO: 49539 - DNA, 25 bp, Probe Sequence
ggagaccatagcaagccactagaac

SEQ ID NO: 49540 - DNA, 25 bp, Probe Sequence
aggagaccatagcaagccactagaa

SEQ ID NO: 49541 - DNA, 25 bp, Probe Sequence
atcgatcccacatcctgaataaaga

SEQ ID NO: 49542 - DNA, 25 bp, Probe Sequence
gaggagaccatagcaagccactaga

SEQ ID NO: 49543 - DNA, 25 bp, Probe Sequence
tgactggattgaggagaccatagca

SEQ ID NO: 49544 - DNA, 25 bp, Probe Sequence
ctatgaacactgctccaggtggaac

SEQ ID NO: 49545 - DNA, 25 bp, Probe Sequence
catcaactctggggacctctttgtg

SEQ ID NO: 49546 - DNA, 25 bp, Probe Sequence
tatcatcgcaaaactcatgatgctc

SEQ ID NO: 49547 - DNA, 25 bp, Probe Sequence
ctatcatcgcaaaactcatgatgct

SEQ ID NO: 49548 - DNA, 25 bp, Probe Sequence
cctatcatcgcaaaactcatgatgc

SEQ ID NO: 49549 - DNA, 25 bp, Probe Sequence
atcatcgcaaaactcatgatgctcc

SEQ ID NO: 49550 - DNA, 25 bp, Probe Sequence
tgcagtatgagaaaagcggaagctt

SEQ ID NO: 49551 - DNA, 25 bp, Probe Sequence
taggtattgatgaagatgaagtggc

SEQ ID NO: 49552 - DNA, 25 bp, Probe Sequence
tagataagaaggttgagaaggtgac

SEQ ID NO: 49553 - DNA, 25 bp, Probe Sequence
cgacaagaatgataaggcagttaag

SEQ ID NO: 49554 - DNA, 25 bp, Probe Sequence
acaagaatgataaggcagttaagga

SEQ ID NO: 49555 - DNA, 25 bp, Probe Sequence
caagaatgataaggcagttaaggac

SEQ ID NO: 49556 - DNA, 25 bp, Probe Sequence
gacaagaatgataaggcagttaagg

SEQ ID NO: 49557 - DNA, 25 bp, Probe Sequence
aagaatgataaggcagttaaggacc

SEQ ID NO: 49558 - DNA, 25 bp, Probe Sequence
aggagaagaagaagatggaagagag

SEQ ID NO: 49559 - DNA, 25 bp, Probe Sequence
gaggagaagaagaagatggaagaga

SEQ ID NO: 49560 - DNA, 25 bp, Probe Sequence
agataagaaggttgagaaggtgaca

SEQ ID NO: 49561 - DNA, 25 bp, Probe Sequence
gaagaagaagatggaagagagcaag

SEQ ID NO: 49562 - DNA, 25 bp, Probe Sequence
gaaggtgacaatctccaatagactt

SEQ ID NO: 49563 - DNA, 25 bp, Probe Sequence
gcagaagacaaggagaattacaaga

SEQ ID NO: 49564 - DNA, 25 bp, Probe Sequence
cgattaggttaggagttcatagttg

SEQ ID NO: 49565 - DNA, 25 bp, Probe Sequence
ttagataagaaggttgagaaggtga

SEQ ID NO: 49566 - DNA, 25 bp, Probe Sequence
ccgacaagaatgataaggcagttaa

SEQ ID NO: 49567 - DNA, 25 bp, Probe Sequence
ataagaaggttgagaaggtgacaat

SEQ ID NO: 49568 - DNA, 25 bp, Probe Sequence
taagaaggttgagaaggtgacaatc

SEQ ID NO: 49569 - DNA, 25 bp, Probe Sequence
gataagaaggttgagaaggtgacaa

SEQ ID NO: 49570 - DNA, 25 bp, Probe Sequence
acacagaagtccatctattacatca

SEQ ID NO: 49571 - DNA, 25 bp, Probe Sequence
attaggttaggagttcatagttgga

SEQ ID NO: 49572 - DNA, 25 bp, Probe Sequence
aaggtgacaatctccaatagacttg

SEQ ID NO: 49573 - DNA, 25 bp, Probe Sequence
agaagaagaagatggaagagagcaa

SEQ ID NO: 49574 - DNA, 25 bp, Probe Sequence
agaaggtgacaatctccaatagact

SEQ ID NO: 49575 - DNA, 25 bp, Probe Sequence
gcagcatcaacctattaaaatactt

SEQ ID NO: 49576 - DNA, 25 bp, Probe Sequence
tgcagcatcaacctattaaaatact

SEQ ID NO: 49577 - DNA, 25 bp, Probe Sequence
cagcatcaacctattaaaatacttt

SEQ ID NO: 49578 - DNA, 25 bp, Probe Sequence
gggaatgacccttttgtgtctatga

SEQ ID NO: 49579 - DNA, 25 bp, Probe Sequence
aaccaaacatgccccaatgacctta

SEQ ID NO: 49580 - DNA, 25 bp, Probe Sequence
agcatcaacctattaaaatactttt

SEQ ID NO: 49581 - DNA, 25 bp, Probe Sequence
tgtctgattctaaatgggagttgat

SEQ ID NO: 49582 - DNA, 25 bp, Probe Sequence
atgtctgattctaaatgggagttga

SEQ ID NO: 49583 - DNA, 25 bp, Probe Sequence
gtctgattctaaatgggagttgatg

SEQ ID NO: 49584 - DNA, 25 bp, Probe Sequence
gatgtctgattctaaatgggagttg

SEQ ID NO: 49585 - DNA, 25 bp, Probe Sequence
caggtttgagatggtattgctaaat

SEQ ID NO: 49586 - DNA, 25 bp, Probe Sequence
ctgattctaaatgggagttgatgct

SEQ ID NO: 49587 - DNA, 25 bp, Probe Sequence
tctgattctaaatgggagttgatgc

SEQ ID NO: 49588 - DNA, 25 bp, Probe Sequence
attaaacaagaaacccaacaacagc

SEQ ID NO: 49589 - DNA, 25 bp, Probe Sequence
gagatgtctgattctaaatgggagt

SEQ ID NO: 49590 - DNA, 25 bp, Probe Sequence
aagggagatgtctgattctaaatgg

SEQ ID NO: 49591 - DNA, 25 bp, Probe Sequence
ggaagggagatgtctgattctaaat

SEQ ID NO: 49592 - DNA, 25 bp, Probe Sequence
ggagatgtctgattctaaatgggag

SEQ ID NO: 49593 - DNA, 25 bp, Probe Sequence
agatgtctgattctaaatgggagtt

SEQ ID NO: 49594 - DNA, 25 bp, Probe Sequence
aattaaacaagaaacccaacaacag

SEQ ID NO: 49595 - DNA, 25 bp, Probe Sequence
gaagggagatgtctgattctaaatg

SEQ ID NO: 49596 - DNA, 25 bp, Probe Sequence
gagcaatttggtagttgtagacatt

SEQ ID NO: 49597 - DNA, 25 bp, Probe Sequence
aggtttgagatggtattgctaaatt

SEQ ID NO: 49598 - DNA, 25 bp, Probe Sequence
caatttggtagttgtagacatttgc

SEQ ID NO: 49599 - DNA, 25 bp, Probe Sequence
gcaatttggtagttgtagacatttg

SEQ ID NO: 49600 - DNA, 25 bp, Probe Sequence
agcaatttggtagttgtagacattt

SEQ ID NO: 49601 - DNA, 25 bp, Probe Sequence
aaattaaacaagaaacccaacaaca

SEQ ID NO: 49602 - DNA, 25 bp, Probe Sequence
ggagcaatttggtagttgtagacat

SEQ ID NO: 49603 - DNA, 25 bp, Probe Sequence
attctaaatgggagttgatgctcag

SEQ ID NO: 49604 - DNA, 25 bp, Probe Sequence
gattctaaatgggagttgatgctca

SEQ ID NO: 49605 - DNA, 25 bp, Probe Sequence
tagcagtattgttggtctaagtcaa

SEQ ID NO: 49606 - DNA, 25 bp, Probe Sequence
aattacatattgctgcttgtgtgtt

SEQ ID NO: 49607 - DNA, 25 bp, Probe Sequence
ttagcagtattgttggtctaagtca

SEQ ID NO: 49608 - DNA, 25 bp, Probe Sequence
gagttcagtggaagttctgtaagat

SEQ ID NO: 49609 - DNA, 25 bp, Probe Sequence
agttcagtggaagttctgtaagatg

SEQ ID NO: 49610 - DNA, 25 bp, Probe Sequence
ttcagtggaagttctgtaagatgtg

SEQ ID NO: 49611 - DNA, 25 bp, Probe Sequence
gttcagtggaagttctgtaagatgt

SEQ ID NO: 49612 - DNA, 25 bp, Probe Sequence
taattacatattgctgcttgtgtgt

SEQ ID NO: 49613 - DNA, 25 bp, Probe Sequence
ggagttcagtggaagttctgtaaga

SEQ ID NO: 49614 - DNA, 25 bp, Probe Sequence
aatggaaggcaggtgaagatataaa

SEQ ID NO: 49615 - DNA, 25 bp, Probe Sequence
aaatggaaggcaggtgaagatataa

SEQ ID NO: 49616 - DNA, 25 bp, Probe Sequence
gaaatggaaggcaggtgaagatata

SEQ ID NO: 49617 - DNA, 25 bp, Probe Sequence
gaagttctgtaagatgtgcatgtac

SEQ ID NO: 49618 - DNA, 25 bp, Probe Sequence
agcagtattgttggtctaagtcaat

SEQ ID NO: 49619 - DNA, 25 bp, Probe Sequence
gcagtattgttggtctaagtcaatt

SEQ ID NO: 49620 - DNA, 25 bp, Probe Sequence
ggaagttctgtaagatgtgcatgta

SEQ ID NO: 49621 - DNA, 25 bp, Probe Sequence
aagttctgtaagatgtgcatgtact

SEQ ID NO: 49622 - DNA, 25 bp, Probe Sequence
agttctgtaagatgtgcatgtacta

SEQ ID NO: 49623 - DNA, 25 bp, Probe Sequence
cctagaatgcttaaatgtgctgtaa

SEQ ID NO: 49624 - DNA, 25 bp, Probe Sequence
ataattacatattgctgcttgtgtg

SEQ ID NO: 49625 - DNA, 25 bp, Probe Sequence
ccctagaatgcttaaatgtgctgta

SEQ ID NO: 49626 - DNA, 25 bp, Probe Sequence
aaaccctagaatgcttaaatgtgct

SEQ ID NO: 49627 - DNA, 25 bp, Probe Sequence
tcaaacctatgttcgtaatgagaga

SEQ ID NO: 49628 - DNA, 25 bp, Probe Sequence
gtcaaacctatgttcgtaatgagag

SEQ ID NO: 49629 - DNA, 25 bp, Probe Sequence
cagtgtggagtatattcagcagtat

SEQ ID NO: 49630 - DNA, 25 bp, Probe Sequence
agtgtggagtatattcagcagtatt

SEQ ID NO: 49631 - DNA, 25 bp, Probe Sequence
tcagtgtggagtatattcagcagta

SEQ ID NO: 49632 - DNA, 25 bp, Probe Sequence
ttgttcagtgtggagtatattcagc

SEQ ID NO: 49633 - DNA, 25 bp, Probe Sequence
tctgccataggaatactgtctacat

SEQ ID NO: 49634 - DNA, 25 bp, Probe Sequence
gttcagtgtggagtatattcagcag

SEQ ID NO: 49635 - DNA, 25 bp, Probe Sequence
ttctgccataggaatactgtctaca

SEQ ID NO: 49636 - DNA, 25 bp, Probe Sequence
ttcagtgtggagtatattcagcagt

SEQ ID NO: 49637 - DNA, 25 bp, Probe Sequence
tgttcagtgtggagtatattcagca

SEQ ID NO: 49638 - DNA, 25 bp, Probe Sequence
ccataggaatactgtctacatgctt

SEQ ID NO: 49639 - DNA, 25 bp, Probe Sequence
ctgccataggaatactgtctacatg

SEQ ID NO: 49640 - DNA, 25 bp, Probe Sequence
ggtggaagttctaatgtctgttagc

SEQ ID NO: 49641 - DNA, 25 bp, Probe Sequence
attctgccataggaatactgtctac

SEQ ID NO: 49642 - DNA, 25 bp, Probe Sequence
tgtggttggttggtatagaatggtg

SEQ ID NO: 49643 - DNA, 25 bp, Probe Sequence
gccataggaatactgtctacatgct

SEQ ID NO: 49644 - DNA, 25 bp, Probe Sequence
gcagagagcaatgatagcaaataat

SEQ ID NO: 49645 - DNA, 25 bp, Probe Sequence
acggaaaccattgattagaactaca

SEQ ID NO: 49646 - DNA, 25 bp, Probe Sequence
attggtttgttcagtgtggagtata

SEQ ID NO: 49647 - DNA, 25 bp, Probe Sequence
tggtttgttcagtgtggagtatatt

SEQ ID NO: 49648 - DNA, 25 bp, Probe Sequence
ttggtttgttcagtgtggagtatat

SEQ ID NO: 49649 - DNA, 25 bp, Probe Sequence
ggtttgttcagtgtggagtatattc

SEQ ID NO: 49650 - DNA, 25 bp, Probe Sequence
aacggaaaccattgattagaactac

SEQ ID NO: 49651 - DNA, 25 bp, Probe Sequence
cggaaaccattgattagaactacat

SEQ ID NO: 49652 - DNA, 25 bp, Probe Sequence
gacttggtggtgcataatggatatt

SEQ ID NO: 49653 - DNA, 25 bp, Probe Sequence
aacctaatagaagagtcaccaccaa

SEQ ID NO: 49654 - DNA, 25 bp, Probe Sequence
aagtacaagtatgaggacaaggatg

SEQ ID NO: 49655 - DNA, 25 bp, Probe Sequence
caagtacaagtatgaggacaaggat

SEQ ID NO: 49656 - DNA, 25 bp, Probe Sequence
agtacaagtatgaggacaaggatgg

SEQ ID NO: 49657 - DNA, 25 bp, Probe Sequence
cctaatagaagagtcaccaccaaat

SEQ ID NO: 49658 - DNA, 25 bp, Probe Sequence
ctaatagaagagtcaccaccaaatg

SEQ ID NO: 49659 - DNA, 25 bp, Probe Sequence
acctaatagaagagtcaccaccaaa

SEQ ID NO: 49660 - DNA, 25 bp, Probe Sequence
aaacctaatagaagagtcaccacca

SEQ ID NO: 49661 - DNA, 25 bp, Probe Sequence
agagtcaccaccaaatgaagaataa

SEQ ID NO: 49662 - DNA, 25 bp, Probe Sequence
aagagtcaccaccaaatgaagaata

SEQ ID NO: 49663 - DNA, 25 bp, Probe Sequence
aatagaagagtcaccaccaaatgaa

SEQ ID NO: 49664 - DNA, 25 bp, Probe Sequence
tcagtaaattcttagggatggaagt

SEQ ID NO: 49665 - DNA, 25 bp, Probe Sequence
gagtcaccaccaaatgaagaataaa

SEQ ID NO: 49666 - DNA, 25 bp, Probe Sequence
atagaagagtcaccaccaaatgaag

SEQ ID NO: 49667 - DNA, 25 bp, Probe Sequence
taatagaagagtcaccaccaaatga

SEQ ID NO: 49668 - DNA, 25 bp, Probe Sequence
ctcagtaaattcttagggatggaag

SEQ ID NO: 49669 - DNA, 25 bp, Probe Sequence
gaagagtcaccaccaaatgaagaat

SEQ ID NO: 49670 - DNA, 25 bp, Probe Sequence
tagaagagtcaccaccaaatgaaga

SEQ ID NO: 49671 - DNA, 25 bp, Probe Sequence
aagtatgaggacaaggatgggaaac

SEQ ID NO: 49672 - DNA, 25 bp, Probe Sequence
caagtatgaggacaaggatgggaaa

SEQ ID NO: 49673 - DNA, 25 bp, Probe Sequence
cctcagtaaattcttagggatggaa

SEQ ID NO: 49674 - DNA, 25 bp, Probe Sequence
ctgcctcagtaaattcttagggatg

SEQ ID NO: 49675 - DNA, 25 bp, Probe Sequence
tacaagtatgaggacaaggatggga

SEQ ID NO: 49676 - DNA, 25 bp, Probe Sequence
agaagagtcaccaccaaatgaagaa

SEQ ID NO: 49677 - DNA, 25 bp, Probe Sequence
atgttcatcaatgcctccaagaatt

SEQ ID NO: 49678 - DNA, 25 bp, Probe Sequence
caggaagatgatcgctattacacag

SEQ ID NO: 49679 - DNA, 25 bp, Probe Sequence
cttcttattgactatcagttcacct

SEQ ID NO: 49680 - DNA, 25 bp, Probe Sequence
tcttcttattgactatcagttcacc

SEQ ID NO: 49681 - DNA, 25 bp, Probe Sequence
catgttcatcaatgcctccaagaat

SEQ ID NO: 49682 - DNA, 25 bp, Probe Sequence
ccaggaagatgatcgctattacaca

SEQ ID NO: 49683 - DNA, 25 bp, Probe Sequence
caaccacccaaatatcactttcttt

SEQ ID NO: 49684 - DNA, 25 bp, Probe Sequence
ttcttattgactatcagttcacctt

SEQ ID NO: 49685 - DNA, 25 bp, Probe Sequence
atcagttcacctttagtctatccca

SEQ ID NO: 49686 - DNA, 25 bp, Probe Sequence
ctccaagaatttcaacctcaacatc

SEQ ID NO: 49687 - DNA, 25 bp, Probe Sequence
tatcagttcacctttagtctatccc

SEQ ID NO: 49688 - DNA, 25 bp, Probe Sequence
aagaatttcaacctcaacatcacct

SEQ ID NO: 49689 - DNA, 25 bp, Probe Sequence
caagaatttcaacctcaacatcacc

SEQ ID NO: 49690 - DNA, 25 bp, Probe Sequence
ccaagaatttcaacctcaacatcac

SEQ ID NO: 49691 - DNA, 25 bp, Probe Sequence
tccaagaatttcaacctcaacatca

SEQ ID NO: 49692 - DNA, 25 bp, Probe Sequence
tcagttcacctttagtctatcccag

SEQ ID NO: 49693 - DNA, 25 bp, Probe Sequence
catcaatgcctccaagaatttcaac

SEQ ID NO: 49694 - DNA, 25 bp, Probe Sequence
tcatcaatgcctccaagaatttcaa

SEQ ID NO: 49695 - DNA, 25 bp, Probe Sequence
gttcatcaatgcctccaagaatttc

SEQ ID NO: 49696 - DNA, 25 bp, Probe Sequence
actcttcttattgactatcagttca

SEQ ID NO: 49697 - DNA, 25 bp, Probe Sequence
catctgtgagaagtgtgagaacctg

SEQ ID NO: 49698 - DNA, 25 bp, Probe Sequence
agaatttcaacctcaacatcacctg

SEQ ID NO: 49699 - DNA, 25 bp, Probe Sequence
cctccaagaatttcaacctcaacat

SEQ ID NO: 49700 - DNA, 25 bp, Probe Sequence
ttcatcaatgcctccaagaatttca

SEQ ID NO: 49701 - DNA, 25 bp, Probe Sequence
taatgctcctcttaaccagttgtaa

SEQ ID NO: 49702 - DNA, 25 bp, Probe Sequence
ctcctcttaaccagttgtaacatct

SEQ ID NO: 49703 - DNA, 25 bp, Probe Sequence
tcctcttaaccagttgtaacatctt

SEQ ID NO: 49704 - DNA, 25 bp, Probe Sequence
aatgctcctcttaaccagttgtaac

SEQ ID NO: 49705 - DNA, 25 bp, Probe Sequence
ttaatgctcctcttaaccagttgta

SEQ ID NO: 49706 - DNA, 25 bp, Probe Sequence
gctcctcttaaccagttgtaacatc

SEQ ID NO: 49707 - DNA, 25 bp, Probe Sequence
tacacacacacctccatatatacac

SEQ ID NO: 49708 - DNA, 25 bp, Probe Sequence
tgaattaccatctcagaagtcaagc

SEQ ID NO: 49709 - DNA, 25 bp, Probe Sequence
tatatctatcgtctgcatcactctc

SEQ ID NO: 49710 - DNA, 25 bp, Probe Sequence
cctcttaaccagttgtaacatctta

SEQ ID NO: 49711 - DNA, 25 bp, Probe Sequence
atacacacacacctccatatataca

SEQ ID NO: 49712 - DNA, 25 bp, Probe Sequence
tgctcctcttaaccagttgtaacat

SEQ ID NO: 49713 - DNA, 25 bp, Probe Sequence
atgctcctcttaaccagttgtaaca

SEQ ID NO: 49714 - DNA, 25 bp, Probe Sequence
ttcagaatgtatgcttggtgagtct

SEQ ID NO: 49715 - DNA, 25 bp, Probe Sequence
gaattaccatctcagaagtcaagct

SEQ ID NO: 49716 - DNA, 25 bp, Probe Sequence
acacacacacctccatatatacacg

SEQ ID NO: 49717 - DNA, 25 bp, Probe Sequence
cttaaccagttgtaacatcttacca

SEQ ID NO: 49718 - DNA, 25 bp, Probe Sequence
tcagaatgtatgcttggtgagtctc

SEQ ID NO: 49719 - DNA, 25 bp, Probe Sequence
gtcaagctgatggagtatgtgataa

SEQ ID NO: 49720 - DNA, 25 bp, Probe Sequence
aacatcttaccatttccctaccaaa

SEQ ID NO: 49721 - DNA, 25 bp, Probe Sequence
gctgatggagtatgtgataaagtga

SEQ ID NO: 49722 - DNA, 25 bp, Probe Sequence
cgtgtgtatcagtttggtaatatgc

SEQ ID NO: 49723 - DNA, 25 bp, Probe Sequence
tcttaaccagttgtaacatcttacc

SEQ ID NO: 49724 - DNA, 25 bp, Probe Sequence
caatgacaactgataaagcgagatg

SEQ ID NO: 49725 - DNA, 25 bp, Probe Sequence
tatggcaatgaagtcagtagatagg

SEQ ID NO: 49726 - DNA, 25 bp, Probe Sequence
gatattaagcctgcctacttctaca

SEQ ID NO: 49727 - DNA, 25 bp, Probe Sequence
agcctcttagcattcagattgtatt

SEQ ID NO: 49728 - DNA, 25 bp, Probe Sequence
attaagcctgcctacttctacaatg

SEQ ID NO: 49729 - DNA, 25 bp, Probe Sequence
atggcaatgaagtcagtagatagga

SEQ ID NO: 49730 - DNA, 25 bp, Probe Sequence
tattaagcctgcctacttctacaat

SEQ ID NO: 49731 - DNA, 25 bp, Probe Sequence
atattaagcctgcctacttctacaa

SEQ ID NO: 49732 - DNA, 25 bp, Probe Sequence
cagcctcttagcattcagattgtat

SEQ ID NO: 49733 - DNA, 25 bp, Probe Sequence
agatattaagcctgcctacttctac

SEQ ID NO: 49734 - DNA, 25 bp, Probe Sequence
tggcaatgaagtcagtagataggaa

SEQ ID NO: 49735 - DNA, 25 bp, Probe Sequence
aagaatcctcaggctctacaatcta

SEQ ID NO: 49736 - DNA, 25 bp, Probe Sequence
aactatggcaatgaagtcagtagat

SEQ ID NO: 49737 - DNA, 25 bp, Probe Sequence
tgtaactatggcaatgaagtcagta

SEQ ID NO: 49738 - DNA, 25 bp, Probe Sequence
ttgtaactatggcaatgaagtcagt

SEQ ID NO: 49739 - DNA, 25 bp, Probe Sequence
gtaactatggcaatgaagtcagtag

SEQ ID NO: 49740 - DNA, 25 bp, Probe Sequence
aagatattaagcctgcctacttcta

SEQ ID NO: 49741 - DNA, 25 bp, Probe Sequence
taactatggcaatgaagtcagtaga

SEQ ID NO: 49742 - DNA, 25 bp, Probe Sequence
actatggcaatgaagtcagtagata

SEQ ID NO: 49743 - DNA, 25 bp, Probe Sequence
agaatcctcaggctctacaatctag

SEQ ID NO: 49744 - DNA, 25 bp, Probe Sequence
ctatggcaatgaagtcagtagatag

SEQ ID NO: 49745 - DNA, 25 bp, Probe Sequence
ttctcacattcagacttacacttaa

SEQ ID NO: 49746 - DNA, 25 bp, Probe Sequence
tgagagatcctaagagctagtatgt

SEQ ID NO: 49747 - DNA, 25 bp, Probe Sequence
acagcctcttagcattcagattgta

SEQ ID NO: 49748 - DNA, 25 bp, Probe Sequence
aatcctattaatgctgagagatcct

SEQ ID NO: 49749 - DNA, 25 bp, Probe Sequence
tacctcaagttcaagttaatggcat

SEQ ID NO: 49750 - DNA, 25 bp, Probe Sequence
atacctcaagttcaagttaatggca

SEQ ID NO: 49751 - DNA, 25 bp, Probe Sequence
taagtattggcattagtgttcagtg

SEQ ID NO: 49752 - DNA, 25 bp, Probe Sequence
ttctctctgtgttctctgtattgta

SEQ ID NO: 49753 - DNA, 25 bp, Probe Sequence
tatacctcaagttcaagttaatggc

SEQ ID NO: 49754 - DNA, 25 bp, Probe Sequence
ttaaggttgtgtgtgtattgtgtat

SEQ ID NO: 49755 - DNA, 25 bp, Probe Sequence
aaggttgtgtgtgtattgtgtatat

SEQ ID NO: 49756 - DNA, 25 bp, Probe Sequence
tctctctgtgttctctgtattgtac

SEQ ID NO: 49757 - DNA, 25 bp, Probe Sequence
ctctctgtgttctctgtattgtact

SEQ ID NO: 49758 - DNA, 25 bp, Probe Sequence
acctcaagttcaagttaatggcatt

SEQ ID NO: 49759 - DNA, 25 bp, Probe Sequence
ataagtattggcattagtgttcagt

SEQ ID NO: 49760 - DNA, 25 bp, Probe Sequence
gacattgtgtagcctatggtaagta

SEQ ID NO: 49761 - DNA, 25 bp, Probe Sequence
tgtgttctctgtattgtactaacca

SEQ ID NO: 49762 - DNA, 25 bp, Probe Sequence
cctcaagttcaagttaatggcattg

SEQ ID NO: 49763 - DNA, 25 bp, Probe Sequence
ctctgtattgtactaaccaacctcc

SEQ ID NO: 49764 - DNA, 25 bp, Probe Sequence
agataagtattggcattagtgttca

SEQ ID NO: 49765 - DNA, 25 bp, Probe Sequence
tgagataagtattggcattagtgtt

SEQ ID NO: 49766 - DNA, 25 bp, Probe Sequence
tctctgtattgtactaaccaacctc

SEQ ID NO: 49767 - DNA, 25 bp, Probe Sequence
taaggttgtgtgtgtattgtgtata

SEQ ID NO: 49768 - DNA, 25 bp, Probe Sequence
ttctctgtattgtactaaccaacct

SEQ ID NO: 49769 - DNA, 25 bp, Probe Sequence
gttctctgtattgtactaaccaacc

SEQ ID NO: 49770 - DNA, 25 bp, Probe Sequence
ctgtgttctctgtattgtactaacc

SEQ ID NO: 49771 - DNA, 25 bp, Probe Sequence
gataagtattggcattagtgttcag

SEQ ID NO: 49772 - DNA, 25 bp, Probe Sequence
tctctgtgttctctgtattgtacta

SEQ ID NO: 49773 - DNA, 25 bp, Probe Sequence
ctggaacctgagagcgagtattata

SEQ ID NO: 49774 - DNA, 25 bp, Probe Sequence
ggaacctgagagcgagtattataag

SEQ ID NO: 49775 - DNA, 25 bp, Probe Sequence
tggaacctgagagcgagtattataa

SEQ ID NO: 49776 - DNA, 25 bp, Probe Sequence
gaacctgagagcgagtattataagc

SEQ ID NO: 49777 - DNA, 25 bp, Probe Sequence
cctggaacctgagagcgagtattat

SEQ ID NO: 49778 - DNA, 25 bp, Probe Sequence
actcaagaaagtggtgatgatgatc

SEQ ID NO: 49779 - DNA, 25 bp, Probe Sequence
ctcaagaaagtggtgatgatgatcc

SEQ ID NO: 49780 - DNA, 25 bp, Probe Sequence
aacctgagagcgagtattataagct

SEQ ID NO: 49781 - DNA, 25 bp, Probe Sequence
ttaacttcttcaggaactgggagac

SEQ ID NO: 49782 - DNA, 25 bp, Probe Sequence
ctctgttaacttcttcaggaactgg

SEQ ID NO: 49783 - DNA, 25 bp, Probe Sequence
acctgagagcgagtattataagctg

SEQ ID NO: 49784 - DNA, 25 bp, Probe Sequence
tttgggaacattgatggcgaatact

SEQ ID NO: 49785 - DNA, 25 bp, Probe Sequence
gtttgggaacattgatggcgaatac

SEQ ID NO: 49786 - DNA, 25 bp, Probe Sequence
gctctgttaacttcttcaggaactg

SEQ ID NO: 49787 - DNA, 25 bp, Probe Sequence
ctggatggctctgttaacttcttca

SEQ ID NO: 49788 - DNA, 25 bp, Probe Sequence
aagaaagtggtgatgatgatccgac

SEQ ID NO: 49789 - DNA, 25 bp, Probe Sequence
caagaaagtggtgatgatgatccga

SEQ ID NO: 49790 - DNA, 25 bp, Probe Sequence
atggctctgttaacttcttcaggaa

SEQ ID NO: 49791 - DNA, 25 bp, Probe Sequence
gaacattgatggcgaatactggctg

SEQ ID NO: 49792 - DNA, 25 bp, Probe Sequence
tcaagaaagtggtgatgatgatccg

SEQ ID NO: 49793 - DNA, 25 bp, Probe Sequence
gatggctctgttaacttcttcagga

SEQ ID NO: 49794 - DNA, 25 bp, Probe Sequence
gaggaggctcttactcactcaagaa

SEQ ID NO: 49795 - DNA, 25 bp, Probe Sequence
ggctctgttaacttcttcaggaact

SEQ ID NO: 49796 - DNA, 25 bp, Probe Sequence
ttgggaacattgatggcgaatactg

SEQ ID NO: 49797 - DNA, 25 bp, Probe Sequence
agccataatctcttagtggattgag

SEQ ID NO: 49798 - DNA, 25 bp, Probe Sequence
aagccataatctcttagtggattga

SEQ ID NO: 49799 - DNA, 25 bp, Probe Sequence
ccataatctcttagtggattgagcc

SEQ ID NO: 49800 - DNA, 25 bp, Probe Sequence
gctggattattaaagtggattgtca

SEQ ID NO: 49801 - DNA, 25 bp, Probe Sequence
gccataatctcttagtggattgagc

SEQ ID NO: 49802 - DNA, 25 bp, Probe Sequence
tcccttctctaagccataatctctt

SEQ ID NO: 49803 - DNA, 25 bp, Probe Sequence
ttcccttctctaagccataatctct

SEQ ID NO: 49804 - DNA, 25 bp, Probe Sequence
gttcccttctctaagccataatctc

SEQ ID NO: 49805 - DNA, 25 bp, Probe Sequence
ctgttcccttctctaagccataatc

SEQ ID NO: 49806 - DNA, 25 bp, Probe Sequence
tgttcccttctctaagccataatct

SEQ ID NO: 49807 - DNA, 25 bp, Probe Sequence
taagccataatctcttagtggattg

SEQ ID NO: 49808 - DNA, 25 bp, Probe Sequence
cccttctctaagccataatctctta

SEQ ID NO: 49809 - DNA, 25 bp, Probe Sequence
agctggattattaaagtggattgtc

SEQ ID NO: 49810 - DNA, 25 bp, Probe Sequence
ctgaagctggattattaaagtggat

SEQ ID NO: 49811 - DNA, 25 bp, Probe Sequence
gctgaagctggattattaaagtgga

SEQ ID NO: 49812 - DNA, 25 bp, Probe Sequence
ataatctcttagtggattgagccct

SEQ ID NO: 49813 - DNA, 25 bp, Probe Sequence
cataatctcttagtggattgagccc

SEQ ID NO: 49814 - DNA, 25 bp, Probe Sequence
aagctggattattaaagtggattgt

SEQ ID NO: 49815 - DNA, 25 bp, Probe Sequence
tgaagctggattattaaagtggatt

SEQ ID NO: 49816 - DNA, 25 bp, Probe Sequence
taatctcttagtggattgagccctc

SEQ ID NO: 49817 - DNA, 25 bp, Probe Sequence
gaagctggattattaaagtggattg

SEQ ID NO: 49818 - DNA, 25 bp, Probe Sequence
ctggattattaaagtggattgtcac

SEQ ID NO: 49819 - DNA, 25 bp, Probe Sequence
atctcttagtggattgagccctctt

SEQ ID NO: 49820 - DNA, 25 bp, Probe Sequence
ttctttgagctgttcccttctctaa

SEQ ID NO: 49821 - DNA, 25 bp, Probe Sequence
acattaaattcatggttttcattca

SEQ ID NO: 49822 - DNA, 25 bp, Probe Sequence
cattaaattcatggttttcattcaa

SEQ ID NO: 49823 - DNA, 25 bp, Probe Sequence
ttatgttgttattctcggactgtga

SEQ ID NO: 49824 - DNA, 25 bp, Probe Sequence
gttatgttgttattctcggactgtg

SEQ ID NO: 49825 - DNA, 25 bp, Probe Sequence
ctggttatgttgttattctcggact

SEQ ID NO: 49826 - DNA, 25 bp, Probe Sequence
ggttatgttgttattctcggactgt

SEQ ID NO: 49827 - DNA, 25 bp, Probe Sequence
tggttatgttgttattctcggactg

SEQ ID NO: 49828 - DNA, 25 bp, Probe Sequence
tatgttgttattctcggactgtgaa

SEQ ID NO: 49829 - DNA, 25 bp, Probe Sequence
cctggttatgttgttattctcggac

SEQ ID NO: 49830 - DNA, 25 bp, Probe Sequence
gacctggttatgttgttattctcgg

SEQ ID NO: 49831 - DNA, 25 bp, Probe Sequence
ggacctggttatgttgttattctcg

SEQ ID NO: 49832 - DNA, 25 bp, Probe Sequence
ctagactaggagaccagaagtgaat

SEQ ID NO: 49833 - DNA, 25 bp, Probe Sequence
tagactaggagaccagaagtgaatg

SEQ ID NO: 49834 - DNA, 25 bp, Probe Sequence
acctggttatgttgttattctcgga

SEQ ID NO: 49835 - DNA, 25 bp, Probe Sequence
atgttgttattctcggactgtgaat

SEQ ID NO: 49836 - DNA, 25 bp, Probe Sequence
tgttgttattctcggactgtgaatt

SEQ ID NO: 49837 - DNA, 25 bp, Probe Sequence
attgggacctggttatgttgttatt

SEQ ID NO: 49838 - DNA, 25 bp, Probe Sequence
aattgggacctggttatgttgttat

SEQ ID NO: 49839 - DNA, 25 bp, Probe Sequence
ttgggacctggttatgttgttattc

SEQ ID NO: 49840 - DNA, 25 bp, Probe Sequence
gaattgggacctggttatgttgtta

SEQ ID NO: 49841 - DNA, 25 bp, Probe Sequence
gggacctggttatgttgttattctc

SEQ ID NO: 49842 - DNA, 25 bp, Probe Sequence
gctagactaggagaccagaagtgaa

SEQ ID NO: 49843 - DNA, 25 bp, Probe Sequence
gcatcccaagatcattctacaagta

SEQ ID NO: 49844 - DNA, 25 bp, Probe Sequence
tgggacctggttatgttgttattct

SEQ ID NO: 49845 - DNA, 25 bp, Probe Sequence
attagctagactaggagaccagaag

SEQ ID NO: 49846 - DNA, 25 bp, Probe Sequence
gattagctagactaggagaccagaa

SEQ ID NO: 49847 - DNA, 25 bp, Probe Sequence
caaccatgaactcagctattaagaa

SEQ ID NO: 49848 - DNA, 25 bp, Probe Sequence
gcaaccatgaactcagctattaaga

SEQ ID NO: 49849 - DNA, 25 bp, Probe Sequence
catcctccttgtcttaatcgtcctg

SEQ ID NO: 49850 - DNA, 25 bp, Probe Sequence
tttcaaatcctccctacttccaaga

SEQ ID NO: 49851 - DNA, 25 bp, Probe Sequence
ctttcaaatcctccctacttccaag

SEQ ID NO: 49852 - DNA, 25 bp, Probe Sequence
tcaaatcctccctacttccaagaaa

SEQ ID NO: 49853 - DNA, 25 bp, Probe Sequence
ttcaaatcctccctacttccaagaa

SEQ ID NO: 49854 - DNA, 25 bp, Probe Sequence
ccatcctccttgtcttaatcgtcct

SEQ ID NO: 49855 - DNA, 25 bp, Probe Sequence
tcaatgatgagtcctctctggtcag

SEQ ID NO: 49856 - DNA, 25 bp, Probe Sequence
agatgccttctagattcactgtctt

SEQ ID NO: 49857 - DNA, 25 bp, Probe Sequence
aagcaaccatgaactcagctattaa

SEQ ID NO: 49858 - DNA, 25 bp, Probe Sequence
agcaaccatgaactcagctattaag

SEQ ID NO: 49859 - DNA, 25 bp, Probe Sequence
gtcaatgatgagtcctctctggtca

SEQ ID NO: 49860 - DNA, 25 bp, Probe Sequence
gctttcaaatcctccctacttccaa

SEQ ID NO: 49861 - DNA, 25 bp, Probe Sequence
gtcagacatcgctggaaatgaatag

SEQ ID NO: 49862 - DNA, 25 bp, Probe Sequence
caagcaaccatgaactcagctatta

SEQ ID NO: 49863 - DNA, 25 bp, Probe Sequence
aaccatgaactcagctattaagaaa

SEQ ID NO: 49864 - DNA, 25 bp, Probe Sequence
caatgatgagtcctctctggtcaga

SEQ ID NO: 49865 - DNA, 25 bp, Probe Sequence
atcctccttgtcttaatcgtcctgc

SEQ ID NO: 49866 - DNA, 25 bp, Probe Sequence
agccatcctccttgtcttaatcgtc

SEQ ID NO: 49867 - DNA, 25 bp, Probe Sequence
aatgatgagtcctctctggtcagac

SEQ ID NO: 49868 - DNA, 25 bp, Probe Sequence
cagatgccttctagattcactgtct

SEQ ID NO: 49869 - DNA, 25 bp, Probe Sequence
ctttctcaacagaggatgtagccag

SEQ ID NO: 49870 - DNA, 25 bp, Probe Sequence
gagccatcctccttgtcttaatcgt

SEQ ID NO: 49871 - DNA, 25 bp, Probe Sequence
aaggacatatcttggaacttctgac

SEQ ID NO: 49872 - DNA, 25 bp, Probe Sequence
aggacatatcttggaacttctgaca

SEQ ID NO: 49873 - DNA, 25 bp, Probe Sequence
ggacatatcttggaacttctgacag

SEQ ID NO: 49874 - DNA, 25 bp, Probe Sequence
agtaggtggagatgagattgtgatg

SEQ ID NO: 49875 - DNA, 25 bp, Probe Sequence
cagtaggtggagatgagattgtgat

SEQ ID NO: 49876 - DNA, 25 bp, Probe Sequence
acatatcttggaacttctgacagag

SEQ ID NO: 49877 - DNA, 25 bp, Probe Sequence
gacatatcttggaacttctgacaga

SEQ ID NO: 49878 - DNA, 25 bp, Probe Sequence
catatcttggaacttctgacagagg

SEQ ID NO: 49879 - DNA, 25 bp, Probe Sequence
atatcttggaacttctgacagaggt

SEQ ID NO: 49880 - DNA, 25 bp, Probe Sequence
gtaggtggagatgagattgtgatgg

SEQ ID NO: 49881 - DNA, 25 bp, Probe Sequence
taggtggagatgagattgtgatggt

SEQ ID NO: 49882 - DNA, 25 bp, Probe Sequence
aacagtaggtggagatgagattgtg

SEQ ID NO: 49883 - DNA, 25 bp, Probe Sequence
tatcttggaacttctgacagaggtg

SEQ ID NO: 49884 - DNA, 25 bp, Probe Sequence
gaaacagtaggtggagatgagattg

SEQ ID NO: 49885 - DNA, 25 bp, Probe Sequence
ggaaaggacatatcttggaacttct

SEQ ID NO: 49886 - DNA, 25 bp, Probe Sequence
aggaaaggacatatcttggaacttc

SEQ ID NO: 49887 - DNA, 25 bp, Probe Sequence
gaggaaaggacatatcttggaactt

SEQ ID NO: 49888 - DNA, 25 bp, Probe Sequence
aaaggacatatcttggaacttctga

SEQ ID NO: 49889 - DNA, 25 bp, Probe Sequence
tgaaacagtaggtggagatgagatt

SEQ ID NO: 49890 - DNA, 25 bp, Probe Sequence
gaaaggacatatcttggaacttctg

SEQ ID NO: 49891 - DNA, 25 bp, Probe Sequence
agaggaaaggacatatcttggaact

SEQ ID NO: 49892 - DNA, 25 bp, Probe Sequence
gttcacgaagaggaaaggacatatc

SEQ ID NO: 49893 - DNA, 25 bp, Probe Sequence
ttcacgaagaggaaaggacatatct

SEQ ID NO: 49894 - DNA, 25 bp, Probe Sequence
acagtaggtggagatgagattgtga

SEQ ID NO: 49895 - DNA, 25 bp, Probe Sequence
ctttagcactgtacccctgacactt

SEQ ID NO: 49896 - DNA, 25 bp, Probe Sequence
ccaataaaacaaggtagtttggctg

SEQ ID NO: 49897 - DNA, 25 bp, Probe Sequence
tccaataaaacaaggtagtttggct

SEQ ID NO: 49898 - DNA, 25 bp, Probe Sequence
tttagcactgtacccctgacacttg

SEQ ID NO: 49899 - DNA, 25 bp, Probe Sequence
tatgatgatgagtatgtgctggaag

SEQ ID NO: 49900 - DNA, 25 bp, Probe Sequence
gtatgatgatgagtatgtgctggaa

SEQ ID NO: 49901 - DNA, 25 bp, Probe Sequence
attcctatgaagtgctgtcttgtat

SEQ ID NO: 49902 - DNA, 25 bp, Probe Sequence
ttcctatgaagtgctgtcttgtatc

SEQ ID NO: 49903 - DNA, 25 bp, Probe Sequence
gattcctatgaagtgctgtcttgta

SEQ ID NO: 49904 - DNA, 25 bp, Probe Sequence
aacttacagaagcagagacagaata

SEQ ID NO: 49905 - DNA, 25 bp, Probe Sequence
gaagaggctgtcaacaatatcatca

SEQ ID NO: 49906 - DNA, 25 bp, Probe Sequence
acttacagaagcagagacagaatat

SEQ ID NO: 49907 - DNA, 25 bp, Probe Sequence
caacttacagaagcagagacagaat

SEQ ID NO: 49908 - DNA, 25 bp, Probe Sequence
aagaggctgtcaacaatatcatcac

SEQ ID NO: 49909 - DNA, 25 bp, Probe Sequence
ccaaccaggaatatgttacactctt

SEQ ID NO: 49910 - DNA, 25 bp, Probe Sequence
aaccaaccaggaatatgttacactc

SEQ ID NO: 49911 - DNA, 25 bp, Probe Sequence
caaccaggaatatgttacactcttg

SEQ ID NO: 49912 - DNA, 25 bp, Probe Sequence
ggtatattcagaggtggctatgatt

SEQ ID NO: 49913 - DNA, 25 bp, Probe Sequence
aggtatattcagaggtggctatgat

SEQ ID NO: 49914 - DNA, 25 bp, Probe Sequence
attcgctctatctggcaggtatatt

SEQ ID NO: 49915 - DNA, 25 bp, Probe Sequence
tgatgatgagtatgtgctggaagat

SEQ ID NO: 49916 - DNA, 25 bp, Probe Sequence
atgatgatgagtatgtgctggaaga

SEQ ID NO: 49917 - DNA, 25 bp, Probe Sequence
tgaagaggctgtcaacaatatcatc

SEQ ID NO: 49918 - DNA, 25 bp, Probe Sequence
aggaatatgttacactcttgttcgt

SEQ ID NO: 49919 - DNA, 25 bp, Probe Sequence
tcaacttacagaagcagagacagaa

SEQ ID NO: 49920 - DNA, 25 bp, Probe Sequence
ttcaacttacagaagcagagacaga

SEQ ID NO: 49921 - DNA, 25 bp, Probe Sequence
caggaatatgttacactcttgttcg

SEQ ID NO: 49922 - DNA, 25 bp, Probe Sequence
accaggaatatgttacactcttgtt

SEQ ID NO: 49923 - DNA, 25 bp, Probe Sequence
gatagaatcagagtagaggacatgg

SEQ ID NO: 49924 - DNA, 25 bp, Probe Sequence
atagaatcagagtagaggacatggc

SEQ ID NO: 49925 - DNA, 25 bp, Probe Sequence
cctcacttcttaacatattcctgtg

SEQ ID NO: 49926 - DNA, 25 bp, Probe Sequence
cacttcttaacatattcctgtgtct

SEQ ID NO: 49927 - DNA, 25 bp, Probe Sequence
tcacttcttaacatattcctgtgtc

SEQ ID NO: 49928 - DNA, 25 bp, Probe Sequence
ctcacttcttaacatattcctgtgt

SEQ ID NO: 49929 - DNA, 25 bp, Probe Sequence
tagaatcagagtagaggacatggct

SEQ ID NO: 49930 - DNA, 25 bp, Probe Sequence
acttcttaacatattcctgtgtctt

SEQ ID NO: 49931 - DNA, 25 bp, Probe Sequence
catattcctgtgtctttgtaatggc

SEQ ID NO: 49932 - DNA, 25 bp, Probe Sequence
cataggaattatttcgttggctgaa

SEQ ID NO: 49933 - DNA, 25 bp, Probe Sequence
ataggaattatttcgttggctgaac

SEQ ID NO: 49934 - DNA, 25 bp, Probe Sequence
ccctcacttcttaacatattcctgt

SEQ ID NO: 49935 - DNA, 25 bp, Probe Sequence
ctactgccgccataggaattatttc

SEQ ID NO: 49936 - DNA, 25 bp, Probe Sequence
acatattcctgtgtctttgtaatgg

SEQ ID NO: 49937 - DNA, 25 bp, Probe Sequence
taaccacagccctaaatccatgata

SEQ ID NO: 49938 - DNA, 25 bp, Probe Sequence
ccacagccctaaatccatgataaag

SEQ ID NO: 49939 - DNA, 25 bp, Probe Sequence
tgatagaatcagagtagaggacatg

SEQ ID NO: 49940 - DNA, 25 bp, Probe Sequence
ccctccctctaaatacctaccctag

SEQ ID NO: 49941 - DNA, 25 bp, Probe Sequence
gccctaaatccatgataaagctact

SEQ ID NO: 49942 - DNA, 25 bp, Probe Sequence
ccctctaaatacctaccctagatga

SEQ ID NO: 49943 - DNA, 25 bp, Probe Sequence
tccctctaaatacctaccctagatg

SEQ ID NO: 49944 - DNA, 25 bp, Probe Sequence
ttgatagaatcagagtagaggacat

SEQ ID NO: 49945 - DNA, 25 bp, Probe Sequence
ctccctctaaatacctaccctagat

SEQ ID NO: 49946 - DNA, 25 bp, Probe Sequence
tcttaacatattcctgtgtctttgt

SEQ ID NO: 49947 - DNA, 25 bp, Probe Sequence
gaatatgaccaaagaccaacacttc

SEQ ID NO: 49948 - DNA, 25 bp, Probe Sequence
tgaatatgaccaaagaccaacactt

SEQ ID NO: 49949 - DNA, 25 bp, Probe Sequence
caatgacagatttccctttagaccc

SEQ ID NO: 49950 - DNA, 25 bp, Probe Sequence
ccaatgacagatttccctttagacc

SEQ ID NO: 49951 - DNA, 25 bp, Probe Sequence
cccaatgacagatttccctttagac

SEQ ID NO: 49952 - DNA, 25 bp, Probe Sequence
taaactacagatgtcaactccttgg

SEQ ID NO: 49953 - DNA, 25 bp, Probe Sequence
aatatgaccaaagaccaacacttcc

SEQ ID NO: 49954 - DNA, 25 bp, Probe Sequence
tctaaactacagatgtcaactcctt

SEQ ID NO: 49955 - DNA, 25 bp, Probe Sequence
ttctaaactacagatgtcaactcct

SEQ ID NO: 49956 - DNA, 25 bp, Probe Sequence
aatgacagatttccctttagaccca

SEQ ID NO: 49957 - DNA, 25 bp, Probe Sequence
ctaaactacagatgtcaactccttg

SEQ ID NO: 49958 - DNA, 25 bp, Probe Sequence
tttctgattgtggtgttgagagttg

SEQ ID NO: 49959 - DNA, 25 bp, Probe Sequence
tttctaaactacagatgtcaactcc

SEQ ID NO: 49960 - DNA, 25 bp, Probe Sequence
atgacagatttccctttagacccag

SEQ ID NO: 49961 - DNA, 25 bp, Probe Sequence
cttggttctcctctagattgaagtt

SEQ ID NO: 49962 - DNA, 25 bp, Probe Sequence
ctcttggttctcctctagattgaag

SEQ ID NO: 49963 - DNA, 25 bp, Probe Sequence
ctgatgctgttcttaccagattaaa

SEQ ID NO: 49964 - DNA, 25 bp, Probe Sequence
tgatttgtaatttcatttctggagc

SEQ ID NO: 49965 - DNA, 25 bp, Probe Sequence
tcttggttctcctctagattgaagt

SEQ ID NO: 49966 - DNA, 25 bp, Probe Sequence
gctgtcattcatgtgattgatttgt

SEQ ID NO: 49967 - DNA, 25 bp, Probe Sequence
ttctgattgtggtgttgagagttgc

SEQ ID NO: 49968 - DNA, 25 bp, Probe Sequence
gtgaatatgaccaaagaccaacact

SEQ ID NO: 49969 - DNA, 25 bp, Probe Sequence
ggctgtcattcatgtgattgatttg

SEQ ID NO: 49970 - DNA, 25 bp, Probe Sequence
caatcagttcactcattcctggtcc

SEQ ID NO: 49971 - DNA, 25 bp, Probe Sequence
agttgaaggtgaagtgtctgaacaa

SEQ ID NO: 49972 - DNA, 25 bp, Probe Sequence
cagttgaaggtgaagtgtctgaaca

SEQ ID NO: 49973 - DNA, 25 bp, Probe Sequence
ttgaaggtgaagtgtctgaacaacc

SEQ ID NO: 49974 - DNA, 25 bp, Probe Sequence
gcagttgaaggtgaagtgtctgaac

SEQ ID NO: 49975 - DNA, 25 bp, Probe Sequence
gttgaaggtgaagtgtctgaacaac

SEQ ID NO: 49976 - DNA, 25 bp, Probe Sequence
ccagacaacatcaaggctctcttcc

SEQ ID NO: 49977 - DNA, 25 bp, Probe Sequence
cagtgaaataaagcatcccaccctg

SEQ ID NO: 49978 - DNA, 25 bp, Probe Sequence
cacagtgaaataaagcatcccaccc

SEQ ID NO: 49979 - DNA, 25 bp, Probe Sequence
ccacagtgaaataaagcatcccacc

SEQ ID NO: 49980 - DNA, 25 bp, Probe Sequence
ctcattccttcagacccagttttcc

SEQ ID NO: 49981 - DNA, 25 bp, Probe Sequence
cctcattccttcagacccagttttc

SEQ ID NO: 49982 - DNA, 25 bp, Probe Sequence
acagtgaaataaagcatcccaccct

SEQ ID NO: 49983 - DNA, 25 bp, Probe Sequence
tgcagttgaaggtgaagtgtctgaa

SEQ ID NO: 49984 - DNA, 25 bp, Probe Sequence
gccacagtgaaataaagcatcccac

SEQ ID NO: 49985 - DNA, 25 bp, Probe Sequence
ctctcaaagctggtgaagaagcatg

SEQ ID NO: 49986 - DNA, 25 bp, Probe Sequence
cactgctgactccaagtactgctac

SEQ ID NO: 49987 - DNA, 25 bp, Probe Sequence
tcattccttcagacccagttttccc

SEQ ID NO: 49988 - DNA, 25 bp, Probe Sequence
ccctcattccttcagacccagtttt

SEQ ID NO: 49989 - DNA, 25 bp, Probe Sequence
gaaggtgaagtgtctgaacaacctg

SEQ ID NO: 49990 - DNA, 25 bp, Probe Sequence
tcactgctgactccaagtactgcta

SEQ ID NO: 49991 - DNA, 25 bp, Probe Sequence
tgaaggtgaagtgtctgaacaacct

SEQ ID NO: 49992 - DNA, 25 bp, Probe Sequence
gaaataaagcatcccaccctgcaaa

SEQ ID NO: 49993 - DNA, 25 bp, Probe Sequence
catggtcactgctgactccaagtac

SEQ ID NO: 49994 - DNA, 25 bp, Probe Sequence
aaggtgaagtgtctgaacaacctgg

SEQ ID NO: 49995 - DNA, 25 bp, Probe Sequence
gtctctctcataccaacagaacttc

SEQ ID NO: 49996 - DNA, 25 bp, Probe Sequence
caagtctctctcataccaacagaac

SEQ ID NO: 49997 - DNA, 25 bp, Probe Sequence
acaagtctctctcataccaacagaa

SEQ ID NO: 49998 - DNA, 25 bp, Probe Sequence
agtctctctcataccaacagaactt

SEQ ID NO: 49999 - DNA, 25 bp, Probe Sequence
aagtctctctcataccaacagaact

SEQ ID NO: 50000 - DNA, 25 bp, Probe Sequence
tctctctcataccaacagaacttcc

SEQ ID NO: 50001 - DNA, 25 bp, Probe Sequence
gacaagtctctctcataccaacaga

SEQ ID NO: 50002 - DNA, 25 bp, Probe Sequence
gtagacaagtctctctcataccaac

SEQ ID NO: 50003 - DNA, 25 bp, Probe Sequence
tagacaagtctctctcataccaaca

SEQ ID NO: 50004 - DNA, 25 bp, Probe Sequence
tgtagacaagtctctctcataccaa

SEQ ID NO: 50005 - DNA, 25 bp, Probe Sequence
ctgtagacaagtctctctcatacca

SEQ ID NO: 50006 - DNA, 25 bp, Probe Sequence
cctgtagacaagtctctctcatacc

SEQ ID NO: 50007 - DNA, 25 bp, Probe Sequence
gttagagcattagcagatgtccact

SEQ ID NO: 50008 - DNA, 25 bp, Probe Sequence
agacaagtctctctcataccaacag

SEQ ID NO: 50009 - DNA, 25 bp, Probe Sequence
tgttagagcattagcagatgtccac

SEQ ID NO: 50010 - DNA, 25 bp, Probe Sequence
gtgttagagcattagcagatgtcca

SEQ ID NO: 50011 - DNA, 25 bp, Probe Sequence
ctctctcataccaacagaacttccg

SEQ ID NO: 50012 - DNA, 25 bp, Probe Sequence
gcctgtagacaagtctctctcatac

SEQ ID NO: 50013 - DNA, 25 bp, Probe Sequence
tgcctgtagacaagtctctctcata

SEQ ID NO: 50014 - DNA, 25 bp, Probe Sequence
ttagagcattagcagatgtccactg

SEQ ID NO: 50015 - DNA, 25 bp, Probe Sequence
cgtgttagagcattagcagatgtcc

SEQ ID NO: 50016 - DNA, 25 bp, Probe Sequence
ccgtgttagagcattagcagatgtc

SEQ ID NO: 50017 - DNA, 25 bp, Probe Sequence
ttacctgcctgtagacaagtctctc

SEQ ID NO: 50018 - DNA, 25 bp, Probe Sequence
ctgcctgtagacaagtctctctcat

SEQ ID NO: 50019 - DNA, 25 bp, Probe Sequence
agtggagtaatttatgccttagtct

SEQ ID NO: 50020 - DNA, 25 bp, Probe Sequence
cagtggagtaatttatgccttagtc

SEQ ID NO: 50021 - DNA, 25 bp, Probe Sequence
ccagtggagtaatttatgccttagt

SEQ ID NO: 50022 - DNA, 25 bp, Probe Sequence
cccagtggagtaatttatgccttag

SEQ ID NO: 50023 - DNA, 25 bp, Probe Sequence
ggagtaatttatgccttagtcttgt

SEQ ID NO: 50024 - DNA, 25 bp, Probe Sequence
tggagtaatttatgccttagtcttg

SEQ ID NO: 50025 - DNA, 25 bp, Probe Sequence
gtggagtaatttatgccttagtctt

SEQ ID NO: 50026 - DNA, 25 bp, Probe Sequence
gcccagtggagtaatttatgcctta

SEQ ID NO: 50027 - DNA, 25 bp, Probe Sequence
gagtaatttatgccttagtcttgtt

SEQ ID NO: 50028 - DNA, 25 bp, Probe Sequence
agtaatttatgccttagtcttgttt

SEQ ID NO: 50029 - DNA, 25 bp, Probe Sequence
tagtcttgttttgaggtagaaatgc

SEQ ID NO: 50030 - DNA, 25 bp, Probe Sequence
atttatgccttagtcttgttttgag

SEQ ID NO: 50031 - DNA, 25 bp, Probe Sequence
ttatgccttagtcttgttttgaggt

SEQ ID NO: 50032 - DNA, 25 bp, Probe Sequence
tatgccttagtcttgttttgaggta

SEQ ID NO: 50033 - DNA, 25 bp, Probe Sequence
tttatgccttagtcttgttttgagg

SEQ ID NO: 50034 - DNA, 25 bp, Probe Sequence
gccttagtcttgttttgaggtagaa

SEQ ID NO: 50035 - DNA, 25 bp, Probe Sequence
atgccttagtcttgttttgaggtag

SEQ ID NO: 50036 - DNA, 25 bp, Probe Sequence
ccttagtcttgttttgaggtagaaa

SEQ ID NO: 50037 - DNA, 25 bp, Probe Sequence
tgtgcatagtacgacctttactgtc

SEQ ID NO: 50038 - DNA, 25 bp, Probe Sequence
ctgtgcatagtacgacctttactgt

SEQ ID NO: 50039 - DNA, 25 bp, Probe Sequence
aatttatgccttagtcttgttttga

SEQ ID NO: 50040 - DNA, 25 bp, Probe Sequence
tgccttagtcttgttttgaggtaga

SEQ ID NO: 50041 - DNA, 25 bp, Probe Sequence
gacaagtggtatgaccagtgataat

SEQ ID NO: 50042 - DNA, 25 bp, Probe Sequence
acaagtggtatgaccagtgataatg

SEQ ID NO: 50043 - DNA, 25 bp, Probe Sequence
ccacagttctacatcatccagaccg

SEQ ID NO: 50044 - DNA, 25 bp, Probe Sequence
cccacagttctacatcatccagacc

SEQ ID NO: 50045 - DNA, 25 bp, Probe Sequence
cacagttctacatcatccagaccgg

SEQ ID NO: 50046 - DNA, 25 bp, Probe Sequence
ctttcaaatcgtccgcgatgacatg

SEQ ID NO: 50047 - DNA, 25 bp, Probe Sequence
atgtagtctctgttaaggtcaagtt

SEQ ID NO: 50048 - DNA, 25 bp, Probe Sequence
aatgtagtctctgttaaggtcaagt

SEQ ID NO: 50049 - DNA, 25 bp, Probe Sequence
aacaacctccttcttatctgtgata

SEQ ID NO: 50050 - DNA, 25 bp, Probe Sequence
aatcatccgtatgtcagtgtatctg

SEQ ID NO: 50051 - DNA, 25 bp, Probe Sequence
gtcctctaagagttgattgctgtat

SEQ ID NO: 50052 - DNA, 25 bp, Probe Sequence
attgtgctattactccaaggtccaa

SEQ ID NO: 50053 - DNA, 25 bp, Probe Sequence
aattgtgctattactccaaggtcca

SEQ ID NO: 50054 - DNA, 25 bp, Probe Sequence
tcctctaagagttgattgctgtata

SEQ ID NO: 50055 - DNA, 25 bp, Probe Sequence
tgtcctctaagagttgattgctgta

SEQ ID NO: 50056 - DNA, 25 bp, Probe Sequence
gtgctattactccaaggtccaactt

SEQ ID NO: 50057 - DNA, 25 bp, Probe Sequence
atcatccgtatgtcagtgtatctgg

SEQ ID NO: 50058 - DNA, 25 bp, Probe Sequence
ttcttccattcttgtcattggtcaa

SEQ ID NO: 50059 - DNA, 25 bp, Probe Sequence
tcttccattcttgtcattggtcaat

SEQ ID NO: 50060 - DNA, 25 bp, Probe Sequence
acatggtattgtatatcagtggaga

SEQ ID NO: 50061 - DNA, 25 bp, Probe Sequence
ttccattcttgtcattggtcaatag

SEQ ID NO: 50062 - DNA, 25 bp, Probe Sequence
cttccattcttgtcattggtcaata

SEQ ID NO: 50063 - DNA, 25 bp, Probe Sequence
catggtattgtatatcagtggagaa

SEQ ID NO: 50064 - DNA, 25 bp, Probe Sequence
tccattcttgtcattggtcaatagg

SEQ ID NO: 50065 - DNA, 25 bp, Probe Sequence
tgtagtctctgttaaggtcaagttt

SEQ ID NO: 50066 - DNA, 25 bp, Probe Sequence
tcaaatgtagtctctgttaaggtca

SEQ ID NO: 50067 - DNA, 25 bp, Probe Sequence
aaatcatccgtatgtcagtgtatct

SEQ ID NO: 50068 - DNA, 25 bp, Probe Sequence
ttgtcctctaagagttgattgctgt

SEQ ID NO: 50069 - DNA, 25 bp, Probe Sequence
atgctacccaattccagatttcttt

SEQ ID NO: 50070 - DNA, 25 bp, Probe Sequence
ttgtgctattactccaaggtccaac

SEQ ID NO: 50071 - DNA, 25 bp, Probe Sequence
gcttccgaataaaagaagaaagcaa

SEQ ID NO: 50072 - DNA, 25 bp, Probe Sequence
atgtcagcagtcaatgatgaatctt

SEQ ID NO: 50073 - DNA, 25 bp, Probe Sequence
tcttagtgatgctgccaggataatt

SEQ ID NO: 50074 - DNA, 25 bp, Probe Sequence
ctcttagtgatgctgccaggataat

SEQ ID NO: 50075 - DNA, 25 bp, Probe Sequence
taattggatgtgctcctgaatctac

SEQ ID NO: 50076 - DNA, 25 bp, Probe Sequence
ataattggatgtgctcctgaatcta

SEQ ID NO: 50077 - DNA, 25 bp, Probe Sequence
tataattggatgtgctcctgaatct

SEQ ID NO: 50078 - DNA, 25 bp, Probe Sequence
catgtcagcagtcaatgatgaatct

SEQ ID NO: 50079 - DNA, 25 bp, Probe Sequence
caaagagaaacctgagaaagacaag

SEQ ID NO: 50080 - DNA, 25 bp, Probe Sequence
aaggagaagaaggagaaagttgaaa

SEQ ID NO: 50081 - DNA, 25 bp, Probe Sequence
aaaggagaagaaggagaaagttgaa

SEQ ID NO: 50082 - DNA, 25 bp, Probe Sequence
acaaagagaaacctgagaaagacaa

SEQ ID NO: 50083 - DNA, 25 bp, Probe Sequence
gacaaagagaaacctgagaaagaca

SEQ ID NO: 50084 - DNA, 25 bp, Probe Sequence
aaaccaaagtctgacattctgaaag

SEQ ID NO: 50085 - DNA, 25 bp, Probe Sequence
caaaccaaagtctgacattctgaaa

SEQ ID NO: 50086 - DNA, 25 bp, Probe Sequence
attggatgtgctcctgaatctactt

SEQ ID NO: 50087 - DNA, 25 bp, Probe Sequence
aattggatgtgctcctgaatctact

SEQ ID NO: 50088 - DNA, 25 bp, Probe Sequence
accaaagtctgacattctgaaagat

SEQ ID NO: 50089 - DNA, 25 bp, Probe Sequence
ttagtgatgctgccaggataatttc

SEQ ID NO: 50090 - DNA, 25 bp, Probe Sequence
cttagtgatgctgccaggataattt

SEQ ID NO: 50091 - DNA, 25 bp, Probe Sequence
ttataattggatgtgctcctgaatc

SEQ ID NO: 50092 - DNA, 25 bp, Probe Sequence
aaccaaagtctgacattctgaaaga

SEQ ID NO: 50093 - DNA, 25 bp, Probe Sequence
ggacaaagagaaacctgagaaagac

SEQ ID NO: 50094 - DNA, 25 bp, Probe Sequence
aaaccaaaccaaagtctgacattct

SEQ ID NO: 50095 - DNA, 25 bp, Probe Sequence
tcagcagtcaatgatgaatctttct

SEQ ID NO: 50096 - DNA, 25 bp, Probe Sequence
agtatgttctcctgttcctatgtta

SEQ ID NO: 50097 - DNA, 25 bp, Probe Sequence
tagtatgttctcctgttcctatgtt

SEQ ID NO: 50098 - DNA, 25 bp, Probe Sequence
gtatgttctcctgttcctatgttaa

SEQ ID NO: 50099 - DNA, 25 bp, Probe Sequence
atgttctcctgttcctatgttaagg

SEQ ID NO: 50100 - DNA, 25 bp, Probe Sequence
tatgttctcctgttcctatgttaag

SEQ ID NO: 50101 - DNA, 25 bp, Probe Sequence
atagtatgttctcctgttcctatgt

SEQ ID NO: 50102 - DNA, 25 bp, Probe Sequence
tcccaaatcctttcatcattctaca

SEQ ID NO: 50103 - DNA, 25 bp, Probe Sequence
gtgacttaccagggaaacttataca

SEQ ID NO: 50104 - DNA, 25 bp, Probe Sequence
tgtgacttaccagggaaacttatac

SEQ ID NO: 50105 - DNA, 25 bp, Probe Sequence
cccaaatcctttcatcattctacag

SEQ ID NO: 50106 - DNA, 25 bp, Probe Sequence
gacttaccagggaaacttatacagg

SEQ ID NO: 50107 - DNA, 25 bp, Probe Sequence
tgacttaccagggaaacttatacag

SEQ ID NO: 50108 - DNA, 25 bp, Probe Sequence
ctttcccaaatcctttcatcattct

SEQ ID NO: 50109 - DNA, 25 bp, Probe Sequence
atctcactgtttatgttgctttcca

SEQ ID NO: 50110 - DNA, 25 bp, Probe Sequence
tcaaatagtatgttctcctgttcct

SEQ ID NO: 50111 - DNA, 25 bp, Probe Sequence
gctttcccaaatcctttcatcattc

SEQ ID NO: 50112 - DNA, 25 bp, Probe Sequence
ccaaatcctttcatcattctacagt

SEQ ID NO: 50113 - DNA, 25 bp, Probe Sequence
ttcccaaatcctttcatcattctac

SEQ ID NO: 50114 - DNA, 25 bp, Probe Sequence
aatagtatgttctcctgttcctatg

SEQ ID NO: 50115 - DNA, 25 bp, Probe Sequence
ctcactgtttatgttgctttccaaa

SEQ ID NO: 50116 - DNA, 25 bp, Probe Sequence
tgatctcactgtttatgttgctttc

SEQ ID NO: 50117 - DNA, 25 bp, Probe Sequence
ctgatctcactgtttatgttgcttt

SEQ ID NO: 50118 - DNA, 25 bp, Probe Sequence
cttggaggtgatgtcttatttgtgg

SEQ ID NO: 50119 - DNA, 25 bp, Probe Sequence
atctgatctcactgtttatgttgct

SEQ ID NO: 50120 - DNA, 25 bp, Probe Sequence
ttcaagaacaactacctagagactg

SEQ ID NO: 50121 - DNA, 25 bp, Probe Sequence
gttcaagaacaactacctagagact

SEQ ID NO: 50122 - DNA, 25 bp, Probe Sequence
aatactatggacattggacggactg

SEQ ID NO: 50123 - DNA, 25 bp, Probe Sequence
tcaagaacaactacctagagactgt

SEQ ID NO: 50124 - DNA, 25 bp, Probe Sequence
acacagtattctaccatgttcaaga

SEQ ID NO: 50125 - DNA, 25 bp, Probe Sequence
gttggtagtgaataacaatggaatt

SEQ ID NO: 50126 - DNA, 25 bp, Probe Sequence
cctgcctatgaattattacacagta

SEQ ID NO: 50127 - DNA, 25 bp, Probe Sequence
ggtacaacttgccaatcatactgtt

SEQ ID NO: 50128 - DNA, 25 bp, Probe Sequence
gctgacccgctctaatatgtaaata

SEQ ID NO: 50129 - DNA, 25 bp, Probe Sequence
tgaaggagcaaatactatggacatt

SEQ ID NO: 50130 - DNA, 25 bp, Probe Sequence
agatgtgaagtttatccaggttgat

SEQ ID NO: 50131 - DNA, 25 bp, Probe Sequence
gtgaaggagcaaatactatggacat

SEQ ID NO: 50132 - DNA, 25 bp, Probe Sequence
cagatgtgaagtttatccaggttga

SEQ ID NO: 50133 - DNA, 25 bp, Probe Sequence
tgatgtaattgtgttatttggtgcc

SEQ ID NO: 50134 - DNA, 25 bp, Probe Sequence
atccctgcctatgaattattacaca

SEQ ID NO: 50135 - DNA, 25 bp, Probe Sequence
tgctgatgtaattgtgttatttggt

SEQ ID NO: 50136 - DNA, 25 bp, Probe Sequence
tacacagtattctaccatgttcaag

SEQ ID NO: 50137 - DNA, 25 bp, Probe Sequence
ctgatgtaattgtgttatttggtgc

SEQ ID NO: 50138 - DNA, 25 bp, Probe Sequence
gctgatgtaattgtgttatttggtg

SEQ ID NO: 50139 - DNA, 25 bp, Probe Sequence
atgtaattgtgttatttggtgccag

SEQ ID NO: 50140 - DNA, 25 bp, Probe Sequence
gatgtaattgtgttatttggtgcca

SEQ ID NO: 50141 - DNA, 25 bp, Probe Sequence
tatgtaaataaagacgccagttggt

SEQ ID NO: 50142 - DNA, 25 bp, Probe Sequence
atatgtaaataaagacgccagttgg

SEQ ID NO: 50143 - DNA, 25 bp, Probe Sequence
caggtacaacttgccaatcatactg

SEQ ID NO: 50144 - DNA, 25 bp, Probe Sequence
ctctaacacattcttcccttcttca

SEQ ID NO: 50145 - DNA, 25 bp, Probe Sequence
taacacattcttcccttcttcacaa

SEQ ID NO: 50146 - DNA, 25 bp, Probe Sequence
tctaacacattcttcccttcttcac

SEQ ID NO: 50147 - DNA, 25 bp, Probe Sequence
ctaacacattcttcccttcttcaca

SEQ ID NO: 50148 - DNA, 25 bp, Probe Sequence
cctctaacacattcttcccttcttc

SEQ ID NO: 50149 - DNA, 25 bp, Probe Sequence
cttccaataaaggtgtttctcttcc

SEQ ID NO: 50150 - DNA, 25 bp, Probe Sequence
aacacattcttcccttcttcacaaa

SEQ ID NO: 50151 - DNA, 25 bp, Probe Sequence
gctcttccaataaaggtgtttctct

SEQ ID NO: 50152 - DNA, 25 bp, Probe Sequence
tcttccaataaaggtgtttctcttc

SEQ ID NO: 50153 - DNA, 25 bp, Probe Sequence
ctcttccaataaaggtgtttctctt

SEQ ID NO: 50154 - DNA, 25 bp, Probe Sequence
acacattcttcccttcttcacaaac

SEQ ID NO: 50155 - DNA, 25 bp, Probe Sequence
ccctctaacacattcttcccttctt

SEQ ID NO: 50156 - DNA, 25 bp, Probe Sequence
ttccaataaaggtgtttctcttcct

SEQ ID NO: 50157 - DNA, 25 bp, Probe Sequence
caataaaggtgtttctcttcctcct

SEQ ID NO: 50158 - DNA, 25 bp, Probe Sequence
tccaataaaggtgtttctcttcctc

SEQ ID NO: 50159 - DNA, 25 bp, Probe Sequence
cacattcttcccttcttcacaaacg

SEQ ID NO: 50160 - DNA, 25 bp, Probe Sequence
ccaataaaggtgtttctcttcctcc

SEQ ID NO: 50161 - DNA, 25 bp, Probe Sequence
tccctctaacacattcttcccttct

SEQ ID NO: 50162 - DNA, 25 bp, Probe Sequence
agctcttccaataaaggtgtttctc

SEQ ID NO: 50163 - DNA, 25 bp, Probe Sequence
cagctcttccaataaaggtgtttct

SEQ ID NO: 50164 - DNA, 25 bp, Probe Sequence
ggtgtttctcttcctccttctcaag

SEQ ID NO: 50165 - DNA, 25 bp, Probe Sequence
cttgtccacacagctcttccaataa

SEQ ID NO: 50166 - DNA, 25 bp, Probe Sequence
acagctcttccaataaaggtgtttc

SEQ ID NO: 50167 - DNA, 25 bp, Probe Sequence
acattcttcccttcttcacaaacgg

SEQ ID NO: 50168 - DNA, 25 bp, Probe Sequence
cacaacaagtacatggtgactgaac

SEQ ID NO: 50169 - DNA, 25 bp, Probe Sequence
acaacaagtacatggtgactgaacg

SEQ ID NO: 50170 - DNA, 25 bp, Probe Sequence
ccacaacaagtacatggtgactgaa

SEQ ID NO: 50171 - DNA, 25 bp, Probe Sequence
cttacattcatgaccttgacacctc

SEQ ID NO: 50172 - DNA, 25 bp, Probe Sequence
ttacattcatgaccttgacacctca

SEQ ID NO: 50173 - DNA, 25 bp, Probe Sequence
tacattcatgaccttgacacctcag

SEQ ID NO: 50174 - DNA, 25 bp, Probe Sequence
ccttacattcatgaccttgacacct

SEQ ID NO: 50175 - DNA, 25 bp, Probe Sequence
caacaagtacatggtgactgaacgc

SEQ ID NO: 50176 - DNA, 25 bp, Probe Sequence
ggcccagggttataataagtaaata

SEQ ID NO: 50177 - DNA, 25 bp, Probe Sequence
gcccagggttataataagtaaataa

SEQ ID NO: 50178 - DNA, 25 bp, Probe Sequence
ccgtgtcaaccacaacaagtacatg

SEQ ID NO: 50179 - DNA, 25 bp, Probe Sequence
cgtgtcaaccacaacaagtacatgg

SEQ ID NO: 50180 - DNA, 25 bp, Probe Sequence
ctccaactggtctggcaactacttc

SEQ ID NO: 50181 - DNA, 25 bp, Probe Sequence
cccttacattcatgaccttgacacc

SEQ ID NO: 50182 - DNA, 25 bp, Probe Sequence
aaccacaacaagtacatggtgactg

SEQ ID NO: 50183 - DNA, 25 bp, Probe Sequence
caaccacaacaagtacatggtgact

SEQ ID NO: 50184 - DNA, 25 bp, Probe Sequence
tcaaccacaacaagtacatggtgac

SEQ ID NO: 50185 - DNA, 25 bp, Probe Sequence
gtcaaccacaacaagtacatggtga

SEQ ID NO: 50186 - DNA, 25 bp, Probe Sequence
cattcatgaccttgacacctcagct

SEQ ID NO: 50187 - DNA, 25 bp, Probe Sequence
tgtcaaccacaacaagtacatggtg

SEQ ID NO: 50188 - DNA, 25 bp, Probe Sequence
gtgtcaaccacaacaagtacatggt

SEQ ID NO: 50189 - DNA, 25 bp, Probe Sequence
acattcatgaccttgacacctcagc

SEQ ID NO: 50190 - DNA, 25 bp, Probe Sequence
gactccccttacattcatgaccttg

SEQ ID NO: 50191 - DNA, 25 bp, Probe Sequence
accacaacaagtacatggtgactga

SEQ ID NO: 50192 - DNA, 25 bp, Probe Sequence
gttaatgaagttgtggcaggaataa

SEQ ID NO: 50193 - DNA, 25 bp, Probe Sequence
aaggaatatgcggttaatgaagttg

SEQ ID NO: 50194 - DNA, 25 bp, Probe Sequence
ccatctatgttgttcttaggcattc

SEQ ID NO: 50195 - DNA, 25 bp, Probe Sequence
tccatctatgttgttcttaggcatt

SEQ ID NO: 50196 - DNA, 25 bp, Probe Sequence
gaatatgcggttaatgaagttgtgg

SEQ ID NO: 50197 - DNA, 25 bp, Probe Sequence
ggaatatgcggttaatgaagttgtg

SEQ ID NO: 50198 - DNA, 25 bp, Probe Sequence
aggaatatgcggttaatgaagttgt

SEQ ID NO: 50199 - DNA, 25 bp, Probe Sequence
gtccatctatgttgttcttaggcat

SEQ ID NO: 50200 - DNA, 25 bp, Probe Sequence
aagtccatctatgttgttcttaggc

SEQ ID NO: 50201 - DNA, 25 bp, Probe Sequence
gcaagtccatctatgttgttcttag

SEQ ID NO: 50202 - DNA, 25 bp, Probe Sequence
ggttaatgaagttgtggcaggaata

SEQ ID NO: 50203 - DNA, 25 bp, Probe Sequence
catctatgttgttcttaggcattct

SEQ ID NO: 50204 - DNA, 25 bp, Probe Sequence
tgttgataataaggaatatgcggtt

SEQ ID NO: 50205 - DNA, 25 bp, Probe Sequence
agtccatctatgttgttcttaggca

SEQ ID NO: 50206 - DNA, 25 bp, Probe Sequence
taaggaatatgcggttaatgaagtt

SEQ ID NO: 50207 - DNA, 25 bp, Probe Sequence
caagtccatctatgttgttcttagg

SEQ ID NO: 50208 - DNA, 25 bp, Probe Sequence
atgttgataataaggaatatgcggt

SEQ ID NO: 50209 - DNA, 25 bp, Probe Sequence
ataaggaatatgcggttaatgaagt

SEQ ID NO: 50210 - DNA, 25 bp, Probe Sequence
atgttgttcttaggcattctatctt

SEQ ID NO: 50211 - DNA, 25 bp, Probe Sequence
gagcaccacacctactgagattatt

SEQ ID NO: 50212 - DNA, 25 bp, Probe Sequence
aatgttgataataaggaatatgcgg

SEQ ID NO: 50213 - DNA, 25 bp, Probe Sequence
aatatgcggttaatgaagttgtggc

SEQ ID NO: 50214 - DNA, 25 bp, Probe Sequence
tattgcctagttgacaacattgctt

SEQ ID NO: 50215 - DNA, 25 bp, Probe Sequence
ttattgcctagttgacaacattgct

SEQ ID NO: 50216 - DNA, 25 bp, Probe Sequence
gcagtcagattctataaatggcaag

SEQ ID NO: 50217 - DNA, 25 bp, Probe Sequence
agcagtcagattctataaatggcaa

SEQ ID NO: 50218 - DNA, 25 bp, Probe Sequence
aagcagtcagattctataaatggca

SEQ ID NO: 50219 - DNA, 25 bp, Probe Sequence
aaagcagtcagattctataaatggc

SEQ ID NO: 50220 - DNA, 25 bp, Probe Sequence
tgacatagtagcaaattggttctga

SEQ ID NO: 50221 - DNA, 25 bp, Probe Sequence
tagctgctggattattgtctgtctt

SEQ ID NO: 50222 - DNA, 25 bp, Probe Sequence
attggttctgaattatgcaactgtt

SEQ ID NO: 50223 - DNA, 25 bp, Probe Sequence
gacatagtagcaaattggttctgaa

SEQ ID NO: 50224 - DNA, 25 bp, Probe Sequence
ctgctggattattgtctgtctttat

SEQ ID NO: 50225 - DNA, 25 bp, Probe Sequence
gctgctggattattgtctgtcttta

SEQ ID NO: 50226 - DNA, 25 bp, Probe Sequence
caagttccagtaaaccacaagtatg

SEQ ID NO: 50227 - DNA, 25 bp, Probe Sequence
tatagcaagttccagtaaaccacaa

SEQ ID NO: 50228 - DNA, 25 bp, Probe Sequence
ttatagcaagttccagtaaaccaca

SEQ ID NO: 50229 - DNA, 25 bp, Probe Sequence
cagtcagattctataaatggcaagt

SEQ ID NO: 50230 - DNA, 25 bp, Probe Sequence
ttgtctgtctttatagcaagttcca

SEQ ID NO: 50231 - DNA, 25 bp, Probe Sequence
ttgacatagtagcaaattggttctg

SEQ ID NO: 50232 - DNA, 25 bp, Probe Sequence
tttatagcaagttccagtaaaccac

SEQ ID NO: 50233 - DNA, 25 bp, Probe Sequence
aagtaagcctgaagtgaggatactg

SEQ ID NO: 50234 - DNA, 25 bp, Probe Sequence
caagtaagcctgaagtgaggatact

SEQ ID NO: 50235 - DNA, 25 bp, Probe Sequence
acatagtagcaaattggttctgaat

SEQ ID NO: 50236 - DNA, 25 bp, Probe Sequence
tggctttagtaggtatagaagacaa

SEQ ID NO: 50237 - DNA, 25 bp, Probe Sequence
cttgacatagtagcaaattggttct

SEQ ID NO: 50238 - DNA, 25 bp, Probe Sequence
cacttgacatagtagcaaattggtt

SEQ ID NO: 50239 - DNA, 25 bp, Probe Sequence
attgtctgtctttatagcaagttcc

SEQ ID NO: 50240 - DNA, 25 bp, Probe Sequence
cagattagatgtgccaataaccaag

SEQ ID NO: 50241 - DNA, 25 bp, Probe Sequence
agattagatgtgccaataaccaagt

SEQ ID NO: 50242 - DNA, 25 bp, Probe Sequence
tcagattagatgtgccaataaccaa

SEQ ID NO: 50243 - DNA, 25 bp, Probe Sequence
ttcctcagattagatgtgccaataa

SEQ ID NO: 50244 - DNA, 25 bp, Probe Sequence
tcctcagattagatgtgccaataac

SEQ ID NO: 50245 - DNA, 25 bp, Probe Sequence
ctcagattagatgtgccaataacca

SEQ ID NO: 50246 - DNA, 25 bp, Probe Sequence
atatgtaatgcttccaatcttgctt

SEQ ID NO: 50247 - DNA, 25 bp, Probe Sequence
aatatgtaatgcttccaatcttgct

SEQ ID NO: 50248 - DNA, 25 bp, Probe Sequence
gattagatgtgccaataaccaagtt

SEQ ID NO: 50249 - DNA, 25 bp, Probe Sequence
cctcagattagatgtgccaataacc

SEQ ID NO: 50250 - DNA, 25 bp, Probe Sequence
ctgctcgttcataaccaacaatata

SEQ ID NO: 50251 - DNA, 25 bp, Probe Sequence
ccagaagaattgaccttgaccatta

SEQ ID NO: 50252 - DNA, 25 bp, Probe Sequence
cagaagaattgaccttgaccattaa

SEQ ID NO: 50253 - DNA, 25 bp, Probe Sequence
tgctcgttcataaccaacaatataa

SEQ ID NO: 50254 - DNA, 25 bp, Probe Sequence
ctatacctgctcgttcataaccaac

SEQ ID NO: 50255 - DNA, 25 bp, Probe Sequence
cctgctcgttcataaccaacaatat

SEQ ID NO: 50256 - DNA, 25 bp, Probe Sequence
tatacctgctcgttcataaccaaca

SEQ ID NO: 50257 - DNA, 25 bp, Probe Sequence
tccagaagaattgaccttgaccatt

SEQ ID NO: 50258 - DNA, 25 bp, Probe Sequence
acctgctcgttcataaccaacaata

SEQ ID NO: 50259 - DNA, 25 bp, Probe Sequence
tacctgctcgttcataaccaacaat

SEQ ID NO: 50260 - DNA, 25 bp, Probe Sequence
atacctgctcgttcataaccaacaa

SEQ ID NO: 50261 - DNA, 25 bp, Probe Sequence
ttcagtccagaagaattgaccttga

SEQ ID NO: 50262 - DNA, 25 bp, Probe Sequence
gtgtgtcagatttcctcagattaga

SEQ ID NO: 50263 - DNA, 25 bp, Probe Sequence
tttcctcagattagatgtgccaata

SEQ ID NO: 50264 - DNA, 25 bp, Probe Sequence
taaagacacttaagaaaaccgctca

SEQ ID NO: 50265 - DNA, 25 bp, Probe Sequence
ttaaagacacttaagaaaaccgctc

SEQ ID NO: 50266 - DNA, 25 bp, Probe Sequence
agacacttaagaaaaccgctcaaaa

SEQ ID NO: 50267 - DNA, 25 bp, Probe Sequence
attaaagacacttaagaaaaccgct

SEQ ID NO: 50268 - DNA, 25 bp, Probe Sequence
aagacacttaagaaaaccgctcaaa

SEQ ID NO: 50269 - DNA, 25 bp, Probe Sequence
aaagacacttaagaaaaccgctcaa

SEQ ID NO: 50270 - DNA, 25 bp, Probe Sequence
gtggagtattaaagacacttaagaa

SEQ ID NO: 50271 - DNA, 25 bp, Probe Sequence
tattaaagacacttaagaaaaccgc

SEQ ID NO: 50272 - DNA, 25 bp, Probe Sequence
tggagtattaaagacacttaagaaa

SEQ ID NO: 50273 - DNA, 25 bp, Probe Sequence
gtattaaagacacttaagaaaaccg

SEQ ID NO: 50274 - DNA, 25 bp, Probe Sequence
agtggagtattaaagacacttaaga

SEQ ID NO: 50275 - DNA, 25 bp, Probe Sequence
agtattaaagacacttaagaaaacc

SEQ ID NO: 50276 - DNA, 25 bp, Probe Sequence
ggagtattaaagacacttaagaaaa

SEQ ID NO: 50277 - DNA, 25 bp, Probe Sequence
agcctggatgaatctgacctctata

SEQ ID NO: 50278 - DNA, 25 bp, Probe Sequence
gatgaatctgacctctatagcctgg

SEQ ID NO: 50279 - DNA, 25 bp, Probe Sequence
ggatgaatctgacctctatagcctg

SEQ ID NO: 50280 - DNA, 25 bp, Probe Sequence
ctggatgaatctgacctctatagcc

SEQ ID NO: 50281 - DNA, 25 bp, Probe Sequence
cctggatgaatctgacctctatagc

SEQ ID NO: 50282 - DNA, 25 bp, Probe Sequence
gcctggatgaatctgacctctatag

SEQ ID NO: 50283 - DNA, 25 bp, Probe Sequence
tggatgaatctgacctctatagcct

SEQ ID NO: 50284 - DNA, 25 bp, Probe Sequence
acaaagcgttaggagaagaagagag

SEQ ID NO: 50285 - DNA, 25 bp, Probe Sequence
gacaaagcgttaggagaagaagaga

SEQ ID NO: 50286 - DNA, 25 bp, Probe Sequence
agacaaagcgttaggagaagaagag

SEQ ID NO: 50287 - DNA, 25 bp, Probe Sequence
cagacaaagcgttaggagaagaaga

SEQ ID NO: 50288 - DNA, 25 bp, Probe Sequence
acagacaaagcgttaggagaagaag

SEQ ID NO: 50289 - DNA, 25 bp, Probe Sequence
gacagacaaagcgttaggagaagaa

SEQ ID NO: 50290 - DNA, 25 bp, Probe Sequence
tgggtgtgtgttcatccttgttaaa

SEQ ID NO: 50291 - DNA, 25 bp, Probe Sequence
ttgggtgtgtgttcatccttgttaa

SEQ ID NO: 50292 - DNA, 25 bp, Probe Sequence
cagcctggatgaatctgacctctat

SEQ ID NO: 50293 - DNA, 25 bp, Probe Sequence
caaagcgttaggagaagaagagagg

SEQ ID NO: 50294 - DNA, 25 bp, Probe Sequence
cttgggtgtgtgttcatccttgtta

SEQ ID NO: 50295 - DNA, 25 bp, Probe Sequence
gagacagacaaagcgttaggagaag

SEQ ID NO: 50296 - DNA, 25 bp, Probe Sequence
cagcaacaataaatagacacgcacg

SEQ ID NO: 50297 - DNA, 25 bp, Probe Sequence
aaagaaagctacagaagaaactggg

SEQ ID NO: 50298 - DNA, 25 bp, Probe Sequence
agggtggcagcaacaataaatagac

SEQ ID NO: 50299 - DNA, 25 bp, Probe Sequence
cagggtggcagcaacaataaataga

SEQ ID NO: 50300 - DNA, 25 bp, Probe Sequence
atgaatctgacctctatagcctggc

SEQ ID NO: 50301 - DNA, 25 bp, Probe Sequence
aatataacattactcagtggacgga

SEQ ID NO: 50302 - DNA, 25 bp, Probe Sequence
atcaattcagactgtgttcattagc

SEQ ID NO: 50303 - DNA, 25 bp, Probe Sequence
tcaattcagactgtgttcattagca

SEQ ID NO: 50304 - DNA, 25 bp, Probe Sequence
tgacacatagtaaggagaatggaat

SEQ ID NO: 50305 - DNA, 25 bp, Probe Sequence
atgacacatagtaaggagaatggaa

SEQ ID NO: 50306 - DNA, 25 bp, Probe Sequence
aatgacacatagtaaggagaatgga

SEQ ID NO: 50307 - DNA, 25 bp, Probe Sequence
atataacattactcagtggacggag

SEQ ID NO: 50308 - DNA, 25 bp, Probe Sequence
tataacattactcagtggacggaga

SEQ ID NO: 50309 - DNA, 25 bp, Probe Sequence
actgtatatgttactgccttgtact

SEQ ID NO: 50310 - DNA, 25 bp, Probe Sequence
cagtgtgtatatgacagccagtata

SEQ ID NO: 50311 - DNA, 25 bp, Probe Sequence
aggttatgcgtctatatgatactca

SEQ ID NO: 50312 - DNA, 25 bp, Probe Sequence
aagcaatcttctattctcattcctt

SEQ ID NO: 50313 - DNA, 25 bp, Probe Sequence
agtgtgtatatgacagccagtataa

SEQ ID NO: 50314 - DNA, 25 bp, Probe Sequence
attcagactgtgttcattagcagat

SEQ ID NO: 50315 - DNA, 25 bp, Probe Sequence
ataacattactcagtggacggagaa

SEQ ID NO: 50316 - DNA, 25 bp, Probe Sequence
ttcagactgtgttcattagcagatt

SEQ ID NO: 50317 - DNA, 25 bp, Probe Sequence
aattcagactgtgttcattagcaga

SEQ ID NO: 50318 - DNA, 25 bp, Probe Sequence
caattcagactgtgttcattagcag

SEQ ID NO: 50319 - DNA, 25 bp, Probe Sequence
tcagtgtgtatatgacagccagtat

SEQ ID NO: 50320 - DNA, 25 bp, Probe Sequence
gtgtctctctctctctctgtctctt

SEQ ID NO: 50321 - DNA, 25 bp, Probe Sequence
ctgtatatgttactgccttgtactt

SEQ ID NO: 50322 - DNA, 25 bp, Probe Sequence
atatgaaggaatagcctgaactcaa

SEQ ID NO: 50323 - DNA, 25 bp, Probe Sequence
aactgtatatgttactgccttgtac

SEQ ID NO: 50324 - DNA, 25 bp, Probe Sequence
ctcagtgtgtatatgacagccagta

SEQ ID NO: 50325 - DNA, 25 bp, Probe Sequence
aataatctctggcttacaagtcctt

SEQ ID NO: 50326 - DNA, 25 bp, Probe Sequence
aatctctggcttacaagtccttaat

SEQ ID NO: 50327 - DNA, 25 bp, Probe Sequence
atctctggcttacaagtccttaatt

SEQ ID NO: 50328 - DNA, 25 bp, Probe Sequence
ctgttaggaataatgttgctctgaa

SEQ ID NO: 50329 - DNA, 25 bp, Probe Sequence
taatctctggcttacaagtccttaa

SEQ ID NO: 50330 - DNA, 25 bp, Probe Sequence
ataatctctggcttacaagtcctta

SEQ ID NO: 50331 - DNA, 25 bp, Probe Sequence
taataatctctggcttacaagtcct

SEQ ID NO: 50332 - DNA, 25 bp, Probe Sequence
gctgttaggaataatgttgctctga

SEQ ID NO: 50333 - DNA, 25 bp, Probe Sequence
tgttaggaataatgttgctctgaac

SEQ ID NO: 50334 - DNA, 25 bp, Probe Sequence
ttaataatctctggcttacaagtcc

SEQ ID NO: 50335 - DNA, 25 bp, Probe Sequence
ggctgttaggaataatgttgctctg

SEQ ID NO: 50336 - DNA, 25 bp, Probe Sequence
agttcttaataatctctggcttaca

SEQ ID NO: 50337 - DNA, 25 bp, Probe Sequence
tcttaataatctctggcttacaagt

SEQ ID NO: 50338 - DNA, 25 bp, Probe Sequence
ttgtttgactttgtttggtgaaatg

SEQ ID NO: 50339 - DNA, 25 bp, Probe Sequence
catttgtttgactttgtttggtgaa

SEQ ID NO: 50340 - DNA, 25 bp, Probe Sequence
atgagttcttaataatctctggctt

SEQ ID NO: 50341 - DNA, 25 bp, Probe Sequence
aatgagttcttaataatctctggct

SEQ ID NO: 50342 - DNA, 25 bp, Probe Sequence
tgtttgactttgtttggtgaaatgt

SEQ ID NO: 50343 - DNA, 25 bp, Probe Sequence
cttaataatctctggcttacaagtc

SEQ ID NO: 50344 - DNA, 25 bp, Probe Sequence
tctctggcttacaagtccttaattt

SEQ ID NO: 50345 - DNA, 25 bp, Probe Sequence
tttaatttgggttgtctgtcttgtc

SEQ ID NO: 50346 - DNA, 25 bp, Probe Sequence
taatttgggttgtctgtcttgtctt

SEQ ID NO: 50347 - DNA, 25 bp, Probe Sequence
ttaatttgggttgtctgtcttgtct

SEQ ID NO: 50348 - DNA, 25 bp, Probe Sequence
tttgtttgactttgtttggtgaaat

SEQ ID NO: 50349 - DNA, 25 bp, Probe Sequence
caataggaagagcaaccagttacta

SEQ ID NO: 50350 - DNA, 25 bp, Probe Sequence
taggaagagcaaccagttactatga

SEQ ID NO: 50351 - DNA, 25 bp, Probe Sequence
ataggaagagcaaccagttactatg

SEQ ID NO: 50352 - DNA, 25 bp, Probe Sequence
atctatgaccaataggaagagcaac

SEQ ID NO: 50353 - DNA, 25 bp, Probe Sequence
gaagagcaaccagttactatgagtg

SEQ ID NO: 50354 - DNA, 25 bp, Probe Sequence
aggaagagcaaccagttactatgag

SEQ ID NO: 50355 - DNA, 25 bp, Probe Sequence
tatgaccaataggaagagcaaccag

SEQ ID NO: 50356 - DNA, 25 bp, Probe Sequence
aataggaagagcaaccagttactat

SEQ ID NO: 50357 - DNA, 25 bp, Probe Sequence
agagcaaccagttactatgagtgaa

SEQ ID NO: 50358 - DNA, 25 bp, Probe Sequence
aagagcaaccagttactatgagtga

SEQ ID NO: 50359 - DNA, 25 bp, Probe Sequence
tatctatgaccaataggaagagcaa

SEQ ID NO: 50360 - DNA, 25 bp, Probe Sequence
ttatctatgaccaataggaagagca

SEQ ID NO: 50361 - DNA, 25 bp, Probe Sequence
gaccaataggaagagcaaccagtta

SEQ ID NO: 50362 - DNA, 25 bp, Probe Sequence
ccaataggaagagcaaccagttact

SEQ ID NO: 50363 - DNA, 25 bp, Probe Sequence
ggaagagcaaccagttactatgagt

SEQ ID NO: 50364 - DNA, 25 bp, Probe Sequence
accaataggaagagcaaccagttac

SEQ ID NO: 50365 - DNA, 25 bp, Probe Sequence
aagactgttaattcctcatgcgttg

SEQ ID NO: 50366 - DNA, 25 bp, Probe Sequence
tctatgaccaataggaagagcaacc

SEQ ID NO: 50367 - DNA, 25 bp, Probe Sequence
ctatgaccaataggaagagcaacca

SEQ ID NO: 50368 - DNA, 25 bp, Probe Sequence
gcccaataaagactgttaattcctc

SEQ ID NO: 50369 - DNA, 25 bp, Probe Sequence
agcccaataaagactgttaattcct

SEQ ID NO: 50370 - DNA, 25 bp, Probe Sequence
gagcccaataaagactgttaattcc

SEQ ID NO: 50371 - DNA, 25 bp, Probe Sequence
atcaacatttctggcaatttctaca

SEQ ID NO: 50372 - DNA, 25 bp, Probe Sequence
gcatcaacatttctggcaatttcta

SEQ ID NO: 50373 - DNA, 25 bp, Probe Sequence
ctgctagactcctatcttctgaatt

SEQ ID NO: 50374 - DNA, 25 bp, Probe Sequence
gctgctagactcctatcttctgaat

SEQ ID NO: 50375 - DNA, 25 bp, Probe Sequence
taaggtcctccagtgcttgaatatc

SEQ ID NO: 50376 - DNA, 25 bp, Probe Sequence
ctaaggtcctccagtgcttgaatat

SEQ ID NO: 50377 - DNA, 25 bp, Probe Sequence
gagacagatagatgacaccatgttc

SEQ ID NO: 50378 - DNA, 25 bp, Probe Sequence
cttgaatatcagcgtgctaagtcag

SEQ ID NO: 50379 - DNA, 25 bp, Probe Sequence
agacagatagatgacaccatgttct

SEQ ID NO: 50380 - DNA, 25 bp, Probe Sequence
tgaatatcagcgtgctaagtcagaa

SEQ ID NO: 50381 - DNA, 25 bp, Probe Sequence
ttgaatatcagcgtgctaagtcaga

SEQ ID NO: 50382 - DNA, 25 bp, Probe Sequence
gctcatcaaactgaacagaagaatt

SEQ ID NO: 50383 - DNA, 25 bp, Probe Sequence
cgagacagatagatgacaccatgtt

SEQ ID NO: 50384 - DNA, 25 bp, Probe Sequence
cttcccagagatgttgagaatgttc

SEQ ID NO: 50385 - DNA, 25 bp, Probe Sequence
gaatatcagcgtgctaagtcagaaa

SEQ ID NO: 50386 - DNA, 25 bp, Probe Sequence
tgctcatcaaactgaacagaagaat

SEQ ID NO: 50387 - DNA, 25 bp, Probe Sequence
atgctcatcaaactgaacagaagaa

SEQ ID NO: 50388 - DNA, 25 bp, Probe Sequence
aattcgtcccactaaagatgtcaga

SEQ ID NO: 50389 - DNA, 25 bp, Probe Sequence
atcttctgaattctatagtgcctgg

SEQ ID NO: 50390 - DNA, 25 bp, Probe Sequence
cttacccgagacagatagatgacac

SEQ ID NO: 50391 - DNA, 25 bp, Probe Sequence
agtcccagaaataaactgagaagtg

SEQ ID NO: 50392 - DNA, 25 bp, Probe Sequence
ggctgctagactcctatcttctgaa

SEQ ID NO: 50393 - DNA, 25 bp, Probe Sequence
tagtcccagaaataaactgagaagt

SEQ ID NO: 50394 - DNA, 25 bp, Probe Sequence
tcccagagatgttgagaatgttcat

SEQ ID NO: 50395 - DNA, 25 bp, Probe Sequence
gatgcttacccgagacagatagatg

SEQ ID NO: 50396 - DNA, 25 bp, Probe Sequence
tgctagactcctatcttctgaattc

SEQ ID NO: 50397 - DNA, 25 bp, Probe Sequence
ttgttgtgtatgagaagaggaagag

SEQ ID NO: 50398 - DNA, 25 bp, Probe Sequence
attgttgtgtatgagaagaggaaga

SEQ ID NO: 50399 - DNA, 25 bp, Probe Sequence
cattgttgtgtatgagaagaggaag

SEQ ID NO: 50400 - DNA, 25 bp, Probe Sequence
tgttgtgtatgagaagaggaagagg

SEQ ID NO: 50401 - DNA, 25 bp, Probe Sequence
gagtatgaatgtaatgccaccaacg

SEQ ID NO: 50402 - DNA, 25 bp, Probe Sequence
cgagtatgaatgtaatgccaccaac

SEQ ID NO: 50403 - DNA, 25 bp, Probe Sequence
gttgtgtatgagaagaggaagaggc

SEQ ID NO: 50404 - DNA, 25 bp, Probe Sequence
ttctggctgaaattatcatccttgt

SEQ ID NO: 50405 - DNA, 25 bp, Probe Sequence
attctggctgaaattatcatccttg

SEQ ID NO: 50406 - DNA, 25 bp, Probe Sequence
tcattgttgtgtatgagaagaggaa

SEQ ID NO: 50407 - DNA, 25 bp, Probe Sequence
atcattgttgtgtatgagaagagga

SEQ ID NO: 50408 - DNA, 25 bp, Probe Sequence
tctggctgaaattatcatccttgtg

SEQ ID NO: 50409 - DNA, 25 bp, Probe Sequence
gatcattgttgtgtatgagaagagg

SEQ ID NO: 50410 - DNA, 25 bp, Probe Sequence
gctgaaattatcatccttgtggtga

SEQ ID NO: 50411 - DNA, 25 bp, Probe Sequence
agatgaggttcctgacgatgatgaa

SEQ ID NO: 50412 - DNA, 25 bp, Probe Sequence
gcgagtatgaatgtaatgccaccaa

SEQ ID NO: 50413 - DNA, 25 bp, Probe Sequence
ctggctgaaattatcatccttgtgg

SEQ ID NO: 50414 - DNA, 25 bp, Probe Sequence
ggctgaaattatcatccttgtggtg

SEQ ID NO: 50415 - DNA, 25 bp, Probe Sequence
agtatgaatgtaatgccaccaacgc

SEQ ID NO: 50416 - DNA, 25 bp, Probe Sequence
ttgtgtaactattgaagtgcaatga

SEQ ID NO: 50417 - DNA, 25 bp, Probe Sequence
tgtaactattgaagtgcaatgatgt

SEQ ID NO: 50418 - DNA, 25 bp, Probe Sequence
tgtgtaactattgaagtgcaatgat

SEQ ID NO: 50419 - DNA, 25 bp, Probe Sequence
gtgtaactattgaagtgcaatgatg

SEQ ID NO: 50420 - DNA, 25 bp, Probe Sequence
tggctgaaattatcatccttgtggt

SEQ ID NO: 50421 - DNA, 25 bp, Probe Sequence
agaaagtctgcctgtttagtaagtg

SEQ ID NO: 50422 - DNA, 25 bp, Probe Sequence
agtaagtggcaattccatacatatt

SEQ ID NO: 50423 - DNA, 25 bp, Probe Sequence
gaaagtctgcctgtttagtaagtgg

SEQ ID NO: 50424 - DNA, 25 bp, Probe Sequence
ttagtaagtggcaattccatacata

SEQ ID NO: 50425 - DNA, 25 bp, Probe Sequence
tagtaagtggcaattccatacatat

SEQ ID NO: 50426 - DNA, 25 bp, Probe Sequence
ttagaatgtttgtaatgagtgttcg

SEQ ID NO: 50427 - DNA, 25 bp, Probe Sequence
ttgagtgttggtgttaagcatgaaa

SEQ ID NO: 50428 - DNA, 25 bp, Probe Sequence
tttgagtgttggtgttaagcatgaa

SEQ ID NO: 50429 - DNA, 25 bp, Probe Sequence
ttgtaatgagtgttcgatatttgct

SEQ ID NO: 50430 - DNA, 25 bp, Probe Sequence
tgagtgttcgatatttgctataggt

SEQ ID NO: 50431 - DNA, 25 bp, Probe Sequence
gtttagtaagtggcaattccataca

SEQ ID NO: 50432 - DNA, 25 bp, Probe Sequence
tgtttagtaagtggcaattccatac

SEQ ID NO: 50433 - DNA, 25 bp, Probe Sequence
ctgtttagtaagtggcaattccata

SEQ ID NO: 50434 - DNA, 25 bp, Probe Sequence
agaatgtttgtaatgagtgttcgat

SEQ ID NO: 50435 - DNA, 25 bp, Probe Sequence
cctgtttagtaagtggcaattccat

SEQ ID NO: 50436 - DNA, 25 bp, Probe Sequence
gagtgttcgatatttgctataggtt

SEQ ID NO: 50437 - DNA, 25 bp, Probe Sequence
tttgtaatgagtgttcgatatttgc

SEQ ID NO: 50438 - DNA, 25 bp, Probe Sequence
tgtaatgagtgttcgatatttgcta

SEQ ID NO: 50439 - DNA, 25 bp, Probe Sequence
atgagtgttcgatatttgctatagg

SEQ ID NO: 50440 - DNA, 25 bp, Probe Sequence
tttagtaagtggcaattccatacat

SEQ ID NO: 50441 - DNA, 25 bp, Probe Sequence
tgagtgttggtgttaagcatgaaac

SEQ ID NO: 50442 - DNA, 25 bp, Probe Sequence
tagaatgtttgtaatgagtgttcga

SEQ ID NO: 50443 - DNA, 25 bp, Probe Sequence
agtgttcgatatttgctataggttt

SEQ ID NO: 50444 - DNA, 25 bp, Probe Sequence
cattttgagtgttggtgttaagcat

SEQ ID NO: 50445 - DNA, 25 bp, Probe Sequence
cagctactctaaattatggtctcct

SEQ ID NO: 50446 - DNA, 25 bp, Probe Sequence
gaggaagaaccagtacgtcagtaac

SEQ ID NO: 50447 - DNA, 25 bp, Probe Sequence
gctactctaaattatggtctcctta

SEQ ID NO: 50448 - DNA, 25 bp, Probe Sequence
agctactctaaattatggtctcctt

SEQ ID NO: 50449 - DNA, 25 bp, Probe Sequence
ccagctactctaaattatggtctcc

SEQ ID NO: 50450 - DNA, 25 bp, Probe Sequence
ggaggaagaaccagtacgtcagtaa

SEQ ID NO: 50451 - DNA, 25 bp, Probe Sequence
tccagctactctaaattatggtctc

SEQ ID NO: 50452 - DNA, 25 bp, Probe Sequence
ctccagctactctaaattatggtct

SEQ ID NO: 50453 - DNA, 25 bp, Probe Sequence
gctccagctactctaaattatggtc

SEQ ID NO: 50454 - DNA, 25 bp, Probe Sequence
ggtctccttataagttattgctgct

SEQ ID NO: 50455 - DNA, 25 bp, Probe Sequence
tggtctccttataagttattgctgc

SEQ ID NO: 50456 - DNA, 25 bp, Probe Sequence
aggctccagctactctaaattatgg

SEQ ID NO: 50457 - DNA, 25 bp, Probe Sequence
ggctccagctactctaaattatggt

SEQ ID NO: 50458 - DNA, 25 bp, Probe Sequence
atggtctccttataagttattgctg

SEQ ID NO: 50459 - DNA, 25 bp, Probe Sequence
tatggtctccttataagttattgct

SEQ ID NO: 50460 - DNA, 25 bp, Probe Sequence
gactacagcatgtggaggaagaacc

SEQ ID NO: 50461 - DNA, 25 bp, Probe Sequence
ctacagcatgtggaggaagaaccag

SEQ ID NO: 50462 - DNA, 25 bp, Probe Sequence
tggaggaagaaccagtacgtcagta

SEQ ID NO: 50463 - DNA, 25 bp, Probe Sequence
ctactctaaattatggtctccttat

SEQ ID NO: 50464 - DNA, 25 bp, Probe Sequence
aggaagaaccagtacgtcagtaacg

SEQ ID NO: 50465 - DNA, 25 bp, Probe Sequence
cagcatgtggaggaagaaccagtac

SEQ ID NO: 50466 - DNA, 25 bp, Probe Sequence
ttatggtctccttataagttattgc

SEQ ID NO: 50467 - DNA, 25 bp, Probe Sequence
catgtggaggaagaaccagtacgtc

SEQ ID NO: 50468 - DNA, 25 bp, Probe Sequence
ggaagaaccagtacgtcagtaacgg

SEQ ID NO: 50469 - DNA, 25 bp, Probe Sequence
gaagaaccagtacgtcagtaacggg

SEQ ID NO: 50470 - DNA, 25 bp, Probe Sequence
cttcttcatcttcaccagaggaatc

SEQ ID NO: 50471 - DNA, 25 bp, Probe Sequence
ttcttcatcttcaccagaggaatca

SEQ ID NO: 50472 - DNA, 25 bp, Probe Sequence
cttcatcttcaccagaggaatcact

SEQ ID NO: 50473 - DNA, 25 bp, Probe Sequence
tcttcatcttcaccagaggaatcac

SEQ ID NO: 50474 - DNA, 25 bp, Probe Sequence
ttcatcttcaccagaggaatcactc

SEQ ID NO: 50475 - DNA, 25 bp, Probe Sequence
ctccatcttcagcttcttcatcttc

SEQ ID NO: 50476 - DNA, 25 bp, Probe Sequence
gcttcttcatcttcaccagaggaat

SEQ ID NO: 50477 - DNA, 25 bp, Probe Sequence
tctccatcttcagcttcttcatctt

SEQ ID NO: 50478 - DNA, 25 bp, Probe Sequence
tagttgtgaccttagtgtttctgtg

SEQ ID NO: 50479 - DNA, 25 bp, Probe Sequence
catcttcagcttcttcatcttcacc

SEQ ID NO: 50480 - DNA, 25 bp, Probe Sequence
ccatcttcagcttcttcatcttcac

SEQ ID NO: 50481 - DNA, 25 bp, Probe Sequence
tccatcttcagcttcttcatcttca

SEQ ID NO: 50482 - DNA, 25 bp, Probe Sequence
ctctccatcttcagcttcttcatct

SEQ ID NO: 50483 - DNA, 25 bp, Probe Sequence
atcttcagcttcttcatcttcacca

SEQ ID NO: 50484 - DNA, 25 bp, Probe Sequence
ctagttgtgaccttagtgtttctgt

SEQ ID NO: 50485 - DNA, 25 bp, Probe Sequence
tcactgtctgagagtttagttgtag

SEQ ID NO: 50486 - DNA, 25 bp, Probe Sequence
cactgtctgagagtttagttgtagc

SEQ ID NO: 50487 - DNA, 25 bp, Probe Sequence
actgtctgagagtttagttgtagca

SEQ ID NO: 50488 - DNA, 25 bp, Probe Sequence
tcttcagcttcttcatcttcaccag

SEQ ID NO: 50489 - DNA, 25 bp, Probe Sequence
ctgtctgagagtttagttgtagcag

SEQ ID NO: 50490 - DNA, 25 bp, Probe Sequence
ttcagcttcttcatcttcaccagag

SEQ ID NO: 50491 - DNA, 25 bp, Probe Sequence
cttcagcttcttcatcttcaccaga

SEQ ID NO: 50492 - DNA, 25 bp, Probe Sequence
cctctccatcttcagcttcttcatc

SEQ ID NO: 50493 - DNA, 25 bp, Probe Sequence
ctactgctaaagctgttgatggata

SEQ ID NO: 50494 - DNA, 25 bp, Probe Sequence
gcttgaggaagaagatactgaagat

SEQ ID NO: 50495 - DNA, 25 bp, Probe Sequence
atgcttgaggaagaagatactgaag

SEQ ID NO: 50496 - DNA, 25 bp, Probe Sequence
ttgcctggaataagtggatagatat

SEQ ID NO: 50497 - DNA, 25 bp, Probe Sequence
cattggttggataagtggatgttaa

SEQ ID NO: 50498 - DNA, 25 bp, Probe Sequence
tgcttgaggaagaagatactgaaga

SEQ ID NO: 50499 - DNA, 25 bp, Probe Sequence
cgatcctacagatacaagttgctaa

SEQ ID NO: 50500 - DNA, 25 bp, Probe Sequence
tgcctggaataagtggatagatata

SEQ ID NO: 50501 - DNA, 25 bp, Probe Sequence
gacatctattccatctgtgagtgac

SEQ ID NO: 50502 - DNA, 25 bp, Probe Sequence
ctgtgacatctattccatctgtgag

SEQ ID NO: 50503 - DNA, 25 bp, Probe Sequence
gatactgaagattagacatggttgg

SEQ ID NO: 50504 - DNA, 25 bp, Probe Sequence
catgcttgaggaagaagatactgaa

SEQ ID NO: 50505 - DNA, 25 bp, Probe Sequence
cttgaggaagaagatactgaagatt

SEQ ID NO: 50506 - DNA, 25 bp, Probe Sequence
acatctattccatctgtgagtgact

SEQ ID NO: 50507 - DNA, 25 bp, Probe Sequence
tgacatctattccatctgtgagtga

SEQ ID NO: 50508 - DNA, 25 bp, Probe Sequence
gtgacatctattccatctgtgagtg

SEQ ID NO: 50509 - DNA, 25 bp, Probe Sequence
tgtgacatctattccatctgtgagt

SEQ ID NO: 50510 - DNA, 25 bp, Probe Sequence
ggaagaagatactgaagattagaca

SEQ ID NO: 50511 - DNA, 25 bp, Probe Sequence
ttcactatattcagagcaagctagg

SEQ ID NO: 50512 - DNA, 25 bp, Probe Sequence
tcactatattcagagcaagctagga

SEQ ID NO: 50513 - DNA, 25 bp, Probe Sequence
atctattccatctgtgagtgactct

SEQ ID NO: 50514 - DNA, 25 bp, Probe Sequence
catctattccatctgtgagtgactc

SEQ ID NO: 50515 - DNA, 25 bp, Probe Sequence
gcctggaataagtggatagatataa

SEQ ID NO: 50516 - DNA, 25 bp, Probe Sequence
tctattccatctgtgagtgactctt

SEQ ID NO: 50517 - DNA, 25 bp, Probe Sequence
cactatattcagagcaagctaggaa

SEQ ID NO: 50518 - DNA, 25 bp, Probe Sequence
ccaggaataatcacaatagaaggtc

SEQ ID NO: 50519 - DNA, 25 bp, Probe Sequence
caggaataatcacaatagaaggtct

SEQ ID NO: 50520 - DNA, 25 bp, Probe Sequence
taccaggaataatcacaatagaagg

SEQ ID NO: 50521 - DNA, 25 bp, Probe Sequence
tagtattctcactggactgtggata

SEQ ID NO: 50522 - DNA, 25 bp, Probe Sequence
atagtattctcactggactgtggat

SEQ ID NO: 50523 - DNA, 25 bp, Probe Sequence
gatagagaagtcctgatggatgaac

SEQ ID NO: 50524 - DNA, 25 bp, Probe Sequence
atagagaagtcctgatggatgaact

SEQ ID NO: 50525 - DNA, 25 bp, Probe Sequence
agtattctcactggactgtggatac

SEQ ID NO: 50526 - DNA, 25 bp, Probe Sequence
catagtattctcactggactgtgga

SEQ ID NO: 50527 - DNA, 25 bp, Probe Sequence
taccatagtattctcactggactgt

SEQ ID NO: 50528 - DNA, 25 bp, Probe Sequence
aatagaaggtcttattgttcagtga

SEQ ID NO: 50529 - DNA, 25 bp, Probe Sequence
accaggaataatcacaatagaaggt

SEQ ID NO: 50530 - DNA, 25 bp, Probe Sequence
gcaacttatgtgttcgatcatgtat

SEQ ID NO: 50531 - DNA, 25 bp, Probe Sequence
caaccacgatagagaagtcctgatg

SEQ ID NO: 50532 - DNA, 25 bp, Probe Sequence
agcaacttatgtgttcgatcatgta

SEQ ID NO: 50533 - DNA, 25 bp, Probe Sequence
cgatagagaagtcctgatggatgaa

SEQ ID NO: 50534 - DNA, 25 bp, Probe Sequence
gtaccatagtattctcactggactg

SEQ ID NO: 50535 - DNA, 25 bp, Probe Sequence
aggaataatcacaatagaaggtctt

SEQ ID NO: 50536 - DNA, 25 bp, Probe Sequence
tgtgttcgatcatgtatgagataga

SEQ ID NO: 50537 - DNA, 25 bp, Probe Sequence
aagcaacttatgtgttcgatcatgt

SEQ ID NO: 50538 - DNA, 25 bp, Probe Sequence
accatagtattctcactggactgtg

SEQ ID NO: 50539 - DNA, 25 bp, Probe Sequence
atagaaggtcttattgttcagtgaa

SEQ ID NO: 50540 - DNA, 25 bp, Probe Sequence
acttatgtgttcgatcatgtatgag

SEQ ID NO: 50541 - DNA, 25 bp, Probe Sequence
caacttatgtgttcgatcatgtatg

SEQ ID NO: 50542 - DNA, 25 bp, Probe Sequence
tagtttgattctggtttccctcata

SEQ ID NO: 50543 - DNA, 25 bp, Probe Sequence
agtttgattctggtttccctcatac

SEQ ID NO: 50544 - DNA, 25 bp, Probe Sequence
gtagtttgattctggtttccctcat

SEQ ID NO: 50545 - DNA, 25 bp, Probe Sequence
gtttgattctggtttccctcataca

SEQ ID NO: 50546 - DNA, 25 bp, Probe Sequence
agtagtttgattctggtttccctca

SEQ ID NO: 50547 - DNA, 25 bp, Probe Sequence
tttgattctggtttccctcatacag

SEQ ID NO: 50548 - DNA, 25 bp, Probe Sequence
ccttctatacaggaatctctggaaa

SEQ ID NO: 50549 - DNA, 25 bp, Probe Sequence
cccttctatacaggaatctctggaa

SEQ ID NO: 50550 - DNA, 25 bp, Probe Sequence
ttgattctggtttccctcatacagt

SEQ ID NO: 50551 - DNA, 25 bp, Probe Sequence
ctcccttctatacaggaatctctgg

SEQ ID NO: 50552 - DNA, 25 bp, Probe Sequence
agtttgacaccttgatacccacttt

SEQ ID NO: 50553 - DNA, 25 bp, Probe Sequence
cagttctgcaagtagtttagtagga

SEQ ID NO: 50554 - DNA, 25 bp, Probe Sequence
tcagttctgcaagtagtttagtagg

SEQ ID NO: 50555 - DNA, 25 bp, Probe Sequence
cctcagttctgcaagtagtttagta

SEQ ID NO: 50556 - DNA, 25 bp, Probe Sequence
tcccttctatacaggaatctctgga

SEQ ID NO: 50557 - DNA, 25 bp, Probe Sequence
ctcctcagttctgcaagtagtttag

SEQ ID NO: 50558 - DNA, 25 bp, Probe Sequence
agttctgcaagtagtttagtaggaa

SEQ ID NO: 50559 - DNA, 25 bp, Probe Sequence
ctcagttctgcaagtagtttagtag

SEQ ID NO: 50560 - DNA, 25 bp, Probe Sequence
gctcccttctatacaggaatctctg

SEQ ID NO: 50561 - DNA, 25 bp, Probe Sequence
ctgctcccttctatacaggaatctc

SEQ ID NO: 50562 - DNA, 25 bp, Probe Sequence
gattctggtttccctcatacagtgt

SEQ ID NO: 50563 - DNA, 25 bp, Probe Sequence
tgattctggtttccctcatacagtg

SEQ ID NO: 50564 - DNA, 25 bp, Probe Sequence
tcctcagttctgcaagtagtttagt

SEQ ID NO: 50565 - DNA, 25 bp, Probe Sequence
tgctcccttctatacaggaatctct

SEQ ID NO: 50566 - DNA, 25 bp, Probe Sequence
ctctaaggataatggtggatgtcag

SEQ ID NO: 50567 - DNA, 25 bp, Probe Sequence
gaatgctctaaggataatggtggat

SEQ ID NO: 50568 - DNA, 25 bp, Probe Sequence
aatgctctaaggataatggtggatg

SEQ ID NO: 50569 - DNA, 25 bp, Probe Sequence
atgaatgctctaaggataatggtgg

SEQ ID NO: 50570 - DNA, 25 bp, Probe Sequence
gatgaatgctctaaggataatggtg

SEQ ID NO: 50571 - DNA, 25 bp, Probe Sequence
tgaatgctctaaggataatggtgga

SEQ ID NO: 50572 - DNA, 25 bp, Probe Sequence
atgctctaaggataatggtggatgt

SEQ ID NO: 50573 - DNA, 25 bp, Probe Sequence
agatgaatgctctaaggataatggt

SEQ ID NO: 50574 - DNA, 25 bp, Probe Sequence
cgacttgaattatccttccagacat

SEQ ID NO: 50575 - DNA, 25 bp, Probe Sequence
tgaatggctattagtatcagaacgg

SEQ ID NO: 50576 - DNA, 25 bp, Probe Sequence
ggttgactgtgaatggctattagta

SEQ ID NO: 50577 - DNA, 25 bp, Probe Sequence
gtgaatggctattagtatcagaacg

SEQ ID NO: 50578 - DNA, 25 bp, Probe Sequence
tgactgtgaatggctattagtatca

SEQ ID NO: 50579 - DNA, 25 bp, Probe Sequence
gacttgaattatccttccagacatt

SEQ ID NO: 50580 - DNA, 25 bp, Probe Sequence
cctaataagaactgtgtgtggcaag

SEQ ID NO: 50581 - DNA, 25 bp, Probe Sequence
tctaaggataatggtggatgtcagc

SEQ ID NO: 50582 - DNA, 25 bp, Probe Sequence
gctctaaggataatggtggatgtca

SEQ ID NO: 50583 - DNA, 25 bp, Probe Sequence
tgctctaaggataatggtggatgtc

SEQ ID NO: 50584 - DNA, 25 bp, Probe Sequence
ctaataagaactgtgtgtggcaagt

SEQ ID NO: 50585 - DNA, 25 bp, Probe Sequence
aagatgaatgctctaaggataatgg

SEQ ID NO: 50586 - DNA, 25 bp, Probe Sequence
tctgacaatactgtatccaagaagg

SEQ ID NO: 50587 - DNA, 25 bp, Probe Sequence
gttgactgtgaatggctattagtat

SEQ ID NO: 50588 - DNA, 25 bp, Probe Sequence
ctaaggataatggtggatgtcagca

SEQ ID NO: 50589 - DNA, 25 bp, Probe Sequence
tcctaataagaactgtgtgtggcaa

SEQ ID NO: 50590 - DNA, 25 bp, Probe Sequence
agagaagtgtagaggatgatgttaa

SEQ ID NO: 50591 - DNA, 25 bp, Probe Sequence
ctagagaagtgtagaggatgatgtt

SEQ ID NO: 50592 - DNA, 25 bp, Probe Sequence
tagagaagtgtagaggatgatgtta

SEQ ID NO: 50593 - DNA, 25 bp, Probe Sequence
atacaaagaaaggtcagagaaatgc

SEQ ID NO: 50594 - DNA, 25 bp, Probe Sequence
attaaggcatctatgggcattatga

SEQ ID NO: 50595 - DNA, 25 bp, Probe Sequence
cattaaggcatctatgggcattatg

SEQ ID NO: 50596 - DNA, 25 bp, Probe Sequence
tcattaaggcatctatgggcattat

SEQ ID NO: 50597 - DNA, 25 bp, Probe Sequence
ttcattaaggcatctatgggcatta

SEQ ID NO: 50598 - DNA, 25 bp, Probe Sequence
atggcatttcattaaggcatctatg

SEQ ID NO: 50599 - DNA, 25 bp, Probe Sequence
ttaaggcatctatgggcattatgag

SEQ ID NO: 50600 - DNA, 25 bp, Probe Sequence
atttcattaaggcatctatgggcat

SEQ ID NO: 50601 - DNA, 25 bp, Probe Sequence
tttcattaaggcatctatgggcatt

SEQ ID NO: 50602 - DNA, 25 bp, Probe Sequence
cataactgtaagtcctgtttggttg

SEQ ID NO: 50603 - DNA, 25 bp, Probe Sequence
ataactgtaagtcctgtttggttgt

SEQ ID NO: 50604 - DNA, 25 bp, Probe Sequence
ctgtgtctcattaaagtgattgctg

SEQ ID NO: 50605 - DNA, 25 bp, Probe Sequence
taactgtaagtcctgtttggttgtt

SEQ ID NO: 50606 - DNA, 25 bp, Probe Sequence
actgtgtctcattaaagtgattgct

SEQ ID NO: 50607 - DNA, 25 bp, Probe Sequence
catttcattaaggcatctatgggca

SEQ ID NO: 50608 - DNA, 25 bp, Probe Sequence
tggcatttcattaaggcatctatgg

SEQ ID NO: 50609 - DNA, 25 bp, Probe Sequence
ctgtaagtcctgtttggttgttgtt

SEQ ID NO: 50610 - DNA, 25 bp, Probe Sequence
acataactgtaagtcctgtttggtt

SEQ ID NO: 50611 - DNA, 25 bp, Probe Sequence
tcaatcagtgactagcttcctgtag

SEQ ID NO: 50612 - DNA, 25 bp, Probe Sequence
tgtaagtcctgtttggttgttgttg

SEQ ID NO: 50613 - DNA, 25 bp, Probe Sequence
gaatgatacaaagaaaggtcagaga

SEQ ID NO: 50614 - DNA, 25 bp, Probe Sequence
taagttactatttattccgctccgc

SEQ ID NO: 50615 - DNA, 25 bp, Probe Sequence
ataagttactatttattccgctccg

SEQ ID NO: 50616 - DNA, 25 bp, Probe Sequence
ctcttccttctgctagtctcctgtg

SEQ ID NO: 50617 - DNA, 25 bp, Probe Sequence
caggaatccaagtgcatttcttaaa

SEQ ID NO: 50618 - DNA, 25 bp, Probe Sequence
aagttactatttattccgctccgcc

SEQ ID NO: 50619 - DNA, 25 bp, Probe Sequence
cttccttctgctagtctcctgtgtc

SEQ ID NO: 50620 - DNA, 25 bp, Probe Sequence
aggaatccaagtgcatttcttaaat

SEQ ID NO: 50621 - DNA, 25 bp, Probe Sequence
tcttccttctgctagtctcctgtgt

SEQ ID NO: 50622 - DNA, 25 bp, Probe Sequence
ctgagtcttctgcatcagattattg

SEQ ID NO: 50623 - DNA, 25 bp, Probe Sequence
ggaatccaagtgcatttcttaaata

SEQ ID NO: 50624 - DNA, 25 bp, Probe Sequence
gctgagtcttctgcatcagattatt

SEQ ID NO: 50625 - DNA, 25 bp, Probe Sequence
cctcttccttctgctagtctcctgt

SEQ ID NO: 50626 - DNA, 25 bp, Probe Sequence
tgagtcttctgcatcagattattgc

SEQ ID NO: 50627 - DNA, 25 bp, Probe Sequence
ctgaatttaaaagcacacgaaacaa

SEQ ID NO: 50628 - DNA, 25 bp, Probe Sequence
aacctgaatttaaaagcacacgaaa

SEQ ID NO: 50629 - DNA, 25 bp, Probe Sequence
taacctgaatttaaaagcacacgaa

SEQ ID NO: 50630 - DNA, 25 bp, Probe Sequence
agctgagtcttctgcatcagattat

SEQ ID NO: 50631 - DNA, 25 bp, Probe Sequence
tccaagtgcatttcttaaataagtt

SEQ ID NO: 50632 - DNA, 25 bp, Probe Sequence
tgaatttaaaagcacacgaaacaaa

SEQ ID NO: 50633 - DNA, 25 bp, Probe Sequence
aagctgagtcttctgcatcagatta

SEQ ID NO: 50634 - DNA, 25 bp, Probe Sequence
cctgaatttaaaagcacacgaaaca

SEQ ID NO: 50635 - DNA, 25 bp, Probe Sequence
acctgaatttaaaagcacacgaaac

SEQ ID NO: 50636 - DNA, 25 bp, Probe Sequence
atccaagtgcatttcttaaataagt

SEQ ID NO: 50637 - DNA, 25 bp, Probe Sequence
ttaacctgaatttaaaagcacacga

SEQ ID NO: 50638 - DNA, 25 bp, Probe Sequence
ttcactaaggaagaagagctagagt

SEQ ID NO: 50639 - DNA, 25 bp, Probe Sequence
atgtctacaatgactctcgtgtctc

SEQ ID NO: 50640 - DNA, 25 bp, Probe Sequence
tcactaaggaagaagagctagagtc

SEQ ID NO: 50641 - DNA, 25 bp, Probe Sequence
gaagaagagctagagtcggagaatg

SEQ ID NO: 50642 - DNA, 25 bp, Probe Sequence
catgtctacaatgactctcgtgtct

SEQ ID NO: 50643 - DNA, 25 bp, Probe Sequence
cactaaggaagaagagctagagtcg

SEQ ID NO: 50644 - DNA, 25 bp, Probe Sequence
aaagttgacagtacaaagattccct

SEQ ID NO: 50645 - DNA, 25 bp, Probe Sequence
aagttgacagtacaaagattccctc

SEQ ID NO: 50646 - DNA, 25 bp, Probe Sequence
taaggaagaagagctagagtcggag

SEQ ID NO: 50647 - DNA, 25 bp, Probe Sequence
ctaaggaagaagagctagagtcgga

SEQ ID NO: 50648 - DNA, 25 bp, Probe Sequence
tttcactaaggaagaagagctagag

SEQ ID NO: 50649 - DNA, 25 bp, Probe Sequence
ggaagaagagctagagtcggagaat

SEQ ID NO: 50650 - DNA, 25 bp, Probe Sequence
actaaggaagaagagctagagtcgg

SEQ ID NO: 50651 - DNA, 25 bp, Probe Sequence
gttcagtaggtgtagactttccact

SEQ ID NO: 50652 - DNA, 25 bp, Probe Sequence
agttcagtaggtgtagactttccac

SEQ ID NO: 50653 - DNA, 25 bp, Probe Sequence
tgtctacaatgactctcgtgtctcc

SEQ ID NO: 50654 - DNA, 25 bp, Probe Sequence
agttgacagtacaaagattccctcg

SEQ ID NO: 50655 - DNA, 25 bp, Probe Sequence
gcatgtctacaatgactctcgtgtc

SEQ ID NO: 50656 - DNA, 25 bp, Probe Sequence
ggttggcatgtctacaatgactctc

SEQ ID NO: 50657 - DNA, 25 bp, Probe Sequence
ttgacagtacaaagattccctcgaa

SEQ ID NO: 50658 - DNA, 25 bp, Probe Sequence
ctggttggcatgtctacaatgactc

SEQ ID NO: 50659 - DNA, 25 bp, Probe Sequence
ctacgtgctgttctaccaactgatg

SEQ ID NO: 50660 - DNA, 25 bp, Probe Sequence
gttggcatgtctacaatgactctcg

SEQ ID NO: 50661 - DNA, 25 bp, Probe Sequence
gggattgtttcaaccttttcactaa

SEQ ID NO: 50662 - DNA, 25 bp, Probe Sequence
cactgttagaccttatgatagccaa

SEQ ID NO: 50663 - DNA, 25 bp, Probe Sequence
atgatagccaagataacgagtgatg

SEQ ID NO: 50664 - DNA, 25 bp, Probe Sequence
tatgatagccaagataacgagtgat

SEQ ID NO: 50665 - DNA, 25 bp, Probe Sequence
gatagccaagataacgagtgatgag

SEQ ID NO: 50666 - DNA, 25 bp, Probe Sequence
actgttagaccttatgatagccaag

SEQ ID NO: 50667 - DNA, 25 bp, Probe Sequence
ctgttagaccttatgatagccaaga

SEQ ID NO: 50668 - DNA, 25 bp, Probe Sequence
tacactgttagaccttatgatagcc

SEQ ID NO: 50669 - DNA, 25 bp, Probe Sequence
ccttatgatagccaagataacgagt

SEQ ID NO: 50670 - DNA, 25 bp, Probe Sequence
accttatgatagccaagataacgag

SEQ ID NO: 50671 - DNA, 25 bp, Probe Sequence
gaccttatgatagccaagataacga

SEQ ID NO: 50672 - DNA, 25 bp, Probe Sequence
agaccttatgatagccaagataacg

SEQ ID NO: 50673 - DNA, 25 bp, Probe Sequence
ccgttcttgattattacagacctct

SEQ ID NO: 50674 - DNA, 25 bp, Probe Sequence
ttatgatagccaagataacgagtga

SEQ ID NO: 50675 - DNA, 25 bp, Probe Sequence
acactgttagaccttatgatagcca

SEQ ID NO: 50676 - DNA, 25 bp, Probe Sequence
cttatgatagccaagataacgagtg

SEQ ID NO: 50677 - DNA, 25 bp, Probe Sequence
tgttagaccttatgatagccaagat

SEQ ID NO: 50678 - DNA, 25 bp, Probe Sequence
tgatagccaagataacgagtgatga

SEQ ID NO: 50679 - DNA, 25 bp, Probe Sequence
aagtctcatctcattcgtctgattg

SEQ ID NO: 50680 - DNA, 25 bp, Probe Sequence
taagtctcatctcattcgtctgatt

SEQ ID NO: 50681 - DNA, 25 bp, Probe Sequence
ttaagtctcatctcattcgtctgat

SEQ ID NO: 50682 - DNA, 25 bp, Probe Sequence
cgttcttgattattacagacctctt

SEQ ID NO: 50683 - DNA, 25 bp, Probe Sequence
gccgttcttgattattacagacctc

SEQ ID NO: 50684 - DNA, 25 bp, Probe Sequence
taagccatgaatgaactacatccaa

SEQ ID NO: 50685 - DNA, 25 bp, Probe Sequence
aattgatgtcatagatgcttaccaa

SEQ ID NO: 50686 - DNA, 25 bp, Probe Sequence
ctctgatttcctcctttcctttctg

SEQ ID NO: 50687 - DNA, 25 bp, Probe Sequence
tctgatttcctcctttcctttctgg

SEQ ID NO: 50688 - DNA, 25 bp, Probe Sequence
gctctgatttcctcctttcctttct

SEQ ID NO: 50689 - DNA, 25 bp, Probe Sequence
tgctctgatttcctcctttcctttc

SEQ ID NO: 50690 - DNA, 25 bp, Probe Sequence
ctgctctgatttcctcctttccttt

SEQ ID NO: 50691 - DNA, 25 bp, Probe Sequence
gatttcctcctttcctttctggctg

SEQ ID NO: 50692 - DNA, 25 bp, Probe Sequence
ctgatttcctcctttcctttctggc

SEQ ID NO: 50693 - DNA, 25 bp, Probe Sequence
atttcctcctttcctttctggctga

SEQ ID NO: 50694 - DNA, 25 bp, Probe Sequence
tgatttcctcctttcctttctggct

SEQ ID NO: 50695 - DNA, 25 bp, Probe Sequence
cctgctctgatttcctcctttcctt

SEQ ID NO: 50696 - DNA, 25 bp, Probe Sequence
ctgactcctaggcttctgaacaatc

SEQ ID NO: 50697 - DNA, 25 bp, Probe Sequence
ctcctgctctgatttcctcctttcc

SEQ ID NO: 50698 - DNA, 25 bp, Probe Sequence
gactcctaggcttctgaacaatcac

SEQ ID NO: 50699 - DNA, 25 bp, Probe Sequence
actgactcctaggcttctgaacaat

SEQ ID NO: 50700 - DNA, 25 bp, Probe Sequence
tttcctcctttcctttctggctgag

SEQ ID NO: 50701 - DNA, 25 bp, Probe Sequence
ctcctaggcttctgaacaatcacag

SEQ ID NO: 50702 - DNA, 25 bp, Probe Sequence
tgactcctaggcttctgaacaatca

SEQ ID NO: 50703 - DNA, 25 bp, Probe Sequence
tcctgctctgatttcctcctttcct

SEQ ID NO: 50704 - DNA, 25 bp, Probe Sequence
tttcctttctggctgaggttctgag

SEQ ID NO: 50705 - DNA, 25 bp, Probe Sequence
ctttcctttctggctgaggttctga

SEQ ID NO: 50706 - DNA, 25 bp, Probe Sequence
actcctaggcttctgaacaatcaca

SEQ ID NO: 50707 - DNA, 25 bp, Probe Sequence
cactgactcctaggcttctgaacaa

SEQ ID NO: 50708 - DNA, 25 bp, Probe Sequence
ctcctttcctttctggctgaggttc

SEQ ID NO: 50709 - DNA, 25 bp, Probe Sequence
tctgaacaatcacagaaacactttt

SEQ ID NO: 50710 - DNA, 25 bp, Probe Sequence
tcctaggcttctgaacaatcacaga

SEQ ID NO: 50711 - DNA, 25 bp, Probe Sequence
gtatatgactgagcgtagcatacag

SEQ ID NO: 50712 - DNA, 25 bp, Probe Sequence
caactgaagacaattatcaaccacg

SEQ ID NO: 50713 - DNA, 25 bp, Probe Sequence
gcaactgaagacaattatcaaccac

SEQ ID NO: 50714 - DNA, 25 bp, Probe Sequence
agcaactgaagacaattatcaacca

SEQ ID NO: 50715 - DNA, 25 bp, Probe Sequence
ttagcagcaactgaagacaattatc

SEQ ID NO: 50716 - DNA, 25 bp, Probe Sequence
cttagcagcaactgaagacaattat

SEQ ID NO: 50717 - DNA, 25 bp, Probe Sequence
caccatgtattcatccagagttctt

SEQ ID NO: 50718 - DNA, 25 bp, Probe Sequence
tagcagcaactgaagacaattatca

SEQ ID NO: 50719 - DNA, 25 bp, Probe Sequence
cagcaactgaagacaattatcaacc

SEQ ID NO: 50720 - DNA, 25 bp, Probe Sequence
acttagcagcaactgaagacaatta

SEQ ID NO: 50721 - DNA, 25 bp, Probe Sequence
accatgtattcatccagagttctta

SEQ ID NO: 50722 - DNA, 25 bp, Probe Sequence
gcagcaactgaagacaattatcaac

SEQ ID NO: 50723 - DNA, 25 bp, Probe Sequence
agcagcaactgaagacaattatcaa

SEQ ID NO: 50724 - DNA, 25 bp, Probe Sequence
aaggtatatgactgagcgtagcata

SEQ ID NO: 50725 - DNA, 25 bp, Probe Sequence
ccatgtattcatccagagttcttaa

SEQ ID NO: 50726 - DNA, 25 bp, Probe Sequence
tatatgactgagcgtagcatacagg

SEQ ID NO: 50727 - DNA, 25 bp, Probe Sequence
aggtatatgactgagcgtagcatac

SEQ ID NO: 50728 - DNA, 25 bp, Probe Sequence
ttgaaaggtatatgactgagcgtag

SEQ ID NO: 50729 - DNA, 25 bp, Probe Sequence
tttgaaaggtatatgactgagcgta

SEQ ID NO: 50730 - DNA, 25 bp, Probe Sequence
ccaccatgtattcatccagagttct

SEQ ID NO: 50731 - DNA, 25 bp, Probe Sequence
cacttagcagcaactgaagacaatt

SEQ ID NO: 50732 - DNA, 25 bp, Probe Sequence
ggtatatgactgagcgtagcataca

SEQ ID NO: 50733 - DNA, 25 bp, Probe Sequence
gtcaaactaattctcacatccctct

SEQ ID NO: 50734 - DNA, 25 bp, Probe Sequence
aaggtcaaactaattctcacatccc

SEQ ID NO: 50735 - DNA, 25 bp, Probe Sequence
caacctcttgagcaatatccagaag

SEQ ID NO: 50736 - DNA, 25 bp, Probe Sequence
atctcctacatcctcactctcactg

SEQ ID NO: 50737 - DNA, 25 bp, Probe Sequence
catctcctacatcctcactctcact

SEQ ID NO: 50738 - DNA, 25 bp, Probe Sequence
ccaacctcttgagcaatatccagaa

SEQ ID NO: 50739 - DNA, 25 bp, Probe Sequence
gctattctctgaacgtattgatgtg

SEQ ID NO: 50740 - DNA, 25 bp, Probe Sequence
agctattctctgaacgtattgatgt

SEQ ID NO: 50741 - DNA, 25 bp, Probe Sequence
ctcctacatcctcactctcactgat

SEQ ID NO: 50742 - DNA, 25 bp, Probe Sequence
aagctattctctgaacgtattgatg

SEQ ID NO: 50743 - DNA, 25 bp, Probe Sequence
aacctcttgagcaatatccagaagc

SEQ ID NO: 50744 - DNA, 25 bp, Probe Sequence
gaagctattctctgaacgtattgat

SEQ ID NO: 50745 - DNA, 25 bp, Probe Sequence
ctattctctgaacgtattgatgtgt

SEQ ID NO: 50746 - DNA, 25 bp, Probe Sequence
tattctctgaacgtattgatgtgtt

SEQ ID NO: 50747 - DNA, 25 bp, Probe Sequence
ccatctcctacatcctcactctcac

SEQ ID NO: 50748 - DNA, 25 bp, Probe Sequence
caccatctcctacatcctcactctc

SEQ ID NO: 50749 - DNA, 25 bp, Probe Sequence
caccaacctcttgagcaatatccag

SEQ ID NO: 50750 - DNA, 25 bp, Probe Sequence
gacaccaacctcttgagcaatatcc

SEQ ID NO: 50751 - DNA, 25 bp, Probe Sequence
ggacaccaacctcttgagcaatatc

SEQ ID NO: 50752 - DNA, 25 bp, Probe Sequence
accaacctcttgagcaatatccaga

SEQ ID NO: 50753 - DNA, 25 bp, Probe Sequence
accatctcctacatcctcactctca

SEQ ID NO: 50754 - DNA, 25 bp, Probe Sequence
tctcctacatcctcactctcactga

SEQ ID NO: 50755 - DNA, 25 bp, Probe Sequence
gagcaatatccagaagctattctct

SEQ ID NO: 50756 - DNA, 25 bp, Probe Sequence
tgagcaatatccagaagctattctc

SEQ ID NO: 50757 - DNA, 25 bp, Probe Sequence
ttgagcaatatccagaagctattct

SEQ ID NO: 50758 - DNA, 25 bp, Probe Sequence
tcttgagcaatatccagaagctatt

SEQ ID NO: 50759 - DNA, 25 bp, Probe Sequence
cattcaggagaaggaagtcatcatc

SEQ ID NO: 50760 - DNA, 25 bp, Probe Sequence
ccattcaggagaaggaagtcatcat

SEQ ID NO: 50761 - DNA, 25 bp, Probe Sequence
caggaactcaagtacagcaattacg

SEQ ID NO: 50762 - DNA, 25 bp, Probe Sequence
gcaggaactcaagtacagcaattac

SEQ ID NO: 50763 - DNA, 25 bp, Probe Sequence
agcaggaactcaagtacagcaatta

SEQ ID NO: 50764 - DNA, 25 bp, Probe Sequence
caatttctaccacaacttcaccaaa

SEQ ID NO: 50765 - DNA, 25 bp, Probe Sequence
attcaggagaaggaagtcatcatcc

SEQ ID NO: 50766 - DNA, 25 bp, Probe Sequence
acaatttctaccacaacttcaccaa

SEQ ID NO: 50767 - DNA, 25 bp, Probe Sequence
gaagtcatcatcctgaacaacaaag

SEQ ID NO: 50768 - DNA, 25 bp, Probe Sequence
gacaatttctaccacaacttcacca

SEQ ID NO: 50769 - DNA, 25 bp, Probe Sequence
aagtcatcatcctgaacaacaaaga

SEQ ID NO: 50770 - DNA, 25 bp, Probe Sequence
accattcaggagaaggaagtcatca

SEQ ID NO: 50771 - DNA, 25 bp, Probe Sequence
gaccattcaggagaaggaagtcatc

SEQ ID NO: 50772 - DNA, 25 bp, Probe Sequence
aagcaggaactcaagtacagcaatt

SEQ ID NO: 50773 - DNA, 25 bp, Probe Sequence
agtcatcatcctgaacaacaaagag

SEQ ID NO: 50774 - DNA, 25 bp, Probe Sequence
tgaacaacaaagagtgtgacaattt

SEQ ID NO: 50775 - DNA, 25 bp, Probe Sequence
aacaaagagtgtgacaatttctacc

SEQ ID NO: 50776 - DNA, 25 bp, Probe Sequence
aacaacaaagagtgtgacaatttct

SEQ ID NO: 50777 - DNA, 25 bp, Probe Sequence
gaacaacaaagagtgtgacaatttc

SEQ ID NO: 50778 - DNA, 25 bp, Probe Sequence
ctgaacaacaaagagtgtgacaatt

SEQ ID NO: 50779 - DNA, 25 bp, Probe Sequence
acaaagagtgtgacaatttctacca

SEQ ID NO: 50780 - DNA, 25 bp, Probe Sequence
tcatcatcctgaacaacaaagagtg

SEQ ID NO: 50781 - DNA, 25 bp, Probe Sequence
gtcatcatcctgaacaacaaagagt

SEQ ID NO: 50782 - DNA, 25 bp, Probe Sequence
acaacaaagagtgtgacaatttcta

SEQ ID NO: 50783 - DNA, 25 bp, Probe Sequence
ccacaataaacatgatctgaagcaa

SEQ ID NO: 50784 - DNA, 25 bp, Probe Sequence
cacaataaacatgatctgaagcaaa

SEQ ID NO: 50785 - DNA, 25 bp, Probe Sequence
cccacaataaacatgatctgaagca

SEQ ID NO: 50786 - DNA, 25 bp, Probe Sequence
acaataaacatgatctgaagcaaaa

SEQ ID NO: 50787 - DNA, 25 bp, Probe Sequence
ccccacaataaacatgatctgaagc

SEQ ID NO: 50788 - DNA, 25 bp, Probe Sequence
gccccacaataaacatgatctgaag

SEQ ID NO: 50789 - DNA, 25 bp, Probe Sequence
ggccccacaataaacatgatctgaa

SEQ ID NO: 50790 - DNA, 25 bp, Probe Sequence
ctggccccacaataaacatgatctg

SEQ ID NO: 50791 - DNA, 25 bp, Probe Sequence
tggccccacaataaacatgatctga

SEQ ID NO: 50792 - DNA, 25 bp, Probe Sequence
cctggccccacaataaacatgatct

SEQ ID NO: 50793 - DNA, 25 bp, Probe Sequence
agaataaggagagaatgacatcgtg

SEQ ID NO: 50794 - DNA, 25 bp, Probe Sequence
cagaataaggagagaatgacatcgt

SEQ ID NO: 50795 - DNA, 25 bp, Probe Sequence
agacaggattcagaataaggagaga

SEQ ID NO: 50796 - DNA, 25 bp, Probe Sequence
cagacaggattcagaataaggagag

SEQ ID NO: 50797 - DNA, 25 bp, Probe Sequence
tcagaataaggagagaatgacatcg

SEQ ID NO: 50798 - DNA, 25 bp, Probe Sequence
ggctgaactctgtattagtaatcca

SEQ ID NO: 50799 - DNA, 25 bp, Probe Sequence
gacaggattcagaataaggagagaa

SEQ ID NO: 50800 - DNA, 25 bp, Probe Sequence
gaataaggagagaatgacatcgtgc

SEQ ID NO: 50801 - DNA, 25 bp, Probe Sequence
ccagacaggattcagaataaggaga

SEQ ID NO: 50802 - DNA, 25 bp, Probe Sequence
agagccagacaggattcagaataag

SEQ ID NO: 50803 - DNA, 25 bp, Probe Sequence
gctgaactctgtattagtaatccaa

SEQ ID NO: 50804 - DNA, 25 bp, Probe Sequence
cagagccagacaggattcagaataa

SEQ ID NO: 50805 - DNA, 25 bp, Probe Sequence
ttcagaataaggagagaatgacatc

SEQ ID NO: 50806 - DNA, 25 bp, Probe Sequence
tgaactctgtattagtaatccaagg

SEQ ID NO: 50807 - DNA, 25 bp, Probe Sequence
accagacacataggacaaagtttat

SEQ ID NO: 50808 - DNA, 25 bp, Probe Sequence
acaggattcagaataaggagagaat

SEQ ID NO: 50809 - DNA, 25 bp, Probe Sequence
aataataactgtgaatgccaaaccg

SEQ ID NO: 50810 - DNA, 25 bp, Probe Sequence
ggacatttctggatacacatacaca

SEQ ID NO: 50811 - DNA, 25 bp, Probe Sequence
tggacatttctggatacacatacac

SEQ ID NO: 50812 - DNA, 25 bp, Probe Sequence
gccagacaggattcagaataaggag

SEQ ID NO: 50813 - DNA, 25 bp, Probe Sequence
gagccagacaggattcagaataagg

SEQ ID NO: 50814 - DNA, 25 bp, Probe Sequence
ccagacacataggacaaagtttatc

SEQ ID NO: 50815 - DNA, 25 bp, Probe Sequence
caataataactgtgaatgccaaacc

SEQ ID NO: 50816 - DNA, 25 bp, Probe Sequence
ggattcagaataaggagagaatgac

SEQ ID NO: 50817 - DNA, 25 bp, Probe Sequence
ccagtaaagtgcatttgacattgaa

SEQ ID NO: 50818 - DNA, 25 bp, Probe Sequence
cagtaaagtgcatttgacattgaaa

SEQ ID NO: 50819 - DNA, 25 bp, Probe Sequence
cccagtaaagtgcatttgacattga

SEQ ID NO: 50820 - DNA, 25 bp, Probe Sequence
gcccagtaaagtgcatttgacattg

SEQ ID NO: 50821 - DNA, 25 bp, Probe Sequence
agtaaagtgcatttgacattgaaaa

SEQ ID NO: 50822 - DNA, 25 bp, Probe Sequence
ggcccagtaaagtgcatttgacatt

SEQ ID NO: 50823 - DNA, 25 bp, Probe Sequence
gtaggagaacagccattccacatgt

SEQ ID NO: 50824 - DNA, 25 bp, Probe Sequence
acatacgatattgcctggtagtaag

SEQ ID NO: 50825 - DNA, 25 bp, Probe Sequence
atacgatattgcctggtagtaagac

SEQ ID NO: 50826 - DNA, 25 bp, Probe Sequence
catacgatattgcctggtagtaaga

SEQ ID NO: 50827 - DNA, 25 bp, Probe Sequence
cacatacgatattgcctggtagtaa

SEQ ID NO: 50828 - DNA, 25 bp, Probe Sequence
tacgatattgcctggtagtaagaca

SEQ ID NO: 50829 - DNA, 25 bp, Probe Sequence
tagtaagacacgagagccttctaat

SEQ ID NO: 50830 - DNA, 25 bp, Probe Sequence
gtagtaagacacgagagccttctaa

SEQ ID NO: 50831 - DNA, 25 bp, Probe Sequence
atattgcctggtagtaagacacgag

SEQ ID NO: 50832 - DNA, 25 bp, Probe Sequence
gatattgcctggtagtaagacacga

SEQ ID NO: 50833 - DNA, 25 bp, Probe Sequence
acgatattgcctggtagtaagacac

SEQ ID NO: 50834 - DNA, 25 bp, Probe Sequence
agtaagacacgagagccttctaatg

SEQ ID NO: 50835 - DNA, 25 bp, Probe Sequence
tattgcctggtagtaagacacgaga

SEQ ID NO: 50836 - DNA, 25 bp, Probe Sequence
ggtagtaagacacgagagccttcta

SEQ ID NO: 50837 - DNA, 25 bp, Probe Sequence
cgatattgcctggtagtaagacacg

SEQ ID NO: 50838 - DNA, 25 bp, Probe Sequence
caaggacgagtatgagtttgatgag

SEQ ID NO: 50839 - DNA, 25 bp, Probe Sequence
gtaagacacgagagccttctaatgc

SEQ ID NO: 50840 - DNA, 25 bp, Probe Sequence
aaggacgagtatgagtttgatgagg

SEQ ID NO: 50841 - DNA, 25 bp, Probe Sequence
attgcctggtagtaagacacgagag

SEQ ID NO: 50842 - DNA, 25 bp, Probe Sequence
ggacgagtatgagtttgatgaggac

SEQ ID NO: 50843 - DNA, 25 bp, Probe Sequence
aggacgagtatgagtttgatgagga

SEQ ID NO: 50844 - DNA, 25 bp, Probe Sequence
gtatgagtttgatgaggacgacgag

SEQ ID NO: 50845 - DNA, 25 bp, Probe Sequence
gagtatgagtttgatgaggacgacg

SEQ ID NO: 50846 - DNA, 25 bp, Probe Sequence
cgagtatgagtttgatgaggacgac

SEQ ID NO: 50847 - DNA, 25 bp, Probe Sequence
gacgagtatgagtttgatgaggacg

SEQ ID NO: 50848 - DNA, 25 bp, Probe Sequence
tggcaatgaacagatgactaagtat

SEQ ID NO: 50849 - DNA, 25 bp, Probe Sequence
ggcaatgaacagatgactaagtatg

SEQ ID NO: 50850 - DNA, 25 bp, Probe Sequence
tgttcattctcgtaacctccatatt

SEQ ID NO: 50851 - DNA, 25 bp, Probe Sequence
ttgttcattctcgtaacctccatat

SEQ ID NO: 50852 - DNA, 25 bp, Probe Sequence
attgttcattctcgtaacctccata

SEQ ID NO: 50853 - DNA, 25 bp, Probe Sequence
gcaatgaacagatgactaagtatga

SEQ ID NO: 50854 - DNA, 25 bp, Probe Sequence
aattgttcattctcgtaacctccat

SEQ ID NO: 50855 - DNA, 25 bp, Probe Sequence
ctggcaatgaacagatgactaagta

SEQ ID NO: 50856 - DNA, 25 bp, Probe Sequence
tattggaacttctacagcttgatgc

SEQ ID NO: 50857 - DNA, 25 bp, Probe Sequence
atattggaacttctacagcttgatg

SEQ ID NO: 50858 - DNA, 25 bp, Probe Sequence
cctcattgacaagagatggagacaa

SEQ ID NO: 50859 - DNA, 25 bp, Probe Sequence
cattggtgttcattatttgctttgc

SEQ ID NO: 50860 - DNA, 25 bp, Probe Sequence
acagatgactaagtatgaaatggca

SEQ ID NO: 50861 - DNA, 25 bp, Probe Sequence
gtatattggaacttctacagcttga

SEQ ID NO: 50862 - DNA, 25 bp, Probe Sequence
tcattggtgttcattatttgctttg

SEQ ID NO: 50863 - DNA, 25 bp, Probe Sequence
attgtctaaagaaactaaagggcag

SEQ ID NO: 50864 - DNA, 25 bp, Probe Sequence
aacagatgactaagtatgaaatggc

SEQ ID NO: 50865 - DNA, 25 bp, Probe Sequence
attggtgttcattatttgctttgcc

SEQ ID NO: 50866 - DNA, 25 bp, Probe Sequence
gaaattgttcattctcgtaacctcc

SEQ ID NO: 50867 - DNA, 25 bp, Probe Sequence
ttcctcattgacaagagatggagac

SEQ ID NO: 50868 - DNA, 25 bp, Probe Sequence
aattgtctaaagaaactaaagggca

SEQ ID NO: 50869 - DNA, 25 bp, Probe Sequence
cagatgactaagtatgaaatggcat

SEQ ID NO: 50870 - DNA, 25 bp, Probe Sequence
aaattgttcattctcgtaacctcca

SEQ ID NO: 50871 - DNA, 25 bp, Probe Sequence
tctaaagaaactaaagggcagtcat

SEQ ID NO: 50872 - DNA, 25 bp, Probe Sequence
aatcggcagaccattagttactatg

SEQ ID NO: 50873 - DNA, 25 bp, Probe Sequence
tacttagccacctgatgactaatga

SEQ ID NO: 50874 - DNA, 25 bp, Probe Sequence
tagccacctgatgactaatgacaac

SEQ ID NO: 50875 - DNA, 25 bp, Probe Sequence
gtacttagccacctgatgactaatg

SEQ ID NO: 50876 - DNA, 25 bp, Probe Sequence
ttagccacctgatgactaatgacaa

SEQ ID NO: 50877 - DNA, 25 bp, Probe Sequence
acctgatgactaatgacaacaaaga

SEQ ID NO: 50878 - DNA, 25 bp, Probe Sequence
cacctgatgactaatgacaacaaag

SEQ ID NO: 50879 - DNA, 25 bp, Probe Sequence
gaaagagaatggatgaacagagagt

SEQ ID NO: 50880 - DNA, 25 bp, Probe Sequence
ctgatgactaatgacaacaaagagg

SEQ ID NO: 50881 - DNA, 25 bp, Probe Sequence
cctgatgactaatgacaacaaagag

SEQ ID NO: 50882 - DNA, 25 bp, Probe Sequence
caaacacggtaaggaaacaatctat

SEQ ID NO: 50883 - DNA, 25 bp, Probe Sequence
tcaaacacggtaaggaaacaatcta

SEQ ID NO: 50884 - DNA, 25 bp, Probe Sequence
taatgacaacaaagaggctgatgaa

SEQ ID NO: 50885 - DNA, 25 bp, Probe Sequence
ggaaagagaatggatgaacagagag

SEQ ID NO: 50886 - DNA, 25 bp, Probe Sequence
cttagccacctgatgactaatgaca

SEQ ID NO: 50887 - DNA, 25 bp, Probe Sequence
acttagccacctgatgactaatgac

SEQ ID NO: 50888 - DNA, 25 bp, Probe Sequence
ctaatgacaacaaagaggctgatga

SEQ ID NO: 50889 - DNA, 25 bp, Probe Sequence
gactaatgacaacaaagaggctgat

SEQ ID NO: 50890 - DNA, 25 bp, Probe Sequence
gatgactaatgacaacaaagaggct

SEQ ID NO: 50891 - DNA, 25 bp, Probe Sequence
aaacacggtaaggaaacaatctatt

SEQ ID NO: 50892 - DNA, 25 bp, Probe Sequence
aaagagaatggatgaacagagagtt

SEQ ID NO: 50893 - DNA, 25 bp, Probe Sequence
caacaaagaggctgatgaagatttc

SEQ ID NO: 50894 - DNA, 25 bp, Probe Sequence
acaacaaagaggctgatgaagattt

SEQ ID NO: 50895 - DNA, 25 bp, Probe Sequence
aaatcggcagaccattagttactat

SEQ ID NO: 50896 - DNA, 25 bp, Probe Sequence
tgtgattcttgttgttgattctctc

SEQ ID NO: 50897 - DNA, 25 bp, Probe Sequence
ttcttgttgttgattctctctctgg

SEQ ID NO: 50898 - DNA, 25 bp, Probe Sequence
gtgattcttgttgttgattctctct

SEQ ID NO: 50899 - DNA, 25 bp, Probe Sequence
tgattcttgttgttgattctctctc

SEQ ID NO: 50900 - DNA, 25 bp, Probe Sequence
attcttgttgttgattctctctctg

SEQ ID NO: 50901 - DNA, 25 bp, Probe Sequence
atgtgattcttgttgttgattctct

SEQ ID NO: 50902 - DNA, 25 bp, Probe Sequence
gattcttgttgttgattctctctct

SEQ ID NO: 50903 - DNA, 25 bp, Probe Sequence
tcttgttgttgattctctctctgga

SEQ ID NO: 50904 - DNA, 25 bp, Probe Sequence
gcaatgtgattcttgttgttgattc

SEQ ID NO: 50905 - DNA, 25 bp, Probe Sequence
agcaatgtgattcttgttgttgatt

SEQ ID NO: 50906 - DNA, 25 bp, Probe Sequence
ttagcaatgtgattcttgttgttga

SEQ ID NO: 50907 - DNA, 25 bp, Probe Sequence
tagcaatgtgattcttgttgttgat

SEQ ID NO: 50908 - DNA, 25 bp, Probe Sequence
aatgtgattcttgttgttgattctc

SEQ ID NO: 50909 - DNA, 25 bp, Probe Sequence
caatgtgattcttgttgttgattct

SEQ ID NO: 50910 - DNA, 25 bp, Probe Sequence
gttgttgattctctctctggagttc

SEQ ID NO: 50911 - DNA, 25 bp, Probe Sequence
cttgttgttgattctctctctggag

SEQ ID NO: 50912 - DNA, 25 bp, Probe Sequence
tgttgattctctctctggagttcat

SEQ ID NO: 50913 - DNA, 25 bp, Probe Sequence
ttgttgattctctctctggagttca

SEQ ID NO: 50914 - DNA, 25 bp, Probe Sequence
ctcatcagtgcctggtataatatgg

SEQ ID NO: 50915 - DNA, 25 bp, Probe Sequence
tgttgttgattctctctctggagtt

SEQ ID NO: 50916 - DNA, 25 bp, Probe Sequence
ttgttgttgattctctctctggagt

SEQ ID NO: 50917 - DNA, 25 bp, Probe Sequence
gctcatcagtgcctggtataatatg

SEQ ID NO: 50918 - DNA, 25 bp, Probe Sequence
tgctcatcagtgcctggtataatat

SEQ ID NO: 50919 - DNA, 25 bp, Probe Sequence
gttgattctctctctggagttcatg

SEQ ID NO: 50920 - DNA, 25 bp, Probe Sequence
ccctttcaaatatgctggtctacat

SEQ ID NO: 50921 - DNA, 25 bp, Probe Sequence
cattcatcacagaacacgacagagt

SEQ ID NO: 50922 - DNA, 25 bp, Probe Sequence
ctacatggaaagacaaagaggaaag

SEQ ID NO: 50923 - DNA, 25 bp, Probe Sequence
tacatggaaagacaaagaggaaagg

SEQ ID NO: 50924 - DNA, 25 bp, Probe Sequence
caaatatgctggtctacatggaaag

SEQ ID NO: 50925 - DNA, 25 bp, Probe Sequence
ctttcaaatatgctggtctacatgg

SEQ ID NO: 50926 - DNA, 25 bp, Probe Sequence
cctttcaaatatgctggtctacatg

SEQ ID NO: 50927 - DNA, 25 bp, Probe Sequence
tcaaatatgctggtctacatggaaa

SEQ ID NO: 50928 - DNA, 25 bp, Probe Sequence
ttcaaatatgctggtctacatggaa

SEQ ID NO: 50929 - DNA, 25 bp, Probe Sequence
tttcaaatatgctggtctacatgga

SEQ ID NO: 50930 - DNA, 25 bp, Probe Sequence
tctacatggaaagacaaagaggaaa

SEQ ID NO: 50931 - DNA, 25 bp, Probe Sequence
aaatatgctggtctacatggaaaga

SEQ ID NO: 50932 - DNA, 25 bp, Probe Sequence
ttaggtccgtcacatttcagaagag

SEQ ID NO: 50933 - DNA, 25 bp, Probe Sequence
ccattcatcacagaacacgacagag

SEQ ID NO: 50934 - DNA, 25 bp, Probe Sequence
cttaggtccgtcacatttcagaaga

SEQ ID NO: 50935 - DNA, 25 bp, Probe Sequence
attcatcacagaacacgacagagtg

SEQ ID NO: 50936 - DNA, 25 bp, Probe Sequence
ttactacacaaggcatgaggtcaaa

SEQ ID NO: 50937 - DNA, 25 bp, Probe Sequence
tttactacacaaggcatgaggtcaa

SEQ ID NO: 50938 - DNA, 25 bp, Probe Sequence
ctgccctttcaaatatgctggtcta

SEQ ID NO: 50939 - DNA, 25 bp, Probe Sequence
tataaacaagctgcacattacacct

SEQ ID NO: 50940 - DNA, 25 bp, Probe Sequence
gtataaacaagctgcacattacacc

SEQ ID NO: 50941 - DNA, 25 bp, Probe Sequence
taggtccgtcacatttcagaagaga

SEQ ID NO: 50942 - DNA, 25 bp, Probe Sequence
aacaagctgcacattacacctctag

SEQ ID NO: 50943 - DNA, 25 bp, Probe Sequence
cgtataaacaagctgcacattacac

SEQ ID NO: 50944 - DNA, 25 bp, Probe Sequence
gtggattgcttatggctatgagata

SEQ ID NO: 50945 - DNA, 25 bp, Probe Sequence
atgtgataagacctccttccatact

SEQ ID NO: 50946 - DNA, 25 bp, Probe Sequence
caccgttgtaaccagagaactatta

SEQ ID NO: 50947 - DNA, 25 bp, Probe Sequence
cttgaagaacctgtctaactggatg

SEQ ID NO: 50948 - DNA, 25 bp, Probe Sequence
tgtgataagacctccttccatactg

SEQ ID NO: 50949 - DNA, 25 bp, Probe Sequence
agtggattgcttatggctatgagat

SEQ ID NO: 50950 - DNA, 25 bp, Probe Sequence
gcttatggctatgagataggttgat

SEQ ID NO: 50951 - DNA, 25 bp, Probe Sequence
gattgcttatggctatgagataggt

SEQ ID NO: 50952 - DNA, 25 bp, Probe Sequence
tggattgcttatggctatgagatag

SEQ ID NO: 50953 - DNA, 25 bp, Probe Sequence
caacatagtgtgtattggtctgaag

SEQ ID NO: 50954 - DNA, 25 bp, Probe Sequence
ttgcttatggctatgagataggttg

SEQ ID NO: 50955 - DNA, 25 bp, Probe Sequence
attgcttatggctatgagataggtt

SEQ ID NO: 50956 - DNA, 25 bp, Probe Sequence
aacatagtgtgtattggtctgaagg

SEQ ID NO: 50957 - DNA, 25 bp, Probe Sequence
ggattgcttatggctatgagatagg

SEQ ID NO: 50958 - DNA, 25 bp, Probe Sequence
catgtgataagacctccttccatac

SEQ ID NO: 50959 - DNA, 25 bp, Probe Sequence
tgcttatggctatgagataggttga

SEQ ID NO: 50960 - DNA, 25 bp, Probe Sequence
gagtggattgcttatggctatgaga

SEQ ID NO: 50961 - DNA, 25 bp, Probe Sequence
ccttgaagaacctgtctaactggat

SEQ ID NO: 50962 - DNA, 25 bp, Probe Sequence
cagtatggctctgacatctcttaga

SEQ ID NO: 50963 - DNA, 25 bp, Probe Sequence
catgtgttgaacctctacctgttag

SEQ ID NO: 50964 - DNA, 25 bp, Probe Sequence
tgagtggattgcttatggctatgag

SEQ ID NO: 50965 - DNA, 25 bp, Probe Sequence
ccgttgtaaccagagaactattact

SEQ ID NO: 50966 - DNA, 25 bp, Probe Sequence
accgttgtaaccagagaactattac

SEQ ID NO: 50967 - DNA, 25 bp, Probe Sequence
atccatccagaagcatgtgataaga

SEQ ID NO: 50968 - DNA, 25 bp, Probe Sequence
ctatgatccaacaccatattgaagc

SEQ ID NO: 50969 - DNA, 25 bp, Probe Sequence
cctatgatccaacaccatattgaag

SEQ ID NO: 50970 - DNA, 25 bp, Probe Sequence
tatgatccaacaccatattgaagcc

SEQ ID NO: 50971 - DNA, 25 bp, Probe Sequence
atctcactgatggtatctggagtca

SEQ ID NO: 50972 - DNA, 25 bp, Probe Sequence
atgatccaacaccatattgaagcct

SEQ ID NO: 50973 - DNA, 25 bp, Probe Sequence
gaatccacagacacacgaggtattg

SEQ ID NO: 50974 - DNA, 25 bp, Probe Sequence
agaatccacagacacacgaggtatt

SEQ ID NO: 50975 - DNA, 25 bp, Probe Sequence
acatttatcagtgacatcatcaact

SEQ ID NO: 50976 - DNA, 25 bp, Probe Sequence
gcacatttatcagtgacatcatcaa

SEQ ID NO: 50977 - DNA, 25 bp, Probe Sequence
cagcacatttatcagtgacatcatc

SEQ ID NO: 50978 - DNA, 25 bp, Probe Sequence
tgatccaacaccatattgaagcctg

SEQ ID NO: 50979 - DNA, 25 bp, Probe Sequence
gagattctgctcattggcttctacc

SEQ ID NO: 50980 - DNA, 25 bp, Probe Sequence
ggagattctgctcattggcttctac

SEQ ID NO: 50981 - DNA, 25 bp, Probe Sequence
aggagattctgctcattggcttcta

SEQ ID NO: 50982 - DNA, 25 bp, Probe Sequence
agcacatttatcagtgacatcatca

SEQ ID NO: 50983 - DNA, 25 bp, Probe Sequence
gatccaacaccatattgaagcctgt

SEQ ID NO: 50984 - DNA, 25 bp, Probe Sequence
gagaatccacagacacacgaggtat

SEQ ID NO: 50985 - DNA, 25 bp, Probe Sequence
catcgttgagaatccacagacacac

SEQ ID NO: 50986 - DNA, 25 bp, Probe Sequence
ccctatgatccaacaccatattgaa

SEQ ID NO: 50987 - DNA, 25 bp, Probe Sequence
cacatttatcagtgacatcatcaac

SEQ ID NO: 50988 - DNA, 25 bp, Probe Sequence
ccagcacatttatcagtgacatcat

SEQ ID NO: 50989 - DNA, 25 bp, Probe Sequence
tccctatgatccaacaccatattga

SEQ ID NO: 50990 - DNA, 25 bp, Probe Sequence
gtccctatgatccaacaccatattg

SEQ ID NO: 50991 - DNA, 25 bp, Probe Sequence
cagatatacgtgcatctcactgatg

SEQ ID NO: 50992 - DNA, 25 bp, Probe Sequence
aatggcataactgagataaggtgaa

SEQ ID NO: 50993 - DNA, 25 bp, Probe Sequence
atggcataactgagataaggtgaat

SEQ ID NO: 50994 - DNA, 25 bp, Probe Sequence
tggcataactgagataaggtgaata

SEQ ID NO: 50995 - DNA, 25 bp, Probe Sequence
ggcataactgagataaggtgaataa

SEQ ID NO: 50996 - DNA, 25 bp, Probe Sequence
ctgagataaggtgaataagtgacaa

SEQ ID NO: 50997 - DNA, 25 bp, Probe Sequence
actgagataaggtgaataagtgaca

SEQ ID NO: 50998 - DNA, 25 bp, Probe Sequence
aactgagataaggtgaataagtgac

SEQ ID NO: 50999 - DNA, 25 bp, Probe Sequence
gcataactgagataaggtgaataag

SEQ ID NO: 51000 - DNA, 25 bp, Probe Sequence
ggtgaataagtgacaaataaagcca

SEQ ID NO: 51001 - DNA, 25 bp, Probe Sequence
ttgctccagtgtttgaaataagaag

SEQ ID NO: 51002 - DNA, 25 bp, Probe Sequence
gttgctccagtgtttgaaataagaa

SEQ ID NO: 51003 - DNA, 25 bp, Probe Sequence
aaatggcataactgagataaggtga

SEQ ID NO: 51004 - DNA, 25 bp, Probe Sequence
gctccagtgtttgaaataagaagac

SEQ ID NO: 51005 - DNA, 25 bp, Probe Sequence
aggtgaataagtgacaaataaagcc

SEQ ID NO: 51006 - DNA, 25 bp, Probe Sequence
tgctccagtgtttgaaataagaaga

SEQ ID NO: 51007 - DNA, 25 bp, Probe Sequence
agttgctccagtgtttgaaataaga

SEQ ID NO: 51008 - DNA, 25 bp, Probe Sequence
cagttgctccagtgtttgaaataag

SEQ ID NO: 51009 - DNA, 25 bp, Probe Sequence
atgtctggaataagttctgtttgtg

SEQ ID NO: 51010 - DNA, 25 bp, Probe Sequence
tgaataagtgacaaataaagccagt

SEQ ID NO: 51011 - DNA, 25 bp, Probe Sequence
gtgaataagtgacaaataaagccag

SEQ ID NO: 51012 - DNA, 25 bp, Probe Sequence
ccagtgtttgaaataagaagactca

SEQ ID NO: 51013 - DNA, 25 bp, Probe Sequence
atcagttgctccagtgtttgaaata

SEQ ID NO: 51014 - DNA, 25 bp, Probe Sequence
ctggaataagttctgtttgtgctga

SEQ ID NO: 51015 - DNA, 25 bp, Probe Sequence
tctggaataagttctgtttgtgctg

SEQ ID NO: 51016 - DNA, 25 bp, Probe Sequence
tggctgaagtaatgaaatacgaaga

SEQ ID NO: 51017 - DNA, 25 bp, Probe Sequence
atggctgaagtaatgaaatacgaag

SEQ ID NO: 51018 - DNA, 25 bp, Probe Sequence
attaaagagtgggtggacaagtatg

SEQ ID NO: 51019 - DNA, 25 bp, Probe Sequence
aattaaagagtgggtggacaagtat

SEQ ID NO: 51020 - DNA, 25 bp, Probe Sequence
aaattaaagagtgggtggacaagta

SEQ ID NO: 51021 - DNA, 25 bp, Probe Sequence
ggctgaagtaatgaaatacgaagat

SEQ ID NO: 51022 - DNA, 25 bp, Probe Sequence
ttaaagagtgggtggacaagtatga

SEQ ID NO: 51023 - DNA, 25 bp, Probe Sequence
tatggctgaagtaatgaaatacgaa

SEQ ID NO: 51024 - DNA, 25 bp, Probe Sequence
ttatggctgaagtaatgaaatacga

SEQ ID NO: 51025 - DNA, 25 bp, Probe Sequence
agaagtatctggaagcgaacatgac

SEQ ID NO: 51026 - DNA, 25 bp, Probe Sequence
gaagtatctggaagcgaacatgaca

SEQ ID NO: 51027 - DNA, 25 bp, Probe Sequence
taaagagtgggtggacaagtatgac

SEQ ID NO: 51028 - DNA, 25 bp, Probe Sequence
caagaattgagtgctgaggagagac

SEQ ID NO: 51029 - DNA, 25 bp, Probe Sequence
aagaattgagtgctgaggagagaca

SEQ ID NO: 51030 - DNA, 25 bp, Probe Sequence
gctgaagtaatgaaatacgaagatt

SEQ ID NO: 51031 - DNA, 25 bp, Probe Sequence
aagtatctggaagcgaacatgacac

SEQ ID NO: 51032 - DNA, 25 bp, Probe Sequence
gtgctgaggagagacagaagtatct

SEQ ID NO: 51033 - DNA, 25 bp, Probe Sequence
agtgctgaggagagacagaagtatc

SEQ ID NO: 51034 - DNA, 25 bp, Probe Sequence
gagtgctgaggagagacagaagtat

SEQ ID NO: 51035 - DNA, 25 bp, Probe Sequence
ttgcagcactccaactagaatactt

SEQ ID NO: 51036 - DNA, 25 bp, Probe Sequence
gtatctggaagcgaacatgacacaa

SEQ ID NO: 51037 - DNA, 25 bp, Probe Sequence
attatggctgaagtaatgaaatacg

SEQ ID NO: 51038 - DNA, 25 bp, Probe Sequence
aattgagtgctgaggagagacagaa

SEQ ID NO: 51039 - DNA, 25 bp, Probe Sequence
attgagtgctgaggagagacagaag

SEQ ID NO: 51040 - DNA, 25 bp, Probe Sequence
ttgagcgacctttactttatacttt

SEQ ID NO: 51041 - DNA, 25 bp, Probe Sequence
tttgagcgacctttactttatactt

SEQ ID NO: 51042 - DNA, 25 bp, Probe Sequence
gccatgaccatgttcactttataat

SEQ ID NO: 51043 - DNA, 25 bp, Probe Sequence
agccatgaccatgttcactttataa

SEQ ID NO: 51044 - DNA, 25 bp, Probe Sequence
acacctcctagatgtcagtatcagc

SEQ ID NO: 51045 - DNA, 25 bp, Probe Sequence
cagccatgaccatgttcactttata

SEQ ID NO: 51046 - DNA, 25 bp, Probe Sequence
cacctcctagatgtcagtatcagct

SEQ ID NO: 51047 - DNA, 25 bp, Probe Sequence
ccatgaccatgttcactttataatc

SEQ ID NO: 51048 - DNA, 25 bp, Probe Sequence
tcagccatgaccatgttcactttat

SEQ ID NO: 51049 - DNA, 25 bp, Probe Sequence
ggaattttgagcgacctttacttta

SEQ ID NO: 51050 - DNA, 25 bp, Probe Sequence
ttcagccatgaccatgttcacttta

SEQ ID NO: 51051 - DNA, 25 bp, Probe Sequence
catgaccatgttcactttataatca

SEQ ID NO: 51052 - DNA, 25 bp, Probe Sequence
tgagcgacctttactttatactttt

SEQ ID NO: 51053 - DNA, 25 bp, Probe Sequence
ttttgagcgacctttactttatact

SEQ ID NO: 51054 - DNA, 25 bp, Probe Sequence
ccagggatcaataagagccaaagtg

SEQ ID NO: 51055 - DNA, 25 bp, Probe Sequence
caccagggatcaataagagccaaag

SEQ ID NO: 51056 - DNA, 25 bp, Probe Sequence
tggaattttgagcgacctttacttt

SEQ ID NO: 51057 - DNA, 25 bp, Probe Sequence
gcgacctttactttatacttttctg

SEQ ID NO: 51058 - DNA, 25 bp, Probe Sequence
agcgacctttactttatacttttct

SEQ ID NO: 51059 - DNA, 25 bp, Probe Sequence
gagcgacctttactttatacttttc

SEQ ID NO: 51060 - DNA, 25 bp, Probe Sequence
gaattttgagcgacctttactttat

SEQ ID NO: 51061 - DNA, 25 bp, Probe Sequence
gatcaataagagccaaagtgggaca

SEQ ID NO: 51062 - DNA, 25 bp, Probe Sequence
tgaccatgttcactttataatcaaa

SEQ ID NO: 51063 - DNA, 25 bp, Probe Sequence
accagggatcaataagagccaaagt

SEQ ID NO: 51064 - DNA, 25 bp, Probe Sequence
aatgttgctaagtcctggtatgatg

SEQ ID NO: 51065 - DNA, 25 bp, Probe Sequence
tggttgttcaataagtgagatgatt

SEQ ID NO: 51066 - DNA, 25 bp, Probe Sequence
ttggttgttcaataagtgagatgat

SEQ ID NO: 51067 - DNA, 25 bp, Probe Sequence
attatggttgtactcttcttgttcc

SEQ ID NO: 51068 - DNA, 25 bp, Probe Sequence
ctaagtcctggtatgatggtgtgag

SEQ ID NO: 51069 - DNA, 25 bp, Probe Sequence
atgttgctaagtcctggtatgatgg

SEQ ID NO: 51070 - DNA, 25 bp, Probe Sequence
gatggctattcagataacatggcaa

SEQ ID NO: 51071 - DNA, 25 bp, Probe Sequence
ctggatggctattcagataacatgg

SEQ ID NO: 51072 - DNA, 25 bp, Probe Sequence
aaatgttgctaagtcctggtatgat

SEQ ID NO: 51073 - DNA, 25 bp, Probe Sequence
aagataaatgttgctaagtcctggt

SEQ ID NO: 51074 - DNA, 25 bp, Probe Sequence
taaatgttgctaagtcctggtatga

SEQ ID NO: 51075 - DNA, 25 bp, Probe Sequence
cacagaaagaactacccatagatga

SEQ ID NO: 51076 - DNA, 25 bp, Probe Sequence
gacccaataacaactaaacctttca

SEQ ID NO: 51077 - DNA, 25 bp, Probe Sequence
agataaatgttgctaagtcctggta

SEQ ID NO: 51078 - DNA, 25 bp, Probe Sequence
aaagataaatgttgctaagtcctgg

SEQ ID NO: 51079 - DNA, 25 bp, Probe Sequence
agacccaataacaactaaacctttc

SEQ ID NO: 51080 - DNA, 25 bp, Probe Sequence
acccaataacaactaaacctttcaa

SEQ ID NO: 51081 - DNA, 25 bp, Probe Sequence
acagaaagaactacccatagatgaa

SEQ ID NO: 51082 - DNA, 25 bp, Probe Sequence
gcattcattggttgttcaataagtg

SEQ ID NO: 51083 - DNA, 25 bp, Probe Sequence
ataaatgttgctaagtcctggtatg

SEQ ID NO: 51084 - DNA, 25 bp, Probe Sequence
gcagttcttctcatagatagctgta

SEQ ID NO: 51085 - DNA, 25 bp, Probe Sequence
gcacagaaagaactacccatagatg

SEQ ID NO: 51086 - DNA, 25 bp, Probe Sequence
gttgctaagtcctggtatgatggtg

SEQ ID NO: 51087 - DNA, 25 bp, Probe Sequence
ttcctgattctgaacattgctattt

SEQ ID NO: 51088 - DNA, 25 bp, Probe Sequence
tagaattgagttgtgtgaagatgtc

SEQ ID NO: 51089 - DNA, 25 bp, Probe Sequence
ttagaattgagttgtgtgaagatgt

SEQ ID NO: 51090 - DNA, 25 bp, Probe Sequence
agaattgagttgtgtgaagatgtca

SEQ ID NO: 51091 - DNA, 25 bp, Probe Sequence
ttgactcttcacatgatggaggtat

SEQ ID NO: 51092 - DNA, 25 bp, Probe Sequence
cctgaggtgttacaatcttgtcttg

SEQ ID NO: 51093 - DNA, 25 bp, Probe Sequence
actcttcacatgatggaggtatgag

SEQ ID NO: 51094 - DNA, 25 bp, Probe Sequence
gactcttcacatgatggaggtatga

SEQ ID NO: 51095 - DNA, 25 bp, Probe Sequence
tgactcttcacatgatggaggtatg

SEQ ID NO: 51096 - DNA, 25 bp, Probe Sequence
tacatattctgaaagagcattccga

SEQ ID NO: 51097 - DNA, 25 bp, Probe Sequence
tattctgaaagagcattccgaaaga

SEQ ID NO: 51098 - DNA, 25 bp, Probe Sequence
catattctgaaagagcattccgaaa

SEQ ID NO: 51099 - DNA, 25 bp, Probe Sequence
atattctgaaagagcattccgaaag

SEQ ID NO: 51100 - DNA, 25 bp, Probe Sequence
acatattctgaaagagcattccgaa

SEQ ID NO: 51101 - DNA, 25 bp, Probe Sequence
ttatttgtttcaccttcaagccttt

SEQ ID NO: 51102 - DNA, 25 bp, Probe Sequence
gttgactcttcacatgatggaggta

SEQ ID NO: 51103 - DNA, 25 bp, Probe Sequence
tatttgtttcaccttcaagcctttg

SEQ ID NO: 51104 - DNA, 25 bp, Probe Sequence
gttatttgtttcaccttcaagcctt

SEQ ID NO: 51105 - DNA, 25 bp, Probe Sequence
attctgaaagagcattccgaaagat

SEQ ID NO: 51106 - DNA, 25 bp, Probe Sequence
ttacatattctgaaagagcattccg

SEQ ID NO: 51107 - DNA, 25 bp, Probe Sequence
gttcaagaccaagaatcagaagctc

SEQ ID NO: 51108 - DNA, 25 bp, Probe Sequence
ctgaggtgttacaatcttgtcttgc

SEQ ID NO: 51109 - DNA, 25 bp, Probe Sequence
ctcttcacatgatggaggtatgagg

SEQ ID NO: 51110 - DNA, 25 bp, Probe Sequence
tgttatttgtttcaccttcaagcct

SEQ ID NO: 51111 - DNA, 25 bp, Probe Sequence
tggaagcgtttatttatacatctct

SEQ ID NO: 51112 - DNA, 25 bp, Probe Sequence
aatatctgttcttcttactgtgcct

SEQ ID NO: 51113 - DNA, 25 bp, Probe Sequence
atctgttcttcttactgtgcctata

SEQ ID NO: 51114 - DNA, 25 bp, Probe Sequence
tatctgttcttcttactgtgcctat

SEQ ID NO: 51115 - DNA, 25 bp, Probe Sequence
tctgttcttcttactgtgcctatat

SEQ ID NO: 51116 - DNA, 25 bp, Probe Sequence
atatctgttcttcttactgtgccta

SEQ ID NO: 51117 - DNA, 25 bp, Probe Sequence
ttaagttggcagcagtaatcttctt

SEQ ID NO: 51118 - DNA, 25 bp, Probe Sequence
ctgttcttcttactgtgcctatatt

SEQ ID NO: 51119 - DNA, 25 bp, Probe Sequence
cgagtcactgatgatgtaatgatat

SEQ ID NO: 51120 - DNA, 25 bp, Probe Sequence
acgaatagcagataatgatgactag

SEQ ID NO: 51121 - DNA, 25 bp, Probe Sequence
aacgaatagcagataatgatgacta

SEQ ID NO: 51122 - DNA, 25 bp, Probe Sequence
cactgtgtggaatgtgaatagttaa

SEQ ID NO: 51123 - DNA, 25 bp, Probe Sequence
acacaccgtatgttgttagagtctt

SEQ ID NO: 51124 - DNA, 25 bp, Probe Sequence
acatcctggaagtctgtaagttgtt

SEQ ID NO: 51125 - DNA, 25 bp, Probe Sequence
ctcaacactaacttcactgggataa

SEQ ID NO: 51126 - DNA, 25 bp, Probe Sequence
tgttcttcttactgtgcctatatta

SEQ ID NO: 51127 - DNA, 25 bp, Probe Sequence
tcaacactaacttcactgggataat

SEQ ID NO: 51128 - DNA, 25 bp, Probe Sequence
ttcgagtcactgatgatgtaatgat

SEQ ID NO: 51129 - DNA, 25 bp, Probe Sequence
attcgagtcactgatgatgtaatga

SEQ ID NO: 51130 - DNA, 25 bp, Probe Sequence
aacactaacttcactgggataatca

SEQ ID NO: 51131 - DNA, 25 bp, Probe Sequence
caacactaacttcactgggataatc

SEQ ID NO: 51132 - DNA, 25 bp, Probe Sequence
gcaatttcgttaatggagatgactt

SEQ ID NO: 51133 - DNA, 25 bp, Probe Sequence
atttcctcaacactaacttcactgg

SEQ ID NO: 51134 - DNA, 25 bp, Probe Sequence
tcgagtcactgatgatgtaatgata

SEQ ID NO: 51135 - DNA, 25 bp, Probe Sequence
aaatatctgttcttcttactgtgcc

SEQ ID NO: 51136 - DNA, 25 bp, Probe Sequence
ctctacgctctggttaatgtaatgt

SEQ ID NO: 51137 - DNA, 25 bp, Probe Sequence
actctacgctctggttaatgtaatg

SEQ ID NO: 51138 - DNA, 25 bp, Probe Sequence
tctacgctctggttaatgtaatgta

SEQ ID NO: 51139 - DNA, 25 bp, Probe Sequence
aactctacgctctggttaatgtaat

SEQ ID NO: 51140 - DNA, 25 bp, Probe Sequence
tggttaatgtaatgtactctcctgg

SEQ ID NO: 51141 - DNA, 25 bp, Probe Sequence
gtaatgtactctcctggactgaatg

SEQ ID NO: 51142 - DNA, 25 bp, Probe Sequence
cgctctggttaatgtaatgtactct

SEQ ID NO: 51143 - DNA, 25 bp, Probe Sequence
tacgctctggttaatgtaatgtact

SEQ ID NO: 51144 - DNA, 25 bp, Probe Sequence
ggttaatgtaatgtactctcctgga

SEQ ID NO: 51145 - DNA, 25 bp, Probe Sequence
ctacgctctggttaatgtaatgtac

SEQ ID NO: 51146 - DNA, 25 bp, Probe Sequence
cgagtctatggaggtcttacaacta

SEQ ID NO: 51147 - DNA, 25 bp, Probe Sequence
tgtaatgtactctcctggactgaat

SEQ ID NO: 51148 - DNA, 25 bp, Probe Sequence
atgtaatgtactctcctggactgaa

SEQ ID NO: 51149 - DNA, 25 bp, Probe Sequence
aatgtaatgtactctcctggactga

SEQ ID NO: 51150 - DNA, 25 bp, Probe Sequence
taatgtaatgtactctcctggactg

SEQ ID NO: 51151 - DNA, 25 bp, Probe Sequence
acgctctggttaatgtaatgtactc

SEQ ID NO: 51152 - DNA, 25 bp, Probe Sequence
gagtctatggaggtcttacaactaa

SEQ ID NO: 51153 - DNA, 25 bp, Probe Sequence
aatatgccatatccaccagtgtatc

SEQ ID NO: 51154 - DNA, 25 bp, Probe Sequence
ccagtataatatgccatatccacca

SEQ ID NO: 51155 - DNA, 25 bp, Probe Sequence
gctctggttaatgtaatgtactctc

SEQ ID NO: 51156 - DNA, 25 bp, Probe Sequence
actatccacagcagtaatatgtctg

SEQ ID NO: 51157 - DNA, 25 bp, Probe Sequence
ttaatgtaatgtactctcctggact

SEQ ID NO: 51158 - DNA, 25 bp, Probe Sequence
gttaatgtaatgtactctcctggac

SEQ ID NO: 51159 - DNA, 25 bp, Probe Sequence
ctggttaatgtaatgtactctcctg

SEQ ID NO: 51160 - DNA, 25 bp, Probe Sequence
agtataagataggcatcgtggtaga

SEQ ID NO: 51161 - DNA, 25 bp, Probe Sequence
gtataagataggcatcgtggtagat

SEQ ID NO: 51162 - DNA, 25 bp, Probe Sequence
tagtataagataggcatcgtggtag

SEQ ID NO: 51163 - DNA, 25 bp, Probe Sequence
ctgagtcacctaattcatactgtca

SEQ ID NO: 51164 - DNA, 25 bp, Probe Sequence
tctgcttcctgtctacctcatacta

SEQ ID NO: 51165 - DNA, 25 bp, Probe Sequence
tgagtcacctaattcatactgtcat

SEQ ID NO: 51166 - DNA, 25 bp, Probe Sequence
ctagtataagataggcatcgtggta

SEQ ID NO: 51167 - DNA, 25 bp, Probe Sequence
gctgagtcacctaattcatactgtc

SEQ ID NO: 51168 - DNA, 25 bp, Probe Sequence
ctgcttcctgtctacctcatactag

SEQ ID NO: 51169 - DNA, 25 bp, Probe Sequence
gagtgttgagttggaaccattgtaa

SEQ ID NO: 51170 - DNA, 25 bp, Probe Sequence
caccttcatatcctgatcttagagc

SEQ ID NO: 51171 - DNA, 25 bp, Probe Sequence
atctgtcaatgtgatgatctgtgtt

SEQ ID NO: 51172 - DNA, 25 bp, Probe Sequence
ccttcaccttcatatcctgatctta

SEQ ID NO: 51173 - DNA, 25 bp, Probe Sequence
gtcacctaattcatactgtcatact

SEQ ID NO: 51174 - DNA, 25 bp, Probe Sequence
accttcatatcctgatcttagagcc

SEQ ID NO: 51175 - DNA, 25 bp, Probe Sequence
tcaccttcatatcctgatcttagag

SEQ ID NO: 51176 - DNA, 25 bp, Probe Sequence
ctggctgagtcacctaattcatact

SEQ ID NO: 51177 - DNA, 25 bp, Probe Sequence
ttcaccttcatatcctgatcttaga

SEQ ID NO: 51178 - DNA, 25 bp, Probe Sequence
cctaattcatactgtcatactagca

SEQ ID NO: 51179 - DNA, 25 bp, Probe Sequence
acctaattcatactgtcatactagc

SEQ ID NO: 51180 - DNA, 25 bp, Probe Sequence
agtcacctaattcatactgtcatac

SEQ ID NO: 51181 - DNA, 25 bp, Probe Sequence
ggctgagtcacctaattcatactgt

SEQ ID NO: 51182 - DNA, 25 bp, Probe Sequence
tggctgagtcacctaattcatactg

SEQ ID NO: 51183 - DNA, 25 bp, Probe Sequence
gcttcctgtctacctcatactagaa

SEQ ID NO: 51184 - DNA, 25 bp, Probe Sequence
gaatggttgtctggtatctgaactg

SEQ ID NO: 51185 - DNA, 25 bp, Probe Sequence
acacctctatgtatgacaatgaact

SEQ ID NO: 51186 - DNA, 25 bp, Probe Sequence
tgacacctctatgtatgacaatgaa

SEQ ID NO: 51187 - DNA, 25 bp, Probe Sequence
ttgacacctctatgtatgacaatga

SEQ ID NO: 51188 - DNA, 25 bp, Probe Sequence
aatggttgtctggtatctgaactga

SEQ ID NO: 51189 - DNA, 25 bp, Probe Sequence
gacacctctatgtatgacaatgaac

SEQ ID NO: 51190 - DNA, 25 bp, Probe Sequence
ctggaatggttgtctggtatctgaa

SEQ ID NO: 51191 - DNA, 25 bp, Probe Sequence
atggttgtctggtatctgaactgag

SEQ ID NO: 51192 - DNA, 25 bp, Probe Sequence
cacctctatgtatgacaatgaactt

SEQ ID NO: 51193 - DNA, 25 bp, Probe Sequence
ggatattgacacctctatgtatgac

SEQ ID NO: 51194 - DNA, 25 bp, Probe Sequence
ggaatggttgtctggtatctgaact

SEQ ID NO: 51195 - DNA, 25 bp, Probe Sequence
tggaatggttgtctggtatctgaac

SEQ ID NO: 51196 - DNA, 25 bp, Probe Sequence
aggatattgacacctctatgtatga

SEQ ID NO: 51197 - DNA, 25 bp, Probe Sequence
gatattgacacctctatgtatgaca

SEQ ID NO: 51198 - DNA, 25 bp, Probe Sequence
attgacacctctatgtatgacaatg

SEQ ID NO: 51199 - DNA, 25 bp, Probe Sequence
atattgacacctctatgtatgacaa

SEQ ID NO: 51200 - DNA, 25 bp, Probe Sequence
ctatgtatgacaatgaactttgggc

SEQ ID NO: 51201 - DNA, 25 bp, Probe Sequence
tatgtatgacaatgaactttgggca

SEQ ID NO: 51202 - DNA, 25 bp, Probe Sequence
tctatgtatgacaatgaactttggg

SEQ ID NO: 51203 - DNA, 25 bp, Probe Sequence
cactttggagagacagaatctagtc

SEQ ID NO: 51204 - DNA, 25 bp, Probe Sequence
ttggagagacagaatctagtcctgg

SEQ ID NO: 51205 - DNA, 25 bp, Probe Sequence
cgaattggactacctcatggatgtg

SEQ ID NO: 51206 - DNA, 25 bp, Probe Sequence
gaattggactacctcatggatgtgc

SEQ ID NO: 51207 - DNA, 25 bp, Probe Sequence
ctttggagagacagaatctagtcct

SEQ ID NO: 51208 - DNA, 25 bp, Probe Sequence
cagcaacaatgtgaccgatatgttc

SEQ ID NO: 51209 - DNA, 25 bp, Probe Sequence
caacatcatcttctccaacgggaac

SEQ ID NO: 51210 - DNA, 25 bp, Probe Sequence
agcaacaatgtgaccgatatgttcc

SEQ ID NO: 51211 - DNA, 25 bp, Probe Sequence
ccagcaacaatgtgaccgatatgtt

SEQ ID NO: 51212 - DNA, 25 bp, Probe Sequence
aacatcatcttctccaacgggaacc

SEQ ID NO: 51213 - DNA, 25 bp, Probe Sequence
caacaatgtgaccgatatgttcccg

SEQ ID NO: 51214 - DNA, 25 bp, Probe Sequence
gcaacaatgtgaccgatatgttccc

SEQ ID NO: 51215 - DNA, 25 bp, Probe Sequence
tcctcaataacaaccatcgtaagaa

SEQ ID NO: 51216 - DNA, 25 bp, Probe Sequence
atcctcaataacaaccatcgtaaga

SEQ ID NO: 51217 - DNA, 25 bp, Probe Sequence
catcctcaataacaaccatcgtaag

SEQ ID NO: 51218 - DNA, 25 bp, Probe Sequence
cctcaataacaaccatcgtaagaat

SEQ ID NO: 51219 - DNA, 25 bp, Probe Sequence
ccatcctcaataacaaccatcgtaa

SEQ ID NO: 51220 - DNA, 25 bp, Probe Sequence
taacaaccatcgtaagaatgactga

SEQ ID NO: 51221 - DNA, 25 bp, Probe Sequence
ataacaaccatcgtaagaatgactg

SEQ ID NO: 51222 - DNA, 25 bp, Probe Sequence
aacaaccatcgtaagaatgactgac

SEQ ID NO: 51223 - DNA, 25 bp, Probe Sequence
caataacaaccatcgtaagaatgac

SEQ ID NO: 51224 - DNA, 25 bp, Probe Sequence
atcgtaagaatgactgactgaacca

SEQ ID NO: 51225 - DNA, 25 bp, Probe Sequence
catcgtaagaatgactgactgaacc

SEQ ID NO: 51226 - DNA, 25 bp, Probe Sequence
ccatcgtaagaatgactgactgaac

SEQ ID NO: 51227 - DNA, 25 bp, Probe Sequence
aataacaaccatcgtaagaatgact

SEQ ID NO: 51228 - DNA, 25 bp, Probe Sequence
ctcaataacaaccatcgtaagaatg

SEQ ID NO: 51229 - DNA, 25 bp, Probe Sequence
tcgtaagaatgactgactgaaccat

SEQ ID NO: 51230 - DNA, 25 bp, Probe Sequence
accatcgtaagaatgactgactgaa

SEQ ID NO: 51231 - DNA, 25 bp, Probe Sequence
aaccatcgtaagaatgactgactga

SEQ ID NO: 51232 - DNA, 25 bp, Probe Sequence
caaccatcgtaagaatgactgactg

SEQ ID NO: 51233 - DNA, 25 bp, Probe Sequence
acaaccatcgtaagaatgactgact

SEQ ID NO: 51234 - DNA, 25 bp, Probe Sequence
tcaataacaaccatcgtaagaatga

SEQ ID NO: 51235 - DNA, 25 bp, Probe Sequence
atgactgactgaaccattattccag

SEQ ID NO: 51236 - DNA, 25 bp, Probe Sequence
ggctattacttcttcaattccatga

SEQ ID NO: 51237 - DNA, 25 bp, Probe Sequence
aactttctccctctatgacacaaat

SEQ ID NO: 51238 - DNA, 25 bp, Probe Sequence
gctaacctttctaacctccctaaat

SEQ ID NO: 51239 - DNA, 25 bp, Probe Sequence
gaaagagtgaactgagaccccaaaa

SEQ ID NO: 51240 - DNA, 25 bp, Probe Sequence
aggttgcctctgacaagatgaatgg

SEQ ID NO: 51241 - DNA, 25 bp, Probe Sequence
ggaaagagtgaactgagaccccaaa

SEQ ID NO: 51242 - DNA, 25 bp, Probe Sequence
gaggttgcctctgacaagatgaatg

SEQ ID NO: 51243 - DNA, 25 bp, Probe Sequence
tgaggttgcctctgacaagatgaat

SEQ ID NO: 51244 - DNA, 25 bp, Probe Sequence
aggaaagagtgaactgagaccccaa

SEQ ID NO: 51245 - DNA, 25 bp, Probe Sequence
aaggaaagagtgaactgagacccca

SEQ ID NO: 51246 - DNA, 25 bp, Probe Sequence
ctgaggttgcctctgacaagatgaa

SEQ ID NO: 51247 - DNA, 25 bp, Probe Sequence
ctgcgactcttcacagtgcaaattc

SEQ ID NO: 51248 - DNA, 25 bp, Probe Sequence
cttcacagtgcaaattccccacaag

SEQ ID NO: 51249 - DNA, 25 bp, Probe Sequence
aagaaaatggacccaccttttccag

SEQ ID NO: 51250 - DNA, 25 bp, Probe Sequence
tcttcacagtgcaaattccccacaa

SEQ ID NO: 51251 - DNA, 25 bp, Probe Sequence
caagaaaatggacccaccttttcca

SEQ ID NO: 51252 - DNA, 25 bp, Probe Sequence
gcaagaaaatggacccaccttttcc

SEQ ID NO: 51253 - DNA, 25 bp, Probe Sequence
ggcaagaaaatggacccaccttttc

SEQ ID NO: 51254 - DNA, 25 bp, Probe Sequence
gagaagagcagaagaatctacactt

SEQ ID NO: 51255 - DNA, 25 bp, Probe Sequence
cagagtatggagaagtcactaatgt

SEQ ID NO: 51256 - DNA, 25 bp, Probe Sequence
cgagaagagcagaagaatctacact

SEQ ID NO: 51257 - DNA, 25 bp, Probe Sequence
agagtatggagaagtcactaatgtg

SEQ ID NO: 51258 - DNA, 25 bp, Probe Sequence
gctagaagagaccttgaacaagttc

SEQ ID NO: 51259 - DNA, 25 bp, Probe Sequence
ctcctgacactatcaacaatcatgt

SEQ ID NO: 51260 - DNA, 25 bp, Probe Sequence
ccagagtatggagaagtcactaatg

SEQ ID NO: 51261 - DNA, 25 bp, Probe Sequence
accagagtatggagaagtcactaat

SEQ ID NO: 51262 - DNA, 25 bp, Probe Sequence
tgctagaagagaccttgaacaagtt

SEQ ID NO: 51263 - DNA, 25 bp, Probe Sequence
acactatcaacaatcatgtgaagac

SEQ ID NO: 51264 - DNA, 25 bp, Probe Sequence
tgacactatcaacaatcatgtgaag

SEQ ID NO: 51265 - DNA, 25 bp, Probe Sequence
ctgacactatcaacaatcatgtgaa

SEQ ID NO: 51266 - DNA, 25 bp, Probe Sequence
cctgacactatcaacaatcatgtga

SEQ ID NO: 51267 - DNA, 25 bp, Probe Sequence
tcctgacactatcaacaatcatgtg

SEQ ID NO: 51268 - DNA, 25 bp, Probe Sequence
gctcctgacactatcaacaatcatg

SEQ ID NO: 51269 - DNA, 25 bp, Probe Sequence
aatcatgtgaagacttgtcgagaag

SEQ ID NO: 51270 - DNA, 25 bp, Probe Sequence
cactatcaacaatcatgtgaagact

SEQ ID NO: 51271 - DNA, 25 bp, Probe Sequence
gacactatcaacaatcatgtgaaga

SEQ ID NO: 51272 - DNA, 25 bp, Probe Sequence
caccagagtatggagaagtcactaa

SEQ ID NO: 51273 - DNA, 25 bp, Probe Sequence
ccattacagagggagttcattcaaa

SEQ ID NO: 51274 - DNA, 25 bp, Probe Sequence
tctgctagaagagaccttgaacaag

SEQ ID NO: 51275 - DNA, 25 bp, Probe Sequence
actatcaacaatcatgtgaagactt

SEQ ID NO: 51276 - DNA, 25 bp, Probe Sequence
ctgctagaagagaccttgaacaagt

SEQ ID NO: 51277 - DNA, 25 bp, Probe Sequence
ttgtcgagaagagcagaagaatcta

SEQ ID NO: 51278 - DNA, 25 bp, Probe Sequence
aatggagattatgattcagtgggtt

SEQ ID NO: 51279 - DNA, 25 bp, Probe Sequence
atggagattatgattcagtgggttg

SEQ ID NO: 51280 - DNA, 25 bp, Probe Sequence
cctggtttgaatggagattatgatt

SEQ ID NO: 51281 - DNA, 25 bp, Probe Sequence
acctggtttgaatggagattatgat

SEQ ID NO: 51282 - DNA, 25 bp, Probe Sequence
gacctggtttgaatggagattatga

SEQ ID NO: 51283 - DNA, 25 bp, Probe Sequence
ggacctggtttgaatggagattatg

SEQ ID NO: 51284 - DNA, 25 bp, Probe Sequence
tggagattatgattcagtgggttgg

SEQ ID NO: 51285 - DNA, 25 bp, Probe Sequence
gggacctggtttgaatggagattat

SEQ ID NO: 51286 - DNA, 25 bp, Probe Sequence
gaatggagattatgattcagtgggt

SEQ ID NO: 51287 - DNA, 25 bp, Probe Sequence
ggagattatgattcagtgggttggg

SEQ ID NO: 51288 - DNA, 25 bp, Probe Sequence
ctggtttgaatggagattatgattc

SEQ ID NO: 51289 - DNA, 25 bp, Probe Sequence
gagattatgattcagtgggttgggg

SEQ ID NO: 51290 - DNA, 25 bp, Probe Sequence
ttgaatggagattatgattcagtgg

SEQ ID NO: 51291 - DNA, 25 bp, Probe Sequence
ggggacctggtttgaatggagatta

SEQ ID NO: 51292 - DNA, 25 bp, Probe Sequence
tgaatggagattatgattcagtggg

SEQ ID NO: 51293 - DNA, 25 bp, Probe Sequence
tggtttgaatggagattatgattca

SEQ ID NO: 51294 - DNA, 25 bp, Probe Sequence
ggtttgaatggagattatgattcag

SEQ ID NO: 51295 - DNA, 25 bp, Probe Sequence
tcaccggacctcaactaaccctaaa

SEQ ID NO: 51296 - DNA, 25 bp, Probe Sequence
tttgaatggagattatgattcagtg

SEQ ID NO: 51297 - DNA, 25 bp, Probe Sequence
gtttgaatggagattatgattcagt

SEQ ID NO: 51298 - DNA, 25 bp, Probe Sequence
aaaatgcacacctcaggagtctacc

SEQ ID NO: 51299 - DNA, 25 bp, Probe Sequence
caccggacctcaactaaccctaaaa

SEQ ID NO: 51300 - DNA, 25 bp, Probe Sequence
atgattttaagaggctttggcccaa

SEQ ID NO: 51301 - DNA, 25 bp, Probe Sequence
gattttaagaggctttggcccaact

SEQ ID NO: 51302 - DNA, 25 bp, Probe Sequence
ggtaatcatgttactaaccacctat

SEQ ID NO: 51303 - DNA, 25 bp, Probe Sequence
aaaggtaatcatgttactaaccacc

SEQ ID NO: 51304 - DNA, 25 bp, Probe Sequence
gtaatcatgttactaaccacctatt

SEQ ID NO: 51305 - DNA, 25 bp, Probe Sequence
aaggtaatcatgttactaaccacct

SEQ ID NO: 51306 - DNA, 25 bp, Probe Sequence
aggtaatcatgttactaaccaccta

SEQ ID NO: 51307 - DNA, 25 bp, Probe Sequence
taaaggtaatcatgttactaaccac

SEQ ID NO: 51308 - DNA, 25 bp, Probe Sequence
taatcatgttactaaccacctattt

SEQ ID NO: 51309 - DNA, 25 bp, Probe Sequence
ttaaaggtaatcatgttactaacca

SEQ ID NO: 51310 - DNA, 25 bp, Probe Sequence
aatcatgttactaaccacctatttt

SEQ ID NO: 51311 - DNA, 25 bp, Probe Sequence
tttaaaggtaatcatgttactaacc

SEQ ID NO: 51312 - DNA, 25 bp, Probe Sequence
acattgtctcaacattcattcacag

SEQ ID NO: 51313 - DNA, 25 bp, Probe Sequence
tgtctcaacattcattcacagattg

SEQ ID NO: 51314 - DNA, 25 bp, Probe Sequence
cattgtctcaacattcattcacaga

SEQ ID NO: 51315 - DNA, 25 bp, Probe Sequence
aacattgtctcaacattcattcaca

SEQ ID NO: 51316 - DNA, 25 bp, Probe Sequence
ttgtctcaacattcattcacagatt

SEQ ID NO: 51317 - DNA, 25 bp, Probe Sequence
attgtctcaacattcattcacagat

SEQ ID NO: 51318 - DNA, 25 bp, Probe Sequence
cagactgaaggaacactgtagtata

SEQ ID NO: 51319 - DNA, 25 bp, Probe Sequence
tggtacagtattgcttattgtgact

SEQ ID NO: 51320 - DNA, 25 bp, Probe Sequence
gtggtacagtattgcttattgtgac

SEQ ID NO: 51321 - DNA, 25 bp, Probe Sequence
tgtggtacagtattgcttattgtga

SEQ ID NO: 51322 - DNA, 25 bp, Probe Sequence
ttgtggtacagtattgcttattgtg

SEQ ID NO: 51323 - DNA, 25 bp, Probe Sequence
ggtacagtattgcttattgtgactt

SEQ ID NO: 51324 - DNA, 25 bp, Probe Sequence
taacattgtctcaacattcattcac

SEQ ID NO: 51325 - DNA, 25 bp, Probe Sequence
gtaacattgtctcaacattcattca

SEQ ID NO: 51326 - DNA, 25 bp, Probe Sequence
tgtaacattgtctcaacattcattc

SEQ ID NO: 51327 - DNA, 25 bp, Probe Sequence
cccataggtagtttaacaggcatta

SEQ ID NO: 51328 - DNA, 25 bp, Probe Sequence
cttctcccataggtagtttaacagg

SEQ ID NO: 51329 - DNA, 25 bp, Probe Sequence
gcagactgaaggaacactgtagtat

SEQ ID NO: 51330 - DNA, 25 bp, Probe Sequence
gcttctcccataggtagtttaacag

SEQ ID NO: 51331 - DNA, 25 bp, Probe Sequence
gctgattctggttatctctttaagg

SEQ ID NO: 51332 - DNA, 25 bp, Probe Sequence
tcccataggtagtttaacaggcatt

SEQ ID NO: 51333 - DNA, 25 bp, Probe Sequence
ttacagcatctttgacaaacatctc

SEQ ID NO: 51334 - DNA, 25 bp, Probe Sequence
cttacagcatctttgacaaacatct

SEQ ID NO: 51335 - DNA, 25 bp, Probe Sequence
tcttacagcatctttgacaaacatc

SEQ ID NO: 51336 - DNA, 25 bp, Probe Sequence
ctctgacacaacataatggagatgc

SEQ ID NO: 51337 - DNA, 25 bp, Probe Sequence
gctctgacacaacataatggagatg

SEQ ID NO: 51338 - DNA, 25 bp, Probe Sequence
gagtctcaaggaaattgtcatcaac

SEQ ID NO: 51339 - DNA, 25 bp, Probe Sequence
agagtctcaaggaaattgtcatcaa

SEQ ID NO: 51340 - DNA, 25 bp, Probe Sequence
gcctccgttatgagatcaaggatat

SEQ ID NO: 51341 - DNA, 25 bp, Probe Sequence
cagagtctcaaggaaattgtcatca

SEQ ID NO: 51342 - DNA, 25 bp, Probe Sequence
atcgagtcaagatgagttagtggag

SEQ ID NO: 51343 - DNA, 25 bp, Probe Sequence
gatcgagtcaagatgagttagtgga

SEQ ID NO: 51344 - DNA, 25 bp, Probe Sequence
agctctgacacaacataatggagat

SEQ ID NO: 51345 - DNA, 25 bp, Probe Sequence
tgatcgagtcaagatgagttagtgg

SEQ ID NO: 51346 - DNA, 25 bp, Probe Sequence
tacagatgcaagtcttgatgaggaa

SEQ ID NO: 51347 - DNA, 25 bp, Probe Sequence
agtctcaaggaaattgtcatcaacg

SEQ ID NO: 51348 - DNA, 25 bp, Probe Sequence
tcttgatgaggaacttgatcgagtc

SEQ ID NO: 51349 - DNA, 25 bp, Probe Sequence
agtcttgatgaggaacttgatcgag

SEQ ID NO: 51350 - DNA, 25 bp, Probe Sequence
tagtcgtgtaataaactcaccagtg

SEQ ID NO: 51351 - DNA, 25 bp, Probe Sequence
ttagtcgtgtaataaactcaccagt

SEQ ID NO: 51352 - DNA, 25 bp, Probe Sequence
cctccgttatgagatcaaggatatc

SEQ ID NO: 51353 - DNA, 25 bp, Probe Sequence
cttgatgaggaacttgatcgagtca

SEQ ID NO: 51354 - DNA, 25 bp, Probe Sequence
gtcttgatgaggaacttgatcgagt

SEQ ID NO: 51355 - DNA, 25 bp, Probe Sequence
tctgacacaacataatggagatgca

SEQ ID NO: 51356 - DNA, 25 bp, Probe Sequence
ctgtgactctcgacaatgtaactct

SEQ ID NO: 51357 - DNA, 25 bp, Probe Sequence
gcagagtctcaaggaaattgtcatc

SEQ ID NO: 51358 - DNA, 25 bp, Probe Sequence
caaactctctctggacaaagtcttc

SEQ ID NO: 51359 - DNA, 25 bp, Probe Sequence
tgtaataaactcaccagtggcaaac

SEQ ID NO: 51360 - DNA, 25 bp, Probe Sequence
tctgtgttcctgtcatagcaaatat

SEQ ID NO: 51361 - DNA, 25 bp, Probe Sequence
ctctgtgttcctgtcatagcaaata

SEQ ID NO: 51362 - DNA, 25 bp, Probe Sequence
tattcatcttcccttctacacacct

SEQ ID NO: 51363 - DNA, 25 bp, Probe Sequence
tctgtgtattcatcttcccttctac

SEQ ID NO: 51364 - DNA, 25 bp, Probe Sequence
gtattcatcttcccttctacacacc

SEQ ID NO: 51365 - DNA, 25 bp, Probe Sequence
ctctgtgtattcatcttcccttcta

SEQ ID NO: 51366 - DNA, 25 bp, Probe Sequence
gactctgtgtattcatcttcccttc

SEQ ID NO: 51367 - DNA, 25 bp, Probe Sequence
actctgtgtattcatcttcccttct

SEQ ID NO: 51368 - DNA, 25 bp, Probe Sequence
agactctgtgtattcatcttccctt

SEQ ID NO: 51369 - DNA, 25 bp, Probe Sequence
gataggtatgactggcttaagagac

SEQ ID NO: 51370 - DNA, 25 bp, Probe Sequence
aagtgcttgtcagttgttgaataaa

SEQ ID NO: 51371 - DNA, 25 bp, Probe Sequence
aaagtgcttgtcagttgttgaataa

SEQ ID NO: 51372 - DNA, 25 bp, Probe Sequence
ggataggtatgactggcttaagaga

SEQ ID NO: 51373 - DNA, 25 bp, Probe Sequence
gttgggataggtatgactggcttaa

SEQ ID NO: 51374 - DNA, 25 bp, Probe Sequence
attcatcttcccttctacacacctg

SEQ ID NO: 51375 - DNA, 25 bp, Probe Sequence
ctgtgttcctgtcatagcaaatatg

SEQ ID NO: 51376 - DNA, 25 bp, Probe Sequence
tgtgttcctgtcatagcaaatatgg

SEQ ID NO: 51377 - DNA, 25 bp, Probe Sequence
gtgttcctgtcatagcaaatatggg

SEQ ID NO: 51378 - DNA, 25 bp, Probe Sequence
cctctgtgttcctgtcatagcaaat

SEQ ID NO: 51379 - DNA, 25 bp, Probe Sequence
gttcctgtcatagcaaatatgggac

SEQ ID NO: 51380 - DNA, 25 bp, Probe Sequence
tgttcctgtcatagcaaatatggga

SEQ ID NO: 51381 - DNA, 25 bp, Probe Sequence
ataggtatgactggcttaagagacc

SEQ ID NO: 51382 - DNA, 25 bp, Probe Sequence
tgtattcatcttcccttctacacac

SEQ ID NO: 51383 - DNA, 25 bp, Probe Sequence
ctgtgtattcatcttcccttctaca

SEQ ID NO: 51384 - DNA, 25 bp, Probe Sequence
ctaggaaggcatgtctattgtgatt

SEQ ID NO: 51385 - DNA, 25 bp, Probe Sequence
aatgttctaggaaggcatgtctatt

SEQ ID NO: 51386 - DNA, 25 bp, Probe Sequence
atgttctaggaaggcatgtctattg

SEQ ID NO: 51387 - DNA, 25 bp, Probe Sequence
tctaggaaggcatgtctattgtgat

SEQ ID NO: 51388 - DNA, 25 bp, Probe Sequence
ttacttcagtgaggagattggagtc

SEQ ID NO: 51389 - DNA, 25 bp, Probe Sequence
ttctaggaaggcatgtctattgtga

SEQ ID NO: 51390 - DNA, 25 bp, Probe Sequence
gttctaggaaggcatgtctattgtg

SEQ ID NO: 51391 - DNA, 25 bp, Probe Sequence
tgttctaggaaggcatgtctattgt

SEQ ID NO: 51392 - DNA, 25 bp, Probe Sequence
cgtaatgttgaacagaattggagta

SEQ ID NO: 51393 - DNA, 25 bp, Probe Sequence
tacttcagtgaggagattggagtct

SEQ ID NO: 51394 - DNA, 25 bp, Probe Sequence
caagccgtaatgttgaacagaattg

SEQ ID NO: 51395 - DNA, 25 bp, Probe Sequence
ttggaacatcagcaccagtatattg

SEQ ID NO: 51396 - DNA, 25 bp, Probe Sequence
ccgtaatgttgaacagaattggagt

SEQ ID NO: 51397 - DNA, 25 bp, Probe Sequence
ggctaacaagaggaaagaactacat

SEQ ID NO: 51398 - DNA, 25 bp, Probe Sequence
tggtagacagttcatgcagtatatg

SEQ ID NO: 51399 - DNA, 25 bp, Probe Sequence
agggaagttagtcaaatgaaatgga

SEQ ID NO: 51400 - DNA, 25 bp, Probe Sequence
cagggaagttagtcaaatgaaatgg

SEQ ID NO: 51401 - DNA, 25 bp, Probe Sequence
gaggagattggagtctgaatggatc

SEQ ID NO: 51402 - DNA, 25 bp, Probe Sequence
tgaggagattggagtctgaatggat

SEQ ID NO: 51403 - DNA, 25 bp, Probe Sequence
gggaagttagtcaaatgaaatggaa

SEQ ID NO: 51404 - DNA, 25 bp, Probe Sequence
atggtagacagttcatgcagtatat

SEQ ID NO: 51405 - DNA, 25 bp, Probe Sequence
cattgtatgtttgtggaaagagcat

SEQ ID NO: 51406 - DNA, 25 bp, Probe Sequence
tatttctgtgcccttaaacccattt

SEQ ID NO: 51407 - DNA, 25 bp, Probe Sequence
ttatttctgtgcccttaaacccatt

SEQ ID NO: 51408 - DNA, 25 bp, Probe Sequence
gtgagtttagttctttgcttgcttt

SEQ ID NO: 51409 - DNA, 25 bp, Probe Sequence
atggtcaggtgagtttagttctttg

SEQ ID NO: 51410 - DNA, 25 bp, Probe Sequence
tcaggtgagtttagttctttgcttg

SEQ ID NO: 51411 - DNA, 25 bp, Probe Sequence
gtcaggtgagtttagttctttgctt

SEQ ID NO: 51412 - DNA, 25 bp, Probe Sequence
catggtcaggtgagtttagttcttt

SEQ ID NO: 51413 - DNA, 25 bp, Probe Sequence
ggtgagtttagttctttgcttgctt

SEQ ID NO: 51414 - DNA, 25 bp, Probe Sequence
aacgattcgagccttacactctatc

SEQ ID NO: 51415 - DNA, 25 bp, Probe Sequence
gaacgattcgagccttacactctat

SEQ ID NO: 51416 - DNA, 25 bp, Probe Sequence
gatcatggtcaggtgagtttagttc

SEQ ID NO: 51417 - DNA, 25 bp, Probe Sequence
cgattcgagccttacactctatctc

SEQ ID NO: 51418 - DNA, 25 bp, Probe Sequence
atcatggtcaggtgagtttagttct

SEQ ID NO: 51419 - DNA, 25 bp, Probe Sequence
tcatggtcaggtgagtttagttctt

SEQ ID NO: 51420 - DNA, 25 bp, Probe Sequence
aggtgagtttagttctttgcttgct

SEQ ID NO: 51421 - DNA, 25 bp, Probe Sequence
caggtgagtttagttctttgcttgc

SEQ ID NO: 51422 - DNA, 25 bp, Probe Sequence
ggtcaggtgagtttagttctttgct

SEQ ID NO: 51423 - DNA, 25 bp, Probe Sequence
acgattcgagccttacactctatct

SEQ ID NO: 51424 - DNA, 25 bp, Probe Sequence
tggtcaggtgagtttagttctttgc

SEQ ID NO: 51425 - DNA, 25 bp, Probe Sequence
tgggtttattttggtggtgttacta

SEQ ID NO: 51426 - DNA, 25 bp, Probe Sequence
tttgggtttattttggtggtgttac

SEQ ID NO: 51427 - DNA, 25 bp, Probe Sequence
ttttgggtttattttggtggtgtta

SEQ ID NO: 51428 - DNA, 25 bp, Probe Sequence
acagagttttgggtttattttggtg

SEQ ID NO: 51429 - DNA, 25 bp, Probe Sequence
cacagagttttgggtttattttggt

SEQ ID NO: 51430 - DNA, 25 bp, Probe Sequence
tcacagagttttgggtttattttgg

SEQ ID NO: 51431 - DNA, 25 bp, Probe Sequence
tgagtttagttctttgcttgctttt

SEQ ID NO: 51432 - DNA, 25 bp, Probe Sequence
gaaaccccgtctttactaaaataca

SEQ ID NO: 51433 - DNA, 25 bp, Probe Sequence
tgaaaccccgtctttactaaaatac

SEQ ID NO: 51434 - DNA, 25 bp, Probe Sequence
gtgaaaccccgtctttactaaaata

SEQ ID NO: 51435 - DNA, 25 bp, Probe Sequence
accccgtctttactaaaatacaaaa

SEQ ID NO: 51436 - DNA, 25 bp, Probe Sequence
aaccccgtctttactaaaatacaaa

SEQ ID NO: 51437 - DNA, 25 bp, Probe Sequence
aaaccccgtctttactaaaatacaa

SEQ ID NO: 51438 - DNA, 25 bp, Probe Sequence
ggtttccttaaatttagcattgcat

SEQ ID NO: 51439 - DNA, 25 bp, Probe Sequence
aggtttccttaaatttagcattgca

SEQ ID NO: 51440 - DNA, 25 bp, Probe Sequence
ggtgaaaccccgtctttactaaaat

SEQ ID NO: 51441 - DNA, 25 bp, Probe Sequence
aaatttagcattgcatttcagtact

SEQ ID NO: 51442 - DNA, 25 bp, Probe Sequence
tccttaaatttagcattgcatttca

SEQ ID NO: 51443 - DNA, 25 bp, Probe Sequence
gtttccttaaatttagcattgcatt

SEQ ID NO: 51444 - DNA, 25 bp, Probe Sequence
ccttaaatttagcattgcatttcag

SEQ ID NO: 51445 - DNA, 25 bp, Probe Sequence
cttaaatttagcattgcatttcagt

SEQ ID NO: 51446 - DNA, 25 bp, Probe Sequence
ttccttaaatttagcattgcatttc

SEQ ID NO: 51447 - DNA, 25 bp, Probe Sequence
taaatttagcattgcatttcagtac

SEQ ID NO: 51448 - DNA, 25 bp, Probe Sequence
tttccttaaatttagcattgcattt

SEQ ID NO: 51449 - DNA, 25 bp, Probe Sequence
aaggtttccttaaatttagcattgc

SEQ ID NO: 51450 - DNA, 25 bp, Probe Sequence
ttaaatttagcattgcatttcagta

SEQ ID NO: 51451 - DNA, 25 bp, Probe Sequence
caaggtttccttaaatttagcattg

SEQ ID NO: 51452 - DNA, 25 bp, Probe Sequence
tcattgtagaagcggtcactattag

SEQ ID NO: 51453 - DNA, 25 bp, Probe Sequence
cattattgtcattgtagaagcggtc

SEQ ID NO: 51454 - DNA, 25 bp, Probe Sequence
gtcattgtagaagcggtcactatta

SEQ ID NO: 51455 - DNA, 25 bp, Probe Sequence
attattgtcattgtagaagcggtca

SEQ ID NO: 51456 - DNA, 25 bp, Probe Sequence
tcattattgtcattgtagaagcggt

SEQ ID NO: 51457 - DNA, 25 bp, Probe Sequence
cttagtgcttccaggtagttatagt

SEQ ID NO: 51458 - DNA, 25 bp, Probe Sequence
ttcattattgtcattgtagaagcgg

SEQ ID NO: 51459 - DNA, 25 bp, Probe Sequence
tgttggctatcaatgaatgtgtcta

SEQ ID NO: 51460 - DNA, 25 bp, Probe Sequence
ttattgtcattgtagaagcggtcac

SEQ ID NO: 51461 - DNA, 25 bp, Probe Sequence
gttggctatcaatgaatgtgtctaa

SEQ ID NO: 51462 - DNA, 25 bp, Probe Sequence
cattgtagaagcggtcactattagc

SEQ ID NO: 51463 - DNA, 25 bp, Probe Sequence
acttagtgcttccaggtagttatag

SEQ ID NO: 51464 - DNA, 25 bp, Probe Sequence
ttgttggctatcaatgaatgtgtct

SEQ ID NO: 51465 - DNA, 25 bp, Probe Sequence
ttagtgcttccaggtagttatagta

SEQ ID NO: 51466 - DNA, 25 bp, Probe Sequence
attgtagaagcggtcactattagca

SEQ ID NO: 51467 - DNA, 25 bp, Probe Sequence
tagtgcttccaggtagttatagtac

SEQ ID NO: 51468 - DNA, 25 bp, Probe Sequence
tgtcattgtagaagcggtcactatt

SEQ ID NO: 51469 - DNA, 25 bp, Probe Sequence
ttgtcattgtagaagcggtcactat

SEQ ID NO: 51470 - DNA, 25 bp, Probe Sequence
attgtcattgtagaagcggtcacta

SEQ ID NO: 51471 - DNA, 25 bp, Probe Sequence
tattgtcattgtagaagcggtcact

SEQ ID NO: 51472 - DNA, 25 bp, Probe Sequence
ttgtagaagcggtcactattagcag

SEQ ID NO: 51473 - DNA, 25 bp, Probe Sequence
ggaatggactaatatcagtgtgtta

SEQ ID NO: 51474 - DNA, 25 bp, Probe Sequence
tcatgtactgtatgtccataagtga

SEQ ID NO: 51475 - DNA, 25 bp, Probe Sequence
ggtcagctacttcctcctatacatt

SEQ ID NO: 51476 - DNA, 25 bp, Probe Sequence
tttaactttgtggtaactgagtgcc

SEQ ID NO: 51477 - DNA, 25 bp, Probe Sequence
ttaactttgtggtaactgagtgccc

SEQ ID NO: 51478 - DNA, 25 bp, Probe Sequence
ttccccaccccttaattttaacttt

SEQ ID NO: 51479 - DNA, 25 bp, Probe Sequence
cttcttccccaccccttaattttaa

SEQ ID NO: 51480 - DNA, 25 bp, Probe Sequence
gccccttctctatgaacttaaaatc

SEQ ID NO: 51481 - DNA, 25 bp, Probe Sequence
cttccccaccccttaattttaactt

SEQ ID NO: 51482 - DNA, 25 bp, Probe Sequence
ttcttccccaccccttaattttaac

SEQ ID NO: 51483 - DNA, 25 bp, Probe Sequence
cgccccttctctatgaacttaaaat

SEQ ID NO: 51484 - DNA, 25 bp, Probe Sequence
tccccaccccttaattttaactttg

SEQ ID NO: 51485 - DNA, 25 bp, Probe Sequence
ttttaactttgtggtaactgagtgc

SEQ ID NO: 51486 - DNA, 25 bp, Probe Sequence
ccccaccccttaattttaactttgt

SEQ ID NO: 51487 - DNA, 25 bp, Probe Sequence
tcttcttccccaccccttaatttta

SEQ ID NO: 51488 - DNA, 25 bp, Probe Sequence
tcttccccaccccttaattttaact

SEQ ID NO: 51489 - DNA, 25 bp, Probe Sequence
tcgccccttctctatgaacttaaaa

SEQ ID NO: 51490 - DNA, 25 bp, Probe Sequence
ttcttcttccccaccccttaatttt

SEQ ID NO: 51491 - DNA, 25 bp, Probe Sequence
tttcttcttccccaccccttaattt

SEQ ID NO: 51492 - DNA, 25 bp, Probe Sequence
cccaccccttaattttaactttgtg

SEQ ID NO: 51493 - DNA, 25 bp, Probe Sequence
ccccttctctatgaacttaaaatca

SEQ ID NO: 51494 - DNA, 25 bp, Probe Sequence
ctcgccccttctctatgaacttaaa

SEQ ID NO: 51495 - DNA, 25 bp, Probe Sequence
attttaactttgtggtaactgagtg

SEQ ID NO: 51496 - DNA, 25 bp, Probe Sequence
tgctgctctccctttaatgccatat

SEQ ID NO: 51497 - DNA, 25 bp, Probe Sequence
ccccttaattttaactttgtggtaa

SEQ ID NO: 51498 - DNA, 25 bp, Probe Sequence
ctttcttcttccccaccccttaatt

SEQ ID NO: 51499 - DNA, 25 bp, Probe Sequence
caccccttaattttaactttgtggt

SEQ ID NO: 51500 - DNA, 25 bp, Probe Sequence
actaccattatgacactactccaga

SEQ ID NO: 51501 - DNA, 25 bp, Probe Sequence
cactaccattatgacactactccag

SEQ ID NO: 51502 - DNA, 25 bp, Probe Sequence
gacactaccattatgacactactcc

SEQ ID NO: 51503 - DNA, 25 bp, Probe Sequence
ggacactaccattatgacactactc

SEQ ID NO: 51504 - DNA, 25 bp, Probe Sequence
acactaccattatgacactactcca

SEQ ID NO: 51505 - DNA, 25 bp, Probe Sequence
ctaccattatgacactactccagat

SEQ ID NO: 51506 - DNA, 25 bp, Probe Sequence
accattatgacactactccagatat

SEQ ID NO: 51507 - DNA, 25 bp, Probe Sequence
ctgaactctgatgaggaagtgaata

SEQ ID NO: 51508 - DNA, 25 bp, Probe Sequence
tgaactctgatgaggaagtgaataa

SEQ ID NO: 51509 - DNA, 25 bp, Probe Sequence
taccattatgacactactccagata

SEQ ID NO: 51510 - DNA, 25 bp, Probe Sequence
aatatcttggatacttcttacctgc

SEQ ID NO: 51511 - DNA, 25 bp, Probe Sequence
tggacactaccattatgacactact

SEQ ID NO: 51512 - DNA, 25 bp, Probe Sequence
gtggacactaccattatgacactac

SEQ ID NO: 51513 - DNA, 25 bp, Probe Sequence
tctgatgaggaagtgaataaatggt

SEQ ID NO: 51514 - DNA, 25 bp, Probe Sequence
actttgtgacttgtatgagagagac

SEQ ID NO: 51515 - DNA, 25 bp, Probe Sequence
aactttgtgacttgtatgagagaga

SEQ ID NO: 51516 - DNA, 25 bp, Probe Sequence
gatgaggaagtgaataaatggttgc

SEQ ID NO: 51517 - DNA, 25 bp, Probe Sequence
tgatgaggaagtgaataaatggttg

SEQ ID NO: 51518 - DNA, 25 bp, Probe Sequence
ctttgtgacttgtatgagagagacc

SEQ ID NO: 51519 - DNA, 25 bp, Probe Sequence
ctgatgaggaagtgaataaatggtt

SEQ ID NO: 51520 - DNA, 25 bp, Probe Sequence
cctgaactctgatgaggaagtgaat

SEQ ID NO: 51521 - DNA, 25 bp, Probe Sequence
ggtggacactaccattatgacacta

SEQ ID NO: 51522 - DNA, 25 bp, Probe Sequence
gagaaggtggacactaccattatga

SEQ ID NO: 51523 - DNA, 25 bp, Probe Sequence
ccattatgacactactccagatata

SEQ ID NO: 51524 - DNA, 25 bp, Probe Sequence
gaccttctcttcataatcttgctct

SEQ ID NO: 51525 - DNA, 25 bp, Probe Sequence
accttctcttcataatcttgctctg

SEQ ID NO: 51526 - DNA, 25 bp, Probe Sequence
agaccttctcttcataatcttgctc

SEQ ID NO: 51527 - DNA, 25 bp, Probe Sequence
gaacagaacacacaagtatgaagtt

SEQ ID NO: 51528 - DNA, 25 bp, Probe Sequence
ggaacagaacacacaagtatgaagt

SEQ ID NO: 51529 - DNA, 25 bp, Probe Sequence
aagtggttacctgttcaagaatcaa

SEQ ID NO: 51530 - DNA, 25 bp, Probe Sequence
agtggttacctgttcaagaatcaag

SEQ ID NO: 51531 - DNA, 25 bp, Probe Sequence
tcaagtggttacctgttcaagaatc

SEQ ID NO: 51532 - DNA, 25 bp, Probe Sequence
ctcaagtggttacctgttcaagaat

SEQ ID NO: 51533 - DNA, 25 bp, Probe Sequence
ccttctcttcataatcttgctctga

SEQ ID NO: 51534 - DNA, 25 bp, Probe Sequence
tagaccttctcttcataatcttgct

SEQ ID NO: 51535 - DNA, 25 bp, Probe Sequence
caagtggttacctgttcaagaatca

SEQ ID NO: 51536 - DNA, 25 bp, Probe Sequence
cttctcttcataatcttgctctgag

SEQ ID NO: 51537 - DNA, 25 bp, Probe Sequence
ttagaccttctcttcataatcttgc

SEQ ID NO: 51538 - DNA, 25 bp, Probe Sequence
tctcaagtggttacctgttcaagaa

SEQ ID NO: 51539 - DNA, 25 bp, Probe Sequence
gttacctgttcaagaatcaagcaca

SEQ ID NO: 51540 - DNA, 25 bp, Probe Sequence
ggttacctgttcaagaatcaagcac

SEQ ID NO: 51541 - DNA, 25 bp, Probe Sequence
gtggttacctgttcaagaatcaagc

SEQ ID NO: 51542 - DNA, 25 bp, Probe Sequence
ctctcaagtggttacctgttcaaga

SEQ ID NO: 51543 - DNA, 25 bp, Probe Sequence
tggttacctgttcaagaatcaagca

SEQ ID NO: 51544 - DNA, 25 bp, Probe Sequence
aagaatcaagcacagacgacaagaa

SEQ ID NO: 51545 - DNA, 25 bp, Probe Sequence
tcttcataatcttgctctgagatgg

SEQ ID NO: 51546 - DNA, 25 bp, Probe Sequence
acagaacacacaagtatgaagtttc

SEQ ID NO: 51547 - DNA, 25 bp, Probe Sequence
catcctctcaagtggttacctgttc

SEQ ID NO: 51548 - DNA, 25 bp, Probe Sequence
atcagaagaataccaggagcgatat

SEQ ID NO: 51549 - DNA, 25 bp, Probe Sequence
aatcagaagaataccaggagcgata

SEQ ID NO: 51550 - DNA, 25 bp, Probe Sequence
tcagaagaataccaggagcgatatg

SEQ ID NO: 51551 - DNA, 25 bp, Probe Sequence
atcatcttctatgctccatacacag

SEQ ID NO: 51552 - DNA, 25 bp, Probe Sequence
gaatcagaagaataccaggagcgat

SEQ ID NO: 51553 - DNA, 25 bp, Probe Sequence
ggtatcatcttctatgctccataca

SEQ ID NO: 51554 - DNA, 25 bp, Probe Sequence
cttcctatgctatctctcttccgag

SEQ ID NO: 51555 - DNA, 25 bp, Probe Sequence
actaggagataatgtgtatgtaggt

SEQ ID NO: 51556 - DNA, 25 bp, Probe Sequence
ctatgctatctctcttccgaggttc

SEQ ID NO: 51557 - DNA, 25 bp, Probe Sequence
tatcatcttctatgctccatacaca

SEQ ID NO: 51558 - DNA, 25 bp, Probe Sequence
gtatcatcttctatgctccatacac

SEQ ID NO: 51559 - DNA, 25 bp, Probe Sequence
tatgctatctctcttccgaggttct

SEQ ID NO: 51560 - DNA, 25 bp, Probe Sequence
gactaggagataatgtgtatgtagg

SEQ ID NO: 51561 - DNA, 25 bp, Probe Sequence
ggactaggagataatgtgtatgtag

SEQ ID NO: 51562 - DNA, 25 bp, Probe Sequence
tcatcttctatgctccatacacagg

SEQ ID NO: 51563 - DNA, 25 bp, Probe Sequence
gtgtatgtaggtttatgtgatggga

SEQ ID NO: 51564 - DNA, 25 bp, Probe Sequence
tgtgtatgtaggtttatgtgatggg

SEQ ID NO: 51565 - DNA, 25 bp, Probe Sequence
tcctcagttcccatttctccttata

SEQ ID NO: 51566 - DNA, 25 bp, Probe Sequence
ttgctgatagggataaatcttgagg

SEQ ID NO: 51567 - DNA, 25 bp, Probe Sequence
gatagggataaatcttgaggctgag

SEQ ID NO: 51568 - DNA, 25 bp, Probe Sequence
tgttgctgatagggataaatcttga

SEQ ID NO: 51569 - DNA, 25 bp, Probe Sequence
cattgttgccgtttcatacttctac

SEQ ID NO: 51570 - DNA, 25 bp, Probe Sequence
ctgatagggataaatcttgaggctg

SEQ ID NO: 51571 - DNA, 25 bp, Probe Sequence
tgtatgtaggtttatgtgatgggat

SEQ ID NO: 51572 - DNA, 25 bp, Probe Sequence
tttcagaaggttgttgggattatca

SEQ ID NO: 51573 - DNA, 25 bp, Probe Sequence
ttcagaaggttgttgggattatcac

SEQ ID NO: 51574 - DNA, 25 bp, Probe Sequence
gttgttgggattatcacaggttaag

SEQ ID NO: 51575 - DNA, 25 bp, Probe Sequence
ggttgttgggattatcacaggttaa

SEQ ID NO: 51576 - DNA, 25 bp, Probe Sequence
ttgttgggattatcacaggttaagc

SEQ ID NO: 51577 - DNA, 25 bp, Probe Sequence
aggttgttgggattatcacaggtta

SEQ ID NO: 51578 - DNA, 25 bp, Probe Sequence
cagaaggttgttgggattatcacag

SEQ ID NO: 51579 - DNA, 25 bp, Probe Sequence
tcagaaggttgttgggattatcaca

SEQ ID NO: 51580 - DNA, 25 bp, Probe Sequence
aaggttgttgggattatcacaggtt

SEQ ID NO: 51581 - DNA, 25 bp, Probe Sequence
agaaggttgttgggattatcacagg

SEQ ID NO: 51582 - DNA, 25 bp, Probe Sequence
gaaggttgttgggattatcacaggt

SEQ ID NO: 51583 - DNA, 25 bp, Probe Sequence
ttttcagaaggttgttgggattatc

SEQ ID NO: 51584 - DNA, 25 bp, Probe Sequence
gtacaggaaccatttatacaaagaa

SEQ ID NO: 51585 - DNA, 25 bp, Probe Sequence
acaggaaccatttatacaaagaata

SEQ ID NO: 51586 - DNA, 25 bp, Probe Sequence
tacaggaaccatttatacaaagaat

SEQ ID NO: 51587 - DNA, 25 bp, Probe Sequence
aatgtcacaatctgtgtactgttaa

SEQ ID NO: 51588 - DNA, 25 bp, Probe Sequence
caggaaccatttatacaaagaatat

SEQ ID NO: 51589 - DNA, 25 bp, Probe Sequence
aaacatgtacaggaaccatttatac

SEQ ID NO: 51590 - DNA, 25 bp, Probe Sequence
tgtacaggaaccatttatacaaaga

SEQ ID NO: 51591 - DNA, 25 bp, Probe Sequence
atgtcacaatctgtgtactgttaaa

SEQ ID NO: 51592 - DNA, 25 bp, Probe Sequence
aaatgtcacaatctgtgtactgtta

SEQ ID NO: 51593 - DNA, 25 bp, Probe Sequence
acatgtacaggaaccatttatacaa

SEQ ID NO: 51594 - DNA, 25 bp, Probe Sequence
aacatgtacaggaaccatttataca

SEQ ID NO: 51595 - DNA, 25 bp, Probe Sequence
cacttaaaacatgtacaggaaccat

SEQ ID NO: 51596 - DNA, 25 bp, Probe Sequence
gcttctgtgatggttatattgccta

SEQ ID NO: 51597 - DNA, 25 bp, Probe Sequence
aaggaatgatgttctgtagagatgg

SEQ ID NO: 51598 - DNA, 25 bp, Probe Sequence
cttgtgcttcaatagtggaatctac

SEQ ID NO: 51599 - DNA, 25 bp, Probe Sequence
ttctgtgatggttatattgcctagc

SEQ ID NO: 51600 - DNA, 25 bp, Probe Sequence
tgtgcttcaatagtggaatctactt

SEQ ID NO: 51601 - DNA, 25 bp, Probe Sequence
ttgtgcttcaatagtggaatctact

SEQ ID NO: 51602 - DNA, 25 bp, Probe Sequence
acttgtgcttcaatagtggaatcta

SEQ ID NO: 51603 - DNA, 25 bp, Probe Sequence
cttctgtgatggttatattgcctag

SEQ ID NO: 51604 - DNA, 25 bp, Probe Sequence
aacttgtgcttcaatagtggaatct

SEQ ID NO: 51605 - DNA, 25 bp, Probe Sequence
ttgcttctgtgatggttatattgcc

SEQ ID NO: 51606 - DNA, 25 bp, Probe Sequence
caacttgtgcttcaatagtggaatc

SEQ ID NO: 51607 - DNA, 25 bp, Probe Sequence
tcaccttacacagaataatcaggaa

SEQ ID NO: 51608 - DNA, 25 bp, Probe Sequence
ttcaccttacacagaataatcagga

SEQ ID NO: 51609 - DNA, 25 bp, Probe Sequence
tgcttctgtgatggttatattgcct

SEQ ID NO: 51610 - DNA, 25 bp, Probe Sequence
aggaatgatgttctgtagagatggc

SEQ ID NO: 51611 - DNA, 25 bp, Probe Sequence
caagcctgtctgtatatctggtagc

SEQ ID NO: 51612 - DNA, 25 bp, Probe Sequence
ggaaccaagcctgtctgtatatctg

SEQ ID NO: 51613 - DNA, 25 bp, Probe Sequence
gatattccacttagctgtagagtcc

SEQ ID NO: 51614 - DNA, 25 bp, Probe Sequence
tattccacttagctgtagagtccat

SEQ ID NO: 51615 - DNA, 25 bp, Probe Sequence
atattccacttagctgtagagtcca

SEQ ID NO: 51616 - DNA, 25 bp, Probe Sequence
tttgcttctgtgatggttatattgc

SEQ ID NO: 51617 - DNA, 25 bp, Probe Sequence
cgtttgcttctgtgatggttatatt

SEQ ID NO: 51618 - DNA, 25 bp, Probe Sequence
tgatattccacttagctgtagagtc

SEQ ID NO: 51619 - DNA, 25 bp, Probe Sequence
tttctcttctaagtttctgtccctc

SEQ ID NO: 51620 - DNA, 25 bp, Probe Sequence
aatatacagaaggctatcacacttg

SEQ ID NO: 51621 - DNA, 25 bp, Probe Sequence
atatacagaaggctatcacacttgt

SEQ ID NO: 51622 - DNA, 25 bp, Probe Sequence
ttaatgacttatgagcaagctggtt

SEQ ID NO: 51623 - DNA, 25 bp, Probe Sequence
ttggttaatgacttatgagcaagct

SEQ ID NO: 51624 - DNA, 25 bp, Probe Sequence
gttaatgacttatgagcaagctggt

SEQ ID NO: 51625 - DNA, 25 bp, Probe Sequence
tggttaatgacttatgagcaagctg

SEQ ID NO: 51626 - DNA, 25 bp, Probe Sequence
ggatttggttaatgacttatgagca

SEQ ID NO: 51627 - DNA, 25 bp, Probe Sequence
tggatttggttaatgacttatgagc

SEQ ID NO: 51628 - DNA, 25 bp, Probe Sequence
tatacagaaggctatcacacttgtg

SEQ ID NO: 51629 - DNA, 25 bp, Probe Sequence
tttggttaatgacttatgagcaagc

SEQ ID NO: 51630 - DNA, 25 bp, Probe Sequence
taatatacagaaggctatcacactt

SEQ ID NO: 51631 - DNA, 25 bp, Probe Sequence
ggttaatgacttatgagcaagctgg

SEQ ID NO: 51632 - DNA, 25 bp, Probe Sequence
ataatatacagaaggctatcacact

SEQ ID NO: 51633 - DNA, 25 bp, Probe Sequence
taattcaactttcgtctgcctgttt

SEQ ID NO: 51634 - DNA, 25 bp, Probe Sequence
ttaattcaactttcgtctgcctgtt

SEQ ID NO: 51635 - DNA, 25 bp, Probe Sequence
tttaagcactcacgcaaaggtaaat

SEQ ID NO: 51636 - DNA, 25 bp, Probe Sequence
tgtgaaattctcttgtctaatctga

SEQ ID NO: 51637 - DNA, 25 bp, Probe Sequence
agaatcaccaactgtaaacatgaga

SEQ ID NO: 51638 - DNA, 25 bp, Probe Sequence
gaatcaccaactgtaaacatgagaa

SEQ ID NO: 51639 - DNA, 25 bp, Probe Sequence
aagaatcaccaactgtaaacatgag

SEQ ID NO: 51640 - DNA, 25 bp, Probe Sequence
ttaagcactcacgcaaaggtaaatg

SEQ ID NO: 51641 - DNA, 25 bp, Probe Sequence
gttaattcaactttcgtctgcctgt

SEQ ID NO: 51642 - DNA, 25 bp, Probe Sequence
acacttgtgaaattctcttgtctaa

SEQ ID NO: 51643 - DNA, 25 bp, Probe Sequence
accaactgtaaacatgagaataact

SEQ ID NO: 51644 - DNA, 25 bp, Probe Sequence
tgacatggctaactgcaagaattaa

SEQ ID NO: 51645 - DNA, 25 bp, Probe Sequence
tgataaagttctctatggcaaagtc

SEQ ID NO: 51646 - DNA, 25 bp, Probe Sequence
ctgacatggctaactgcaagaatta

SEQ ID NO: 51647 - DNA, 25 bp, Probe Sequence
ctgataaagttctctatggcaaagt

SEQ ID NO: 51648 - DNA, 25 bp, Probe Sequence
tccctacctagaatgtcagatgttt

SEQ ID NO: 51649 - DNA, 25 bp, Probe Sequence
tatggcaaagtctttcaaatacgag

SEQ ID NO: 51650 - DNA, 25 bp, Probe Sequence
ctatggcaaagtctttcaaatacga

SEQ ID NO: 51651 - DNA, 25 bp, Probe Sequence
tctatggcaaagtctttcaaatacg

SEQ ID NO: 51652 - DNA, 25 bp, Probe Sequence
gttctctatggcaaagtctttcaaa

SEQ ID NO: 51653 - DNA, 25 bp, Probe Sequence
agttctctatggcaaagtctttcaa

SEQ ID NO: 51654 - DNA, 25 bp, Probe Sequence
gataaagttctctatggcaaagtct

SEQ ID NO: 51655 - DNA, 25 bp, Probe Sequence
tctgataaagttctctatggcaaag

SEQ ID NO: 51656 - DNA, 25 bp, Probe Sequence
ttccctacctagaatgtcagatgtt

SEQ ID NO: 51657 - DNA, 25 bp, Probe Sequence
tttccctacctagaatgtcagatgt

SEQ ID NO: 51658 - DNA, 25 bp, Probe Sequence
aagttctctatggcaaagtctttca

SEQ ID NO: 51659 - DNA, 25 bp, Probe Sequence
catacacatccatgttcactgtaac

SEQ ID NO: 51660 - DNA, 25 bp, Probe Sequence
agtctttcaaatacgagataactgc

SEQ ID NO: 51661 - DNA, 25 bp, Probe Sequence
ttctctatggcaaagtctttcaaat

SEQ ID NO: 51662 - DNA, 25 bp, Probe Sequence
ataatttatgatgactcagtggtgc

SEQ ID NO: 51663 - DNA, 25 bp, Probe Sequence
ggcaaagtctttcaaatacgagata

SEQ ID NO: 51664 - DNA, 25 bp, Probe Sequence
taatttatgatgactcagtggtgcc

SEQ ID NO: 51665 - DNA, 25 bp, Probe Sequence
ccatacacatccatgttcactgtaa

SEQ ID NO: 51666 - DNA, 25 bp, Probe Sequence
ttctgataaagttctctatggcaaa

SEQ ID NO: 51667 - DNA, 25 bp, Probe Sequence
tttctgataaagttctctatggcaa

SEQ ID NO: 51668 - DNA, 25 bp, Probe Sequence
aagtctcaggttatcaagttcagtc

SEQ ID NO: 51669 - DNA, 25 bp, Probe Sequence
tcaagtctcaggttatcaagttcag

SEQ ID NO: 51670 - DNA, 25 bp, Probe Sequence
gtctcaggttatcaagttcagtcaa

SEQ ID NO: 51671 - DNA, 25 bp, Probe Sequence
caagtctcaggttatcaagttcagt

SEQ ID NO: 51672 - DNA, 25 bp, Probe Sequence
gtcaagtctcaggttatcaagttca

SEQ ID NO: 51673 - DNA, 25 bp, Probe Sequence
tgtcaagtctcaggttatcaagttc

SEQ ID NO: 51674 - DNA, 25 bp, Probe Sequence
agatacagaattggagaagacttgc

SEQ ID NO: 51675 - DNA, 25 bp, Probe Sequence
agtctcaggttatcaagttcagtca

SEQ ID NO: 51676 - DNA, 25 bp, Probe Sequence
ggttatcaagttcagtcaacagaag

SEQ ID NO: 51677 - DNA, 25 bp, Probe Sequence
aggttatcaagttcagtcaacagaa

SEQ ID NO: 51678 - DNA, 25 bp, Probe Sequence
tatcaagttcagtcaacagaagcat

SEQ ID NO: 51679 - DNA, 25 bp, Probe Sequence
gttatcaagttcagtcaacagaagc

SEQ ID NO: 51680 - DNA, 25 bp, Probe Sequence
tctcaggttatcaagttcagtcaac

SEQ ID NO: 51681 - DNA, 25 bp, Probe Sequence
ttatcaagttcagtcaacagaagca

SEQ ID NO: 51682 - DNA, 25 bp, Probe Sequence
gagatacagaattggagaagacttg

SEQ ID NO: 51683 - DNA, 25 bp, Probe Sequence
caggttatcaagttcagtcaacaga

SEQ ID NO: 51684 - DNA, 25 bp, Probe Sequence
tcaggttatcaagttcagtcaacag

SEQ ID NO: 51685 - DNA, 25 bp, Probe Sequence
ctcaggttatcaagttcagtcaaca

SEQ ID NO: 51686 - DNA, 25 bp, Probe Sequence
ttgtcaagtctcaggttatcaagtt

SEQ ID NO: 51687 - DNA, 25 bp, Probe Sequence
agagatacagaattggagaagactt

SEQ ID NO: 51688 - DNA, 25 bp, Probe Sequence
tagaatgttatgtgctggctcctta

SEQ ID NO: 51689 - DNA, 25 bp, Probe Sequence
cttacaatgacgccataactcctag

SEQ ID NO: 51690 - DNA, 25 bp, Probe Sequence
gcattggactcactgttcattatgt

SEQ ID NO: 51691 - DNA, 25 bp, Probe Sequence
tggttagttcagatgctagagatat

SEQ ID NO: 51692 - DNA, 25 bp, Probe Sequence
cagcatattagaacagacgatccat

SEQ ID NO: 51693 - DNA, 25 bp, Probe Sequence
tagaacagacgatccatgctaatat

SEQ ID NO: 51694 - DNA, 25 bp, Probe Sequence
atattagaacagacgatccatgcta

SEQ ID NO: 51695 - DNA, 25 bp, Probe Sequence
catattagaacagacgatccatgct

SEQ ID NO: 51696 - DNA, 25 bp, Probe Sequence
agcatattagaacagacgatccatg

SEQ ID NO: 51697 - DNA, 25 bp, Probe Sequence
gaacagacgatccatgctaatattg

SEQ ID NO: 51698 - DNA, 25 bp, Probe Sequence
agaacagacgatccatgctaatatt

SEQ ID NO: 51699 - DNA, 25 bp, Probe Sequence
cagacgatccatgctaatattgtat

SEQ ID NO: 51700 - DNA, 25 bp, Probe Sequence
ttagaacagacgatccatgctaata

SEQ ID NO: 51701 - DNA, 25 bp, Probe Sequence
tattagaacagacgatccatgctaa

SEQ ID NO: 51702 - DNA, 25 bp, Probe Sequence
acagacgatccatgctaatattgta

SEQ ID NO: 51703 - DNA, 25 bp, Probe Sequence
aacagacgatccatgctaatattgt

SEQ ID NO: 51704 - DNA, 25 bp, Probe Sequence
aagttctgggtcctttcatcataag

SEQ ID NO: 51705 - DNA, 25 bp, Probe Sequence
gaagttctgggtcctttcatcataa

SEQ ID NO: 51706 - DNA, 25 bp, Probe Sequence
ttgcagcatattagaacagacgatc

SEQ ID NO: 51707 - DNA, 25 bp, Probe Sequence
cttgcagcatattagaacagacgat

SEQ ID NO: 51708 - DNA, 25 bp, Probe Sequence
agacgatccatgctaatattgtatt

SEQ ID NO: 51709 - DNA, 25 bp, Probe Sequence
gcagcatattagaacagacgatcca

SEQ ID NO: 51710 - DNA, 25 bp, Probe Sequence
agcaagtatgtgaaacaagaagttc

SEQ ID NO: 51711 - DNA, 25 bp, Probe Sequence
agaagttctgggtcctttcatcata

SEQ ID NO: 51712 - DNA, 25 bp, Probe Sequence
tagcaagtatgtgaaacaagaagtt

SEQ ID NO: 51713 - DNA, 25 bp, Probe Sequence
ttagcaagtatgtgaaacaagaagt

SEQ ID NO: 51714 - DNA, 25 bp, Probe Sequence
gcaagtatgtgaaacaagaagttct

SEQ ID NO: 51715 - DNA, 25 bp, Probe Sequence
atttctgggcaatttagacagtgaa

SEQ ID NO: 51716 - DNA, 25 bp, Probe Sequence
acattcagcactcttccaggaatag

SEQ ID NO: 51717 - DNA, 25 bp, Probe Sequence
gacattcagcactcttccaggaata

SEQ ID NO: 51718 - DNA, 25 bp, Probe Sequence
tttagaatgacccttgggaacagtg

SEQ ID NO: 51719 - DNA, 25 bp, Probe Sequence
cactgtttagaatgacccttgggaa

SEQ ID NO: 51720 - DNA, 25 bp, Probe Sequence
attcagcactcttccaggaatagga

SEQ ID NO: 51721 - DNA, 25 bp, Probe Sequence
cattcagcactcttccaggaatagg

SEQ ID NO: 51722 - DNA, 25 bp, Probe Sequence
gtttagaatgacccttgggaacagt

SEQ ID NO: 51723 - DNA, 25 bp, Probe Sequence
actgtttagaatgacccttgggaac

SEQ ID NO: 51724 - DNA, 25 bp, Probe Sequence
ttgggaacagtgaacgtagagaatt

SEQ ID NO: 51725 - DNA, 25 bp, Probe Sequence
ccaccactgtttagaatgacccttg

SEQ ID NO: 51726 - DNA, 25 bp, Probe Sequence
tagaatgacccttgggaacagtgaa

SEQ ID NO: 51727 - DNA, 25 bp, Probe Sequence
ttagaatgacccttgggaacagtga

SEQ ID NO: 51728 - DNA, 25 bp, Probe Sequence
ggaacagtgaacgtagagaattgtt

SEQ ID NO: 51729 - DNA, 25 bp, Probe Sequence
tttagcagagtttgtgaccaaagtc

SEQ ID NO: 51730 - DNA, 25 bp, Probe Sequence
cttgggaacagtgaacgtagagaat

SEQ ID NO: 51731 - DNA, 25 bp, Probe Sequence
ttcagcactcttccaggaataggac

SEQ ID NO: 51732 - DNA, 25 bp, Probe Sequence
ttgacattcagcactcttccaggaa

SEQ ID NO: 51733 - DNA, 25 bp, Probe Sequence
tgggaacagtgaacgtagagaattg

SEQ ID NO: 51734 - DNA, 25 bp, Probe Sequence
tgacattcagcactcttccaggaat

SEQ ID NO: 51735 - DNA, 25 bp, Probe Sequence
gttgacattcagcactcttccagga

SEQ ID NO: 51736 - DNA, 25 bp, Probe Sequence
gggaacagtgaacgtagagaattgt

SEQ ID NO: 51737 - DNA, 25 bp, Probe Sequence
aagtcagagtggatcatggtggttt

SEQ ID NO: 51738 - DNA, 25 bp, Probe Sequence
aaagtcagagtggatcatggtggtt

SEQ ID NO: 51739 - DNA, 25 bp, Probe Sequence
cagcagggaatttgtcttgttggag

SEQ ID NO: 51740 - DNA, 25 bp, Probe Sequence
ataaagcttctgtgtctaaggcaaa

SEQ ID NO: 51741 - DNA, 25 bp, Probe Sequence
aataaagcttctgtgtctaaggcaa

SEQ ID NO: 51742 - DNA, 25 bp, Probe Sequence
aaataaagcttctgtgtctaaggca

SEQ ID NO: 51743 - DNA, 25 bp, Probe Sequence
taaagcttctgtgtctaaggcaaaa

SEQ ID NO: 51744 - DNA, 25 bp, Probe Sequence
cttactcctatgatgacattccaga

SEQ ID NO: 51745 - DNA, 25 bp, Probe Sequence
gcttactcctatgatgacattccag

SEQ ID NO: 51746 - DNA, 25 bp, Probe Sequence
gtgcttactcctatgatgacattcc

SEQ ID NO: 51747 - DNA, 25 bp, Probe Sequence
tgcttactcctatgatgacattcca

SEQ ID NO: 51748 - DNA, 25 bp, Probe Sequence
cgtgcttactcctatgatgacattc

SEQ ID NO: 51749 - DNA, 25 bp, Probe Sequence
ctaccgtgcttactcctatgatgac

SEQ ID NO: 51750 - DNA, 25 bp, Probe Sequence
ccgtgcttactcctatgatgacatt

SEQ ID NO: 51751 - DNA, 25 bp, Probe Sequence
taccgtgcttactcctatgatgaca

SEQ ID NO: 51752 - DNA, 25 bp, Probe Sequence
accgtgcttactcctatgatgacat

SEQ ID NO: 51753 - DNA, 25 bp, Probe Sequence
gctaccgtgcttactcctatgatga

SEQ ID NO: 51754 - DNA, 25 bp, Probe Sequence
ggctaccgtgcttactcctatgatg

SEQ ID NO: 51755 - DNA, 25 bp, Probe Sequence
aggctaccgtgcttactcctatgat

SEQ ID NO: 51756 - DNA, 25 bp, Probe Sequence
aaaggctaccgtgcttactcctatg

SEQ ID NO: 51757 - DNA, 25 bp, Probe Sequence
caaaggctaccgtgcttactcctat

SEQ ID NO: 51758 - DNA, 25 bp, Probe Sequence
acttcaaacatttcagaaaacaaaa

SEQ ID NO: 51759 - DNA, 25 bp, Probe Sequence
aacttcaaacatttcagaaaacaaa

SEQ ID NO: 51760 - DNA, 25 bp, Probe Sequence
taacttcaaacatttcagaaaacaa

SEQ ID NO: 51761 - DNA, 25 bp, Probe Sequence
ttaacttcaaacatttcagaaaaca

SEQ ID NO: 51762 - DNA, 25 bp, Probe Sequence
tgactcagagggaaattacatgctg

SEQ ID NO: 51763 - DNA, 25 bp, Probe Sequence
cagagggaaattacatgctgacatg

SEQ ID NO: 51764 - DNA, 25 bp, Probe Sequence
tcagagggaaattacatgctgacat

SEQ ID NO: 51765 - DNA, 25 bp, Probe Sequence
gactcagagggaaattacatgctga

SEQ ID NO: 51766 - DNA, 25 bp, Probe Sequence
ctcagagggaaattacatgctgaca

SEQ ID NO: 51767 - DNA, 25 bp, Probe Sequence
actcagagggaaattacatgctgac

SEQ ID NO: 51768 - DNA, 25 bp, Probe Sequence
catggatggcaaagatcaagctgac

SEQ ID NO: 51769 - DNA, 25 bp, Probe Sequence
acttgtctgcctcacatattctaag

SEQ ID NO: 51770 - DNA, 25 bp, Probe Sequence
gacttgtctgcctcacatattctaa

SEQ ID NO: 51771 - DNA, 25 bp, Probe Sequence
aatgacttgtctgcctcacatattc

SEQ ID NO: 51772 - DNA, 25 bp, Probe Sequence
gaatgacttgtctgcctcacatatt

SEQ ID NO: 51773 - DNA, 25 bp, Probe Sequence
tgacttgtctgcctcacatattcta

SEQ ID NO: 51774 - DNA, 25 bp, Probe Sequence
cttgtctgcctcacatattctaagg

SEQ ID NO: 51775 - DNA, 25 bp, Probe Sequence
tagtaagctacctacatctgaacca

SEQ ID NO: 51776 - DNA, 25 bp, Probe Sequence
ctagtaagctacctacatctgaacc

SEQ ID NO: 51777 - DNA, 25 bp, Probe Sequence
tcctaataggtcaagagagagagac

SEQ ID NO: 51778 - DNA, 25 bp, Probe Sequence
ctcctaataggtcaagagagagaga

SEQ ID NO: 51779 - DNA, 25 bp, Probe Sequence
actcctaataggtcaagagagagag

SEQ ID NO: 51780 - DNA, 25 bp, Probe Sequence
gactcctaataggtcaagagagaga

SEQ ID NO: 51781 - DNA, 25 bp, Probe Sequence
agactcctaataggtcaagagagag

SEQ ID NO: 51782 - DNA, 25 bp, Probe Sequence
atgacttgtctgcctcacatattct

SEQ ID NO: 51783 - DNA, 25 bp, Probe Sequence
aagactcctaataggtcaagagaga

SEQ ID NO: 51784 - DNA, 25 bp, Probe Sequence
gaagactcctaataggtcaagagag

SEQ ID NO: 51785 - DNA, 25 bp, Probe Sequence
ttgtctgcctcacatattctaaggt

SEQ ID NO: 51786 - DNA, 25 bp, Probe Sequence
cgaagactcctaataggtcaagaga

SEQ ID NO: 51787 - DNA, 25 bp, Probe Sequence
aaacagtggatataagtgatttggc

SEQ ID NO: 51788 - DNA, 25 bp, Probe Sequence
agcctgaataaatggaatgacttgt

SEQ ID NO: 51789 - DNA, 25 bp, Probe Sequence
tgaataaatggaatgacttgtctgc

SEQ ID NO: 51790 - DNA, 25 bp, Probe Sequence
taatgaagaaacaccatcccaagat

SEQ ID NO: 51791 - DNA, 25 bp, Probe Sequence
cagcctgaataaatggaatgacttg

SEQ ID NO: 51792 - DNA, 25 bp, Probe Sequence
gaataaatggaatgacttgtctgcc

SEQ ID NO: 51793 - DNA, 25 bp, Probe Sequence
cctcaagttatctcctctgttaaga

SEQ ID NO: 51794 - DNA, 25 bp, Probe Sequence
ctcaagttatctcctctgttaagac

SEQ ID NO: 51795 - DNA, 25 bp, Probe Sequence
tcaagttatctcctctgttaagaca

SEQ ID NO: 51796 - DNA, 25 bp, Probe Sequence
caagttatctcctctgttaagacaa

SEQ ID NO: 51797 - DNA, 25 bp, Probe Sequence
ccctcaagttatctcctctgttaag

SEQ ID NO: 51798 - DNA, 25 bp, Probe Sequence
tccctcaagttatctcctctgttaa

SEQ ID NO: 51799 - DNA, 25 bp, Probe Sequence
gtccctcaagttatctcctctgtta

SEQ ID NO: 51800 - DNA, 25 bp, Probe Sequence
tgtccctcaagttatctcctctgtt

SEQ ID NO: 51801 - DNA, 25 bp, Probe Sequence
tagtgacagatccagagacacacaa

SEQ ID NO: 51802 - DNA, 25 bp, Probe Sequence
tctagtgacagatccagagacacac

SEQ ID NO: 51803 - DNA, 25 bp, Probe Sequence
tgacagatccagagacacacaagag

SEQ ID NO: 51804 - DNA, 25 bp, Probe Sequence
ctagtgacagatccagagacacaca

SEQ ID NO: 51805 - DNA, 25 bp, Probe Sequence
ctgtccctcaagttatctcctctgt

SEQ ID NO: 51806 - DNA, 25 bp, Probe Sequence
aagttatctcctctgttaagacaaa

SEQ ID NO: 51807 - DNA, 25 bp, Probe Sequence
gtgacagatccagagacacacaaga

SEQ ID NO: 51808 - DNA, 25 bp, Probe Sequence
agtgacagatccagagacacacaag

SEQ ID NO: 51809 - DNA, 25 bp, Probe Sequence
gaatcattgcaggtgagtccatcag

SEQ ID NO: 51810 - DNA, 25 bp, Probe Sequence
ctctagtgacagatccagagacaca

SEQ ID NO: 51811 - DNA, 25 bp, Probe Sequence
atcattgcaggtgagtccatcagaa

SEQ ID NO: 51812 - DNA, 25 bp, Probe Sequence
aatcattgcaggtgagtccatcaga

SEQ ID NO: 51813 - DNA, 25 bp, Probe Sequence
gacagatccagagacacacaagagc

SEQ ID NO: 51814 - DNA, 25 bp, Probe Sequence
cctctagtgacagatccagagacac

SEQ ID NO: 51815 - DNA, 25 bp, Probe Sequence
cagatccagagacacacaagagcac

SEQ ID NO: 51816 - DNA, 25 bp, Probe Sequence
agttatctcctctgttaagacaaaa

SEQ ID NO: 51817 - DNA, 25 bp, Probe Sequence
tagcaaggataacaaggtaacacaa

SEQ ID NO: 51818 - DNA, 25 bp, Probe Sequence
ttagcaaggataacaaggtaacaca

SEQ ID NO: 51819 - DNA, 25 bp, Probe Sequence
attagcaaggataacaaggtaacac

SEQ ID NO: 51820 - DNA, 25 bp, Probe Sequence
ggataacaaggtaacacaaggctta

SEQ ID NO: 51821 - DNA, 25 bp, Probe Sequence
agcaaggataacaaggtaacacaag

SEQ ID NO: 51822 - DNA, 25 bp, Probe Sequence
aacacaaggcttacttatattcacc

SEQ ID NO: 51823 - DNA, 25 bp, Probe Sequence
aattagcaaggataacaaggtaaca

SEQ ID NO: 51824 - DNA, 25 bp, Probe Sequence
caaggataacaaggtaacacaaggc

SEQ ID NO: 51825 - DNA, 25 bp, Probe Sequence
gcaaggataacaaggtaacacaagg

SEQ ID NO: 51826 - DNA, 25 bp, Probe Sequence
aaggataacaaggtaacacaaggct

SEQ ID NO: 51827 - DNA, 25 bp, Probe Sequence
aggataacaaggtaacacaaggctt

SEQ ID NO: 51828 - DNA, 25 bp, Probe Sequence
acaaggtaacacaaggcttacttat

SEQ ID NO: 51829 - DNA, 25 bp, Probe Sequence
ataacaaggtaacacaaggcttact

SEQ ID NO: 51830 - DNA, 25 bp, Probe Sequence
gataacaaggtaacacaaggcttac

SEQ ID NO: 51831 - DNA, 25 bp, Probe Sequence
aacaaggtaacacaaggcttactta

SEQ ID NO: 51832 - DNA, 25 bp, Probe Sequence
taacaaggtaacacaaggcttactt

SEQ ID NO: 51833 - DNA, 25 bp, Probe Sequence
ttgtatctccgttgattccaagaat

SEQ ID NO: 51834 - DNA, 25 bp, Probe Sequence
tagcattctttcttgtatctccgtt

SEQ ID NO: 51835 - DNA, 25 bp, Probe Sequence
ttagcattctttcttgtatctccgt

SEQ ID NO: 51836 - DNA, 25 bp, Probe Sequence
aggcttacttatattcacccaacaa

SEQ ID NO: 51837 - DNA, 25 bp, Probe Sequence
ttggaggacattagcattctttctt

SEQ ID NO: 51838 - DNA, 25 bp, Probe Sequence
tttggaggacattagcattctttct

SEQ ID NO: 51839 - DNA, 25 bp, Probe Sequence
caaggtaacacaaggcttacttata

SEQ ID NO: 51840 - DNA, 25 bp, Probe Sequence
tctttcttgtatctccgttgattcc

SEQ ID NO: 51841 - DNA, 25 bp, Probe Sequence
catctctcctattgtgctctatctc

SEQ ID NO: 51842 - DNA, 25 bp, Probe Sequence
atctctcctattgtgctctatctcc

SEQ ID NO: 51843 - DNA, 25 bp, Probe Sequence
ctctcctattgtgctctatctcctg

SEQ ID NO: 51844 - DNA, 25 bp, Probe Sequence
tctctcctattgtgctctatctcct

SEQ ID NO: 51845 - DNA, 25 bp, Probe Sequence
aagttcctcagcatctctcctattg

SEQ ID NO: 51846 - DNA, 25 bp, Probe Sequence
caagttcctcagcatctctcctatt

SEQ ID NO: 51847 - DNA, 25 bp, Probe Sequence
tctcctattgtgctctatctcctgg

SEQ ID NO: 51848 - DNA, 25 bp, Probe Sequence
cttctataccaagtatgatgctgcg

SEQ ID NO: 51849 - DNA, 25 bp, Probe Sequence
tacatcatcttggtaggattgctgc

SEQ ID NO: 51850 - DNA, 25 bp, Probe Sequence
gttcctcagcatctctcctattgtg

SEQ ID NO: 51851 - DNA, 25 bp, Probe Sequence
agttcctcagcatctctcctattgt

SEQ ID NO: 51852 - DNA, 25 bp, Probe Sequence
gcttctataccaagtatgatgctgc

SEQ ID NO: 51853 - DNA, 25 bp, Probe Sequence
ctacatcatcttggtaggattgctg

SEQ ID NO: 51854 - DNA, 25 bp, Probe Sequence
ccagcttctataccaagtatgatgc

SEQ ID NO: 51855 - DNA, 25 bp, Probe Sequence
gccagcttctataccaagtatgatg

SEQ ID NO: 51856 - DNA, 25 bp, Probe Sequence
tcatcttggtaggattgctgcatat

SEQ ID NO: 51857 - DNA, 25 bp, Probe Sequence
atcatcttggtaggattgctgcata

SEQ ID NO: 51858 - DNA, 25 bp, Probe Sequence
taggattgctgcatatggttctact

SEQ ID NO: 51859 - DNA, 25 bp, Probe Sequence
atcaacaaatactgagggatgggtt

SEQ ID NO: 51860 - DNA, 25 bp, Probe Sequence
aggcactgaaacagaggactataaa

SEQ ID NO: 51861 - DNA, 25 bp, Probe Sequence
aaggcactgaaacagaggactataa

SEQ ID NO: 51862 - DNA, 25 bp, Probe Sequence
agcttctataccaagtatgatgctg

SEQ ID NO: 51863 - DNA, 25 bp, Probe Sequence
cagcttctataccaagtatgatgct

SEQ ID NO: 51864 - DNA, 25 bp, Probe Sequence
catcttggtaggattgctgcatatg

SEQ ID NO: 51865 - DNA, 25 bp, Probe Sequence
cttctctctctatgtctggtccttc

SEQ ID NO: 51866 - DNA, 25 bp, Probe Sequence
ttctctctctatgtctggtccttct

SEQ ID NO: 51867 - DNA, 25 bp, Probe Sequence
tctctctctatgtctggtccttctg

SEQ ID NO: 51868 - DNA, 25 bp, Probe Sequence
gaagcggttatagccattgacattg

SEQ ID NO: 51869 - DNA, 25 bp, Probe Sequence
atgaagcggttatagccattgacat

SEQ ID NO: 51870 - DNA, 25 bp, Probe Sequence
atagggtcgttgaataaatggctta

SEQ ID NO: 51871 - DNA, 25 bp, Probe Sequence
tatagggtcgttgaataaatggctt

SEQ ID NO: 51872 - DNA, 25 bp, Probe Sequence
tgaagcggttatagccattgacatt

SEQ ID NO: 51873 - DNA, 25 bp, Probe Sequence
ggtcgttgaataaatggcttagaat

SEQ ID NO: 51874 - DNA, 25 bp, Probe Sequence
gggaagaagcagatatttgaagaga

SEQ ID NO: 51875 - DNA, 25 bp, Probe Sequence
agggaagaagcagatatttgaagag

SEQ ID NO: 51876 - DNA, 25 bp, Probe Sequence
gagggaagaagcagatatttgaaga

SEQ ID NO: 51877 - DNA, 25 bp, Probe Sequence
agagggaagaagcagatatttgaag

SEQ ID NO: 51878 - DNA, 25 bp, Probe Sequence
gagagggaagaagcagatatttgaa

SEQ ID NO: 51879 - DNA, 25 bp, Probe Sequence
tagggtcgttgaataaatggcttag

SEQ ID NO: 51880 - DNA, 25 bp, Probe Sequence
agcagatatttgaagagaacagaga

SEQ ID NO: 51881 - DNA, 25 bp, Probe Sequence
gcagatatttgaagagaacagagag

SEQ ID NO: 51882 - DNA, 25 bp, Probe Sequence
cgttgaataaatggcttagaatgtg

SEQ ID NO: 51883 - DNA, 25 bp, Probe Sequence
tcgttgaataaatggcttagaatgt

SEQ ID NO: 51884 - DNA, 25 bp, Probe Sequence
gtcgttgaataaatggcttagaatg

SEQ ID NO: 51885 - DNA, 25 bp, Probe Sequence
gcttctctctctatgtctggtcctt

SEQ ID NO: 51886 - DNA, 25 bp, Probe Sequence
aagcagatatttgaagagaacagag

SEQ ID NO: 51887 - DNA, 25 bp, Probe Sequence
gaagcagatatttgaagagaacaga

SEQ ID NO: 51888 - DNA, 25 bp, Probe Sequence
agaagcagatatttgaagagaacag

SEQ ID NO: 51889 - DNA, 25 bp, Probe Sequence
gtgttaggaatgacctggaattgtc

SEQ ID NO: 51890 - DNA, 25 bp, Probe Sequence
acttatgagcgggatattgattaca

SEQ ID NO: 51891 - DNA, 25 bp, Probe Sequence
gagcgggatattgattacaaagttt

SEQ ID NO: 51892 - DNA, 25 bp, Probe Sequence
atgagcgggatattgattacaaagt

SEQ ID NO: 51893 - DNA, 25 bp, Probe Sequence
tgagcgggatattgattacaaagtt

SEQ ID NO: 51894 - DNA, 25 bp, Probe Sequence
tatgagcgggatattgattacaaag

SEQ ID NO: 51895 - DNA, 25 bp, Probe Sequence
cttatgagcgggatattgattacaa

SEQ ID NO: 51896 - DNA, 25 bp, Probe Sequence
tacttatgagcgggatattgattac

SEQ ID NO: 51897 - DNA, 25 bp, Probe Sequence
tttacttatgagcgggatattgatt

SEQ ID NO: 51898 - DNA, 25 bp, Probe Sequence
ttatgagcgggatattgattacaaa

SEQ ID NO: 51899 - DNA, 25 bp, Probe Sequence
tggaattgtcaataaacagatgctg

SEQ ID NO: 51900 - DNA, 25 bp, Probe Sequence
ctggaattgtcaataaacagatgct

SEQ ID NO: 51901 - DNA, 25 bp, Probe Sequence
gaattgtcaataaacagatgctgct

SEQ ID NO: 51902 - DNA, 25 bp, Probe Sequence
acctggaattgtcaataaacagatg

SEQ ID NO: 51903 - DNA, 25 bp, Probe Sequence
aattgtcaataaacagatgctgctg

SEQ ID NO: 51904 - DNA, 25 bp, Probe Sequence
cctggaattgtcaataaacagatgc

SEQ ID NO: 51905 - DNA, 25 bp, Probe Sequence
gacctggaattgtcaataaacagat

SEQ ID NO: 51906 - DNA, 25 bp, Probe Sequence
cgtgttaggaatgacctggaattgt

SEQ ID NO: 51907 - DNA, 25 bp, Probe Sequence
ggaattgtcaataaacagatgctgc

SEQ ID NO: 51908 - DNA, 25 bp, Probe Sequence
ttacttatgagcgggatattgatta

SEQ ID NO: 51909 - DNA, 25 bp, Probe Sequence
ttacttacaggtgttctgctggtga

SEQ ID NO: 51910 - DNA, 25 bp, Probe Sequence
ccagatgaaagcaatcaagtttctt

SEQ ID NO: 51911 - DNA, 25 bp, Probe Sequence
agatgaaagcaatcaagtttcttct

SEQ ID NO: 51912 - DNA, 25 bp, Probe Sequence
cagatgaaagcaatcaagtttcttc

SEQ ID NO: 51913 - DNA, 25 bp, Probe Sequence
cctctaccaagtacactcgtgatat

SEQ ID NO: 51914 - DNA, 25 bp, Probe Sequence
acctctaccaagtacactcgtgata

SEQ ID NO: 51915 - DNA, 25 bp, Probe Sequence
ctctaccaagtacactcgtgatatc

SEQ ID NO: 51916 - DNA, 25 bp, Probe Sequence
tctaccaagtacactcgtgatatct

SEQ ID NO: 51917 - DNA, 25 bp, Probe Sequence
ctaccaagtacactcgtgatatcta

SEQ ID NO: 51918 - DNA, 25 bp, Probe Sequence
accaagtacactcgtgatatctata

SEQ ID NO: 51919 - DNA, 25 bp, Probe Sequence
taccaagtacactcgtgatatctat

SEQ ID NO: 51920 - DNA, 25 bp, Probe Sequence
ccaagtacactcgtgatatctataa

SEQ ID NO: 51921 - DNA, 25 bp, Probe Sequence
gtaacaaccagatggcttcactgaa

SEQ ID NO: 51922 - DNA, 25 bp, Probe Sequence
gtcccacctgctgctcataataaat

SEQ ID NO: 51923 - DNA, 25 bp, Probe Sequence
tcccacctgctgctcataataaatg

SEQ ID NO: 51924 - DNA, 25 bp, Probe Sequence
cacctctaccaagtacactcgtgat

SEQ ID NO: 51925 - DNA, 25 bp, Probe Sequence
tcactgaaacctgcttttgtaaatt

SEQ ID NO: 51926 - DNA, 25 bp, Probe Sequence
acactcgtgatatctataaagagct

SEQ ID NO: 51927 - DNA, 25 bp, Probe Sequence
taacaaccagatggcttcactgaaa

SEQ ID NO: 51928 - DNA, 25 bp, Probe Sequence
cactgaaacctgcttttgtaaatta

SEQ ID NO: 51929 - DNA, 25 bp, Probe Sequence
ttcactgaaacctgcttttgtaaat

SEQ ID NO: 51930 - DNA, 25 bp, Probe Sequence
cttcactgaaacctgcttttgtaaa

SEQ ID NO: 51931 - DNA, 25 bp, Probe Sequence
actgaaacctgcttttgtaaattac

SEQ ID NO: 51932 - DNA, 25 bp, Probe Sequence
tgtcccacctgctgctcataataaa

SEQ ID NO: 51933 - DNA, 25 bp, Probe Sequence
ctgaaacctgcttttgtaaattact

SEQ ID NO: 51934 - DNA, 25 bp, Probe Sequence
tacactcgtgatatctataaagagc

SEQ ID NO: 51935 - DNA, 25 bp, Probe Sequence
tgaaacctgcttttgtaaattactt

SEQ ID NO: 51936 - DNA, 25 bp, Probe Sequence
gtcacctctaccaagtacactcgtg

SEQ ID NO: 51937 - DNA, 25 bp, Probe Sequence
atttgttgttgttgctgtttccttt

SEQ ID NO: 51938 - DNA, 25 bp, Probe Sequence
gatttgttgttgttgctgtttcctt

SEQ ID NO: 51939 - DNA, 25 bp, Probe Sequence
tttgttgttgttgctgtttcctttg

SEQ ID NO: 51940 - DNA, 25 bp, Probe Sequence
ttgttgttgttgctgtttcctttgt

SEQ ID NO: 51941 - DNA, 25 bp, Probe Sequence
gattctcaacctaacagagagacag

SEQ ID NO: 51942 - DNA, 25 bp, Probe Sequence
aattcctcttcaacatgtacctcac

SEQ ID NO: 51943 - DNA, 25 bp, Probe Sequence
tgttgttgttgctgtttcctttgtg

SEQ ID NO: 51944 - DNA, 25 bp, Probe Sequence
acttccttatcctcctcctccaaac

SEQ ID NO: 51945 - DNA, 25 bp, Probe Sequence
cacttccttatcctcctcctccaaa

SEQ ID NO: 51946 - DNA, 25 bp, Probe Sequence
aggattctcaacctaacagagagac

SEQ ID NO: 51947 - DNA, 25 bp, Probe Sequence
caggattctcaacctaacagagaga

SEQ ID NO: 51948 - DNA, 25 bp, Probe Sequence
gaattcctcttcaacatgtacctca

SEQ ID NO: 51949 - DNA, 25 bp, Probe Sequence
agaattcctcttcaacatgtacctc

SEQ ID NO: 51950 - DNA, 25 bp, Probe Sequence
cagaaccgtaggatgaaaatgaaaa

SEQ ID NO: 51951 - DNA, 25 bp, Probe Sequence
attctcaacctaacagagagacagg

SEQ ID NO: 51952 - DNA, 25 bp, Probe Sequence
ggattctcaacctaacagagagaca

SEQ ID NO: 51953 - DNA, 25 bp, Probe Sequence
ctaacagagagacaggtcaaaatct

SEQ ID NO: 51954 - DNA, 25 bp, Probe Sequence
ctacaccaaataccagacgcttgag

SEQ ID NO: 51955 - DNA, 25 bp, Probe Sequence
tcagaaccgtaggatgaaaatgaaa

SEQ ID NO: 51956 - DNA, 25 bp, Probe Sequence
ccaggattctcaacctaacagagag

SEQ ID NO: 51957 - DNA, 25 bp, Probe Sequence
ggatttgttgttgttgctgtttcct

SEQ ID NO: 51958 - DNA, 25 bp, Probe Sequence
ccacttccttatcctcctcctccaa

SEQ ID NO: 51959 - DNA, 25 bp, Probe Sequence
gttgttgttgctgtttcctttgtgg

SEQ ID NO: 51960 - DNA, 25 bp, Probe Sequence
attcctcttcaacatgtacctcacc

SEQ ID NO: 51961 - DNA, 25 bp, Probe Sequence
attggacttgcattgattatactgg

SEQ ID NO: 51962 - DNA, 25 bp, Probe Sequence
acagaatattggacttgcattgatt

SEQ ID NO: 51963 - DNA, 25 bp, Probe Sequence
ttacagaatattggacttgcattga

SEQ ID NO: 51964 - DNA, 25 bp, Probe Sequence
tgataagcccaacaaggaatttatg

SEQ ID NO: 51965 - DNA, 25 bp, Probe Sequence
gtgataagcccaacaaggaatttat

SEQ ID NO: 51966 - DNA, 25 bp, Probe Sequence
tacagaatattggacttgcattgat

SEQ ID NO: 51967 - DNA, 25 bp, Probe Sequence
gaatccctatcactcaagaccaaga

SEQ ID NO: 51968 - DNA, 25 bp, Probe Sequence
agaatccctatcactcaagaccaag

SEQ ID NO: 51969 - DNA, 25 bp, Probe Sequence
gctttggacttctttaggcagataa

SEQ ID NO: 51970 - DNA, 25 bp, Probe Sequence
gataagcccaacaaggaatttatgc

SEQ ID NO: 51971 - DNA, 25 bp, Probe Sequence
ttggacttgcattgattatactggc

SEQ ID NO: 51972 - DNA, 25 bp, Probe Sequence
ctttggacttctttaggcagataaa

SEQ ID NO: 51973 - DNA, 25 bp, Probe Sequence
aatccctatcactcaagaccaagac

SEQ ID NO: 51974 - DNA, 25 bp, Probe Sequence
tgtgataagcccaacaaggaattta

SEQ ID NO: 51975 - DNA, 25 bp, Probe Sequence
atgtgataagcccaacaaggaattt

SEQ ID NO: 51976 - DNA, 25 bp, Probe Sequence
aatgtgataagcccaacaaggaatt

SEQ ID NO: 51977 - DNA, 25 bp, Probe Sequence
gagaatccctatcactcaagaccaa

SEQ ID NO: 51978 - DNA, 25 bp, Probe Sequence
cagaatattggacttgcattgatta

SEQ ID NO: 51979 - DNA, 25 bp, Probe Sequence
caatgtgataagcccaacaaggaat

SEQ ID NO: 51980 - DNA, 25 bp, Probe Sequence
tatttctggaccaagtaaagatggg

SEQ ID NO: 51981 - DNA, 25 bp, Probe Sequence
tattggacttgcattgattatactg

SEQ ID NO: 51982 - DNA, 25 bp, Probe Sequence
ttgcatcgactgatagtgtgttctt

SEQ ID NO: 51983 - DNA, 25 bp, Probe Sequence
ttatttctggaccaagtaaagatgg

SEQ ID NO: 51984 - DNA, 25 bp, Probe Sequence
tttagaggaaggcaaactggtcaac

SEQ ID NO: 51985 - DNA, 25 bp, Probe Sequence
atcgtaattcatccgttgtatcaga

SEQ ID NO: 51986 - DNA, 25 bp, Probe Sequence
gcagagtataatcgtaattcatccg

SEQ ID NO: 51987 - DNA, 25 bp, Probe Sequence
aatcgtaattcatccgttgtatcag

SEQ ID NO: 51988 - DNA, 25 bp, Probe Sequence
tcgtaattcatccgttgtatcagaa

SEQ ID NO: 51989 - DNA, 25 bp, Probe Sequence
ctacaatacacactggaacaactgg

SEQ ID NO: 51990 - DNA, 25 bp, Probe Sequence
atgagatcagatggaacagacaatg

SEQ ID NO: 51991 - DNA, 25 bp, Probe Sequence
cagagtataatcgtaattcatccgt

SEQ ID NO: 51992 - DNA, 25 bp, Probe Sequence
atcagatggaacagacaatgcctat

SEQ ID NO: 51993 - DNA, 25 bp, Probe Sequence
taatcgtaattcatccgttgtatca

SEQ ID NO: 51994 - DNA, 25 bp, Probe Sequence
agtataatcgtaattcatccgttgt

SEQ ID NO: 51995 - DNA, 25 bp, Probe Sequence
tacaatacacactggaacaactggt

SEQ ID NO: 51996 - DNA, 25 bp, Probe Sequence
ggatataactgtaatgccaccacaa

SEQ ID NO: 51997 - DNA, 25 bp, Probe Sequence
gctacaatacacactggaacaactg

SEQ ID NO: 51998 - DNA, 25 bp, Probe Sequence
catgagatcagatggaacagacaat

SEQ ID NO: 51999 - DNA, 25 bp, Probe Sequence
aaggctacaatacacactggaacaa

SEQ ID NO: 52000 - DNA, 25 bp, Probe Sequence
gagtataatcgtaattcatccgttg

SEQ ID NO: 52001 - DNA, 25 bp, Probe Sequence
agagtataatcgtaattcatccgtt

SEQ ID NO: 52002 - DNA, 25 bp, Probe Sequence
tcagatggaacagacaatgcctatg

SEQ ID NO: 52003 - DNA, 25 bp, Probe Sequence
gaccatgtatgtgtatctatagcca

SEQ ID NO: 52004 - DNA, 25 bp, Probe Sequence
cagagagaatgcagagtataatcgt

SEQ ID NO: 52005 - DNA, 25 bp, Probe Sequence
acagagagaatgcagagtataatcg

SEQ ID NO: 52006 - DNA, 25 bp, Probe Sequence
gatcagatggaacagacaatgccta

SEQ ID NO: 52007 - DNA, 25 bp, Probe Sequence
atgtaacagagagaatgcagagtat

SEQ ID NO: 52008 - DNA, 25 bp, Probe Sequence
taatattgcacagaacttccatagc

SEQ ID NO: 52009 - DNA, 25 bp, Probe Sequence
tattctgtaggatggaagtcttgtc

SEQ ID NO: 52010 - DNA, 25 bp, Probe Sequence
atattctgtaggatggaagtcttgt

SEQ ID NO: 52011 - DNA, 25 bp, Probe Sequence
agtcaatattctgtaggatggaagt

SEQ ID NO: 52012 - DNA, 25 bp, Probe Sequence
gtcaatattctgtaggatggaagtc

SEQ ID NO: 52013 - DNA, 25 bp, Probe Sequence
tcaatattctgtaggatggaagtct

SEQ ID NO: 52014 - DNA, 25 bp, Probe Sequence
cgacaagtcaatattctgtaggatg

SEQ ID NO: 52015 - DNA, 25 bp, Probe Sequence
gcgacaagtcaatattctgtaggat

SEQ ID NO: 52016 - DNA, 25 bp, Probe Sequence
acaagtcaatattctgtaggatgga

SEQ ID NO: 52017 - DNA, 25 bp, Probe Sequence
caagtcaatattctgtaggatggaa

SEQ ID NO: 52018 - DNA, 25 bp, Probe Sequence
aaggcgacaagtcaatattctgtag

SEQ ID NO: 52019 - DNA, 25 bp, Probe Sequence
gacaagtcaatattctgtaggatgg

SEQ ID NO: 52020 - DNA, 25 bp, Probe Sequence
caaggcgacaagtcaatattctgta

SEQ ID NO: 52021 - DNA, 25 bp, Probe Sequence
attctgtaggatggaagtcttgtcc

SEQ ID NO: 52022 - DNA, 25 bp, Probe Sequence
aaagaccagaaaccaaagaatccaa

SEQ ID NO: 52023 - DNA, 25 bp, Probe Sequence
aatattctgtaggatggaagtcttg

SEQ ID NO: 52024 - DNA, 25 bp, Probe Sequence
caatattctgtaggatggaagtctt

SEQ ID NO: 52025 - DNA, 25 bp, Probe Sequence
aagtcaatattctgtaggatggaag

SEQ ID NO: 52026 - DNA, 25 bp, Probe Sequence
aagaccagaaaccaaagaatccaag

SEQ ID NO: 52027 - DNA, 25 bp, Probe Sequence
gaccagaaaccaaagaatccaagag

SEQ ID NO: 52028 - DNA, 25 bp, Probe Sequence
gaaagagatgctcggaaagttctaa

SEQ ID NO: 52029 - DNA, 25 bp, Probe Sequence
agaccagaaaccaaagaatccaaga

SEQ ID NO: 52030 - DNA, 25 bp, Probe Sequence
ttgatgagatgcggaagaaagagat

SEQ ID NO: 52031 - DNA, 25 bp, Probe Sequence
attgatgagatgcggaagaaagaga

SEQ ID NO: 52032 - DNA, 25 bp, Probe Sequence
cattgatgagatgcggaagaaagag

SEQ ID NO: 52033 - DNA, 25 bp, Probe Sequence
gtagaacataggactgctaatctca

SEQ ID NO: 52034 - DNA, 25 bp, Probe Sequence
ttaataccaagacacctcatctgct

SEQ ID NO: 52035 - DNA, 25 bp, Probe Sequence
tgtagaacataggactgctaatctc

SEQ ID NO: 52036 - DNA, 25 bp, Probe Sequence
agtaattgtagaacataggactgct

SEQ ID NO: 52037 - DNA, 25 bp, Probe Sequence
ttgtagaacataggactgctaatct

SEQ ID NO: 52038 - DNA, 25 bp, Probe Sequence
taataccaagacacctcatctgctc

SEQ ID NO: 52039 - DNA, 25 bp, Probe Sequence
ttagccaattaataccaagacacct

SEQ ID NO: 52040 - DNA, 25 bp, Probe Sequence
gttagccaattaataccaagacacc

SEQ ID NO: 52041 - DNA, 25 bp, Probe Sequence
tagccaattaataccaagacacctc

SEQ ID NO: 52042 - DNA, 25 bp, Probe Sequence
tagaacataggactgctaatctcag

SEQ ID NO: 52043 - DNA, 25 bp, Probe Sequence
ccaattaataccaagacacctcatc

SEQ ID NO: 52044 - DNA, 25 bp, Probe Sequence
aagtaattgtagaacataggactgc

SEQ ID NO: 52045 - DNA, 25 bp, Probe Sequence
gccaattaataccaagacacctcat

SEQ ID NO: 52046 - DNA, 25 bp, Probe Sequence
attaataccaagacacctcatctgc

SEQ ID NO: 52047 - DNA, 25 bp, Probe Sequence
attgtagaacataggactgctaatc

SEQ ID NO: 52048 - DNA, 25 bp, Probe Sequence
tgtctacttgcttattacattgtca

SEQ ID NO: 52049 - DNA, 25 bp, Probe Sequence
taattctcttctgtatcatggcatt

SEQ ID NO: 52050 - DNA, 25 bp, Probe Sequence
aataattctcttctgtatcatggca

SEQ ID NO: 52051 - DNA, 25 bp, Probe Sequence
aattaataccaagacacctcatctg

SEQ ID NO: 52052 - DNA, 25 bp, Probe Sequence
caattaataccaagacacctcatct

SEQ ID NO: 52053 - DNA, 25 bp, Probe Sequence
ataattctcttctgtatcatggcat

SEQ ID NO: 52054 - DNA, 25 bp, Probe Sequence
gtaattgtagaacataggactgcta

SEQ ID NO: 52055 - DNA, 25 bp, Probe Sequence
aaccctataatgactgaaatgaccc

SEQ ID NO: 52056 - DNA, 25 bp, Probe Sequence
ttatataggctatggacctcatgtg

SEQ ID NO: 52057 - DNA, 25 bp, Probe Sequence
ctctcttcaagccatcagtatctac

SEQ ID NO: 52058 - DNA, 25 bp, Probe Sequence
gttatcaagacgagattacaggtgg

SEQ ID NO: 52059 - DNA, 25 bp, Probe Sequence
cctctcttcaagccatcagtatcta

SEQ ID NO: 52060 - DNA, 25 bp, Probe Sequence
ttcaagccatcagtatctacctcaa

SEQ ID NO: 52061 - DNA, 25 bp, Probe Sequence
ctcttcaagccatcagtatctacct

SEQ ID NO: 52062 - DNA, 25 bp, Probe Sequence
ctacagcgatggttctacattgatt

SEQ ID NO: 52063 - DNA, 25 bp, Probe Sequence
ctacctctcttcaagccatcagtat

SEQ ID NO: 52064 - DNA, 25 bp, Probe Sequence
tcttcaagccatcagtatctacctc

SEQ ID NO: 52065 - DNA, 25 bp, Probe Sequence
tctcttcaagccatcagtatctacc

SEQ ID NO: 52066 - DNA, 25 bp, Probe Sequence
tacctctcttcaagccatcagtatc

SEQ ID NO: 52067 - DNA, 25 bp, Probe Sequence
cttcaagccatcagtatctacctca

SEQ ID NO: 52068 - DNA, 25 bp, Probe Sequence
tgttatcaagacgagattacaggtg

SEQ ID NO: 52069 - DNA, 25 bp, Probe Sequence
atgttatcaagacgagattacaggt

SEQ ID NO: 52070 - DNA, 25 bp, Probe Sequence
gatgttatcaagacgagattacagg

SEQ ID NO: 52071 - DNA, 25 bp, Probe Sequence
ttatcaagacgagattacaggtggc

SEQ ID NO: 52072 - DNA, 25 bp, Probe Sequence
acctctcttcaagccatcagtatct

SEQ ID NO: 52073 - DNA, 25 bp, Probe Sequence
ttacctacctctcttcaagccatca

SEQ ID NO: 52074 - DNA, 25 bp, Probe Sequence
atttggactttacctacctctcttc

SEQ ID NO: 52075 - DNA, 25 bp, Probe Sequence
ttagaaagatactgcgtgaagaagg

SEQ ID NO: 52076 - DNA, 25 bp, Probe Sequence
ggaaaggagcaagtcagaatagaaa

SEQ ID NO: 52077 - DNA, 25 bp, Probe Sequence
tttggactttacctacctctcttca

SEQ ID NO: 52078 - DNA, 25 bp, Probe Sequence
tttagaaagatactgcgtgaagaag

SEQ ID NO: 52079 - DNA, 25 bp, Probe Sequence
gaaaggagcaagtcagaatagaaat

SEQ ID NO: 52080 - DNA, 25 bp, Probe Sequence
caagccatcagtatctacctcaaag

SEQ ID NO: 52081 - DNA, 25 bp, Probe Sequence
ctccgttgatgtgaataatgtggta

SEQ ID NO: 52082 - DNA, 25 bp, Probe Sequence
cttctccgttgatgtgaataatgtg

SEQ ID NO: 52083 - DNA, 25 bp, Probe Sequence
acttctccgttgatgtgaataatgt

SEQ ID NO: 52084 - DNA, 25 bp, Probe Sequence
ttaggagtagcaacatacaggaatt

SEQ ID NO: 52085 - DNA, 25 bp, Probe Sequence
agtcaatcgtaggaagaacacagta

SEQ ID NO: 52086 - DNA, 25 bp, Probe Sequence
tacttctccgttgatgtgaataatg

SEQ ID NO: 52087 - DNA, 25 bp, Probe Sequence
cgttgatgtgaataatgtggtactc

SEQ ID NO: 52088 - DNA, 25 bp, Probe Sequence
ttctccgttgatgtgaataatgtgg

SEQ ID NO: 52089 - DNA, 25 bp, Probe Sequence
ggtacttctccgttgatgtgaataa

SEQ ID NO: 52090 - DNA, 25 bp, Probe Sequence
aagtcaatcgtaggaagaacacagt

SEQ ID NO: 52091 - DNA, 25 bp, Probe Sequence
ccgttgatgtgaataatgtggtact

SEQ ID NO: 52092 - DNA, 25 bp, Probe Sequence
tccgttgatgtgaataatgtggtac

SEQ ID NO: 52093 - DNA, 25 bp, Probe Sequence
caatcgtaggaagaacacagtacag

SEQ ID NO: 52094 - DNA, 25 bp, Probe Sequence
gtcaatcgtaggaagaacacagtac

SEQ ID NO: 52095 - DNA, 25 bp, Probe Sequence
gtacttctccgttgatgtgaataat

SEQ ID NO: 52096 - DNA, 25 bp, Probe Sequence
tcaatcgtaggaagaacacagtaca

SEQ ID NO: 52097 - DNA, 25 bp, Probe Sequence
tctccgttgatgtgaataatgtggt

SEQ ID NO: 52098 - DNA, 25 bp, Probe Sequence
gttgatgtgaataatgtggtactca

SEQ ID NO: 52099 - DNA, 25 bp, Probe Sequence
aatgttacttcagtggtatcagcac

SEQ ID NO: 52100 - DNA, 25 bp, Probe Sequence
gaatgctatcgaatctatgaggctt

SEQ ID NO: 52101 - DNA, 25 bp, Probe Sequence
atccagacaggcactaatgaacatt

SEQ ID NO: 52102 - DNA, 25 bp, Probe Sequence
aatgctatcgaatctatgaggcttg

SEQ ID NO: 52103 - DNA, 25 bp, Probe Sequence
ttgatgtgaataatgtggtactcat

SEQ ID NO: 52104 - DNA, 25 bp, Probe Sequence
acagaatgctatcgaatctatgagg

SEQ ID NO: 52105 - DNA, 25 bp, Probe Sequence
ggaggaagaggaagaggaagaaatg

SEQ ID NO: 52106 - DNA, 25 bp, Probe Sequence
aggaggaagaggaagaggaagaaat

SEQ ID NO: 52107 - DNA, 25 bp, Probe Sequence
actcctctacctcaacgatgacttc

SEQ ID NO: 52108 - DNA, 25 bp, Probe Sequence
gactcctctacctcaacgatgactt

SEQ ID NO: 52109 - DNA, 25 bp, Probe Sequence
aagctcagagaggatcaagagaaga

SEQ ID NO: 52110 - DNA, 25 bp, Probe Sequence
ctgatgctttaaatgaagaggatgg

SEQ ID NO: 52111 - DNA, 25 bp, Probe Sequence
gatgctttaaatgaagaggatggtg

SEQ ID NO: 52112 - DNA, 25 bp, Probe Sequence
tgatgctttaaatgaagaggatggt

SEQ ID NO: 52113 - DNA, 25 bp, Probe Sequence
gctgatgctttaaatgaagaggatg

SEQ ID NO: 52114 - DNA, 25 bp, Probe Sequence
gaggaagaggaagaggaagaaatgc

SEQ ID NO: 52115 - DNA, 25 bp, Probe Sequence
agctcagagaggatcaagagaagag

SEQ ID NO: 52116 - DNA, 25 bp, Probe Sequence
atgctttaaatgaagaggatggtgg

SEQ ID NO: 52117 - DNA, 25 bp, Probe Sequence
ggctgatgctttaaatgaagaggat

SEQ ID NO: 52118 - DNA, 25 bp, Probe Sequence
gaggaggaagaggaagaggaagaaa

SEQ ID NO: 52119 - DNA, 25 bp, Probe Sequence
ctcctctacctcaacgatgacttcc

SEQ ID NO: 52120 - DNA, 25 bp, Probe Sequence
ctcagagaggatcaagagaagaggc

SEQ ID NO: 52121 - DNA, 25 bp, Probe Sequence
gctcagagaggatcaagagaagagg

SEQ ID NO: 52122 - DNA, 25 bp, Probe Sequence
gaggctgatgctttaaatgaagagg

SEQ ID NO: 52123 - DNA, 25 bp, Probe Sequence
ggaggctgatgctttaaatgaagag

SEQ ID NO: 52124 - DNA, 25 bp, Probe Sequence
gaggaggctgatgctttaaatgaag

SEQ ID NO: 52125 - DNA, 25 bp, Probe Sequence
cctctacctcaacgatgacttccag

SEQ ID NO: 52126 - DNA, 25 bp, Probe Sequence
aaagctcagagaggatcaagagaag

SEQ ID NO: 52127 - DNA, 25 bp, Probe Sequence
aggctgatgctttaaatgaagagga

SEQ ID NO: 52128 - DNA, 25 bp, Probe Sequence
aggaggctgatgctttaaatgaaga

SEQ ID NO: 52129 - DNA, 25 bp, Probe Sequence
gaaacgctggtccctactaaaatac

SEQ ID NO: 52130 - DNA, 25 bp, Probe Sequence
tgaaacgctggtccctactaaaata

SEQ ID NO: 52131 - DNA, 25 bp, Probe Sequence
aaatacaaaacaaaatagccaggtt

SEQ ID NO: 52132 - DNA, 25 bp, Probe Sequence
taaatacaaaacaaaatagccaggt

SEQ ID NO: 52133 - DNA, 25 bp, Probe Sequence
gtgaaacgctggtccctactaaaat

SEQ ID NO: 52134 - DNA, 25 bp, Probe Sequence
tacaaaacaaaatagccaggtttgg

SEQ ID NO: 52135 - DNA, 25 bp, Probe Sequence
ttaaatacaaaacaaaatagccagg

SEQ ID NO: 52136 - DNA, 25 bp, Probe Sequence
atacaaaacaaaatagccaggtttg

SEQ ID NO: 52137 - DNA, 25 bp, Probe Sequence
aaacgctggtccctactaaaatacc

SEQ ID NO: 52138 - DNA, 25 bp, Probe Sequence
aatacaaaacaaaatagccaggttt

SEQ ID NO: 52139 - DNA, 25 bp, Probe Sequence
acaaaacaaaatagccaggtttggg

SEQ ID NO: 52140 - DNA, 25 bp, Probe Sequence
caaaacaaaatagccaggtttgggg

SEQ ID NO: 52141 - DNA, 25 bp, Probe Sequence
ggtgaaacgctggtccctactaaaa

SEQ ID NO: 52142 - DNA, 25 bp, Probe Sequence
cttgacgttgacttcattaaaatta

SEQ ID NO: 52143 - DNA, 25 bp, Probe Sequence
tgacgttgacttcattaaaattatc

SEQ ID NO: 52144 - DNA, 25 bp, Probe Sequence
gacgttgacttcattaaaattatct

SEQ ID NO: 52145 - DNA, 25 bp, Probe Sequence
aaaacaaaatagccaggtttggggt

SEQ ID NO: 52146 - DNA, 25 bp, Probe Sequence
ttgacgttgacttcattaaaattat

SEQ ID NO: 52147 - DNA, 25 bp, Probe Sequence
gctggtccctactaaaataccaaaa

SEQ ID NO: 52148 - DNA, 25 bp, Probe Sequence
aaacaaaatagccaggtttggggtg

SEQ ID NO: 52149 - DNA, 25 bp, Probe Sequence
tttaaatacaaaacaaaatagccag

SEQ ID NO: 52150 - DNA, 25 bp, Probe Sequence
cgctggtccctactaaaataccaaa

SEQ ID NO: 52151 - DNA, 25 bp, Probe Sequence
caggaatatagccttttggcatggg

SEQ ID NO: 52152 - DNA, 25 bp, Probe Sequence
ggaatatagccttttggcatgggtg

SEQ ID NO: 52153 - DNA, 25 bp, Probe Sequence
agatgatgatgatgacgatgatgat

SEQ ID NO: 52154 - DNA, 25 bp, Probe Sequence
gagatgatgatgatgacgatgatga

SEQ ID NO: 52155 - DNA, 25 bp, Probe Sequence
catactggtcgtcttgttataggag

SEQ ID NO: 52156 - DNA, 25 bp, Probe Sequence
atgatgatgatgacgatgatgattc

SEQ ID NO: 52157 - DNA, 25 bp, Probe Sequence
gatgatgatgatgacgatgatgatt

SEQ ID NO: 52158 - DNA, 25 bp, Probe Sequence
tactggtcgtcttgttataggagat

SEQ ID NO: 52159 - DNA, 25 bp, Probe Sequence
atactggtcgtcttgttataggaga

SEQ ID NO: 52160 - DNA, 25 bp, Probe Sequence
ggagatgatgatgatgacgatgatg

SEQ ID NO: 52161 - DNA, 25 bp, Probe Sequence
acttagttgcctgttactgagttag

SEQ ID NO: 52162 - DNA, 25 bp, Probe Sequence
gatgatgatgacgatgatgattcac

SEQ ID NO: 52163 - DNA, 25 bp, Probe Sequence
tgatgatgatgacgatgatgattca

SEQ ID NO: 52164 - DNA, 25 bp, Probe Sequence
tggagatgatgatgatgacgatgat

SEQ ID NO: 52165 - DNA, 25 bp, Probe Sequence
tacttagttgcctgttactgagtta

SEQ ID NO: 52166 - DNA, 25 bp, Probe Sequence
atgaagaactggagtctcaatatca

SEQ ID NO: 52167 - DNA, 25 bp, Probe Sequence
atgatgatgacgatgatgattcacc

SEQ ID NO: 52168 - DNA, 25 bp, Probe Sequence
gaagaatctgctgaagaactccaag

SEQ ID NO: 52169 - DNA, 25 bp, Probe Sequence
ctggagatgatgatgatgacgatga

SEQ ID NO: 52170 - DNA, 25 bp, Probe Sequence
acatactggtcgtcttgttatagga

SEQ ID NO: 52171 - DNA, 25 bp, Probe Sequence
cttagttgcctgttactgagttagc

SEQ ID NO: 52172 - DNA, 25 bp, Probe Sequence
tgaagaactggagtctcaatatcag

SEQ ID NO: 52173 - DNA, 25 bp, Probe Sequence
gtacttagttgcctgttactgagtt

SEQ ID NO: 52174 - DNA, 25 bp, Probe Sequence
gatgatgacgatgatgattcacctg

SEQ ID NO: 52175 - DNA, 25 bp, Probe Sequence
agaagaatctgctgaagaactccaa

SEQ ID NO: 52176 - DNA, 25 bp, Probe Sequence
aagaagaatctgctgaagaactcca

SEQ ID NO: 52177 - DNA, 25 bp, Probe Sequence
gcatgttagacaactacacagtatg

SEQ ID NO: 52178 - DNA, 25 bp, Probe Sequence
agcatgttagacaactacacagtat

SEQ ID NO: 52179 - DNA, 25 bp, Probe Sequence
cagcatgttagacaactacacagta

SEQ ID NO: 52180 - DNA, 25 bp, Probe Sequence
tagacactggaataacagcacagaa

SEQ ID NO: 52181 - DNA, 25 bp, Probe Sequence
tcacattcatccaacttcaccactt

SEQ ID NO: 52182 - DNA, 25 bp, Probe Sequence
aggctagaagtgaagaccttattaa

SEQ ID NO: 52183 - DNA, 25 bp, Probe Sequence
atcagcatgttagacaactacacag

SEQ ID NO: 52184 - DNA, 25 bp, Probe Sequence
catcagcatgttagacaactacaca

SEQ ID NO: 52185 - DNA, 25 bp, Probe Sequence
cttgctgtaaggctagaagtgaaga

SEQ ID NO: 52186 - DNA, 25 bp, Probe Sequence
ctccatcagcatgttagacaactac

SEQ ID NO: 52187 - DNA, 25 bp, Probe Sequence
ttgctgtaaggctagaagtgaagac

SEQ ID NO: 52188 - DNA, 25 bp, Probe Sequence
atgttagacaactacacagtatgtt

SEQ ID NO: 52189 - DNA, 25 bp, Probe Sequence
cacattcatccaacttcaccacttg

SEQ ID NO: 52190 - DNA, 25 bp, Probe Sequence
catgttagacaactacacagtatgt

SEQ ID NO: 52191 - DNA, 25 bp, Probe Sequence
ctcattcctcttcctctttgtgtag

SEQ ID NO: 52192 - DNA, 25 bp, Probe Sequence
gcaagtctaacctctgaacataaat

SEQ ID NO: 52193 - DNA, 25 bp, Probe Sequence
ctactaaagggtaacttcaggtgtg

SEQ ID NO: 52194 - DNA, 25 bp, Probe Sequence
ggctagaagtgaagaccttattaat

SEQ ID NO: 52195 - DNA, 25 bp, Probe Sequence
ccatcagcatgttagacaactacac

SEQ ID NO: 52196 - DNA, 25 bp, Probe Sequence
tccatcagcatgttagacaactaca

SEQ ID NO: 52197 - DNA, 25 bp, Probe Sequence
cattcctttccagaacaactctttc

SEQ ID NO: 52198 - DNA, 25 bp, Probe Sequence
tctccctctactcacaatactaaag

SEQ ID NO: 52199 - DNA, 25 bp, Probe Sequence
tcattcctttccagaacaactcttt

SEQ ID NO: 52200 - DNA, 25 bp, Probe Sequence
ttcattcctttccagaacaactctt

SEQ ID NO: 52201 - DNA, 25 bp, Probe Sequence
tctgttatctgtgtatattgttgct

SEQ ID NO: 52202 - DNA, 25 bp, Probe Sequence
ttctgttatctgtgtatattgttgc

SEQ ID NO: 52203 - DNA, 25 bp, Probe Sequence
ctgttatctgtgtatattgttgctt

SEQ ID NO: 52204 - DNA, 25 bp, Probe Sequence
tctgtgtatattgttgcttattgtt

SEQ ID NO: 52205 - DNA, 25 bp, Probe Sequence
atctgtgtatattgttgcttattgt

SEQ ID NO: 52206 - DNA, 25 bp, Probe Sequence
tgttatctgtgtatattgttgctta

SEQ ID NO: 52207 - DNA, 25 bp, Probe Sequence
gttctgttatctgtgtatattgttg

SEQ ID NO: 52208 - DNA, 25 bp, Probe Sequence
cttctcagagtcaacctcctgtgat

SEQ ID NO: 52209 - DNA, 25 bp, Probe Sequence
agttctgttatctgtgtatattgtt

SEQ ID NO: 52210 - DNA, 25 bp, Probe Sequence
aagttctgttatctgtgtatattgt

SEQ ID NO: 52211 - DNA, 25 bp, Probe Sequence
ttctcagagtcaacctcctgtgatg

SEQ ID NO: 52212 - DNA, 25 bp, Probe Sequence
gaagttctgttatctgtgtatattg

SEQ ID NO: 52213 - DNA, 25 bp, Probe Sequence
aagcagcaagatgttcaaactccat

SEQ ID NO: 52214 - DNA, 25 bp, Probe Sequence
ctgtgtatattgttgcttattgttt

SEQ ID NO: 52215 - DNA, 25 bp, Probe Sequence
aaagcagcaagatgttcaaactcca

SEQ ID NO: 52216 - DNA, 25 bp, Probe Sequence
tatctgtgtatattgttgcttattg

SEQ ID NO: 52217 - DNA, 25 bp, Probe Sequence
gttatctgtgtatattgttgcttat

SEQ ID NO: 52218 - DNA, 25 bp, Probe Sequence
agaagttctgttatctgtgtatatt

SEQ ID NO: 52219 - DNA, 25 bp, Probe Sequence
aagaagttctgttatctgtgtatat

SEQ ID NO: 52220 - DNA, 25 bp, Probe Sequence
atgttgtctttatcgactttgtaaa

SEQ ID NO: 52221 - DNA, 25 bp, Probe Sequence
gtgatgccttctcagagtcaacctc

SEQ ID NO: 52222 - DNA, 25 bp, Probe Sequence
attatgttgtctttatcgactttgt

SEQ ID NO: 52223 - DNA, 25 bp, Probe Sequence
aaaagcagcaagatgttcaaactcc

SEQ ID NO: 52224 - DNA, 25 bp, Probe Sequence
ttcaaactccatctgcaaaagaaga

SEQ ID NO: 52225 - DNA, 25 bp, Probe Sequence
ccacactgacttatttccctaaact

SEQ ID NO: 52226 - DNA, 25 bp, Probe Sequence
accacactgacttatttccctaaac

SEQ ID NO: 52227 - DNA, 25 bp, Probe Sequence
caccacactgacttatttccctaaa

SEQ ID NO: 52228 - DNA, 25 bp, Probe Sequence
tagggcaatttcattaactctgact

SEQ ID NO: 52229 - DNA, 25 bp, Probe Sequence
gtagggcaatttcattaactctgac

SEQ ID NO: 52230 - DNA, 25 bp, Probe Sequence
agtagggcaatttcattaactctga

SEQ ID NO: 52231 - DNA, 25 bp, Probe Sequence
ggcaatttcattaactctgactctt

SEQ ID NO: 52232 - DNA, 25 bp, Probe Sequence
aagtagggcaatttcattaactctg

SEQ ID NO: 52233 - DNA, 25 bp, Probe Sequence
cacactgacttatttccctaaacta

SEQ ID NO: 52234 - DNA, 25 bp, Probe Sequence
gggcaatttcattaactctgactct

SEQ ID NO: 52235 - DNA, 25 bp, Probe Sequence
agggcaatttcattaactctgactc

SEQ ID NO: 52236 - DNA, 25 bp, Probe Sequence
tcaccacactgacttatttccctaa

SEQ ID NO: 52237 - DNA, 25 bp, Probe Sequence
aaagtagggcaatttcattaactct

SEQ ID NO: 52238 - DNA, 25 bp, Probe Sequence
ctcaccacactgacttatttcccta

SEQ ID NO: 52239 - DNA, 25 bp, Probe Sequence
acactgacttatttccctaaactat

SEQ ID NO: 52240 - DNA, 25 bp, Probe Sequence
cactgacttatttccctaaactatt

SEQ ID NO: 52241 - DNA, 25 bp, Probe Sequence
ctttaggactgggtggatggagaag

SEQ ID NO: 52242 - DNA, 25 bp, Probe Sequence
aaaagtagggcaatttcattaactc

SEQ ID NO: 52243 - DNA, 25 bp, Probe Sequence
cctcaccacactgacttatttccct

SEQ ID NO: 52244 - DNA, 25 bp, Probe Sequence
gatggagaagacaccttgtgctcat

SEQ ID NO: 52245 - DNA, 25 bp, Probe Sequence
actgacttatttccctaaactattt

SEQ ID NO: 52246 - DNA, 25 bp, Probe Sequence
tttaggactgggtggatggagaaga

SEQ ID NO: 52247 - DNA, 25 bp, Probe Sequence
atggagaagacaccttgtgctcatg

SEQ ID NO: 52248 - DNA, 25 bp, Probe Sequence
ttaggactgggtggatggagaagac

SEQ ID NO: 52249 - DNA, 25 bp, Probe Sequence
aatgagcaagaatcagacatcacag

SEQ ID NO: 52250 - DNA, 25 bp, Probe Sequence
tgagcaagaatcagacatcacagat

SEQ ID NO: 52251 - DNA, 25 bp, Probe Sequence
atgagcaagaatcagacatcacaga

SEQ ID NO: 52252 - DNA, 25 bp, Probe Sequence
aatacatcttggcacaatgagtgtc

SEQ ID NO: 52253 - DNA, 25 bp, Probe Sequence
gtggagataatgaagttggctttac

SEQ ID NO: 52254 - DNA, 25 bp, Probe Sequence
agtggagataatgaagttggcttta

SEQ ID NO: 52255 - DNA, 25 bp, Probe Sequence
tggagataatgaagttggctttaca

SEQ ID NO: 52256 - DNA, 25 bp, Probe Sequence
ggtataagttcaatgttcccatcac

SEQ ID NO: 52257 - DNA, 25 bp, Probe Sequence
aggtataagttcaatgttcccatca

SEQ ID NO: 52258 - DNA, 25 bp, Probe Sequence
ggagataatgaagttggctttacat

SEQ ID NO: 52259 - DNA, 25 bp, Probe Sequence
tttcgtgaacacattcttggtaaag

SEQ ID NO: 52260 - DNA, 25 bp, Probe Sequence
ctttcgtgaacacattcttggtaaa

SEQ ID NO: 52261 - DNA, 25 bp, Probe Sequence
caacttcttgtaatgggagatgaga

SEQ ID NO: 52262 - DNA, 25 bp, Probe Sequence
atacatcttggcacaatgagtgtct

SEQ ID NO: 52263 - DNA, 25 bp, Probe Sequence
tcttgtaatgggagatgagaatgta

SEQ ID NO: 52264 - DNA, 25 bp, Probe Sequence
atcacagatgcaacttcttgtaatg

SEQ ID NO: 52265 - DNA, 25 bp, Probe Sequence
cagtggagataatgaagttggcttt

SEQ ID NO: 52266 - DNA, 25 bp, Probe Sequence
ttgtaatgggagatgagaatgtacg

SEQ ID NO: 52267 - DNA, 25 bp, Probe Sequence
aaatgagcaagaatcagacatcaca

SEQ ID NO: 52268 - DNA, 25 bp, Probe Sequence
ataagttcaatgttcccatcactcg

SEQ ID NO: 52269 - DNA, 25 bp, Probe Sequence
aactgatgaaccagaatccttggaa

SEQ ID NO: 52270 - DNA, 25 bp, Probe Sequence
cttgtaatgggagatgagaatgtac

SEQ ID NO: 52271 - DNA, 25 bp, Probe Sequence
gtataagttcaatgttcccatcact

SEQ ID NO: 52272 - DNA, 25 bp, Probe Sequence
gcttcaagaacagaatttgggaatt

SEQ ID NO: 52273 - DNA, 25 bp, Probe Sequence
acttctataagagcgtgacttgtaa

SEQ ID NO: 52274 - DNA, 25 bp, Probe Sequence
atacttctataagagcgtgacttgt

SEQ ID NO: 52275 - DNA, 25 bp, Probe Sequence
cttcattggtaagatgttcaagtcg

SEQ ID NO: 52276 - DNA, 25 bp, Probe Sequence
gcttcattggtaagatgttcaagtc

SEQ ID NO: 52277 - DNA, 25 bp, Probe Sequence
tacttctataagagcgtgacttgta

SEQ ID NO: 52278 - DNA, 25 bp, Probe Sequence
tccacatatacttctataagagcgt

SEQ ID NO: 52279 - DNA, 25 bp, Probe Sequence
gcctgattgtagagttcattctcat

SEQ ID NO: 52280 - DNA, 25 bp, Probe Sequence
cttctataagagcgtgacttgtaat

SEQ ID NO: 52281 - DNA, 25 bp, Probe Sequence
gtccacatatacttctataagagcg

SEQ ID NO: 52282 - DNA, 25 bp, Probe Sequence
ctgagcctgattgtagagttcattc

SEQ ID NO: 52283 - DNA, 25 bp, Probe Sequence
gagcctgattgtagagttcattctc

SEQ ID NO: 52284 - DNA, 25 bp, Probe Sequence
ggcttcattggtaagatgttcaagt

SEQ ID NO: 52285 - DNA, 25 bp, Probe Sequence
tgagcctgattgtagagttcattct

SEQ ID NO: 52286 - DNA, 25 bp, Probe Sequence
ttcattggtaagatgttcaagtcgc

SEQ ID NO: 52287 - DNA, 25 bp, Probe Sequence
agcctgattgtagagttcattctca

SEQ ID NO: 52288 - DNA, 25 bp, Probe Sequence
acatatacttctataagagcgtgac

SEQ ID NO: 52289 - DNA, 25 bp, Probe Sequence
tatacttctataagagcgtgacttg

SEQ ID NO: 52290 - DNA, 25 bp, Probe Sequence
cctgattgtagagttcattctcatg

SEQ ID NO: 52291 - DNA, 25 bp, Probe Sequence
ccacatatacttctataagagcgtg

SEQ ID NO: 52292 - DNA, 25 bp, Probe Sequence
catatacttctataagagcgtgact

SEQ ID NO: 52293 - DNA, 25 bp, Probe Sequence
cattggtaagatgttcaagtcgctg

SEQ ID NO: 52294 - DNA, 25 bp, Probe Sequence
ctgattgtagagttcattctcatgt

SEQ ID NO: 52295 - DNA, 25 bp, Probe Sequence
cctgagcctgattgtagagttcatt

SEQ ID NO: 52296 - DNA, 25 bp, Probe Sequence
tcattggtaagatgttcaagtcgct

SEQ ID NO: 52297 - DNA, 25 bp, Probe Sequence
agatcctgaagttacagatgaagaa

SEQ ID NO: 52298 - DNA, 25 bp, Probe Sequence
tagaacaaccagtattagaaggtgc

SEQ ID NO: 52299 - DNA, 25 bp, Probe Sequence
cctagaacaaccagtattagaaggt

SEQ ID NO: 52300 - DNA, 25 bp, Probe Sequence
tagatcctgaagttacagatgaaga

SEQ ID NO: 52301 - DNA, 25 bp, Probe Sequence
ctagaacaaccagtattagaaggtg

SEQ ID NO: 52302 - DNA, 25 bp, Probe Sequence
gaaagagagagaagccaaagagatg

SEQ ID NO: 52303 - DNA, 25 bp, Probe Sequence
ttcgtggatagtttgtggaaatcat

SEQ ID NO: 52304 - DNA, 25 bp, Probe Sequence
tgatggttagaaacttcgtggatag

SEQ ID NO: 52305 - DNA, 25 bp, Probe Sequence
gaaacgacaaagggaagaagagatt

SEQ ID NO: 52306 - DNA, 25 bp, Probe Sequence
tcgtggatagtttgtggaaatcatc

SEQ ID NO: 52307 - DNA, 25 bp, Probe Sequence
gtgatggttagaaacttcgtggata

SEQ ID NO: 52308 - DNA, 25 bp, Probe Sequence
aattgtgatggttagaaacttcgtg

SEQ ID NO: 52309 - DNA, 25 bp, Probe Sequence
gaattgtgatggttagaaacttcgt

SEQ ID NO: 52310 - DNA, 25 bp, Probe Sequence
tgaattgtgatggttagaaacttcg

SEQ ID NO: 52311 - DNA, 25 bp, Probe Sequence
ttacaagttgctactggatcaggag

SEQ ID NO: 52312 - DNA, 25 bp, Probe Sequence
cttacaagttgctactggatcagga

SEQ ID NO: 52313 - DNA, 25 bp, Probe Sequence
gatggttagaaacttcgtggatagt

SEQ ID NO: 52314 - DNA, 25 bp, Probe Sequence
cttcgtggatagtttgtggaaatca

SEQ ID NO: 52315 - DNA, 25 bp, Probe Sequence
actgaattgtgatggttagaaactt

SEQ ID NO: 52316 - DNA, 25 bp, Probe Sequence
cccaacatagagtagtatttgcttt

SEQ ID NO: 52317 - DNA, 25 bp, Probe Sequence
aaaggaaagagagagaagccaaaga

SEQ ID NO: 52318 - DNA, 25 bp, Probe Sequence
attgtgatggttagaaacttcgtgg

SEQ ID NO: 52319 - DNA, 25 bp, Probe Sequence
ataaacagacaatgaaactctttgc

SEQ ID NO: 52320 - DNA, 25 bp, Probe Sequence
atagatcctgaagttacagatgaag

SEQ ID NO: 52321 - DNA, 25 bp, Probe Sequence
caagaaggagaaggaagaagaggag

SEQ ID NO: 52322 - DNA, 25 bp, Probe Sequence
ttccatagcctctgagactcataag

SEQ ID NO: 52323 - DNA, 25 bp, Probe Sequence
tcatcatctaccaagagaaacaagg

SEQ ID NO: 52324 - DNA, 25 bp, Probe Sequence
gtcatcatctaccaagagaaacaag

SEQ ID NO: 52325 - DNA, 25 bp, Probe Sequence
ccaagaaggagaaggaagaagagga

SEQ ID NO: 52326 - DNA, 25 bp, Probe Sequence
cgtcatcatctaccaagagaaacaa

SEQ ID NO: 52327 - DNA, 25 bp, Probe Sequence
catcatctaccaagagaaacaaggc

SEQ ID NO: 52328 - DNA, 25 bp, Probe Sequence
aagaaggagaaggaagaagaggagc

SEQ ID NO: 52329 - DNA, 25 bp, Probe Sequence
tttccatagcctctgagactcataa

SEQ ID NO: 52330 - DNA, 25 bp, Probe Sequence
tccatagcctctgagactcataagg

SEQ ID NO: 52331 - DNA, 25 bp, Probe Sequence
aagcaggagtctacagtgatggttc

SEQ ID NO: 52332 - DNA, 25 bp, Probe Sequence
ggatgcagaaatcattgtcaagatc

SEQ ID NO: 52333 - DNA, 25 bp, Probe Sequence
aggatgcagaaatcattgtcaagat

SEQ ID NO: 52334 - DNA, 25 bp, Probe Sequence
atcatctaccaagagaaacaaggcg

SEQ ID NO: 52335 - DNA, 25 bp, Probe Sequence
gcgtcatcatctaccaagagaaaca

SEQ ID NO: 52336 - DNA, 25 bp, Probe Sequence
caagcaggagtctacagtgatggtt

SEQ ID NO: 52337 - DNA, 25 bp, Probe Sequence
gaggatgcagaaatcattgtcaaga

SEQ ID NO: 52338 - DNA, 25 bp, Probe Sequence
cttgttccttgtttcctctgggttt

SEQ ID NO: 52339 - DNA, 25 bp, Probe Sequence
tgggttttatagtgatacagtggtg

SEQ ID NO: 52340 - DNA, 25 bp, Probe Sequence
ttgtttcctctgggttttatagtga

SEQ ID NO: 52341 - DNA, 25 bp, Probe Sequence
tccttgtttcctctgggttttatag

SEQ ID NO: 52342 - DNA, 25 bp, Probe Sequence
ttccttgtttcctctgggttttata

SEQ ID NO: 52343 - DNA, 25 bp, Probe Sequence
tgtttcctctgggttttatagtgat

SEQ ID NO: 52344 - DNA, 25 bp, Probe Sequence
cttgtttcctctgggttttatagtg

SEQ ID NO: 52345 - DNA, 25 bp, Probe Sequence
acttcctctgaataccttcctacat

SEQ ID NO: 52346 - DNA, 25 bp, Probe Sequence
cttcctctgaataccttcctacatt

SEQ ID NO: 52347 - DNA, 25 bp, Probe Sequence
atcacttcctctgaataccttccta

SEQ ID NO: 52348 - DNA, 25 bp, Probe Sequence
cacttcctctgaataccttcctaca

SEQ ID NO: 52349 - DNA, 25 bp, Probe Sequence
tcacttcctctgaataccttcctac

SEQ ID NO: 52350 - DNA, 25 bp, Probe Sequence
ttcctctgaataccttcctacatta

SEQ ID NO: 52351 - DNA, 25 bp, Probe Sequence
ctctgaataccttcctacattatgg

SEQ ID NO: 52352 - DNA, 25 bp, Probe Sequence
cctctgaataccttcctacattatg

SEQ ID NO: 52353 - DNA, 25 bp, Probe Sequence
tcctctgaataccttcctacattat

SEQ ID NO: 52354 - DNA, 25 bp, Probe Sequence
aatgtcattcttgatcttcagcctt

SEQ ID NO: 52355 - DNA, 25 bp, Probe Sequence
atgtcattcttgatcttcagccttc

SEQ ID NO: 52356 - DNA, 25 bp, Probe Sequence
gatcacttcctctgaataccttcct

SEQ ID NO: 52357 - DNA, 25 bp, Probe Sequence
ccagtatgactacatcttgcctcaa

SEQ ID NO: 52358 - DNA, 25 bp, Probe Sequence
cagcaacctgtattcattattagga

SEQ ID NO: 52359 - DNA, 25 bp, Probe Sequence
tgattgaggttgggaataatgacat

SEQ ID NO: 52360 - DNA, 25 bp, Probe Sequence
taccataaacacaccaccttgattt

SEQ ID NO: 52361 - DNA, 25 bp, Probe Sequence
gattgaggttgggaataatgacatc

SEQ ID NO: 52362 - DNA, 25 bp, Probe Sequence
ctaccataaacacaccaccttgatt

SEQ ID NO: 52363 - DNA, 25 bp, Probe Sequence
gtgattgaggttgggaataatgaca

SEQ ID NO: 52364 - DNA, 25 bp, Probe Sequence
agcaacctgtattcattattaggaa

SEQ ID NO: 52365 - DNA, 25 bp, Probe Sequence
tagggtgattgaggttgggaataat

SEQ ID NO: 52366 - DNA, 25 bp, Probe Sequence
atagggtgattgaggttgggaataa

SEQ ID NO: 52367 - DNA, 25 bp, Probe Sequence
tctgaataccttcctacattatggg

SEQ ID NO: 52368 - DNA, 25 bp, Probe Sequence
attgaggttgggaataatgacatcg

SEQ ID NO: 52369 - DNA, 25 bp, Probe Sequence
gattcaagcaggacaataacaagag

SEQ ID NO: 52370 - DNA, 25 bp, Probe Sequence
gagattcaagcaggacaataacaag

SEQ ID NO: 52371 - DNA, 25 bp, Probe Sequence
agattcaagcaggacaataacaaga

SEQ ID NO: 52372 - DNA, 25 bp, Probe Sequence
attcatccagacatattacagccag

SEQ ID NO: 52373 - DNA, 25 bp, Probe Sequence
aattcatccagacatattacagcca

SEQ ID NO: 52374 - DNA, 25 bp, Probe Sequence
attcaagcaggacaataacaagagg

SEQ ID NO: 52375 - DNA, 25 bp, Probe Sequence
attgtcctgtgcctcctaatatcat

SEQ ID NO: 52376 - DNA, 25 bp, Probe Sequence
ttgtcctgtgcctcctaatatcatt

SEQ ID NO: 52377 - DNA, 25 bp, Probe Sequence
tcatccagacatattacagccagtt

SEQ ID NO: 52378 - DNA, 25 bp, Probe Sequence
ttcatccagacatattacagccagt

SEQ ID NO: 52379 - DNA, 25 bp, Probe Sequence
tgagattcaagcaggacaataacaa

SEQ ID NO: 52380 - DNA, 25 bp, Probe Sequence
gtgagattcaagcaggacaataaca

SEQ ID NO: 52381 - DNA, 25 bp, Probe Sequence
tacataacctatatacctccagcag

SEQ ID NO: 52382 - DNA, 25 bp, Probe Sequence
ctacataacctatatacctccagca

SEQ ID NO: 52383 - DNA, 25 bp, Probe Sequence
cattgtcctgtgcctcctaatatca

SEQ ID NO: 52384 - DNA, 25 bp, Probe Sequence
acataacctatatacctccagcagc

SEQ ID NO: 52385 - DNA, 25 bp, Probe Sequence
agataagtaagtaccatacacacct

SEQ ID NO: 52386 - DNA, 25 bp, Probe Sequence
ggtgagattcaagcaggacaataac

SEQ ID NO: 52387 - DNA, 25 bp, Probe Sequence
gccttcactacactgccttacataa

SEQ ID NO: 52388 - DNA, 25 bp, Probe Sequence
cttaatcaagagctggagttcaatg

SEQ ID NO: 52389 - DNA, 25 bp, Probe Sequence
ttcaatgagtcctagacagtgagag

SEQ ID NO: 52390 - DNA, 25 bp, Probe Sequence
gttcaatgagtcctagacagtgaga

SEQ ID NO: 52391 - DNA, 25 bp, Probe Sequence
agttcaatgagtcctagacagtgag

SEQ ID NO: 52392 - DNA, 25 bp, Probe Sequence
gagttcaatgagtcctagacagtga

SEQ ID NO: 52393 - DNA, 25 bp, Probe Sequence
gagtaacaccattgtccagtctatg

SEQ ID NO: 52394 - DNA, 25 bp, Probe Sequence
ggagtaacaccattgtccagtctat

SEQ ID NO: 52395 - DNA, 25 bp, Probe Sequence
gagaatgtgaaacaacagtgtgaaa

SEQ ID NO: 52396 - DNA, 25 bp, Probe Sequence
tgagaatgtgaaacaacagtgtgaa

SEQ ID NO: 52397 - DNA, 25 bp, Probe Sequence
gtgagaatgtgaaacaacagtgtga

SEQ ID NO: 52398 - DNA, 25 bp, Probe Sequence
tgtgagaatgtgaaacaacagtgtg

SEQ ID NO: 52399 - DNA, 25 bp, Probe Sequence
cttcactatctcaggagccagtcac

SEQ ID NO: 52400 - DNA, 25 bp, Probe Sequence
catacctcttctccaacagtctgcc

SEQ ID NO: 52401 - DNA, 25 bp, Probe Sequence
ccatacctcttctccaacagtctgc

SEQ ID NO: 52402 - DNA, 25 bp, Probe Sequence
gccatacctcttctccaacagtctg

SEQ ID NO: 52403 - DNA, 25 bp, Probe Sequence
agaatgtgaaacaacagtgtgaaaa

SEQ ID NO: 52404 - DNA, 25 bp, Probe Sequence
atgtgaaacaacagtgtgaaaattg

SEQ ID NO: 52405 - DNA, 25 bp, Probe Sequence
gaatgtgaaacaacagtgtgaaaat

SEQ ID NO: 52406 - DNA, 25 bp, Probe Sequence
tgtgaaacaacagtgtgaaaattgg

SEQ ID NO: 52407 - DNA, 25 bp, Probe Sequence
aatgtgaaacaacagtgtgaaaatt

SEQ ID NO: 52408 - DNA, 25 bp, Probe Sequence
agtaacaccattgtccagtctatgg

SEQ ID NO: 52409 - DNA, 25 bp, Probe Sequence
cagaggttccgtagtaagatggaag

SEQ ID NO: 52410 - DNA, 25 bp, Probe Sequence
atacctcttctccaacagtctgcca

SEQ ID NO: 52411 - DNA, 25 bp, Probe Sequence
gggagtaacaccattgtccagtcta

SEQ ID NO: 52412 - DNA, 25 bp, Probe Sequence
catctttgtcatcgggttcagctac

SEQ ID NO: 52413 - DNA, 25 bp, Probe Sequence
gaaacaacagtgtgaaaattggctg

SEQ ID NO: 52414 - DNA, 25 bp, Probe Sequence
tgaaacaacagtgtgaaaattggct

SEQ ID NO: 52415 - DNA, 25 bp, Probe Sequence
gtgaaacaacagtgtgaaaattggc

SEQ ID NO: 52416 - DNA, 25 bp, Probe Sequence
gagggctgtgagaatgtgaaacaac

SEQ ID NO: 52417 - DNA, 25 bp, Probe Sequence
aaatgaagtgttgttgcctttgtat

SEQ ID NO: 52418 - DNA, 25 bp, Probe Sequence
aatgaagtgttgttgcctttgtatg

SEQ ID NO: 52419 - DNA, 25 bp, Probe Sequence
tcctctcatatagaaagcccagaat

SEQ ID NO: 52420 - DNA, 25 bp, Probe Sequence
cctctcatatagaaagcccagaatt

SEQ ID NO: 52421 - DNA, 25 bp, Probe Sequence
caaataaattgtcacattccgaagc

SEQ ID NO: 52422 - DNA, 25 bp, Probe Sequence
cccaaataaattgtcacattccgaa

SEQ ID NO: 52423 - DNA, 25 bp, Probe Sequence
tctgtgccgattactctgtcttgta

SEQ ID NO: 52424 - DNA, 25 bp, Probe Sequence
cctatctgcatgtcctctcatatag

SEQ ID NO: 52425 - DNA, 25 bp, Probe Sequence
ccaaataaattgtcacattccgaag

SEQ ID NO: 52426 - DNA, 25 bp, Probe Sequence
ctcatatagaaagcccagaattagg

SEQ ID NO: 52427 - DNA, 25 bp, Probe Sequence
gtcctctcatatagaaagcccagaa

SEQ ID NO: 52428 - DNA, 25 bp, Probe Sequence
atgtcctctcatatagaaagcccag

SEQ ID NO: 52429 - DNA, 25 bp, Probe Sequence
tatctgcatgtcctctcatatagaa

SEQ ID NO: 52430 - DNA, 25 bp, Probe Sequence
atgaagtgttgttgcctttgtatgt

SEQ ID NO: 52431 - DNA, 25 bp, Probe Sequence
ctatctgcatgtcctctcatataga

SEQ ID NO: 52432 - DNA, 25 bp, Probe Sequence
cagaaatagggagatggttagtggg

SEQ ID NO: 52433 - DNA, 25 bp, Probe Sequence
ctgtgccgattactctgtcttgtac

SEQ ID NO: 52434 - DNA, 25 bp, Probe Sequence
aaataaattgtcacattccgaagct

SEQ ID NO: 52435 - DNA, 25 bp, Probe Sequence
aataaattgtcacattccgaagctg

SEQ ID NO: 52436 - DNA, 25 bp, Probe Sequence
tgtcctctcatatagaaagcccaga

SEQ ID NO: 52437 - DNA, 25 bp, Probe Sequence
gtttgttctgctgctcttcaatatt

SEQ ID NO: 52438 - DNA, 25 bp, Probe Sequence
cgtttgttctgctgctcttcaatat

SEQ ID NO: 52439 - DNA, 25 bp, Probe Sequence
tgaagtgttgttgcctttgtatgtg

SEQ ID NO: 52440 - DNA, 25 bp, Probe Sequence
gcagaaatagggagatggttagtgg

SEQ ID NO: 52441 - DNA, 25 bp, Probe Sequence
gacagtaagcagaacaatcagaatg

SEQ ID NO: 52442 - DNA, 25 bp, Probe Sequence
attccttcaccatacaccttatcaa

SEQ ID NO: 52443 - DNA, 25 bp, Probe Sequence
gtaagcagaacaatcagaatggaat

SEQ ID NO: 52444 - DNA, 25 bp, Probe Sequence
agtaagcagaacaatcagaatggaa

SEQ ID NO: 52445 - DNA, 25 bp, Probe Sequence
gattccttcaccatacaccttatca

SEQ ID NO: 52446 - DNA, 25 bp, Probe Sequence
agattccttcaccatacaccttatc

SEQ ID NO: 52447 - DNA, 25 bp, Probe Sequence
cagtaagcagaacaatcagaatgga

SEQ ID NO: 52448 - DNA, 25 bp, Probe Sequence
ggacagtaagcagaacaatcagaat

SEQ ID NO: 52449 - DNA, 25 bp, Probe Sequence
aagattccttcaccatacaccttat

SEQ ID NO: 52450 - DNA, 25 bp, Probe Sequence
acagtaagcagaacaatcagaatgg

SEQ ID NO: 52451 - DNA, 25 bp, Probe Sequence
agcagaacaatcagaatggaattaa

SEQ ID NO: 52452 - DNA, 25 bp, Probe Sequence
aagcagaacaatcagaatggaatta

SEQ ID NO: 52453 - DNA, 25 bp, Probe Sequence
taagcagaacaatcagaatggaatt

SEQ ID NO: 52454 - DNA, 25 bp, Probe Sequence
cttcaggacagtaagcagaacaatc

SEQ ID NO: 52455 - DNA, 25 bp, Probe Sequence
aggacagtaagcagaacaatcagaa

SEQ ID NO: 52456 - DNA, 25 bp, Probe Sequence
tcttcaggacagtaagcagaacaat

SEQ ID NO: 52457 - DNA, 25 bp, Probe Sequence
atcttcaggacagtaagcagaacaa

SEQ ID NO: 52458 - DNA, 25 bp, Probe Sequence
aatcttcaggacagtaagcagaaca

SEQ ID NO: 52459 - DNA, 25 bp, Probe Sequence
ttcaggacagtaagcagaacaatca

SEQ ID NO: 52460 - DNA, 25 bp, Probe Sequence
caggacagtaagcagaacaatcaga

SEQ ID NO: 52461 - DNA, 25 bp, Probe Sequence
tcaggacagtaagcagaacaatcag

SEQ ID NO: 52462 - DNA, 25 bp, Probe Sequence
ttccttcaccatacaccttatcaaa

SEQ ID NO: 52463 - DNA, 25 bp, Probe Sequence
tatagcgttggatttgaggttgtaa

SEQ ID NO: 52464 - DNA, 25 bp, Probe Sequence
atatagcgttggatttgaggttgta

SEQ ID NO: 52465 - DNA, 25 bp, Probe Sequence
aaggagataataatgcggttgatga

SEQ ID NO: 52466 - DNA, 25 bp, Probe Sequence
attaggaatggcatatactgaggtg

SEQ ID NO: 52467 - DNA, 25 bp, Probe Sequence
aggagataataatgcggttgatgac

SEQ ID NO: 52468 - DNA, 25 bp, Probe Sequence
tattaggaatggcatatactgaggt

SEQ ID NO: 52469 - DNA, 25 bp, Probe Sequence
atatactgaggtggtcgtaagtctt

SEQ ID NO: 52470 - DNA, 25 bp, Probe Sequence
tatactgaggtggtcgtaagtctta

SEQ ID NO: 52471 - DNA, 25 bp, Probe Sequence
ttaggaatggcatatactgaggtgg

SEQ ID NO: 52472 - DNA, 25 bp, Probe Sequence
atactgaggtggtcgtaagtcttaa

SEQ ID NO: 52473 - DNA, 25 bp, Probe Sequence
ttggagtagatactggtctgtgatt

SEQ ID NO: 52474 - DNA, 25 bp, Probe Sequence
catatactgaggtggtcgtaagtct

SEQ ID NO: 52475 - DNA, 25 bp, Probe Sequence
ctattaggaatggcatatactgagg

SEQ ID NO: 52476 - DNA, 25 bp, Probe Sequence
tactgaggtggtcgtaagtcttaac

SEQ ID NO: 52477 - DNA, 25 bp, Probe Sequence
gagtagatactggtctgtgattggt

SEQ ID NO: 52478 - DNA, 25 bp, Probe Sequence
tggagtagatactggtctgtgattg

SEQ ID NO: 52479 - DNA, 25 bp, Probe Sequence
gatactggtctgtgattggtggaat

SEQ ID NO: 52480 - DNA, 25 bp, Probe Sequence
agtagatactggtctgtgattggtg

SEQ ID NO: 52481 - DNA, 25 bp, Probe Sequence
aaccgtcatacctccttctattagg

SEQ ID NO: 52482 - DNA, 25 bp, Probe Sequence
atactggtctgtgattggtggaatg

SEQ ID NO: 52483 - DNA, 25 bp, Probe Sequence
taggaatggcatatactgaggtggt

SEQ ID NO: 52484 - DNA, 25 bp, Probe Sequence
ggagtagatactggtctgtgattgg

SEQ ID NO: 52485 - DNA, 25 bp, Probe Sequence
tagatactggtctgtgattggtgga

SEQ ID NO: 52486 - DNA, 25 bp, Probe Sequence
gtagatactggtctgtgattggtgg

SEQ ID NO: 52487 - DNA, 25 bp, Probe Sequence
aagagagattcctatagttcaccga

SEQ ID NO: 52488 - DNA, 25 bp, Probe Sequence
atattggaattgtgacgatcctcat

SEQ ID NO: 52489 - DNA, 25 bp, Probe Sequence
ccacaaggactaagtatcagtgatt

SEQ ID NO: 52490 - DNA, 25 bp, Probe Sequence
tttgtattatctgctttgctgatgt

SEQ ID NO: 52491 - DNA, 25 bp, Probe Sequence
tgtattatctgctttgctgatgtag

SEQ ID NO: 52492 - DNA, 25 bp, Probe Sequence
attatctgctttgctgatgtagaca

SEQ ID NO: 52493 - DNA, 25 bp, Probe Sequence
ttatctgctttgctgatgtagacaa

SEQ ID NO: 52494 - DNA, 25 bp, Probe Sequence
ttgtattatctgctttgctgatgta

SEQ ID NO: 52495 - DNA, 25 bp, Probe Sequence
aagactctcctcaaagaaatgactt

SEQ ID NO: 52496 - DNA, 25 bp, Probe Sequence
atcaagactctcctcaaagaaatga

SEQ ID NO: 52497 - DNA, 25 bp, Probe Sequence
agactctcctcaaagaaatgacttg

SEQ ID NO: 52498 - DNA, 25 bp, Probe Sequence
caagactctcctcaaagaaatgact

SEQ ID NO: 52499 - DNA, 25 bp, Probe Sequence
tcaagactctcctcaaagaaatgac

SEQ ID NO: 52500 - DNA, 25 bp, Probe Sequence
tattatctgctttgctgatgtagac

SEQ ID NO: 52501 - DNA, 25 bp, Probe Sequence
gtattatctgctttgctgatgtaga

SEQ ID NO: 52502 - DNA, 25 bp, Probe Sequence
ctttgctgatgtagacaagagttaa

SEQ ID NO: 52503 - DNA, 25 bp, Probe Sequence
tatctgctttgctgatgtagacaag

SEQ ID NO: 52504 - DNA, 25 bp, Probe Sequence
gctttgctgatgtagacaagagtta

SEQ ID NO: 52505 - DNA, 25 bp, Probe Sequence
gatcaagactctcctcaaagaaatg

SEQ ID NO: 52506 - DNA, 25 bp, Probe Sequence
ctctcctcaaagaaatgacttgctg

SEQ ID NO: 52507 - DNA, 25 bp, Probe Sequence
gactctcctcaaagaaatgacttgc

SEQ ID NO: 52508 - DNA, 25 bp, Probe Sequence
atgattcccacaaggactaagtatc

SEQ ID NO: 52509 - DNA, 25 bp, Probe Sequence
caaggactaagtatcagtgatttgt

SEQ ID NO: 52510 - DNA, 25 bp, Probe Sequence
acaaggactaagtatcagtgatttg

SEQ ID NO: 52511 - DNA, 25 bp, Probe Sequence
gattcccacaaggactaagtatcag

SEQ ID NO: 52512 - DNA, 25 bp, Probe Sequence
ttaataatgtgtctgtaaccaagaa

SEQ ID NO: 52513 - DNA, 25 bp, Probe Sequence
tgacagagcgagacttatagataga

SEQ ID NO: 52514 - DNA, 25 bp, Probe Sequence
gtgacagagcgagacttatagatag

SEQ ID NO: 52515 - DNA, 25 bp, Probe Sequence
tgacacaggattatgaagaatggaa

SEQ ID NO: 52516 - DNA, 25 bp, Probe Sequence
ggtgacagagcgagacttatagata

SEQ ID NO: 52517 - DNA, 25 bp, Probe Sequence
gacagagcgagacttatagatagat

SEQ ID NO: 52518 - DNA, 25 bp, Probe Sequence
ctgacacaggattatgaagaatgga

SEQ ID NO: 52519 - DNA, 25 bp, Probe Sequence
tctgacacaggattatgaagaatgg

SEQ ID NO: 52520 - DNA, 25 bp, Probe Sequence
agtgcctgattggtatagccttatg

SEQ ID NO: 52521 - DNA, 25 bp, Probe Sequence
acagagcgagacttatagatagata

SEQ ID NO: 52522 - DNA, 25 bp, Probe Sequence
tgcctgattggtatagccttatgtg

SEQ ID NO: 52523 - DNA, 25 bp, Probe Sequence
gtgcctgattggtatagccttatgt

SEQ ID NO: 52524 - DNA, 25 bp, Probe Sequence
atctgacacaggattatgaagaatg

SEQ ID NO: 52525 - DNA, 25 bp, Probe Sequence
atagtacattgccatctccaggaag

SEQ ID NO: 52526 - DNA, 25 bp, Probe Sequence
gatagtacattgccatctccaggaa

SEQ ID NO: 52527 - DNA, 25 bp, Probe Sequence
aactgatagtacattgccatctcca

SEQ ID NO: 52528 - DNA, 25 bp, Probe Sequence
aacaactagagaagattggacagca

SEQ ID NO: 52529 - DNA, 25 bp, Probe Sequence
agaaggtagaggagatgccacataa

SEQ ID NO: 52530 - DNA, 25 bp, Probe Sequence
cagagcgagacttatagatagatag

SEQ ID NO: 52531 - DNA, 25 bp, Probe Sequence
acaactagagaagattggacagcag

SEQ ID NO: 52532 - DNA, 25 bp, Probe Sequence
agagcgagacttatagatagataga

SEQ ID NO: 52533 - DNA, 25 bp, Probe Sequence
ggaagagaaagaagatagtggttga

SEQ ID NO: 52534 - DNA, 25 bp, Probe Sequence
agagaaagaagatagtggttgaagc

SEQ ID NO: 52535 - DNA, 25 bp, Probe Sequence
gatctgacacaggattatgaagaat

SEQ ID NO: 52536 - DNA, 25 bp, Probe Sequence
tagatagataaacggaattggagcc

SEQ ID NO: 52537 - DNA, 25 bp, Probe Sequence
cggctgtgatgagattattgataga

SEQ ID NO: 52538 - DNA, 25 bp, Probe Sequence
tcggctgtgatgagattattgatag

SEQ ID NO: 52539 - DNA, 25 bp, Probe Sequence
tcagaatagaacacaataggacagt

SEQ ID NO: 52540 - DNA, 25 bp, Probe Sequence
ggctgtgatgagattattgatagag

SEQ ID NO: 52541 - DNA, 25 bp, Probe Sequence
tgatagagagtagttagatgctgtt

SEQ ID NO: 52542 - DNA, 25 bp, Probe Sequence
ttgatagagagtagttagatgctgt

SEQ ID NO: 52543 - DNA, 25 bp, Probe Sequence
gatctagtcaagccacagttatcaa

SEQ ID NO: 52544 - DNA, 25 bp, Probe Sequence
ctcggctgtgatgagattattgata

SEQ ID NO: 52545 - DNA, 25 bp, Probe Sequence
ttcagaatagaacacaataggacag

SEQ ID NO: 52546 - DNA, 25 bp, Probe Sequence
gctgtgatgagattattgatagaga

SEQ ID NO: 52547 - DNA, 25 bp, Probe Sequence
aatagaacacaataggacagtgact

SEQ ID NO: 52548 - DNA, 25 bp, Probe Sequence
gaatagaacacaataggacagtgac

SEQ ID NO: 52549 - DNA, 25 bp, Probe Sequence
agaatagaacacaataggacagtga

SEQ ID NO: 52550 - DNA, 25 bp, Probe Sequence
cagaatagaacacaataggacagtg

SEQ ID NO: 52551 - DNA, 25 bp, Probe Sequence
gaactcggctgtgatgagattattg

SEQ ID NO: 52552 - DNA, 25 bp, Probe Sequence
agaactcggctgtgatgagattatt

SEQ ID NO: 52553 - DNA, 25 bp, Probe Sequence
aagaactcggctgtgatgagattat

SEQ ID NO: 52554 - DNA, 25 bp, Probe Sequence
attgatagagagtagttagatgctg

SEQ ID NO: 52555 - DNA, 25 bp, Probe Sequence
ctctgtctcctcctctaattaagct

SEQ ID NO: 52556 - DNA, 25 bp, Probe Sequence
actcggctgtgatgagattattgat

SEQ ID NO: 52557 - DNA, 25 bp, Probe Sequence
accattgcttatgctgttatatact

SEQ ID NO: 52558 - DNA, 25 bp, Probe Sequence
cctctgtctcctcctctaattaagc

SEQ ID NO: 52559 - DNA, 25 bp, Probe Sequence
aactcggctgtgatgagattattga

SEQ ID NO: 52560 - DNA, 25 bp, Probe Sequence
gtgatctagtcaagccacagttatc

SEQ ID NO: 52561 - DNA, 25 bp, Probe Sequence
ctatgcttgctcagagaagaggtat

SEQ ID NO: 52562 - DNA, 25 bp, Probe Sequence
ttactatgcttgctcagagaagagg

SEQ ID NO: 52563 - DNA, 25 bp, Probe Sequence
tatgcttgctcagagaagaggtatg

SEQ ID NO: 52564 - DNA, 25 bp, Probe Sequence
actatgcttgctcagagaagaggta

SEQ ID NO: 52565 - DNA, 25 bp, Probe Sequence
tactatgcttgctcagagaagaggt

SEQ ID NO: 52566 - DNA, 25 bp, Probe Sequence
tttactatgcttgctcagagaagag

SEQ ID NO: 52567 - DNA, 25 bp, Probe Sequence
ttttactatgcttgctcagagaaga

SEQ ID NO: 52568 - DNA, 25 bp, Probe Sequence
atgcttgctcagagaagaggtatgc

SEQ ID NO: 52569 - DNA, 25 bp, Probe Sequence
ttctgaggagactacagcaggtgaa

SEQ ID NO: 52570 - DNA, 25 bp, Probe Sequence
cttctgaggagactacagcaggtga

SEQ ID NO: 52571 - DNA, 25 bp, Probe Sequence
cttatgtcttcagccactcacttat

SEQ ID NO: 52572 - DNA, 25 bp, Probe Sequence
ttatgtcttcagccactcacttata

SEQ ID NO: 52573 - DNA, 25 bp, Probe Sequence
tcttatgtcttcagccactcactta

SEQ ID NO: 52574 - DNA, 25 bp, Probe Sequence
tatgtcttcagccactcacttataa

SEQ ID NO: 52575 - DNA, 25 bp, Probe Sequence
ctcttatgtcttcagccactcactt

SEQ ID NO: 52576 - DNA, 25 bp, Probe Sequence
ctctcttatgtcttcagccactcac

SEQ ID NO: 52577 - DNA, 25 bp, Probe Sequence
ttgactgggattggaaataatgaga

SEQ ID NO: 52578 - DNA, 25 bp, Probe Sequence
gttgactgggattggaaataatgag

SEQ ID NO: 52579 - DNA, 25 bp, Probe Sequence
gattggaaataatgagactgaccct

SEQ ID NO: 52580 - DNA, 25 bp, Probe Sequence
ctgggattggaaataatgagactga

SEQ ID NO: 52581 - DNA, 25 bp, Probe Sequence
gactgggattggaaataatgagact

SEQ ID NO: 52582 - DNA, 25 bp, Probe Sequence
tgttgactgggattggaaataatga

SEQ ID NO: 52583 - DNA, 25 bp, Probe Sequence
atgttgactgggattggaaataatg

SEQ ID NO: 52584 - DNA, 25 bp, Probe Sequence
tgggattggaaataatgagactgac

SEQ ID NO: 52585 - DNA, 25 bp, Probe Sequence
actgggattggaaataatgagactg

SEQ ID NO: 52586 - DNA, 25 bp, Probe Sequence
tgactgggattggaaataatgagac

SEQ ID NO: 52587 - DNA, 25 bp, Probe Sequence
tctcttatgtcttcagccactcact

SEQ ID NO: 52588 - DNA, 25 bp, Probe Sequence
ggattggaaataatgagactgaccc

SEQ ID NO: 52589 - DNA, 25 bp, Probe Sequence
gggattggaaataatgagactgacc

SEQ ID NO: 52590 - DNA, 25 bp, Probe Sequence
attggaaataatgagactgaccctc

SEQ ID NO: 52591 - DNA, 25 bp, Probe Sequence
catgttgactgggattggaaataat

SEQ ID NO: 52592 - DNA, 25 bp, Probe Sequence
atgtcttcagccactcacttataaa

SEQ ID NO: 52593 - DNA, 25 bp, Probe Sequence
cctctcttatgtcttcagccactca

SEQ ID NO: 52594 - DNA, 25 bp, Probe Sequence
tgtcttcagccactcacttataaag

SEQ ID NO: 52595 - DNA, 25 bp, Probe Sequence
agaactggttatgagacattggaat

SEQ ID NO: 52596 - DNA, 25 bp, Probe Sequence
attggaatacttcttgctgctacat

SEQ ID NO: 52597 - DNA, 25 bp, Probe Sequence
actggttatgagacattggaatact

SEQ ID NO: 52598 - DNA, 25 bp, Probe Sequence
gagaactggttatgagacattggaa

SEQ ID NO: 52599 - DNA, 25 bp, Probe Sequence
atgagacattggaatacttcttgct

SEQ ID NO: 52600 - DNA, 25 bp, Probe Sequence
gacattggaatacttcttgctgcta

SEQ ID NO: 52601 - DNA, 25 bp, Probe Sequence
tgagacattggaatacttcttgctg

SEQ ID NO: 52602 - DNA, 25 bp, Probe Sequence
aactggttatgagacattggaatac

SEQ ID NO: 52603 - DNA, 25 bp, Probe Sequence
tatgagacattggaatacttcttgc

SEQ ID NO: 52604 - DNA, 25 bp, Probe Sequence
catgtctcacacgctcatctatatc

SEQ ID NO: 52605 - DNA, 25 bp, Probe Sequence
cattggaatacttcttgctgctaca

SEQ ID NO: 52606 - DNA, 25 bp, Probe Sequence
acattggaatacttcttgctgctac

SEQ ID NO: 52607 - DNA, 25 bp, Probe Sequence
ctaccttaattcagcctagaagagt

SEQ ID NO: 52608 - DNA, 25 bp, Probe Sequence
tggttatgagacattggaatacttc

SEQ ID NO: 52609 - DNA, 25 bp, Probe Sequence
ctggttatgagacattggaatactt

SEQ ID NO: 52610 - DNA, 25 bp, Probe Sequence
tagaaggactctgagaagttggtag

SEQ ID NO: 52611 - DNA, 25 bp, Probe Sequence
gaactggttatgagacattggaata

SEQ ID NO: 52612 - DNA, 25 bp, Probe Sequence
tcatgtctcacacgctcatctatat

SEQ ID NO: 52613 - DNA, 25 bp, Probe Sequence
ccttaattcagcctagaagagtaca

SEQ ID NO: 52614 - DNA, 25 bp, Probe Sequence
accttaattcagcctagaagagtac

SEQ ID NO: 52615 - DNA, 25 bp, Probe Sequence
atccatcttcaacagtagtgtcttc

SEQ ID NO: 52616 - DNA, 25 bp, Probe Sequence
cagatgctacagtccaacaagaatg

SEQ ID NO: 52617 - DNA, 25 bp, Probe Sequence
ccatcttcaacagtagtgtcttcat

SEQ ID NO: 52618 - DNA, 25 bp, Probe Sequence
ctagaaggactctgagaagttggta

SEQ ID NO: 52619 - DNA, 25 bp, Probe Sequence
cttctcttacactgctacaccatta

SEQ ID NO: 52620 - DNA, 25 bp, Probe Sequence
ctcttacactgctacaccattactt

SEQ ID NO: 52621 - DNA, 25 bp, Probe Sequence
ttctcttacactgctacaccattac

SEQ ID NO: 52622 - DNA, 25 bp, Probe Sequence
tctcttacactgctacaccattact

SEQ ID NO: 52623 - DNA, 25 bp, Probe Sequence
tacttctcttacactgctacaccat

SEQ ID NO: 52624 - DNA, 25 bp, Probe Sequence
ttacttctcttacactgctacacca

SEQ ID NO: 52625 - DNA, 25 bp, Probe Sequence
acttctcttacactgctacaccatt

SEQ ID NO: 52626 - DNA, 25 bp, Probe Sequence
tctaattgaatacagcttgctcttg

SEQ ID NO: 52627 - DNA, 25 bp, Probe Sequence
gtctaattgaatacagcttgctctt

SEQ ID NO: 52628 - DNA, 25 bp, Probe Sequence
tcatacagagaatccttgatggaat

SEQ ID NO: 52629 - DNA, 25 bp, Probe Sequence
tacactgctacaccattactttctt

SEQ ID NO: 52630 - DNA, 25 bp, Probe Sequence
ttacactgctacaccattactttct

SEQ ID NO: 52631 - DNA, 25 bp, Probe Sequence
tcttacactgctacaccattacttt

SEQ ID NO: 52632 - DNA, 25 bp, Probe Sequence
tttacttctcttacactgctacacc

SEQ ID NO: 52633 - DNA, 25 bp, Probe Sequence
catacagagaatccttgatggaatt

SEQ ID NO: 52634 - DNA, 25 bp, Probe Sequence
cttacactgctacaccattactttc

SEQ ID NO: 52635 - DNA, 25 bp, Probe Sequence
cttctcagtgctctctttccaatat

SEQ ID NO: 52636 - DNA, 25 bp, Probe Sequence
tctcagtgctctctttccaatatag

SEQ ID NO: 52637 - DNA, 25 bp, Probe Sequence
ctgctacaccattactttcttgaga

SEQ ID NO: 52638 - DNA, 25 bp, Probe Sequence
actgctacaccattactttcttgag

SEQ ID NO: 52639 - DNA, 25 bp, Probe Sequence
ttctcagtgctctctttccaatata

SEQ ID NO: 52640 - DNA, 25 bp, Probe Sequence
gctacaccattactttcttgagaca

SEQ ID NO: 52641 - DNA, 25 bp, Probe Sequence
tgctacaccattactttcttgagac

SEQ ID NO: 52642 - DNA, 25 bp, Probe Sequence
tgtctaattgaatacagcttgctct

SEQ ID NO: 52643 - DNA, 25 bp, Probe Sequence
aaagacacaataaacttcctatggt

SEQ ID NO: 52644 - DNA, 25 bp, Probe Sequence
ctgaagagttcgagagatccaagag

SEQ ID NO: 52645 - DNA, 25 bp, Probe Sequence
caaagacacaataaacttcctatgg

SEQ ID NO: 52646 - DNA, 25 bp, Probe Sequence
gacacaataaacttcctatggtctg

SEQ ID NO: 52647 - DNA, 25 bp, Probe Sequence
aagacacaataaacttcctatggtc

SEQ ID NO: 52648 - DNA, 25 bp, Probe Sequence
gactgaagagttcgagagatccaag

SEQ ID NO: 52649 - DNA, 25 bp, Probe Sequence
tctcaaagacacaataaacttccta

SEQ ID NO: 52650 - DNA, 25 bp, Probe Sequence
actgaagagttcgagagatccaaga

SEQ ID NO: 52651 - DNA, 25 bp, Probe Sequence
tcaaagacacaataaacttcctatg

SEQ ID NO: 52652 - DNA, 25 bp, Probe Sequence
gaagaggagtctgcattgtagtgtc

SEQ ID NO: 52653 - DNA, 25 bp, Probe Sequence
ctcaaagacacaataaacttcctat

SEQ ID NO: 52654 - DNA, 25 bp, Probe Sequence
tgaagagttcgagagatccaagagg

SEQ ID NO: 52655 - DNA, 25 bp, Probe Sequence
aagaggagtctgcattgtagtgtct

SEQ ID NO: 52656 - DNA, 25 bp, Probe Sequence
ctatgaaaatgacaaatgagcaacg

SEQ ID NO: 52657 - DNA, 25 bp, Probe Sequence
ccgcagtttgtagtgttttatctta

SEQ ID NO: 52658 - DNA, 25 bp, Probe Sequence
gcctatgaaaatgacaaatgagcaa

SEQ ID NO: 52659 - DNA, 25 bp, Probe Sequence
cctatgaaaatgacaaatgagcaac

SEQ ID NO: 52660 - DNA, 25 bp, Probe Sequence
ctgcctatgaaaatgacaaatgagc

SEQ ID NO: 52661 - DNA, 25 bp, Probe Sequence
gctgcctatgaaaatgacaaatgag

SEQ ID NO: 52662 - DNA, 25 bp, Probe Sequence
aagagttcgagagatccaagaggag

SEQ ID NO: 52663 - DNA, 25 bp, Probe Sequence
gaagagttcgagagatccaagagga

SEQ ID NO: 52664 - DNA, 25 bp, Probe Sequence
gagtctgcattgtagtgtctcaaag

SEQ ID NO: 52665 - DNA, 25 bp, Probe Sequence
tatgaaaatgacaaatgagcaacgc

SEQ ID NO: 52666 - DNA, 25 bp, Probe Sequence
agtctgcattgtagtgtctcaaaga

SEQ ID NO: 52667 - DNA, 25 bp, Probe Sequence
ggattaggagtggaatgaggaatag

SEQ ID NO: 52668 - DNA, 25 bp, Probe Sequence
gattaggagtggaatgaggaatagt

SEQ ID NO: 52669 - DNA, 25 bp, Probe Sequence
attaggagtggaatgaggaatagtt

SEQ ID NO: 52670 - DNA, 25 bp, Probe Sequence
ttcatagccagtcaagcatagaatt

SEQ ID NO: 52671 - DNA, 25 bp, Probe Sequence
tcatagccagtcaagcatagaattg

SEQ ID NO: 52672 - DNA, 25 bp, Probe Sequence
atgtgctaataggtgccaatactgt

SEQ ID NO: 52673 - DNA, 25 bp, Probe Sequence
gccaagattctgttacctgtaatta

SEQ ID NO: 52674 - DNA, 25 bp, Probe Sequence
catgtgctaataggtgccaatactg

SEQ ID NO: 52675 - DNA, 25 bp, Probe Sequence
ggaatagtttaggaccacaagagat

SEQ ID NO: 52676 - DNA, 25 bp, Probe Sequence
atgaggaatagtttaggaccacaag

SEQ ID NO: 52677 - DNA, 25 bp, Probe Sequence
gaatgaggaatagtttaggaccaca

SEQ ID NO: 52678 - DNA, 25 bp, Probe Sequence
agtggaatgaggaatagtttaggac

SEQ ID NO: 52679 - DNA, 25 bp, Probe Sequence
tgtgctaataggtgccaatactgtg

SEQ ID NO: 52680 - DNA, 25 bp, Probe Sequence
gaggaatagtttaggaccacaagag

SEQ ID NO: 52681 - DNA, 25 bp, Probe Sequence
aatgaggaatagtttaggaccacaa

SEQ ID NO: 52682 - DNA, 25 bp, Probe Sequence
ggagtggaatgaggaatagtttagg

SEQ ID NO: 52683 - DNA, 25 bp, Probe Sequence
gagtggaatgaggaatagtttagga

SEQ ID NO: 52684 - DNA, 25 bp, Probe Sequence
aggagtggaatgaggaatagtttag

SEQ ID NO: 52685 - DNA, 25 bp, Probe Sequence
aggaatagtttaggaccacaagaga

SEQ ID NO: 52686 - DNA, 25 bp, Probe Sequence
ggaatgaggaatagtttaggaccac

SEQ ID NO: 52687 - DNA, 25 bp, Probe Sequence
gtggaatgaggaatagtttaggacc

SEQ ID NO: 52688 - DNA, 25 bp, Probe Sequence
tgaggaatagtttaggaccacaaga

SEQ ID NO: 52689 - DNA, 25 bp, Probe Sequence
ttaggagtggaatgaggaatagttt

SEQ ID NO: 52690 - DNA, 25 bp, Probe Sequence
tttcatagccagtcaagcatagaat

SEQ ID NO: 52691 - DNA, 25 bp, Probe Sequence
gaggtattagccaacacagttagat

SEQ ID NO: 52692 - DNA, 25 bp, Probe Sequence
tatagatatattccaagccgcctga

SEQ ID NO: 52693 - DNA, 25 bp, Probe Sequence
atatagatatattccaagccgcctg

SEQ ID NO: 52694 - DNA, 25 bp, Probe Sequence
catatagatatattccaagccgcct

SEQ ID NO: 52695 - DNA, 25 bp, Probe Sequence
gctcaccttgttcagaagagaataa

SEQ ID NO: 52696 - DNA, 25 bp, Probe Sequence
aggtattagccaacacagttagatc

SEQ ID NO: 52697 - DNA, 25 bp, Probe Sequence
attagccaacacagttagatcagag

SEQ ID NO: 52698 - DNA, 25 bp, Probe Sequence
ggtattagccaacacagttagatca

SEQ ID NO: 52699 - DNA, 25 bp, Probe Sequence
acatgaacagaatagcagacacaat

SEQ ID NO: 52700 - DNA, 25 bp, Probe Sequence
gtattagccaacacagttagatcag

SEQ ID NO: 52701 - DNA, 25 bp, Probe Sequence
tattagccaacacagttagatcaga

SEQ ID NO: 52702 - DNA, 25 bp, Probe Sequence
catgaacagaatagcagacacaatg

SEQ ID NO: 52703 - DNA, 25 bp, Probe Sequence
ggaggtattagccaacacagttaga

SEQ ID NO: 52704 - DNA, 25 bp, Probe Sequence
gcatatagatatattccaagccgcc

SEQ ID NO: 52705 - DNA, 25 bp, Probe Sequence
tagccaacacagttagatcagagaa

SEQ ID NO: 52706 - DNA, 25 bp, Probe Sequence
ttagccaacacagttagatcagaga

SEQ ID NO: 52707 - DNA, 25 bp, Probe Sequence
ttgacacatgaacagaatagcagac

SEQ ID NO: 52708 - DNA, 25 bp, Probe Sequence
tgctcaccttgttcagaagagaata

SEQ ID NO: 52709 - DNA, 25 bp, Probe Sequence
cacatgaacagaatagcagacacaa

SEQ ID NO: 52710 - DNA, 25 bp, Probe Sequence
gttgacacatgaacagaatagcaga

SEQ ID NO: 52711 - DNA, 25 bp, Probe Sequence
gacacatgaacagaatagcagacac

SEQ ID NO: 52712 - DNA, 25 bp, Probe Sequence
atagatatattccaagccgcctgac

SEQ ID NO: 52713 - DNA, 25 bp, Probe Sequence
atgctcaccttgttcagaagagaat

SEQ ID NO: 52714 - DNA, 25 bp, Probe Sequence
ttaccatgcactaattcaatcacag

SEQ ID NO: 52715 - DNA, 25 bp, Probe Sequence
gtatatccagcacttaacgagaagg

SEQ ID NO: 52716 - DNA, 25 bp, Probe Sequence
agtatatccagcacttaacgagaag

SEQ ID NO: 52717 - DNA, 25 bp, Probe Sequence
gagtatgatgccaagtcagatatgt

SEQ ID NO: 52718 - DNA, 25 bp, Probe Sequence
tgagtatgatgccaagtcagatatg

SEQ ID NO: 52719 - DNA, 25 bp, Probe Sequence
gacatcctacagaagaacacagact

SEQ ID NO: 52720 - DNA, 25 bp, Probe Sequence
agacatcctacagaagaacacagac

SEQ ID NO: 52721 - DNA, 25 bp, Probe Sequence
cagacatcctacagaagaacacaga

SEQ ID NO: 52722 - DNA, 25 bp, Probe Sequence
agtatgatgccaagtcagatatgta

SEQ ID NO: 52723 - DNA, 25 bp, Probe Sequence
gtatagttggtacaatgcttcgttg

SEQ ID NO: 52724 - DNA, 25 bp, Probe Sequence
acagacatcctacagaagaacacag

SEQ ID NO: 52725 - DNA, 25 bp, Probe Sequence
cacagacatcctacagaagaacaca

SEQ ID NO: 52726 - DNA, 25 bp, Probe Sequence
ggtatagttggtacaatgcttcgtt

SEQ ID NO: 52727 - DNA, 25 bp, Probe Sequence
gtatgatgccaagtcagatatgtac

SEQ ID NO: 52728 - DNA, 25 bp, Probe Sequence
cctacagatgaagataatagagcaa

SEQ ID NO: 52729 - DNA, 25 bp, Probe Sequence
ttatctgttctctccaccttcagtt

SEQ ID NO: 52730 - DNA, 25 bp, Probe Sequence
aacttggacctcatcctcaattatt

SEQ ID NO: 52731 - DNA, 25 bp, Probe Sequence
acagatgaagataatagagcaagaa

SEQ ID NO: 52732 - DNA, 25 bp, Probe Sequence
cagttggaaggatctgagtatgatg

SEQ ID NO: 52733 - DNA, 25 bp, Probe Sequence
tatatccagcacttaacgagaagga

SEQ ID NO: 52734 - DNA, 25 bp, Probe Sequence
gaacagttggaaggatctgagtatg

SEQ ID NO: 52735 - DNA, 25 bp, Probe Sequence
acagttggaaggatctgagtatgat

SEQ ID NO: 52736 - DNA, 25 bp, Probe Sequence
aacagttggaaggatctgagtatga

SEQ ID NO: 52737 - DNA, 25 bp, Probe Sequence
aaggatctgagtatgatgccaagtc

SEQ ID NO: 52738 - DNA, 25 bp, Probe Sequence
gaaggatctgagtatgatgccaagt

SEQ ID NO: 52739 - DNA, 25 bp, Probe Sequence
tgcttgctacttggacataactaat

SEQ ID NO: 52740 - DNA, 25 bp, Probe Sequence
attgcttgctacttggacataacta

SEQ ID NO: 52741 - DNA, 25 bp, Probe Sequence
tattgcttgctacttggacataact

SEQ ID NO: 52742 - DNA, 25 bp, Probe Sequence
ttgcttgctacttggacataactaa

SEQ ID NO: 52743 - DNA, 25 bp, Probe Sequence
ttactggagttaaggaggtagatga

SEQ ID NO: 52744 - DNA, 25 bp, Probe Sequence
tactggagttaaggaggtagatgac

SEQ ID NO: 52745 - DNA, 25 bp, Probe Sequence
gcttgctacttggacataactaatt

SEQ ID NO: 52746 - DNA, 25 bp, Probe Sequence
ttattgcttgctacttggacataac

SEQ ID NO: 52747 - DNA, 25 bp, Probe Sequence
atattattgcttgctacttggacat

SEQ ID NO: 52748 - DNA, 25 bp, Probe Sequence
attattgcttgctacttggacataa

SEQ ID NO: 52749 - DNA, 25 bp, Probe Sequence
gagttaaggaggtagatgacttctt

SEQ ID NO: 52750 - DNA, 25 bp, Probe Sequence
ggagttaaggaggtagatgacttct

SEQ ID NO: 52751 - DNA, 25 bp, Probe Sequence
tggagttaaggaggtagatgacttc

SEQ ID NO: 52752 - DNA, 25 bp, Probe Sequence
ctggagttaaggaggtagatgactt

SEQ ID NO: 52753 - DNA, 25 bp, Probe Sequence
tgagcaagagaagaacttccttatt

SEQ ID NO: 52754 - DNA, 25 bp, Probe Sequence
ttgagcaagagaagaacttccttat

SEQ ID NO: 52755 - DNA, 25 bp, Probe Sequence
tattattgcttgctacttggacata

SEQ ID NO: 52756 - DNA, 25 bp, Probe Sequence
cgatactacatgctcaacattgaag

SEQ ID NO: 52757 - DNA, 25 bp, Probe Sequence
actggagttaaggaggtagatgact

SEQ ID NO: 52758 - DNA, 25 bp, Probe Sequence
ctgctaaggatctcttatacagacg

SEQ ID NO: 52759 - DNA, 25 bp, Probe Sequence
ctaaggatctcttatacagacgcac

SEQ ID NO: 52760 - DNA, 25 bp, Probe Sequence
aatattattgcttgctacttggaca

SEQ ID NO: 52761 - DNA, 25 bp, Probe Sequence
tcattaccacggaagatatattagc

SEQ ID NO: 52762 - DNA, 25 bp, Probe Sequence
gagcaagagaagaacttccttatta

SEQ ID NO: 52763 - DNA, 25 bp, Probe Sequence
aagtgagagaagatgacctaagtgt

SEQ ID NO: 52764 - DNA, 25 bp, Probe Sequence
tgagagaagatgacctaagtgtgac

SEQ ID NO: 52765 - DNA, 25 bp, Probe Sequence
gtgagagaagatgacctaagtgtga

SEQ ID NO: 52766 - DNA, 25 bp, Probe Sequence
agtgagagaagatgacctaagtgtg

SEQ ID NO: 52767 - DNA, 25 bp, Probe Sequence
gagagaagatgacctaagtgtgact

SEQ ID NO: 52768 - DNA, 25 bp, Probe Sequence
agagaagatgacctaagtgtgactg

SEQ ID NO: 52769 - DNA, 25 bp, Probe Sequence
aaagtgagagaagatgacctaagtg

SEQ ID NO: 52770 - DNA, 25 bp, Probe Sequence
gagaagatgacctaagtgtgactgc

SEQ ID NO: 52771 - DNA, 25 bp, Probe Sequence
ctgttctttcctagccacctttcta

SEQ ID NO: 52772 - DNA, 25 bp, Probe Sequence
cagaagctaaagtcttgatgccatc

SEQ ID NO: 52773 - DNA, 25 bp, Probe Sequence
aaggagaaaagtgagagaagatgac

SEQ ID NO: 52774 - DNA, 25 bp, Probe Sequence
cacatctctgtcacgtccactaatc

SEQ ID NO: 52775 - DNA, 25 bp, Probe Sequence
aaaggagaaaagtgagagaagatga

SEQ ID NO: 52776 - DNA, 25 bp, Probe Sequence
gagaaaagtgagagaagatgaccta

SEQ ID NO: 52777 - DNA, 25 bp, Probe Sequence
tgttctttcctagccacctttctag

SEQ ID NO: 52778 - DNA, 25 bp, Probe Sequence
aaaagtgagagaagatgacctaagt

SEQ ID NO: 52779 - DNA, 25 bp, Probe Sequence
agaaaagtgagagaagatgacctaa

SEQ ID NO: 52780 - DNA, 25 bp, Probe Sequence
aaaaggagaaaagtgagagaagatg

SEQ ID NO: 52781 - DNA, 25 bp, Probe Sequence
caaaaggagaaaagtgagagaagat

SEQ ID NO: 52782 - DNA, 25 bp, Probe Sequence
gaaaagtgagagaagatgacctaag

SEQ ID NO: 52783 - DNA, 25 bp, Probe Sequence
gcaaaaggagaaaagtgagagaaga

SEQ ID NO: 52784 - DNA, 25 bp, Probe Sequence
tcacatctctgtcacgtccactaat

SEQ ID NO: 52785 - DNA, 25 bp, Probe Sequence
attcacatctctgtcacgtccacta

SEQ ID NO: 52786 - DNA, 25 bp, Probe Sequence
agaagatgacctaagtgtgactgca

SEQ ID NO: 52787 - DNA, 25 bp, Probe Sequence
ggaataaggaatgaatcaactgacc

SEQ ID NO: 52788 - DNA, 25 bp, Probe Sequence
aacctgagcagtgtctatgtattaa

SEQ ID NO: 52789 - DNA, 25 bp, Probe Sequence
tggaataaggaatgaatcaactgac

SEQ ID NO: 52790 - DNA, 25 bp, Probe Sequence
ctggaataaggaatgaatcaactga

SEQ ID NO: 52791 - DNA, 25 bp, Probe Sequence
tctggaataaggaatgaatcaactg

SEQ ID NO: 52792 - DNA, 25 bp, Probe Sequence
aattcatagcaggtgccttattctt

SEQ ID NO: 52793 - DNA, 25 bp, Probe Sequence
ttctggaataaggaatgaatcaact

SEQ ID NO: 52794 - DNA, 25 bp, Probe Sequence
agtgtctatgtattaatgcgttgga

SEQ ID NO: 52795 - DNA, 25 bp, Probe Sequence
cagtgtctatgtattaatgcgttgg

SEQ ID NO: 52796 - DNA, 25 bp, Probe Sequence
gtgtctatgtattaatgcgttggaa

SEQ ID NO: 52797 - DNA, 25 bp, Probe Sequence
acctgagcagtgtctatgtattaat

SEQ ID NO: 52798 - DNA, 25 bp, Probe Sequence
cctgagcagtgtctatgtattaatg

SEQ ID NO: 52799 - DNA, 25 bp, Probe Sequence
ccagttaatcagtctctgtacttgt

SEQ ID NO: 52800 - DNA, 25 bp, Probe Sequence
aatctgctacctagtctatacacag

SEQ ID NO: 52801 - DNA, 25 bp, Probe Sequence
gaataaggaatgaatcaactgacct

SEQ ID NO: 52802 - DNA, 25 bp, Probe Sequence
ctacctagtctatacacagcgtgaa

SEQ ID NO: 52803 - DNA, 25 bp, Probe Sequence
tacctagtctatacacagcgtgaac

SEQ ID NO: 52804 - DNA, 25 bp, Probe Sequence
atcagtctttagtcttccctttgtt

SEQ ID NO: 52805 - DNA, 25 bp, Probe Sequence
gtcagggaaggtttgtttatgttac

SEQ ID NO: 52806 - DNA, 25 bp, Probe Sequence
agtcagggaaggtttgtttatgtta

SEQ ID NO: 52807 - DNA, 25 bp, Probe Sequence
gagtgagtatagtaacccaagatgc

SEQ ID NO: 52808 - DNA, 25 bp, Probe Sequence
cagttaatcagtctctgtacttgtt

SEQ ID NO: 52809 - DNA, 25 bp, Probe Sequence
atttggctttaagttgttgtttgtg

SEQ ID NO: 52810 - DNA, 25 bp, Probe Sequence
tcagtctttagtcttccctttgtta

SEQ ID NO: 52811 - DNA, 25 bp, Probe Sequence
ccaacctaacaagaattaagcagag

SEQ ID NO: 52812 - DNA, 25 bp, Probe Sequence
accaacctaacaagaattaagcaga

SEQ ID NO: 52813 - DNA, 25 bp, Probe Sequence
aaccaacctaacaagaattaagcag

SEQ ID NO: 52814 - DNA, 25 bp, Probe Sequence
caacctaacaagaattaagcagagt

SEQ ID NO: 52815 - DNA, 25 bp, Probe Sequence
cctaacaagaattaagcagagttgg

SEQ ID NO: 52816 - DNA, 25 bp, Probe Sequence
acctaacaagaattaagcagagttg

SEQ ID NO: 52817 - DNA, 25 bp, Probe Sequence
aagttgatgactctcgtgaacatag

SEQ ID NO: 52818 - DNA, 25 bp, Probe Sequence
gaagttgatgactctcgtgaacata

SEQ ID NO: 52819 - DNA, 25 bp, Probe Sequence
gaagcattcattaccatctggactt

SEQ ID NO: 52820 - DNA, 25 bp, Probe Sequence
aacctaacaagaattaagcagagtt

SEQ ID NO: 52821 - DNA, 25 bp, Probe Sequence
aagcattcattaccatctggacttg

SEQ ID NO: 52822 - DNA, 25 bp, Probe Sequence
tggaccagttattctagcagatgaa

SEQ ID NO: 52823 - DNA, 25 bp, Probe Sequence
aagtggaccagttattctagcagat

SEQ ID NO: 52824 - DNA, 25 bp, Probe Sequence
tagtaatggagaagttgatgactct

SEQ ID NO: 52825 - DNA, 25 bp, Probe Sequence
gtggaccagttattctagcagatga

SEQ ID NO: 52826 - DNA, 25 bp, Probe Sequence
agtggaccagttattctagcagatg

SEQ ID NO: 52827 - DNA, 25 bp, Probe Sequence
ctagtaatggagaagttgatgactc

SEQ ID NO: 52828 - DNA, 25 bp, Probe Sequence
agaagttgatgactctcgtgaacat

SEQ ID NO: 52829 - DNA, 25 bp, Probe Sequence
aagaactgtggaccttgaacttgaa

SEQ ID NO: 52830 - DNA, 25 bp, Probe Sequence
agtatgaaagtgccaggattgaata

SEQ ID NO: 52831 - DNA, 25 bp, Probe Sequence
gaaagtgccaggattgaatatgatg

SEQ ID NO: 52832 - DNA, 25 bp, Probe Sequence
tgaaagtgccaggattgaatatgat

SEQ ID NO: 52833 - DNA, 25 bp, Probe Sequence
atgaaagtgccaggattgaatatga

SEQ ID NO: 52834 - DNA, 25 bp, Probe Sequence
cttgaacttgaagctcagattgata

SEQ ID NO: 52835 - DNA, 25 bp, Probe Sequence
aatatgacattcttggtgacagtgg

SEQ ID NO: 52836 - DNA, 25 bp, Probe Sequence
caatatgacattcttggtgacagtg

SEQ ID NO: 52837 - DNA, 25 bp, Probe Sequence
tagcaatatgacattcttggtgaca

SEQ ID NO: 52838 - DNA, 25 bp, Probe Sequence
ttagcaatatgacattcttggtgac

SEQ ID NO: 52839 - DNA, 25 bp, Probe Sequence
atatgacattcttggtgacagtgga

SEQ ID NO: 52840 - DNA, 25 bp, Probe Sequence
agcaatatgacattcttggtgacag

SEQ ID NO: 52841 - DNA, 25 bp, Probe Sequence
tatcaatgttctcctccatacagag

SEQ ID NO: 52842 - DNA, 25 bp, Probe Sequence
ctatcaatgttctcctccatacaga

SEQ ID NO: 52843 - DNA, 25 bp, Probe Sequence
tctatcaatgttctcctccatacag

SEQ ID NO: 52844 - DNA, 25 bp, Probe Sequence
gcaatatgacattcttggtgacagt

SEQ ID NO: 52845 - DNA, 25 bp, Probe Sequence
tatgacattcttggtgacagtggaa

SEQ ID NO: 52846 - DNA, 25 bp, Probe Sequence
atcaatgttctcctccatacagagt

SEQ ID NO: 52847 - DNA, 25 bp, Probe Sequence
atctatcaatgttctcctccataca

SEQ ID NO: 52848 - DNA, 25 bp, Probe Sequence
aatgttctcctccatacagagtctc

SEQ ID NO: 52849 - DNA, 25 bp, Probe Sequence
caatgttctcctccatacagagtct

SEQ ID NO: 52850 - DNA, 25 bp, Probe Sequence
tcaatgttctcctccatacagagtc

SEQ ID NO: 52851 - DNA, 25 bp, Probe Sequence
gatctatcaatgttctcctccatac

SEQ ID NO: 52852 - DNA, 25 bp, Probe Sequence
gttctcctccatacagagtctcttc

SEQ ID NO: 52853 - DNA, 25 bp, Probe Sequence
ggatctatcaatgttctcctccata

SEQ ID NO: 52854 - DNA, 25 bp, Probe Sequence
accagcacaaataaagaatcagaaa

SEQ ID NO: 52855 - DNA, 25 bp, Probe Sequence
ccaacgaaactgagataatgaaaga

SEQ ID NO: 52856 - DNA, 25 bp, Probe Sequence
tccaacgaaactgagataatgaaag

SEQ ID NO: 52857 - DNA, 25 bp, Probe Sequence
cttccaacgaaactgagataatgaa

SEQ ID NO: 52858 - DNA, 25 bp, Probe Sequence
tcttccaacgaaactgagataatga

SEQ ID NO: 52859 - DNA, 25 bp, Probe Sequence
attcattgatgactacctactgagc

SEQ ID NO: 52860 - DNA, 25 bp, Probe Sequence
tcttcacattcattgatgactacct

SEQ ID NO: 52861 - DNA, 25 bp, Probe Sequence
cacattcattgatgactacctactg

SEQ ID NO: 52862 - DNA, 25 bp, Probe Sequence
acattcattgatgactacctactga

SEQ ID NO: 52863 - DNA, 25 bp, Probe Sequence
tcacattcattgatgactacctact

SEQ ID NO: 52864 - DNA, 25 bp, Probe Sequence
atcttcacattcattgatgactacc

SEQ ID NO: 52865 - DNA, 25 bp, Probe Sequence
tcattgatgactacctactgagcaa

SEQ ID NO: 52866 - DNA, 25 bp, Probe Sequence
ttcattgatgactacctactgagca

SEQ ID NO: 52867 - DNA, 25 bp, Probe Sequence
cattcattgatgactacctactgag

SEQ ID NO: 52868 - DNA, 25 bp, Probe Sequence
ttcacattcattgatgactacctac

SEQ ID NO: 52869 - DNA, 25 bp, Probe Sequence
cttcacattcattgatgactaccta

SEQ ID NO: 52870 - DNA, 25 bp, Probe Sequence
attgatgactacctactgagcaatc

SEQ ID NO: 52871 - DNA, 25 bp, Probe Sequence
cattgatgactacctactgagcaat

SEQ ID NO: 52872 - DNA, 25 bp, Probe Sequence
cgaggaaatcttcacattcattgat

SEQ ID NO: 52873 - DNA, 25 bp, Probe Sequence
aatcttcacattcattgatgactac

SEQ ID NO: 52874 - DNA, 25 bp, Probe Sequence
actgtgtaatagtttccctagaagc

SEQ ID NO: 52875 - DNA, 25 bp, Probe Sequence
ccgaggaaatcttcacattcattga

SEQ ID NO: 52876 - DNA, 25 bp, Probe Sequence
gtagaagttcttcctttcctaaccc

SEQ ID NO: 52877 - DNA, 25 bp, Probe Sequence
gggtagaagttcttcctttcctaac

SEQ ID NO: 52878 - DNA, 25 bp, Probe Sequence
gaggaaatcttcacattcattgatg

SEQ ID NO: 52879 - DNA, 25 bp, Probe Sequence
ttgatgactacctactgagcaatca

SEQ ID NO: 52880 - DNA, 25 bp, Probe Sequence
ggaaatcttcacattcattgatgac

SEQ ID NO: 52881 - DNA, 25 bp, Probe Sequence
aggaaatcttcacattcattgatga

SEQ ID NO: 52882 - DNA, 25 bp, Probe Sequence
cccgaggaaatcttcacattcattg

SEQ ID NO: 52883 - DNA, 25 bp, Probe Sequence
aaaccaaacaggacatccagatcat

SEQ ID NO: 52884 - DNA, 25 bp, Probe Sequence
tggagaggatatgacatgaaataaa

SEQ ID NO: 52885 - DNA, 25 bp, Probe Sequence
tttctcaagaatgcccatctgtgaa

SEQ ID NO: 52886 - DNA, 25 bp, Probe Sequence
atggagaggatatgacatgaaataa

SEQ ID NO: 52887 - DNA, 25 bp, Probe Sequence
ctttctcaagaatgcccatctgtga

SEQ ID NO: 52888 - DNA, 25 bp, Probe Sequence
catgaaagatggcaaatgctgatcc

SEQ ID NO: 52889 - DNA, 25 bp, Probe Sequence
aaccaaacaggacatccagatcatg

SEQ ID NO: 52890 - DNA, 25 bp, Probe Sequence
atgaaataaaagatccagcccaact

SEQ ID NO: 52891 - DNA, 25 bp, Probe Sequence
ttctcaagaatgcccatctgtgaac

SEQ ID NO: 52892 - DNA, 25 bp, Probe Sequence
atgacatgaaataaaagatccagcc

SEQ ID NO: 52893 - DNA, 25 bp, Probe Sequence
catgaaataaaagatccagcccaac

SEQ ID NO: 52894 - DNA, 25 bp, Probe Sequence
acatgaaataaaagatccagcccaa

SEQ ID NO: 52895 - DNA, 25 bp, Probe Sequence
gacatgaaataaaagatccagccca

SEQ ID NO: 52896 - DNA, 25 bp, Probe Sequence
tgacatgaaataaaagatccagccc

SEQ ID NO: 52897 - DNA, 25 bp, Probe Sequence
aaacaggacatccagatcatgaaag

SEQ ID NO: 52898 - DNA, 25 bp, Probe Sequence
gcatggagaggatatgacatgaaat

SEQ ID NO: 52899 - DNA, 25 bp, Probe Sequence
atgaaagatggcaaatgctgatccc

SEQ ID NO: 52900 - DNA, 25 bp, Probe Sequence
ataaaagatccagcccaactgaaaa

SEQ ID NO: 52901 - DNA, 25 bp, Probe Sequence
aataaaagatccagcccaactgaaa

SEQ ID NO: 52902 - DNA, 25 bp, Probe Sequence
aaataaaagatccagcccaactgaa

SEQ ID NO: 52903 - DNA, 25 bp, Probe Sequence
cctttctcaagaatgcccatctgtg

SEQ ID NO: 52904 - DNA, 25 bp, Probe Sequence
caaacaggacatccagatcatgaaa

SEQ ID NO: 52905 - DNA, 25 bp, Probe Sequence
gaaataaaagatccagcccaactga

SEQ ID NO: 52906 - DNA, 25 bp, Probe Sequence
acaggacatccagatcatgaaagat

SEQ ID NO: 52907 - DNA, 25 bp, Probe Sequence
caacttagaatcagaaccacaggac

SEQ ID NO: 52908 - DNA, 25 bp, Probe Sequence
aacttagaatcagaaccacaggacg

SEQ ID NO: 52909 - DNA, 25 bp, Probe Sequence
tgtattcaaacaattatgccactcg

SEQ ID NO: 52910 - DNA, 25 bp, Probe Sequence
catgctcagtttaatacacctatgc

SEQ ID NO: 52911 - DNA, 25 bp, Probe Sequence
acatgctcagtttaatacacctatg

SEQ ID NO: 52912 - DNA, 25 bp, Probe Sequence
acctatgcagttgtactcagatgac

SEQ ID NO: 52913 - DNA, 25 bp, Probe Sequence
cacctatgcagttgtactcagatga

SEQ ID NO: 52914 - DNA, 25 bp, Probe Sequence
gtacatgctcagtttaatacaccta

SEQ ID NO: 52915 - DNA, 25 bp, Probe Sequence
gtattcaaacaattatgccactcga

SEQ ID NO: 52916 - DNA, 25 bp, Probe Sequence
attcaaacaattatgccactcgatg

SEQ ID NO: 52917 - DNA, 25 bp, Probe Sequence
cctatgcagttgtactcagatgaca

SEQ ID NO: 52918 - DNA, 25 bp, Probe Sequence
tattcaaacaattatgccactcgat

SEQ ID NO: 52919 - DNA, 25 bp, Probe Sequence
aatacacctatgcagttgtactcag

SEQ ID NO: 52920 - DNA, 25 bp, Probe Sequence
taatacacctatgcagttgtactca

SEQ ID NO: 52921 - DNA, 25 bp, Probe Sequence
acacctatgcagttgtactcagatg

SEQ ID NO: 52922 - DNA, 25 bp, Probe Sequence
tacacctatgcagttgtactcagat

SEQ ID NO: 52923 - DNA, 25 bp, Probe Sequence
atacacctatgcagttgtactcaga

SEQ ID NO: 52924 - DNA, 25 bp, Probe Sequence
tgtactcagatgacaatattatgga

SEQ ID NO: 52925 - DNA, 25 bp, Probe Sequence
acttagaatcagaaccacaggacgg

SEQ ID NO: 52926 - DNA, 25 bp, Probe Sequence
ccactcgatgcaacaaacataataa

SEQ ID NO: 52927 - DNA, 25 bp, Probe Sequence
tcagtttaatacacctatgcagttg

SEQ ID NO: 52928 - DNA, 25 bp, Probe Sequence
gctcagtttaatacacctatgcagt

SEQ ID NO: 52929 - DNA, 25 bp, Probe Sequence
gaacttcctggtgtgaagattgtac

SEQ ID NO: 52930 - DNA, 25 bp, Probe Sequence
ctcagtttaatacacctatgcagtt

SEQ ID NO: 52931 - DNA, 25 bp, Probe Sequence
caacttagaatcagaaccacaggac

SEQ ID NO: 52932 - DNA, 25 bp, Probe Sequence
aacttagaatcagaaccacaggacg

SEQ ID NO: 52933 - DNA, 25 bp, Probe Sequence
tgtattcaaacaattatgccactcg

SEQ ID NO: 52934 - DNA, 25 bp, Probe Sequence
catgctcagtttaatacacctatgc

SEQ ID NO: 52935 - DNA, 25 bp, Probe Sequence
acatgctcagtttaatacacctatg

SEQ ID NO: 52936 - DNA, 25 bp, Probe Sequence
acctatgcagttgtactcagatgac

SEQ ID NO: 52937 - DNA, 25 bp, Probe Sequence
cacctatgcagttgtactcagatga

SEQ ID NO: 52938 - DNA, 25 bp, Probe Sequence
gtacatgctcagtttaatacaccta

SEQ ID NO: 52939 - DNA, 25 bp, Probe Sequence
gtattcaaacaattatgccactcga

SEQ ID NO: 52940 - DNA, 25 bp, Probe Sequence
attcaaacaattatgccactcgatg

SEQ ID NO: 52941 - DNA, 25 bp, Probe Sequence
cctatgcagttgtactcagatgaca

SEQ ID NO: 52942 - DNA, 25 bp, Probe Sequence
tattcaaacaattatgccactcgat

SEQ ID NO: 52943 - DNA, 25 bp, Probe Sequence
aatacacctatgcagttgtactcag

SEQ ID NO: 52944 - DNA, 25 bp, Probe Sequence
taatacacctatgcagttgtactca

SEQ ID NO: 52945 - DNA, 25 bp, Probe Sequence
acacctatgcagttgtactcagatg

SEQ ID NO: 52946 - DNA, 25 bp, Probe Sequence
tacacctatgcagttgtactcagat

SEQ ID NO: 52947 - DNA, 25 bp, Probe Sequence
atacacctatgcagttgtactcaga

SEQ ID NO: 52948 - DNA, 25 bp, Probe Sequence
tgtactcagatgacaatattatgga

SEQ ID NO: 52949 - DNA, 25 bp, Probe Sequence
acttagaatcagaaccacaggacgg

SEQ ID NO: 52950 - DNA, 25 bp, Probe Sequence
ccactcgatgcaacaaacataataa

SEQ ID NO: 52951 - DNA, 25 bp, Probe Sequence
tcagtttaatacacctatgcagttg

SEQ ID NO: 52952 - DNA, 25 bp, Probe Sequence
gctcagtttaatacacctatgcagt

SEQ ID NO: 52953 - DNA, 25 bp, Probe Sequence
gaacttcctggtgtgaagattgtac

SEQ ID NO: 52954 - DNA, 25 bp, Probe Sequence
ctcagtttaatacacctatgcagtt

SEQ ID NO: 52955 - DNA, 25 bp, Probe Sequence
cctatacacacatctccttcatcat

SEQ ID NO: 52956 - DNA, 25 bp, Probe Sequence
atacacacatctccttcatcatcat

SEQ ID NO: 52957 - DNA, 25 bp, Probe Sequence
acacacatctccttcatcatcatat

SEQ ID NO: 52958 - DNA, 25 bp, Probe Sequence
tcctatacacacatctccttcatca

SEQ ID NO: 52959 - DNA, 25 bp, Probe Sequence
atcctatacacacatctccttcatc

SEQ ID NO: 52960 - DNA, 25 bp, Probe Sequence
tacacacatctccttcatcatcata

SEQ ID NO: 52961 - DNA, 25 bp, Probe Sequence
tatacacacatctccttcatcatca

SEQ ID NO: 52962 - DNA, 25 bp, Probe Sequence
ctatacacacatctccttcatcatc

SEQ ID NO: 52963 - DNA, 25 bp, Probe Sequence
atgttattcctctgtgttcacttcg

SEQ ID NO: 52964 - DNA, 25 bp, Probe Sequence
atgtgatgaacctactcaatgtgat

SEQ ID NO: 52965 - DNA, 25 bp, Probe Sequence
tgtgatgaacctactcaatgtgata

SEQ ID NO: 52966 - DNA, 25 bp, Probe Sequence
gatgtgatgaacctactcaatgtga

SEQ ID NO: 52967 - DNA, 25 bp, Probe Sequence
caagaaccaagaactctaactgtcc

SEQ ID NO: 52968 - DNA, 25 bp, Probe Sequence
ggacaagaaccaagaactctaactg

SEQ ID NO: 52969 - DNA, 25 bp, Probe Sequence
caggacaagaaccaagaactctaac

SEQ ID NO: 52970 - DNA, 25 bp, Probe Sequence
tatcctatacacacatctccttcat

SEQ ID NO: 52971 - DNA, 25 bp, Probe Sequence
tgatgtgatgaacctactcaatgtg

SEQ ID NO: 52972 - DNA, 25 bp, Probe Sequence
tatgttattcctctgtgttcacttc

SEQ ID NO: 52973 - DNA, 25 bp, Probe Sequence
aggacaagaaccaagaactctaact

SEQ ID NO: 52974 - DNA, 25 bp, Probe Sequence
atatcctatacacacatctccttca

SEQ ID NO: 52975 - DNA, 25 bp, Probe Sequence
ttgagaagtctacattgcttacatt

SEQ ID NO: 52976 - DNA, 25 bp, Probe Sequence
acaagaaccaagaactctaactgtc

SEQ ID NO: 52977 - DNA, 25 bp, Probe Sequence
gacaagaaccaagaactctaactgt

SEQ ID NO: 52978 - DNA, 25 bp, Probe Sequence
cacacatctccttcatcatcatata

SEQ ID NO: 52979 - DNA, 25 bp, Probe Sequence
tggttgtacattttattttgaaagg

SEQ ID NO: 52980 - DNA, 25 bp, Probe Sequence
ggttgtacattttattttgaaagga

SEQ ID NO: 52981 - DNA, 25 bp, Probe Sequence
ttggttgtacattttattttgaaag

SEQ ID NO: 52982 - DNA, 25 bp, Probe Sequence
gttgtacattttattttgaaaggaa

SEQ ID NO: 52983 - DNA, 25 bp, Probe Sequence
ttactgaagagcaatagccacttga

SEQ ID NO: 52984 - DNA, 25 bp, Probe Sequence
gttactgaagagcaatagccacttg

SEQ ID NO: 52985 - DNA, 25 bp, Probe Sequence
cagagaacagcattgacttcatcag

SEQ ID NO: 52986 - DNA, 25 bp, Probe Sequence
cagtatcatcagctccttcttacag

SEQ ID NO: 52987 - DNA, 25 bp, Probe Sequence
gtatcatcagctccttcttacagtg

SEQ ID NO: 52988 - DNA, 25 bp, Probe Sequence
agtatcatcagctccttcttacagt

SEQ ID NO: 52989 - DNA, 25 bp, Probe Sequence
tactgaagagcaatagccacttgag

SEQ ID NO: 52990 - DNA, 25 bp, Probe Sequence
ggaatcagatgaaatggagaacttg

SEQ ID NO: 52991 - DNA, 25 bp, Probe Sequence
tggaatcagatgaaatggagaactt

SEQ ID NO: 52992 - DNA, 25 bp, Probe Sequence
ccagtatcatcagctccttcttaca

SEQ ID NO: 52993 - DNA, 25 bp, Probe Sequence
gaatcagatgaaatggagaacttgc

SEQ ID NO: 52994 - DNA, 25 bp, Probe Sequence
ggttactgaagagcaatagccactt

SEQ ID NO: 52995 - DNA, 25 bp, Probe Sequence
aatcagatgaaatggagaacttgct

SEQ ID NO: 52996 - DNA, 25 bp, Probe Sequence
gaggttactgaagagcaatagccac

SEQ ID NO: 52997 - DNA, 25 bp, Probe Sequence
tatcatcagctccttcttacagtgc

SEQ ID NO: 52998 - DNA, 25 bp, Probe Sequence
agaggttactgaagagcaatagcca

SEQ ID NO: 52999 - DNA, 25 bp, Probe Sequence
atgaaatggagaacttgctgaccta

SEQ ID NO: 53000 - DNA, 25 bp, Probe Sequence
aggttactgaagagcaatagccact

SEQ ID NO: 53001 - DNA, 25 bp, Probe Sequence
ctggaatcagatgaaatggagaact

SEQ ID NO: 53002 - DNA, 25 bp, Probe Sequence
cagaggttactgaagagcaatagcc

SEQ ID NO: 53003 - DNA, 25 bp, Probe Sequence
agagaacagcattgacttcatcagc

SEQ ID NO: 53004 - DNA, 25 bp, Probe Sequence
gccagtatcatcagctccttcttac

SEQ ID NO: 53005 - DNA, 25 bp, Probe Sequence
atcagatgaaatggagaacttgctg

SEQ ID NO: 53006 - DNA, 25 bp, Probe Sequence
gatggtggataaacttatcttgctg

SEQ ID NO: 53007 - DNA, 25 bp, Probe Sequence
aagaagaacgagtatggattaccag

SEQ ID NO: 53008 - DNA, 25 bp, Probe Sequence
gagataccacaaagaagaacgagta

SEQ ID NO: 53009 - DNA, 25 bp, Probe Sequence
caaagaagaacgagtatggattacc

SEQ ID NO: 53010 - DNA, 25 bp, Probe Sequence
acttctttgactgtcttaactggag

SEQ ID NO: 53011 - DNA, 25 bp, Probe Sequence
cacaaagaagaacgagtatggatta

SEQ ID NO: 53012 - DNA, 25 bp, Probe Sequence
ctttgactgtcttaactggaggaaa

SEQ ID NO: 53013 - DNA, 25 bp, Probe Sequence
tacttctttgactgtcttaactgga

SEQ ID NO: 53014 - DNA, 25 bp, Probe Sequence
acaaagaagaacgagtatggattac

SEQ ID NO: 53015 - DNA, 25 bp, Probe Sequence
agaagaacgagtatggattaccagg

SEQ ID NO: 53016 - DNA, 25 bp, Probe Sequence
cttctttgactgtcttaactggagg

SEQ ID NO: 53017 - DNA, 25 bp, Probe Sequence
tttgactgtcttaactggaggaaag

SEQ ID NO: 53018 - DNA, 25 bp, Probe Sequence
tctttgactgtcttaactggaggaa

SEQ ID NO: 53019 - DNA, 25 bp, Probe Sequence
ttctttgactgtcttaactggagga

SEQ ID NO: 53020 - DNA, 25 bp, Probe Sequence
ttacttctttgactgtcttaactgg

SEQ ID NO: 53021 - DNA, 25 bp, Probe Sequence
gaatatgacaaattagaagaacggc

SEQ ID NO: 53022 - DNA, 25 bp, Probe Sequence
ttaaccgtgattggagataccacaa

SEQ ID NO: 53023 - DNA, 25 bp, Probe Sequence
gactgtcttaactggaggaaagtag

SEQ ID NO: 53024 - DNA, 25 bp, Probe Sequence
tgactgtcttaactggaggaaagta

SEQ ID NO: 53025 - DNA, 25 bp, Probe Sequence
ggaatatgacaaattagaagaacgg

SEQ ID NO: 53026 - DNA, 25 bp, Probe Sequence
ttgactgtcttaactggaggaaagt

SEQ ID NO: 53027 - DNA, 25 bp, Probe Sequence
gggaacatattacttctttgactgt

SEQ ID NO: 53028 - DNA, 25 bp, Probe Sequence
gataccacaaagaagaacgagtatg

SEQ ID NO: 53029 - DNA, 25 bp, Probe Sequence
agataccacaaagaagaacgagtat

SEQ ID NO: 53030 - DNA, 25 bp, Probe Sequence
ggagataccacaaagaagaacgagt

SEQ ID NO: 53031 - DNA, 25 bp, Probe Sequence
catatctaagtcagcatcggagaat

SEQ ID NO: 53032 - DNA, 25 bp, Probe Sequence
atatctaagtcagcatcggagaatt

SEQ ID NO: 53033 - DNA, 25 bp, Probe Sequence
tcatatctaagtcagcatcggagaa

SEQ ID NO: 53034 - DNA, 25 bp, Probe Sequence
tataactcacatcttgttgtccacc

SEQ ID NO: 53035 - DNA, 25 bp, Probe Sequence
catcttgttcagcatcagaggattc

SEQ ID NO: 53036 - DNA, 25 bp, Probe Sequence
ctcatatctaagtcagcatcggaga

SEQ ID NO: 53037 - DNA, 25 bp, Probe Sequence
atcttgttcagcatcagaggattca

SEQ ID NO: 53038 - DNA, 25 bp, Probe Sequence
tcatcttgttcagcatcagaggatt

SEQ ID NO: 53039 - DNA, 25 bp, Probe Sequence
ctcattagacatcggagagttcatg

SEQ ID NO: 53040 - DNA, 25 bp, Probe Sequence
gctcattagacatcggagagttcat

SEQ ID NO: 53041 - DNA, 25 bp, Probe Sequence
atcagaggattcactcaggagagaa

SEQ ID NO: 53042 - DNA, 25 bp, Probe Sequence
ttataactcacatcttgttgtccac

SEQ ID NO: 53043 - DNA, 25 bp, Probe Sequence
ggagagaaaccctataagtgtagtg

SEQ ID NO: 53044 - DNA, 25 bp, Probe Sequence
tggagagaaaccctataagtgtagt

SEQ ID NO: 53045 - DNA, 25 bp, Probe Sequence
ataactcacatcttgttgtccacca

SEQ ID NO: 53046 - DNA, 25 bp, Probe Sequence
ctggagagaaaccctataagtgtag

SEQ ID NO: 53047 - DNA, 25 bp, Probe Sequence
cttgttcagcatcagaggattcact

SEQ ID NO: 53048 - DNA, 25 bp, Probe Sequence
ctatgagtgtaatgagtgtgggaag

SEQ ID NO: 53049 - DNA, 25 bp, Probe Sequence
agagaaaccctataagtgtagtgac

SEQ ID NO: 53050 - DNA, 25 bp, Probe Sequence
ttgttgtccaccagagagttcattc

SEQ ID NO: 53051 - DNA, 25 bp, Probe Sequence
cttgttgtccaccagagagttcatt

SEQ ID NO: 53052 - DNA, 25 bp, Probe Sequence
ctcatcttgttcagcatcagaggat

SEQ ID NO: 53053 - DNA, 25 bp, Probe Sequence
gagagaaaccctataagtgtagtga

SEQ ID NO: 53054 - DNA, 25 bp, Probe Sequence
aattctacatcggtctaatctactt

SEQ ID NO: 53055 - DNA, 25 bp, Probe Sequence
gtagatggcagtatgacaattcttg

SEQ ID NO: 53056 - DNA, 25 bp, Probe Sequence
cagtcacacaatataacaagaatgg

SEQ ID NO: 53057 - DNA, 25 bp, Probe Sequence
tgtagatggcagtatgacaattctt

SEQ ID NO: 53058 - DNA, 25 bp, Probe Sequence
ctgtagatggcagtatgacaattct

SEQ ID NO: 53059 - DNA, 25 bp, Probe Sequence
tctgtagatggcagtatgacaattc

SEQ ID NO: 53060 - DNA, 25 bp, Probe Sequence
gtctgtagatggcagtatgacaatt

SEQ ID NO: 53061 - DNA, 25 bp, Probe Sequence
acagtcacacaatataacaagaatg

SEQ ID NO: 53062 - DNA, 25 bp, Probe Sequence
tactaatgatattgagaagcctagc

SEQ ID NO: 53063 - DNA, 25 bp, Probe Sequence
tctacagtcacacaatataacaaga

SEQ ID NO: 53064 - DNA, 25 bp, Probe Sequence
cctactcattctcatctttaagcca

SEQ ID NO: 53065 - DNA, 25 bp, Probe Sequence
gcatcaaatctacagtcacacaata

SEQ ID NO: 53066 - DNA, 25 bp, Probe Sequence
agcctactcattctcatctttaagc

SEQ ID NO: 53067 - DNA, 25 bp, Probe Sequence
cacagaaattcagcaccaagttatt

SEQ ID NO: 53068 - DNA, 25 bp, Probe Sequence
gtcacacaatataacaagaatggga

SEQ ID NO: 53069 - DNA, 25 bp, Probe Sequence
agtcacacaatataacaagaatggg

SEQ ID NO: 53070 - DNA, 25 bp, Probe Sequence
ctactcattctcatctttaagccag

SEQ ID NO: 53071 - DNA, 25 bp, Probe Sequence
acagaaattcagcaccaagttattc

SEQ ID NO: 53072 - DNA, 25 bp, Probe Sequence
tcacagaaattcagcaccaagttat

SEQ ID NO: 53073 - DNA, 25 bp, Probe Sequence
cagaaattcagcaccaagttattcc

SEQ ID NO: 53074 - DNA, 25 bp, Probe Sequence
gcctactcattctcatctttaagcc

SEQ ID NO: 53075 - DNA, 25 bp, Probe Sequence
ctacagtcacacaatataacaagaa

SEQ ID NO: 53076 - DNA, 25 bp, Probe Sequence
tactcattctcatctttaagccaga

SEQ ID NO: 53077 - DNA, 25 bp, Probe Sequence
ctgggctagatacatcacattaaag

SEQ ID NO: 53078 - DNA, 25 bp, Probe Sequence
attgtgtgcatgaggatcagaatag

SEQ ID NO: 53079 - DNA, 25 bp, Probe Sequence
aagacagaccaatcaacttcacaca

SEQ ID NO: 53080 - DNA, 25 bp, Probe Sequence
caatcaacttcacacagcaacacat

SEQ ID NO: 53081 - DNA, 25 bp, Probe Sequence
attaccaaagacagaccaatcaact

SEQ ID NO: 53082 - DNA, 25 bp, Probe Sequence
gaccattacacgcaaagatattcaa

SEQ ID NO: 53083 - DNA, 25 bp, Probe Sequence
ctgaccattacacgcaaagatattc

SEQ ID NO: 53084 - DNA, 25 bp, Probe Sequence
gcaatacctaaagcaagaaagcatt

SEQ ID NO: 53085 - DNA, 25 bp, Probe Sequence
accattacacgcaaagatattcaaa

SEQ ID NO: 53086 - DNA, 25 bp, Probe Sequence
agacagaccaatcaacttcacacag

SEQ ID NO: 53087 - DNA, 25 bp, Probe Sequence
ccattacacgcaaagatattcaaac

SEQ ID NO: 53088 - DNA, 25 bp, Probe Sequence
tattaccaaagacagaccaatcaac

SEQ ID NO: 53089 - DNA, 25 bp, Probe Sequence
gtattaccaaagacagaccaatcaa

SEQ ID NO: 53090 - DNA, 25 bp, Probe Sequence
ttaccaaagacagaccaatcaactt

SEQ ID NO: 53091 - DNA, 25 bp, Probe Sequence
taccaaagacagaccaatcaacttc

SEQ ID NO: 53092 - DNA, 25 bp, Probe Sequence
taaagcaagaaagcattgacaagaa

SEQ ID NO: 53093 - DNA, 25 bp, Probe Sequence
atacctaaagcaagaaagcattgac

SEQ ID NO: 53094 - DNA, 25 bp, Probe Sequence
atatgctgactgtattaccaaagac

SEQ ID NO: 53095 - DNA, 25 bp, Probe Sequence
ctaaagcaagaaagcattgacaaga

SEQ ID NO: 53096 - DNA, 25 bp, Probe Sequence
aaagcaagaaagcattgacaagaaa

SEQ ID NO: 53097 - DNA, 25 bp, Probe Sequence
cctgaccattacacgcaaagatatt

SEQ ID NO: 53098 - DNA, 25 bp, Probe Sequence
acacgcaaagatattcaaactctaa

SEQ ID NO: 53099 - DNA, 25 bp, Probe Sequence
ttacacgcaaagatattcaaactct

SEQ ID NO: 53100 - DNA, 25 bp, Probe Sequence
aatacctaaagcaagaaagcattga

SEQ ID NO: 53101 - DNA, 25 bp, Probe Sequence
cattacacgcaaagatattcaaact

SEQ ID NO: 53102 - DNA, 25 bp, Probe Sequence
tacctaaagcaagaaagcattgaca

SEQ ID NO: 53103 - DNA, 25 bp, Probe Sequence
aactaatcttggcatcctatcacta

SEQ ID NO: 53104 - DNA, 25 bp, Probe Sequence
actaatcttggcatcctatcactat

SEQ ID NO: 53105 - DNA, 25 bp, Probe Sequence
tactggatgtgaactgagcgtatat

SEQ ID NO: 53106 - DNA, 25 bp, Probe Sequence
taatcttggcatcctatcactatgt

SEQ ID NO: 53107 - DNA, 25 bp, Probe Sequence
gatgtgaactgagcgtatatctgtt

SEQ ID NO: 53108 - DNA, 25 bp, Probe Sequence
ctaatcttggcatcctatcactatg

SEQ ID NO: 53109 - DNA, 25 bp, Probe Sequence
ctggatgtgaactgagcgtatatct

SEQ ID NO: 53110 - DNA, 25 bp, Probe Sequence
aatcttggcatcctatcactatgtg

SEQ ID NO: 53111 - DNA, 25 bp, Probe Sequence
ggatgtgaactgagcgtatatctgt

SEQ ID NO: 53112 - DNA, 25 bp, Probe Sequence
tggatgtgaactgagcgtatatctg

SEQ ID NO: 53113 - DNA, 25 bp, Probe Sequence
actggatgtgaactgagcgtatatc

SEQ ID NO: 53114 - DNA, 25 bp, Probe Sequence
gtactggatgtgaactgagcgtata

SEQ ID NO: 53115 - DNA, 25 bp, Probe Sequence
aaactaatcttggcatcctatcact

SEQ ID NO: 53116 - DNA, 25 bp, Probe Sequence
ctgtaaccactttctttccttcttt

SEQ ID NO: 53117 - DNA, 25 bp, Probe Sequence
cctgtaaccactttctttccttctt

SEQ ID NO: 53118 - DNA, 25 bp, Probe Sequence
gctaagtccttccataaagatgcta

SEQ ID NO: 53119 - DNA, 25 bp, Probe Sequence
atgtgaactgagcgtatatctgttt

SEQ ID NO: 53120 - DNA, 25 bp, Probe Sequence
atgtgctaaaggaacctgtatatct

SEQ ID NO: 53121 - DNA, 25 bp, Probe Sequence
tgtgctaaaggaacctgtatatcta

SEQ ID NO: 53122 - DNA, 25 bp, Probe Sequence
aatgtgctaaaggaacctgtatatc

SEQ ID NO: 53123 - DNA, 25 bp, Probe Sequence
tagtgatcttctgtttatcggttga

SEQ ID NO: 53124 - DNA, 25 bp, Probe Sequence
agtgatcttctgtttatcggttgaa

SEQ ID NO: 53125 - DNA, 25 bp, Probe Sequence
tcttagtgatcttctgtttatcggt

SEQ ID NO: 53126 - DNA, 25 bp, Probe Sequence
atcttctgtttatcggttgaatgcc

SEQ ID NO: 53127 - DNA, 25 bp, Probe Sequence
aataaaagaccttggctttctaaaa

SEQ ID NO: 53128 - DNA, 25 bp, Probe Sequence
taataaaagaccttggctttctaaa

SEQ ID NO: 53129 - DNA, 25 bp, Probe Sequence
ttaataaaagaccttggctttctaa

SEQ ID NO: 53130 - DNA, 25 bp, Probe Sequence
tttaataaaagaccttggctttcta

SEQ ID NO: 53131 - DNA, 25 bp, Probe Sequence
atccatccatccgtcattcattcaa

SEQ ID NO: 53132 - DNA, 25 bp, Probe Sequence
catccatccgtcattcattcaaata

SEQ ID NO: 53133 - DNA, 25 bp, Probe Sequence
catccatccatccgtcattcattca

SEQ ID NO: 53134 - DNA, 25 bp, Probe Sequence
aatagacaaatacatctgccctcat

SEQ ID NO: 53135 - DNA, 25 bp, Probe Sequence
aaatagacaaatacatctgccctca

SEQ ID NO: 53136 - DNA, 25 bp, Probe Sequence
atccatccgtcattcattcaaatat

SEQ ID NO: 53137 - DNA, 25 bp, Probe Sequence
ccatccatccgtcattcattcaaat

SEQ ID NO: 53138 - DNA, 25 bp, Probe Sequence
atagacaaatacatctgccctcatg

SEQ ID NO: 53139 - DNA, 25 bp, Probe Sequence
tccatccgtcattcattcaaatatt

SEQ ID NO: 53140 - DNA, 25 bp, Probe Sequence
tccatccatccgtcattcattcaaa

SEQ ID NO: 53141 - DNA, 25 bp, Probe Sequence
gcatccatccatccgtcattcattc

SEQ ID NO: 53142 - DNA, 25 bp, Probe Sequence
tagacaaatacatctgccctcatgg

SEQ ID NO: 53143 - DNA, 25 bp, Probe Sequence
gttcacttaggcacatcacacacac

SEQ ID NO: 53144 - DNA, 25 bp, Probe Sequence
gctgaaatgactagcagataaacag

SEQ ID NO: 53145 - DNA, 25 bp, Probe Sequence
actgggcattaccatagagaacaaa

SEQ ID NO: 53146 - DNA, 25 bp, Probe Sequence
ccatccgtcattcattcaaatatta

SEQ ID NO: 53147 - DNA, 25 bp, Probe Sequence
ggctgaaatgactagcagataaaca

SEQ ID NO: 53148 - DNA, 25 bp, Probe Sequence
tggctgaaatgactagcagataaac

SEQ ID NO: 53149 - DNA, 25 bp, Probe Sequence
gtggctgaaatgactagcagataaa

SEQ ID NO: 53150 - DNA, 25 bp, Probe Sequence
acaaatacatctgccctcatggaag

SEQ ID NO: 53151 - DNA, 25 bp, Probe Sequence
gacaaatacatctgccctcatggaa

SEQ ID NO: 53152 - DNA, 25 bp, Probe Sequence
cagtcacgcaaacacacactaattc

SEQ ID NO: 53153 - DNA, 25 bp, Probe Sequence
gggcattaccatagagaacaaaata

SEQ ID NO: 53154 - DNA, 25 bp, Probe Sequence
acaaaatagacaaatacatctgccc

SEQ ID NO: 53155 - DNA, 25 bp, Probe Sequence
gacaagacggacaagggtatttatg

SEQ ID NO: 53156 - DNA, 25 bp, Probe Sequence
agacaagacggacaagggtatttat

SEQ ID NO: 53157 - DNA, 25 bp, Probe Sequence
cttcttacggatttagacgaggttc

SEQ ID NO: 53158 - DNA, 25 bp, Probe Sequence
aagacaagacggacaagggtattta

SEQ ID NO: 53159 - DNA, 25 bp, Probe Sequence
ttactaattcgcatctggaagctca

SEQ ID NO: 53160 - DNA, 25 bp, Probe Sequence
ggtttgccttcttacggatttagac

SEQ ID NO: 53161 - DNA, 25 bp, Probe Sequence
gtgagaacttaatcctgggtttcag

SEQ ID NO: 53162 - DNA, 25 bp, Probe Sequence
gtttgccttcttacggatttagacg

SEQ ID NO: 53163 - DNA, 25 bp, Probe Sequence
gaacttaatcctgggtttcagcatt

SEQ ID NO: 53164 - DNA, 25 bp, Probe Sequence
tttgccttcttacggatttagacga

SEQ ID NO: 53165 - DNA, 25 bp, Probe Sequence
cgtcaaggtgagaacttaatcctgg

SEQ ID NO: 53166 - DNA, 25 bp, Probe Sequence
acaagacggacaagggtatttatgt

SEQ ID NO: 53167 - DNA, 25 bp, Probe Sequence
aacttaatcctgggtttcagcattg

SEQ ID NO: 53168 - DNA, 25 bp, Probe Sequence
tactaattcgcatctggaagctcag

SEQ ID NO: 53169 - DNA, 25 bp, Probe Sequence
gaagacaagacggacaagggtattt

SEQ ID NO: 53170 - DNA, 25 bp, Probe Sequence
ctgcgtcaaggtgagaacttaatcc

SEQ ID NO: 53171 - DNA, 25 bp, Probe Sequence
tttactaattcgcatctggaagctc

SEQ ID NO: 53172 - DNA, 25 bp, Probe Sequence
ttgccttcttacggatttagacgag

SEQ ID NO: 53173 - DNA, 25 bp, Probe Sequence
ggtgagaacttaatcctgggtttca

SEQ ID NO: 53174 - DNA, 25 bp, Probe Sequence
aaggtgagaacttaatcctgggttt

SEQ ID NO: 53175 - DNA, 25 bp, Probe Sequence
agaacttaatcctgggtttcagcat

SEQ ID NO: 53176 - DNA, 25 bp, Probe Sequence
gggtttgccttcttacggatttaga

SEQ ID NO: 53177 - DNA, 25 bp, Probe Sequence
ccttcttacggatttagacgaggtt

SEQ ID NO: 53178 - DNA, 25 bp, Probe Sequence
aggtgagaacttaatcctgggtttc

SEQ ID NO: 53179 - DNA, 25 bp, Probe Sequence
tagagagtgaagatgaagatgagga

SEQ ID NO: 53180 - DNA, 25 bp, Probe Sequence
ttagagagtgaagatgaagatgagg

SEQ ID NO: 53181 - DNA, 25 bp, Probe Sequence
agagagtgaagatgaagatgaggag

SEQ ID NO: 53182 - DNA, 25 bp, Probe Sequence
accattagagagtgaagatgaagat

SEQ ID NO: 53183 - DNA, 25 bp, Probe Sequence
ccattagagagtgaagatgaagatg

SEQ ID NO: 53184 - DNA, 25 bp, Probe Sequence
gagagtgaagatgaagatgaggagg

SEQ ID NO: 53185 - DNA, 25 bp, Probe Sequence
caccattagagagtgaagatgaaga

SEQ ID NO: 53186 - DNA, 25 bp, Probe Sequence
gctgccttatattcctacattccag

SEQ ID NO: 53187 - DNA, 25 bp, Probe Sequence
ctgccttatattcctacattccagg

SEQ ID NO: 53188 - DNA, 25 bp, Probe Sequence
attagagagtgaagatgaagatgag

SEQ ID NO: 53189 - DNA, 25 bp, Probe Sequence
cattagagagtgaagatgaagatga

SEQ ID NO: 53190 - DNA, 25 bp, Probe Sequence
ccaccattagagagtgaagatgaag

SEQ ID NO: 53191 - DNA, 25 bp, Probe Sequence
agagctgccttatattcctacattc

SEQ ID NO: 53192 - DNA, 25 bp, Probe Sequence
gagagctgccttatattcctacatt

SEQ ID NO: 53193 - DNA, 25 bp, Probe Sequence
caacagtagttctaggaggagacac

SEQ ID NO: 53194 - DNA, 25 bp, Probe Sequence
gagctgccttatattcctacattcc

SEQ ID NO: 53195 - DNA, 25 bp, Probe Sequence
tgagagctgccttatattcctacat

SEQ ID NO: 53196 - DNA, 25 bp, Probe Sequence
gcatgtatcactctgtggagaataa

SEQ ID NO: 53197 - DNA, 25 bp, Probe Sequence
agctgccttatattcctacattcca

SEQ ID NO: 53198 - DNA, 25 bp, Probe Sequence
agtgagagctgccttatattcctac

SEQ ID NO: 53199 - DNA, 25 bp, Probe Sequence
agcatgtatcactctgtggagaata

SEQ ID NO: 53200 - DNA, 25 bp, Probe Sequence
tagcatgtatcactctgtggagaat

SEQ ID NO: 53201 - DNA, 25 bp, Probe Sequence
aaccaccttagcatgtatcactctg

SEQ ID NO: 53202 - DNA, 25 bp, Probe Sequence
caaccaccttagcatgtatcactct

SEQ ID NO: 53203 - DNA, 25 bp, Probe Sequence
aataaatagggaagatggagacacc

SEQ ID NO: 53204 - DNA, 25 bp, Probe Sequence
aaataaatagggaagatggagacac

SEQ ID NO: 53205 - DNA, 25 bp, Probe Sequence
gaacttccaggagtatgtcaccttc

SEQ ID NO: 53206 - DNA, 25 bp, Probe Sequence
ataaatagggaagatggagacacct

SEQ ID NO: 53207 - DNA, 25 bp, Probe Sequence
taaatagggaagatggagacacctc

SEQ ID NO: 53208 - DNA, 25 bp, Probe Sequence
gaggtgaacttccaggagtatgtca

SEQ ID NO: 53209 - DNA, 25 bp, Probe Sequence
tgaacttccaggagtatgtcacctt

SEQ ID NO: 53210 - DNA, 25 bp, Probe Sequence
tcaaatccagtggtgggtaattgta

SEQ ID NO: 53211 - DNA, 25 bp, Probe Sequence
aaatagggaagatggagacacctct

SEQ ID NO: 53212 - DNA, 25 bp, Probe Sequence
ggctgaaaataaatagggaagatgg

SEQ ID NO: 53213 - DNA, 25 bp, Probe Sequence
gggctgaaaataaatagggaagatg

SEQ ID NO: 53214 - DNA, 25 bp, Probe Sequence
agggctgaaaataaatagggaagat

SEQ ID NO: 53215 - DNA, 25 bp, Probe Sequence
aagggctgaaaataaatagggaaga

SEQ ID NO: 53216 - DNA, 25 bp, Probe Sequence
caagggctgaaaataaatagggaag

SEQ ID NO: 53217 - DNA, 25 bp, Probe Sequence
gccttggctttgatctacaatgaag

SEQ ID NO: 53218 - DNA, 25 bp, Probe Sequence
caaatccagtggtgggtaattgtac

SEQ ID NO: 53219 - DNA, 25 bp, Probe Sequence
aacttccaggagtatgtcaccttcc

SEQ ID NO: 53220 - DNA, 25 bp, Probe Sequence
gctgaaaataaatagggaagatgga

SEQ ID NO: 53221 - DNA, 25 bp, Probe Sequence
tcaagggctgaaaataaatagggaa

SEQ ID NO: 53222 - DNA, 25 bp, Probe Sequence
ctcaagggctgaaaataaataggga

SEQ ID NO: 53223 - DNA, 25 bp, Probe Sequence
tttgatctacaatgaagccctcaag

SEQ ID NO: 53224 - DNA, 25 bp, Probe Sequence
ctttgatctacaatgaagccctcaa

SEQ ID NO: 53225 - DNA, 25 bp, Probe Sequence
aatagggaagatggagacacctctg

SEQ ID NO: 53226 - DNA, 25 bp, Probe Sequence
gagtcaaatccagtggtgggtaatt

SEQ ID NO: 53227 - DNA, 25 bp, Probe Sequence
gacaaagaagagacatcgaatcaac

SEQ ID NO: 53228 - DNA, 25 bp, Probe Sequence
agacaaagaagagacatcgaatcaa

SEQ ID NO: 53229 - DNA, 25 bp, Probe Sequence
aagacaaagaagagacatcgaatca

SEQ ID NO: 53230 - DNA, 25 bp, Probe Sequence
gcataagacaaagaagagacatcga

SEQ ID NO: 53231 - DNA, 25 bp, Probe Sequence
cataagacaaagaagagacatcgaa

SEQ ID NO: 53232 - DNA, 25 bp, Probe Sequence
ctgcataagacaaagaagagacatc

SEQ ID NO: 53233 - DNA, 25 bp, Probe Sequence
aggagagatgcttagtgtaattata

SEQ ID NO: 53234 - DNA, 25 bp, Probe Sequence
caaagaagagacatcgaatcaacca

SEQ ID NO: 53235 - DNA, 25 bp, Probe Sequence
acaaagaagagacatcgaatcaacc

SEQ ID NO: 53236 - DNA, 25 bp, Probe Sequence
taagacaaagaagagacatcgaatc

SEQ ID NO: 53237 - DNA, 25 bp, Probe Sequence
tctgcataagacaaagaagagacat

SEQ ID NO: 53238 - DNA, 25 bp, Probe Sequence
tgcataagacaaagaagagacatcg

SEQ ID NO: 53239 - DNA, 25 bp, Probe Sequence
ataagacaaagaagagacatcgaat

SEQ ID NO: 53240 - DNA, 25 bp, Probe Sequence
cactcaccggaactcctataatgtc

SEQ ID NO: 53241 - DNA, 25 bp, Probe Sequence
ggagagatgcttagtgtaattataa

SEQ ID NO: 53242 - DNA, 25 bp, Probe Sequence
ataagttaacaagcctttggatcag

SEQ ID NO: 53243 - DNA, 25 bp, Probe Sequence
aagcactcaccggaactcctataat

SEQ ID NO: 53244 - DNA, 25 bp, Probe Sequence
ttctgcataagacaaagaagagaca

SEQ ID NO: 53245 - DNA, 25 bp, Probe Sequence
tataagttaacaagcctttggatca

SEQ ID NO: 53246 - DNA, 25 bp, Probe Sequence
taagttaacaagcctttggatcagg

SEQ ID NO: 53247 - DNA, 25 bp, Probe Sequence
caatagtgatctcacaagcactcac

SEQ ID NO: 53248 - DNA, 25 bp, Probe Sequence
agcactcaccggaactcctataatg

SEQ ID NO: 53249 - DNA, 25 bp, Probe Sequence
aatagtgatctcacaagcactcacc

SEQ ID NO: 53250 - DNA, 25 bp, Probe Sequence
ccaatagtgatctcacaagcactca

SEQ ID NO: 53251 - DNA, 25 bp, Probe Sequence
tatgtgctcttcaatatagtgctaa

SEQ ID NO: 53252 - DNA, 25 bp, Probe Sequence
ctatgtgctcttcaatatagtgcta

SEQ ID NO: 53253 - DNA, 25 bp, Probe Sequence
atagtaaagaagtaggaatgggtgc

SEQ ID NO: 53254 - DNA, 25 bp, Probe Sequence
tatttcactcatcctttactctccc

SEQ ID NO: 53255 - DNA, 25 bp, Probe Sequence
ggacttgtgaaatgaactgaaagag

SEQ ID NO: 53256 - DNA, 25 bp, Probe Sequence
aggacttgtgaaatgaactgaaaga

SEQ ID NO: 53257 - DNA, 25 bp, Probe Sequence
gacttgtgaaatgaactgaaagagc

SEQ ID NO: 53258 - DNA, 25 bp, Probe Sequence
tgtgctcttcaatatagtgctaaag

SEQ ID NO: 53259 - DNA, 25 bp, Probe Sequence
atgtgctcttcaatatagtgctaaa

SEQ ID NO: 53260 - DNA, 25 bp, Probe Sequence
aatagtaaagaagtaggaatgggtg

SEQ ID NO: 53261 - DNA, 25 bp, Probe Sequence
ttatttcactcatcctttactctcc

SEQ ID NO: 53262 - DNA, 25 bp, Probe Sequence
caggacttgtgaaatgaactgaaag

SEQ ID NO: 53263 - DNA, 25 bp, Probe Sequence
actgttagcatatttcttaggatgt

SEQ ID NO: 53264 - DNA, 25 bp, Probe Sequence
tgaaatgaactgaaagagcttgaag

SEQ ID NO: 53265 - DNA, 25 bp, Probe Sequence
gtgaaatgaactgaaagagcttgaa

SEQ ID NO: 53266 - DNA, 25 bp, Probe Sequence
ttattatgagctgcttgtttgagtg

SEQ ID NO: 53267 - DNA, 25 bp, Probe Sequence
ttgtgaaatgaactgaaagagcttg

SEQ ID NO: 53268 - DNA, 25 bp, Probe Sequence
tttatcaaagcagcagccaaagaag

SEQ ID NO: 53269 - DNA, 25 bp, Probe Sequence
tttattatgagctgcttgtttgagt

SEQ ID NO: 53270 - DNA, 25 bp, Probe Sequence
cttgtgaaatgaactgaaagagctt

SEQ ID NO: 53271 - DNA, 25 bp, Probe Sequence
tgtgaaatgaactgaaagagcttga

SEQ ID NO: 53272 - DNA, 25 bp, Probe Sequence
aaatagtaaagaagtaggaatgggt

SEQ ID NO: 53273 - DNA, 25 bp, Probe Sequence
tattatgagctgcttgtttgagtgg

SEQ ID NO: 53274 - DNA, 25 bp, Probe Sequence
acttgtgaaatgaactgaaagagct

SEQ ID NO: 53275 - DNA, 25 bp, Probe Sequence
tcatctaatcatccaaacagtccag

SEQ ID NO: 53276 - DNA, 25 bp, Probe Sequence
atcatctaatcatccaaacagtcca

SEQ ID NO: 53277 - DNA, 25 bp, Probe Sequence
catctaatcatccaaacagtccagt

SEQ ID NO: 53278 - DNA, 25 bp, Probe Sequence
ttataggtgaggaaactgaggctta

SEQ ID NO: 53279 - DNA, 25 bp, Probe Sequence
gcttaggaaccaaatcaactttctt

SEQ ID NO: 53280 - DNA, 25 bp, Probe Sequence
cctgccttaaatcatctaatcatcc

SEQ ID NO: 53281 - DNA, 25 bp, Probe Sequence
tataggtgaggaaactgaggcttag

SEQ ID NO: 53282 - DNA, 25 bp, Probe Sequence
aatcatctaatcatccaaacagtcc

SEQ ID NO: 53283 - DNA, 25 bp, Probe Sequence
atctaatcatccaaacagtccagtt

SEQ ID NO: 53284 - DNA, 25 bp, Probe Sequence
tttataggtgaggaaactgaggctt

SEQ ID NO: 53285 - DNA, 25 bp, Probe Sequence
ctgccttaaatcatctaatcatcca

SEQ ID NO: 53286 - DNA, 25 bp, Probe Sequence
acctgccttaaatcatctaatcatc

SEQ ID NO: 53287 - DNA, 25 bp, Probe Sequence
tctaatcatccaaacagtccagttg

SEQ ID NO: 53288 - DNA, 25 bp, Probe Sequence
ggcttaggaaccaaatcaactttct

SEQ ID NO: 53289 - DNA, 25 bp, Probe Sequence
tgccttaaatcatctaatcatccaa

SEQ ID NO: 53290 - DNA, 25 bp, Probe Sequence
aaattcacactcattatcccacata

SEQ ID NO: 53291 - DNA, 25 bp, Probe Sequence
aattcacactcattatcccacataa

SEQ ID NO: 53292 - DNA, 25 bp, Probe Sequence
attgtgtaaggtttattagccctgt

SEQ ID NO: 53293 - DNA, 25 bp, Probe Sequence
tgtgtaaggtttattagccctgttt

SEQ ID NO: 53294 - DNA, 25 bp, Probe Sequence
ttgtgtaaggtttattagccctgtt

SEQ ID NO: 53295 - DNA, 25 bp, Probe Sequence
cttaggaaccaaatcaactttcttt

SEQ ID NO: 53296 - DNA, 25 bp, Probe Sequence
aattgtgtaaggtttattagccctg

SEQ ID NO: 53297 - DNA, 25 bp, Probe Sequence
ttacctgccttaaatcatctaatca

SEQ ID NO: 53298 - DNA, 25 bp, Probe Sequence
gggcttaggaaccaaatcaactttc

SEQ ID NO: 53299 - DNA, 25 bp, Probe Sequence
atcttgttcatcttgttcagtcctt

SEQ ID NO: 53300 - DNA, 25 bp, Probe Sequence
atcatcttgttcatcttgttcagtc

SEQ ID NO: 53301 - DNA, 25 bp, Probe Sequence
catcttgttcatcttgttcagtcct

SEQ ID NO: 53302 - DNA, 25 bp, Probe Sequence
tcatcttgttcatcttgttcagtcc

SEQ ID NO: 53303 - DNA, 25 bp, Probe Sequence
gatcatcttgttcatcttgttcagt

SEQ ID NO: 53304 - DNA, 25 bp, Probe Sequence
gttcatcttgttcagtcctttcttg

SEQ ID NO: 53305 - DNA, 25 bp, Probe Sequence
cttgttcatcttgttcagtcctttc

SEQ ID NO: 53306 - DNA, 25 bp, Probe Sequence
ttcatcttgttcagtcctttcttgt

SEQ ID NO: 53307 - DNA, 25 bp, Probe Sequence
tgttcatcttgttcagtcctttctt

SEQ ID NO: 53308 - DNA, 25 bp, Probe Sequence
ttgttcatcttgttcagtcctttct

SEQ ID NO: 53309 - DNA, 25 bp, Probe Sequence
tcttgttcatcttgttcagtccttt

SEQ ID NO: 53310 - DNA, 25 bp, Probe Sequence
gcattcttacacatctatcctagac

SEQ ID NO: 53311 - DNA, 25 bp, Probe Sequence
tttgaaagatgagaaggttgagatg

SEQ ID NO: 53312 - DNA, 25 bp, Probe Sequence
cttgtgtgattggaattattcatcc

SEQ ID NO: 53313 - DNA, 25 bp, Probe Sequence
tcttgtgtgattggaattattcatc

SEQ ID NO: 53314 - DNA, 25 bp, Probe Sequence
tcatcttgttcagtcctttcttgtg

SEQ ID NO: 53315 - DNA, 25 bp, Probe Sequence
ttgaaagatgagaaggttgagatgc

SEQ ID NO: 53316 - DNA, 25 bp, Probe Sequence
aagatgatgccgaagagttgatgtc

SEQ ID NO: 53317 - DNA, 25 bp, Probe Sequence
atcttgttcagtcctttcttgtgtg

SEQ ID NO: 53318 - DNA, 25 bp, Probe Sequence
catcttgttcagtcctttcttgtgt

SEQ ID NO: 53319 - DNA, 25 bp, Probe Sequence
atattcttgtctgttccagtcttat

SEQ ID NO: 53320 - DNA, 25 bp, Probe Sequence
actaatattcttgtctgttccagtc

SEQ ID NO: 53321 - DNA, 25 bp, Probe Sequence
ttcttgtgtgattggaattattcat

SEQ ID NO: 53322 - DNA, 25 bp, Probe Sequence
ttgttcagtcctttcttgtgtgatt

SEQ ID NO: 53323 - DNA, 25 bp, Probe Sequence
ggactggcttcgttctcttaatata

SEQ ID NO: 53324 - DNA, 25 bp, Probe Sequence
tggcttcgttctcttaatatactca

SEQ ID NO: 53325 - DNA, 25 bp, Probe Sequence
actggcttcgttctcttaatatact

SEQ ID NO: 53326 - DNA, 25 bp, Probe Sequence
gactggcttcgttctcttaatatac

SEQ ID NO: 53327 - DNA, 25 bp, Probe Sequence
ggcttcgttctcttaatatactcag

SEQ ID NO: 53328 - DNA, 25 bp, Probe Sequence
ctggcttcgttctcttaatatactc

SEQ ID NO: 53329 - DNA, 25 bp, Probe Sequence
tggactggcttcgttctcttaatat

SEQ ID NO: 53330 - DNA, 25 bp, Probe Sequence
gcttcgttctcttaatatactcagt

SEQ ID NO: 53331 - DNA, 25 bp, Probe Sequence
tatactcagtaatgactcaagcctc

SEQ ID NO: 53332 - DNA, 25 bp, Probe Sequence
atatactcagtaatgactcaagcct

SEQ ID NO: 53333 - DNA, 25 bp, Probe Sequence
ctggactggcttcgttctcttaata

SEQ ID NO: 53334 - DNA, 25 bp, Probe Sequence
aatatactcagtaatgactcaagcc

SEQ ID NO: 53335 - DNA, 25 bp, Probe Sequence
gcatttagtttctatctttccaggc

SEQ ID NO: 53336 - DNA, 25 bp, Probe Sequence
catttagtttctatctttccaggca

SEQ ID NO: 53337 - DNA, 25 bp, Probe Sequence
tttagtttctatctttccaggcaaa

SEQ ID NO: 53338 - DNA, 25 bp, Probe Sequence
tattaacataccctagttgccgttt

SEQ ID NO: 53339 - DNA, 25 bp, Probe Sequence
atttagtttctatctttccaggcaa

SEQ ID NO: 53340 - DNA, 25 bp, Probe Sequence
ctattaacataccctagttgccgtt

SEQ ID NO: 53341 - DNA, 25 bp, Probe Sequence
actggactggcttcgttctcttaat

SEQ ID NO: 53342 - DNA, 25 bp, Probe Sequence
gctattaacataccctagttgccgt

SEQ ID NO: 53343 - DNA, 25 bp, Probe Sequence
tctgcatttagtttctatctttcca

SEQ ID NO: 53344 - DNA, 25 bp, Probe Sequence
tctatctttccaggcaaaacaaatg

SEQ ID NO: 53345 - DNA, 25 bp, Probe Sequence
tttctatctttccaggcaaaacaaa

SEQ ID NO: 53346 - DNA, 25 bp, Probe Sequence
taatatactcagtaatgactcaagc

SEQ ID NO: 53347 - DNA, 25 bp, Probe Sequence
atagcatatctgagactgaggagaa

SEQ ID NO: 53348 - DNA, 25 bp, Probe Sequence
aatagcatatctgagactgaggaga

SEQ ID NO: 53349 - DNA, 25 bp, Probe Sequence
ggaaatagcatatctgagactgagg

SEQ ID NO: 53350 - DNA, 25 bp, Probe Sequence
tggaaatagcatatctgagactgag

SEQ ID NO: 53351 - DNA, 25 bp, Probe Sequence
gaaatagcatatctgagactgagga

SEQ ID NO: 53352 - DNA, 25 bp, Probe Sequence
aaatagcatatctgagactgaggag

SEQ ID NO: 53353 - DNA, 25 bp, Probe Sequence
ttggaaatagcatatctgagactga

SEQ ID NO: 53354 - DNA, 25 bp, Probe Sequence
tagcatatctgagactgaggagaaa

SEQ ID NO: 53355 - DNA, 25 bp, Probe Sequence
ttagtctctacaaacagaaagcgtt

SEQ ID NO: 53356 - DNA, 25 bp, Probe Sequence
tttagtctctacaaacagaaagcgt

SEQ ID NO: 53357 - DNA, 25 bp, Probe Sequence
gcatatctgagactgaggagaaatt

SEQ ID NO: 53358 - DNA, 25 bp, Probe Sequence
tatctgagactgaggagaaattgac

SEQ ID NO: 53359 - DNA, 25 bp, Probe Sequence
agcatatctgagactgaggagaaat

SEQ ID NO: 53360 - DNA, 25 bp, Probe Sequence
tttggaaatagcatatctgagactg

SEQ ID NO: 53361 - DNA, 25 bp, Probe Sequence
ctgagactgaggagaaattgacaat

SEQ ID NO: 53362 - DNA, 25 bp, Probe Sequence
ctctgtgggctgtcatagttaattg

SEQ ID NO: 53363 - DNA, 25 bp, Probe Sequence
atctgagactgaggagaaattgaca

SEQ ID NO: 53364 - DNA, 25 bp, Probe Sequence
catatctgagactgaggagaaattg

SEQ ID NO: 53365 - DNA, 25 bp, Probe Sequence
tctgagactgaggagaaattgacaa

SEQ ID NO: 53366 - DNA, 25 bp, Probe Sequence
atatctgagactgaggagaaattga

SEQ ID NO: 53367 - DNA, 25 bp, Probe Sequence
tctgtgggctgtcatagttaattga

SEQ ID NO: 53368 - DNA, 25 bp, Probe Sequence
tttaaagtgggaaagctgaatgaca

SEQ ID NO: 53369 - DNA, 25 bp, Probe Sequence
actgaggagaaattgacaattcact

SEQ ID NO: 53370 - DNA, 25 bp, Probe Sequence
gactgaggagaaattgacaattcac

SEQ ID NO: 53371 - DNA, 25 bp, Probe Sequence
tgtcatctagtctcaagtatagcga

SEQ ID NO: 53372 - DNA, 25 bp, Probe Sequence
tgtaactcttgtgtagattgtctct

SEQ ID NO: 53373 - DNA, 25 bp, Probe Sequence
ttgtcatctagtctcaagtatagcg

SEQ ID NO: 53374 - DNA, 25 bp, Probe Sequence
ttgtaactcttgtgtagattgtctc

SEQ ID NO: 53375 - DNA, 25 bp, Probe Sequence
gtcatctagtctcaagtatagcgag

SEQ ID NO: 53376 - DNA, 25 bp, Probe Sequence
catttccagagccttgtgtatattt

SEQ ID NO: 53377 - DNA, 25 bp, Probe Sequence
tttccagagccttgtgtatatttcc

SEQ ID NO: 53378 - DNA, 25 bp, Probe Sequence
tgttattcaagattgagttctcact

SEQ ID NO: 53379 - DNA, 25 bp, Probe Sequence
atttccagagccttgtgtatatttc

SEQ ID NO: 53380 - DNA, 25 bp, Probe Sequence
tgtaagtgaatgtaacatactgtca

SEQ ID NO: 53381 - DNA, 25 bp, Probe Sequence
agagccttgtgtatatttccaatga

SEQ ID NO: 53382 - DNA, 25 bp, Probe Sequence
cagagccttgtgtatatttccaatg

SEQ ID NO: 53383 - DNA, 25 bp, Probe Sequence
gccttgtgtatatttccaatgaact

SEQ ID NO: 53384 - DNA, 25 bp, Probe Sequence
agccttgtgtatatttccaatgaac

SEQ ID NO: 53385 - DNA, 25 bp, Probe Sequence
tgtctacttgtaagtgaatgtaaca

SEQ ID NO: 53386 - DNA, 25 bp, Probe Sequence
gagccttgtgtatatttccaatgaa

SEQ ID NO: 53387 - DNA, 25 bp, Probe Sequence
ccagagccttgtgtatatttccaat

SEQ ID NO: 53388 - DNA, 25 bp, Probe Sequence
ttccagagccttgtgtatatttcca

SEQ ID NO: 53389 - DNA, 25 bp, Probe Sequence
tatagaattgtaacactacacggtg

SEQ ID NO: 53390 - DNA, 25 bp, Probe Sequence
ttaacaaacctgtgtatgcttatgc

SEQ ID NO: 53391 - DNA, 25 bp, Probe Sequence
acatttccagagccttgtgtatatt

SEQ ID NO: 53392 - DNA, 25 bp, Probe Sequence
gtaactcttgtgtagattgtctcta

SEQ ID NO: 53393 - DNA, 25 bp, Probe Sequence
atgttattcaagattgagttctcac

SEQ ID NO: 53394 - DNA, 25 bp, Probe Sequence
tccagagccttgtgtatatttccaa

SEQ ID NO: 53395 - DNA, 25 bp, Probe Sequence
atacaagatactacagtaacaggct

SEQ ID NO: 53396 - DNA, 25 bp, Probe Sequence
tacaagatactacagtaacaggctt

SEQ ID NO: 53397 - DNA, 25 bp, Probe Sequence
gatacaagatactacagtaacaggc

SEQ ID NO: 53398 - DNA, 25 bp, Probe Sequence
ctaatgagtaggttcgtagcttgat

SEQ ID NO: 53399 - DNA, 25 bp, Probe Sequence
ttctaatgagtaggttcgtagcttg

SEQ ID NO: 53400 - DNA, 25 bp, Probe Sequence
taatgagtaggttcgtagcttgatt

SEQ ID NO: 53401 - DNA, 25 bp, Probe Sequence
tctaatgagtaggttcgtagcttga

SEQ ID NO: 53402 - DNA, 25 bp, Probe Sequence
agtaggttcgtagcttgattgaatt

SEQ ID NO: 53403 - DNA, 25 bp, Probe Sequence
aatgagtaggttcgtagcttgattg

SEQ ID NO: 53404 - DNA, 25 bp, Probe Sequence
gagtaggttcgtagcttgattgaat

SEQ ID NO: 53405 - DNA, 25 bp, Probe Sequence
gtaggttcgtagcttgattgaatta

SEQ ID NO: 53406 - DNA, 25 bp, Probe Sequence
actcctgttatctccttgtttgaat

SEQ ID NO: 53407 - DNA, 25 bp, Probe Sequence
gggtattatttgtgactctcctgaa

SEQ ID NO: 53408 - DNA, 25 bp, Probe Sequence
aggttcgtagcttgattgaattaat

SEQ ID NO: 53409 - DNA, 25 bp, Probe Sequence
atgagtaggttcgtagcttgattga

SEQ ID NO: 53410 - DNA, 25 bp, Probe Sequence
ttacatagaaagagagcccaagaat

SEQ ID NO: 53411 - DNA, 25 bp, Probe Sequence
tgatacaagatactacagtaacagg

SEQ ID NO: 53412 - DNA, 25 bp, Probe Sequence
aaattgtaaacttgtgcttctgtgt

SEQ ID NO: 53413 - DNA, 25 bp, Probe Sequence
ctcctgaaattgtaaacttgtgctt

SEQ ID NO: 53414 - DNA, 25 bp, Probe Sequence
tgtgactctcctgaaattgtaaact

SEQ ID NO: 53415 - DNA, 25 bp, Probe Sequence
acatagaaagagagcccaagaatat

SEQ ID NO: 53416 - DNA, 25 bp, Probe Sequence
cttacatagaaagagagcccaagaa

SEQ ID NO: 53417 - DNA, 25 bp, Probe Sequence
aattgtaaacttgtgcttctgtgtc

SEQ ID NO: 53418 - DNA, 25 bp, Probe Sequence
ttgtgactctcctgaaattgtaaac

SEQ ID NO: 53419 - DNA, 25 bp, Probe Sequence
agttttactatgaatgaccctgaaa

SEQ ID NO: 53420 - DNA, 25 bp, Probe Sequence
aagttttactatgaatgaccctgaa

SEQ ID NO: 53421 - DNA, 25 bp, Probe Sequence
aaagttttactatgaatgaccctga

SEQ ID NO: 53422 - DNA, 25 bp, Probe Sequence
gttttactatgaatgaccctgaaaa

SEQ ID NO: 53423 - DNA, 25 bp, Probe Sequence
taaagttttactatgaatgaccctg

SEQ ID NO: 53424 - DNA, 25 bp, Probe Sequence
ataaagttttactatgaatgaccct

SEQ ID NO: 53425 - DNA, 25 bp, Probe Sequence
aataaagttttactatgaatgaccc

SEQ ID NO: 53426 - DNA, 25 bp, Probe Sequence
gattccattcttctgttaccgactt

SEQ ID NO: 53427 - DNA, 25 bp, Probe Sequence
tcctgttcattgttcttgtgttctt

SEQ ID NO: 53428 - DNA, 25 bp, Probe Sequence
ctcctgttcattgttcttgtgttct

SEQ ID NO: 53429 - DNA, 25 bp, Probe Sequence
ctgattccattcttctgttaccgac

SEQ ID NO: 53430 - DNA, 25 bp, Probe Sequence
tgaagacaatctaggttaagcaaga

SEQ ID NO: 53431 - DNA, 25 bp, Probe Sequence
tgattccattcttctgttaccgact

SEQ ID NO: 53432 - DNA, 25 bp, Probe Sequence
aagacaatctaggttaagcaagagc

SEQ ID NO: 53433 - DNA, 25 bp, Probe Sequence
gaagacaatctaggttaagcaagag

SEQ ID NO: 53434 - DNA, 25 bp, Probe Sequence
gttgctattagttctctcacctatt

SEQ ID NO: 53435 - DNA, 25 bp, Probe Sequence
gacaatctaggttaagcaagagcaa

SEQ ID NO: 53436 - DNA, 25 bp, Probe Sequence
ttcgtctgagagaatggctgataat

SEQ ID NO: 53437 - DNA, 25 bp, Probe Sequence
ttgaagacaatctaggttaagcaag

SEQ ID NO: 53438 - DNA, 25 bp, Probe Sequence
cctcctgttcattgttcttgtgttc

SEQ ID NO: 53439 - DNA, 25 bp, Probe Sequence
ttgtgacttgactgtggaagatgat

SEQ ID NO: 53440 - DNA, 25 bp, Probe Sequence
attgtgacttgactgtggaagatga

SEQ ID NO: 53441 - DNA, 25 bp, Probe Sequence
cattgtgacttgactgtggaagatg

SEQ ID NO: 53442 - DNA, 25 bp, Probe Sequence
agacaatctaggttaagcaagagca

SEQ ID NO: 53443 - DNA, 25 bp, Probe Sequence
aagaatatctggatcaactacctga

SEQ ID NO: 53444 - DNA, 25 bp, Probe Sequence
tcgtctgagagaatggctgataatg

SEQ ID NO: 53445 - DNA, 25 bp, Probe Sequence
ttgcctggttgctattagttctctc

SEQ ID NO: 53446 - DNA, 25 bp, Probe Sequence
attactattcgtctgagagaatggc

SEQ ID NO: 53447 - DNA, 25 bp, Probe Sequence
ggttgctattagttctctcacctat

SEQ ID NO: 53448 - DNA, 25 bp, Probe Sequence
tggttgctattagttctctcaccta

SEQ ID NO: 53449 - DNA, 25 bp, Probe Sequence
tattcgtctgagagaatggctgata

SEQ ID NO: 53450 - DNA, 25 bp, Probe Sequence
aagttgaatggttcctcttggtaag

SEQ ID NO: 53451 - DNA, 25 bp, Probe Sequence
ttataccagagtgtagtaggctagg

SEQ ID NO: 53452 - DNA, 25 bp, Probe Sequence
aacgattcttactcagtgtgatgta

SEQ ID NO: 53453 - DNA, 25 bp, Probe Sequence
acgattcttactcagtgtgatgtat

SEQ ID NO: 53454 - DNA, 25 bp, Probe Sequence
tagaatgtcattgtggatgttacct

SEQ ID NO: 53455 - DNA, 25 bp, Probe Sequence
agaatgtcattgtggatgttacctt

SEQ ID NO: 53456 - DNA, 25 bp, Probe Sequence
gtattataccagagtgtagtaggct

SEQ ID NO: 53457 - DNA, 25 bp, Probe Sequence
agtattataccagagtgtagtaggc

SEQ ID NO: 53458 - DNA, 25 bp, Probe Sequence
atagaatgtcattgtggatgttacc

SEQ ID NO: 53459 - DNA, 25 bp, Probe Sequence
attataccagagtgtagtaggctag

SEQ ID NO: 53460 - DNA, 25 bp, Probe Sequence
tactcagtgtgatgtataatgatgc

SEQ ID NO: 53461 - DNA, 25 bp, Probe Sequence
cctcagatccttagtattgtgtgat

SEQ ID NO: 53462 - DNA, 25 bp, Probe Sequence
ccagttagtcttcttcaaggaatta

SEQ ID NO: 53463 - DNA, 25 bp, Probe Sequence
actctgtaatagaatgtcattgtgg

SEQ ID NO: 53464 - DNA, 25 bp, Probe Sequence
tgtaatagaatgtcattgtggatgt

SEQ ID NO: 53465 - DNA, 25 bp, Probe Sequence
ctctgtaatagaatgtcattgtgga

SEQ ID NO: 53466 - DNA, 25 bp, Probe Sequence
aataactcactgatacctgcgttaa

SEQ ID NO: 53467 - DNA, 25 bp, Probe Sequence
tccagttagtcttcttcaaggaatt

SEQ ID NO: 53468 - DNA, 25 bp, Probe Sequence
cgattcttactcagtgtgatgtata

SEQ ID NO: 53469 - DNA, 25 bp, Probe Sequence
ctgtaatagaatgtcattgtggatg

SEQ ID NO: 53470 - DNA, 25 bp, Probe Sequence
tattataccagagtgtagtaggcta

SEQ ID NO: 53471 - DNA, 25 bp, Probe Sequence
tctgtaatagaatgtcattgtggat

SEQ ID NO: 53472 - DNA, 25 bp, Probe Sequence
ctcagatccttagtattgtgtgatt

SEQ ID NO: 53473 - DNA, 25 bp, Probe Sequence
cagttagtcttcttcaaggaattac

SEQ ID NO: 53474 - DNA, 25 bp, Probe Sequence
aagccaacttcactgtatcctcaat

SEQ ID NO: 53475 - DNA, 25 bp, Probe Sequence
agccaacttcactgtatcctcaatg

SEQ ID NO: 53476 - DNA, 25 bp, Probe Sequence
cgagtgcttatttctacagatgtct

SEQ ID NO: 53477 - DNA, 25 bp, Probe Sequence
ccgagtgcttatttctacagatgtc

SEQ ID NO: 53478 - DNA, 25 bp, Probe Sequence
tacatacacagaattgggagatcag

SEQ ID NO: 53479 - DNA, 25 bp, Probe Sequence
gtacatacacagaattgggagatca

SEQ ID NO: 53480 - DNA, 25 bp, Probe Sequence
tcagattgatgagatgccgatgaac

SEQ ID NO: 53481 - DNA, 25 bp, Probe Sequence
gggtttatatggactttcttctcat

SEQ ID NO: 53482 - DNA, 25 bp, Probe Sequence
aactttgtaaagaatgacgacatcc

SEQ ID NO: 53483 - DNA, 25 bp, Probe Sequence
cagagatatcgagcagtactattcc

SEQ ID NO: 53484 - DNA, 25 bp, Probe Sequence
gagatatcgagcagtactattccac

SEQ ID NO: 53485 - DNA, 25 bp, Probe Sequence
agagatatcgagcagtactattcca

SEQ ID NO: 53486 - DNA, 25 bp, Probe Sequence
caggtgtccctcatcattaactatg

SEQ ID NO: 53487 - DNA, 25 bp, Probe Sequence
tcaggtgtccctcatcattaactat

SEQ ID NO: 53488 - DNA, 25 bp, Probe Sequence
atacacagaattgggagatcaggtc

SEQ ID NO: 53489 - DNA, 25 bp, Probe Sequence
tcagagatatcgagcagtactattc

SEQ ID NO: 53490 - DNA, 25 bp, Probe Sequence
tatggactttcttctcataaatggc

SEQ ID NO: 53491 - DNA, 25 bp, Probe Sequence
catacacagaattgggagatcaggt

SEQ ID NO: 53492 - DNA, 25 bp, Probe Sequence
acatacacagaattgggagatcagg

SEQ ID NO: 53493 - DNA, 25 bp, Probe Sequence
catcctcagagatatcgagcagtac

SEQ ID NO: 53494 - DNA, 25 bp, Probe Sequence
ctcaggtgtccctcatcattaacta

SEQ ID NO: 53495 - DNA, 25 bp, Probe Sequence
gcagtactattccactcagattgat

SEQ ID NO: 53496 - DNA, 25 bp, Probe Sequence
agatatcgagcagtactattccact

SEQ ID NO: 53497 - DNA, 25 bp, Probe Sequence
actttgtaaagaatgacgacatccg

SEQ ID NO: 53498 - DNA, 25 bp, Probe Sequence
aagtggaagatagatgataagcctg

SEQ ID NO: 53499 - DNA, 25 bp, Probe Sequence
gtggaagatagatgataagcctgta

SEQ ID NO: 53500 - DNA, 25 bp, Probe Sequence
agtggaagatagatgataagcctgt

SEQ ID NO: 53501 - DNA, 25 bp, Probe Sequence
aatctgttgctgactcttaattcct

SEQ ID NO: 53502 - DNA, 25 bp, Probe Sequence
tctgttgctgactcttaattcctat

SEQ ID NO: 53503 - DNA, 25 bp, Probe Sequence
atctgttgctgactcttaattccta

SEQ ID NO: 53504 - DNA, 25 bp, Probe Sequence
gcttgttggataagtggaagataga

SEQ ID NO: 53505 - DNA, 25 bp, Probe Sequence
tgttggataagtggaagatagatga

SEQ ID NO: 53506 - DNA, 25 bp, Probe Sequence
tggaagatagatgataagcctgtaa

SEQ ID NO: 53507 - DNA, 25 bp, Probe Sequence
taatctgttgctgactcttaattcc

SEQ ID NO: 53508 - DNA, 25 bp, Probe Sequence
ctgttgctgactcttaattcctatt

SEQ ID NO: 53509 - DNA, 25 bp, Probe Sequence
taagtggaagatagatgataagcct

SEQ ID NO: 53510 - DNA, 25 bp, Probe Sequence
ggcttgttggataagtggaagatag

SEQ ID NO: 53511 - DNA, 25 bp, Probe Sequence
ttgttggataagtggaagatagatg

SEQ ID NO: 53512 - DNA, 25 bp, Probe Sequence
tgacacagatatgagaagttgtagc

SEQ ID NO: 53513 - DNA, 25 bp, Probe Sequence
gttggataagtggaagatagatgat

SEQ ID NO: 53514 - DNA, 25 bp, Probe Sequence
cttgttggataagtggaagatagat

SEQ ID NO: 53515 - DNA, 25 bp, Probe Sequence
acctcatataaggagaagagcatct

SEQ ID NO: 53516 - DNA, 25 bp, Probe Sequence
ttctcctggatcttgctgaattagt

SEQ ID NO: 53517 - DNA, 25 bp, Probe Sequence
ataagtggaagatagatgataagcc

SEQ ID NO: 53518 - DNA, 25 bp, Probe Sequence
ctgacacagatatgagaagttgtag

SEQ ID NO: 53519 - DNA, 25 bp, Probe Sequence
ctgtagtctccttgatctgctgatt

SEQ ID NO: 53520 - DNA, 25 bp, Probe Sequence
tacctcatataaggagaagagcatc

SEQ ID NO: 53521 - DNA, 25 bp, Probe Sequence
tctcctggatcttgctgaattagtg

SEQ ID NO: 53522 - DNA, 25 bp, Probe Sequence
ctgtcattcaagatccttccttcaa

SEQ ID NO: 53523 - DNA, 25 bp, Probe Sequence
tgtcattcaagatccttccttcaac

SEQ ID NO: 53524 - DNA, 25 bp, Probe Sequence
tctgtcattcaagatccttccttca

SEQ ID NO: 53525 - DNA, 25 bp, Probe Sequence
gtcattcaagatccttccttcaacc

SEQ ID NO: 53526 - DNA, 25 bp, Probe Sequence
cagaatcctctcagagtcattgaag

SEQ ID NO: 53527 - DNA, 25 bp, Probe Sequence
gccagaaggatgaatacttggatat

SEQ ID NO: 53528 - DNA, 25 bp, Probe Sequence
aattctggcattagctctcatagga

SEQ ID NO: 53529 - DNA, 25 bp, Probe Sequence
agaagaaagaaagaaacctcatcct

SEQ ID NO: 53530 - DNA, 25 bp, Probe Sequence
cagaagaaagaaagaaacctcatcc

SEQ ID NO: 53531 - DNA, 25 bp, Probe Sequence
gcagaagaaagaaagaaacctcatc

SEQ ID NO: 53532 - DNA, 25 bp, Probe Sequence
ccagaatcctctcagagtcattgaa

SEQ ID NO: 53533 - DNA, 25 bp, Probe Sequence
tacttggatattactgaaagggagg

SEQ ID NO: 53534 - DNA, 25 bp, Probe Sequence
ctgagaaggaattgcgtcatgtaag

SEQ ID NO: 53535 - DNA, 25 bp, Probe Sequence
atgtggaaagtatcagagtaagcct

SEQ ID NO: 53536 - DNA, 25 bp, Probe Sequence
agaatcctctcagagtcattgaagg

SEQ ID NO: 53537 - DNA, 25 bp, Probe Sequence
atctgagaaggaattgcgtcatgta

SEQ ID NO: 53538 - DNA, 25 bp, Probe Sequence
atctgtcattcaagatccttccttc

SEQ ID NO: 53539 - DNA, 25 bp, Probe Sequence
ggcagaagaaagaaagaaacctcat

SEQ ID NO: 53540 - DNA, 25 bp, Probe Sequence
ctttagaatcagaattgtagccagt

SEQ ID NO: 53541 - DNA, 25 bp, Probe Sequence
tctgagaaggaattgcgtcatgtaa

SEQ ID NO: 53542 - DNA, 25 bp, Probe Sequence
gaatctgagaaggaattgcgtcatg

SEQ ID NO: 53543 - DNA, 25 bp, Probe Sequence
gaagaaagaaagaaacctcatccta

SEQ ID NO: 53544 - DNA, 25 bp, Probe Sequence
tatctgtcattcaagatccttcctt

SEQ ID NO: 53545 - DNA, 25 bp, Probe Sequence
ttatctgtcattcaagatccttcct

SEQ ID NO: 53546 - DNA, 25 bp, Probe Sequence
ttgatgtgaatatgaagccagtagt

SEQ ID NO: 53547 - DNA, 25 bp, Probe Sequence
ctacaatagaagtcagagcatcacc

SEQ ID NO: 53548 - DNA, 25 bp, Probe Sequence
tgatgtgaatatgaagccagtagta

SEQ ID NO: 53549 - DNA, 25 bp, Probe Sequence
tacaatagaagtcagagcatcacca

SEQ ID NO: 53550 - DNA, 25 bp, Probe Sequence
atagaagtcagagcatcaccagaat

SEQ ID NO: 53551 - DNA, 25 bp, Probe Sequence
aatagaagtcagagcatcaccagaa

SEQ ID NO: 53552 - DNA, 25 bp, Probe Sequence
aatatgaagccagtagtacaagagc

SEQ ID NO: 53553 - DNA, 25 bp, Probe Sequence
gtgaatatgaagccagtagtacaag

SEQ ID NO: 53554 - DNA, 25 bp, Probe Sequence
tgaatatgaagccagtagtacaaga

SEQ ID NO: 53555 - DNA, 25 bp, Probe Sequence
gatgtgaatatgaagccagtagtac

SEQ ID NO: 53556 - DNA, 25 bp, Probe Sequence
gaatatgaagccagtagtacaagag

SEQ ID NO: 53557 - DNA, 25 bp, Probe Sequence
caatagaagtcagagcatcaccaga

SEQ ID NO: 53558 - DNA, 25 bp, Probe Sequence
cagagttctatgttggaagtattct

SEQ ID NO: 53559 - DNA, 25 bp, Probe Sequence
tagaagtcagagcatcaccagaatg

SEQ ID NO: 53560 - DNA, 25 bp, Probe Sequence
acaatagaagtcagagcatcaccag

SEQ ID NO: 53561 - DNA, 25 bp, Probe Sequence
gaagatacattggctctaagaggat

SEQ ID NO: 53562 - DNA, 25 bp, Probe Sequence
tgtgaatatgaagccagtagtacaa

SEQ ID NO: 53563 - DNA, 25 bp, Probe Sequence
attcagagatcaggaagaggacttg

SEQ ID NO: 53564 - DNA, 25 bp, Probe Sequence
cattcagagatcaggaagaggactt

SEQ ID NO: 53565 - DNA, 25 bp, Probe Sequence
agaagatacattggctctaagagga

SEQ ID NO: 53566 - DNA, 25 bp, Probe Sequence
cagaagatacattggctctaagagg

SEQ ID NO: 53567 - DNA, 25 bp, Probe Sequence
atgtgaatatgaagccagtagtaca

SEQ ID NO: 53568 - DNA, 25 bp, Probe Sequence
atatgaagccagtagtacaagagcc

SEQ ID NO: 53569 - DNA, 25 bp, Probe Sequence
gcagaagatacattggctctaagag

SEQ ID NO: 53570 - DNA, 25 bp, Probe Sequence
ttatggaagttcagcgttgtatgtc

SEQ ID NO: 53571 - DNA, 25 bp, Probe Sequence
cttcagcacttctcacaatgtaact

SEQ ID NO: 53572 - DNA, 25 bp, Probe Sequence
gttatggaagttcagcgttgtatgt

SEQ ID NO: 53573 - DNA, 25 bp, Probe Sequence
tgttatggaagttcagcgttgtatg

SEQ ID NO: 53574 - DNA, 25 bp, Probe Sequence
taccttcagcacttctcacaatgta

SEQ ID NO: 53575 - DNA, 25 bp, Probe Sequence
gttcagcgttgtatgtctctctcta

SEQ ID NO: 53576 - DNA, 25 bp, Probe Sequence
ttcagcgttgtatgtctctctctac

SEQ ID NO: 53577 - DNA, 25 bp, Probe Sequence
tatggaagttcagcgttgtatgtct

SEQ ID NO: 53578 - DNA, 25 bp, Probe Sequence
cataccttcagcacttctcacaatg

SEQ ID NO: 53579 - DNA, 25 bp, Probe Sequence
acataccttcagcacttctcacaat

SEQ ID NO: 53580 - DNA, 25 bp, Probe Sequence
ccttcagcacttctcacaatgtaac

SEQ ID NO: 53581 - DNA, 25 bp, Probe Sequence
ataccttcagcacttctcacaatgt

SEQ ID NO: 53582 - DNA, 25 bp, Probe Sequence
aagacatcacataccttcagcactt

SEQ ID NO: 53583 - DNA, 25 bp, Probe Sequence
accttcagcacttctcacaatgtaa

SEQ ID NO: 53584 - DNA, 25 bp, Probe Sequence
ctgttatggaagttcagcgttgtat

SEQ ID NO: 53585 - DNA, 25 bp, Probe Sequence
atcacataccttcagcacttctcac

SEQ ID NO: 53586 - DNA, 25 bp, Probe Sequence
catcacataccttcagcacttctca

SEQ ID NO: 53587 - DNA, 25 bp, Probe Sequence
acatcacataccttcagcacttctc

SEQ ID NO: 53588 - DNA, 25 bp, Probe Sequence
gacatcacataccttcagcacttct

SEQ ID NO: 53589 - DNA, 25 bp, Probe Sequence
agacatcacataccttcagcacttc

SEQ ID NO: 53590 - DNA, 25 bp, Probe Sequence
ttcagcacttctcacaatgtaactg

SEQ ID NO: 53591 - DNA, 25 bp, Probe Sequence
aagttcagcgttgtatgtctctctc

SEQ ID NO: 53592 - DNA, 25 bp, Probe Sequence
gaagttcagcgttgtatgtctctct

SEQ ID NO: 53593 - DNA, 25 bp, Probe Sequence
attacttctgctttcgtatctcctc

SEQ ID NO: 53594 - DNA, 25 bp, Probe Sequence
ggaccagagtgttaatgagatgtta

SEQ ID NO: 53595 - DNA, 25 bp, Probe Sequence
gaccagagtgttaatgagatgttat

SEQ ID NO: 53596 - DNA, 25 bp, Probe Sequence
tattattgcttgtgcctcaactgtt

SEQ ID NO: 53597 - DNA, 25 bp, Probe Sequence
ttattattgcttgtgcctcaactgt

SEQ ID NO: 53598 - DNA, 25 bp, Probe Sequence
cagagtgttaatgagatgttattgc

SEQ ID NO: 53599 - DNA, 25 bp, Probe Sequence
atgtggaccagagtgttaatgagat

SEQ ID NO: 53600 - DNA, 25 bp, Probe Sequence
tggaccagagtgttaatgagatgtt

SEQ ID NO: 53601 - DNA, 25 bp, Probe Sequence
catagacttactggctgtagcaatg

SEQ ID NO: 53602 - DNA, 25 bp, Probe Sequence
accagagtgttaatgagatgttatt

SEQ ID NO: 53603 - DNA, 25 bp, Probe Sequence
ccagagtgttaatgagatgttattg

SEQ ID NO: 53604 - DNA, 25 bp, Probe Sequence
gtggaccagagtgttaatgagatgt

SEQ ID NO: 53605 - DNA, 25 bp, Probe Sequence
tgtggaccagagtgttaatgagatg

SEQ ID NO: 53606 - DNA, 25 bp, Probe Sequence
acatagacttactggctgtagcaat

SEQ ID NO: 53607 - DNA, 25 bp, Probe Sequence
aacatagacttactggctgtagcaa

SEQ ID NO: 53608 - DNA, 25 bp, Probe Sequence
tgagatgttattgcagaagagattg

SEQ ID NO: 53609 - DNA, 25 bp, Probe Sequence
cactcagtaaatgtttggttccttt

SEQ ID NO: 53610 - DNA, 25 bp, Probe Sequence
cacctgccattctgactttattaaa

SEQ ID NO: 53611 - DNA, 25 bp, Probe Sequence
gatgttattgcagaagagattgaga

SEQ ID NO: 53612 - DNA, 25 bp, Probe Sequence
agatgttattgcagaagagattgag

SEQ ID NO: 53613 - DNA, 25 bp, Probe Sequence
gagatgttattgcagaagagattga

SEQ ID NO: 53614 - DNA, 25 bp, Probe Sequence
catgtggaccagagtgttaatgaga

SEQ ID NO: 53615 - DNA, 25 bp, Probe Sequence
ccacctgccattctgactttattaa

SEQ ID NO: 53616 - DNA, 25 bp, Probe Sequence
tttattattgcttgtgcctcaactg

SEQ ID NO: 53617 - DNA, 25 bp, Probe Sequence
atgttattgcagaagagattgagaa

SEQ ID NO: 53618 - DNA, 25 bp, Probe Sequence
gcttagagttaggaattgtgttcaa

SEQ ID NO: 53619 - DNA, 25 bp, Probe Sequence
agttaggaattgtgttcaagtgctt

SEQ ID NO: 53620 - DNA, 25 bp, Probe Sequence
tagagttaggaattgtgttcaagtg

SEQ ID NO: 53621 - DNA, 25 bp, Probe Sequence
gagttaggaattgtgttcaagtgct

SEQ ID NO: 53622 - DNA, 25 bp, Probe Sequence
agagttaggaattgtgttcaagtgc

SEQ ID NO: 53623 - DNA, 25 bp, Probe Sequence
ttatctgcctattactcagcctaag

SEQ ID NO: 53624 - DNA, 25 bp, Probe Sequence
ttagagttaggaattgtgttcaagt

SEQ ID NO: 53625 - DNA, 25 bp, Probe Sequence
tatctgcctattactcagcctaagg

SEQ ID NO: 53626 - DNA, 25 bp, Probe Sequence
tgagcttagagttaggaattgtgtt

SEQ ID NO: 53627 - DNA, 25 bp, Probe Sequence
gttaggaattgtgttcaagtgcttg

SEQ ID NO: 53628 - DNA, 25 bp, Probe Sequence
ctgagcttagagttaggaattgtgt

SEQ ID NO: 53629 - DNA, 25 bp, Probe Sequence
agcttagagttaggaattgtgttca

SEQ ID NO: 53630 - DNA, 25 bp, Probe Sequence
gagcttagagttaggaattgtgttc

SEQ ID NO: 53631 - DNA, 25 bp, Probe Sequence
cttagagttaggaattgtgttcaag

SEQ ID NO: 53632 - DNA, 25 bp, Probe Sequence
actgagcttagagttaggaattgtg

SEQ ID NO: 53633 - DNA, 25 bp, Probe Sequence
gtcgtctttatctgcctattactca

SEQ ID NO: 53634 - DNA, 25 bp, Probe Sequence
tgtcgtctttatctgcctattactc

SEQ ID NO: 53635 - DNA, 25 bp, Probe Sequence
gtgtcgtctttatctgcctattact

SEQ ID NO: 53636 - DNA, 25 bp, Probe Sequence
cgtttgtgtgtccttgtaaatatgt

SEQ ID NO: 53637 - DNA, 25 bp, Probe Sequence
gatttccgtctgtagatttaactgc

SEQ ID NO: 53638 - DNA, 25 bp, Probe Sequence
atttccgtctgtagatttaactgct

SEQ ID NO: 53639 - DNA, 25 bp, Probe Sequence
ttaggaattgtgttcaagtgcttgg

SEQ ID NO: 53640 - DNA, 25 bp, Probe Sequence
tgatgtgcaataactgagcttagag

SEQ ID NO: 53641 - DNA, 25 bp, Probe Sequence
gtgatgtgcaataactgagcttaga

SEQ ID NO: 53642 - DNA, 25 bp, Probe Sequence
tatcttctgttcttcctaccttgtg

SEQ ID NO: 53643 - DNA, 25 bp, Probe Sequence
ttatcttctgttcttcctaccttgt

SEQ ID NO: 53644 - DNA, 25 bp, Probe Sequence
tatacgaacctaacctaccttgttg

SEQ ID NO: 53645 - DNA, 25 bp, Probe Sequence
taacttactgagcctgtgacttgta

SEQ ID NO: 53646 - DNA, 25 bp, Probe Sequence
gtatgttgtcttaacttactgagcc

SEQ ID NO: 53647 - DNA, 25 bp, Probe Sequence
tatgttgtcttaacttactgagcct

SEQ ID NO: 53648 - DNA, 25 bp, Probe Sequence
ttatacgaacctaacctaccttgtt

SEQ ID NO: 53649 - DNA, 25 bp, Probe Sequence
cttaacttactgagcctgtgacttg

SEQ ID NO: 53650 - DNA, 25 bp, Probe Sequence
tcttaacttactgagcctgtgactt

SEQ ID NO: 53651 - DNA, 25 bp, Probe Sequence
atgttgtcttaacttactgagcctg

SEQ ID NO: 53652 - DNA, 25 bp, Probe Sequence
acttactgagcctgtgacttgtatt

SEQ ID NO: 53653 - DNA, 25 bp, Probe Sequence
aacttactgagcctgtgacttgtat

SEQ ID NO: 53654 - DNA, 25 bp, Probe Sequence
tgtatgttgtcttaacttactgagc

SEQ ID NO: 53655 - DNA, 25 bp, Probe Sequence
ttgtcttaacttactgagcctgtga

SEQ ID NO: 53656 - DNA, 25 bp, Probe Sequence
atacgaacctaacctaccttgttgt

SEQ ID NO: 53657 - DNA, 25 bp, Probe Sequence
ttaacttactgagcctgtgacttgt

SEQ ID NO: 53658 - DNA, 25 bp, Probe Sequence
tacgaacctaacctaccttgttgtt

SEQ ID NO: 53659 - DNA, 25 bp, Probe Sequence
gttgtcttaacttactgagcctgtg

SEQ ID NO: 53660 - DNA, 25 bp, Probe Sequence
tgttgtcttaacttactgagcctgt

SEQ ID NO: 53661 - DNA, 25 bp, Probe Sequence
gttatacgaacctaacctaccttgt

SEQ ID NO: 53662 - DNA, 25 bp, Probe Sequence
tgttatacgaacctaacctaccttg

SEQ ID NO: 53663 - DNA, 25 bp, Probe Sequence
atcttctgttcttcctaccttgtgc

SEQ ID NO: 53664 - DNA, 25 bp, Probe Sequence
ttgttatacgaacctaacctacctt

SEQ ID NO: 53665 - DNA, 25 bp, Probe Sequence
tgagaggaagactggatagtgagtt

SEQ ID NO: 53666 - DNA, 25 bp, Probe Sequence
cagaacttggagaagagacggaatc

SEQ ID NO: 53667 - DNA, 25 bp, Probe Sequence
agaacttggagaagagacggaatct

SEQ ID NO: 53668 - DNA, 25 bp, Probe Sequence
ctcaccttccataccctacagattc

SEQ ID NO: 53669 - DNA, 25 bp, Probe Sequence
gaatcttctgaactgcctcatcgtc

SEQ ID NO: 53670 - DNA, 25 bp, Probe Sequence
gaacttggagaagagacggaatctt

SEQ ID NO: 53671 - DNA, 25 bp, Probe Sequence
cctcaccttccataccctacagatt

SEQ ID NO: 53672 - DNA, 25 bp, Probe Sequence
tcaccttccataccctacagattcg

SEQ ID NO: 53673 - DNA, 25 bp, Probe Sequence
acagaaattaaacccaagagtttga

SEQ ID NO: 53674 - DNA, 25 bp, Probe Sequence
tttacagaaattaaacccaagagtt

SEQ ID NO: 53675 - DNA, 25 bp, Probe Sequence
cagaaattaaacccaagagtttgat

SEQ ID NO: 53676 - DNA, 25 bp, Probe Sequence
aatcttctgaactgcctcatcgtcc

SEQ ID NO: 53677 - DNA, 25 bp, Probe Sequence
ggaatcttctgaactgcctcatcgt

SEQ ID NO: 53678 - DNA, 25 bp, Probe Sequence
acggaatcttctgaactgcctcatc

SEQ ID NO: 53679 - DNA, 25 bp, Probe Sequence
gacggaatcttctgaactgcctcat

SEQ ID NO: 53680 - DNA, 25 bp, Probe Sequence
ccagaacttggagaagagacggaat

SEQ ID NO: 53681 - DNA, 25 bp, Probe Sequence
tacagaaattaaacccaagagtttg

SEQ ID NO: 53682 - DNA, 25 bp, Probe Sequence
gcttttacagaaattaaacccaaga

SEQ ID NO: 53683 - DNA, 25 bp, Probe Sequence
agaaattaaacccaagagtttgatt

SEQ ID NO: 53684 - DNA, 25 bp, Probe Sequence
cttccataccctacagattcgctcc

SEQ ID NO: 53685 - DNA, 25 bp, Probe Sequence
ccttccataccctacagattcgctc

SEQ ID NO: 53686 - DNA, 25 bp, Probe Sequence
gagacggaatcttctgaactgcctc

SEQ ID NO: 53687 - DNA, 25 bp, Probe Sequence
ggagcttttacagaaattaaaccca

SEQ ID NO: 53688 - DNA, 25 bp, Probe Sequence
tggagcttttacagaaattaaaccc

SEQ ID NO: 53689 - DNA, 25 bp, Probe Sequence
ttacagaaattaaacccaagagttt

SEQ ID NO: 53690 - DNA, 25 bp, Probe Sequence
agaacctaccacagagaatctatcc

SEQ ID NO: 53691 - DNA, 25 bp, Probe Sequence
tagaacctaccacagagaatctatc

SEQ ID NO: 53692 - DNA, 25 bp, Probe Sequence
gtagacattgttctgtggaaggcta

SEQ ID NO: 53693 - DNA, 25 bp, Probe Sequence
tagacattgttctgtggaaggctag

SEQ ID NO: 53694 - DNA, 25 bp, Probe Sequence
cctaccacagagaatctatcccata

SEQ ID NO: 53695 - DNA, 25 bp, Probe Sequence
gcttatgcacgtatattggtatagt

SEQ ID NO: 53696 - DNA, 25 bp, Probe Sequence
tttaaggacttgagtgactttgagg

SEQ ID NO: 53697 - DNA, 25 bp, Probe Sequence
agtagaacctaccacagagaatcta

SEQ ID NO: 53698 - DNA, 25 bp, Probe Sequence
tagtagaacctaccacagagaatct

SEQ ID NO: 53699 - DNA, 25 bp, Probe Sequence
ctaccacagagaatctatcccataa

SEQ ID NO: 53700 - DNA, 25 bp, Probe Sequence
ccttaccttatgaagcagtgagcag

SEQ ID NO: 53701 - DNA, 25 bp, Probe Sequence
tgcacgtatattggtatagtagaac

SEQ ID NO: 53702 - DNA, 25 bp, Probe Sequence
gtagaacctaccacagagaatctat

SEQ ID NO: 53703 - DNA, 25 bp, Probe Sequence
atagtagaacctaccacagagaatc

SEQ ID NO: 53704 - DNA, 25 bp, Probe Sequence
taccacagagaatctatcccataaa

SEQ ID NO: 53705 - DNA, 25 bp, Probe Sequence
gaacctaccacagagaatctatccc

SEQ ID NO: 53706 - DNA, 25 bp, Probe Sequence
gtatagtagaacctaccacagagaa

SEQ ID NO: 53707 - DNA, 25 bp, Probe Sequence
acctaccacagagaatctatcccat

SEQ ID NO: 53708 - DNA, 25 bp, Probe Sequence
aacctaccacagagaatctatccca

SEQ ID NO: 53709 - DNA, 25 bp, Probe Sequence
cttaccttatgaagcagtgagcagc

SEQ ID NO: 53710 - DNA, 25 bp, Probe Sequence
tatgaagcagtgagcagcagtgata

SEQ ID NO: 53711 - DNA, 25 bp, Probe Sequence
gcacgtatattggtatagtagaacc

SEQ ID NO: 53712 - DNA, 25 bp, Probe Sequence
gtcggtagacattgttctgtggaag

SEQ ID NO: 53713 - DNA, 25 bp, Probe Sequence
tgtagaaatgaagtccatattgggc

SEQ ID NO: 53714 - DNA, 25 bp, Probe Sequence
tgtatctggacagatggactgaatg

SEQ ID NO: 53715 - DNA, 25 bp, Probe Sequence
gtatctggacagatggactgaatgc

SEQ ID NO: 53716 - DNA, 25 bp, Probe Sequence
ctgtatctggacagatggactgaat

SEQ ID NO: 53717 - DNA, 25 bp, Probe Sequence
gtactgtatctggacagatggactg

SEQ ID NO: 53718 - DNA, 25 bp, Probe Sequence
tactgtatctggacagatggactga

SEQ ID NO: 53719 - DNA, 25 bp, Probe Sequence
catgagtactgtatctggacagatg

SEQ ID NO: 53720 - DNA, 25 bp, Probe Sequence
atgagtactgtatctggacagatgg

SEQ ID NO: 53721 - DNA, 25 bp, Probe Sequence
tatctggacagatggactgaatgcg

SEQ ID NO: 53722 - DNA, 25 bp, Probe Sequence
actgtatctggacagatggactgaa

SEQ ID NO: 53723 - DNA, 25 bp, Probe Sequence
gagtactgtatctggacagatggac

SEQ ID NO: 53724 - DNA, 25 bp, Probe Sequence
gcatgagtactgtatctggacagat

SEQ ID NO: 53725 - DNA, 25 bp, Probe Sequence
agtactgtatctggacagatggact

SEQ ID NO: 53726 - DNA, 25 bp, Probe Sequence
tgagtactgtatctggacagatgga

SEQ ID NO: 53727 - DNA, 25 bp, Probe Sequence
gttatggtcacagtggttatggatt

SEQ ID NO: 53728 - DNA, 25 bp, Probe Sequence
ccaactgagtgtcttactgtgttat

SEQ ID NO: 53729 - DNA, 25 bp, Probe Sequence
caactgagtgtcttactgtgttatt

SEQ ID NO: 53730 - DNA, 25 bp, Probe Sequence
ttagattgagagcatactggtacat

SEQ ID NO: 53731 - DNA, 25 bp, Probe Sequence
atgtgatgtatatgtagctgatgac

SEQ ID NO: 53732 - DNA, 25 bp, Probe Sequence
tagattgagagcatactggtacatg

SEQ ID NO: 53733 - DNA, 25 bp, Probe Sequence
taatgcctggatctgtgttctactt

SEQ ID NO: 53734 - DNA, 25 bp, Probe Sequence
gattgagagcatactggtacatgag

SEQ ID NO: 53735 - DNA, 25 bp, Probe Sequence
attgagagcatactggtacatgaga

SEQ ID NO: 53736 - DNA, 25 bp, Probe Sequence
agattgagagcatactggtacatga

SEQ ID NO: 53737 - DNA, 25 bp, Probe Sequence
ctaatgcctggatctgtgttctact

SEQ ID NO: 53738 - DNA, 25 bp, Probe Sequence
tgtgatgtatatgtagctgatgacc

SEQ ID NO: 53739 - DNA, 25 bp, Probe Sequence
ggttatggtcacagtggttatggat

SEQ ID NO: 53740 - DNA, 25 bp, Probe Sequence
ttgagagcatactggtacatgagag

SEQ ID NO: 53741 - DNA, 25 bp, Probe Sequence
ttatggatttattggcagtggagta

SEQ ID NO: 53742 - DNA, 25 bp, Probe Sequence
actgagtgtcttactgtgttattaa

SEQ ID NO: 53743 - DNA, 25 bp, Probe Sequence
aactgagtgtcttactgtgttatta

SEQ ID NO: 53744 - DNA, 25 bp, Probe Sequence
tcctttatttgttcagttgtttcca

SEQ ID NO: 53745 - DNA, 25 bp, Probe Sequence
taattctcttgagttgcagttaagc

SEQ ID NO: 53746 - DNA, 25 bp, Probe Sequence
cctaattctcttgagttgcagttaa

SEQ ID NO: 53747 - DNA, 25 bp, Probe Sequence
gttcaaatgagtaaatgtccagacc

SEQ ID NO: 53748 - DNA, 25 bp, Probe Sequence
ttcaaatgagtaaatgtccagacca

SEQ ID NO: 53749 - DNA, 25 bp, Probe Sequence
gtcacagtggttatggatttattgg

SEQ ID NO: 53750 - DNA, 25 bp, Probe Sequence
ggtcacagtggttatggatttattg

SEQ ID NO: 53751 - DNA, 25 bp, Probe Sequence
attcttgatggatgaggagttagtc

SEQ ID NO: 53752 - DNA, 25 bp, Probe Sequence
cattcttgatggatgaggagttagt

SEQ ID NO: 53753 - DNA, 25 bp, Probe Sequence
ctattcctgttgaagcataaccttg

SEQ ID NO: 53754 - DNA, 25 bp, Probe Sequence
tattcctgttgaagcataaccttgg

SEQ ID NO: 53755 - DNA, 25 bp, Probe Sequence
tgtgaggattcaatgagccaatata

SEQ ID NO: 53756 - DNA, 25 bp, Probe Sequence
atagtaggtgtgaggattcaatgag

SEQ ID NO: 53757 - DNA, 25 bp, Probe Sequence
aatagtaggtgtgaggattcaatga

SEQ ID NO: 53758 - DNA, 25 bp, Probe Sequence
ttcttgatggatgaggagttagtca

SEQ ID NO: 53759 - DNA, 25 bp, Probe Sequence
gtgtgaggattcaatgagccaatat

SEQ ID NO: 53760 - DNA, 25 bp, Probe Sequence
tagtaggtgtgaggattcaatgagc

SEQ ID NO: 53761 - DNA, 25 bp, Probe Sequence
gtgaggattcaatgagccaatatat

SEQ ID NO: 53762 - DNA, 25 bp, Probe Sequence
attcaatgagccaatatatccaaga

SEQ ID NO: 53763 - DNA, 25 bp, Probe Sequence
aagagagatcagactgttactgtgt

SEQ ID NO: 53764 - DNA, 25 bp, Probe Sequence
ttcaatgagccaatatatccaagat

SEQ ID NO: 53765 - DNA, 25 bp, Probe Sequence
tgaggattcaatgagccaatatatc

SEQ ID NO: 53766 - DNA, 25 bp, Probe Sequence
gattcaatgagccaatatatccaag

SEQ ID NO: 53767 - DNA, 25 bp, Probe Sequence
agagagatcagactgttactgtgtc

SEQ ID NO: 53768 - DNA, 25 bp, Probe Sequence
ctgagatgctgttaatttgtgactt

SEQ ID NO: 53769 - DNA, 25 bp, Probe Sequence
gggaagaaccattcattcatcattt

SEQ ID NO: 53770 - DNA, 25 bp, Probe Sequence
tgagatgctgttaatttgtgacttt

SEQ ID NO: 53771 - DNA, 25 bp, Probe Sequence
agaaccattcattcatcatttcctg

SEQ ID NO: 53772 - DNA, 25 bp, Probe Sequence
agggaagaaccattcattcatcatt

SEQ ID NO: 53773 - DNA, 25 bp, Probe Sequence
agatgctgttaatttgtgactttgc

SEQ ID NO: 53774 - DNA, 25 bp, Probe Sequence
gagatgctgttaatttgtgactttg

SEQ ID NO: 53775 - DNA, 25 bp, Probe Sequence
aagttattctgcctgtgactcaatt

SEQ ID NO: 53776 - DNA, 25 bp, Probe Sequence
gagttggctgttcacatgattattc

SEQ ID NO: 53777 - DNA, 25 bp, Probe Sequence
agagttggctgttcacatgattatt

SEQ ID NO: 53778 - DNA, 25 bp, Probe Sequence
caagttattctgcctgtgactcaat

SEQ ID NO: 53779 - DNA, 25 bp, Probe Sequence
atatgtaggagagttggctgttcac

SEQ ID NO: 53780 - DNA, 25 bp, Probe Sequence
gagagttggctgttcacatgattat

SEQ ID NO: 53781 - DNA, 25 bp, Probe Sequence
agttggctgttcacatgattattca

SEQ ID NO: 53782 - DNA, 25 bp, Probe Sequence
gttggctgttcacatgattattcag

SEQ ID NO: 53783 - DNA, 25 bp, Probe Sequence
ctgttcacatgattattcagtcctt

SEQ ID NO: 53784 - DNA, 25 bp, Probe Sequence
ttggctgttcacatgattattcagt

SEQ ID NO: 53785 - DNA, 25 bp, Probe Sequence
gctgttcacatgattattcagtcct

SEQ ID NO: 53786 - DNA, 25 bp, Probe Sequence
tggctgttcacatgattattcagtc

SEQ ID NO: 53787 - DNA, 25 bp, Probe Sequence
gttattctgcctgtgactcaatttc

SEQ ID NO: 53788 - DNA, 25 bp, Probe Sequence
gttagcatttcataggattgttgtg

SEQ ID NO: 53789 - DNA, 25 bp, Probe Sequence
agttagcatttcataggattgttgt

SEQ ID NO: 53790 - DNA, 25 bp, Probe Sequence
ttattctgcctgtgactcaatttcc

SEQ ID NO: 53791 - DNA, 25 bp, Probe Sequence
ggctgttcacatgattattcagtcc

SEQ ID NO: 53792 - DNA, 25 bp, Probe Sequence
agttattctgcctgtgactcaattt

SEQ ID NO: 53793 - DNA, 25 bp, Probe Sequence
aagtatgctactgtctccagaacac

SEQ ID NO: 53794 - DNA, 25 bp, Probe Sequence
caagtatgctactgtctccagaaca

SEQ ID NO: 53795 - DNA, 25 bp, Probe Sequence
ggagagttggctgttcacatgatta

SEQ ID NO: 53796 - DNA, 25 bp, Probe Sequence
ttagcatttcataggattgttgtga

SEQ ID NO: 53797 - DNA, 25 bp, Probe Sequence
tattctgcctgtgactcaatttcct

SEQ ID NO: 53798 - DNA, 25 bp, Probe Sequence
tatgtaggagagttggctgttcaca

SEQ ID NO: 53799 - DNA, 25 bp, Probe Sequence
ttatcatcctcactgtggagtaatg

SEQ ID NO: 53800 - DNA, 25 bp, Probe Sequence
cttatcatcctcactgtggagtaat

SEQ ID NO: 53801 - DNA, 25 bp, Probe Sequence
ccttatcatcctcactgtggagtaa

SEQ ID NO: 53802 - DNA, 25 bp, Probe Sequence
tgagaatttggtgtttggaatgttt

SEQ ID NO: 53803 - DNA, 25 bp, Probe Sequence
atgagaatttggtgtttggaatgtt

SEQ ID NO: 53804 - DNA, 25 bp, Probe Sequence
ccgtatgcttacattattgctcttt

SEQ ID NO: 53805 - DNA, 25 bp, Probe Sequence
gggaggagaatctttatcagaaact

SEQ ID NO: 53806 - DNA, 25 bp, Probe Sequence
ctacctttacccagtttgtgtgttt

SEQ ID NO: 53807 - DNA, 25 bp, Probe Sequence
tttcctactacctttacccagtttg

SEQ ID NO: 53808 - DNA, 25 bp, Probe Sequence
tacccaatggcaatatgaaaccttt

SEQ ID NO: 53809 - DNA, 25 bp, Probe Sequence
cccgtatgcttacattattgctctt

SEQ ID NO: 53810 - DNA, 25 bp, Probe Sequence
tacctttacccagtttgtgtgtttg

SEQ ID NO: 53811 - DNA, 25 bp, Probe Sequence
ctacccaatggcaatatgaaacctt

SEQ ID NO: 53812 - DNA, 25 bp, Probe Sequence
ctactacctttacccagtttgtgtg

SEQ ID NO: 53813 - DNA, 25 bp, Probe Sequence
ttcctactacctttacccagtttgt

SEQ ID NO: 53814 - DNA, 25 bp, Probe Sequence
tatcatcctcactgtggagtaatga

SEQ ID NO: 53815 - DNA, 25 bp, Probe Sequence
catgagaatttggtgtttggaatgt

SEQ ID NO: 53816 - DNA, 25 bp, Probe Sequence
tactacctttacccagtttgtgtgt

SEQ ID NO: 53817 - DNA, 25 bp, Probe Sequence
aggagaatctttatcagaaactggt

SEQ ID NO: 53818 - DNA, 25 bp, Probe Sequence
tcctactacctttacccagtttgtg

SEQ ID NO: 53819 - DNA, 25 bp, Probe Sequence
gaggagaatctttatcagaaactgg

SEQ ID NO: 53820 - DNA, 25 bp, Probe Sequence
ggaggagaatctttatcagaaactg

SEQ ID NO: 53821 - DNA, 25 bp, Probe Sequence
ggagaatctttatcagaaactggtt

SEQ ID NO: 53822 - DNA, 25 bp, Probe Sequence
gtgtttgaactgtcactgattcttg

SEQ ID NO: 53823 - DNA, 25 bp, Probe Sequence
ggactgtgtgtgaatgtgtatgtat

SEQ ID NO: 53824 - DNA, 25 bp, Probe Sequence
gactgtgtgtgaatgtgtatgtata

SEQ ID NO: 53825 - DNA, 25 bp, Probe Sequence
aggactgtgtgtgaatgtgtatgta

SEQ ID NO: 53826 - DNA, 25 bp, Probe Sequence
ttaatagattaagttctgaggcagc

SEQ ID NO: 53827 - DNA, 25 bp, Probe Sequence
aatataagccaagggtaatttcagc

SEQ ID NO: 53828 - DNA, 25 bp, Probe Sequence
caggactgtgtgtgaatgtgtatgt

SEQ ID NO: 53829 - DNA, 25 bp, Probe Sequence
aatagattaagttctgaggcagctc

SEQ ID NO: 53830 - DNA, 25 bp, Probe Sequence
taatagattaagttctgaggcagct

SEQ ID NO: 53831 - DNA, 25 bp, Probe Sequence
actgtttaactctttggtgtctgtg

SEQ ID NO: 53832 - DNA, 25 bp, Probe Sequence
actgtgtgtgaatgtgtatgtatac

SEQ ID NO: 53833 - DNA, 25 bp, Probe Sequence
atataagccaagggtaatttcagcg

SEQ ID NO: 53834 - DNA, 25 bp, Probe Sequence
ctgtgtgtgaatgtgtatgtatact

SEQ ID NO: 53835 - DNA, 25 bp, Probe Sequence
atactgtcctcaaatataagccaag

SEQ ID NO: 53836 - DNA, 25 bp, Probe Sequence
cacacaatagcctctgtaggttagg

SEQ ID NO: 53837 - DNA, 25 bp, Probe Sequence
ccacacaatagcctctgtaggttag

SEQ ID NO: 53838 - DNA, 25 bp, Probe Sequence
tgtgtgtgaatgtgtatgtatactt

SEQ ID NO: 53839 - DNA, 25 bp, Probe Sequence
tccacacaatagcctctgtaggtta

SEQ ID NO: 53840 - DNA, 25 bp, Probe Sequence
tactgtcctcaaatataagccaagg

SEQ ID NO: 53841 - DNA, 25 bp, Probe Sequence
atagattaagttctgaggcagctcc

SEQ ID NO: 53842 - DNA, 25 bp, Probe Sequence
gtcctcaaatataagccaagggtaa

SEQ ID NO: 53843 - DNA, 25 bp, Probe Sequence
gtttaactctttggtgtctgtgctc

SEQ ID NO: 53844 - DNA, 25 bp, Probe Sequence
gtggtgactgtttaactctttggtg

SEQ ID NO: 53845 - DNA, 25 bp, Probe Sequence
tcctcaaatataagccaagggtaat

SEQ ID NO: 53846 - DNA, 25 bp, Probe Sequence
gactgtttaactctttggtgtctgt

SEQ ID NO: 53847 - DNA, 25 bp, Probe Sequence
ttgtctattctgtaggcttccatgt

SEQ ID NO: 53848 - DNA, 25 bp, Probe Sequence
tgtctattctgtaggcttccatgtc

SEQ ID NO: 53849 - DNA, 25 bp, Probe Sequence
tacactgacttcaggatagatgttg

SEQ ID NO: 53850 - DNA, 25 bp, Probe Sequence
ttacactgacttcaggatagatgtt

SEQ ID NO: 53851 - DNA, 25 bp, Probe Sequence
gtctattctgtaggcttccatgtcc

SEQ ID NO: 53852 - DNA, 25 bp, Probe Sequence
agtgactggtatttaatgctgatct

SEQ ID NO: 53853 - DNA, 25 bp, Probe Sequence
tctattctgtaggcttccatgtcca

SEQ ID NO: 53854 - DNA, 25 bp, Probe Sequence
acactgacttcaggatagatgttgg

SEQ ID NO: 53855 - DNA, 25 bp, Probe Sequence
tttgtctattctgtaggcttccatg

SEQ ID NO: 53856 - DNA, 25 bp, Probe Sequence
tgacttcaggatagatgttgggatg

SEQ ID NO: 53857 - DNA, 25 bp, Probe Sequence
taaggatgtctttacactgacttca

SEQ ID NO: 53858 - DNA, 25 bp, Probe Sequence
ctattctgtaggcttccatgtccag

SEQ ID NO: 53859 - DNA, 25 bp, Probe Sequence
gtgactggtatttaatgctgatcta

SEQ ID NO: 53860 - DNA, 25 bp, Probe Sequence
cttccatgtccagaatcctgcttaa

SEQ ID NO: 53861 - DNA, 25 bp, Probe Sequence
tgactggtatttaatgctgatctac

SEQ ID NO: 53862 - DNA, 25 bp, Probe Sequence
atacactgtggatgtcattgctgtc

SEQ ID NO: 53863 - DNA, 25 bp, Probe Sequence
gactggtatttaatgctgatctact

SEQ ID NO: 53864 - DNA, 25 bp, Probe Sequence
ttaaggatgtctttacactgacttc

SEQ ID NO: 53865 - DNA, 25 bp, Probe Sequence
gtcgggcaggttgacatatttattt

SEQ ID NO: 53866 - DNA, 25 bp, Probe Sequence
catacactgtggatgtcattgctgt

SEQ ID NO: 53867 - DNA, 25 bp, Probe Sequence
tgtctttacactgacttcaggatag

SEQ ID NO: 53868 - DNA, 25 bp, Probe Sequence
gatgtctttacactgacttcaggat

SEQ ID NO: 53869 - DNA, 25 bp, Probe Sequence
gtctttacactgacttcaggataga

SEQ ID NO: 53870 - DNA, 25 bp, Probe Sequence
aaggatgtctttacactgacttcag

SEQ ID NO: 53871 - DNA, 25 bp, Probe Sequence
attcattcattcatccatcagacac

SEQ ID NO: 53872 - DNA, 25 bp, Probe Sequence
cattcattcattcatccatcagaca

SEQ ID NO: 53873 - DNA, 25 bp, Probe Sequence
tcattcattcattcatccatcagac

SEQ ID NO: 53874 - DNA, 25 bp, Probe Sequence
ttcattcattcatccatcagacacc

SEQ ID NO: 53875 - DNA, 25 bp, Probe Sequence
ttcattcattcattcatccatcaga

SEQ ID NO: 53876 - DNA, 25 bp, Probe Sequence
tcattcattcatccatcagacacct

SEQ ID NO: 53877 - DNA, 25 bp, Probe Sequence
cattcattcattcattcatccatca

SEQ ID NO: 53878 - DNA, 25 bp, Probe Sequence
cctcattcattcattcattcattca

SEQ ID NO: 53879 - DNA, 25 bp, Probe Sequence
attcattcattcattcatccatcag

SEQ ID NO: 53880 - DNA, 25 bp, Probe Sequence
tcattcattcattcattcatccatc

SEQ ID NO: 53881 - DNA, 25 bp, Probe Sequence
ctctaggtcattccacagacttaca

SEQ ID NO: 53882 - DNA, 25 bp, Probe Sequence
cattcattcatccatcagacacctg

SEQ ID NO: 53883 - DNA, 25 bp, Probe Sequence
taggtcattccacagacttacacag

SEQ ID NO: 53884 - DNA, 25 bp, Probe Sequence
tctaggtcattccacagacttacac

SEQ ID NO: 53885 - DNA, 25 bp, Probe Sequence
ttcattcattcattcattcatccat

SEQ ID NO: 53886 - DNA, 25 bp, Probe Sequence
attcattcattcattcattcatcca

SEQ ID NO: 53887 - DNA, 25 bp, Probe Sequence
tcttccactgagcttcactaataat

SEQ ID NO: 53888 - DNA, 25 bp, Probe Sequence
tctccctcattcattcattcattca

SEQ ID NO: 53889 - DNA, 25 bp, Probe Sequence
ctaggtcattccacagacttacaca

SEQ ID NO: 53890 - DNA, 25 bp, Probe Sequence
gccgagattgaaatatgaaatggtt

SEQ ID NO: 53891 - DNA, 25 bp, Probe Sequence
ctcttccactgagcttcactaataa

SEQ ID NO: 53892 - DNA, 25 bp, Probe Sequence
ctctccctcattcattcattcattc

SEQ ID NO: 53893 - DNA, 25 bp, Probe Sequence
cctctccctcattcattcattcatt

SEQ ID NO: 53894 - DNA, 25 bp, Probe Sequence
cctctaggtcattccacagacttac

SEQ ID NO: 53895 - DNA, 25 bp, Probe Sequence
aacgcaatctataatctccttccag

SEQ ID NO: 53896 - DNA, 25 bp, Probe Sequence
caacgcaatctataatctccttcca

SEQ ID NO: 53897 - DNA, 25 bp, Probe Sequence
acgcaatctataatctccttccaga

SEQ ID NO: 53898 - DNA, 25 bp, Probe Sequence
gcaacgcaatctataatctccttcc

SEQ ID NO: 53899 - DNA, 25 bp, Probe Sequence
ggcaacgcaatctataatctccttc

SEQ ID NO: 53900 - DNA, 25 bp, Probe Sequence
cttctacagcctcagacaatgactt

SEQ ID NO: 53901 - DNA, 25 bp, Probe Sequence
atagcgaacctccatctcaaattaa

SEQ ID NO: 53902 - DNA, 25 bp, Probe Sequence
aatagcgaacctccatctcaaatta

SEQ ID NO: 53903 - DNA, 25 bp, Probe Sequence
gagggcaaggctataatagatgaat

SEQ ID NO: 53904 - DNA, 25 bp, Probe Sequence
tagcgaacctccatctcaaattaaa

SEQ ID NO: 53905 - DNA, 25 bp, Probe Sequence
agggcaaggctataatagatgaatt

SEQ ID NO: 53906 - DNA, 25 bp, Probe Sequence
cttaaattagcctaactgaactgcg

SEQ ID NO: 53907 - DNA, 25 bp, Probe Sequence
cgcaatctataatctccttccagat

SEQ ID NO: 53908 - DNA, 25 bp, Probe Sequence
aattagcctaactgaactgcgttga

SEQ ID NO: 53909 - DNA, 25 bp, Probe Sequence
ttaaattagcctaactgaactgcgt

SEQ ID NO: 53910 - DNA, 25 bp, Probe Sequence
tcttaaattagcctaactgaactgc

SEQ ID NO: 53911 - DNA, 25 bp, Probe Sequence
gggcaaggctataatagatgaattt

SEQ ID NO: 53912 - DNA, 25 bp, Probe Sequence
caacaatagcgaacctccatctcaa

SEQ ID NO: 53913 - DNA, 25 bp, Probe Sequence
tgagggcaaggctataatagatgaa

SEQ ID NO: 53914 - DNA, 25 bp, Probe Sequence
taaattagcctaactgaactgcgtt

SEQ ID NO: 53915 - DNA, 25 bp, Probe Sequence
caatagcgaacctccatctcaaatt

SEQ ID NO: 53916 - DNA, 25 bp, Probe Sequence
tatatgtttgccaatctccttgttt

SEQ ID NO: 53917 - DNA, 25 bp, Probe Sequence
ctgagggcaaggctataatagatga

SEQ ID NO: 53918 - DNA, 25 bp, Probe Sequence
gctgcttcaactttggaatatatgt

SEQ ID NO: 53919 - DNA, 25 bp, Probe Sequence
gctgttgtgatctgtgtagttaatg

SEQ ID NO: 53920 - DNA, 25 bp, Probe Sequence
tgaatctgtcagtctcttaggtaac

SEQ ID NO: 53921 - DNA, 25 bp, Probe Sequence
gttgaatctgtcagtctcttaggta

SEQ ID NO: 53922 - DNA, 25 bp, Probe Sequence
atctgtcagtctcttaggtaacttc

SEQ ID NO: 53923 - DNA, 25 bp, Probe Sequence
gaatctgtcagtctcttaggtaact

SEQ ID NO: 53924 - DNA, 25 bp, Probe Sequence
ctgttgtgatctgtgtagttaatgt

SEQ ID NO: 53925 - DNA, 25 bp, Probe Sequence
tctgtcagtctcttaggtaacttcc

SEQ ID NO: 53926 - DNA, 25 bp, Probe Sequence
aatctgtcagtctcttaggtaactt

SEQ ID NO: 53927 - DNA, 25 bp, Probe Sequence
ttgaatctgtcagtctcttaggtaa

SEQ ID NO: 53928 - DNA, 25 bp, Probe Sequence
tctgtattgccaatcaaggttcatt

SEQ ID NO: 53929 - DNA, 25 bp, Probe Sequence
ttctgtattgccaatcaaggttcat

SEQ ID NO: 53930 - DNA, 25 bp, Probe Sequence
ttctggtgtcacttcagtaattctg

SEQ ID NO: 53931 - DNA, 25 bp, Probe Sequence
ggtgtcacttcagtaattctggtag

SEQ ID NO: 53932 - DNA, 25 bp, Probe Sequence
tcagtctcttaggtaacttcctgta

SEQ ID NO: 53933 - DNA, 25 bp, Probe Sequence
cttctgtattgccaatcaaggttca

SEQ ID NO: 53934 - DNA, 25 bp, Probe Sequence
cagtctcttaggtaacttcctgtaa

SEQ ID NO: 53935 - DNA, 25 bp, Probe Sequence
gtcacttcagtaattctggtagcag

SEQ ID NO: 53936 - DNA, 25 bp, Probe Sequence
ctgtcagtctcttaggtaacttcct

SEQ ID NO: 53937 - DNA, 25 bp, Probe Sequence
agctgttgtgatctgtgtagttaat

SEQ ID NO: 53938 - DNA, 25 bp, Probe Sequence
tggtgtcacttcagtaattctggta

SEQ ID NO: 53939 - DNA, 25 bp, Probe Sequence
gtgtcacttcagtaattctggtagc

SEQ ID NO: 53940 - DNA, 25 bp, Probe Sequence
gtcagtctcttaggtaacttcctgt

SEQ ID NO: 53941 - DNA, 25 bp, Probe Sequence
tgtcagtctcttaggtaacttcctg

SEQ ID NO: 53942 - DNA, 25 bp, Probe Sequence
tgttgtgatctgtgtagttaatgta

SEQ ID NO: 53943 - DNA, 25 bp, Probe Sequence
attcttatacctgctcctctgattc

SEQ ID NO: 53944 - DNA, 25 bp, Probe Sequence
ttcttatacctgctcctctgattct

SEQ ID NO: 53945 - DNA, 25 bp, Probe Sequence
caattcttatacctgctcctctgat

SEQ ID NO: 53946 - DNA, 25 bp, Probe Sequence
ttcaattcttatacctgctcctctg

SEQ ID NO: 53947 - DNA, 25 bp, Probe Sequence
cttcaattcttatacctgctcctct

SEQ ID NO: 53948 - DNA, 25 bp, Probe Sequence
ttcctgccttcaattcttatacctg

SEQ ID NO: 53949 - DNA, 25 bp, Probe Sequence
ccttcaattcttatacctgctcctc

SEQ ID NO: 53950 - DNA, 25 bp, Probe Sequence
tcttatacctgctcctctgattctg

SEQ ID NO: 53951 - DNA, 25 bp, Probe Sequence
aattcttatacctgctcctctgatt

SEQ ID NO: 53952 - DNA, 25 bp, Probe Sequence
aggattgagatagaggagaacaaga

SEQ ID NO: 53953 - DNA, 25 bp, Probe Sequence
caggattgagatagaggagaacaag

SEQ ID NO: 53954 - DNA, 25 bp, Probe Sequence
ggattgagatagaggagaacaagaa

SEQ ID NO: 53955 - DNA, 25 bp, Probe Sequence
tcaattcttatacctgctcctctga

SEQ ID NO: 53956 - DNA, 25 bp, Probe Sequence
ctgccttcaattcttatacctgctc

SEQ ID NO: 53957 - DNA, 25 bp, Probe Sequence
gagagtgataattcagaccgtgttc

SEQ ID NO: 53958 - DNA, 25 bp, Probe Sequence
gacttggagttagcagatgacaatc

SEQ ID NO: 53959 - DNA, 25 bp, Probe Sequence
gcaggattgagatagaggagaacaa

SEQ ID NO: 53960 - DNA, 25 bp, Probe Sequence
tgacttggagttagcagatgacaat

SEQ ID NO: 53961 - DNA, 25 bp, Probe Sequence
atgacttggagttagcagatgacaa

SEQ ID NO: 53962 - DNA, 25 bp, Probe Sequence
gccttcaattcttatacctgctcct

SEQ ID NO: 53963 - DNA, 25 bp, Probe Sequence
cttatacctgctcctctgattctgc

SEQ ID NO: 53964 - DNA, 25 bp, Probe Sequence
tgccttcaattcttatacctgctcc

SEQ ID NO: 53965 - DNA, 25 bp, Probe Sequence
cctgccttcaattcttatacctgct

SEQ ID NO: 53966 - DNA, 25 bp, Probe Sequence
tcctgccttcaattcttatacctgc

SEQ ID NO: 53967 - DNA, 25 bp, Probe Sequence
gttacagtatgaacacacagcagag

SEQ ID NO: 53968 - DNA, 25 bp, Probe Sequence
ttacagtatgaacacacagcagagg

SEQ ID NO: 53969 - DNA, 25 bp, Probe Sequence
cttagacgacgtgttacagtatgaa

SEQ ID NO: 53970 - DNA, 25 bp, Probe Sequence
ccaaggcagaatctaaatcacacta

SEQ ID NO: 53971 - DNA, 25 bp, Probe Sequence
ggttaatccatacacaaagacggta

SEQ ID NO: 53972 - DNA, 25 bp, Probe Sequence
ttagacgacgtgttacagtatgaac

SEQ ID NO: 53973 - DNA, 25 bp, Probe Sequence
caaggcagaatctaaatcacactat

SEQ ID NO: 53974 - DNA, 25 bp, Probe Sequence
tgtttctgccaaaggtaaattaact

SEQ ID NO: 53975 - DNA, 25 bp, Probe Sequence
tgttgtttctgccaaaggtaaatta

SEQ ID NO: 53976 - DNA, 25 bp, Probe Sequence
ctgttgtttctgccaaaggtaaatt

SEQ ID NO: 53977 - DNA, 25 bp, Probe Sequence
gttaatccatacacaaagacggtac

SEQ ID NO: 53978 - DNA, 25 bp, Probe Sequence
gagattctttcctgaacactgactg

SEQ ID NO: 53979 - DNA, 25 bp, Probe Sequence
tctgttgtttctgccaaaggtaaat

SEQ ID NO: 53980 - DNA, 25 bp, Probe Sequence
atctgttgtttctgccaaaggtaaa

SEQ ID NO: 53981 - DNA, 25 bp, Probe Sequence
aatctgttgtttctgccaaaggtaa

SEQ ID NO: 53982 - DNA, 25 bp, Probe Sequence
ccttagacgacgtgttacagtatga

SEQ ID NO: 53983 - DNA, 25 bp, Probe Sequence
aaggcagaatctaaatcacactatt

SEQ ID NO: 53984 - DNA, 25 bp, Probe Sequence
aaatgtaagacaccaaatcctccat

SEQ ID NO: 53985 - DNA, 25 bp, Probe Sequence
ttgtttctgccaaaggtaaattaac

SEQ ID NO: 53986 - DNA, 25 bp, Probe Sequence
gttgtttctgccaaaggtaaattaa

SEQ ID NO: 53987 - DNA, 25 bp, Probe Sequence
gtaagacaccaaatcctccatctct

SEQ ID NO: 53988 - DNA, 25 bp, Probe Sequence
aatgtaagacaccaaatcctccatc

SEQ ID NO: 53989 - DNA, 25 bp, Probe Sequence
gaaatgtaagacaccaaatcctcca

SEQ ID NO: 53990 - DNA, 25 bp, Probe Sequence
gaatctgttgtttctgccaaaggta

SEQ ID NO: 53991 - DNA, 25 bp, Probe Sequence
aggcatggaagagaatggttactaa

SEQ ID NO: 53992 - DNA, 25 bp, Probe Sequence
aaggcatggaagagaatggttacta

SEQ ID NO: 53993 - DNA, 25 bp, Probe Sequence
aagaaggcatggaagagaatggtta

SEQ ID NO: 53994 - DNA, 25 bp, Probe Sequence
tgaatactaccaaacagccatacat

SEQ ID NO: 53995 - DNA, 25 bp, Probe Sequence
actgtgatgtttctgaatactacca

SEQ ID NO: 53996 - DNA, 25 bp, Probe Sequence
ttggtgtaaagaagaatccctcatc

SEQ ID NO: 53997 - DNA, 25 bp, Probe Sequence
aagagaatggttactaaagtgtgct

SEQ ID NO: 53998 - DNA, 25 bp, Probe Sequence
gaagagaatggttactaaagtgtgc

SEQ ID NO: 53999 - DNA, 25 bp, Probe Sequence
tggaagagaatggttactaaagtgt

SEQ ID NO: 54000 - DNA, 25 bp, Probe Sequence
ttgaagaaactgccattactgtgat

SEQ ID NO: 54001 - DNA, 25 bp, Probe Sequence
attgaagaaactgccattactgtga

SEQ ID NO: 54002 - DNA, 25 bp, Probe Sequence
aattgaagaaactgccattactgtg

SEQ ID NO: 54003 - DNA, 25 bp, Probe Sequence
ggaagagaatggttactaaagtgtg

SEQ ID NO: 54004 - DNA, 25 bp, Probe Sequence
attgaagtaaatgtgagcgaattgg

SEQ ID NO: 54005 - DNA, 25 bp, Probe Sequence
tacttggtgtaaagaagaatccctc

SEQ ID NO: 54006 - DNA, 25 bp, Probe Sequence
cttggtgtaaagaagaatccctcat

SEQ ID NO: 54007 - DNA, 25 bp, Probe Sequence
agagaatggttactaaagtgtgctt

SEQ ID NO: 54008 - DNA, 25 bp, Probe Sequence
gccattactgtgatgtttctgaata

SEQ ID NO: 54009 - DNA, 25 bp, Probe Sequence
atacttggtgtaaagaagaatccct

SEQ ID NO: 54010 - DNA, 25 bp, Probe Sequence
ctgtgatgtttctgaatactaccaa

SEQ ID NO: 54011 - DNA, 25 bp, Probe Sequence
tgccattactgtgatgtttctgaat

SEQ ID NO: 54012 - DNA, 25 bp, Probe Sequence
aagaaactgccattactgtgatgtt

SEQ ID NO: 54013 - DNA, 25 bp, Probe Sequence
gaaggcatggaagagaatggttact

SEQ ID NO: 54014 - DNA, 25 bp, Probe Sequence
agaaggcatggaagagaatggttac

SEQ ID NO: 54015 - DNA, 25 bp, Probe Sequence
ttggctagttgtgtgtgtaatgtta

SEQ ID NO: 54016 - DNA, 25 bp, Probe Sequence
aattgttatcagcattgaccaagtg

SEQ ID NO: 54017 - DNA, 25 bp, Probe Sequence
tggctagttgtgtgtgtaatgttac

SEQ ID NO: 54018 - DNA, 25 bp, Probe Sequence
taattgttatcagcattgaccaagt

SEQ ID NO: 54019 - DNA, 25 bp, Probe Sequence
gctagttgtgtgtgtaatgttactt

SEQ ID NO: 54020 - DNA, 25 bp, Probe Sequence
tcttaattgttatcagcattgacca

SEQ ID NO: 54021 - DNA, 25 bp, Probe Sequence
ttctatatgttgcgttgtgatgaca

SEQ ID NO: 54022 - DNA, 25 bp, Probe Sequence
ggctagttgtgtgtgtaatgttact

SEQ ID NO: 54023 - DNA, 25 bp, Probe Sequence
tgttgcgttgtgatgacattatctt

SEQ ID NO: 54024 - DNA, 25 bp, Probe Sequence
ttaattgttatcagcattgaccaag

SEQ ID NO: 54025 - DNA, 25 bp, Probe Sequence
cttaattgttatcagcattgaccaa

SEQ ID NO: 54026 - DNA, 25 bp, Probe Sequence
attgttatcagcattgaccaagtgg

SEQ ID NO: 54027 - DNA, 25 bp, Probe Sequence
caagttggaagctattcggataatt

SEQ ID NO: 54028 - DNA, 25 bp, Probe Sequence
ttcttaattgttatcagcattgacc

SEQ ID NO: 54029 - DNA, 25 bp, Probe Sequence
tttctatatgttgcgttgtgatgac

SEQ ID NO: 54030 - DNA, 25 bp, Probe Sequence
gtttctatatgttgcgttgtgatga

SEQ ID NO: 54031 - DNA, 25 bp, Probe Sequence
tgtttctatatgttgcgttgtgatg

SEQ ID NO: 54032 - DNA, 25 bp, Probe Sequence
atgtttctatatgttgcgttgtgat

SEQ ID NO: 54033 - DNA, 25 bp, Probe Sequence
ccagggattgtgaaataaatgttgc

SEQ ID NO: 54034 - DNA, 25 bp, Probe Sequence
tccagggattgtgaaataaatgttg

SEQ ID NO: 54035 - DNA, 25 bp, Probe Sequence
tatgtttctatatgttgcgttgtga

SEQ ID NO: 54036 - DNA, 25 bp, Probe Sequence
atgtgtaactgaatggtttgtgaaa

SEQ ID NO: 54037 - DNA, 25 bp, Probe Sequence
aatgtgtaactgaatggtttgtgaa

SEQ ID NO: 54038 - DNA, 25 bp, Probe Sequence
aattaggtcattcaggacagctaag

SEQ ID NO: 54039 - DNA, 25 bp, Probe Sequence
aatacacctccaagctgaatatgaa

SEQ ID NO: 54040 - DNA, 25 bp, Probe Sequence
caatacacctccaagctgaatatga

SEQ ID NO: 54041 - DNA, 25 bp, Probe Sequence
gacaatacacctccaagctgaatat

SEQ ID NO: 54042 - DNA, 25 bp, Probe Sequence
acaatacacctccaagctgaatatg

SEQ ID NO: 54043 - DNA, 25 bp, Probe Sequence
agacaatacacctccaagctgaata

SEQ ID NO: 54044 - DNA, 25 bp, Probe Sequence
atatttaacaacccgtgctttgaag

SEQ ID NO: 54045 - DNA, 25 bp, Probe Sequence
tatttaacaacccgtgctttgaaga

SEQ ID NO: 54046 - DNA, 25 bp, Probe Sequence
atttaacaacccgtgctttgaagaa

SEQ ID NO: 54047 - DNA, 25 bp, Probe Sequence
atacacctccaagctgaatatgaaa

SEQ ID NO: 54048 - DNA, 25 bp, Probe Sequence
aatatttaacaacccgtgctttgaa

SEQ ID NO: 54049 - DNA, 25 bp, Probe Sequence
gagacaatacacctccaagctgaat

SEQ ID NO: 54050 - DNA, 25 bp, Probe Sequence
tttaacaacccgtgctttgaagaag

SEQ ID NO: 54051 - DNA, 25 bp, Probe Sequence
gtcattaggaagctggtcatggaac

SEQ ID NO: 54052 - DNA, 25 bp, Probe Sequence
ttaacaacccgtgctttgaagaaga

SEQ ID NO: 54053 - DNA, 25 bp, Probe Sequence
taacaacccgtgctttgaagaagag

SEQ ID NO: 54054 - DNA, 25 bp, Probe Sequence
tgaaatatttaacaacccgtgcttt

SEQ ID NO: 54055 - DNA, 25 bp, Probe Sequence
ggagtgaaatatttaacaacccgtg

SEQ ID NO: 54056 - DNA, 25 bp, Probe Sequence
atggagtgaaatatttaacaacccg

SEQ ID NO: 54057 - DNA, 25 bp, Probe Sequence
ggtcattaggaagctggtcatggaa

SEQ ID NO: 54058 - DNA, 25 bp, Probe Sequence
gtgaaatatttaacaacccgtgctt

SEQ ID NO: 54059 - DNA, 25 bp, Probe Sequence
tggagtgaaatatttaacaacccgt

SEQ ID NO: 54060 - DNA, 25 bp, Probe Sequence
tacacctccaagctgaatatgaaaa

SEQ ID NO: 54061 - DNA, 25 bp, Probe Sequence
gagtgaaatatttaacaacccgtgc

SEQ ID NO: 54062 - DNA, 25 bp, Probe Sequence
aaatatttaacaacccgtgctttga

SEQ ID NO: 54063 - DNA, 25 bp, Probe Sequence
tgtaatagataatggctgactggac

SEQ ID NO: 54064 - DNA, 25 bp, Probe Sequence
tcagaatagcaagtggtggtatatc

SEQ ID NO: 54065 - DNA, 25 bp, Probe Sequence
ctgtaatagataatggctgactgga

SEQ ID NO: 54066 - DNA, 25 bp, Probe Sequence
gtaatagataatggctgactggacc

SEQ ID NO: 54067 - DNA, 25 bp, Probe Sequence
ttcagaatagcaagtggtggtatat

SEQ ID NO: 54068 - DNA, 25 bp, Probe Sequence
tagcaagtggtggtatatcttatcc

SEQ ID NO: 54069 - DNA, 25 bp, Probe Sequence
cagaatagcaagtggtggtatatct

SEQ ID NO: 54070 - DNA, 25 bp, Probe Sequence
ggacataatcatcactcagtaggta

SEQ ID NO: 54071 - DNA, 25 bp, Probe Sequence
tctgtaatagataatggctgactgg

SEQ ID NO: 54072 - DNA, 25 bp, Probe Sequence
agaatagcaagtggtggtatatctt

SEQ ID NO: 54073 - DNA, 25 bp, Probe Sequence
acctataccagtacagaatgatcct

SEQ ID NO: 54074 - DNA, 25 bp, Probe Sequence
cacctataccagtacagaatgatcc

SEQ ID NO: 54075 - DNA, 25 bp, Probe Sequence
ccacctataccagtacagaatgatc

SEQ ID NO: 54076 - DNA, 25 bp, Probe Sequence
accacctataccagtacagaatgat

SEQ ID NO: 54077 - DNA, 25 bp, Probe Sequence
ctctgtaatagataatggctgactg

SEQ ID NO: 54078 - DNA, 25 bp, Probe Sequence
tctctgtaatagataatggctgact

SEQ ID NO: 54079 - DNA, 25 bp, Probe Sequence
ctctctgtaatagataatggctgac

SEQ ID NO: 54080 - DNA, 25 bp, Probe Sequence
gataatgtgcctcaggttaatggtg

SEQ ID NO: 54081 - DNA, 25 bp, Probe Sequence
tctctctgtaatagataatggctga

SEQ ID NO: 54082 - DNA, 25 bp, Probe Sequence
caccacctataccagtacagaatga

SEQ ID NO: 54083 - DNA, 25 bp, Probe Sequence
gagtgacacagttgctgatatagaa

SEQ ID NO: 54084 - DNA, 25 bp, Probe Sequence
aagagtgacacagttgctgatatag

SEQ ID NO: 54085 - DNA, 25 bp, Probe Sequence
gaagagtgacacagttgctgatata

SEQ ID NO: 54086 - DNA, 25 bp, Probe Sequence
agacctcctgtagatataagagaga

SEQ ID NO: 54087 - DNA, 25 bp, Probe Sequence
tttatgtgtatcgggagtgtgttta

SEQ ID NO: 54088 - DNA, 25 bp, Probe Sequence
tatttatgtgtatcgggagtgtgtt

SEQ ID NO: 54089 - DNA, 25 bp, Probe Sequence
ttatttatgtgtatcgggagtgtgt

SEQ ID NO: 54090 - DNA, 25 bp, Probe Sequence
ttatgtgtatcgggagtgtgtttag

SEQ ID NO: 54091 - DNA, 25 bp, Probe Sequence
atttatgtgtatcgggagtgtgttt

SEQ ID NO: 54092 - DNA, 25 bp, Probe Sequence
tatgtgtatcgggagtgtgtttagt

SEQ ID NO: 54093 - DNA, 25 bp, Probe Sequence
attatttatgtgtatcgggagtgtg

SEQ ID NO: 54094 - DNA, 25 bp, Probe Sequence
gatttcaaacagtgatagacttgcc

SEQ ID NO: 54095 - DNA, 25 bp, Probe Sequence
agatttcaaacagtgatagacttgc

SEQ ID NO: 54096 - DNA, 25 bp, Probe Sequence
tatcgggagtgtgtttagtctgttt

SEQ ID NO: 54097 - DNA, 25 bp, Probe Sequence
tcaaacagtgatagacttgccattt

SEQ ID NO: 54098 - DNA, 25 bp, Probe Sequence
ttcaaacagtgatagacttgccatt

SEQ ID NO: 54099 - DNA, 25 bp, Probe Sequence
tttcaaacagtgatagacttgccat

SEQ ID NO: 54100 - DNA, 25 bp, Probe Sequence
atttcaaacagtgatagacttgcca

SEQ ID NO: 54101 - DNA, 25 bp, Probe Sequence
ctgcgtatttgtaaatagcctgatg

SEQ ID NO: 54102 - DNA, 25 bp, Probe Sequence
ctttcatcctgtctgtgttatgtgg

SEQ ID NO: 54103 - DNA, 25 bp, Probe Sequence
cctttcatcctgtctgtgttatgtg

SEQ ID NO: 54104 - DNA, 25 bp, Probe Sequence
tcctttcatcctgtctgtgttatgt

SEQ ID NO: 54105 - DNA, 25 bp, Probe Sequence
aattctcagatcaaatgtgccttaa

SEQ ID NO: 54106 - DNA, 25 bp, Probe Sequence
aaattctcagatcaaatgtgcctta

SEQ ID NO: 54107 - DNA, 25 bp, Probe Sequence
taaattctcagatcaaatgtgcctt

SEQ ID NO: 54108 - DNA, 25 bp, Probe Sequence
ttaaattctcagatcaaatgtgcct

SEQ ID NO: 54109 - DNA, 25 bp, Probe Sequence
gttaaattctcagatcaaatgtgcc

SEQ ID NO: 54110 - DNA, 25 bp, Probe Sequence
gccatttcttgagtacctgttagtt

SEQ ID NO: 54111 - DNA, 25 bp, Probe Sequence
ctgtgtcatcttctggagttatcaa

SEQ ID NO: 54112 - DNA, 25 bp, Probe Sequence
tcagtacagatagcaattagtcagc

SEQ ID NO: 54113 - DNA, 25 bp, Probe Sequence
ctcagataactcagtacagatagca

SEQ ID NO: 54114 - DNA, 25 bp, Probe Sequence
cactgtgtcatcttctggagttatc

SEQ ID NO: 54115 - DNA, 25 bp, Probe Sequence
actgtgtcatcttctggagttatca

SEQ ID NO: 54116 - DNA, 25 bp, Probe Sequence
tcagataactcagtacagatagcaa

SEQ ID NO: 54117 - DNA, 25 bp, Probe Sequence
ctcagtacagatagcaattagtcag

SEQ ID NO: 54118 - DNA, 25 bp, Probe Sequence
tctcagataactcagtacagatagc

SEQ ID NO: 54119 - DNA, 25 bp, Probe Sequence
tcatagacactgtgctaatgtgaat

SEQ ID NO: 54120 - DNA, 25 bp, Probe Sequence
actcagtacagatagcaattagtca

SEQ ID NO: 54121 - DNA, 25 bp, Probe Sequence
catagacactgtgctaatgtgaatt

SEQ ID NO: 54122 - DNA, 25 bp, Probe Sequence
ctcatagacactgtgctaatgtgaa

SEQ ID NO: 54123 - DNA, 25 bp, Probe Sequence
ttctcatagacactgtgctaatgtg

SEQ ID NO: 54124 - DNA, 25 bp, Probe Sequence
aatgtaatgtaagacaccaacagaa

SEQ ID NO: 54125 - DNA, 25 bp, Probe Sequence
tgattacaatggagtaaccgacaat

SEQ ID NO: 54126 - DNA, 25 bp, Probe Sequence
ttgattacaatggagtaaccgacaa

SEQ ID NO: 54127 - DNA, 25 bp, Probe Sequence
tctcatagacactgtgctaatgtga

SEQ ID NO: 54128 - DNA, 25 bp, Probe Sequence
cagataactcagtacagatagcaat

SEQ ID NO: 54129 - DNA, 25 bp, Probe Sequence
ctgtacctatcaggactatacctca

SEQ ID NO: 54130 - DNA, 25 bp, Probe Sequence
actgtacctatcaggactatacctc

SEQ ID NO: 54131 - DNA, 25 bp, Probe Sequence
aactgtacctatcaggactatacct

SEQ ID NO: 54132 - DNA, 25 bp, Probe Sequence
tgtacctatcaggactatacctcat

SEQ ID NO: 54133 - DNA, 25 bp, Probe Sequence
acaatcaagacaacacaagaattat

SEQ ID NO: 54134 - DNA, 25 bp, Probe Sequence
atacaatcaagacaacacaagaatt

SEQ ID NO: 54135 - DNA, 25 bp, Probe Sequence
cctgtaattcgcataagtcatagaa

SEQ ID NO: 54136 - DNA, 25 bp, Probe Sequence
ggcaatagtagtagctgtctcttag

SEQ ID NO: 54137 - DNA, 25 bp, Probe Sequence
ataggcaatagtagtagctgtctct

SEQ ID NO: 54138 - DNA, 25 bp, Probe Sequence
aggcaatagtagtagctgtctctta

SEQ ID NO: 54139 - DNA, 25 bp, Probe Sequence
taggcaatagtagtagctgtctctt

SEQ ID NO: 54140 - DNA, 25 bp, Probe Sequence
tgtataggcaatagtagtagctgtc

SEQ ID NO: 54141 - DNA, 25 bp, Probe Sequence
ctgtataggcaatagtagtagctgt

SEQ ID NO: 54142 - DNA, 25 bp, Probe Sequence
gtataggcaatagtagtagctgtct

SEQ ID NO: 54143 - DNA, 25 bp, Probe Sequence
tataggcaatagtagtagctgtctc

SEQ ID NO: 54144 - DNA, 25 bp, Probe Sequence
gcaatagtagtagctgtctcttaga

SEQ ID NO: 54145 - DNA, 25 bp, Probe Sequence
gctcaagtagatgcccataataaga

SEQ ID NO: 54146 - DNA, 25 bp, Probe Sequence
gccaatactccatttcataaaccat

SEQ ID NO: 54147 - DNA, 25 bp, Probe Sequence
tgctcaagtagatgcccataataag

SEQ ID NO: 54148 - DNA, 25 bp, Probe Sequence
ttgctcaagtagatgcccataataa

SEQ ID NO: 54149 - DNA, 25 bp, Probe Sequence
ccctgtaattcgcataagtcataga

SEQ ID NO: 54150 - DNA, 25 bp, Probe Sequence
tccctgtaattcgcataagtcatag

SEQ ID NO: 54151 - DNA, 25 bp, Probe Sequence
ttccctgtaattcgcataagtcata

SEQ ID NO: 54152 - DNA, 25 bp, Probe Sequence
gttgctcaagtagatgcccataata

SEQ ID NO: 54153 - DNA, 25 bp, Probe Sequence
attccctgtaattcgcataagtcat

SEQ ID NO: 54154 - DNA, 25 bp, Probe Sequence
ttcaaactcagtgccattaacaaac

SEQ ID NO: 54155 - DNA, 25 bp, Probe Sequence
ctgttagtttactcttgggctcttt

SEQ ID NO: 54156 - DNA, 25 bp, Probe Sequence
agggactcagatttatatggcttta

SEQ ID NO: 54157 - DNA, 25 bp, Probe Sequence
gataagactgactggaatcaagctg

SEQ ID NO: 54158 - DNA, 25 bp, Probe Sequence
ttcatagaggttactgtaattgggc

SEQ ID NO: 54159 - DNA, 25 bp, Probe Sequence
agccactgtaagcatgttactatta

SEQ ID NO: 54160 - DNA, 25 bp, Probe Sequence
gccactgtaagcatgttactattaa

SEQ ID NO: 54161 - DNA, 25 bp, Probe Sequence
gagccactgtaagcatgttactatt

SEQ ID NO: 54162 - DNA, 25 bp, Probe Sequence
tttcctggagtacatttgtcacatt

SEQ ID NO: 54163 - DNA, 25 bp, Probe Sequence
tgagccactgtaagcatgttactat

SEQ ID NO: 54164 - DNA, 25 bp, Probe Sequence
ttcctggagtacatttgtcacattc

SEQ ID NO: 54165 - DNA, 25 bp, Probe Sequence
ttgagccactgtaagcatgttacta

SEQ ID NO: 54166 - DNA, 25 bp, Probe Sequence
agcatgttactattaaatggttggt

SEQ ID NO: 54167 - DNA, 25 bp, Probe Sequence
gagtacatttgtcacattcagcttt

SEQ ID NO: 54168 - DNA, 25 bp, Probe Sequence
agtacatttgtcacattcagctttg

SEQ ID NO: 54169 - DNA, 25 bp, Probe Sequence
tcctggagtacatttgtcacattca

SEQ ID NO: 54170 - DNA, 25 bp, Probe Sequence
tttcagtaaagccctctgttacatc

SEQ ID NO: 54171 - DNA, 25 bp, Probe Sequence
tacatttgtcacattcagctttgag

SEQ ID NO: 54172 - DNA, 25 bp, Probe Sequence
gcatgttactattaaatggttggtt

SEQ ID NO: 54173 - DNA, 25 bp, Probe Sequence
gtacatttgtcacattcagctttga

SEQ ID NO: 54174 - DNA, 25 bp, Probe Sequence
ggagtacatttgtcacattcagctt

SEQ ID NO: 54175 - DNA, 25 bp, Probe Sequence
gttcacctttaatcccagctacttg

SEQ ID NO: 54176 - DNA, 25 bp, Probe Sequence
aagcatgttactattaaatggttgg

SEQ ID NO: 54177 - DNA, 25 bp, Probe Sequence
cctggagtacatttgtcacattcag

SEQ ID NO: 54178 - DNA, 25 bp, Probe Sequence
actatattctgtttccaagtaacct

SEQ ID NO: 54179 - DNA, 25 bp, Probe Sequence
tgttcacctttaatcccagctactt

SEQ ID NO: 54180 - DNA, 25 bp, Probe Sequence
aatgacattgtcgaaagaaagttct

SEQ ID NO: 54181 - DNA, 25 bp, Probe Sequence
ctggagtacatttgtcacattcagc

SEQ ID NO: 54182 - DNA, 25 bp, Probe Sequence
tggagtacatttgtcacattcagct

SEQ ID NO: 54183 - DNA, 25 bp, Probe Sequence
ggtccactgtttctcctataaatgt

SEQ ID NO: 54184 - DNA, 25 bp, Probe Sequence
tatgatgatgttcccgatttctctg

SEQ ID NO: 54185 - DNA, 25 bp, Probe Sequence
gtatgatgatgttcccgatttctct

SEQ ID NO: 54186 - DNA, 25 bp, Probe Sequence
tggtccactgtttctcctataaatg

SEQ ID NO: 54187 - DNA, 25 bp, Probe Sequence
ctggtccactgtttctcctataaat

SEQ ID NO: 54188 - DNA, 25 bp, Probe Sequence
cgtatgatgatgttcccgatttctc

SEQ ID NO: 54189 - DNA, 25 bp, Probe Sequence
gtccactgtttctcctataaatgta

SEQ ID NO: 54190 - DNA, 25 bp, Probe Sequence
gatgatgttcccgatttctctgttg

SEQ ID NO: 54191 - DNA, 25 bp, Probe Sequence
atgatgatgttcccgatttctctgt

SEQ ID NO: 54192 - DNA, 25 bp, Probe Sequence
cctggtccactgtttctcctataaa

SEQ ID NO: 54193 - DNA, 25 bp, Probe Sequence
tgatgatgttcccgatttctctgtt

SEQ ID NO: 54194 - DNA, 25 bp, Probe Sequence
ctccttcggacacaatctactccta

SEQ ID NO: 54195 - DNA, 25 bp, Probe Sequence
tccactgtttctcctataaatgtaa

SEQ ID NO: 54196 - DNA, 25 bp, Probe Sequence
tccttcggacacaatctactcctac

SEQ ID NO: 54197 - DNA, 25 bp, Probe Sequence
ccgtatgatgatgttcccgatttct

SEQ ID NO: 54198 - DNA, 25 bp, Probe Sequence
gtcactgttgccaaactataccatg

SEQ ID NO: 54199 - DNA, 25 bp, Probe Sequence
atgatgttcccgatttctctgttgg

SEQ ID NO: 54200 - DNA, 25 bp, Probe Sequence
gtttctcctataaatgtaaatgggt

SEQ ID NO: 54201 - DNA, 25 bp, Probe Sequence
tgtttctcctataaatgtaaatggg

SEQ ID NO: 54202 - DNA, 25 bp, Probe Sequence
ccactgtttctcctataaatgtaaa

SEQ ID NO: 54203 - DNA, 25 bp, Probe Sequence
tttctcctataaatgtaaatgggtc

SEQ ID NO: 54204 - DNA, 25 bp, Probe Sequence
ccctggtccactgtttctcctataa

SEQ ID NO: 54205 - DNA, 25 bp, Probe Sequence
gatgttcccgatttctctgttggtc

SEQ ID NO: 54206 - DNA, 25 bp, Probe Sequence
ccttcggacacaatctactcctacg

SEQ ID NO: 54207 - DNA, 25 bp, Probe Sequence
aaccaagactcattcatatagcacg

SEQ ID NO: 54208 - DNA, 25 bp, Probe Sequence
taaccaagactcattcatatagcac

SEQ ID NO: 54209 - DNA, 25 bp, Probe Sequence
cagaaggaacacagattgtagagat

SEQ ID NO: 54210 - DNA, 25 bp, Probe Sequence
agaaggaacacagattgtagagatt

SEQ ID NO: 54211 - DNA, 25 bp, Probe Sequence
ttaaccaagactcattcatatagca

SEQ ID NO: 54212 - DNA, 25 bp, Probe Sequence
ggaacacagattgtagagattaaca

SEQ ID NO: 54213 - DNA, 25 bp, Probe Sequence
aggaacacagattgtagagattaac

SEQ ID NO: 54214 - DNA, 25 bp, Probe Sequence
gaaggaacacagattgtagagatta

SEQ ID NO: 54215 - DNA, 25 bp, Probe Sequence
ccaagactcattcatatagcacgta

SEQ ID NO: 54216 - DNA, 25 bp, Probe Sequence
catctgatgattgagcagtagcatt

SEQ ID NO: 54217 - DNA, 25 bp, Probe Sequence
tataagagatgggttcagtggtatg

SEQ ID NO: 54218 - DNA, 25 bp, Probe Sequence
caagactcattcatatagcacgtag

SEQ ID NO: 54219 - DNA, 25 bp, Probe Sequence
gcagaaggaacacagattgtagaga

SEQ ID NO: 54220 - DNA, 25 bp, Probe Sequence
aaggaacacagattgtagagattaa

SEQ ID NO: 54221 - DNA, 25 bp, Probe Sequence
tatttgttcattgcttgccagagat

SEQ ID NO: 54222 - DNA, 25 bp, Probe Sequence
aagttctatttgttcattgcttgcc

SEQ ID NO: 54223 - DNA, 25 bp, Probe Sequence
cctttgtgagcaagttctatttgtt

SEQ ID NO: 54224 - DNA, 25 bp, Probe Sequence
atcctttgtgagcaagttctatttg

SEQ ID NO: 54225 - DNA, 25 bp, Probe Sequence
agactcattcatatagcacgtagtt

SEQ ID NO: 54226 - DNA, 25 bp, Probe Sequence
aagactcattcatatagcacgtagt

SEQ ID NO: 54227 - DNA, 25 bp, Probe Sequence
gttctatttgttcattgcttgccag

SEQ ID NO: 54228 - DNA, 25 bp, Probe Sequence
tttgtgagcaagttctatttgttca

SEQ ID NO: 54229 - DNA, 25 bp, Probe Sequence
ctttgtgagcaagttctatttgttc

SEQ ID NO: 54230 - DNA, 25 bp, Probe Sequence
tcctttgtgagcaagttctatttgt

SEQ ID NO: 54231 - DNA, 25 bp, Probe Sequence
aatgttgtgctgtatgttcttgatt

SEQ ID NO: 54232 - DNA, 25 bp, Probe Sequence
gtaagaagaattggagcctaatagc

SEQ ID NO: 54233 - DNA, 25 bp, Probe Sequence
cttggtggttactaacatcaacttg

SEQ ID NO: 54234 - DNA, 25 bp, Probe Sequence
acttggtggttactaacatcaactt

SEQ ID NO: 54235 - DNA, 25 bp, Probe Sequence
tacttggtggttactaacatcaact

SEQ ID NO: 54236 - DNA, 25 bp, Probe Sequence
cattgatgttgatgttccaccagaa

SEQ ID NO: 54237 - DNA, 25 bp, Probe Sequence
gtggttactaacatcaacttgtgac

SEQ ID NO: 54238 - DNA, 25 bp, Probe Sequence
gccgtgctctgtattgagtataatt

SEQ ID NO: 54239 - DNA, 25 bp, Probe Sequence
tggttactaacatcaacttgtgaca

SEQ ID NO: 54240 - DNA, 25 bp, Probe Sequence
gtacttggtggttactaacatcaac

SEQ ID NO: 54241 - DNA, 25 bp, Probe Sequence
ttggtggttactaacatcaacttgt

SEQ ID NO: 54242 - DNA, 25 bp, Probe Sequence
ggttactaacatcaacttgtgacat

SEQ ID NO: 54243 - DNA, 25 bp, Probe Sequence
ggtggttactaacatcaacttgtga

SEQ ID NO: 54244 - DNA, 25 bp, Probe Sequence
agtaagaagaattggagcctaatag

SEQ ID NO: 54245 - DNA, 25 bp, Probe Sequence
tggtggttactaacatcaacttgtg

SEQ ID NO: 54246 - DNA, 25 bp, Probe Sequence
actaacatcaacttgtgacatctag

SEQ ID NO: 54247 - DNA, 25 bp, Probe Sequence
tgccgtgctctgtattgagtataat

SEQ ID NO: 54248 - DNA, 25 bp, Probe Sequence
ttactaacatcaacttgtgacatct

SEQ ID NO: 54249 - DNA, 25 bp, Probe Sequence
gttactaacatcaacttgtgacatc

SEQ ID NO: 54250 - DNA, 25 bp, Probe Sequence
ttgccgtgctctgtattgagtataa

SEQ ID NO: 54251 - DNA, 25 bp, Probe Sequence
aataaccttaggcatgagtccttag

SEQ ID NO: 54252 - DNA, 25 bp, Probe Sequence
ggtatttctgagtgtcctattgtct

SEQ ID NO: 54253 - DNA, 25 bp, Probe Sequence
ttgtgctgtatgttcttgatttgac

SEQ ID NO: 54254 - DNA, 25 bp, Probe Sequence
gttgtgctgtatgttcttgatttga

SEQ ID NO: 54255 - DNA, 25 bp, Probe Sequence
tcactgtctctgtctcatctagtac

SEQ ID NO: 54256 - DNA, 25 bp, Probe Sequence
ctgctatggtggttgtattagagaa

SEQ ID NO: 54257 - DNA, 25 bp, Probe Sequence
tgtgtgttagtgtcatcatctgtaa

SEQ ID NO: 54258 - DNA, 25 bp, Probe Sequence
aatctgtgtgttagtgtcatcatct

SEQ ID NO: 54259 - DNA, 25 bp, Probe Sequence
tcaggaataatcataccaccaactt

SEQ ID NO: 54260 - DNA, 25 bp, Probe Sequence
gtcaggaataatcataccaccaact

SEQ ID NO: 54261 - DNA, 25 bp, Probe Sequence
agtcaggaataatcataccaccaac

SEQ ID NO: 54262 - DNA, 25 bp, Probe Sequence
aagtcaggaataatcataccaccaa

SEQ ID NO: 54263 - DNA, 25 bp, Probe Sequence
tgtgttagtgtcatcatctgtaagt

SEQ ID NO: 54264 - DNA, 25 bp, Probe Sequence
ctgtgtgttagtgtcatcatctgta

SEQ ID NO: 54265 - DNA, 25 bp, Probe Sequence
tgttagtgtcatcatctgtaagtca

SEQ ID NO: 54266 - DNA, 25 bp, Probe Sequence
gtgtgttagtgtcatcatctgtaag

SEQ ID NO: 54267 - DNA, 25 bp, Probe Sequence
atctgtgtgttagtgtcatcatctg

SEQ ID NO: 54268 - DNA, 25 bp, Probe Sequence
actggctattacttaatctgtgtgt

SEQ ID NO: 54269 - DNA, 25 bp, Probe Sequence
gtgttagtgtcatcatctgtaagtc

SEQ ID NO: 54270 - DNA, 25 bp, Probe Sequence
caggaataatcataccaccaacttc

SEQ ID NO: 54271 - DNA, 25 bp, Probe Sequence
taagtcaggaataatcataccacca

SEQ ID NO: 54272 - DNA, 25 bp, Probe Sequence
gctatggtggttgtattagagaact

SEQ ID NO: 54273 - DNA, 25 bp, Probe Sequence
ggtggttgtattagagaactgatgt

SEQ ID NO: 54274 - DNA, 25 bp, Probe Sequence
tggtggttgtattagagaactgatg

SEQ ID NO: 54275 - DNA, 25 bp, Probe Sequence
tgctatggtggttgtattagagaac

SEQ ID NO: 54276 - DNA, 25 bp, Probe Sequence
tggcttaacaatcagacttcttcta

SEQ ID NO: 54277 - DNA, 25 bp, Probe Sequence
ctggctattacttaatctgtgtgtt

SEQ ID NO: 54278 - DNA, 25 bp, Probe Sequence
atggtggttgtattagagaactgat

SEQ ID NO: 54279 - DNA, 25 bp, Probe Sequence
ctatatctacttgagcctgtgtgcc

SEQ ID NO: 54280 - DNA, 25 bp, Probe Sequence
cctatatctacttgagcctgtgtgc

SEQ ID NO: 54281 - DNA, 25 bp, Probe Sequence
gcctatatctacttgagcctgtgtg

SEQ ID NO: 54282 - DNA, 25 bp, Probe Sequence
agcctatatctacttgagcctgtgt

SEQ ID NO: 54283 - DNA, 25 bp, Probe Sequence
gcccactgaagagatgaagaataaa

SEQ ID NO: 54284 - DNA, 25 bp, Probe Sequence
cagcctatatctacttgagcctgtg

SEQ ID NO: 54285 - DNA, 25 bp, Probe Sequence
tgcccactgaagagatgaagaataa

SEQ ID NO: 54286 - DNA, 25 bp, Probe Sequence
attgtgcccagcctatatctacttg

SEQ ID NO: 54287 - DNA, 25 bp, Probe Sequence
cattgtgcccagcctatatctactt

SEQ ID NO: 54288 - DNA, 25 bp, Probe Sequence
ccagcctatatctacttgagcctgt

SEQ ID NO: 54289 - DNA, 25 bp, Probe Sequence
gtgcccactgaagagatgaagaata

SEQ ID NO: 54290 - DNA, 25 bp, Probe Sequence
ttgtgcccagcctatatctacttga

SEQ ID NO: 54291 - DNA, 25 bp, Probe Sequence
tgtgcccagcctatatctacttgag

SEQ ID NO: 54292 - DNA, 25 bp, Probe Sequence
actgaagagatgaagaataaaagcc

SEQ ID NO: 54293 - DNA, 25 bp, Probe Sequence
agagatgaagaataaaagcctaagc

SEQ ID NO: 54294 - DNA, 25 bp, Probe Sequence
ctgaagagatgaagaataaaagcct

SEQ ID NO: 54295 - DNA, 25 bp, Probe Sequence
cccactgaagagatgaagaataaaa

SEQ ID NO: 54296 - DNA, 25 bp, Probe Sequence
tatatctacttgagcctgtgtgccc

SEQ ID NO: 54297 - DNA, 25 bp, Probe Sequence
ccattgtgcccagcctatatctact

SEQ ID NO: 54298 - DNA, 25 bp, Probe Sequence
cactgaagagatgaagaataaaagc

SEQ ID NO: 54299 - DNA, 25 bp, Probe Sequence
tgaagagatgaagaataaaagccta

SEQ ID NO: 54300 - DNA, 25 bp, Probe Sequence
ccactgaagagatgaagaataaaag

SEQ ID NO: 54301 - DNA, 25 bp, Probe Sequence
tgtgcccactgaagagatgaagaat

SEQ ID NO: 54302 - DNA, 25 bp, Probe Sequence
cccagcctatatctacttgagcctg

SEQ ID NO: 54303 - DNA, 25 bp, Probe Sequence
aatccaagcaacttcataatcagat

SEQ ID NO: 54304 - DNA, 25 bp, Probe Sequence
atccaagcaacttcataatcagatt

SEQ ID NO: 54305 - DNA, 25 bp, Probe Sequence
tccaagcaacttcataatcagatta

SEQ ID NO: 54306 - DNA, 25 bp, Probe Sequence
gtaatgtgtgctctgtaagtttgtt

SEQ ID NO: 54307 - DNA, 25 bp, Probe Sequence
taatgtgtgctctgtaagtttgttt

SEQ ID NO: 54308 - DNA, 25 bp, Probe Sequence
agtaatgtgtgctctgtaagtttgt

SEQ ID NO: 54309 - DNA, 25 bp, Probe Sequence
aaatccaagcaacttcataatcaga

SEQ ID NO: 54310 - DNA, 25 bp, Probe Sequence
ttaatctgcactcattgaagtcatt

SEQ ID NO: 54311 - DNA, 25 bp, Probe Sequence
gagtaatgtgtgctctgtaagtttg

SEQ ID NO: 54312 - DNA, 25 bp, Probe Sequence
atgactaatttgggagtaatgtgtg

SEQ ID NO: 54313 - DNA, 25 bp, Probe Sequence
taaagaaactgtagaggagcaacaa

SEQ ID NO: 54314 - DNA, 25 bp, Probe Sequence
ttaaagaaactgtagaggagcaaca

SEQ ID NO: 54315 - DNA, 25 bp, Probe Sequence
gactaatttgggagtaatgtgtgct

SEQ ID NO: 54316 - DNA, 25 bp, Probe Sequence
ctaatttgggagtaatgtgtgctct

SEQ ID NO: 54317 - DNA, 25 bp, Probe Sequence
ggagtaatgtgtgctctgtaagttt

SEQ ID NO: 54318 - DNA, 25 bp, Probe Sequence
gggtacatttattgctttaatctgc

SEQ ID NO: 54319 - DNA, 25 bp, Probe Sequence
taatttgggagtaatgtgtgctctg

SEQ ID NO: 54320 - DNA, 25 bp, Probe Sequence
actaatttgggagtaatgtgtgctc

SEQ ID NO: 54321 - DNA, 25 bp, Probe Sequence
aaagaaactgtagaggagcaacaaa

SEQ ID NO: 54322 - DNA, 25 bp, Probe Sequence
tgactaatttgggagtaatgtgtgc

SEQ ID NO: 54323 - DNA, 25 bp, Probe Sequence
ttacttcctctagtgaatgtccttt

SEQ ID NO: 54324 - DNA, 25 bp, Probe Sequence
tttacttcctctagtgaatgtcctt

SEQ ID NO: 54325 - DNA, 25 bp, Probe Sequence
gtgtgtgtgacttgaaattcagtag

SEQ ID NO: 54326 - DNA, 25 bp, Probe Sequence
gcactcattgaagtcatttattacc

SEQ ID NO: 54327 - DNA, 25 bp, Probe Sequence
ttcaaaggttcttctgtcccaagta

SEQ ID NO: 54328 - DNA, 25 bp, Probe Sequence
ctttcaaaggttcttctgtcccaag

SEQ ID NO: 54329 - DNA, 25 bp, Probe Sequence
gctgaagttaattgttcatcttgcc

SEQ ID NO: 54330 - DNA, 25 bp, Probe Sequence
ggctgaagttaattgttcatcttgc

SEQ ID NO: 54331 - DNA, 25 bp, Probe Sequence
tttcaaaggttcttctgtcccaagt

SEQ ID NO: 54332 - DNA, 25 bp, Probe Sequence
tcatttccatactgtttgcctcctc

SEQ ID NO: 54333 - DNA, 25 bp, Probe Sequence
tcaaaggttcttctgtcccaagtac

SEQ ID NO: 54334 - DNA, 25 bp, Probe Sequence
gtcatttccatactgtttgcctcct

SEQ ID NO: 54335 - DNA, 25 bp, Probe Sequence
tctcatgcacagaattcctccatag

SEQ ID NO: 54336 - DNA, 25 bp, Probe Sequence
ctgagtctcctgtagcatctggttc

SEQ ID NO: 54337 - DNA, 25 bp, Probe Sequence
tttccctgggctgaagttaattgtt

SEQ ID NO: 54338 - DNA, 25 bp, Probe Sequence
tgttcacagtggtcatttccatact

SEQ ID NO: 54339 - DNA, 25 bp, Probe Sequence
gtgttcacagtggtcatttccatac

SEQ ID NO: 54340 - DNA, 25 bp, Probe Sequence
gttaattgttcatcttgccccttta

SEQ ID NO: 54341 - DNA, 25 bp, Probe Sequence
taattgttcatcttgcccctttagt

SEQ ID NO: 54342 - DNA, 25 bp, Probe Sequence
ttaattgttcatcttgcccctttag

SEQ ID NO: 54343 - DNA, 25 bp, Probe Sequence
tctgagtctcctgtagcatctggtt

SEQ ID NO: 54344 - DNA, 25 bp, Probe Sequence
ttagttctcatgcacagaattcctc

SEQ ID NO: 54345 - DNA, 25 bp, Probe Sequence
aattgttcatcttgcccctttagtt

SEQ ID NO: 54346 - DNA, 25 bp, Probe Sequence
agttaattgttcatcttgccccttt

SEQ ID NO: 54347 - DNA, 25 bp, Probe Sequence
ttccctgggctgaagttaattgttc

SEQ ID NO: 54348 - DNA, 25 bp, Probe Sequence
ctgaagttaattgttcatcttgccc

SEQ ID NO: 54349 - DNA, 25 bp, Probe Sequence
gggctgaagttaattgttcatcttg

SEQ ID NO: 54350 - DNA, 25 bp, Probe Sequence
attgttcatcttgcccctttagttc

SEQ ID NO: 54351 - DNA, 25 bp, Probe Sequence
gtatgaaataaacctggtcttgtgt

SEQ ID NO: 54352 - DNA, 25 bp, Probe Sequence
tgtatgaaataaacctggtcttgtg

SEQ ID NO: 54353 - DNA, 25 bp, Probe Sequence
ttgtatgaaataaacctggtcttgt

SEQ ID NO: 54354 - DNA, 25 bp, Probe Sequence
tatgaaataaacctggtcttgtgtt

SEQ ID NO: 54355 - DNA, 25 bp, Probe Sequence
acattgtatgaaataaacctggtct

SEQ ID NO: 54356 - DNA, 25 bp, Probe Sequence
aacattgtatgaaataaacctggtc

SEQ ID NO: 54357 - DNA, 25 bp, Probe Sequence
attgtatgaaataaacctggtcttg

SEQ ID NO: 54358 - DNA, 25 bp, Probe Sequence
cattgtatgaaataaacctggtctt

SEQ ID NO: 54359 - DNA, 25 bp, Probe Sequence
atgaaataaacctggtcttgtgttt

SEQ ID NO: 54360 - DNA, 25 bp, Probe Sequence
taacattgtatgaaataaacctggt

SEQ ID NO: 54361 - DNA, 25 bp, Probe Sequence
ataacattgtatgaaataaacctgg

SEQ ID NO: 54362 - DNA, 25 bp, Probe Sequence
tgaaataaacctggtcttgtgtttt

SEQ ID NO: 54363 - DNA, 25 bp, Probe Sequence
tgtgtgaataacattgtatgaaata

SEQ ID NO: 54364 - DNA, 25 bp, Probe Sequence
gtatgaaataaacctggtcttgtgt

SEQ ID NO: 54365 - DNA, 25 bp, Probe Sequence
tgtatgaaataaacctggtcttgtg

SEQ ID NO: 54366 - DNA, 25 bp, Probe Sequence
ttgtatgaaataaacctggtcttgt

SEQ ID NO: 54367 - DNA, 25 bp, Probe Sequence
tatgaaataaacctggtcttgtgtt

SEQ ID NO: 54368 - DNA, 25 bp, Probe Sequence
acattgtatgaaataaacctggtct

SEQ ID NO: 54369 - DNA, 25 bp, Probe Sequence
aacattgtatgaaataaacctggtc

SEQ ID NO: 54370 - DNA, 25 bp, Probe Sequence
attgtatgaaataaacctggtcttg

SEQ ID NO: 54371 - DNA, 25 bp, Probe Sequence
cattgtatgaaataaacctggtctt

SEQ ID NO: 54372 - DNA, 25 bp, Probe Sequence
atgaaataaacctggtcttgtgttt

SEQ ID NO: 54373 - DNA, 25 bp, Probe Sequence
taacattgtatgaaataaacctggt

SEQ ID NO: 54374 - DNA, 25 bp, Probe Sequence
ataacattgtatgaaataaacctgg

SEQ ID NO: 54375 - DNA, 25 bp, Probe Sequence
tgaaataaacctggtcttgtgtttt

SEQ ID NO: 54376 - DNA, 25 bp, Probe Sequence
tgtgtgaataacattgtatgaaata

SEQ ID NO: 54377 - DNA, 25 bp, Probe Sequence
ctctactgaaggcttcttggttata

SEQ ID NO: 54378 - DNA, 25 bp, Probe Sequence
tacctcaatgaacagttgtactcag

SEQ ID NO: 54379 - DNA, 25 bp, Probe Sequence
ctacctcaatgaacagttgtactca

SEQ ID NO: 54380 - DNA, 25 bp, Probe Sequence
tctactgaaggcttcttggttataa

SEQ ID NO: 54381 - DNA, 25 bp, Probe Sequence
cagtgactctgaggaagaagtagaa

SEQ ID NO: 54382 - DNA, 25 bp, Probe Sequence
ctactgaaggcttcttggttataag

SEQ ID NO: 54383 - DNA, 25 bp, Probe Sequence
gctacctcaatgaacagttgtactc

SEQ ID NO: 54384 - DNA, 25 bp, Probe Sequence
ttcgctacctcaatgaacagttgta

SEQ ID NO: 54385 - DNA, 25 bp, Probe Sequence
gaagtagaaaggaagaagaaatgcc

SEQ ID NO: 54386 - DNA, 25 bp, Probe Sequence
tagggaagaaagggaagaagaaatg

SEQ ID NO: 54387 - DNA, 25 bp, Probe Sequence
gtagggaagaaagggaagaagaaat

SEQ ID NO: 54388 - DNA, 25 bp, Probe Sequence
aagtagaaaggaagaagaaatgcca

SEQ ID NO: 54389 - DNA, 25 bp, Probe Sequence
tgaggaagaagtagaaaggaagaag

SEQ ID NO: 54390 - DNA, 25 bp, Probe Sequence
ctgaggaagaagtagaaaggaagaa

SEQ ID NO: 54391 - DNA, 25 bp, Probe Sequence
cagccatttcttcttgtttgatttc

SEQ ID NO: 54392 - DNA, 25 bp, Probe Sequence
agccatttcttcttgtttgatttcc

SEQ ID NO: 54393 - DNA, 25 bp, Probe Sequence
tagaaaggaagaagaaatgccacaa

SEQ ID NO: 54394 - DNA, 25 bp, Probe Sequence
gaggaagaagtagaaaggaagaaga

SEQ ID NO: 54395 - DNA, 25 bp, Probe Sequence
gaagaaagggaagaagaaatgtcaa

SEQ ID NO: 54396 - DNA, 25 bp, Probe Sequence
gccatttcttcttgtttgatttcca

SEQ ID NO: 54397 - DNA, 25 bp, Probe Sequence
ggaagaaagggaagaagaaatgtca

SEQ ID NO: 54398 - DNA, 25 bp, Probe Sequence
gctctactgaaggcttcttggttat

SEQ ID NO: 54399 - DNA, 25 bp, Probe Sequence
agtagaaaggaagaagaaatgccac

SEQ ID NO: 54400 - DNA, 25 bp, Probe Sequence
agaagtagaaaggaagaagaaatgc

SEQ ID NO: 54401 - DNA, 25 bp, Probe Sequence
gtgtgtgtctcctctcttctctata

SEQ ID NO: 54402 - DNA, 25 bp, Probe Sequence
tgtgagagtcttgttgtctgatatt

SEQ ID NO: 54403 - DNA, 25 bp, Probe Sequence
aatgtgagagtcttgttgtctgata

SEQ ID NO: 54404 - DNA, 25 bp, Probe Sequence
atgtgagagtcttgttgtctgatat

SEQ ID NO: 54405 - DNA, 25 bp, Probe Sequence
gaatgtgagagtcttgttgtctgat

SEQ ID NO: 54406 - DNA, 25 bp, Probe Sequence
accaatatctaggaagaatgactga

SEQ ID NO: 54407 - DNA, 25 bp, Probe Sequence
ttggaatgtgagagtcttgttgtct

SEQ ID NO: 54408 - DNA, 25 bp, Probe Sequence
caatatctaggaagaatgactgagg

SEQ ID NO: 54409 - DNA, 25 bp, Probe Sequence
ccaatatctaggaagaatgactgag

SEQ ID NO: 54410 - DNA, 25 bp, Probe Sequence
aaccaatatctaggaagaatgactg

SEQ ID NO: 54411 - DNA, 25 bp, Probe Sequence
ggaatgtgagagtcttgttgtctga

SEQ ID NO: 54412 - DNA, 25 bp, Probe Sequence
tgtctcctctcttctctatagttcc

SEQ ID NO: 54413 - DNA, 25 bp, Probe Sequence
tgtgtctcctctcttctctatagtt

SEQ ID NO: 54414 - DNA, 25 bp, Probe Sequence
gtgtgtctcctctcttctctatagt

SEQ ID NO: 54415 - DNA, 25 bp, Probe Sequence
tgtgtgtctcctctcttctctatag

SEQ ID NO: 54416 - DNA, 25 bp, Probe Sequence
ggtgtgtgtctcctctcttctctat

SEQ ID NO: 54417 - DNA, 25 bp, Probe Sequence
gtgtctcctctcttctctatagttc

SEQ ID NO: 54418 - DNA, 25 bp, Probe Sequence
aagtttgtggtttgtttctggttta

SEQ ID NO: 54419 - DNA, 25 bp, Probe Sequence
taagtttgtggtttgtttctggttt

SEQ ID NO: 54420 - DNA, 25 bp, Probe Sequence
cttgttatttgggagactttgagag

SEQ ID NO: 54421 - DNA, 25 bp, Probe Sequence
agtttgtggtttgtttctggtttac

SEQ ID NO: 54422 - DNA, 25 bp, Probe Sequence
gtaagtttgtggtttgtttctggtt

SEQ ID NO: 54423 - DNA, 25 bp, Probe Sequence
ggagagtaagtttgtggtttgtttc

SEQ ID NO: 54424 - DNA, 25 bp, Probe Sequence
ccttgttatttgggagactttgaga

SEQ ID NO: 54425 - DNA, 25 bp, Probe Sequence
ttctggattcttcttgctgatgatt

SEQ ID NO: 54426 - DNA, 25 bp, Probe Sequence
cttctggattcttcttgctgatgat

SEQ ID NO: 54427 - DNA, 25 bp, Probe Sequence
agaacaattagtcaagagcagtagc

SEQ ID NO: 54428 - DNA, 25 bp, Probe Sequence
gaggtcaagtcatacaagtgtctta

SEQ ID NO: 54429 - DNA, 25 bp, Probe Sequence
aggtcaagtcatacaagtgtcttaa

SEQ ID NO: 54430 - DNA, 25 bp, Probe Sequence
ctagcactggtggagaattatagaa

SEQ ID NO: 54431 - DNA, 25 bp, Probe Sequence
agcactggtggagaattatagaata

SEQ ID NO: 54432 - DNA, 25 bp, Probe Sequence
tagcactggtggagaattatagaat

SEQ ID NO: 54433 - DNA, 25 bp, Probe Sequence
aagaacaattagtcaagagcagtag

SEQ ID NO: 54434 - DNA, 25 bp, Probe Sequence
taagtgaggtcaagtcatacaagtg

SEQ ID NO: 54435 - DNA, 25 bp, Probe Sequence
ataagtgaggtcaagtcatacaagt

SEQ ID NO: 54436 - DNA, 25 bp, Probe Sequence
gacttctggattcttcttgctgatg

SEQ ID NO: 54437 - DNA, 25 bp, Probe Sequence
gaacaattagtcaagagcagtagcc

SEQ ID NO: 54438 - DNA, 25 bp, Probe Sequence
acttctggattcttcttgctgatga

SEQ ID NO: 54439 - DNA, 25 bp, Probe Sequence
aacaataatggaacacaggagtatt

SEQ ID NO: 54440 - DNA, 25 bp, Probe Sequence
agacttctggattcttcttgctgat

SEQ ID NO: 54441 - DNA, 25 bp, Probe Sequence
ggagatactgagcatgtcttattga

SEQ ID NO: 54442 - DNA, 25 bp, Probe Sequence
tggagatactgagcatgtcttattg

SEQ ID NO: 54443 - DNA, 25 bp, Probe Sequence
gtggagatactgagcatgtcttatt

SEQ ID NO: 54444 - DNA, 25 bp, Probe Sequence
gcactggtggagaattatagaataa

SEQ ID NO: 54445 - DNA, 25 bp, Probe Sequence
ataggaagcacctgagagatagtaa

SEQ ID NO: 54446 - DNA, 25 bp, Probe Sequence
tgaggtcaagtcatacaagtgtctt

SEQ ID NO: 54447 - DNA, 25 bp, Probe Sequence
atactgagcatgtcttattgagtcc

SEQ ID NO: 54448 - DNA, 25 bp, Probe Sequence
gagaatattaagagcagtggtcagg

SEQ ID NO: 54449 - DNA, 25 bp, Probe Sequence
gtaactgaattgaggagattaacgg

SEQ ID NO: 54450 - DNA, 25 bp, Probe Sequence
agtaactgaattgaggagattaacg

SEQ ID NO: 54451 - DNA, 25 bp, Probe Sequence
ttgaagtaactgaattgaggagatt

SEQ ID NO: 54452 - DNA, 25 bp, Probe Sequence
aattcttccatcttaccaaggagag

SEQ ID NO: 54453 - DNA, 25 bp, Probe Sequence
tgaagtaactgaattgaggagatta

SEQ ID NO: 54454 - DNA, 25 bp, Probe Sequence
attcttccatcttaccaaggagagg

SEQ ID NO: 54455 - DNA, 25 bp, Probe Sequence
taactgaattgaggagattaacggg

SEQ ID NO: 54456 - DNA, 25 bp, Probe Sequence
atcgctcggttggaacttaattact

SEQ ID NO: 54457 - DNA, 25 bp, Probe Sequence
catcgctcggttggaacttaattac

SEQ ID NO: 54458 - DNA, 25 bp, Probe Sequence
aacaatgaaggcagtatggtacttg

SEQ ID NO: 54459 - DNA, 25 bp, Probe Sequence
ctttgaagtaactgaattgaggaga

SEQ ID NO: 54460 - DNA, 25 bp, Probe Sequence
acatcgctcggttggaacttaatta

SEQ ID NO: 54461 - DNA, 25 bp, Probe Sequence
acaagcaactcatatttgattcagt

SEQ ID NO: 54462 - DNA, 25 bp, Probe Sequence
ctaattgaggtaatgcggaaatctc

SEQ ID NO: 54463 - DNA, 25 bp, Probe Sequence
aagtaactgaattgaggagattaac

SEQ ID NO: 54464 - DNA, 25 bp, Probe Sequence
ggacattcactgaaatcatctcttt

SEQ ID NO: 54465 - DNA, 25 bp, Probe Sequence
aacatcgctcggttggaacttaatt

SEQ ID NO: 54466 - DNA, 25 bp, Probe Sequence
cccgtcaataaatgttaaagacaca

SEQ ID NO: 54467 - DNA, 25 bp, Probe Sequence
tttgaagtaactgaattgaggagat

SEQ ID NO: 54468 - DNA, 25 bp, Probe Sequence
cggacattcactgaaatcatctctt

SEQ ID NO: 54469 - DNA, 25 bp, Probe Sequence
tggaaacaatgaaggcagtatggta

SEQ ID NO: 54470 - DNA, 25 bp, Probe Sequence
tttccgaacacacttctttctcaac

SEQ ID NO: 54471 - DNA, 25 bp, Probe Sequence
gaagtaactgaattgaggagattaa

SEQ ID NO: 54472 - DNA, 25 bp, Probe Sequence
aacaagcaactcatatttgattcag

SEQ ID NO: 54473 - DNA, 25 bp, Probe Sequence
cttcctctttatctctcccacattg

SEQ ID NO: 54474 - DNA, 25 bp, Probe Sequence
gaggaggaagactattaaaggacag

SEQ ID NO: 54475 - DNA, 25 bp, Probe Sequence
agaggaggaagactattaaaggaca

SEQ ID NO: 54476 - DNA, 25 bp, Probe Sequence
gcagagaggaggaagactattaaag

SEQ ID NO: 54477 - DNA, 25 bp, Probe Sequence
gagaggaggaagactattaaaggac

SEQ ID NO: 54478 - DNA, 25 bp, Probe Sequence
agagaggaggaagactattaaagga

SEQ ID NO: 54479 - DNA, 25 bp, Probe Sequence
cagagaggaggaagactattaaagg

SEQ ID NO: 54480 - DNA, 25 bp, Probe Sequence
tctcccacattgtcttgctaaatat

SEQ ID NO: 54481 - DNA, 25 bp, Probe Sequence
ctctttatctctcccacattgtctt

SEQ ID NO: 54482 - DNA, 25 bp, Probe Sequence
tctttatctctcccacattgtcttg

SEQ ID NO: 54483 - DNA, 25 bp, Probe Sequence
ctctcccacattgtcttgctaaata

SEQ ID NO: 54484 - DNA, 25 bp, Probe Sequence
ctacacatgctcttcctgctctatc

SEQ ID NO: 54485 - DNA, 25 bp, Probe Sequence
ttcctctttatctctcccacattgt

SEQ ID NO: 54486 - DNA, 25 bp, Probe Sequence
tatctctcccacattgtcttgctaa

SEQ ID NO: 54487 - DNA, 25 bp, Probe Sequence
ttatctctcccacattgtcttgcta

SEQ ID NO: 54488 - DNA, 25 bp, Probe Sequence
ccttcctctttatctctcccacatt

SEQ ID NO: 54489 - DNA, 25 bp, Probe Sequence
aggaggaagactattaaaggacagt

SEQ ID NO: 54490 - DNA, 25 bp, Probe Sequence
tcccacattgtcttgctaaatatag

SEQ ID NO: 54491 - DNA, 25 bp, Probe Sequence
ctcccacattgtcttgctaaatata

SEQ ID NO: 54492 - DNA, 25 bp, Probe Sequence
cctctttatctctcccacattgtct

SEQ ID NO: 54493 - DNA, 25 bp, Probe Sequence
tcctctttatctctcccacattgtc

SEQ ID NO: 54494 - DNA, 25 bp, Probe Sequence
ctttatctctcccacattgtcttgc

SEQ ID NO: 54495 - DNA, 25 bp, Probe Sequence
cttccttcctctttatctctcccac

SEQ ID NO: 54496 - DNA, 25 bp, Probe Sequence
tacacatgctcttcctgctctatct

SEQ ID NO: 54497 - DNA, 25 bp, Probe Sequence
acacagagacttccaagttactatt

SEQ ID NO: 54498 - DNA, 25 bp, Probe Sequence
aacacagagacttccaagttactat

SEQ ID NO: 54499 - DNA, 25 bp, Probe Sequence
tgttcttctggtagtgtttggataa

SEQ ID NO: 54500 - DNA, 25 bp, Probe Sequence
ttagtttattgggaagaaagcctca

SEQ ID NO: 54501 - DNA, 25 bp, Probe Sequence
atgttcttctggtagtgtttggata

SEQ ID NO: 54502 - DNA, 25 bp, Probe Sequence
tagtttattgggaagaaagcctcag

SEQ ID NO: 54503 - DNA, 25 bp, Probe Sequence
cttagtttattgggaagaaagcctc

SEQ ID NO: 54504 - DNA, 25 bp, Probe Sequence
agattcaaacacagagacttccaag

SEQ ID NO: 54505 - DNA, 25 bp, Probe Sequence
atgaattgctgagacaatcttgaac

SEQ ID NO: 54506 - DNA, 25 bp, Probe Sequence
aagattcaaacacagagacttccaa

SEQ ID NO: 54507 - DNA, 25 bp, Probe Sequence
gtgggtataaacagatggtcaaatt

SEQ ID NO: 54508 - DNA, 25 bp, Probe Sequence
acttagtttattgggaagaaagcct

SEQ ID NO: 54509 - DNA, 25 bp, Probe Sequence
aatgaattgctgagacaatcttgaa

SEQ ID NO: 54510 - DNA, 25 bp, Probe Sequence
gttcttctggtagtgtttggataat

SEQ ID NO: 54511 - DNA, 25 bp, Probe Sequence
aaccaataatgaattgctgagacaa

SEQ ID NO: 54512 - DNA, 25 bp, Probe Sequence
accaataatgaattgctgagacaat

SEQ ID NO: 54513 - DNA, 25 bp, Probe Sequence
cttctcgctctaatactgcattctg

SEQ ID NO: 54514 - DNA, 25 bp, Probe Sequence
ttgaacccaaatagcattagaaagc

SEQ ID NO: 54515 - DNA, 25 bp, Probe Sequence
gacaatcttgaacccaaatagcatt

SEQ ID NO: 54516 - DNA, 25 bp, Probe Sequence
tgctaatgtgagaaacccagttaaa

SEQ ID NO: 54517 - DNA, 25 bp, Probe Sequence
ctgagacaatcttgaacccaaatag

SEQ ID NO: 54518 - DNA, 25 bp, Probe Sequence
agacaatcttgaacccaaatagcat

SEQ ID NO: 54519 - DNA, 25 bp, Probe Sequence
caagattcaaacacagagacttcca

SEQ ID NO: 54520 - DNA, 25 bp, Probe Sequence
tatcagagtgctaatgtgagaaacc

SEQ ID NO: 54521 - DNA, 25 bp, Probe Sequence
agttactgaaggtctccaaggacaa

SEQ ID NO: 54522 - DNA, 25 bp, Probe Sequence
gaaataaagaacagcttgacaggaa

SEQ ID NO: 54523 - DNA, 25 bp, Probe Sequence
tgaaataaagaacagcttgacagga

SEQ ID NO: 54524 - DNA, 25 bp, Probe Sequence
aaataaagaacagcttgacaggaaa

SEQ ID NO: 54525 - DNA, 25 bp, Probe Sequence
gagttactgaaggtctccaaggaca

SEQ ID NO: 54526 - DNA, 25 bp, Probe Sequence
ctgaaataaagaacagcttgacagg

SEQ ID NO: 54527 - DNA, 25 bp, Probe Sequence
cctgaaataaagaacagcttgacag

SEQ ID NO: 54528 - DNA, 25 bp, Probe Sequence
ctctccctgaaataaagaacagctt

SEQ ID NO: 54529 - DNA, 25 bp, Probe Sequence
ttactgaaggtctccaaggacaaac

SEQ ID NO: 54530 - DNA, 25 bp, Probe Sequence
gttactgaaggtctccaaggacaaa

SEQ ID NO: 54531 - DNA, 25 bp, Probe Sequence
ctccctgaaataaagaacagcttga

SEQ ID NO: 54532 - DNA, 25 bp, Probe Sequence
tctccctgaaataaagaacagcttg

SEQ ID NO: 54533 - DNA, 25 bp, Probe Sequence
ctgccctctccctgaaataaagaac

SEQ ID NO: 54534 - DNA, 25 bp, Probe Sequence
tccctgaaataaagaacagcttgac

SEQ ID NO: 54535 - DNA, 25 bp, Probe Sequence
ccctgaaataaagaacagcttgaca

SEQ ID NO: 54536 - DNA, 25 bp, Probe Sequence
aatttatcaagaaaagggtggggac

SEQ ID NO: 54537 - DNA, 25 bp, Probe Sequence
ccctctccctgaaataaagaacagc

SEQ ID NO: 54538 - DNA, 25 bp, Probe Sequence
gccctctccctgaaataaagaacag

SEQ ID NO: 54539 - DNA, 25 bp, Probe Sequence
cctctccctgaaataaagaacagct

SEQ ID NO: 54540 - DNA, 25 bp, Probe Sequence
tgccctctccctgaaataaagaaca

SEQ ID NO: 54541 - DNA, 25 bp, Probe Sequence
cctgccctctccctgaaataaagaa

SEQ ID NO: 54542 - DNA, 25 bp, Probe Sequence
aataaagaacagcttgacaggaaaa

SEQ ID NO: 54543 - DNA, 25 bp, Probe Sequence
tcaaatttatcaagaaaagggtggg

SEQ ID NO: 54544 - DNA, 25 bp, Probe Sequence
aaatttatcaagaaaagggtgggga

SEQ ID NO: 54545 - DNA, 25 bp, Probe Sequence
gcttcaatcttatcaacgctacatt

SEQ ID NO: 54546 - DNA, 25 bp, Probe Sequence
gctgtatgtagagactgaatgtgaa

SEQ ID NO: 54547 - DNA, 25 bp, Probe Sequence
tgcttcaatcttatcaacgctacat

SEQ ID NO: 54548 - DNA, 25 bp, Probe Sequence
atgcttcaatcttatcaacgctaca

SEQ ID NO: 54549 - DNA, 25 bp, Probe Sequence
ctgtatgtagagactgaatgtgaag

SEQ ID NO: 54550 - DNA, 25 bp, Probe Sequence
cgttaagacctctatgaatgaatgt

SEQ ID NO: 54551 - DNA, 25 bp, Probe Sequence
tgtatgtagagactgaatgtgaagt

SEQ ID NO: 54552 - DNA, 25 bp, Probe Sequence
tcaacatgcttcaatcttatcaacg

SEQ ID NO: 54553 - DNA, 25 bp, Probe Sequence
tgatgtgtactcttcctattgatga

SEQ ID NO: 54554 - DNA, 25 bp, Probe Sequence
catgcttcaatcttatcaacgctac

SEQ ID NO: 54555 - DNA, 25 bp, Probe Sequence
acatgcttcaatcttatcaacgcta

SEQ ID NO: 54556 - DNA, 25 bp, Probe Sequence
ttgatgtgtactcttcctattgatg

SEQ ID NO: 54557 - DNA, 25 bp, Probe Sequence
tcacttctgaccagttaccaatcaa

SEQ ID NO: 54558 - DNA, 25 bp, Probe Sequence
aacatgcttcaatcttatcaacgct

SEQ ID NO: 54559 - DNA, 25 bp, Probe Sequence
caacatgcttcaatcttatcaacgc

SEQ ID NO: 54560 - DNA, 25 bp, Probe Sequence
ttcaacatgcttcaatcttatcaac

SEQ ID NO: 54561 - DNA, 25 bp, Probe Sequence
aagctgtatgtagagactgaatgtg

SEQ ID NO: 54562 - DNA, 25 bp, Probe Sequence
caagctgtatgtagagactgaatgt

SEQ ID NO: 54563 - DNA, 25 bp, Probe Sequence
gatgtgtactcttcctattgatgag

SEQ ID NO: 54564 - DNA, 25 bp, Probe Sequence
agctgtatgtagagactgaatgtga

SEQ ID NO: 54565 - DNA, 25 bp, Probe Sequence
tgaatgaatgtatcagagaatgtct

SEQ ID NO: 54566 - DNA, 25 bp, Probe Sequence
tcttcctattgatgagttaattcca

SEQ ID NO: 54567 - DNA, 25 bp, Probe Sequence
ctcacttctgaccagttaccaatca

SEQ ID NO: 54568 - DNA, 25 bp, Probe Sequence
actcacttctgaccagttaccaatc

SEQ ID NO: 54569 - DNA, 25 bp, Probe Sequence
cgggtgttattcttaatgtttctgt

SEQ ID NO: 54570 - DNA, 25 bp, Probe Sequence
tcgggtgttattcttaatgtttctg

SEQ ID NO: 54571 - DNA, 25 bp, Probe Sequence
ttcgggtgttattcttaatgtttct

SEQ ID NO: 54572 - DNA, 25 bp, Probe Sequence
gggtgttattcttaatgtttctgtc

SEQ ID NO: 54573 - DNA, 25 bp, Probe Sequence
attcgggtgttattcttaatgtttc

SEQ ID NO: 54574 - DNA, 25 bp, Probe Sequence
gatttgcattcgggtgttattctta

SEQ ID NO: 54575 - DNA, 25 bp, Probe Sequence
tttgcattcgggtgttattcttaat

SEQ ID NO: 54576 - DNA, 25 bp, Probe Sequence
atttgcattcgggtgttattcttaa

SEQ ID NO: 54577 - DNA, 25 bp, Probe Sequence
gcattcgggtgttattcttaatgtt

SEQ ID NO: 54578 - DNA, 25 bp, Probe Sequence
ggatttgcattcgggtgttattctt

SEQ ID NO: 54579 - DNA, 25 bp, Probe Sequence
cattcgggtgttattcttaatgttt

SEQ ID NO: 54580 - DNA, 25 bp, Probe Sequence
ttgcattcgggtgttattcttaatg

SEQ ID NO: 54581 - DNA, 25 bp, Probe Sequence
ctggatttgcattcgggtgttattc

SEQ ID NO: 54582 - DNA, 25 bp, Probe Sequence
tgcattcgggtgttattcttaatgt

SEQ ID NO: 54583 - DNA, 25 bp, Probe Sequence
tggatttgcattcgggtgttattct

SEQ ID NO: 54584 - DNA, 25 bp, Probe Sequence
tctggatttgcattcgggtgttatt

SEQ ID NO: 54585 - DNA, 25 bp, Probe Sequence
ttctggatttgcattcgggtgttat

SEQ ID NO: 54586 - DNA, 25 bp, Probe Sequence
tttctggatttgcattcgggtgtta

SEQ ID NO: 54587 - DNA, 25 bp, Probe Sequence
ttttctggatttgcattcgggtgtt

SEQ ID NO: 54588 - DNA, 25 bp, Probe Sequence
tcaaataaaacgtatgaatcagtaa

SEQ ID NO: 54589 - DNA, 25 bp, Probe Sequence
ccaacagagcaatcaggattactaa

SEQ ID NO: 54590 - DNA, 25 bp, Probe Sequence
cgagtatattgtaagaaggtggaca

SEQ ID NO: 54591 - DNA, 25 bp, Probe Sequence
caatgtgaatgtctgtagtcagttg

SEQ ID NO: 54592 - DNA, 25 bp, Probe Sequence
atgtgaatgtctgtagtcagttgtt

SEQ ID NO: 54593 - DNA, 25 bp, Probe Sequence
aatgtgaatgtctgtagtcagttgt

SEQ ID NO: 54594 - DNA, 25 bp, Probe Sequence
agtatattgtaagaaggtggacaga

SEQ ID NO: 54595 - DNA, 25 bp, Probe Sequence
ccaatgtgaatgtctgtagtcagtt

SEQ ID NO: 54596 - DNA, 25 bp, Probe Sequence
gagtatattgtaagaaggtggacag

SEQ ID NO: 54597 - DNA, 25 bp, Probe Sequence
tcgagtatattgtaagaaggtggac

SEQ ID NO: 54598 - DNA, 25 bp, Probe Sequence
gtatattgtaagaaggtggacagaa

SEQ ID NO: 54599 - DNA, 25 bp, Probe Sequence
tgttagcttctattgtaagactgcc

SEQ ID NO: 54600 - DNA, 25 bp, Probe Sequence
ttcgagtatattgtaagaaggtgga

SEQ ID NO: 54601 - DNA, 25 bp, Probe Sequence
atgttagcttctattgtaagactgc

SEQ ID NO: 54602 - DNA, 25 bp, Probe Sequence
taagaaggtggacagaaagagtttg

SEQ ID NO: 54603 - DNA, 25 bp, Probe Sequence
gtaagaaggtggacagaaagagttt

SEQ ID NO: 54604 - DNA, 25 bp, Probe Sequence
gcacaattcatttagaggcttcaat

SEQ ID NO: 54605 - DNA, 25 bp, Probe Sequence
acaattcatttagaggcttcaatca

SEQ ID NO: 54606 - DNA, 25 bp, Probe Sequence
cacaattcatttagaggcttcaatc

SEQ ID NO: 54607 - DNA, 25 bp, Probe Sequence
caacagagcaatcaggattactaaa

SEQ ID NO: 54608 - DNA, 25 bp, Probe Sequence
attcgagtatattgtaagaaggtgg

SEQ ID NO: 54609 - DNA, 25 bp, Probe Sequence
attgtaagaaggtggacagaaagag

SEQ ID NO: 54610 - DNA, 25 bp, Probe Sequence
gaaggtggacagaaagagtttgtat

SEQ ID NO: 54611 - DNA, 25 bp, Probe Sequence
tattgtaagaaggtggacagaaaga

SEQ ID NO: 54612 - DNA, 25 bp, Probe Sequence
taaagatgacccaatgtgaatgtct

SEQ ID NO: 54613 - DNA, 25 bp, Probe Sequence
tcattgttgctatcagtgtggaatt

SEQ ID NO: 54614 - DNA, 25 bp, Probe Sequence
gtcattgttgctatcagtgtggaat

SEQ ID NO: 54615 - DNA, 25 bp, Probe Sequence
ccaacatccaatagtcttcttcatg

SEQ ID NO: 54616 - DNA, 25 bp, Probe Sequence
ctaaggacagtgatgaggaagatgg

SEQ ID NO: 54617 - DNA, 25 bp, Probe Sequence
atgatgatgcagatatcgactacat

SEQ ID NO: 54618 - DNA, 25 bp, Probe Sequence
caatagtcttcttcatggaacacat

SEQ ID NO: 54619 - DNA, 25 bp, Probe Sequence
agtcattgttgctatcagtgtggaa

SEQ ID NO: 54620 - DNA, 25 bp, Probe Sequence
gctaaggacagtgatgaggaagatg

SEQ ID NO: 54621 - DNA, 25 bp, Probe Sequence
acgtccttataatgatgatgcagat

SEQ ID NO: 54622 - DNA, 25 bp, Probe Sequence
tttcccaacatccaatagtcttctt

SEQ ID NO: 54623 - DNA, 25 bp, Probe Sequence
cccaacatccaatagtcttcttcat

SEQ ID NO: 54624 - DNA, 25 bp, Probe Sequence
ttcccaacatccaatagtcttcttc

SEQ ID NO: 54625 - DNA, 25 bp, Probe Sequence
gcaagaggagaagactatgagaaag

SEQ ID NO: 54626 - DNA, 25 bp, Probe Sequence
aaacagaatttggaaagaggaacag

SEQ ID NO: 54627 - DNA, 25 bp, Probe Sequence
attgttgctatcagtgtggaatttg

SEQ ID NO: 54628 - DNA, 25 bp, Probe Sequence
cattgttgctatcagtgtggaattt

SEQ ID NO: 54629 - DNA, 25 bp, Probe Sequence
gctcgtaaattaaatcaccaggaag

SEQ ID NO: 54630 - DNA, 25 bp, Probe Sequence
aatgatgatgcagatatcgactaca

SEQ ID NO: 54631 - DNA, 25 bp, Probe Sequence
caacatccaatagtcttcttcatgg

SEQ ID NO: 54632 - DNA, 25 bp, Probe Sequence
cagtcattgttgctatcagtgtgga

SEQ ID NO: 54633 - DNA, 25 bp, Probe Sequence
tgtctaatcccttcaagaactgttt

SEQ ID NO: 54634 - DNA, 25 bp, Probe Sequence
accaggaagttgtggaagaagataa

SEQ ID NO: 54635 - DNA, 25 bp, Probe Sequence
ctgtctaatcccttcaagaactgtt

SEQ ID NO: 54636 - DNA, 25 bp, Probe Sequence
tgatgatgcagatatcgactacatt

SEQ ID NO: 54637 - DNA, 25 bp, Probe Sequence
aatgtttctggcatttgaagtcaaa

SEQ ID NO: 54638 - DNA, 25 bp, Probe Sequence
atgtttctggcatttgaagtcaaag

SEQ ID NO: 54639 - DNA, 25 bp, Probe Sequence
tgtttctggcatttgaagtcaaaga

SEQ ID NO: 54640 - DNA, 25 bp, Probe Sequence
aaatgtttctggcatttgaagtcaa

SEQ ID NO: 54641 - DNA, 25 bp, Probe Sequence
taaatgtttctggcatttgaagtca

SEQ ID NO: 54642 - DNA, 25 bp, Probe Sequence
gttaaatgtttctggcatttgaagt

SEQ ID NO: 54643 - DNA, 25 bp, Probe Sequence
ttaaatgtttctggcatttgaagtc

SEQ ID NO: 54644 - DNA, 25 bp, Probe Sequence
agttaaatgtttctggcatttgaag

SEQ ID NO: 54645 - DNA, 25 bp, Probe Sequence
aagttaaatgtttctggcatttgaa

SEQ ID NO: 54646 - DNA, 25 bp, Probe Sequence
aaagttaaatgtttctggcatttga

SEQ ID NO: 54647 - DNA, 25 bp, Probe Sequence
acaggaatcttttagtaaaatagca

SEQ ID NO: 54648 - DNA, 25 bp, Probe Sequence
ggaatcttttagtaaaatagcagtg

SEQ ID NO: 54649 - DNA, 25 bp, Probe Sequence
aggaatcttttagtaaaatagcagt

SEQ ID NO: 54650 - DNA, 25 bp, Probe Sequence
caggaatcttttagtaaaatagcag

SEQ ID NO: 54651 - DNA, 25 bp, Probe Sequence
gacaggaatcttttagtaaaatagc

SEQ ID NO: 54652 - DNA, 25 bp, Probe Sequence
gaatcttttagtaaaatagcagtgt

SEQ ID NO: 54653 - DNA, 25 bp, Probe Sequence
tcttttagtaaaatagcagtgtttt

SEQ ID NO: 54654 - DNA, 25 bp, Probe Sequence
atcttttagtaaaatagcagtgttt

SEQ ID NO: 54655 - DNA, 25 bp, Probe Sequence
aatcttttagtaaaatagcagtgtt

SEQ ID NO: 54656 - DNA, 25 bp, Probe Sequence
aaaagttaaatgtttctggcatttg

SEQ ID NO: 54657 - DNA, 25 bp, Probe Sequence
ccactcaaagtatcacagaagattt

SEQ ID NO: 54658 - DNA, 25 bp, Probe Sequence
gccactcaaagtatcacagaagatt

SEQ ID NO: 54659 - DNA, 25 bp, Probe Sequence
tgctttccacagtcagaataggttt

SEQ ID NO: 54660 - DNA, 25 bp, Probe Sequence
cactcaaagtatcacagaagatttc

SEQ ID NO: 54661 - DNA, 25 bp, Probe Sequence
gtgctttccacagtcagaataggtt

SEQ ID NO: 54662 - DNA, 25 bp, Probe Sequence
gctttccacagtcagaataggtttt

SEQ ID NO: 54663 - DNA, 25 bp, Probe Sequence
actcaaagtatcacagaagatttct

SEQ ID NO: 54664 - DNA, 25 bp, Probe Sequence
cttcaaaaggaaactacagtcgtcg

SEQ ID NO: 54665 - DNA, 25 bp, Probe Sequence
gcttcaaaaggaaactacagtcgtc

SEQ ID NO: 54666 - DNA, 25 bp, Probe Sequence
ctcaaagtatcacagaagatttctt

SEQ ID NO: 54667 - DNA, 25 bp, Probe Sequence
aagtatcacagaagatttcttcccg

SEQ ID NO: 54668 - DNA, 25 bp, Probe Sequence
aaaggaaactacagtcgtcgggaag

SEQ ID NO: 54669 - DNA, 25 bp, Probe Sequence
tgcttcaaaaggaaactacagtcgt

SEQ ID NO: 54670 - DNA, 25 bp, Probe Sequence
cctgcttcaaaaggaaactacagtc

SEQ ID NO: 54671 - DNA, 25 bp, Probe Sequence
aaagtatcacagaagatttcttccc

SEQ ID NO: 54672 - DNA, 25 bp, Probe Sequence
ctgcttcaaaaggaaactacagtcg

SEQ ID NO: 54673 - DNA, 25 bp, Probe Sequence
gtatcacagaagatttcttcccgtg

SEQ ID NO: 54674 - DNA, 25 bp, Probe Sequence
cacctgcttcaaaaggaaactacag

SEQ ID NO: 54675 - DNA, 25 bp, Probe Sequence
ggccactcaaagtatcacagaagat

SEQ ID NO: 54676 - DNA, 25 bp, Probe Sequence
agtatcacagaagatttcttcccgt

SEQ ID NO: 54677 - DNA, 25 bp, Probe Sequence
acctgcttcaaaaggaaactacagt

SEQ ID NO: 54678 - DNA, 25 bp, Probe Sequence
ttcaaaaggaaactacagtcgtcgg

SEQ ID NO: 54679 - DNA, 25 bp, Probe Sequence
caaagtatcacagaagatttcttcc

SEQ ID NO: 54680 - DNA, 25 bp, Probe Sequence
tatcacagaagatttcttcccgtgg

SEQ ID NO: 54681 - DNA, 25 bp, Probe Sequence
gatctaggtatggagttatggacac

SEQ ID NO: 54682 - DNA, 25 bp, Probe Sequence
atggatctaggtatggagttatgga

SEQ ID NO: 54683 - DNA, 25 bp, Probe Sequence
gatggatctaggtatggagttatgg

SEQ ID NO: 54684 - DNA, 25 bp, Probe Sequence
ggatggatctaggtatggagttatg

SEQ ID NO: 54685 - DNA, 25 bp, Probe Sequence
ggatctaggtatggagttatggaca

SEQ ID NO: 54686 - DNA, 25 bp, Probe Sequence
tggatctaggtatggagttatggac

SEQ ID NO: 54687 - DNA, 25 bp, Probe Sequence
cggatggatctaggtatggagttat

SEQ ID NO: 54688 - DNA, 25 bp, Probe Sequence
actcttaggcttgcttactctacaa

SEQ ID NO: 54689 - DNA, 25 bp, Probe Sequence
cactcttaggcttgcttactctaca

SEQ ID NO: 54690 - DNA, 25 bp, Probe Sequence
tgaagttgattgactatggtctctc

SEQ ID NO: 54691 - DNA, 25 bp, Probe Sequence
ggatgaagttgattgactatggtct

SEQ ID NO: 54692 - DNA, 25 bp, Probe Sequence
atgaagttgattgactatggtctct

SEQ ID NO: 54693 - DNA, 25 bp, Probe Sequence
gaagttgattgactatggtctctcc

SEQ ID NO: 54694 - DNA, 25 bp, Probe Sequence
gatgaagttgattgactatggtctc

SEQ ID NO: 54695 - DNA, 25 bp, Probe Sequence
cggatgaagttgattgactatggtc

SEQ ID NO: 54696 - DNA, 25 bp, Probe Sequence
atctaggtatggagttatggacacc

SEQ ID NO: 54697 - DNA, 25 bp, Probe Sequence
atggaacagtatgaaattgaggtga

SEQ ID NO: 54698 - DNA, 25 bp, Probe Sequence
gatggaacagtatgaaattgaggtg

SEQ ID NO: 54699 - DNA, 25 bp, Probe Sequence
agatggaacagtatgaaattgaggt

SEQ ID NO: 54700 - DNA, 25 bp, Probe Sequence
cgagatggaacagtatgaaattgag

SEQ ID NO: 54701 - DNA, 25 bp, Probe Sequence
aagttgattgactatggtctctccg

SEQ ID NO: 54702 - DNA, 25 bp, Probe Sequence
gagatggaacagtatgaaattgagg

SEQ ID NO: 54703 - DNA, 25 bp, Probe Sequence
ccgagatggaacagtatgaaattga

SEQ ID NO: 54704 - DNA, 25 bp, Probe Sequence
tggaacagtatgaaattgaggtgac

SEQ ID NO: 54705 - DNA, 25 bp, Probe Sequence
agggcttcatctagggcagataatc

SEQ ID NO: 54706 - DNA, 25 bp, Probe Sequence
taaagaaaggtcttggaaagttaaa

SEQ ID NO: 54707 - DNA, 25 bp, Probe Sequence
ataaagaaaggtcttggaaagttaa

SEQ ID NO: 54708 - DNA, 25 bp, Probe Sequence
aataaagaaaggtcttggaaagtta

SEQ ID NO: 54709 - DNA, 25 bp, Probe Sequence
aaagaaaggtcttggaaagttaaaa

SEQ ID NO: 54710 - DNA, 25 bp, Probe Sequence
gggcttcatctagggcagataatcg

SEQ ID NO: 54711 - DNA, 25 bp, Probe Sequence
cttcatctagggcagataatcgcgg

SEQ ID NO: 54712 - DNA, 25 bp, Probe Sequence
tgagaaggaccagattattgagatg

SEQ ID NO: 54713 - DNA, 25 bp, Probe Sequence
acattgagaaggaccagattattga

SEQ ID NO: 54714 - DNA, 25 bp, Probe Sequence
ggacattgagaaggaccagattatt

SEQ ID NO: 54715 - DNA, 25 bp, Probe Sequence
gacattgagaaggaccagattattg

SEQ ID NO: 54716 - DNA, 25 bp, Probe Sequence
ttgagaaggaccagattattgagat

SEQ ID NO: 54717 - DNA, 25 bp, Probe Sequence
attgagaaggaccagattattgaga

SEQ ID NO: 54718 - DNA, 25 bp, Probe Sequence
cattgagaaggaccagattattgag

SEQ ID NO: 54719 - DNA, 25 bp, Probe Sequence
gatgacaggattggacattgagaag

SEQ ID NO: 54720 - DNA, 25 bp, Probe Sequence
gcagtgaaggagagtacaattacat

SEQ ID NO: 54721 - DNA, 25 bp, Probe Sequence
agaataattgatgtgagcactgtta

SEQ ID NO: 54722 - DNA, 25 bp, Probe Sequence
tagaataattgatgtgagcactgtt

SEQ ID NO: 54723 - DNA, 25 bp, Probe Sequence
agatgacaggattggacattgagaa

SEQ ID NO: 54724 - DNA, 25 bp, Probe Sequence
atagaataattgatgtgagcactgt

SEQ ID NO: 54725 - DNA, 25 bp, Probe Sequence
ctgataactgactctgatctcaaca

SEQ ID NO: 54726 - DNA, 25 bp, Probe Sequence
aaggcagtgaaggagagtacaatta

SEQ ID NO: 54727 - DNA, 25 bp, Probe Sequence
tctgataactgactctgatctcaac

SEQ ID NO: 54728 - DNA, 25 bp, Probe Sequence
cagtgaaggagagtacaattacatt

SEQ ID NO: 54729 - DNA, 25 bp, Probe Sequence
tgataactgactctgatctcaacat

SEQ ID NO: 54730 - DNA, 25 bp, Probe Sequence
gagatgacaggattggacattgaga

SEQ ID NO: 54731 - DNA, 25 bp, Probe Sequence
gaataattgatgtgagcactgttaa

SEQ ID NO: 54732 - DNA, 25 bp, Probe Sequence
ctgtctgataactgactctgatctc

SEQ ID NO: 54733 - DNA, 25 bp, Probe Sequence
gtctgataactgactctgatctcaa

SEQ ID NO: 54734 - DNA, 25 bp, Probe Sequence
tgtctgataactgactctgatctca

SEQ ID NO: 54735 - DNA, 25 bp, Probe Sequence
aggcagtgaaggagagtacaattac

SEQ ID NO: 54736 - DNA, 25 bp, Probe Sequence
ccaagctactaagacaatgaagact

SEQ ID NO: 54737 - DNA, 25 bp, Probe Sequence
caagctactaagacaatgaagactt

SEQ ID NO: 54738 - DNA, 25 bp, Probe Sequence
ctactgcttcccttctttatctact

SEQ ID NO: 54739 - DNA, 25 bp, Probe Sequence
gctactgcttcccttctttatctac

SEQ ID NO: 54740 - DNA, 25 bp, Probe Sequence
aaatatcttctcacgcctgtaatcc

SEQ ID NO: 54741 - DNA, 25 bp, Probe Sequence
gtaaactataaaggtgggatggctt

SEQ ID NO: 54742 - DNA, 25 bp, Probe Sequence
gacaccatcattaaggattcgacac

SEQ ID NO: 54743 - DNA, 25 bp, Probe Sequence
tcccttctttatctactagcctctt

SEQ ID NO: 54744 - DNA, 25 bp, Probe Sequence
ttcccttctttatctactagcctct

SEQ ID NO: 54745 - DNA, 25 bp, Probe Sequence
cttcccttctttatctactagcctc

SEQ ID NO: 54746 - DNA, 25 bp, Probe Sequence
ataacttagatgtctactgggtgag

SEQ ID NO: 54747 - DNA, 25 bp, Probe Sequence
gactttcatatttggataacctgga

SEQ ID NO: 54748 - DNA, 25 bp, Probe Sequence
actgcttcccttctttatctactag

SEQ ID NO: 54749 - DNA, 25 bp, Probe Sequence
taacttagatgtctactgggtgaga

SEQ ID NO: 54750 - DNA, 25 bp, Probe Sequence
gtgacaccatcattaaggattcgac

SEQ ID NO: 54751 - DNA, 25 bp, Probe Sequence
gacctggtagaactgactttcatat

SEQ ID NO: 54752 - DNA, 25 bp, Probe Sequence
tactgcttcccttctttatctacta

SEQ ID NO: 54753 - DNA, 25 bp, Probe Sequence
acctggtagaactgactttcatatt

SEQ ID NO: 54754 - DNA, 25 bp, Probe Sequence
agacctggtagaactgactttcata

SEQ ID NO: 54755 - DNA, 25 bp, Probe Sequence
cccttctttatctactagcctctta

SEQ ID NO: 54756 - DNA, 25 bp, Probe Sequence
tttgagacctggtagaactgacttt

SEQ ID NO: 54757 - DNA, 25 bp, Probe Sequence
tgactttcatatttggataacctgg

SEQ ID NO: 54758 - DNA, 25 bp, Probe Sequence
tggtagaactgactttcatatttgg

SEQ ID NO: 54759 - DNA, 25 bp, Probe Sequence
ctcttatatgtagcacagggaaagg

SEQ ID NO: 54760 - DNA, 25 bp, Probe Sequence
acagattcctacacatgactatcag

SEQ ID NO: 54761 - DNA, 25 bp, Probe Sequence
cagattcctacacatgactatcaga

SEQ ID NO: 54762 - DNA, 25 bp, Probe Sequence
aacagattcctacacatgactatca

SEQ ID NO: 54763 - DNA, 25 bp, Probe Sequence
agattcctacacatgactatcagaa

SEQ ID NO: 54764 - DNA, 25 bp, Probe Sequence
gattcctacacatgactatcagaag

SEQ ID NO: 54765 - DNA, 25 bp, Probe Sequence
aacttctgaacatggtgtggaatag

SEQ ID NO: 54766 - DNA, 25 bp, Probe Sequence
gaacttctgaacatggtgtggaata

SEQ ID NO: 54767 - DNA, 25 bp, Probe Sequence
attcctacacatgactatcagaagg

SEQ ID NO: 54768 - DNA, 25 bp, Probe Sequence
agtaatgatagctcgttgtatccag

SEQ ID NO: 54769 - DNA, 25 bp, Probe Sequence
cagtaatgatagctcgttgtatcca

SEQ ID NO: 54770 - DNA, 25 bp, Probe Sequence
cttctgaacatggtgtggaatagtg

SEQ ID NO: 54771 - DNA, 25 bp, Probe Sequence
aattccaatgaacttctgaacatgg

SEQ ID NO: 54772 - DNA, 25 bp, Probe Sequence
attccaatgaacttctgaacatggt

SEQ ID NO: 54773 - DNA, 25 bp, Probe Sequence
ttctgaacatggtgtggaatagtga

SEQ ID NO: 54774 - DNA, 25 bp, Probe Sequence
acttctgaacatggtgtggaatagt

SEQ ID NO: 54775 - DNA, 25 bp, Probe Sequence
gcagtaatgatagctcgttgtatcc

SEQ ID NO: 54776 - DNA, 25 bp, Probe Sequence
tctgaacatggtgtggaatagtgag

SEQ ID NO: 54777 - DNA, 25 bp, Probe Sequence
gacttaccaaagagcaactgaaaca

SEQ ID NO: 54778 - DNA, 25 bp, Probe Sequence
ttccaatgaacttctgaacatggtg

SEQ ID NO: 54779 - DNA, 25 bp, Probe Sequence
gactatcagaagggagaccagtatg

SEQ ID NO: 54780 - DNA, 25 bp, Probe Sequence
tgaaacagattcctacacatgacta

SEQ ID NO: 54781 - DNA, 25 bp, Probe Sequence
aaagagcaactgaaacagattccta

SEQ ID NO: 54782 - DNA, 25 bp, Probe Sequence
gaacatggtgtggaatagtgaggaa

SEQ ID NO: 54783 - DNA, 25 bp, Probe Sequence
caatgaacttctgaacatggtgtgg

SEQ ID NO: 54784 - DNA, 25 bp, Probe Sequence
acagattcctacacatgactatcag

SEQ ID NO: 54785 - DNA, 25 bp, Probe Sequence
cagattcctacacatgactatcaga

SEQ ID NO: 54786 - DNA, 25 bp, Probe Sequence
aacagattcctacacatgactatca

SEQ ID NO: 54787 - DNA, 25 bp, Probe Sequence
agattcctacacatgactatcagaa

SEQ ID NO: 54788 - DNA, 25 bp, Probe Sequence
gattcctacacatgactatcagaag

SEQ ID NO: 54789 - DNA, 25 bp, Probe Sequence
aacttctgaacatggtgtggaatag

SEQ ID NO: 54790 - DNA, 25 bp, Probe Sequence
gaacttctgaacatggtgtggaata

SEQ ID NO: 54791 - DNA, 25 bp, Probe Sequence
attcctacacatgactatcagaagg

SEQ ID NO: 54792 - DNA, 25 bp, Probe Sequence
agtaatgatagctcgttgtatccag

SEQ ID NO: 54793 - DNA, 25 bp, Probe Sequence
cagtaatgatagctcgttgtatcca

SEQ ID NO: 54794 - DNA, 25 bp, Probe Sequence
cttctgaacatggtgtggaatagtg

SEQ ID NO: 54795 - DNA, 25 bp, Probe Sequence
aattccaatgaacttctgaacatgg

SEQ ID NO: 54796 - DNA, 25 bp, Probe Sequence
attccaatgaacttctgaacatggt

SEQ ID NO: 54797 - DNA, 25 bp, Probe Sequence
ttctgaacatggtgtggaatagtga

SEQ ID NO: 54798 - DNA, 25 bp, Probe Sequence
acttctgaacatggtgtggaatagt

SEQ ID NO: 54799 - DNA, 25 bp, Probe Sequence
gcagtaatgatagctcgttgtatcc

SEQ ID NO: 54800 - DNA, 25 bp, Probe Sequence
tctgaacatggtgtggaatagtgag

SEQ ID NO: 54801 - DNA, 25 bp, Probe Sequence
gacttaccaaagagcaactgaaaca

SEQ ID NO: 54802 - DNA, 25 bp, Probe Sequence
ttccaatgaacttctgaacatggtg

SEQ ID NO: 54803 - DNA, 25 bp, Probe Sequence
gactatcagaagggagaccagtatg

SEQ ID NO: 54804 - DNA, 25 bp, Probe Sequence
tgaaacagattcctacacatgacta

SEQ ID NO: 54805 - DNA, 25 bp, Probe Sequence
aaagagcaactgaaacagattccta

SEQ ID NO: 54806 - DNA, 25 bp, Probe Sequence
gaacatggtgtggaatagtgaggaa

SEQ ID NO: 54807 - DNA, 25 bp, Probe Sequence
caatgaacttctgaacatggtgtgg

SEQ ID NO: 54808 - DNA, 25 bp, Probe Sequence
gagtggcagtctaatactacagtta

SEQ ID NO: 54809 - DNA, 25 bp, Probe Sequence
tgagtggcagtctaatactacagtt

SEQ ID NO: 54810 - DNA, 25 bp, Probe Sequence
gtggcagtctaatactacagttagg

SEQ ID NO: 54811 - DNA, 25 bp, Probe Sequence
agtggcagtctaatactacagttag

SEQ ID NO: 54812 - DNA, 25 bp, Probe Sequence
gtgagtggcagtctaatactacagt

SEQ ID NO: 54813 - DNA, 25 bp, Probe Sequence
tatagagttagttgttctccacggc

SEQ ID NO: 54814 - DNA, 25 bp, Probe Sequence
ggtgagtggcagtctaatactacag

SEQ ID NO: 54815 - DNA, 25 bp, Probe Sequence
ttatttgtattatctgcctggtccc

SEQ ID NO: 54816 - DNA, 25 bp, Probe Sequence
tatttgtattatctgcctggtccct

SEQ ID NO: 54817 - DNA, 25 bp, Probe Sequence
tttatttgtattatctgcctggtcc

SEQ ID NO: 54818 - DNA, 25 bp, Probe Sequence
ctggtgagtggcagtctaatactac

SEQ ID NO: 54819 - DNA, 25 bp, Probe Sequence
ctatagagttagttgttctccacgg

SEQ ID NO: 54820 - DNA, 25 bp, Probe Sequence
cctatagagttagttgttctccacg

SEQ ID NO: 54821 - DNA, 25 bp, Probe Sequence
tggtgagtggcagtctaatactaca

SEQ ID NO: 54822 - DNA, 25 bp, Probe Sequence
tcctatagagttagttgttctccac

SEQ ID NO: 54823 - DNA, 25 bp, Probe Sequence
aaattgagccaccgtctaagaaatc

SEQ ID NO: 54824 - DNA, 25 bp, Probe Sequence
ttcctatagagttagttgttctcca

SEQ ID NO: 54825 - DNA, 25 bp, Probe Sequence
atttgtattatctgcctggtccctg

SEQ ID NO: 54826 - DNA, 25 bp, Probe Sequence
atagagttagttgttctccacggct

SEQ ID NO: 54827 - DNA, 25 bp, Probe Sequence
tggcagtctaatactacagttaggg

SEQ ID NO: 54828 - DNA, 25 bp, Probe Sequence
catttatttgtattatctgcctggt

SEQ ID NO: 54829 - DNA, 25 bp, Probe Sequence
caccgtctaagaaatcaagaggttt

SEQ ID NO: 54830 - DNA, 25 bp, Probe Sequence
atttatttgtattatctgcctggtc

SEQ ID NO: 54831 - DNA, 25 bp, Probe Sequence
tcatttatttgtattatctgcctgg

SEQ ID NO: 54832 - DNA, 25 bp, Probe Sequence
caattcatatactgccttgtgttca

SEQ ID NO: 54833 - DNA, 25 bp, Probe Sequence
tcaattcatatactgccttgtgttc

SEQ ID NO: 54834 - DNA, 25 bp, Probe Sequence
ttcaattcatatactgccttgtgtt

SEQ ID NO: 54835 - DNA, 25 bp, Probe Sequence
aattcatatactgccttgtgttcag

SEQ ID NO: 54836 - DNA, 25 bp, Probe Sequence
atcccgtgttacctttctctattac

SEQ ID NO: 54837 - DNA, 25 bp, Probe Sequence
atgctacaatctgtgtcatatagtt

SEQ ID NO: 54838 - DNA, 25 bp, Probe Sequence
ttcaaatatcccgtgttacctttct

SEQ ID NO: 54839 - DNA, 25 bp, Probe Sequence
tttcaaatatcccgtgttacctttc

SEQ ID NO: 54840 - DNA, 25 bp, Probe Sequence
caaatatcccgtgttacctttctct

SEQ ID NO: 54841 - DNA, 25 bp, Probe Sequence
tcaaatatcccgtgttacctttctc

SEQ ID NO: 54842 - DNA, 25 bp, Probe Sequence
aaatatcccgtgttacctttctcta

SEQ ID NO: 54843 - DNA, 25 bp, Probe Sequence
agcctttcaattcatatactgcctt

SEQ ID NO: 54844 - DNA, 25 bp, Probe Sequence
gaatttcaaatatcccgtgttacct

SEQ ID NO: 54845 - DNA, 25 bp, Probe Sequence
atatcccgtgttacctttctctatt

SEQ ID NO: 54846 - DNA, 25 bp, Probe Sequence
aatatcccgtgttacctttctctat

SEQ ID NO: 54847 - DNA, 25 bp, Probe Sequence
gaagacatcaaagactcaggttaaa

SEQ ID NO: 54848 - DNA, 25 bp, Probe Sequence
aagtatgctacaatctgtgtcatat

SEQ ID NO: 54849 - DNA, 25 bp, Probe Sequence
aatttcaaatatcccgtgttacctt

SEQ ID NO: 54850 - DNA, 25 bp, Probe Sequence
atttcaaatatcccgtgttaccttt

SEQ ID NO: 54851 - DNA, 25 bp, Probe Sequence
tatcccgtgttacctttctctatta

SEQ ID NO: 54852 - DNA, 25 bp, Probe Sequence
tgaagacatcaaagactcaggttaa

SEQ ID NO: 54853 - DNA, 25 bp, Probe Sequence
gcctttcaattcatatactgccttg

SEQ ID NO: 54854 - DNA, 25 bp, Probe Sequence
cctttcaattcatatactgccttgt

SEQ ID NO: 54855 - DNA, 25 bp, Probe Sequence
gtgaacttgtttaattcctcagtgg

SEQ ID NO: 54856 - DNA, 25 bp, Probe Sequence
ggactcttgttcactttaccttctg

SEQ ID NO: 54857 - DNA, 25 bp, Probe Sequence
ctggactcttgttcactttaccttc

SEQ ID NO: 54858 - DNA, 25 bp, Probe Sequence
tggactcttgttcactttaccttct

SEQ ID NO: 54859 - DNA, 25 bp, Probe Sequence
gatttccaagagccagagatgaatt

SEQ ID NO: 54860 - DNA, 25 bp, Probe Sequence
actggactcttgttcactttacctt

SEQ ID NO: 54861 - DNA, 25 bp, Probe Sequence
ttccaagagccagagatgaattgtg

SEQ ID NO: 54862 - DNA, 25 bp, Probe Sequence
gactcttgttcactttaccttctgc

SEQ ID NO: 54863 - DNA, 25 bp, Probe Sequence
ttgttcactttaccttctgccaaat

SEQ ID NO: 54864 - DNA, 25 bp, Probe Sequence
tgttcactttaccttctgccaaatg

SEQ ID NO: 54865 - DNA, 25 bp, Probe Sequence
atttccaagagccagagatgaattg

SEQ ID NO: 54866 - DNA, 25 bp, Probe Sequence
agatttccaagagccagagatgaat

SEQ ID NO: 54867 - DNA, 25 bp, Probe Sequence
gactggactcttgttcactttacct

SEQ ID NO: 54868 - DNA, 25 bp, Probe Sequence
ctggactggactcttgttcacttta

SEQ ID NO: 54869 - DNA, 25 bp, Probe Sequence
aatattaaatcacagttccagccct

SEQ ID NO: 54870 - DNA, 25 bp, Probe Sequence
atattaaatcacagttccagccctg

SEQ ID NO: 54871 - DNA, 25 bp, Probe Sequence
ttaggtatggattgatgactaagtc

SEQ ID NO: 54872 - DNA, 25 bp, Probe Sequence
cttgttcactttaccttctgccaaa

SEQ ID NO: 54873 - DNA, 25 bp, Probe Sequence
tggactggactcttgttcactttac

SEQ ID NO: 54874 - DNA, 25 bp, Probe Sequence
cagctttaggtatggattgatgact

SEQ ID NO: 54875 - DNA, 25 bp, Probe Sequence
gctttaggtatggattgatgactaa

SEQ ID NO: 54876 - DNA, 25 bp, Probe Sequence
agctttaggtatggattgatgacta

SEQ ID NO: 54877 - DNA, 25 bp, Probe Sequence
cagatttccaagagccagagatgaa

SEQ ID NO: 54878 - DNA, 25 bp, Probe Sequence
tttccaagagccagagatgaattgt

SEQ ID NO: 54879 - DNA, 25 bp, Probe Sequence
tcttgttcactttaccttctgccaa

SEQ ID NO: 54880 - DNA, 25 bp, Probe Sequence
tatatgcagaagcagactcacaaga

SEQ ID NO: 54881 - DNA, 25 bp, Probe Sequence
atatgcagaagcagactcacaagaa

SEQ ID NO: 54882 - DNA, 25 bp, Probe Sequence
agactcacaagaaagtgcagatcac

SEQ ID NO: 54883 - DNA, 25 bp, Probe Sequence
cagactcacaagaaagtgcagatca

SEQ ID NO: 54884 - DNA, 25 bp, Probe Sequence
ctcacaagaaagtgcagatcacctt

SEQ ID NO: 54885 - DNA, 25 bp, Probe Sequence
gcagaagcagactcacaagaaagtg

SEQ ID NO: 54886 - DNA, 25 bp, Probe Sequence
tatgcagaagcagactcacaagaaa

SEQ ID NO: 54887 - DNA, 25 bp, Probe Sequence
gactcacaagaaagtgcagatcacc

SEQ ID NO: 54888 - DNA, 25 bp, Probe Sequence
actcacaagaaagtgcagatcacct

SEQ ID NO: 54889 - DNA, 25 bp, Probe Sequence
atgcagaagcagactcacaagaaag

SEQ ID NO: 54890 - DNA, 25 bp, Probe Sequence
cagaagcagactcacaagaaagtgc

SEQ ID NO: 54891 - DNA, 25 bp, Probe Sequence
tcacaagaaagtgcagatcaccttg

SEQ ID NO: 54892 - DNA, 25 bp, Probe Sequence
gcagactcacaagaaagtgcagatc

SEQ ID NO: 54893 - DNA, 25 bp, Probe Sequence
gaagcagactcacaagaaagtgcag

SEQ ID NO: 54894 - DNA, 25 bp, Probe Sequence
agcagactcacaagaaagtgcagat

SEQ ID NO: 54895 - DNA, 25 bp, Probe Sequence
aagcagactcacaagaaagtgcaga

SEQ ID NO: 54896 - DNA, 25 bp, Probe Sequence
agaagcagactcacaagaaagtgca

SEQ ID NO: 54897 - DNA, 25 bp, Probe Sequence
tgcagaagcagactcacaagaaagt

SEQ ID NO: 54898 - DNA, 25 bp, Probe Sequence
cacaagaaagtgcagatcaccttgc

SEQ ID NO: 54899 - DNA, 25 bp, Probe Sequence
attataacaaactgttcgcttaaaa

SEQ ID NO: 54900 - DNA, 25 bp, Probe Sequence
ttcctctctcaagatgaagatgttc

SEQ ID NO: 54901 - DNA, 25 bp, Probe Sequence
tccacctcataagtcatgtctcttg

SEQ ID NO: 54902 - DNA, 25 bp, Probe Sequence
gtccacctcataagtcatgtctctt

SEQ ID NO: 54903 - DNA, 25 bp, Probe Sequence
atgtccacctcataagtcatgtctc

SEQ ID NO: 54904 - DNA, 25 bp, Probe Sequence
gatgtccacctcataagtcatgtct

SEQ ID NO: 54905 - DNA, 25 bp, Probe Sequence
tgctaagaactgtaatgctcaggaa

SEQ ID NO: 54906 - DNA, 25 bp, Probe Sequence
gtctctctcctgctgcctatttata

SEQ ID NO: 54907 - DNA, 25 bp, Probe Sequence
gctgcctatttatagattacactgg

SEQ ID NO: 54908 - DNA, 25 bp, Probe Sequence
cctgctgcctatttatagattacac

SEQ ID NO: 54909 - DNA, 25 bp, Probe Sequence
tcctgctgcctatttatagattaca

SEQ ID NO: 54910 - DNA, 25 bp, Probe Sequence
tctctctcctgctgcctatttatag

SEQ ID NO: 54911 - DNA, 25 bp, Probe Sequence
ctgtgatgtccacctcataagtcat

SEQ ID NO: 54912 - DNA, 25 bp, Probe Sequence
tgatgtccacctcataagtcatgtc

SEQ ID NO: 54913 - DNA, 25 bp, Probe Sequence
ctctcctgctgcctatttatagatt

SEQ ID NO: 54914 - DNA, 25 bp, Probe Sequence
tctctcctgctgcctatttatagat

SEQ ID NO: 54915 - DNA, 25 bp, Probe Sequence
ctctctcctgctgcctatttataga

SEQ ID NO: 54916 - DNA, 25 bp, Probe Sequence
gtgctaagaactgtaatgctcagga

SEQ ID NO: 54917 - DNA, 25 bp, Probe Sequence
agtgctaagaactgtaatgctcagg

SEQ ID NO: 54918 - DNA, 25 bp, Probe Sequence
ctcctgctgcctatttatagattac

SEQ ID NO: 54919 - DNA, 25 bp, Probe Sequence
tgctgcctatttatagattacactg

SEQ ID NO: 54920 - DNA, 25 bp, Probe Sequence
aaattctggtttggtgttgagtctc

SEQ ID NO: 54921 - DNA, 25 bp, Probe Sequence
tgtccacctcataagtcatgtctct

SEQ ID NO: 54922 - DNA, 25 bp, Probe Sequence
tctcctgctgcctatttatagatta

SEQ ID NO: 54923 - DNA, 25 bp, Probe Sequence
ctgctgcctatttatagattacact

SEQ ID NO: 54924 - DNA, 25 bp, Probe Sequence
taataaatgccatactccctaccct

SEQ ID NO: 54925 - DNA, 25 bp, Probe Sequence
ttaataaatgccatactccctaccc

SEQ ID NO: 54926 - DNA, 25 bp, Probe Sequence
gttaataaatgccatactccctacc

SEQ ID NO: 54927 - DNA, 25 bp, Probe Sequence
ggttaataaatgccatactccctac

SEQ ID NO: 54928 - DNA, 25 bp, Probe Sequence
aataaatgccatactccctaccctc

SEQ ID NO: 54929 - DNA, 25 bp, Probe Sequence
ataaatgccatactccctaccctca

SEQ ID NO: 54930 - DNA, 25 bp, Probe Sequence
taaatgccatactccctaccctcaa

SEQ ID NO: 54931 - DNA, 25 bp, Probe Sequence
ctctctgacccagtttatgagcatc

SEQ ID NO: 54932 - DNA, 25 bp, Probe Sequence
aaatgccatactccctaccctcaaa

SEQ ID NO: 54933 - DNA, 25 bp, Probe Sequence
ttatgagcatcccatcctctgtgat

SEQ ID NO: 54934 - DNA, 25 bp, Probe Sequence
gggttaataaatgccatactcccta

SEQ ID NO: 54935 - DNA, 25 bp, Probe Sequence
cagtttatgagcatcccatcctctg

SEQ ID NO: 54936 - DNA, 25 bp, Probe Sequence
tttatgagcatcccatcctctgtga

SEQ ID NO: 54937 - DNA, 25 bp, Probe Sequence
gtttatgagcatcccatcctctgtg

SEQ ID NO: 54938 - DNA, 25 bp, Probe Sequence
agtttatgagcatcccatcctctgt

SEQ ID NO: 54939 - DNA, 25 bp, Probe Sequence
actctctgacccagtttatgagcat

SEQ ID NO: 54940 - DNA, 25 bp, Probe Sequence
tatgagcatcccatcctctgtgatc

SEQ ID NO: 54941 - DNA, 25 bp, Probe Sequence
ccagtttatgagcatcccatcctct

SEQ ID NO: 54942 - DNA, 25 bp, Probe Sequence
tctctgacccagtttatgagcatcc

SEQ ID NO: 54943 - DNA, 25 bp, Probe Sequence
tgacccagtttatgagcatcccatc

SEQ ID NO: 54944 - DNA, 25 bp, Probe Sequence
aatgccatactccctaccctcaaaa

SEQ ID NO: 54945 - DNA, 25 bp, Probe Sequence
ctgacccagtttatgagcatcccat

SEQ ID NO: 54946 - DNA, 25 bp, Probe Sequence
cccagtttatgagcatcccatcctc

SEQ ID NO: 54947 - DNA, 25 bp, Probe Sequence
aactctctgacccagtttatgagca

SEQ ID NO: 54948 - DNA, 25 bp, Probe Sequence
gctgtgtggaatactaactatatgt

SEQ ID NO: 54949 - DNA, 25 bp, Probe Sequence
tgctgtgtggaatactaactatatg

SEQ ID NO: 54950 - DNA, 25 bp, Probe Sequence
ttatgctgtgtggaatactaactat

SEQ ID NO: 54951 - DNA, 25 bp, Probe Sequence
atgctgtgtggaatactaactatat

SEQ ID NO: 54952 - DNA, 25 bp, Probe Sequence
tacttattgttggtaggcacatcgt

SEQ ID NO: 54953 - DNA, 25 bp, Probe Sequence
aactacttattgttggtaggcacat

SEQ ID NO: 54954 - DNA, 25 bp, Probe Sequence
tatgctgtgtggaatactaactata

SEQ ID NO: 54955 - DNA, 25 bp, Probe Sequence
actacttattgttggtaggcacatc

SEQ ID NO: 54956 - DNA, 25 bp, Probe Sequence
gcatggctcattaggttcaaattat

SEQ ID NO: 54957 - DNA, 25 bp, Probe Sequence
ctacttattgttggtaggcacatcg

SEQ ID NO: 54958 - DNA, 25 bp, Probe Sequence
agacatcttaattggtgaaagttgt

SEQ ID NO: 54959 - DNA, 25 bp, Probe Sequence
ttgcatattcacacatggtcaactg

SEQ ID NO: 54960 - DNA, 25 bp, Probe Sequence
tttatgctgtgtggaatactaacta

SEQ ID NO: 54961 - DNA, 25 bp, Probe Sequence
gacatcttaattggtgaaagttgtt

SEQ ID NO: 54962 - DNA, 25 bp, Probe Sequence
cacatcgtgtcaagtgaagtagttt

SEQ ID NO: 54963 - DNA, 25 bp, Probe Sequence
gtgtgaacagtgtgtaccagtttaa

SEQ ID NO: 54964 - DNA, 25 bp, Probe Sequence
actagacatcttaattggtgaaagt

SEQ ID NO: 54965 - DNA, 25 bp, Probe Sequence
ttattgttggtaggcacatcgtgtc

SEQ ID NO: 54966 - DNA, 25 bp, Probe Sequence
cttattgttggtaggcacatcgtgt

SEQ ID NO: 54967 - DNA, 25 bp, Probe Sequence
acttattgttggtaggcacatcgtg

SEQ ID NO: 54968 - DNA, 25 bp, Probe Sequence
acatcttaattggtgaaagttgttt

SEQ ID NO: 54969 - DNA, 25 bp, Probe Sequence
agggtgggtggaataagttgatttg

SEQ ID NO: 54970 - DNA, 25 bp, Probe Sequence
cagggtgggtggaataagttgattt

SEQ ID NO: 54971 - DNA, 25 bp, Probe Sequence
tagacatcttaattggtgaaagttg

SEQ ID NO: 54972 - DNA, 25 bp, Probe Sequence
cttcctccacagacttctgatcatc

SEQ ID NO: 54973 - DNA, 25 bp, Probe Sequence
ttcctccacagacttctgatcatct

SEQ ID NO: 54974 - DNA, 25 bp, Probe Sequence
gacttctgatcatctccctcttctc

SEQ ID NO: 54975 - DNA, 25 bp, Probe Sequence
tcctccacagacttctgatcatctc

SEQ ID NO: 54976 - DNA, 25 bp, Probe Sequence
agacttctgatcatctccctcttct

SEQ ID NO: 54977 - DNA, 25 bp, Probe Sequence
cagacttctgatcatctccctcttc

SEQ ID NO: 54978 - DNA, 25 bp, Probe Sequence
ccttcctccacagacttctgatcat

SEQ ID NO: 54979 - DNA, 25 bp, Probe Sequence
acttctgatcatctccctcttctcc

SEQ ID NO: 54980 - DNA, 25 bp, Probe Sequence
acagacttctgatcatctccctctt

SEQ ID NO: 54981 - DNA, 25 bp, Probe Sequence
cctccacagacttctgatcatctcc

SEQ ID NO: 54982 - DNA, 25 bp, Probe Sequence
cttctgatcatctccctcttctccc

SEQ ID NO: 54983 - DNA, 25 bp, Probe Sequence
cacagacttctgatcatctccctct

SEQ ID NO: 54984 - DNA, 25 bp, Probe Sequence
ccacagacttctgatcatctccctc

SEQ ID NO: 54985 - DNA, 25 bp, Probe Sequence
ctccacagacttctgatcatctccc

SEQ ID NO: 54986 - DNA, 25 bp, Probe Sequence
tccacagacttctgatcatctccct

SEQ ID NO: 54987 - DNA, 25 bp, Probe Sequence
ttctgatcatctccctcttctcccc

SEQ ID NO: 54988 - DNA, 25 bp, Probe Sequence
ctgatcatctccctcttctcccctc

SEQ ID NO: 54989 - DNA, 25 bp, Probe Sequence
tgaccaacctaatgttacaactact

SEQ ID NO: 54990 - DNA, 25 bp, Probe Sequence
ttgaccaacctaatgttacaactac

SEQ ID NO: 54991 - DNA, 25 bp, Probe Sequence
gaccaacctaatgttacaactactt

SEQ ID NO: 54992 - DNA, 25 bp, Probe Sequence
aattgaccaacctaatgttacaact

SEQ ID NO: 54993 - DNA, 25 bp, Probe Sequence
attgaccaacctaatgttacaacta

SEQ ID NO: 54994 - DNA, 25 bp, Probe Sequence
tgtttggatgtaaagattgtgtgtc

SEQ ID NO: 54995 - DNA, 25 bp, Probe Sequence
atgtttggatgtaaagattgtgtgt

SEQ ID NO: 54996 - DNA, 25 bp, Probe Sequence
tggatgtgaatgtgggaagtaattt

SEQ ID NO: 54997 - DNA, 25 bp, Probe Sequence
tttggttgagatgttaaatggtgga

SEQ ID NO: 54998 - DNA, 25 bp, Probe Sequence
gttgcctttaatatctgttgggaag

SEQ ID NO: 54999 - DNA, 25 bp, Probe Sequence
gtttggatgtaaagattgtgtgtct

SEQ ID NO: 55000 - DNA, 25 bp, Probe Sequence
taatatctgttgggaaggaaatgtc

SEQ ID NO: 55001 - DNA, 25 bp, Probe Sequence
gtggatgtgaatgtgggaagtaatt

SEQ ID NO: 55002 - DNA, 25 bp, Probe Sequence
aatgtttggatgtaaagattgtgtg

SEQ ID NO: 55003 - DNA, 25 bp, Probe Sequence
ttggttgagatgttaaatggtggac

SEQ ID NO: 55004 - DNA, 25 bp, Probe Sequence
tgagatgttaaatggtggacgagta

SEQ ID NO: 55005 - DNA, 25 bp, Probe Sequence
tgtaaagattgtgtgtctatccaac

SEQ ID NO: 55006 - DNA, 25 bp, Probe Sequence
cgttgcctttaatatctgttgggaa

SEQ ID NO: 55007 - DNA, 25 bp, Probe Sequence
gatgtaaagattgtgtgtctatcca

SEQ ID NO: 55008 - DNA, 25 bp, Probe Sequence
tggatgtaaagattgtgtgtctatc

SEQ ID NO: 55009 - DNA, 25 bp, Probe Sequence
taatgttacaactactttgaggtgg

SEQ ID NO: 55010 - DNA, 25 bp, Probe Sequence
tttggatgtaaagattgtgtgtcta

SEQ ID NO: 55011 - DNA, 25 bp, Probe Sequence
gagatgttaaatggtggacgagtac

SEQ ID NO: 55012 - DNA, 25 bp, Probe Sequence
gttgagatgttaaatggtggacgag

SEQ ID NO: 55013 - DNA, 25 bp, Probe Sequence
acacgggacaggctttattatttat

SEQ ID NO: 55014 - DNA, 25 bp, Probe Sequence
cacgggacaggctttattatttatt

SEQ ID NO: 55015 - DNA, 25 bp, Probe Sequence
gacacgggacaggctttattattta

SEQ ID NO: 55016 - DNA, 25 bp, Probe Sequence
acgggacaggctttattatttattt

SEQ ID NO: 55017 - DNA, 25 bp, Probe Sequence
catccgaaaccgaaagaaataaagc

SEQ ID NO: 55018 - DNA, 25 bp, Probe Sequence
gcatccgaaaccgaaagaaataaag

SEQ ID NO: 55019 - DNA, 25 bp, Probe Sequence
tagacacgggacaggctttattatt

SEQ ID NO: 55020 - DNA, 25 bp, Probe Sequence
aggatgaggacaggaagcaatttaa

SEQ ID NO: 55021 - DNA, 25 bp, Probe Sequence
aaggatgaggacaggaagcaattta

SEQ ID NO: 55022 - DNA, 25 bp, Probe Sequence
gtagacacgggacaggctttattat

SEQ ID NO: 55023 - DNA, 25 bp, Probe Sequence
agacacgggacaggctttattattt

SEQ ID NO: 55024 - DNA, 25 bp, Probe Sequence
atccgaaaccgaaagaaataaagcg

SEQ ID NO: 55025 - DNA, 25 bp, Probe Sequence
gatgaggacaggaagcaatttaaag

SEQ ID NO: 55026 - DNA, 25 bp, Probe Sequence
atgaggacaggaagcaatttaaaga

SEQ ID NO: 55027 - DNA, 25 bp, Probe Sequence
tgaggacaggaagcaatttaaagac

SEQ ID NO: 55028 - DNA, 25 bp, Probe Sequence
ggatgaggacaggaagcaatttaaa

SEQ ID NO: 55029 - DNA, 25 bp, Probe Sequence
agtagacacgggacaggctttatta

SEQ ID NO: 55030 - DNA, 25 bp, Probe Sequence
gaggacaggaagcaatttaaagacc

SEQ ID NO: 55031 - DNA, 25 bp, Probe Sequence
gaaggatgaggacaggaagcaattt

SEQ ID NO: 55032 - DNA, 25 bp, Probe Sequence
acaggaagcaatttaaagacctctt

SEQ ID NO: 55033 - DNA, 25 bp, Probe Sequence
tgcatccgaaaccgaaagaaataaa

SEQ ID NO: 55034 - DNA, 25 bp, Probe Sequence
ttgcatccgaaaccgaaagaaataa

SEQ ID NO: 55035 - DNA, 25 bp, Probe Sequence
tttgcatccgaaaccgaaagaaata

SEQ ID NO: 55036 - DNA, 25 bp, Probe Sequence
catgaaagaccaaacgtatcgagag

SEQ ID NO: 55037 - DNA, 25 bp, Probe Sequence
cagcactgatgaggtagtagagaag

SEQ ID NO: 55038 - DNA, 25 bp, Probe Sequence
ggacatcttcaataaggagctactg

SEQ ID NO: 55039 - DNA, 25 bp, Probe Sequence
tggacatcttcaataaggagctact

SEQ ID NO: 55040 - DNA, 25 bp, Probe Sequence
gtggacatcttcaataaggagctac

SEQ ID NO: 55041 - DNA, 25 bp, Probe Sequence
gacatcttcaataaggagctactgc

SEQ ID NO: 55042 - DNA, 25 bp, Probe Sequence
gaatacttgttgatttctgatgtgc

SEQ ID NO: 55043 - DNA, 25 bp, Probe Sequence
tcagcactgatgaggtagtagagaa

SEQ ID NO: 55044 - DNA, 25 bp, Probe Sequence
ttctatgataaactccgtaccaagg

SEQ ID NO: 55045 - DNA, 25 bp, Probe Sequence
cgtggacatcttcaataaggagcta

SEQ ID NO: 55046 - DNA, 25 bp, Probe Sequence
cactgatgaggtagtagagaagctg

SEQ ID NO: 55047 - DNA, 25 bp, Probe Sequence
tcttctatgataaactccgtaccaa

SEQ ID NO: 55048 - DNA, 25 bp, Probe Sequence
ttcttctatgataaactccgtacca

SEQ ID NO: 55049 - DNA, 25 bp, Probe Sequence
cttgtatggacagaactggctcaat

SEQ ID NO: 55050 - DNA, 25 bp, Probe Sequence
tctatgataaactccgtaccaaggg

SEQ ID NO: 55051 - DNA, 25 bp, Probe Sequence
gtatggacagaactggctcaatgac

SEQ ID NO: 55052 - DNA, 25 bp, Probe Sequence
cttctatgataaactccgtaccaag

SEQ ID NO: 55053 - DNA, 25 bp, Probe Sequence
ttgtatggacagaactggctcaatg

SEQ ID NO: 55054 - DNA, 25 bp, Probe Sequence
tgatgaggtagtagagaagctggag

SEQ ID NO: 55055 - DNA, 25 bp, Probe Sequence
ctgatgaggtagtagagaagctgga

SEQ ID NO: 55056 - DNA, 25 bp, Probe Sequence
aaatatataaatgccacggtcctgc

SEQ ID NO: 55057 - DNA, 25 bp, Probe Sequence
aagcatattgccaagtatctacagg

SEQ ID NO: 55058 - DNA, 25 bp, Probe Sequence
agcactgatgaggtagtagagaagc

SEQ ID NO: 55059 - DNA, 25 bp, Probe Sequence
cctaagcatattgccaagtatctac

SEQ ID NO: 55060 - DNA, 25 bp, Probe Sequence
tttcttctatgataaactccgtacc

SEQ ID NO: 55061 - DNA, 25 bp, Probe Sequence
attatagagttctcagccattggac

SEQ ID NO: 55062 - DNA, 25 bp, Probe Sequence
cattatagagttctcagccattgga

SEQ ID NO: 55063 - DNA, 25 bp, Probe Sequence
tcattatagagttctcagccattgg

SEQ ID NO: 55064 - DNA, 25 bp, Probe Sequence
ggaaccaagaagagcatattgaatg

SEQ ID NO: 55065 - DNA, 25 bp, Probe Sequence
actgtatatatgctagagcctcact

SEQ ID NO: 55066 - DNA, 25 bp, Probe Sequence
tgtgtctcattatagagttctcagc

SEQ ID NO: 55067 - DNA, 25 bp, Probe Sequence
gtctcattatagagttctcagccat

SEQ ID NO: 55068 - DNA, 25 bp, Probe Sequence
tggaaccaagaagagcatattgaat

SEQ ID NO: 55069 - DNA, 25 bp, Probe Sequence
atggaaccaagaagagcatattgaa

SEQ ID NO: 55070 - DNA, 25 bp, Probe Sequence
gtgtctcattatagagttctcagcc

SEQ ID NO: 55071 - DNA, 25 bp, Probe Sequence
aatctcatccaagcaagttagagtc

SEQ ID NO: 55072 - DNA, 25 bp, Probe Sequence
ttgtacttgcctactgtaatatgga

SEQ ID NO: 55073 - DNA, 25 bp, Probe Sequence
tgtctcattatagagttctcagcca

SEQ ID NO: 55074 - DNA, 25 bp, Probe Sequence
ccactgtgtctcattatagagttct

SEQ ID NO: 55075 - DNA, 25 bp, Probe Sequence
tgtacttgcctactgtaatatggat

SEQ ID NO: 55076 - DNA, 25 bp, Probe Sequence
cttgtacttgcctactgtaatatgg

SEQ ID NO: 55077 - DNA, 25 bp, Probe Sequence
ccttgtacttgcctactgtaatatg

SEQ ID NO: 55078 - DNA, 25 bp, Probe Sequence
ctcattatagagttctcagccattg

SEQ ID NO: 55079 - DNA, 25 bp, Probe Sequence
ttcacctcatgctgttactgtatat

SEQ ID NO: 55080 - DNA, 25 bp, Probe Sequence
attcacctcatgctgttactgtata

SEQ ID NO: 55081 - DNA, 25 bp, Probe Sequence
gattcacctcatgctgttactgtat

SEQ ID NO: 55082 - DNA, 25 bp, Probe Sequence
tctcattatagagttctcagccatt

SEQ ID NO: 55083 - DNA, 25 bp, Probe Sequence
caataccatgaggacaaggatagtg

SEQ ID NO: 55084 - DNA, 25 bp, Probe Sequence
tataataggttgcttctctctcaga

SEQ ID NO: 55085 - DNA, 25 bp, Probe Sequence
gattctctgttgatgaccttggatg

SEQ ID NO: 55086 - DNA, 25 bp, Probe Sequence
caccagacagccatattatgaagaa

SEQ ID NO: 55087 - DNA, 25 bp, Probe Sequence
aacaccagacagccatattatgaag

SEQ ID NO: 55088 - DNA, 25 bp, Probe Sequence
caacaccagacagccatattatgaa

SEQ ID NO: 55089 - DNA, 25 bp, Probe Sequence
gttgaacacatccacattgtatagg

SEQ ID NO: 55090 - DNA, 25 bp, Probe Sequence
cgttgaacacatccacattgtatag

SEQ ID NO: 55091 - DNA, 25 bp, Probe Sequence
acaccagacagccatattatgaaga

SEQ ID NO: 55092 - DNA, 25 bp, Probe Sequence
ttaggattctctgttgatgaccttg

SEQ ID NO: 55093 - DNA, 25 bp, Probe Sequence
ggattctctgttgatgaccttggat

SEQ ID NO: 55094 - DNA, 25 bp, Probe Sequence
ttgaacacatccacattgtatagga

SEQ ID NO: 55095 - DNA, 25 bp, Probe Sequence
actaatgattctgactgtaacacaa

SEQ ID NO: 55096 - DNA, 25 bp, Probe Sequence
aactaatgattctgactgtaacaca

SEQ ID NO: 55097 - DNA, 25 bp, Probe Sequence
tggcaaactaatgattctgactgta

SEQ ID NO: 55098 - DNA, 25 bp, Probe Sequence
aatggcaaactaatgattctgactg

SEQ ID NO: 55099 - DNA, 25 bp, Probe Sequence
gtggtggtgactgaaataactttac

SEQ ID NO: 55100 - DNA, 25 bp, Probe Sequence
taggattctctgttgatgaccttgg

SEQ ID NO: 55101 - DNA, 25 bp, Probe Sequence
gctaatggcaaactaatgattctga

SEQ ID NO: 55102 - DNA, 25 bp, Probe Sequence
atgtagttgtagggagtatcttcac

SEQ ID NO: 55103 - DNA, 25 bp, Probe Sequence
ggcaaactaatgattctgactgtaa

SEQ ID NO: 55104 - DNA, 25 bp, Probe Sequence
atggcaaactaatgattctgactgt

SEQ ID NO: 55105 - DNA, 25 bp, Probe Sequence
taggatgtggtaattagcttgtaac

SEQ ID NO: 55106 - DNA, 25 bp, Probe Sequence
cagatatatgctctcgaacagtgtg

SEQ ID NO: 55107 - DNA, 25 bp, Probe Sequence
cattgaatacacgttgaacacatcc

SEQ ID NO: 55108 - DNA, 25 bp, Probe Sequence
ggaccatatacaaacaacactcttt

SEQ ID NO: 55109 - DNA, 25 bp, Probe Sequence
caagtggctattgctcttcagtaac

SEQ ID NO: 55110 - DNA, 25 bp, Probe Sequence
tcaagtggctattgctcttcagtaa

SEQ ID NO: 55111 - DNA, 25 bp, Probe Sequence
ctgatgaagtcaatgctgttctctg

SEQ ID NO: 55112 - DNA, 25 bp, Probe Sequence
ctgtaagaaggagctgatgatactg

SEQ ID NO: 55113 - DNA, 25 bp, Probe Sequence
actgtaagaaggagctgatgatact

SEQ ID NO: 55114 - DNA, 25 bp, Probe Sequence
cactgtaagaaggagctgatgatac

SEQ ID NO: 55115 - DNA, 25 bp, Probe Sequence
ggtcacagatgttgaagttggaatc

SEQ ID NO: 55116 - DNA, 25 bp, Probe Sequence
ctcaagtggctattgctcttcagta

SEQ ID NO: 55117 - DNA, 25 bp, Probe Sequence
aggtcacagatgttgaagttggaat

SEQ ID NO: 55118 - DNA, 25 bp, Probe Sequence
tgtaagaaggagctgatgatactgg

SEQ ID NO: 55119 - DNA, 25 bp, Probe Sequence
aagtggctattgctcttcagtaacc

SEQ ID NO: 55120 - DNA, 25 bp, Probe Sequence
gtggctattgctcttcagtaacctc

SEQ ID NO: 55121 - DNA, 25 bp, Probe Sequence
tcacagatgttgaagttggaatctc

SEQ ID NO: 55122 - DNA, 25 bp, Probe Sequence
tggctattgctcttcagtaacctct

SEQ ID NO: 55123 - DNA, 25 bp, Probe Sequence
gcactgtaagaaggagctgatgata

SEQ ID NO: 55124 - DNA, 25 bp, Probe Sequence
gtcacagatgttgaagttggaatct

SEQ ID NO: 55125 - DNA, 25 bp, Probe Sequence
gaggtcacagatgttgaagttggaa

SEQ ID NO: 55126 - DNA, 25 bp, Probe Sequence
gagcactaggtcttcatagttccag

SEQ ID NO: 55127 - DNA, 25 bp, Probe Sequence
agtggctattgctcttcagtaacct

SEQ ID NO: 55128 - DNA, 25 bp, Probe Sequence
ggctattgctcttcagtaacctctg

SEQ ID NO: 55129 - DNA, 25 bp, Probe Sequence
gctgatgaagtcaatgctgttctct

SEQ ID NO: 55130 - DNA, 25 bp, Probe Sequence
gtaagaaggagctgatgatactggc

SEQ ID NO: 55131 - DNA, 25 bp, Probe Sequence
cacagatgttgaagttggaatctcg

SEQ ID NO: 55132 - DNA, 25 bp, Probe Sequence
gggtggatttcatcgtgtctatcat

SEQ ID NO: 55133 - DNA, 25 bp, Probe Sequence
aatccatcctttgaagaccaccaga

SEQ ID NO: 55134 - DNA, 25 bp, Probe Sequence
atccatcctttgaagaccaccagac

SEQ ID NO: 55135 - DNA, 25 bp, Probe Sequence
catacatacacactctctcactctg

SEQ ID NO: 55136 - DNA, 25 bp, Probe Sequence
acatacatacacactctctcactct

SEQ ID NO: 55137 - DNA, 25 bp, Probe Sequence
cacatacatacacactctctcactc

SEQ ID NO: 55138 - DNA, 25 bp, Probe Sequence
acacatacatacacactctctcact

SEQ ID NO: 55139 - DNA, 25 bp, Probe Sequence
cacacatacatacacactctctcac

SEQ ID NO: 55140 - DNA, 25 bp, Probe Sequence
cacacacatacatacacactctctc

SEQ ID NO: 55141 - DNA, 25 bp, Probe Sequence
acacacatacatacacactctctca

SEQ ID NO: 55142 - DNA, 25 bp, Probe Sequence
atacatacacactctctcactctgt

SEQ ID NO: 55143 - DNA, 25 bp, Probe Sequence
tacatacacactctctcactctgtc

SEQ ID NO: 55144 - DNA, 25 bp, Probe Sequence
cactctctcactctgtctctcttac

SEQ ID NO: 55145 - DNA, 25 bp, Probe Sequence
atacacactctctcactctgtctct

SEQ ID NO: 55146 - DNA, 25 bp, Probe Sequence
catacacactctctcactctgtctc

SEQ ID NO: 55147 - DNA, 25 bp, Probe Sequence
tctctcactctgtctctcttacctt

SEQ ID NO: 55148 - DNA, 25 bp, Probe Sequence
ctctctcactctgtctctcttacct

SEQ ID NO: 55149 - DNA, 25 bp, Probe Sequence
ccacacacatacatacacactctct

SEQ ID NO: 55150 - DNA, 25 bp, Probe Sequence
gatcattaagccatccaacttcatg

SEQ ID NO: 55151 - DNA, 25 bp, Probe Sequence
acatacacactctctcactctgtct

SEQ ID NO: 55152 - DNA, 25 bp, Probe Sequence
actctctcactctgtctctcttacc

SEQ ID NO: 55153 - DNA, 25 bp, Probe Sequence
tacacactctctcactctgtctctc

SEQ ID NO: 55154 - DNA, 25 bp, Probe Sequence
cttatcactggtcactgagtctgaa

SEQ ID NO: 55155 - DNA, 25 bp, Probe Sequence
accacacacatacatacacactctc

SEQ ID NO: 55156 - DNA, 25 bp, Probe Sequence
acactctctcactctgtctctctta

SEQ ID NO: 55157 - DNA, 25 bp, Probe Sequence
ttgtcttatcactggtcactgagtc

SEQ ID NO: 55158 - DNA, 25 bp, Probe Sequence
cttgtcttatcactggtcactgagt

SEQ ID NO: 55159 - DNA, 25 bp, Probe Sequence
gtgaggttacaggatgaatatgact

SEQ ID NO: 55160 - DNA, 25 bp, Probe Sequence
ggtgaggttacaggatgaatatgac

SEQ ID NO: 55161 - DNA, 25 bp, Probe Sequence
ctgaacacacacaattaagttggat

SEQ ID NO: 55162 - DNA, 25 bp, Probe Sequence
tctgaacacacacaattaagttgga

SEQ ID NO: 55163 - DNA, 25 bp, Probe Sequence
gtctgaacacacacaattaagttgg

SEQ ID NO: 55164 - DNA, 25 bp, Probe Sequence
tgaggttacaggatgaatatgactc

SEQ ID NO: 55165 - DNA, 25 bp, Probe Sequence
gaggttacaggatgaatatgactct

SEQ ID NO: 55166 - DNA, 25 bp, Probe Sequence
tgtctgaacacacacaattaagttg

SEQ ID NO: 55167 - DNA, 25 bp, Probe Sequence
tattatacagcattgttgacctcca

SEQ ID NO: 55168 - DNA, 25 bp, Probe Sequence
tgaacacacacaattaagttggatc

SEQ ID NO: 55169 - DNA, 25 bp, Probe Sequence
gtattatacagcattgttgacctcc

SEQ ID NO: 55170 - DNA, 25 bp, Probe Sequence
aggttacaggatgaatatgactctg

SEQ ID NO: 55171 - DNA, 25 bp, Probe Sequence
attatacagcattgttgacctccac

SEQ ID NO: 55172 - DNA, 25 bp, Probe Sequence
attgttgacctccactccattactg

SEQ ID NO: 55173 - DNA, 25 bp, Probe Sequence
cattgttgacctccactccattact

SEQ ID NO: 55174 - DNA, 25 bp, Probe Sequence
gtcagactacctcgattacaacatt

SEQ ID NO: 55175 - DNA, 25 bp, Probe Sequence
ttatacagcattgttgacctccact

SEQ ID NO: 55176 - DNA, 25 bp, Probe Sequence
ttacaacatttacatcagtggaagg

SEQ ID NO: 55177 - DNA, 25 bp, Probe Sequence
cgattacaacatttacatcagtgga

SEQ ID NO: 55178 - DNA, 25 bp, Probe Sequence
aaagccaaagaattagcatacactg

SEQ ID NO: 55179 - DNA, 25 bp, Probe Sequence
tatacagcattgttgacctccactc

SEQ ID NO: 55180 - DNA, 25 bp, Probe Sequence
cacaaggtttcaacaagaagtatgg

SEQ ID NO: 55181 - DNA, 25 bp, Probe Sequence
tagcacaaggtttcaacaagaagta

SEQ ID NO: 55182 - DNA, 25 bp, Probe Sequence
aagccaaagaattagcatacactgt

SEQ ID NO: 55183 - DNA, 25 bp, Probe Sequence
gtgaagacgaatatgatctgtgctg

SEQ ID NO: 55184 - DNA, 25 bp, Probe Sequence
tgaagacgaatatgatctgtgctgg

SEQ ID NO: 55185 - DNA, 25 bp, Probe Sequence
ccaactacaacgactggatcaattc

SEQ ID NO: 55186 - DNA, 25 bp, Probe Sequence
ctactactacaagccctccatcttc

SEQ ID NO: 55187 - DNA, 25 bp, Probe Sequence
caactactactacaagccctccatc

SEQ ID NO: 55188 - DNA, 25 bp, Probe Sequence
aactactactacaagccctccatct

SEQ ID NO: 55189 - DNA, 25 bp, Probe Sequence
tactactacaagccctccatcttca

SEQ ID NO: 55190 - DNA, 25 bp, Probe Sequence
actactactacaagccctccatctt

SEQ ID NO: 55191 - DNA, 25 bp, Probe Sequence
caactacaacgactggatcaattcg

SEQ ID NO: 55192 - DNA, 25 bp, Probe Sequence
accgtgaagacgaatatgatctgtg

SEQ ID NO: 55193 - DNA, 25 bp, Probe Sequence
caccgtgaagacgaatatgatctgt

SEQ ID NO: 55194 - DNA, 25 bp, Probe Sequence
aactacaacgactggatcaattcgg

SEQ ID NO: 55195 - DNA, 25 bp, Probe Sequence
actactacaagccctccatcttcac

SEQ ID NO: 55196 - DNA, 25 bp, Probe Sequence
gaagacgaatatgatctgtgctggg

SEQ ID NO: 55197 - DNA, 25 bp, Probe Sequence
cgtgaagacgaatatgatctgtgct

SEQ ID NO: 55198 - DNA, 25 bp, Probe Sequence
gcaactactactacaagccctccat

SEQ ID NO: 55199 - DNA, 25 bp, Probe Sequence
ctacaacgactggatcaattcggtg

SEQ ID NO: 55200 - DNA, 25 bp, Probe Sequence
aacgactggatcaattcggtgattg

SEQ ID NO: 55201 - DNA, 25 bp, Probe Sequence
caacgactggatcaattcggtgatt

SEQ ID NO: 55202 - DNA, 25 bp, Probe Sequence
tacaacgactggatcaattcggtga

SEQ ID NO: 55203 - DNA, 25 bp, Probe Sequence
actacaacgactggatcaattcggt

SEQ ID NO: 55204 - DNA, 25 bp, Probe Sequence
ccgtgaagacgaatatgatctgtgc

SEQ ID NO: 55205 - DNA, 25 bp, Probe Sequence
gcaccgtgaagacgaatatgatctg

SEQ ID NO: 55206 - DNA, 25 bp, Probe Sequence
cagcaccgtgaagacgaatatgatc

SEQ ID NO: 55207 - DNA, 25 bp, Probe Sequence
gcatagaattgttaccaacctccaa

SEQ ID NO: 55208 - DNA, 25 bp, Probe Sequence
cacactcacaatattctctctcaga

SEQ ID NO: 55209 - DNA, 25 bp, Probe Sequence
gcacactcacaatattctctctcag

SEQ ID NO: 55210 - DNA, 25 bp, Probe Sequence
ttgcacactcacaatattctctctc

SEQ ID NO: 55211 - DNA, 25 bp, Probe Sequence
gtcagaatgcttacgggtgttattt

SEQ ID NO: 55212 - DNA, 25 bp, Probe Sequence
tgcacactcacaatattctctctca

SEQ ID NO: 55213 - DNA, 25 bp, Probe Sequence
catagaattgttaccaacctccaaa

SEQ ID NO: 55214 - DNA, 25 bp, Probe Sequence
atagaattgttaccaacctccaaag

SEQ ID NO: 55215 - DNA, 25 bp, Probe Sequence
ctctctcagaaatcaatggcatttg

SEQ ID NO: 55216 - DNA, 25 bp, Probe Sequence
tctctctcagaaatcaatggcattt

SEQ ID NO: 55217 - DNA, 25 bp, Probe Sequence
tagaattgttaccaacctccaaagg

SEQ ID NO: 55218 - DNA, 25 bp, Probe Sequence
acactcacaatattctctctcagaa

SEQ ID NO: 55219 - DNA, 25 bp, Probe Sequence
tgcatagaattgttaccaacctcca

SEQ ID NO: 55220 - DNA, 25 bp, Probe Sequence
aaagaaataaagggctgagtgtggt

SEQ ID NO: 55221 - DNA, 25 bp, Probe Sequence
ttataaagactgaaggcaaaggtca

SEQ ID NO: 55222 - DNA, 25 bp, Probe Sequence
cttataaagactgaaggcaaaggtc

SEQ ID NO: 55223 - DNA, 25 bp, Probe Sequence
tttgcacactcacaatattctctct

SEQ ID NO: 55224 - DNA, 25 bp, Probe Sequence
catggtgaaaccctgtatctacaaa

SEQ ID NO: 55225 - DNA, 25 bp, Probe Sequence
ggtcagaatgcttacgggtgttatt

SEQ ID NO: 55226 - DNA, 25 bp, Probe Sequence
attctctctcagaaatcaatggcat

SEQ ID NO: 55227 - DNA, 25 bp, Probe Sequence
tattctctctcagaaatcaatggca

SEQ ID NO: 55228 - DNA, 25 bp, Probe Sequence
aagaaataaagggctgagtgtggtg

SEQ ID NO: 55229 - DNA, 25 bp, Probe Sequence
ttctctctcagaaatcaatggcatt

SEQ ID NO: 55230 - DNA, 25 bp, Probe Sequence
ttatgaaatactcagcttaggcatt

SEQ ID NO: 55231 - DNA, 25 bp, Probe Sequence
atagaatggtgagtgcttcagttat

SEQ ID NO: 55232 - DNA, 25 bp, Probe Sequence
ttatagaatggtgagtgcttcagtt

SEQ ID NO: 55233 - DNA, 25 bp, Probe Sequence
tcttatagaatggtgagtgcttcag

SEQ ID NO: 55234 - DNA, 25 bp, Probe Sequence
cttatagaatggtgagtgcttcagt

SEQ ID NO: 55235 - DNA, 25 bp, Probe Sequence
ctcttatagaatggtgagtgcttca

SEQ ID NO: 55236 - DNA, 25 bp, Probe Sequence
tctcttatagaatggtgagtgcttc

SEQ ID NO: 55237 - DNA, 25 bp, Probe Sequence
ctctcttatagaatggtgagtgctt

SEQ ID NO: 55238 - DNA, 25 bp, Probe Sequence
tatagaatggtgagtgcttcagtta

SEQ ID NO: 55239 - DNA, 25 bp, Probe Sequence
ctaacctaacagtcatgctaaccag

SEQ ID NO: 55240 - DNA, 25 bp, Probe Sequence
cttgtcctctggtatagtagactgt

SEQ ID NO: 55241 - DNA, 25 bp, Probe Sequence
taacctaacagtcatgctaaccaga

SEQ ID NO: 55242 - DNA, 25 bp, Probe Sequence
ttgtcctctggtatagtagactgtg

SEQ ID NO: 55243 - DNA, 25 bp, Probe Sequence
gagaactaacctaacagtcatgcta

SEQ ID NO: 55244 - DNA, 25 bp, Probe Sequence
aactaacctaacagtcatgctaacc

SEQ ID NO: 55245 - DNA, 25 bp, Probe Sequence
gaactaacctaacagtcatgctaac

SEQ ID NO: 55246 - DNA, 25 bp, Probe Sequence
ccttgtcctctggtatagtagactg

SEQ ID NO: 55247 - DNA, 25 bp, Probe Sequence
agaactaacctaacagtcatgctaa

SEQ ID NO: 55248 - DNA, 25 bp, Probe Sequence
ttgagaactaacctaacagtcatgc

SEQ ID NO: 55249 - DNA, 25 bp, Probe Sequence
gtcctctggtatagtagactgtgtg

SEQ ID NO: 55250 - DNA, 25 bp, Probe Sequence
aacctaacagtcatgctaaccagaa

SEQ ID NO: 55251 - DNA, 25 bp, Probe Sequence
gaaccttgtcctctggtatagtaga

SEQ ID NO: 55252 - DNA, 25 bp, Probe Sequence
actaacctaacagtcatgctaacca

SEQ ID NO: 55253 - DNA, 25 bp, Probe Sequence
tgagaactaacctaacagtcatgct

SEQ ID NO: 55254 - DNA, 25 bp, Probe Sequence
tgtcctctggtatagtagactgtgt

SEQ ID NO: 55255 - DNA, 25 bp, Probe Sequence
aatggatgacttagtggagatggaa

SEQ ID NO: 55256 - DNA, 25 bp, Probe Sequence
tacactcgcagttaatatcatagca

SEQ ID NO: 55257 - DNA, 25 bp, Probe Sequence
acactcgcagttaatatcatagcaa

SEQ ID NO: 55258 - DNA, 25 bp, Probe Sequence
cttggaatgtgctaaggaacttgat

SEQ ID NO: 55259 - DNA, 25 bp, Probe Sequence
accagtgtgacttcattagataacg

SEQ ID NO: 55260 - DNA, 25 bp, Probe Sequence
gaccagtgtgacttcattagataac

SEQ ID NO: 55261 - DNA, 25 bp, Probe Sequence
agaccagtgtgacttcattagataa

SEQ ID NO: 55262 - DNA, 25 bp, Probe Sequence
aagaccagtgtgacttcattagata

SEQ ID NO: 55263 - DNA, 25 bp, Probe Sequence
ttggaatgtgctaaggaacttgatg

SEQ ID NO: 55264 - DNA, 25 bp, Probe Sequence
ttacactcgcagttaatatcatagc

SEQ ID NO: 55265 - DNA, 25 bp, Probe Sequence
catctcttggaatgtgctaaggaac

SEQ ID NO: 55266 - DNA, 25 bp, Probe Sequence
gaagaggttaatcatgttatcagcc

SEQ ID NO: 55267 - DNA, 25 bp, Probe Sequence
ggaagaggttaatcatgttatcagc

SEQ ID NO: 55268 - DNA, 25 bp, Probe Sequence
atggatgacttagtggagatggaag

SEQ ID NO: 55269 - DNA, 25 bp, Probe Sequence
atctcttggaatgtgctaaggaact

SEQ ID NO: 55270 - DNA, 25 bp, Probe Sequence
tggaattacttcagactcaatgatg

SEQ ID NO: 55271 - DNA, 25 bp, Probe Sequence
ctcttggaatgtgctaaggaacttg

SEQ ID NO: 55272 - DNA, 25 bp, Probe Sequence
atgctggaattacttcagactcaat

SEQ ID NO: 55273 - DNA, 25 bp, Probe Sequence
ggaattacttcagactcaatgatga

SEQ ID NO: 55274 - DNA, 25 bp, Probe Sequence
ggaatgtgctaaggaacttgatgtc

SEQ ID NO: 55275 - DNA, 25 bp, Probe Sequence
tctcttggaatgtgctaaggaactt

SEQ ID NO: 55276 - DNA, 25 bp, Probe Sequence
aagatgctggaattacttcagactc

SEQ ID NO: 55277 - DNA, 25 bp, Probe Sequence
tcagactcaatgatgaagaacttct

SEQ ID NO: 55278 - DNA, 25 bp, Probe Sequence
atgatgtcattcagtgattggtatg

SEQ ID NO: 55279 - DNA, 25 bp, Probe Sequence
aagacatacttgagaccgcattatt

SEQ ID NO: 55280 - DNA, 25 bp, Probe Sequence
gagaactcactcactatcacaagat

SEQ ID NO: 55281 - DNA, 25 bp, Probe Sequence
agaactcactcactatcacaagata

SEQ ID NO: 55282 - DNA, 25 bp, Probe Sequence
cttagaatcatggtggaaggtgaag

SEQ ID NO: 55283 - DNA, 25 bp, Probe Sequence
ttagaatcatggtggaaggtgaaga

SEQ ID NO: 55284 - DNA, 25 bp, Probe Sequence
acttagaatcatggtggaaggtgaa

SEQ ID NO: 55285 - DNA, 25 bp, Probe Sequence
aacttagaatcatggtggaaggtga

SEQ ID NO: 55286 - DNA, 25 bp, Probe Sequence
agacatacttgagaccgcattattt

SEQ ID NO: 55287 - DNA, 25 bp, Probe Sequence
tagaatcatggtggaaggtgaagag

SEQ ID NO: 55288 - DNA, 25 bp, Probe Sequence
atcacaagatagcaagggagaaatc

SEQ ID NO: 55289 - DNA, 25 bp, Probe Sequence
aaagacatacttgagaccgcattat

SEQ ID NO: 55290 - DNA, 25 bp, Probe Sequence
taaagacatacttgagaccgcatta

SEQ ID NO: 55291 - DNA, 25 bp, Probe Sequence
ataaagacatacttgagaccgcatt

SEQ ID NO: 55292 - DNA, 25 bp, Probe Sequence
gacatacttgagaccgcattattta

SEQ ID NO: 55293 - DNA, 25 bp, Probe Sequence
tacttgagaccgcattatttatggg

SEQ ID NO: 55294 - DNA, 25 bp, Probe Sequence
gataaagacatacttgagaccgcat

SEQ ID NO: 55295 - DNA, 25 bp, Probe Sequence
atgataaagacatacttgagaccgc

SEQ ID NO: 55296 - DNA, 25 bp, Probe Sequence
aatcaataatccaaagcctttcagc

SEQ ID NO: 55297 - DNA, 25 bp, Probe Sequence
atacttgagaccgcattatttatgg

SEQ ID NO: 55298 - DNA, 25 bp, Probe Sequence
caataatccaaagcctttcagcaaa

SEQ ID NO: 55299 - DNA, 25 bp, Probe Sequence
aagtttaattgactcacagttccac

SEQ ID NO: 55300 - DNA, 25 bp, Probe Sequence
acatacttgagaccgcattatttat

SEQ ID NO: 55301 - DNA, 25 bp, Probe Sequence
agtttaattgactcacagttccaca

SEQ ID NO: 55302 - DNA, 25 bp, Probe Sequence
gaagtttaattgactcacagttcca

SEQ ID NO: 55303 - DNA, 25 bp, Probe Sequence
ccacctcagattgatatgttatacg

SEQ ID NO: 55304 - DNA, 25 bp, Probe Sequence
cagctatgtggtaatattcattgcc

SEQ ID NO: 55305 - DNA, 25 bp, Probe Sequence
gattctaaactctttcttggatgcc

SEQ ID NO: 55306 - DNA, 25 bp, Probe Sequence
ggattctaaactctttcttggatgc

SEQ ID NO: 55307 - DNA, 25 bp, Probe Sequence
ggatggacaatggattctaaactct

SEQ ID NO: 55308 - DNA, 25 bp, Probe Sequence
tggatggacaatggattctaaactc

SEQ ID NO: 55309 - DNA, 25 bp, Probe Sequence
tggaaactcacactcgcttaataaa

SEQ ID NO: 55310 - DNA, 25 bp, Probe Sequence
ttggaaactcacactcgcttaataa

SEQ ID NO: 55311 - DNA, 25 bp, Probe Sequence
tttggaaactcacactcgcttaata

SEQ ID NO: 55312 - DNA, 25 bp, Probe Sequence
aataccttctttggaaactcacact

SEQ ID NO: 55313 - DNA, 25 bp, Probe Sequence
acagctatgtggtaatattcattgc

SEQ ID NO: 55314 - DNA, 25 bp, Probe Sequence
tggacaatggattctaaactctttc

SEQ ID NO: 55315 - DNA, 25 bp, Probe Sequence
ataccttctttggaaactcacactc

SEQ ID NO: 55316 - DNA, 25 bp, Probe Sequence
gatggacaatggattctaaactctt

SEQ ID NO: 55317 - DNA, 25 bp, Probe Sequence
tggattctaaactctttcttggatg

SEQ ID NO: 55318 - DNA, 25 bp, Probe Sequence
ggacaatggattctaaactctttct

SEQ ID NO: 55319 - DNA, 25 bp, Probe Sequence
ttggatggacaatggattctaaact

SEQ ID NO: 55320 - DNA, 25 bp, Probe Sequence
taataccttctttggaaactcacac

SEQ ID NO: 55321 - DNA, 25 bp, Probe Sequence
tttggatggacaatggattctaaac

SEQ ID NO: 55322 - DNA, 25 bp, Probe Sequence
ctttggatggacaatggattctaaa

SEQ ID NO: 55323 - DNA, 25 bp, Probe Sequence
cacccacctcagattgatatgttat

SEQ ID NO: 55324 - DNA, 25 bp, Probe Sequence
cttacctcagtgattggagacaatg

SEQ ID NO: 55325 - DNA, 25 bp, Probe Sequence
tacctcagtgattggagacaatgat

SEQ ID NO: 55326 - DNA, 25 bp, Probe Sequence
gctatgtggtaatattcattgccat

SEQ ID NO: 55327 - DNA, 25 bp, Probe Sequence
acaggatacaataacagaagagtca

SEQ ID NO: 55328 - DNA, 25 bp, Probe Sequence
ccaagtctaggtcaccaattataca

SEQ ID NO: 55329 - DNA, 25 bp, Probe Sequence
aggatacaataacagaagagtcaga

SEQ ID NO: 55330 - DNA, 25 bp, Probe Sequence
caggatacaataacagaagagtcag

SEQ ID NO: 55331 - DNA, 25 bp, Probe Sequence
aacaggatacaataacagaagagtc

SEQ ID NO: 55332 - DNA, 25 bp, Probe Sequence
gtctaggtcaccaattatacattcc

SEQ ID NO: 55333 - DNA, 25 bp, Probe Sequence
ggatacaataacagaagagtcagaa

SEQ ID NO: 55334 - DNA, 25 bp, Probe Sequence
gtctgatatgaacaagagagatcca

SEQ ID NO: 55335 - DNA, 25 bp, Probe Sequence
tgatatgaacaagagagatccaaga

SEQ ID NO: 55336 - DNA, 25 bp, Probe Sequence
aagtatgaggttgtctgatatgaac

SEQ ID NO: 55337 - DNA, 25 bp, Probe Sequence
ttgtagatagtccagcatcaagatc

SEQ ID NO: 55338 - DNA, 25 bp, Probe Sequence
agtatgaggttgtctgatatgaaca

SEQ ID NO: 55339 - DNA, 25 bp, Probe Sequence
ctgatatgaacaagagagatccaag

SEQ ID NO: 55340 - DNA, 25 bp, Probe Sequence
tctgatatgaacaagagagatccaa

SEQ ID NO: 55341 - DNA, 25 bp, Probe Sequence
tgtagatagtccagcatcaagatcc

SEQ ID NO: 55342 - DNA, 25 bp, Probe Sequence
gcttacaacaggttgatgaacatag

SEQ ID NO: 55343 - DNA, 25 bp, Probe Sequence
caagtctaggtcaccaattatacat

SEQ ID NO: 55344 - DNA, 25 bp, Probe Sequence
tgtctgatatgaacaagagagatcc

SEQ ID NO: 55345 - DNA, 25 bp, Probe Sequence
agtctaggtcaccaattatacattc

SEQ ID NO: 55346 - DNA, 25 bp, Probe Sequence
cttacaacaggttgatgaacatagt

SEQ ID NO: 55347 - DNA, 25 bp, Probe Sequence
ttaagcgacctcgatatgaagattc

SEQ ID NO: 55348 - DNA, 25 bp, Probe Sequence
gatatgaacaagagagatccaagat

SEQ ID NO: 55349 - DNA, 25 bp, Probe Sequence
agcttacaacaggttgatgaacata

SEQ ID NO: 55350 - DNA, 25 bp, Probe Sequence
actgaaccaaaggagaatgtagaaa

SEQ ID NO: 55351 - DNA, 25 bp, Probe Sequence
atatcgctctattctccagttggtc

SEQ ID NO: 55352 - DNA, 25 bp, Probe Sequence
attggattggagaagcaccatataa

SEQ ID NO: 55353 - DNA, 25 bp, Probe Sequence
aattggattggagaagcaccatata

SEQ ID NO: 55354 - DNA, 25 bp, Probe Sequence
tatcgctctattctccagttggtca

SEQ ID NO: 55355 - DNA, 25 bp, Probe Sequence
aagatatcgctctattctccagttg

SEQ ID NO: 55356 - DNA, 25 bp, Probe Sequence
gaagatatcgctctattctccagtt

SEQ ID NO: 55357 - DNA, 25 bp, Probe Sequence
cactggaagatatcgctctattctc

SEQ ID NO: 55358 - DNA, 25 bp, Probe Sequence
gtaccatgttcatcttgtcctccaa

SEQ ID NO: 55359 - DNA, 25 bp, Probe Sequence
tagcatgtttgtttaatcctttggg

SEQ ID NO: 55360 - DNA, 25 bp, Probe Sequence
ggtatgatgaagtgaaagattatgc

SEQ ID NO: 55361 - DNA, 25 bp, Probe Sequence
gatatcgctctattctccagttggt

SEQ ID NO: 55362 - DNA, 25 bp, Probe Sequence
agtgtttgtctagcatgtttgttta

SEQ ID NO: 55363 - DNA, 25 bp, Probe Sequence
tagtgtttgtctagcatgtttgttt

SEQ ID NO: 55364 - DNA, 25 bp, Probe Sequence
ttagtgtttgtctagcatgtttgtt

SEQ ID NO: 55365 - DNA, 25 bp, Probe Sequence
aatctatctgtacgcactggaagat

SEQ ID NO: 55366 - DNA, 25 bp, Probe Sequence
agatatcgctctattctccagttgg

SEQ ID NO: 55367 - DNA, 25 bp, Probe Sequence
attagtgtttgtctagcatgtttgt

SEQ ID NO: 55368 - DNA, 25 bp, Probe Sequence
ctagcatgtttgtttaatcctttgg

SEQ ID NO: 55369 - DNA, 25 bp, Probe Sequence
tgtctagcatgtttgtttaatcctt

SEQ ID NO: 55370 - DNA, 25 bp, Probe Sequence
ttgtctagcatgtttgtttaatcct

SEQ ID NO: 55371 - DNA, 25 bp, Probe Sequence
gtgtttgtctagcatgtttgtttaa

SEQ ID NO: 55372 - DNA, 25 bp, Probe Sequence
tataatgatttctgggaacatgggc

SEQ ID NO: 55373 - DNA, 25 bp, Probe Sequence
gcactggaagatatcgctctattct

SEQ ID NO: 55374 - DNA, 25 bp, Probe Sequence
atcgctctattctccagttggtcaa

SEQ ID NO: 55375 - DNA, 25 bp, Probe Sequence
ggttaatagtgcctcatagtctact

SEQ ID NO: 55376 - DNA, 25 bp, Probe Sequence
aggttaatagtgcctcatagtctac

SEQ ID NO: 55377 - DNA, 25 bp, Probe Sequence
acttaggttaatagtgcctcatagt

SEQ ID NO: 55378 - DNA, 25 bp, Probe Sequence
ggtgctgtcagatcatagttggtat

SEQ ID NO: 55379 - DNA, 25 bp, Probe Sequence
atagtgcctcatagtctacttagaa

SEQ ID NO: 55380 - DNA, 25 bp, Probe Sequence
aatagtgcctcatagtctacttaga

SEQ ID NO: 55381 - DNA, 25 bp, Probe Sequence
ttaggttaatagtgcctcatagtct

SEQ ID NO: 55382 - DNA, 25 bp, Probe Sequence
gttaatagtgcctcatagtctactt

SEQ ID NO: 55383 - DNA, 25 bp, Probe Sequence
cttaggttaatagtgcctcatagtc

SEQ ID NO: 55384 - DNA, 25 bp, Probe Sequence
gtgctgtcagatcatagttggtatg

SEQ ID NO: 55385 - DNA, 25 bp, Probe Sequence
gatggcaatgtatttaatagcgagg

SEQ ID NO: 55386 - DNA, 25 bp, Probe Sequence
tggcaatgtatttaatagcgaggat

SEQ ID NO: 55387 - DNA, 25 bp, Probe Sequence
atggcaatgtatttaatagcgagga

SEQ ID NO: 55388 - DNA, 25 bp, Probe Sequence
tgatggcaatgtatttaatagcgag

SEQ ID NO: 55389 - DNA, 25 bp, Probe Sequence
aacttaggttaatagtgcctcatag

SEQ ID NO: 55390 - DNA, 25 bp, Probe Sequence
cagtgaggaaatgaattaaagaggt

SEQ ID NO: 55391 - DNA, 25 bp, Probe Sequence
atactgttgtccacacacaccatag

SEQ ID NO: 55392 - DNA, 25 bp, Probe Sequence
taggttaatagtgcctcatagtcta

SEQ ID NO: 55393 - DNA, 25 bp, Probe Sequence
ttgatggcaatgtatttaatagcga

SEQ ID NO: 55394 - DNA, 25 bp, Probe Sequence
ctaggtacaccttagttcatgttgc

SEQ ID NO: 55395 - DNA, 25 bp, Probe Sequence
gctaggtacaccttagttcatgttg

SEQ ID NO: 55396 - DNA, 25 bp, Probe Sequence
gaagctaggtacaccttagttcatg

SEQ ID NO: 55397 - DNA, 25 bp, Probe Sequence
tatttaatagcgaggatcagtgagg

SEQ ID NO: 55398 - DNA, 25 bp, Probe Sequence
ggcaatgtatttaatagcgaggatc

SEQ ID NO: 55399 - DNA, 25 bp, Probe Sequence
tgacatggatttaaatgaattgttt

SEQ ID NO: 55400 - DNA, 25 bp, Probe Sequence
atgacatggatttaaatgaattgtt

SEQ ID NO: 55401 - DNA, 25 bp, Probe Sequence
aatgacatggatttaaatgaattgt

SEQ ID NO: 55402 - DNA, 25 bp, Probe Sequence
aaatgacatggatttaaatgaattg

SEQ ID NO: 55403 - DNA, 25 bp, Probe Sequence
agtaaaatgacatggatttaaatga

SEQ ID NO: 55404 - DNA, 25 bp, Probe Sequence
gaataaggagaacaggacagactaa

SEQ ID NO: 55405 - DNA, 25 bp, Probe Sequence
ggaataaggagaacaggacagacta

SEQ ID NO: 55406 - DNA, 25 bp, Probe Sequence
aaggaataaggagaacaggacagac

SEQ ID NO: 55407 - DNA, 25 bp, Probe Sequence
aggaataaggagaacaggacagact

SEQ ID NO: 55408 - DNA, 25 bp, Probe Sequence
gaaaggaataaggagaacaggacag

SEQ ID NO: 55409 - DNA, 25 bp, Probe Sequence
aaaggaataaggagaacaggacaga

SEQ ID NO: 55410 - DNA, 25 bp, Probe Sequence
tgaaaggaataaggagaacaggaca

SEQ ID NO: 55411 - DNA, 25 bp, Probe Sequence
ggtgtctgaaaggaataaggagaac

SEQ ID NO: 55412 - DNA, 25 bp, Probe Sequence
tggtgtctgaaaggaataaggagaa

SEQ ID NO: 55413 - DNA, 25 bp, Probe Sequence
gtgtctgaaaggaataaggagaaca

SEQ ID NO: 55414 - DNA, 25 bp, Probe Sequence
actggtgtctgaaaggaataaggag

SEQ ID NO: 55415 - DNA, 25 bp, Probe Sequence
ctggtgtctgaaaggaataaggaga

SEQ ID NO: 55416 - DNA, 25 bp, Probe Sequence
tgtctgaaaggaataaggagaacag

SEQ ID NO: 55417 - DNA, 25 bp, Probe Sequence
atccagaaactgagagcagaaataa

SEQ ID NO: 55418 - DNA, 25 bp, Probe Sequence
tccagaaactgagagcagaaataag

SEQ ID NO: 55419 - DNA, 25 bp, Probe Sequence
ctgaaaggaataaggagaacaggac

SEQ ID NO: 55420 - DNA, 25 bp, Probe Sequence
tctgaaaggaataaggagaacagga

SEQ ID NO: 55421 - DNA, 25 bp, Probe Sequence
gtctgaaaggaataaggagaacagg

SEQ ID NO: 55422 - DNA, 25 bp, Probe Sequence
agaaactgagagcagaaataagcag

SEQ ID NO: 55423 - DNA, 25 bp, Probe Sequence
gaatgtggctaactctcctaccaag

SEQ ID NO: 55424 - DNA, 25 bp, Probe Sequence
cactggtgtctgaaaggaataagga

SEQ ID NO: 55425 - DNA, 25 bp, Probe Sequence
cagaaactgagagcagaaataagca

SEQ ID NO: 55426 - DNA, 25 bp, Probe Sequence
gatccagaaactgagagcagaaata

SEQ ID NO: 55427 - DNA, 25 bp, Probe Sequence
agaatgtggctaactctcctaccaa

SEQ ID NO: 55428 - DNA, 25 bp, Probe Sequence
aagaagttggacagagttaccttaa

SEQ ID NO: 55429 - DNA, 25 bp, Probe Sequence
ttaagaagttggacagagttacctt

SEQ ID NO: 55430 - DNA, 25 bp, Probe Sequence
ctaattcattcattccatgtgtgcc

SEQ ID NO: 55431 - DNA, 25 bp, Probe Sequence
taattcattcattccatgtgtgcca

SEQ ID NO: 55432 - DNA, 25 bp, Probe Sequence
taagaagttggacagagttacctta

SEQ ID NO: 55433 - DNA, 25 bp, Probe Sequence
gctaattcattcattccatgtgtgc

SEQ ID NO: 55434 - DNA, 25 bp, Probe Sequence
ttgttaagtatgccgcaagtaagag

SEQ ID NO: 55435 - DNA, 25 bp, Probe Sequence
cgcaagtaagagctaattcattcat

SEQ ID NO: 55436 - DNA, 25 bp, Probe Sequence
agctaattcattcattccatgtgtg

SEQ ID NO: 55437 - DNA, 25 bp, Probe Sequence
aattagtctggctgagatgcttgaa

SEQ ID NO: 55438 - DNA, 25 bp, Probe Sequence
gagctaattcattcattccatgtgt

SEQ ID NO: 55439 - DNA, 25 bp, Probe Sequence
agagctaattcattcattccatgtg

SEQ ID NO: 55440 - DNA, 25 bp, Probe Sequence
ccgcaagtaagagctaattcattca

SEQ ID NO: 55441 - DNA, 25 bp, Probe Sequence
aatgagatgttgtagactgtttcca

SEQ ID NO: 55442 - DNA, 25 bp, Probe Sequence
tacagatgatgaaaggcaataccaa

SEQ ID NO: 55443 - DNA, 25 bp, Probe Sequence
atacagatgatgaaaggcaatacca

SEQ ID NO: 55444 - DNA, 25 bp, Probe Sequence
tggatacagatgatgaaaggcaata

SEQ ID NO: 55445 - DNA, 25 bp, Probe Sequence
agatgatgaaaggcaataccaagat

SEQ ID NO: 55446 - DNA, 25 bp, Probe Sequence
atggatacagatgatgaaaggcaat

SEQ ID NO: 55447 - DNA, 25 bp, Probe Sequence
aagagctaattcattcattccatgt

SEQ ID NO: 55448 - DNA, 25 bp, Probe Sequence
attagtctggctgagatgcttgaag

SEQ ID NO: 55449 - DNA, 25 bp, Probe Sequence
gatgatgaaaggcaataccaagatt

SEQ ID NO: 55450 - DNA, 25 bp, Probe Sequence
gatacagatgatgaaaggcaatacc

SEQ ID NO: 55451 - DNA, 25 bp, Probe Sequence
ggatacagatgatgaaaggcaatac

SEQ ID NO: 55452 - DNA, 25 bp, Probe Sequence
ctcttcaagtgatagttcgcagtat

SEQ ID NO: 55453 - DNA, 25 bp, Probe Sequence
tcttcaagtgatagttcgcagtatg

SEQ ID NO: 55454 - DNA, 25 bp, Probe Sequence
cttcaagtgatagttcgcagtatgt

SEQ ID NO: 55455 - DNA, 25 bp, Probe Sequence
ggaacagtctcttcaagtgatagtt

SEQ ID NO: 55456 - DNA, 25 bp, Probe Sequence
caggaacagtctcttcaagtgatag

SEQ ID NO: 55457 - DNA, 25 bp, Probe Sequence
aacagtctcttcaagtgatagttcg

SEQ ID NO: 55458 - DNA, 25 bp, Probe Sequence
ttcaagtgatagttcgcagtatgtg

SEQ ID NO: 55459 - DNA, 25 bp, Probe Sequence
aggaacagtctcttcaagtgatagt

SEQ ID NO: 55460 - DNA, 25 bp, Probe Sequence
tctcttcaagtgatagttcgcagta

SEQ ID NO: 55461 - DNA, 25 bp, Probe Sequence
acaggaacagtctcttcaagtgata

SEQ ID NO: 55462 - DNA, 25 bp, Probe Sequence
gagtattgagtaacaagtgtggctt

SEQ ID NO: 55463 - DNA, 25 bp, Probe Sequence
aacaggaacagtctcttcaagtgat

SEQ ID NO: 55464 - DNA, 25 bp, Probe Sequence
agtctcttcaagtgatagttcgcag

SEQ ID NO: 55465 - DNA, 25 bp, Probe Sequence
gtctcttcaagtgatagttcgcagt

SEQ ID NO: 55466 - DNA, 25 bp, Probe Sequence
cagtctcttcaagtgatagttcgca

SEQ ID NO: 55467 - DNA, 25 bp, Probe Sequence
acagtctcttcaagtgatagttcgc

SEQ ID NO: 55468 - DNA, 25 bp, Probe Sequence
tctctctttacttggactttgaaca

SEQ ID NO: 55469 - DNA, 25 bp, Probe Sequence
cctctctctttacttggactttgaa

SEQ ID NO: 55470 - DNA, 25 bp, Probe Sequence
ctctctctttacttggactttgaac

SEQ ID NO: 55471 - DNA, 25 bp, Probe Sequence
ggagtattgagtaacaagtgtggct

SEQ ID NO: 55472 - DNA, 25 bp, Probe Sequence
gcaaagtagtgaatggcaaataaat

SEQ ID NO: 55473 - DNA, 25 bp, Probe Sequence
aatgggagtattgagtaacaagtgt

SEQ ID NO: 55474 - DNA, 25 bp, Probe Sequence
gtattgagtaacaagtgtggctttc

SEQ ID NO: 55475 - DNA, 25 bp, Probe Sequence
atgggagtattgagtaacaagtgtg

SEQ ID NO: 55476 - DNA, 25 bp, Probe Sequence
tgactccttcacagtattatcagaa

SEQ ID NO: 55477 - DNA, 25 bp, Probe Sequence
tgaagatgatccagactataatcct

SEQ ID NO: 55478 - DNA, 25 bp, Probe Sequence
agatgatccagactataatcctgct

SEQ ID NO: 55479 - DNA, 25 bp, Probe Sequence
aagatgatccagactataatcctgc

SEQ ID NO: 55480 - DNA, 25 bp, Probe Sequence
gatgatccagactataatcctgctg

SEQ ID NO: 55481 - DNA, 25 bp, Probe Sequence
atgatccagactataatcctgctga

SEQ ID NO: 55482 - DNA, 25 bp, Probe Sequence
tgatccagactataatcctgctgac

SEQ ID NO: 55483 - DNA, 25 bp, Probe Sequence
aaaggatgaaagaagaagaacaagc

SEQ ID NO: 55484 - DNA, 25 bp, Probe Sequence
atgaaagaagaagaacaagcaggaa

SEQ ID NO: 55485 - DNA, 25 bp, Probe Sequence
aaggatgaaagaagaagaacaagca

SEQ ID NO: 55486 - DNA, 25 bp, Probe Sequence
tgaaagaagaagaacaagcaggaaa

SEQ ID NO: 55487 - DNA, 25 bp, Probe Sequence
atgaagatgatccagactataatcc

SEQ ID NO: 55488 - DNA, 25 bp, Probe Sequence
aaatgatgaaactgtccagactacc

SEQ ID NO: 55489 - DNA, 25 bp, Probe Sequence
gatgaaagaagaagaacaagcagga

SEQ ID NO: 55490 - DNA, 25 bp, Probe Sequence
aggatgaaagaagaagaacaagcag

SEQ ID NO: 55491 - DNA, 25 bp, Probe Sequence
gaagatgatccagactataatcctg

SEQ ID NO: 55492 - DNA, 25 bp, Probe Sequence
gtgggaaacaactatttgaaacaga

SEQ ID NO: 55493 - DNA, 25 bp, Probe Sequence
gatccagactataatcctgctgacc

SEQ ID NO: 55494 - DNA, 25 bp, Probe Sequence
gatgatgaagatgatccagactata

SEQ ID NO: 55495 - DNA, 25 bp, Probe Sequence
agtgggaaacaactatttgaaacag

SEQ ID NO: 55496 - DNA, 25 bp, Probe Sequence
accctcaagtttacatacagtgaaa

SEQ ID NO: 55497 - DNA, 25 bp, Probe Sequence
actaccctcaagtttacatacagtg

SEQ ID NO: 55498 - DNA, 25 bp, Probe Sequence
attactagcattacaggctgaagaa

SEQ ID NO: 55499 - DNA, 25 bp, Probe Sequence
aattactagcattacaggctgaaga

SEQ ID NO: 55500 - DNA, 25 bp, Probe Sequence
ttctaccgaacttaatggaatggaa

SEQ ID NO: 55501 - DNA, 25 bp, Probe Sequence
tctaccgaacttaatggaatggaaa

SEQ ID NO: 55502 - DNA, 25 bp, Probe Sequence
cttccaatgtcttaaatcagtcacc

SEQ ID NO: 55503 - DNA, 25 bp, Probe Sequence
ttaaatcagtcaccagttccagaaa

SEQ ID NO: 55504 - DNA, 25 bp, Probe Sequence
ttccaatgtcttaaatcagtcacca

SEQ ID NO: 55505 - DNA, 25 bp, Probe Sequence
caatgtcttaaatcagtcaccagtt

SEQ ID NO: 55506 - DNA, 25 bp, Probe Sequence
cttaaatcagtcaccagttccagaa

SEQ ID NO: 55507 - DNA, 25 bp, Probe Sequence
atgtcttaaatcagtcaccagttcc

SEQ ID NO: 55508 - DNA, 25 bp, Probe Sequence
aatgtcttaaatcagtcaccagttc

SEQ ID NO: 55509 - DNA, 25 bp, Probe Sequence
tccaatgtcttaaatcagtcaccag

SEQ ID NO: 55510 - DNA, 25 bp, Probe Sequence
tttctaccgaacttaatggaatgga

SEQ ID NO: 55511 - DNA, 25 bp, Probe Sequence
taccatcatgtgactggaagatatg

SEQ ID NO: 55512 - DNA, 25 bp, Probe Sequence
ccaatgtcttaaatcagtcaccagt

SEQ ID NO: 55513 - DNA, 25 bp, Probe Sequence
tcttccaatgtcttaaatcagtcac

SEQ ID NO: 55514 - DNA, 25 bp, Probe Sequence
ttaccatcatgtgactggaagatat

SEQ ID NO: 55515 - DNA, 25 bp, Probe Sequence
atttctaccgaacttaatggaatgg

SEQ ID NO: 55516 - DNA, 25 bp, Probe Sequence
gtcttaaatcagtcaccagttccag

SEQ ID NO: 55517 - DNA, 25 bp, Probe Sequence
aggagtcactgattcagcactaatt

SEQ ID NO: 55518 - DNA, 25 bp, Probe Sequence
tcttaaatcagtcaccagttccaga

SEQ ID NO: 55519 - DNA, 25 bp, Probe Sequence
gactggaagatatgcagcttatcat

SEQ ID NO: 55520 - DNA, 25 bp, Probe Sequence
tgtcttaaatcagtcaccagttcca

SEQ ID NO: 55521 - DNA, 25 bp, Probe Sequence
atcttccaatgtcttaaatcagtca

SEQ ID NO: 55522 - DNA, 25 bp, Probe Sequence
actggaagatatgcagcttatcatg

SEQ ID NO: 55523 - DNA, 25 bp, Probe Sequence
agtaggtaactggcattcctctctt

SEQ ID NO: 55524 - DNA, 25 bp, Probe Sequence
ttaacccagacctcaataaagacac

SEQ ID NO: 55525 - DNA, 25 bp, Probe Sequence
tttaacccagacctcaataaagaca

SEQ ID NO: 55526 - DNA, 25 bp, Probe Sequence
taacccagacctcaataaagacacc

SEQ ID NO: 55527 - DNA, 25 bp, Probe Sequence
atcaactatgaggagttcaagaagg

SEQ ID NO: 55528 - DNA, 25 bp, Probe Sequence
gtcatcaactatgaggagttcaaga

SEQ ID NO: 55529 - DNA, 25 bp, Probe Sequence
cctgactgcttgcctcatatttaag

SEQ ID NO: 55530 - DNA, 25 bp, Probe Sequence
tcatcaactatgaggagttcaagaa

SEQ ID NO: 55531 - DNA, 25 bp, Probe Sequence
catcaactatgaggagttcaagaag

SEQ ID NO: 55532 - DNA, 25 bp, Probe Sequence
ggtcatcaactatgaggagttcaag

SEQ ID NO: 55533 - DNA, 25 bp, Probe Sequence
tcaactatgaggagttcaagaaggc

SEQ ID NO: 55534 - DNA, 25 bp, Probe Sequence
ccctgactgcttgcctcatatttaa

SEQ ID NO: 55535 - DNA, 25 bp, Probe Sequence
gcaagagatgaatggcaagaactgg

SEQ ID NO: 55536 - DNA, 25 bp, Probe Sequence
ggcaagagatgaatggcaagaactg

SEQ ID NO: 55537 - DNA, 25 bp, Probe Sequence
aacccagacctcaataaagacacct

SEQ ID NO: 55538 - DNA, 25 bp, Probe Sequence
acccagacctcaataaagacacctt

SEQ ID NO: 55539 - DNA, 25 bp, Probe Sequence
tacgatgccaaggtgaagaagtgag

SEQ ID NO: 55540 - DNA, 25 bp, Probe Sequence
ctacgatgccaaggtgaagaagtga

SEQ ID NO: 55541 - DNA, 25 bp, Probe Sequence
gcctaattttaacccagacctcaat

SEQ ID NO: 55542 - DNA, 25 bp, Probe Sequence
ttttaacccagacctcaataaagac

SEQ ID NO: 55543 - DNA, 25 bp, Probe Sequence
caagagatgaatggcaagaactggg

SEQ ID NO: 55544 - DNA, 25 bp, Probe Sequence
cccagacctcaataaagacaccttt

SEQ ID NO: 55545 - DNA, 25 bp, Probe Sequence
cctaattttaacccagacctcaata

SEQ ID NO: 55546 - DNA, 25 bp, Probe Sequence
gacatcgtcttctccaaagtcaagg

SEQ ID NO: 55547 - DNA, 25 bp, Probe Sequence
caagtgcctaattttaacccagacc

SEQ ID NO: 55548 - DNA, 25 bp, Probe Sequence
ctggactcatcgattcgctcatcta

SEQ ID NO: 55549 - DNA, 25 bp, Probe Sequence
atcgattcgctcatctaccactcag

SEQ ID NO: 55550 - DNA, 25 bp, Probe Sequence
tcatcgattcgctcatctaccactc

SEQ ID NO: 55551 - DNA, 25 bp, Probe Sequence
ctcatcgattcgctcatctaccact

SEQ ID NO: 55552 - DNA, 25 bp, Probe Sequence
gactcatcgattcgctcatctacca

SEQ ID NO: 55553 - DNA, 25 bp, Probe Sequence
tggactcatcgattcgctcatctac

SEQ ID NO: 55554 - DNA, 25 bp, Probe Sequence
catcgattcgctcatctaccactca

SEQ ID NO: 55555 - DNA, 25 bp, Probe Sequence
actcatcgattcgctcatctaccac

SEQ ID NO: 55556 - DNA, 25 bp, Probe Sequence
ggactcatcgattcgctcatctacc

SEQ ID NO: 55557 - DNA, 25 bp, Probe Sequence
gagtcttcgtcctctatgagctctc

SEQ ID NO: 55558 - DNA, 25 bp, Probe Sequence
ggagtcttcgtcctctatgagctct

SEQ ID NO: 55559 - DNA, 25 bp, Probe Sequence
agtcttcgtcctctatgagctctcg

SEQ ID NO: 55560 - DNA, 25 bp, Probe Sequence
tatgacattgagcaacagcagataa

SEQ ID NO: 55561 - DNA, 25 bp, Probe Sequence
ctatgacattgagcaacagcagata

SEQ ID NO: 55562 - DNA, 25 bp, Probe Sequence
ttgctcagttagattccatcattga

SEQ ID NO: 55563 - DNA, 25 bp, Probe Sequence
atgacattgagcaacagcagataag

SEQ ID NO: 55564 - DNA, 25 bp, Probe Sequence
tgctcagttagattccatcattgat

SEQ ID NO: 55565 - DNA, 25 bp, Probe Sequence
taagcagttccacttcttgtctcat

SEQ ID NO: 55566 - DNA, 25 bp, Probe Sequence
cattgagcaacagcagataaggaac

SEQ ID NO: 55567 - DNA, 25 bp, Probe Sequence
ttaagcagttccacttcttgtctca

SEQ ID NO: 55568 - DNA, 25 bp, Probe Sequence
tctatgacattgagcaacagcagat

SEQ ID NO: 55569 - DNA, 25 bp, Probe Sequence
tcaatgcagaaggtatgttaagcta

SEQ ID NO: 55570 - DNA, 25 bp, Probe Sequence
acattgagcaacagcagataaggaa

SEQ ID NO: 55571 - DNA, 25 bp, Probe Sequence
aatgcagaaggtatgttaagctact

SEQ ID NO: 55572 - DNA, 25 bp, Probe Sequence
caatgcagaaggtatgttaagctac

SEQ ID NO: 55573 - DNA, 25 bp, Probe Sequence
tttgctcagttagattccatcattg

SEQ ID NO: 55574 - DNA, 25 bp, Probe Sequence
ctcaatgcagaaggtatgttaagct

SEQ ID NO: 55575 - DNA, 25 bp, Probe Sequence
cttccaggtgaaactctatgacatt

SEQ ID NO: 55576 - DNA, 25 bp, Probe Sequence
ttccaggtgaaactctatgacattg

SEQ ID NO: 55577 - DNA, 25 bp, Probe Sequence
tatgttaagctactgcgacagatac

SEQ ID NO: 55578 - DNA, 25 bp, Probe Sequence
gtatgttaagctactgcgacagata

SEQ ID NO: 55579 - DNA, 25 bp, Probe Sequence
catctcaatgcagaaggtatgttaa

SEQ ID NO: 55580 - DNA, 25 bp, Probe Sequence
tctcaatgcagaaggtatgttaagc

SEQ ID NO: 55581 - DNA, 25 bp, Probe Sequence
atctcaatgcagaaggtatgttaag

SEQ ID NO: 55582 - DNA, 25 bp, Probe Sequence
gacattgagcaacagcagataagga

SEQ ID NO: 55583 - DNA, 25 bp, Probe Sequence
tccaggtgaaactctatgacattga

SEQ ID NO: 55584 - DNA, 25 bp, Probe Sequence
tatgagcagaagatagcagagttac

SEQ ID NO: 55585 - DNA, 25 bp, Probe Sequence
tagatggattaagagaaggaccgat

SEQ ID NO: 55586 - DNA, 25 bp, Probe Sequence
attagatggattaagagaaggaccg

SEQ ID NO: 55587 - DNA, 25 bp, Probe Sequence
ggattaagagaaggaccgattgatt

SEQ ID NO: 55588 - DNA, 25 bp, Probe Sequence
ttagatggattaagagaaggaccga

SEQ ID NO: 55589 - DNA, 25 bp, Probe Sequence
tgttaagtgctattcagtcagaagt

SEQ ID NO: 55590 - DNA, 25 bp, Probe Sequence
atatgagcagaagatagcagagtta

SEQ ID NO: 55591 - DNA, 25 bp, Probe Sequence
tatatgagcagaagatagcagagtt

SEQ ID NO: 55592 - DNA, 25 bp, Probe Sequence
gatggattaagagaaggaccgattg

SEQ ID NO: 55593 - DNA, 25 bp, Probe Sequence
agatggattaagagaaggaccgatt

SEQ ID NO: 55594 - DNA, 25 bp, Probe Sequence
atgagcagaagatagcagagttaca

SEQ ID NO: 55595 - DNA, 25 bp, Probe Sequence
ttaagtgctattcagtcagaagttg

SEQ ID NO: 55596 - DNA, 25 bp, Probe Sequence
gttaagtgctattcagtcagaagtt

SEQ ID NO: 55597 - DNA, 25 bp, Probe Sequence
tggattaagagaaggaccgattgat

SEQ ID NO: 55598 - DNA, 25 bp, Probe Sequence
atggattaagagaaggaccgattga

SEQ ID NO: 55599 - DNA, 25 bp, Probe Sequence
taagtgctattcagtcagaagttgc

SEQ ID NO: 55600 - DNA, 25 bp, Probe Sequence
atgttaagtgctattcagtcagaag

SEQ ID NO: 55601 - DNA, 25 bp, Probe Sequence
tgagcagaagatagcagagttacaa

SEQ ID NO: 55602 - DNA, 25 bp, Probe Sequence
agattgagaatatcagaaggaagca

SEQ ID NO: 55603 - DNA, 25 bp, Probe Sequence
catagtgagtgtgttactgaactgt

SEQ ID NO: 55604 - DNA, 25 bp, Probe Sequence
ttagcagaacaccagcagttaatac

SEQ ID NO: 55605 - DNA, 25 bp, Probe Sequence
gtatgttaagtgctattcagtcaga

SEQ ID NO: 55606 - DNA, 25 bp, Probe Sequence
agtatgttaagtgctattcagtcag

SEQ ID NO: 55607 - DNA, 25 bp, Probe Sequence
atagtgagtgtgttactgaactgta

SEQ ID NO: 55608 - DNA, 25 bp, Probe Sequence
cttatagagcaggaagaatcaagcc

SEQ ID NO: 55609 - DNA, 25 bp, Probe Sequence
ttatagagcaggaagaatcaagcca

SEQ ID NO: 55610 - DNA, 25 bp, Probe Sequence
tatagagcaggaagaatcaagccac

SEQ ID NO: 55611 - DNA, 25 bp, Probe Sequence
gaagtgagaggaagagtctgagttg

SEQ ID NO: 55612 - DNA, 25 bp, Probe Sequence
tgaagtgagaggaagagtctgagtt

SEQ ID NO: 55613 - DNA, 25 bp, Probe Sequence
gggcaataaactttccatttccatt

SEQ ID NO: 55614 - DNA, 25 bp, Probe Sequence
ggcaataaactttccatttccattc

SEQ ID NO: 55615 - DNA, 25 bp, Probe Sequence
tccttaactttgtatcctggcttat

SEQ ID NO: 55616 - DNA, 25 bp, Probe Sequence
atccttaactttgtatcctggctta

SEQ ID NO: 55617 - DNA, 25 bp, Probe Sequence
catccttaactttgtatcctggctt

SEQ ID NO: 55618 - DNA, 25 bp, Probe Sequence
gaagagtctgagttgtctgtttcta

SEQ ID NO: 55619 - DNA, 25 bp, Probe Sequence
agaggaagagtctgagttgtctgtt

SEQ ID NO: 55620 - DNA, 25 bp, Probe Sequence
aagtgagaggaagagtctgagttgt

SEQ ID NO: 55621 - DNA, 25 bp, Probe Sequence
ctgaagtgagaggaagagtctgagt

SEQ ID NO: 55622 - DNA, 25 bp, Probe Sequence
atataccctggtcccatctttctag

SEQ ID NO: 55623 - DNA, 25 bp, Probe Sequence
gcaataaactttccatttccattct

SEQ ID NO: 55624 - DNA, 25 bp, Probe Sequence
ttatataccctggtcccatctttct

SEQ ID NO: 55625 - DNA, 25 bp, Probe Sequence
aacaattatataccctggtcccatc

SEQ ID NO: 55626 - DNA, 25 bp, Probe Sequence
caattatataccctggtcccatctt

SEQ ID NO: 55627 - DNA, 25 bp, Probe Sequence
acaattatataccctggtcccatct

SEQ ID NO: 55628 - DNA, 25 bp, Probe Sequence
aactttccatttccattctcctagc

SEQ ID NO: 55629 - DNA, 25 bp, Probe Sequence
aagagtctgagttgtctgtttctag

SEQ ID NO: 55630 - DNA, 25 bp, Probe Sequence
tatataccctggtcccatctttcta

SEQ ID NO: 55631 - DNA, 25 bp, Probe Sequence
aaacaattatataccctggtcccat

SEQ ID NO: 55632 - DNA, 25 bp, Probe Sequence
acaccaatagagataatacaggcag

SEQ ID NO: 55633 - DNA, 25 bp, Probe Sequence
caccaatagagataatacaggcaga

SEQ ID NO: 55634 - DNA, 25 bp, Probe Sequence
aacaccaatagagataatacaggca

SEQ ID NO: 55635 - DNA, 25 bp, Probe Sequence
accaatagagataatacaggcagat

SEQ ID NO: 55636 - DNA, 25 bp, Probe Sequence
ccaatagagataatacaggcagatt

SEQ ID NO: 55637 - DNA, 25 bp, Probe Sequence
aatattggcagctagacagttagaa

SEQ ID NO: 55638 - DNA, 25 bp, Probe Sequence
agataatacaggcagattctcctcc

SEQ ID NO: 55639 - DNA, 25 bp, Probe Sequence
gcagattctcctcccattatagttg

SEQ ID NO: 55640 - DNA, 25 bp, Probe Sequence
ccactgtatgtataaagccattgaa

SEQ ID NO: 55641 - DNA, 25 bp, Probe Sequence
caatagagataatacaggcagattc

SEQ ID NO: 55642 - DNA, 25 bp, Probe Sequence
aaacaccaatagagataatacaggc

SEQ ID NO: 55643 - DNA, 25 bp, Probe Sequence
gccactgtatgtataaagccattga

SEQ ID NO: 55644 - DNA, 25 bp, Probe Sequence
ggcagattctcctcccattatagtt

SEQ ID NO: 55645 - DNA, 25 bp, Probe Sequence
tgcatatggcttaggagaacattat

SEQ ID NO: 55646 - DNA, 25 bp, Probe Sequence
tataattcggttacacggttgggta

SEQ ID NO: 55647 - DNA, 25 bp, Probe Sequence
aatagagataatacaggcagattct

SEQ ID NO: 55648 - DNA, 25 bp, Probe Sequence
cactgtatgtataaagccattgaag

SEQ ID NO: 55649 - DNA, 25 bp, Probe Sequence
cattataattcggttacacggttgg

SEQ ID NO: 55650 - DNA, 25 bp, Probe Sequence
acattataattcggttacacggttg

SEQ ID NO: 55651 - DNA, 25 bp, Probe Sequence
actgtatgtataaagccattgaaga

SEQ ID NO: 55652 - DNA, 25 bp, Probe Sequence
ggcttaggagaacattataattcgg

SEQ ID NO: 55653 - DNA, 25 bp, Probe Sequence
gaacattataattcggttacacggt

SEQ ID NO: 55654 - DNA, 25 bp, Probe Sequence
gcatatggcttaggagaacattata

SEQ ID NO: 55655 - DNA, 25 bp, Probe Sequence
ttacacggttgggtaaacatagtta

SEQ ID NO: 55656 - DNA, 25 bp, Probe Sequence
caccaatatcttccactgttactgt

SEQ ID NO: 55657 - DNA, 25 bp, Probe Sequence
gcctcattcagatacagaacttcag

SEQ ID NO: 55658 - DNA, 25 bp, Probe Sequence
cagcctcattcagatacagaacttc

SEQ ID NO: 55659 - DNA, 25 bp, Probe Sequence
gctcatagaagtcatcagatcaaca

SEQ ID NO: 55660 - DNA, 25 bp, Probe Sequence
tgctcatagaagtcatcagatcaac

SEQ ID NO: 55661 - DNA, 25 bp, Probe Sequence
tcatagaagtcatcagatcaacaca

SEQ ID NO: 55662 - DNA, 25 bp, Probe Sequence
ccattagcaagatcaataaccatcg

SEQ ID NO: 55663 - DNA, 25 bp, Probe Sequence
attagcaagatcaataaccatcgtg

SEQ ID NO: 55664 - DNA, 25 bp, Probe Sequence
cattagcaagatcaataaccatcgt

SEQ ID NO: 55665 - DNA, 25 bp, Probe Sequence
agcctcattcagatacagaacttca

SEQ ID NO: 55666 - DNA, 25 bp, Probe Sequence
gaagtcatcagatcaacacattcac

SEQ ID NO: 55667 - DNA, 25 bp, Probe Sequence
agaagtcatcagatcaacacattca

SEQ ID NO: 55668 - DNA, 25 bp, Probe Sequence
atgctcatagaagtcatcagatcaa

SEQ ID NO: 55669 - DNA, 25 bp, Probe Sequence
ctcatagaagtcatcagatcaacac

SEQ ID NO: 55670 - DNA, 25 bp, Probe Sequence
ctcacaccaatatcttccactgtta

SEQ ID NO: 55671 - DNA, 25 bp, Probe Sequence
acaccaatatcttccactgttactg

SEQ ID NO: 55672 - DNA, 25 bp, Probe Sequence
cacaccaatatcttccactgttact

SEQ ID NO: 55673 - DNA, 25 bp, Probe Sequence
tcacaccaatatcttccactgttac

SEQ ID NO: 55674 - DNA, 25 bp, Probe Sequence
atcctcacaccaatatcttccactg

SEQ ID NO: 55675 - DNA, 25 bp, Probe Sequence
catcctcacaccaatatcttccact

SEQ ID NO: 55676 - DNA, 25 bp, Probe Sequence
atcagatcaacacattcactccaac

SEQ ID NO: 55677 - DNA, 25 bp, Probe Sequence
catcagatcaacacattcactccaa

SEQ ID NO: 55678 - DNA, 25 bp, Probe Sequence
catagaagtcatcagatcaacacat

SEQ ID NO: 55679 - DNA, 25 bp, Probe Sequence
tatgctcatagaagtcatcagatca

SEQ ID NO: 55680 - DNA, 25 bp, Probe Sequence
ggttccataactctgtatcatgtgt

SEQ ID NO: 55681 - DNA, 25 bp, Probe Sequence
tggttccataactctgtatcatgtg

SEQ ID NO: 55682 - DNA, 25 bp, Probe Sequence
ttggttccataactctgtatcatgt

SEQ ID NO: 55683 - DNA, 25 bp, Probe Sequence
attggttccataactctgtatcatg

SEQ ID NO: 55684 - DNA, 25 bp, Probe Sequence
ctattggttccataactctgtatca

SEQ ID NO: 55685 - DNA, 25 bp, Probe Sequence
gttccataactctgtatcatgtgta

SEQ ID NO: 55686 - DNA, 25 bp, Probe Sequence
tctattggttccataactctgtatc

SEQ ID NO: 55687 - DNA, 25 bp, Probe Sequence
ctatctattggttccataactctgt

SEQ ID NO: 55688 - DNA, 25 bp, Probe Sequence
actatctattggttccataactctg

SEQ ID NO: 55689 - DNA, 25 bp, Probe Sequence
tgactatctattggttccataactc

SEQ ID NO: 55690 - DNA, 25 bp, Probe Sequence
tttgctttgagagaatggtatgttt

SEQ ID NO: 55691 - DNA, 25 bp, Probe Sequence
gactatctattggttccataactct

SEQ ID NO: 55692 - DNA, 25 bp, Probe Sequence
atttctctaaccttgtcttctaacg

SEQ ID NO: 55693 - DNA, 25 bp, Probe Sequence
tattggttccataactctgtatcat

SEQ ID NO: 55694 - DNA, 25 bp, Probe Sequence
ctttactctttcctcaacccttgtc

SEQ ID NO: 55695 - DNA, 25 bp, Probe Sequence
tccataactctgtatcatgtgtatt

SEQ ID NO: 55696 - DNA, 25 bp, Probe Sequence
ttccataactctgtatcatgtgtat

SEQ ID NO: 55697 - DNA, 25 bp, Probe Sequence
atctattggttccataactctgtat

SEQ ID NO: 55698 - DNA, 25 bp, Probe Sequence
atgactatctattggttccataact

SEQ ID NO: 55699 - DNA, 25 bp, Probe Sequence
ctttcctcaacccttgtctctatct

SEQ ID NO: 55700 - DNA, 25 bp, Probe Sequence
ctctttcctcaacccttgtctctat

SEQ ID NO: 55701 - DNA, 25 bp, Probe Sequence
attgctttgtcttgatgtttctatc

SEQ ID NO: 55702 - DNA, 25 bp, Probe Sequence
tctttcctcaacccttgtctctatc

SEQ ID NO: 55703 - DNA, 25 bp, Probe Sequence
tttactctttcctcaacccttgtct

SEQ ID NO: 55704 - DNA, 25 bp, Probe Sequence
ccagaatgggagctgactgatatgg

SEQ ID NO: 55705 - DNA, 25 bp, Probe Sequence
aataataaaagattgccatgaatct

SEQ ID NO: 55706 - DNA, 25 bp, Probe Sequence
ggatgttcagttcacctctggataa

SEQ ID NO: 55707 - DNA, 25 bp, Probe Sequence
aggatgttcagttcacctctggata

SEQ ID NO: 55708 - DNA, 25 bp, Probe Sequence
gatgttcagttcacctctggataaa

SEQ ID NO: 55709 - DNA, 25 bp, Probe Sequence
atgttcagttcacctctggataaac

SEQ ID NO: 55710 - DNA, 25 bp, Probe Sequence
gttcacctctggataaactgggaaa

SEQ ID NO: 55711 - DNA, 25 bp, Probe Sequence
aaggatgttcagttcacctctggat

SEQ ID NO: 55712 - DNA, 25 bp, Probe Sequence
gaaggatgttcagttcacctctgga

SEQ ID NO: 55713 - DNA, 25 bp, Probe Sequence
aggaaggatgttcagttcacctctg

SEQ ID NO: 55714 - DNA, 25 bp, Probe Sequence
caggaaggatgttcagttcacctct

SEQ ID NO: 55715 - DNA, 25 bp, Probe Sequence
ttcacctctggataaactgggaaaa

SEQ ID NO: 55716 - DNA, 25 bp, Probe Sequence
tgttcagttcacctctggataaact

SEQ ID NO: 55717 - DNA, 25 bp, Probe Sequence
agtaagctgtcccttttaattgttt

SEQ ID NO: 55718 - DNA, 25 bp, Probe Sequence
aagtaagctgtcccttttaattgtt

SEQ ID NO: 55719 - DNA, 25 bp, Probe Sequence
caagtaagctgtcccttttaattgt

SEQ ID NO: 55720 - DNA, 25 bp, Probe Sequence
gcaagtaagctgtcccttttaattg

SEQ ID NO: 55721 - DNA, 25 bp, Probe Sequence
ggaaggatgttcagttcacctctgg

SEQ ID NO: 55722 - DNA, 25 bp, Probe Sequence
ccaggaaggatgttcagttcacctc

SEQ ID NO: 55723 - DNA, 25 bp, Probe Sequence
gtaagctgtcccttttaattgtttt

SEQ ID NO: 55724 - DNA, 25 bp, Probe Sequence
taaaatttgctgaaacttcaagggc

SEQ ID NO: 55725 - DNA, 25 bp, Probe Sequence
ttaaaatttgctgaaacttcaaggg

SEQ ID NO: 55726 - DNA, 25 bp, Probe Sequence
agttcacctctggataaactgggaa

SEQ ID NO: 55727 - DNA, 25 bp, Probe Sequence
aaatttgctgaaacttcaagggcag

SEQ ID NO: 55728 - DNA, 25 bp, Probe Sequence
agcaagtaagctgtcccttttaatt

SEQ ID NO: 55729 - DNA, 25 bp, Probe Sequence
tttaaaatttgctgaaacttcaagg

SEQ ID NO: 55730 - DNA, 25 bp, Probe Sequence
cattgtgtcctcaacctgtactatg

SEQ ID NO: 55731 - DNA, 25 bp, Probe Sequence
attgtgtcctcaacctgtactatga

SEQ ID NO: 55732 - DNA, 25 bp, Probe Sequence
ttgactacctttgttcctcttcttt

SEQ ID NO: 55733 - DNA, 25 bp, Probe Sequence
ccattgtgtcctcaacctgtactat

SEQ ID NO: 55734 - DNA, 25 bp, Probe Sequence
gactacctttgttcctcttctttga

SEQ ID NO: 55735 - DNA, 25 bp, Probe Sequence
cttgactacctttgttcctcttctt

SEQ ID NO: 55736 - DNA, 25 bp, Probe Sequence
tgactacctttgttcctcttctttg

SEQ ID NO: 55737 - DNA, 25 bp, Probe Sequence
tcataatttgtcataaccactgctg

SEQ ID NO: 55738 - DNA, 25 bp, Probe Sequence
actacctttgttcctcttctttgaa

SEQ ID NO: 55739 - DNA, 25 bp, Probe Sequence
gacccttggacaacatttatcataa

SEQ ID NO: 55740 - DNA, 25 bp, Probe Sequence
atcataatttgtcataaccactgct

SEQ ID NO: 55741 - DNA, 25 bp, Probe Sequence
tgacccttggacaacatttatcata

SEQ ID NO: 55742 - DNA, 25 bp, Probe Sequence
taatttgtcataaccactgctgagt

SEQ ID NO: 55743 - DNA, 25 bp, Probe Sequence
cataatttgtcataaccactgctga

SEQ ID NO: 55744 - DNA, 25 bp, Probe Sequence
ataatttgtcataaccactgctgag

SEQ ID NO: 55745 - DNA, 25 bp, Probe Sequence
acccttggacaacatttatcataat

SEQ ID NO: 55746 - DNA, 25 bp, Probe Sequence
ctgacccttggacaacatttatcat

SEQ ID NO: 55747 - DNA, 25 bp, Probe Sequence
cactgacccttggacaacatttatc

SEQ ID NO: 55748 - DNA, 25 bp, Probe Sequence
ccttgactacctttgttcctcttct

SEQ ID NO: 55749 - DNA, 25 bp, Probe Sequence
acactgacccttggacaacatttat

SEQ ID NO: 55750 - DNA, 25 bp, Probe Sequence
cccttggacaacatttatcataatt

SEQ ID NO: 55751 - DNA, 25 bp, Probe Sequence
actgacccttggacaacatttatca

SEQ ID NO: 55752 - DNA, 25 bp, Probe Sequence
aacactgacccttggacaacattta

SEQ ID NO: 55753 - DNA, 25 bp, Probe Sequence
tatcataatttgtcataaccactgc

SEQ ID NO: 55754 - DNA, 25 bp, Probe Sequence
aagatgtagaagaaggagatgagaa

SEQ ID NO: 55755 - DNA, 25 bp, Probe Sequence
gatgaccaaactgaaatctgtaagc

SEQ ID NO: 55756 - DNA, 25 bp, Probe Sequence
atgaccaaactgaaatctgtaagca

SEQ ID NO: 55757 - DNA, 25 bp, Probe Sequence
gctaaaggagaagttcaagtttcag

SEQ ID NO: 55758 - DNA, 25 bp, Probe Sequence
acccatcaatctcttcacctctaaa

SEQ ID NO: 55759 - DNA, 25 bp, Probe Sequence
tgaaagatgtagaagaaggagatga

SEQ ID NO: 55760 - DNA, 25 bp, Probe Sequence
agatgtagaagaaggagatgagaaa

SEQ ID NO: 55761 - DNA, 25 bp, Probe Sequence
aaagatgtagaagaaggagatgaga

SEQ ID NO: 55762 - DNA, 25 bp, Probe Sequence
ctgaaagatgtagaagaaggagatg

SEQ ID NO: 55763 - DNA, 25 bp, Probe Sequence
ataaagaaagacacacacaactggg

SEQ ID NO: 55764 - DNA, 25 bp, Probe Sequence
gaaagatgtagaagaaggagatgag

SEQ ID NO: 55765 - DNA, 25 bp, Probe Sequence
aaggaaactaaaggcaaaggttctt

SEQ ID NO: 55766 - DNA, 25 bp, Probe Sequence
aaaggaaactaaaggcaaaggttct

SEQ ID NO: 55767 - DNA, 25 bp, Probe Sequence
ttcagataaagaaagacacacacaa

SEQ ID NO: 55768 - DNA, 25 bp, Probe Sequence
ggctaaaggagaagttcaagtttca

SEQ ID NO: 55769 - DNA, 25 bp, Probe Sequence
tggctaaaggagaagttcaagtttc

SEQ ID NO: 55770 - DNA, 25 bp, Probe Sequence
ttggctaaaggagaagttcaagttt

SEQ ID NO: 55771 - DNA, 25 bp, Probe Sequence
tttggctaaaggagaagttcaagtt

SEQ ID NO: 55772 - DNA, 25 bp, Probe Sequence
ctaaaggagaagttcaagtttcaga

SEQ ID NO: 55773 - DNA, 25 bp, Probe Sequence
cacccatcaatctcttcacctctaa

SEQ ID NO: 55774 - DNA, 25 bp, Probe Sequence
tctgaaagatgtagaagaaggagat

SEQ ID NO: 55775 - DNA, 25 bp, Probe Sequence
ccaacagttagaaatcgtatgtctg

SEQ ID NO: 55776 - DNA, 25 bp, Probe Sequence
gatgtagaagaaggagatgagaaat

SEQ ID NO: 55777 - DNA, 25 bp, Probe Sequence
aggagaagttcaagtttcagataaa

SEQ ID NO: 55778 - DNA, 25 bp, Probe Sequence
aatatcctgccacctctaacaagta

SEQ ID NO: 55779 - DNA, 25 bp, Probe Sequence
caatcaacctggtggaataagaatt

SEQ ID NO: 55780 - DNA, 25 bp, Probe Sequence
ttacaataatggctcgtctatgtgt

SEQ ID NO: 55781 - DNA, 25 bp, Probe Sequence
tacaataatggctcgtctatgtgtg

SEQ ID NO: 55782 - DNA, 25 bp, Probe Sequence
tacactgactaatccagaagacatt

SEQ ID NO: 55783 - DNA, 25 bp, Probe Sequence
atatcctgccacctctaacaagtac

SEQ ID NO: 55784 - DNA, 25 bp, Probe Sequence
gtacactgactaatccagaagacat

SEQ ID NO: 55785 - DNA, 25 bp, Probe Sequence
aattacaatccactacctgaggaac

SEQ ID NO: 55786 - DNA, 25 bp, Probe Sequence
caataatggctcgtctatgtgtgga

SEQ ID NO: 55787 - DNA, 25 bp, Probe Sequence
gttactgtcgaatgctagaagaagg

SEQ ID NO: 55788 - DNA, 25 bp, Probe Sequence
ccaatcaacctggtggaataagaat

SEQ ID NO: 55789 - DNA, 25 bp, Probe Sequence
gctttacaataatggctcgtctatg

SEQ ID NO: 55790 - DNA, 25 bp, Probe Sequence
aatggtacactgactaatccagaag

SEQ ID NO: 55791 - DNA, 25 bp, Probe Sequence
atggtgtaaatggaagtttcagaga

SEQ ID NO: 55792 - DNA, 25 bp, Probe Sequence
taaatggaagtttcagagaggacaa

SEQ ID NO: 55793 - DNA, 25 bp, Probe Sequence
aactccagaagcactttatgaaatg

SEQ ID NO: 55794 - DNA, 25 bp, Probe Sequence
gtaaatggaagtttcagagaggaca

SEQ ID NO: 55795 - DNA, 25 bp, Probe Sequence
tgtaaatggaagtttcagagaggac

SEQ ID NO: 55796 - DNA, 25 bp, Probe Sequence
gtgtaaatggaagtttcagagagga

SEQ ID NO: 55797 - DNA, 25 bp, Probe Sequence
ggtacactgactaatccagaagaca

SEQ ID NO: 55798 - DNA, 25 bp, Probe Sequence
ggtattgcagttggacacatatatt

SEQ ID NO: 55799 - DNA, 25 bp, Probe Sequence
aaatggaagtttcagagaggacaaa

SEQ ID NO: 55800 - DNA, 25 bp, Probe Sequence
cagcagactttgtatttatgttcct

SEQ ID NO: 55801 - DNA, 25 bp, Probe Sequence
atggtacactgactaatccagaaga

SEQ ID NO: 55802 - DNA, 25 bp, Probe Sequence
attctgtaagagattgagcctgaac

SEQ ID NO: 55803 - DNA, 25 bp, Probe Sequence
cattctgtaagagattgagcctgaa

SEQ ID NO: 55804 - DNA, 25 bp, Probe Sequence
gatgtcacagttgaagtatctcctt

SEQ ID NO: 55805 - DNA, 25 bp, Probe Sequence
atgatgtcacagttgaagtatctcc

SEQ ID NO: 55806 - DNA, 25 bp, Probe Sequence
gatgatgtcacagttgaagtatctc

SEQ ID NO: 55807 - DNA, 25 bp, Probe Sequence
ttctgtaagagattgagcctgaact

SEQ ID NO: 55808 - DNA, 25 bp, Probe Sequence
tgagcctgaactctcttagtcataa

SEQ ID NO: 55809 - DNA, 25 bp, Probe Sequence
ttgagcctgaactctcttagtcata

SEQ ID NO: 55810 - DNA, 25 bp, Probe Sequence
cctagatgatgtcacagttgaagta

SEQ ID NO: 55811 - DNA, 25 bp, Probe Sequence
tgatgtcacagttgaagtatctcct

SEQ ID NO: 55812 - DNA, 25 bp, Probe Sequence
attgagcctgaactctcttagtcat

SEQ ID NO: 55813 - DNA, 25 bp, Probe Sequence
agattgagcctgaactctcttagtc

SEQ ID NO: 55814 - DNA, 25 bp, Probe Sequence
acattctgtaagagattgagcctga

SEQ ID NO: 55815 - DNA, 25 bp, Probe Sequence
tagatgatgtcacagttgaagtatc

SEQ ID NO: 55816 - DNA, 25 bp, Probe Sequence
gattgagcctgaactctcttagtca

SEQ ID NO: 55817 - DNA, 25 bp, Probe Sequence
tctgtaagagattgagcctgaactc

SEQ ID NO: 55818 - DNA, 25 bp, Probe Sequence
aatatcttaactgtagccaaggatc

SEQ ID NO: 55819 - DNA, 25 bp, Probe Sequence
ctagatgatgtcacagttgaagtat

SEQ ID NO: 55820 - DNA, 25 bp, Probe Sequence
gaacagtacacaagactctggacta

SEQ ID NO: 55821 - DNA, 25 bp, Probe Sequence
cctttcacttcgtatccaacaaatt

SEQ ID NO: 55822 - DNA, 25 bp, Probe Sequence
acctttcacttcgtatccaacaaat

SEQ ID NO: 55823 - DNA, 25 bp, Probe Sequence
tgtagaagaaagttcagatagcgaa

SEQ ID NO: 55824 - DNA, 25 bp, Probe Sequence
aacagtacacaagactctggactac

SEQ ID NO: 55825 - DNA, 25 bp, Probe Sequence
tacattctgtaagagattgagcctg

SEQ ID NO: 55826 - DNA, 25 bp, Probe Sequence
gagcaggagaggaaggaagttaata

SEQ ID NO: 55827 - DNA, 25 bp, Probe Sequence
agcaggagaggaaggaagttaatac

SEQ ID NO: 55828 - DNA, 25 bp, Probe Sequence
ggtgagttagagatggaagtacatt

SEQ ID NO: 55829 - DNA, 25 bp, Probe Sequence
ttactacacatgaaccataatgctg

SEQ ID NO: 55830 - DNA, 25 bp, Probe Sequence
acttactacacatgaaccataatgc

SEQ ID NO: 55831 - DNA, 25 bp, Probe Sequence
tgactacttactacacatgaaccat

SEQ ID NO: 55832 - DNA, 25 bp, Probe Sequence
aggagaggaaggaagttaataccta

SEQ ID NO: 55833 - DNA, 25 bp, Probe Sequence
atgaatcctccttgagaagtagtac

SEQ ID NO: 55834 - DNA, 25 bp, Probe Sequence
atgaaccataatgctgcttcttgtg

SEQ ID NO: 55835 - DNA, 25 bp, Probe Sequence
cttactacacatgaaccataatgct

SEQ ID NO: 55836 - DNA, 25 bp, Probe Sequence
tactacacatgaaccataatgctgc

SEQ ID NO: 55837 - DNA, 25 bp, Probe Sequence
caggagaggaaggaagttaatacct

SEQ ID NO: 55838 - DNA, 25 bp, Probe Sequence
gcaggagaggaaggaagttaatacc

SEQ ID NO: 55839 - DNA, 25 bp, Probe Sequence
catgaatcctccttgagaagtagta

SEQ ID NO: 55840 - DNA, 25 bp, Probe Sequence
ggagaggaaggaagttaatacctat

SEQ ID NO: 55841 - DNA, 25 bp, Probe Sequence
tacacatgaaccataatgctgcttc

SEQ ID NO: 55842 - DNA, 25 bp, Probe Sequence
ctacacatgaaccataatgctgctt

SEQ ID NO: 55843 - DNA, 25 bp, Probe Sequence
gtgactacttactacacatgaacca

SEQ ID NO: 55844 - DNA, 25 bp, Probe Sequence
aggtgactacttactacacatgaac

SEQ ID NO: 55845 - DNA, 25 bp, Probe Sequence
agaggaaggaagttaatacctatgt

SEQ ID NO: 55846 - DNA, 25 bp, Probe Sequence
tcaataggtgactacttactacaca

SEQ ID NO: 55847 - DNA, 25 bp, Probe Sequence
ccatgaatcctccttgagaagtagt

SEQ ID NO: 55848 - DNA, 25 bp, Probe Sequence
accatgaatcctccttgagaagtag

SEQ ID NO: 55849 - DNA, 25 bp, Probe Sequence
gaccatgaatcctccttgagaagta

SEQ ID NO: 55850 - DNA, 25 bp, Probe Sequence
acaataaagtatattttgtcttgca

SEQ ID NO: 55851 - DNA, 25 bp, Probe Sequence
tacagaaacttggagaaacagatga

SEQ ID NO: 55852 - DNA, 25 bp, Probe Sequence
ctacagaaacttggagaaacagatg

SEQ ID NO: 55853 - DNA, 25 bp, Probe Sequence
gccttctcttagttatttctgggtt

SEQ ID NO: 55854 - DNA, 25 bp, Probe Sequence
ttgccttctcttagttatttctggg

SEQ ID NO: 55855 - DNA, 25 bp, Probe Sequence
acagaaacttggagaaacagatgaa

SEQ ID NO: 55856 - DNA, 25 bp, Probe Sequence
ctcttagttatttctgggttgtcac

SEQ ID NO: 55857 - DNA, 25 bp, Probe Sequence
tctcttagttatttctgggttgtca

SEQ ID NO: 55858 - DNA, 25 bp, Probe Sequence
tcttagttatttctgggttgtcaca

SEQ ID NO: 55859 - DNA, 25 bp, Probe Sequence
ccttctcttagttatttctgggttg

SEQ ID NO: 55860 - DNA, 25 bp, Probe Sequence
aacttggagaaacagatgaagagaa

SEQ ID NO: 55861 - DNA, 25 bp, Probe Sequence
aaacttggagaaacagatgaagaga

SEQ ID NO: 55862 - DNA, 25 bp, Probe Sequence
agaaacttggagaaacagatgaaga

SEQ ID NO: 55863 - DNA, 25 bp, Probe Sequence
cagaaacttggagaaacagatgaag

SEQ ID NO: 55864 - DNA, 25 bp, Probe Sequence
gaaacttggagaaacagatgaagag

SEQ ID NO: 55865 - DNA, 25 bp, Probe Sequence
tttgccttctcttagttatttctgg

SEQ ID NO: 55866 - DNA, 25 bp, Probe Sequence
gctacagaaacttggagaaacagat

SEQ ID NO: 55867 - DNA, 25 bp, Probe Sequence
cttggagaaacagatgaagagaagt

SEQ ID NO: 55868 - DNA, 25 bp, Probe Sequence
acttggagaaacagatgaagagaag

SEQ ID NO: 55869 - DNA, 25 bp, Probe Sequence
ttggagaaacagatgaagagaagtt

SEQ ID NO: 55870 - DNA, 25 bp, Probe Sequence
cagatgaagagaagttatttgtgga

SEQ ID NO: 55871 - DNA, 25 bp, Probe Sequence
tggagaaacagatgaagagaagtta

SEQ ID NO: 55872 - DNA, 25 bp, Probe Sequence
tgccttctcttagttatttctgggt

SEQ ID NO: 55873 - DNA, 25 bp, Probe Sequence
ggtattatgtttgccttctcttagt

SEQ ID NO: 55874 - DNA, 25 bp, Probe Sequence
ttctcttagttatttctgggttgtc

SEQ ID NO: 55875 - DNA, 25 bp, Probe Sequence
aagtgtcttattggagtgatagctt

SEQ ID NO: 55876 - DNA, 25 bp, Probe Sequence
ttgttgaagtcttaatcagcagatt

SEQ ID NO: 55877 - DNA, 25 bp, Probe Sequence
gtttaaggaatacccagagattgct

SEQ ID NO: 55878 - DNA, 25 bp, Probe Sequence
agtttaaggaatacccagagattgc

SEQ ID NO: 55879 - DNA, 25 bp, Probe Sequence
ttcagtggaccttgagctaatagat

SEQ ID NO: 55880 - DNA, 25 bp, Probe Sequence
tgtaggcatctgtaaattctgttgt

SEQ ID NO: 55881 - DNA, 25 bp, Probe Sequence
ttgtaggcatctgtaaattctgttg

SEQ ID NO: 55882 - DNA, 25 bp, Probe Sequence
aggcatctgtaaattctgttgtagg

SEQ ID NO: 55883 - DNA, 25 bp, Probe Sequence
ggcatctgtaaattctgttgtaggt

SEQ ID NO: 55884 - DNA, 25 bp, Probe Sequence
tcagtggaccttgagctaatagatc

SEQ ID NO: 55885 - DNA, 25 bp, Probe Sequence
gcatctgtaaattctgttgtaggta

SEQ ID NO: 55886 - DNA, 25 bp, Probe Sequence
gtaggcatctgtaaattctgttgta

SEQ ID NO: 55887 - DNA, 25 bp, Probe Sequence
cttcagtggaccttgagctaataga

SEQ ID NO: 55888 - DNA, 25 bp, Probe Sequence
tcttcagtggaccttgagctaatag

SEQ ID NO: 55889 - DNA, 25 bp, Probe Sequence
taagtgtcttattggagtgatagct

SEQ ID NO: 55890 - DNA, 25 bp, Probe Sequence
attgtaggcatctgtaaattctgtt

SEQ ID NO: 55891 - DNA, 25 bp, Probe Sequence
ctttgttgaagtcttaatcagcaga

SEQ ID NO: 55892 - DNA, 25 bp, Probe Sequence
ctcttcagtggaccttgagctaata

SEQ ID NO: 55893 - DNA, 25 bp, Probe Sequence
taggcatctgtaaattctgttgtag

SEQ ID NO: 55894 - DNA, 25 bp, Probe Sequence
tcatagtttaaggaatacccagaga

SEQ ID NO: 55895 - DNA, 25 bp, Probe Sequence
agagattgctgctgttctatttatt

SEQ ID NO: 55896 - DNA, 25 bp, Probe Sequence
tttgttgaagtcttaatcagcagat

SEQ ID NO: 55897 - DNA, 25 bp, Probe Sequence
tttaaggaatacccagagattgctg

SEQ ID NO: 55898 - DNA, 25 bp, Probe Sequence
tattgtaggcatctgtaaattctgt

SEQ ID NO: 55899 - DNA, 25 bp, Probe Sequence
ttcagcccagttctcagacacttag

SEQ ID NO: 55900 - DNA, 25 bp, Probe Sequence
cttcagcccagttctcagacactta

SEQ ID NO: 55901 - DNA, 25 bp, Probe Sequence
gaagatcaccttcagcccagttctc

SEQ ID NO: 55902 - DNA, 25 bp, Probe Sequence
ttatactgtgtgtgtgtgaggtctt

SEQ ID NO: 55903 - DNA, 25 bp, Probe Sequence
atactgtgtgtgtgtgaggtcttta

SEQ ID NO: 55904 - DNA, 25 bp, Probe Sequence
tatactgtgtgtgtgtgaggtcttt

SEQ ID NO: 55905 - DNA, 25 bp, Probe Sequence
tttatactgtgtgtgtgtgaggtct

SEQ ID NO: 55906 - DNA, 25 bp, Probe Sequence
gtttatactgtgtgtgtgtgaggtc

SEQ ID NO: 55907 - DNA, 25 bp, Probe Sequence
gtgtttatactgtgtgtgtgtgagg

SEQ ID NO: 55908 - DNA, 25 bp, Probe Sequence
ggtgtttatactgtgtgtgtgtgag

SEQ ID NO: 55909 - DNA, 25 bp, Probe Sequence
tactgtgtgtgtgtgaggtctttaa

SEQ ID NO: 55910 - DNA, 25 bp, Probe Sequence
cgagggtggatttatcttctcaaag

SEQ ID NO: 55911 - DNA, 25 bp, Probe Sequence
tgtttatactgtgtgtgtgtgaggt

SEQ ID NO: 55912 - DNA, 25 bp, Probe Sequence
aggtgtttatactgtgtgtgtgtga

SEQ ID NO: 55913 - DNA, 25 bp, Probe Sequence
cttacccaggtgtttatactgtgtg

SEQ ID NO: 55914 - DNA, 25 bp, Probe Sequence
ttacccaggtgtttatactgtgtgt

SEQ ID NO: 55915 - DNA, 25 bp, Probe Sequence
ccgagggtggatttatcttctcaaa

SEQ ID NO: 55916 - DNA, 25 bp, Probe Sequence
caggtgtttatactgtgtgtgtgtg

SEQ ID NO: 55917 - DNA, 25 bp, Probe Sequence
ccttacccaggtgtttatactgtgt

SEQ ID NO: 55918 - DNA, 25 bp, Probe Sequence
tacccaggtgtttatactgtgtgtg

SEQ ID NO: 55919 - DNA, 25 bp, Probe Sequence
gagggtggatttatcttctcaaaga

SEQ ID NO: 55920 - DNA, 25 bp, Probe Sequence
ggtggatttatcttctcaaagacct

SEQ ID NO: 55921 - DNA, 25 bp, Probe Sequence
agggtggatttatcttctcaaagac

SEQ ID NO: 55922 - DNA, 25 bp, Probe Sequence
gggtggatttatcttctcaaagacc

SEQ ID NO: 55923 - DNA, 25 bp, Probe Sequence
cacaaaggaacacaaaacaaaactt

SEQ ID NO: 55924 - DNA, 25 bp, Probe Sequence
actgtgtgtgtgtgaggtctttaaa

SEQ ID NO: 55925 - DNA, 25 bp, Probe Sequence
atgtgaagttatccagcctctgcta

SEQ ID NO: 55926 - DNA, 25 bp, Probe Sequence
tgcctggaatactatcacctcttat

SEQ ID NO: 55927 - DNA, 25 bp, Probe Sequence
atgcctggaatactatcacctctta

SEQ ID NO: 55928 - DNA, 25 bp, Probe Sequence
taatgcctggaatactatcacctct

SEQ ID NO: 55929 - DNA, 25 bp, Probe Sequence
ttaatgcctggaatactatcacctc

SEQ ID NO: 55930 - DNA, 25 bp, Probe Sequence
gcctggaatactatcacctcttata

SEQ ID NO: 55931 - DNA, 25 bp, Probe Sequence
aatgcctggaatactatcacctctt

SEQ ID NO: 55932 - DNA, 25 bp, Probe Sequence
ccattggtgttgttgcctataataa

SEQ ID NO: 55933 - DNA, 25 bp, Probe Sequence
ctcgttctcactgcttatgttcttc

SEQ ID NO: 55934 - DNA, 25 bp, Probe Sequence
gagaatggatcttgtgtacctgatg

SEQ ID NO: 55935 - DNA, 25 bp, Probe Sequence
tgagaatggatcttgtgtacctgat

SEQ ID NO: 55936 - DNA, 25 bp, Probe Sequence
attaatgcctggaatactatcacct

SEQ ID NO: 55937 - DNA, 25 bp, Probe Sequence
aattaatgcctggaatactatcacc

SEQ ID NO: 55938 - DNA, 25 bp, Probe Sequence
ctgagaatggatcttgtgtacctga

SEQ ID NO: 55939 - DNA, 25 bp, Probe Sequence
acataccactgtcatcatagacctg

SEQ ID NO: 55940 - DNA, 25 bp, Probe Sequence
cacataccactgtcatcatagacct

SEQ ID NO: 55941 - DNA, 25 bp, Probe Sequence
ggaattaatgcctggaatactatca

SEQ ID NO: 55942 - DNA, 25 bp, Probe Sequence
agaatggatcttgtgtacctgatgg

SEQ ID NO: 55943 - DNA, 25 bp, Probe Sequence
tgaactacataggtcttaccattga

SEQ ID NO: 55944 - DNA, 25 bp, Probe Sequence
gaactacataggtcttaccattgac

SEQ ID NO: 55945 - DNA, 25 bp, Probe Sequence
ggaggaattaatgcctggaatacta

SEQ ID NO: 55946 - DNA, 25 bp, Probe Sequence
gtgtagacaaataccagttcccatt

SEQ ID NO: 55947 - DNA, 25 bp, Probe Sequence
tgacctaagatcaatctgaactatc

SEQ ID NO: 55948 - DNA, 25 bp, Probe Sequence
tcgttctcactgcttatgttcttcg

SEQ ID NO: 55949 - DNA, 25 bp, Probe Sequence
ctggaggaattaatgcctggaatac

SEQ ID NO: 55950 - DNA, 25 bp, Probe Sequence
tgatgtattataggcaggaagtgtt

SEQ ID NO: 55951 - DNA, 25 bp, Probe Sequence
ttgatgtattataggcaggaagtgt

SEQ ID NO: 55952 - DNA, 25 bp, Probe Sequence
ggttgacttctacattgataaggac

SEQ ID NO: 55953 - DNA, 25 bp, Probe Sequence
aggttgacttctacattgataagga

SEQ ID NO: 55954 - DNA, 25 bp, Probe Sequence
gaggttgacttctacattgataagg

SEQ ID NO: 55955 - DNA, 25 bp, Probe Sequence
tgatgatattcacacacattcagga

SEQ ID NO: 55956 - DNA, 25 bp, Probe Sequence
agaccttgatgatattcacacacat

SEQ ID NO: 55957 - DNA, 25 bp, Probe Sequence
gacagagaccttgatgatattcaca

SEQ ID NO: 55958 - DNA, 25 bp, Probe Sequence
agagaccttgatgatattcacacac

SEQ ID NO: 55959 - DNA, 25 bp, Probe Sequence
cagagaccttgatgatattcacaca

SEQ ID NO: 55960 - DNA, 25 bp, Probe Sequence
acagagaccttgatgatattcacac

SEQ ID NO: 55961 - DNA, 25 bp, Probe Sequence
gatattcacacacattcaggaacct

SEQ ID NO: 55962 - DNA, 25 bp, Probe Sequence
ctcagaggttgacttctacattgat

SEQ ID NO: 55963 - DNA, 25 bp, Probe Sequence
atgatattcacacacattcaggaac

SEQ ID NO: 55964 - DNA, 25 bp, Probe Sequence
ttgatgatattcacacacattcagg

SEQ ID NO: 55965 - DNA, 25 bp, Probe Sequence
ccttgatgatattcacacacattca

SEQ ID NO: 55966 - DNA, 25 bp, Probe Sequence
accttgatgatattcacacacattc

SEQ ID NO: 55967 - DNA, 25 bp, Probe Sequence
gaccttgatgatattcacacacatt

SEQ ID NO: 55968 - DNA, 25 bp, Probe Sequence
gagaccttgatgatattcacacaca

SEQ ID NO: 55969 - DNA, 25 bp, Probe Sequence
ggacagagaccttgatgatattcac

SEQ ID NO: 55970 - DNA, 25 bp, Probe Sequence
gttgacttctacattgataaggaca

SEQ ID NO: 55971 - DNA, 25 bp, Probe Sequence
gatgatattcacacacattcaggaa

SEQ ID NO: 55972 - DNA, 25 bp, Probe Sequence
tgatattcacacacattcaggaacc

SEQ ID NO: 55973 - DNA, 25 bp, Probe Sequence
tcagaggttgacttctacattgata

SEQ ID NO: 55974 - DNA, 25 bp, Probe Sequence
tgtggagtgtgattcttaattcttc

SEQ ID NO: 55975 - DNA, 25 bp, Probe Sequence
ataggacattgatgctggataggtt

SEQ ID NO: 55976 - DNA, 25 bp, Probe Sequence
aataggacattgatgctggataggt

SEQ ID NO: 55977 - DNA, 25 bp, Probe Sequence
ttgtggagtgtgattcttaattctt

SEQ ID NO: 55978 - DNA, 25 bp, Probe Sequence
cattgtggagtgtgattcttaattc

SEQ ID NO: 55979 - DNA, 25 bp, Probe Sequence
attgtggagtgtgattcttaattct

SEQ ID NO: 55980 - DNA, 25 bp, Probe Sequence
gtggagtgtgattcttaattcttca

SEQ ID NO: 55981 - DNA, 25 bp, Probe Sequence
taggacattgatgctggataggttg

SEQ ID NO: 55982 - DNA, 25 bp, Probe Sequence
acattgtggagtgtgattcttaatt

SEQ ID NO: 55983 - DNA, 25 bp, Probe Sequence
tggagtgtgattcttaattcttcat

SEQ ID NO: 55984 - DNA, 25 bp, Probe Sequence
acaatcacaattacactgtactacc

SEQ ID NO: 55985 - DNA, 25 bp, Probe Sequence
tacatttctatttcttggtggagca

SEQ ID NO: 55986 - DNA, 25 bp, Probe Sequence
aagagcagtcctaaacaatcacaat

SEQ ID NO: 55987 - DNA, 25 bp, Probe Sequence
acattgatgctggataggttgtctt

SEQ ID NO: 55988 - DNA, 25 bp, Probe Sequence
ttacatttctatttcttggtggagc

SEQ ID NO: 55989 - DNA, 25 bp, Probe Sequence
agaagactgtttattgtgaagcatt

SEQ ID NO: 55990 - DNA, 25 bp, Probe Sequence
aagaagactgtttattgtgaagcat

SEQ ID NO: 55991 - DNA, 25 bp, Probe Sequence
gcagtcctaaacaatcacaattaca

SEQ ID NO: 55992 - DNA, 25 bp, Probe Sequence
actgtttattgtgaagcatttacct

SEQ ID NO: 55993 - DNA, 25 bp, Probe Sequence
agcagtcctaaacaatcacaattac

SEQ ID NO: 55994 - DNA, 25 bp, Probe Sequence
gactgtttattgtgaagcatttacc

SEQ ID NO: 55995 - DNA, 25 bp, Probe Sequence
agagcagtcctaaacaatcacaatt

SEQ ID NO: 55996 - DNA, 25 bp, Probe Sequence
gagcagtcctaaacaatcacaatta

SEQ ID NO: 55997 - DNA, 25 bp, Probe Sequence
ggtgtagaatggcatctttgtttat

SEQ ID NO: 55998 - DNA, 25 bp, Probe Sequence
ctgtcagagatattgtaggtgctaa

SEQ ID NO: 55999 - DNA, 25 bp, Probe Sequence
atcttcaccagtgttctatcttgtt

SEQ ID NO: 56000 - DNA, 25 bp, Probe Sequence
cgtatcttcaccagtgttctatctt

SEQ ID NO: 56001 - DNA, 25 bp, Probe Sequence
tgtcagagatattgtaggtgctaat

SEQ ID NO: 56002 - DNA, 25 bp, Probe Sequence
actgtcagagatattgtaggtgcta

SEQ ID NO: 56003 - DNA, 25 bp, Probe Sequence
tcttcaccagtgttctatcttgttc

SEQ ID NO: 56004 - DNA, 25 bp, Probe Sequence
tatcttcaccagtgttctatcttgt

SEQ ID NO: 56005 - DNA, 25 bp, Probe Sequence
gtatcttcaccagtgttctatcttg

SEQ ID NO: 56006 - DNA, 25 bp, Probe Sequence
cttcaccagtgttctatcttgttcc

SEQ ID NO: 56007 - DNA, 25 bp, Probe Sequence
atgtcattgttccattaccttgaat

SEQ ID NO: 56008 - DNA, 25 bp, Probe Sequence
agatattgtaggtgctaatactgga

SEQ ID NO: 56009 - DNA, 25 bp, Probe Sequence
ccgtatcttcaccagtgttctatct

SEQ ID NO: 56010 - DNA, 25 bp, Probe Sequence
gagatattgtaggtgctaatactgg

SEQ ID NO: 56011 - DNA, 25 bp, Probe Sequence
gattggctcaagtacagtaagttac

SEQ ID NO: 56012 - DNA, 25 bp, Probe Sequence
atgattggctcaagtacagtaagtt

SEQ ID NO: 56013 - DNA, 25 bp, Probe Sequence
atcttatgattggctcaagtacagt

SEQ ID NO: 56014 - DNA, 25 bp, Probe Sequence
tgattggctcaagtacagtaagtta

SEQ ID NO: 56015 - DNA, 25 bp, Probe Sequence
tatgattggctcaagtacagtaagt

SEQ ID NO: 56016 - DNA, 25 bp, Probe Sequence
tatgtcattgttccattaccttgaa

SEQ ID NO: 56017 - DNA, 25 bp, Probe Sequence
ttatgtcattgttccattaccttga

SEQ ID NO: 56018 - DNA, 25 bp, Probe Sequence
tcttatgattggctcaagtacagta

SEQ ID NO: 56019 - DNA, 25 bp, Probe Sequence
ttcactgtcagagatattgtaggtg

SEQ ID NO: 56020 - DNA, 25 bp, Probe Sequence
ttatgattggctcaagtacagtaag

SEQ ID NO: 56021 - DNA, 25 bp, Probe Sequence
cttatgattggctcaagtacagtaa

SEQ ID NO: 56022 - DNA, 25 bp, Probe Sequence
aatccatcataccattacctcatcc

SEQ ID NO: 56023 - DNA, 25 bp, Probe Sequence
atccatcataccattacctcatcct

SEQ ID NO: 56024 - DNA, 25 bp, Probe Sequence
ctgatgaggacgcttatgatatgag

SEQ ID NO: 56025 - DNA, 25 bp, Probe Sequence
catcataccattacctcatcctgtg

SEQ ID NO: 56026 - DNA, 25 bp, Probe Sequence
atgaggacgcttatgatatgaggaa

SEQ ID NO: 56027 - DNA, 25 bp, Probe Sequence
tccatcataccattacctcatcctg

SEQ ID NO: 56028 - DNA, 25 bp, Probe Sequence
ccatcataccattacctcatcctgt

SEQ ID NO: 56029 - DNA, 25 bp, Probe Sequence
gatgaggacgcttatgatatgagga

SEQ ID NO: 56030 - DNA, 25 bp, Probe Sequence
atcataccattacctcatcctgtga

SEQ ID NO: 56031 - DNA, 25 bp, Probe Sequence
tgatgaggacgcttatgatatgagg

SEQ ID NO: 56032 - DNA, 25 bp, Probe Sequence
cagtggttcttaggcagatactcta

SEQ ID NO: 56033 - DNA, 25 bp, Probe Sequence
agtggttcttaggcagatactctag

SEQ ID NO: 56034 - DNA, 25 bp, Probe Sequence
tctcatggttcatagtattcactgt

SEQ ID NO: 56035 - DNA, 25 bp, Probe Sequence
actctcatggttcatagtattcact

SEQ ID NO: 56036 - DNA, 25 bp, Probe Sequence
cactctcatggttcatagtattcac

SEQ ID NO: 56037 - DNA, 25 bp, Probe Sequence
ctctcatggttcatagtattcactg

SEQ ID NO: 56038 - DNA, 25 bp, Probe Sequence
cctgatgaggacgcttatgatatga

SEQ ID NO: 56039 - DNA, 25 bp, Probe Sequence
agaaatccatcataccattacctca

SEQ ID NO: 56040 - DNA, 25 bp, Probe Sequence
ttccagttagcaatatcatacctat

SEQ ID NO: 56041 - DNA, 25 bp, Probe Sequence
ccactctcatggttcatagtattca

SEQ ID NO: 56042 - DNA, 25 bp, Probe Sequence
tgtttccagttagcaatatcatacc

SEQ ID NO: 56043 - DNA, 25 bp, Probe Sequence
gaggacgcttatgatatgaggaaag

SEQ ID NO: 56044 - DNA, 25 bp, Probe Sequence
ctcatggttcatagtattcactgta

SEQ ID NO: 56045 - DNA, 25 bp, Probe Sequence
taaatctcattgtttccagttagca

SEQ ID NO: 56046 - DNA, 25 bp, Probe Sequence
aactggtaaactggtatttcttgga

SEQ ID NO: 56047 - DNA, 25 bp, Probe Sequence
ggtaaactggtatttcttggattgg

SEQ ID NO: 56048 - DNA, 25 bp, Probe Sequence
actggtaaactggtatttcttggat

SEQ ID NO: 56049 - DNA, 25 bp, Probe Sequence
tggtatttcttggattggataatgc

SEQ ID NO: 56050 - DNA, 25 bp, Probe Sequence
aaactggtaaactggtatttcttgg

SEQ ID NO: 56051 - DNA, 25 bp, Probe Sequence
tggtaaactggtatttcttggattg

SEQ ID NO: 56052 - DNA, 25 bp, Probe Sequence
gtaaactggtatttcttggattgga

SEQ ID NO: 56053 - DNA, 25 bp, Probe Sequence
ctggtaaactggtatttcttggatt

SEQ ID NO: 56054 - DNA, 25 bp, Probe Sequence
ttgattggatttacagtggtttcag

SEQ ID NO: 56055 - DNA, 25 bp, Probe Sequence
tttgattggatttacagtggtttca

SEQ ID NO: 56056 - DNA, 25 bp, Probe Sequence
attggatttacagtggtttcagcag

SEQ ID NO: 56057 - DNA, 25 bp, Probe Sequence
gattggatttacagtggtttcagca

SEQ ID NO: 56058 - DNA, 25 bp, Probe Sequence
atttgattggatttacagtggtttc

SEQ ID NO: 56059 - DNA, 25 bp, Probe Sequence
aactggtatttcttggattggataa

SEQ ID NO: 56060 - DNA, 25 bp, Probe Sequence
aaactggtatttcttggattggata

SEQ ID NO: 56061 - DNA, 25 bp, Probe Sequence
taaactggtatttcttggattggat

SEQ ID NO: 56062 - DNA, 25 bp, Probe Sequence
cagaccctatcagatttggatatgt

SEQ ID NO: 56063 - DNA, 25 bp, Probe Sequence
aaacaacattgctacacatgctaaa

SEQ ID NO: 56064 - DNA, 25 bp, Probe Sequence
gcagaccctatcagatttggatatg

SEQ ID NO: 56065 - DNA, 25 bp, Probe Sequence
actggtatttcttggattggataat

SEQ ID NO: 56066 - DNA, 25 bp, Probe Sequence
agaccctatcagatttggatatgtc

SEQ ID NO: 56067 - DNA, 25 bp, Probe Sequence
ctggtatttcttggattggataatg

SEQ ID NO: 56068 - DNA, 25 bp, Probe Sequence
tgattggatttacagtggtttcagc

SEQ ID NO: 56069 - DNA, 25 bp, Probe Sequence
catatttgattggatttacagtggt

SEQ ID NO: 56070 - DNA, 25 bp, Probe Sequence
ctactgctctatcctgtgtaactac

SEQ ID NO: 56071 - DNA, 25 bp, Probe Sequence
cctactgctctatcctgtgtaacta

SEQ ID NO: 56072 - DNA, 25 bp, Probe Sequence
gtcctactgctctatcctgtgtaac

SEQ ID NO: 56073 - DNA, 25 bp, Probe Sequence
tcctactgctctatcctgtgtaact

SEQ ID NO: 56074 - DNA, 25 bp, Probe Sequence
tgtcctactgctctatcctgtgtaa

SEQ ID NO: 56075 - DNA, 25 bp, Probe Sequence
ctgtcctactgctctatcctgtgta

SEQ ID NO: 56076 - DNA, 25 bp, Probe Sequence
taataaagacaaagccaccctgaaa

SEQ ID NO: 56077 - DNA, 25 bp, Probe Sequence
ctaataaagacaaagccaccctgaa

SEQ ID NO: 56078 - DNA, 25 bp, Probe Sequence
ttaatcctaaaggtggctgtaatca

SEQ ID NO: 56079 - DNA, 25 bp, Probe Sequence
taatcctaaaggtggctgtaatcat

SEQ ID NO: 56080 - DNA, 25 bp, Probe Sequence
tgtatttaatcctaaaggtggctgt

SEQ ID NO: 56081 - DNA, 25 bp, Probe Sequence
tgtgtatttaatcctaaaggtggct

SEQ ID NO: 56082 - DNA, 25 bp, Probe Sequence
gtgtatttaatcctaaaggtggctg

SEQ ID NO: 56083 - DNA, 25 bp, Probe Sequence
gactaataaagacaaagccaccctg

SEQ ID NO: 56084 - DNA, 25 bp, Probe Sequence
ctgactaataaagacaaagccaccc

SEQ ID NO: 56085 - DNA, 25 bp, Probe Sequence
cctgagtgtattgcatctcttgatt

SEQ ID NO: 56086 - DNA, 25 bp, Probe Sequence
cataatgtcacagttgcctcaaatg

SEQ ID NO: 56087 - DNA, 25 bp, Probe Sequence
ttgtgtatttaatcctaaaggtggc

SEQ ID NO: 56088 - DNA, 25 bp, Probe Sequence
actaataaagacaaagccaccctga

SEQ ID NO: 56089 - DNA, 25 bp, Probe Sequence
tgactaataaagacaaagccaccct

SEQ ID NO: 56090 - DNA, 25 bp, Probe Sequence
ataatgtcacagttgcctcaaatga

SEQ ID NO: 56091 - DNA, 25 bp, Probe Sequence
tttaatcctaaaggtggctgtaatc

SEQ ID NO: 56092 - DNA, 25 bp, Probe Sequence
aatcctgctgtcctactgctctatc

SEQ ID NO: 56093 - DNA, 25 bp, Probe Sequence
aatcctaaaggtggctgtaatcatg

SEQ ID NO: 56094 - DNA, 25 bp, Probe Sequence
tgactcaactctggaagatgaagaa

SEQ ID NO: 56095 - DNA, 25 bp, Probe Sequence
gactatcttgactcaactctggaag

SEQ ID NO: 56096 - DNA, 25 bp, Probe Sequence
agactatcttgactcaactctggaa

SEQ ID NO: 56097 - DNA, 25 bp, Probe Sequence
atattcagcattcctcattacagaa

SEQ ID NO: 56098 - DNA, 25 bp, Probe Sequence
ttgttgttgttgttgttctagccat

SEQ ID NO: 56099 - DNA, 25 bp, Probe Sequence
cttgactcaactctggaagatgaag

SEQ ID NO: 56100 - DNA, 25 bp, Probe Sequence
ttagactctgtgctgtcatactgaa

SEQ ID NO: 56101 - DNA, 25 bp, Probe Sequence
ttgactcaactctggaagatgaaga

SEQ ID NO: 56102 - DNA, 25 bp, Probe Sequence
tatattcagcattcctcattacaga

SEQ ID NO: 56103 - DNA, 25 bp, Probe Sequence
tagactctgtgctgtcatactgaac

SEQ ID NO: 56104 - DNA, 25 bp, Probe Sequence
tgcagagtacctatcctatgtagaa

SEQ ID NO: 56105 - DNA, 25 bp, Probe Sequence
ttgcagagtacctatcctatgtaga

SEQ ID NO: 56106 - DNA, 25 bp, Probe Sequence
aaataggaagtcagcaacaaagaaa

SEQ ID NO: 56107 - DNA, 25 bp, Probe Sequence
ctcaaatcgtcctttaagtcttcct

SEQ ID NO: 56108 - DNA, 25 bp, Probe Sequence
ccgtcaatgagatactggaagacat

SEQ ID NO: 56109 - DNA, 25 bp, Probe Sequence
attgcagagtacctatcctatgtag

SEQ ID NO: 56110 - DNA, 25 bp, Probe Sequence
tcagcattcctcattacagaaatct

SEQ ID NO: 56111 - DNA, 25 bp, Probe Sequence
caaatcgtcctttaagtcttccttc

SEQ ID NO: 56112 - DNA, 25 bp, Probe Sequence
tcaaatcgtcctttaagtcttcctt

SEQ ID NO: 56113 - DNA, 25 bp, Probe Sequence
ttcagcattcctcattacagaaatc

SEQ ID NO: 56114 - DNA, 25 bp, Probe Sequence
ttgttgttgttgttctagccatgtg

SEQ ID NO: 56115 - DNA, 25 bp, Probe Sequence
gttgttgttgttgttctagccatgt

SEQ ID NO: 56116 - DNA, 25 bp, Probe Sequence
tgttgttgttgttgttctagccatg

SEQ ID NO: 56117 - DNA, 25 bp, Probe Sequence
cagcattcctcattacagaaatctt

SEQ ID NO: 56118 - DNA, 25 bp, Probe Sequence
tatgaggatgagtatgtgctggaag

SEQ ID NO: 56119 - DNA, 25 bp, Probe Sequence
ctatgaggatgagtatgtgctggaa

SEQ ID NO: 56120 - DNA, 25 bp, Probe Sequence
gacgaaggctatgaggatgagtatg

SEQ ID NO: 56121 - DNA, 25 bp, Probe Sequence
cgaaggctatgaggatgagtatgtg

SEQ ID NO: 56122 - DNA, 25 bp, Probe Sequence
tgacgaaggctatgaggatgagtat

SEQ ID NO: 56123 - DNA, 25 bp, Probe Sequence
atgacgaaggctatgaggatgagta

SEQ ID NO: 56124 - DNA, 25 bp, Probe Sequence
gaaggctatgaggatgagtatgtgc

SEQ ID NO: 56125 - DNA, 25 bp, Probe Sequence
acgaaggctatgaggatgagtatgt

SEQ ID NO: 56126 - DNA, 25 bp, Probe Sequence
gctatatcctaaatggtctgactgt

SEQ ID NO: 56127 - DNA, 25 bp, Probe Sequence
ggctatatcctaaatggtctgactg

SEQ ID NO: 56128 - DNA, 25 bp, Probe Sequence
gaggatgagtatgtgctggaagatc

SEQ ID NO: 56129 - DNA, 25 bp, Probe Sequence
tgaggatgagtatgtgctggaagat

SEQ ID NO: 56130 - DNA, 25 bp, Probe Sequence
atgaggatgagtatgtgctggaaga

SEQ ID NO: 56131 - DNA, 25 bp, Probe Sequence
agtagacatcatcttggcatctgtg

SEQ ID NO: 56132 - DNA, 25 bp, Probe Sequence
atgatgaagttcactgtcaaggact

SEQ ID NO: 56133 - DNA, 25 bp, Probe Sequence
aaggctatgaggatgagtatgtgct

SEQ ID NO: 56134 - DNA, 25 bp, Probe Sequence
cagtagacatcatcttggcatctgt

SEQ ID NO: 56135 - DNA, 25 bp, Probe Sequence
catgatgaagttcactgtcaaggac

SEQ ID NO: 56136 - DNA, 25 bp, Probe Sequence
tatatcctaaatggtctgactgtgt

SEQ ID NO: 56137 - DNA, 25 bp, Probe Sequence
gggatgaatttgagaaggaggaaac

SEQ ID NO: 56138 - DNA, 25 bp, Probe Sequence
ctatatcctaaatggtctgactgtg

SEQ ID NO: 56139 - DNA, 25 bp, Probe Sequence
atatcctaaatggtctgactgtgtc

SEQ ID NO: 56140 - DNA, 25 bp, Probe Sequence
ggatgaatttgagaaggaggaaacg

SEQ ID NO: 56141 - DNA, 25 bp, Probe Sequence
aacattctcaactcctcttgaatct

SEQ ID NO: 56142 - DNA, 25 bp, Probe Sequence
taggctatatctggaggatgatgat

SEQ ID NO: 56143 - DNA, 25 bp, Probe Sequence
agaagacattattagagcaggaagt

SEQ ID NO: 56144 - DNA, 25 bp, Probe Sequence
ctggagacttacttgaagattgcta

SEQ ID NO: 56145 - DNA, 25 bp, Probe Sequence
cacatcttcctaacttgcctgatag

SEQ ID NO: 56146 - DNA, 25 bp, Probe Sequence
ctaggctatatctggaggatgatga

SEQ ID NO: 56147 - DNA, 25 bp, Probe Sequence
aactggagacttacttgaagattgc

SEQ ID NO: 56148 - DNA, 25 bp, Probe Sequence
gacttacttgaagattgctaggcta

SEQ ID NO: 56149 - DNA, 25 bp, Probe Sequence
tggagacttacttgaagattgctag

SEQ ID NO: 56150 - DNA, 25 bp, Probe Sequence
acacatcttcctaacttgcctgata

SEQ ID NO: 56151 - DNA, 25 bp, Probe Sequence
tattagagcaggaagtacaagcatt

SEQ ID NO: 56152 - DNA, 25 bp, Probe Sequence
ttattagagcaggaagtacaagcat

SEQ ID NO: 56153 - DNA, 25 bp, Probe Sequence
attattagagcaggaagtacaagca

SEQ ID NO: 56154 - DNA, 25 bp, Probe Sequence
acttacttgaagattgctaggctat

SEQ ID NO: 56155 - DNA, 25 bp, Probe Sequence
aagaagacattattagagcaggaag

SEQ ID NO: 56156 - DNA, 25 bp, Probe Sequence
tcagaatgaatcaaccaatgaacaa

SEQ ID NO: 56157 - DNA, 25 bp, Probe Sequence
cattattagagcaggaagtacaagc

SEQ ID NO: 56158 - DNA, 25 bp, Probe Sequence
ggagacttacttgaagattgctagg

SEQ ID NO: 56159 - DNA, 25 bp, Probe Sequence
gattgctaggctatatctggaggat

SEQ ID NO: 56160 - DNA, 25 bp, Probe Sequence
aggctatatctggaggatgatgatc

SEQ ID NO: 56161 - DNA, 25 bp, Probe Sequence
actggagacttacttgaagattgct

SEQ ID NO: 56162 - DNA, 25 bp, Probe Sequence
agacattattagagcaggaagtaca

SEQ ID NO: 56163 - DNA, 25 bp, Probe Sequence
attgctaggctatatctggaggatg

SEQ ID NO: 56164 - DNA, 25 bp, Probe Sequence
gagacttacttgaagattgctaggc

SEQ ID NO: 56165 - DNA, 25 bp, Probe Sequence
cagaatgaatcaaccaatgaacaat

SEQ ID NO: 56166 - DNA, 25 bp, Probe Sequence
tatgcctcactggttgttattctta

SEQ ID NO: 56167 - DNA, 25 bp, Probe Sequence
atatgcctcactggttgttattctt

SEQ ID NO: 56168 - DNA, 25 bp, Probe Sequence
tatatgcctcactggttgttattct

SEQ ID NO: 56169 - DNA, 25 bp, Probe Sequence
atgcctcactggttgttattcttag

SEQ ID NO: 56170 - DNA, 25 bp, Probe Sequence
ttatatgcctcactggttgttattc

SEQ ID NO: 56171 - DNA, 25 bp, Probe Sequence
ttgcttcattgcttatcattaggat

SEQ ID NO: 56172 - DNA, 25 bp, Probe Sequence
ttaatgacctcttggctcacataag

SEQ ID NO: 56173 - DNA, 25 bp, Probe Sequence
ctcactggttgttattcttaggtta

SEQ ID NO: 56174 - DNA, 25 bp, Probe Sequence
cctcactggttgttattcttaggtt

SEQ ID NO: 56175 - DNA, 25 bp, Probe Sequence
tcactggttgttattcttaggttat

SEQ ID NO: 56176 - DNA, 25 bp, Probe Sequence
ctggttgttattcttaggttattcc

SEQ ID NO: 56177 - DNA, 25 bp, Probe Sequence
tgcttcattgcttatcattaggata

SEQ ID NO: 56178 - DNA, 25 bp, Probe Sequence
gtatttgttgcttccctttatctgg

SEQ ID NO: 56179 - DNA, 25 bp, Probe Sequence
aggttattcccacacttgactttat

SEQ ID NO: 56180 - DNA, 25 bp, Probe Sequence
ttaggttattcccacacttgacttt

SEQ ID NO: 56181 - DNA, 25 bp, Probe Sequence
ttaggatagggtaagtgaagtttgc

SEQ ID NO: 56182 - DNA, 25 bp, Probe Sequence
aacagttaagtccattctctggtac

SEQ ID NO: 56183 - DNA, 25 bp, Probe Sequence
ggttattcccacacttgactttatc

SEQ ID NO: 56184 - DNA, 25 bp, Probe Sequence
cttaggttattcccacacttgactt

SEQ ID NO: 56185 - DNA, 25 bp, Probe Sequence
ttcttaggttattcccacacttgac

SEQ ID NO: 56186 - DNA, 25 bp, Probe Sequence
attcttaggttattcccacacttga

SEQ ID NO: 56187 - DNA, 25 bp, Probe Sequence
tgtatttgttgcttccctttatctg

SEQ ID NO: 56188 - DNA, 25 bp, Probe Sequence
gttaagtccattctctggtactagc

SEQ ID NO: 56189 - DNA, 25 bp, Probe Sequence
taggttattcccacacttgacttta

SEQ ID NO: 56190 - DNA, 25 bp, Probe Sequence
agttaaacctctcctgtcattccta

SEQ ID NO: 56191 - DNA, 25 bp, Probe Sequence
gaagaagttcaacctggagagatgg

SEQ ID NO: 56192 - DNA, 25 bp, Probe Sequence
gttaaacctctcctgtcattcctag

SEQ ID NO: 56193 - DNA, 25 bp, Probe Sequence
aagaagttcaacctggagagatgga

SEQ ID NO: 56194 - DNA, 25 bp, Probe Sequence
agaagttcaacctggagagatggaa

SEQ ID NO: 56195 - DNA, 25 bp, Probe Sequence
atcagttaaacctctcctgtcattc

SEQ ID NO: 56196 - DNA, 25 bp, Probe Sequence
catcagttaaacctctcctgtcatt

SEQ ID NO: 56197 - DNA, 25 bp, Probe Sequence
taatgaagaagttcaacctggagag

SEQ ID NO: 56198 - DNA, 25 bp, Probe Sequence
ctaatgaagaagttcaacctggaga

SEQ ID NO: 56199 - DNA, 25 bp, Probe Sequence
ttaaacctctcctgtcattcctagc

SEQ ID NO: 56200 - DNA, 25 bp, Probe Sequence
ttgcctctatgagatcaaacagttt

SEQ ID NO: 56201 - DNA, 25 bp, Probe Sequence
gcctctatgagatcaaacagtttct

SEQ ID NO: 56202 - DNA, 25 bp, Probe Sequence
tgcctctatgagatcaaacagtttc

SEQ ID NO: 56203 - DNA, 25 bp, Probe Sequence
cttgcctctatgagatcaaacagtt

SEQ ID NO: 56204 - DNA, 25 bp, Probe Sequence
cctaatgaagaagttcaacctggag

SEQ ID NO: 56205 - DNA, 25 bp, Probe Sequence
tgatagtgagggtataaagtgtaac

SEQ ID NO: 56206 - DNA, 25 bp, Probe Sequence
agtgtaaccatcagttaaacctctc

SEQ ID NO: 56207 - DNA, 25 bp, Probe Sequence
aagtgtaaccatcagttaaacctct

SEQ ID NO: 56208 - DNA, 25 bp, Probe Sequence
tatgagatcaaacagtttctggagt

SEQ ID NO: 56209 - DNA, 25 bp, Probe Sequence
tctatgagatcaaacagtttctgga

SEQ ID NO: 56210 - DNA, 25 bp, Probe Sequence
gtaaccatcagttaaacctctcctg

SEQ ID NO: 56211 - DNA, 25 bp, Probe Sequence
aaagtgtaaccatcagttaaacctc

SEQ ID NO: 56212 - DNA, 25 bp, Probe Sequence
ctatgagatcaaacagtttctggag

SEQ ID NO: 56213 - DNA, 25 bp, Probe Sequence
ctctatgagatcaaacagtttctgg

SEQ ID NO: 56214 - DNA, 25 bp, Probe Sequence
accaagaagaactaagcatgataac

SEQ ID NO: 56215 - DNA, 25 bp, Probe Sequence
ccaagaagaactaagcatgataact

SEQ ID NO: 56216 - DNA, 25 bp, Probe Sequence
aaccaagaagaactaagcatgataa

SEQ ID NO: 56217 - DNA, 25 bp, Probe Sequence
caagaagaactaagcatgataactg

SEQ ID NO: 56218 - DNA, 25 bp, Probe Sequence
gcccactaaactatgctttcctata

SEQ ID NO: 56219 - DNA, 25 bp, Probe Sequence
catgataactgcattgtaacttggc

SEQ ID NO: 56220 - DNA, 25 bp, Probe Sequence
tttcagcaccagtagatttgtatta

SEQ ID NO: 56221 - DNA, 25 bp, Probe Sequence
tcagcaccagtagatttgtattaaa

SEQ ID NO: 56222 - DNA, 25 bp, Probe Sequence
ttcagcaccagtagatttgtattaa

SEQ ID NO: 56223 - DNA, 25 bp, Probe Sequence
cccactaaactatgctttcctataa

SEQ ID NO: 56224 - DNA, 25 bp, Probe Sequence
tgtaatctcagaataaaggttgtca

SEQ ID NO: 56225 - DNA, 25 bp, Probe Sequence
aagaagaactaagcatgataactgc

SEQ ID NO: 56226 - DNA, 25 bp, Probe Sequence
aaaccaagaagaactaagcatgata

SEQ ID NO: 56227 - DNA, 25 bp, Probe Sequence
atgataactgcattgtaacttggcc

SEQ ID NO: 56228 - DNA, 25 bp, Probe Sequence
actaaactatgctttcctataatgc

SEQ ID NO: 56229 - DNA, 25 bp, Probe Sequence
agcatgataactgcattgtaacttg

SEQ ID NO: 56230 - DNA, 25 bp, Probe Sequence
gaactaagcatgataactgcattgt

SEQ ID NO: 56231 - DNA, 25 bp, Probe Sequence
aatctcagaataaaggttgtcattt

SEQ ID NO: 56232 - DNA, 25 bp, Probe Sequence
gtaatctcagaataaaggttgtcat

SEQ ID NO: 56233 - DNA, 25 bp, Probe Sequence
atgtaatctcagaataaaggttgtc

SEQ ID NO: 56234 - DNA, 25 bp, Probe Sequence
agaactaagcatgataactgcattg

SEQ ID NO: 56235 - DNA, 25 bp, Probe Sequence
agaagaactaagcatgataactgca

SEQ ID NO: 56236 - DNA, 25 bp, Probe Sequence
aagcatgataactgcattgtaactt

SEQ ID NO: 56237 - DNA, 25 bp, Probe Sequence
gaagaactaagcatgataactgcat

SEQ ID NO: 56238 - DNA, 25 bp, Probe Sequence
accaagaagaactaagcatgataac

SEQ ID NO: 56239 - DNA, 25 bp, Probe Sequence
ccaagaagaactaagcatgataact

SEQ ID NO: 56240 - DNA, 25 bp, Probe Sequence
aaccaagaagaactaagcatgataa

SEQ ID NO: 56241 - DNA, 25 bp, Probe Sequence
caagaagaactaagcatgataactg

SEQ ID NO: 56242 - DNA, 25 bp, Probe Sequence
gcccactaaactatgctttcctata

SEQ ID NO: 56243 - DNA, 25 bp, Probe Sequence
catgataactgcattgtaacttggc

SEQ ID NO: 56244 - DNA, 25 bp, Probe Sequence
tttcagcaccagtagatttgtatta

SEQ ID NO: 56245 - DNA, 25 bp, Probe Sequence
tcagcaccagtagatttgtattaaa

SEQ ID NO: 56246 - DNA, 25 bp, Probe Sequence
ttcagcaccagtagatttgtattaa

SEQ ID NO: 56247 - DNA, 25 bp, Probe Sequence
cccactaaactatgctttcctataa

SEQ ID NO: 56248 - DNA, 25 bp, Probe Sequence
tgtaatctcagaataaaggttgtca

SEQ ID NO: 56249 - DNA, 25 bp, Probe Sequence
aagaagaactaagcatgataactgc

SEQ ID NO: 56250 - DNA, 25 bp, Probe Sequence
aaaccaagaagaactaagcatgata

SEQ ID NO: 56251 - DNA, 25 bp, Probe Sequence
atgataactgcattgtaacttggcc

SEQ ID NO: 56252 - DNA, 25 bp, Probe Sequence
actaaactatgctttcctataatgc

SEQ ID NO: 56253 - DNA, 25 bp, Probe Sequence
agcatgataactgcattgtaacttg

SEQ ID NO: 56254 - DNA, 25 bp, Probe Sequence
gaactaagcatgataactgcattgt

SEQ ID NO: 56255 - DNA, 25 bp, Probe Sequence
aatctcagaataaaggttgtcattt

SEQ ID NO: 56256 - DNA, 25 bp, Probe Sequence
gtaatctcagaataaaggttgtcat

SEQ ID NO: 56257 - DNA, 25 bp, Probe Sequence
atgtaatctcagaataaaggttgtc

SEQ ID NO: 56258 - DNA, 25 bp, Probe Sequence
agaactaagcatgataactgcattg

SEQ ID NO: 56259 - DNA, 25 bp, Probe Sequence
agaagaactaagcatgataactgca

SEQ ID NO: 56260 - DNA, 25 bp, Probe Sequence
aagcatgataactgcattgtaactt

SEQ ID NO: 56261 - DNA, 25 bp, Probe Sequence
gaagaactaagcatgataactgcat

SEQ ID NO: 56262 - DNA, 25 bp, Probe Sequence
ccagtgataatagagtgacatcctt

SEQ ID NO: 56263 - DNA, 25 bp, Probe Sequence
cagtgataatagagtgacatccttc

SEQ ID NO: 56264 - DNA, 25 bp, Probe Sequence
taatagagtgacatccttcagagac

SEQ ID NO: 56265 - DNA, 25 bp, Probe Sequence
gatgaagatgaggaggaagaggaag

SEQ ID NO: 56266 - DNA, 25 bp, Probe Sequence
gacatccttcagagacctcattcat

SEQ ID NO: 56267 - DNA, 25 bp, Probe Sequence
aatagagtgacatccttcagagacc

SEQ ID NO: 56268 - DNA, 25 bp, Probe Sequence
agtgataatagagtgacatccttca

SEQ ID NO: 56269 - DNA, 25 bp, Probe Sequence
ccagccaagatgttcatgtagtatt

SEQ ID NO: 56270 - DNA, 25 bp, Probe Sequence
gtgataatagagtgacatccttcag

SEQ ID NO: 56271 - DNA, 25 bp, Probe Sequence
caagatgaagatgaggaggaagagg

SEQ ID NO: 56272 - DNA, 25 bp, Probe Sequence
ccaagatgaagatgaggaggaagag

SEQ ID NO: 56273 - DNA, 25 bp, Probe Sequence
tgataatagagtgacatccttcaga

SEQ ID NO: 56274 - DNA, 25 bp, Probe Sequence
cagccaagatgttcatgtagtattg

SEQ ID NO: 56275 - DNA, 25 bp, Probe Sequence
agatgaagatgaggaggaagaggaa

SEQ ID NO: 56276 - DNA, 25 bp, Probe Sequence
agccaagatgttcatgtagtattga

SEQ ID NO: 56277 - DNA, 25 bp, Probe Sequence
ataatagagtgacatccttcagaga

SEQ ID NO: 56278 - DNA, 25 bp, Probe Sequence
tccagccaagatgttcatgtagtat

SEQ ID NO: 56279 - DNA, 25 bp, Probe Sequence
gaccaagatgaagatgaggaggaag

SEQ ID NO: 56280 - DNA, 25 bp, Probe Sequence
atagagtgacatccttcagagacct

SEQ ID NO: 56281 - DNA, 25 bp, Probe Sequence
gataatagagtgacatccttcagag

SEQ ID NO: 56282 - DNA, 25 bp, Probe Sequence
attcagcctggataatggagaactc

SEQ ID NO: 56283 - DNA, 25 bp, Probe Sequence
gattcagcctggataatggagaact

SEQ ID NO: 56284 - DNA, 25 bp, Probe Sequence
gaagagtggattcagcctggataat

SEQ ID NO: 56285 - DNA, 25 bp, Probe Sequence
gataatggagaactcagaagctacc

SEQ ID NO: 56286 - DNA, 25 bp, Probe Sequence
acatgacctctccctgctttgtaaa

SEQ ID NO: 56287 - DNA, 25 bp, Probe Sequence
aacatgacctctccctgctttgtaa

SEQ ID NO: 56288 - DNA, 25 bp, Probe Sequence
ctagtgagggactgtgttgactgac

SEQ ID NO: 56289 - DNA, 25 bp, Probe Sequence
catgacctctccctgctttgtaaaa

SEQ ID NO: 56290 - DNA, 25 bp, Probe Sequence
caacatgacctctccctgctttgta

SEQ ID NO: 56291 - DNA, 25 bp, Probe Sequence
ctcttcctctctgtaatctaagtgc

SEQ ID NO: 56292 - DNA, 25 bp, Probe Sequence
cctcttcctctctgtaatctaagtg

SEQ ID NO: 56293 - DNA, 25 bp, Probe Sequence
ttcctctctgtaatctaagtgcatt

SEQ ID NO: 56294 - DNA, 25 bp, Probe Sequence
cttcctctctgtaatctaagtgcat

SEQ ID NO: 56295 - DNA, 25 bp, Probe Sequence
tcttcctctctgtaatctaagtgca

SEQ ID NO: 56296 - DNA, 25 bp, Probe Sequence
gctgaccagtagagaatttccttta

SEQ ID NO: 56297 - DNA, 25 bp, Probe Sequence
ccctcttcctctctgtaatctaagt

SEQ ID NO: 56298 - DNA, 25 bp, Probe Sequence
ctcacttagatgtcgtttccttctt

SEQ ID NO: 56299 - DNA, 25 bp, Probe Sequence
tcacttagatgtcgtttccttcttg

SEQ ID NO: 56300 - DNA, 25 bp, Probe Sequence
ctgaccagtagagaatttcctttac

SEQ ID NO: 56301 - DNA, 25 bp, Probe Sequence
tcctctctgtaatctaagtgcatta

SEQ ID NO: 56302 - DNA, 25 bp, Probe Sequence
actcacttagatgtcgtttccttct

SEQ ID NO: 56303 - DNA, 25 bp, Probe Sequence
cctctctgtaatctaagtgcattaa

SEQ ID NO: 56304 - DNA, 25 bp, Probe Sequence
gactcacttagatgtcgtttccttc

SEQ ID NO: 56305 - DNA, 25 bp, Probe Sequence
cacttagatgtcgtttccttcttgc

SEQ ID NO: 56306 - DNA, 25 bp, Probe Sequence
tgactcacttagatgtcgtttcctt

SEQ ID NO: 56307 - DNA, 25 bp, Probe Sequence
ggctgaccagtagagaatttccttt

SEQ ID NO: 56308 - DNA, 25 bp, Probe Sequence
tgaccagtagagaatttcctttact

SEQ ID NO: 56309 - DNA, 25 bp, Probe Sequence
acttagatgtcgtttccttcttgcc

SEQ ID NO: 56310 - DNA, 25 bp, Probe Sequence
gtatctttctcttccaagggcagtg

SEQ ID NO: 56311 - DNA, 25 bp, Probe Sequence
cccctcttcctctctgtaatctaag

SEQ ID NO: 56312 - DNA, 25 bp, Probe Sequence
agcctgggacttttgtaagaatttt

SEQ ID NO: 56313 - DNA, 25 bp, Probe Sequence
gtgactcacttagatgtcgtttcct

SEQ ID NO: 56314 - DNA, 25 bp, Probe Sequence
tacaagtacctgaatgctgcgacaa

SEQ ID NO: 56315 - DNA, 25 bp, Probe Sequence
gaaactgtcttgggacctgatctac

SEQ ID NO: 56316 - DNA, 25 bp, Probe Sequence
agaaactgtcttgggacctgatcta

SEQ ID NO: 56317 - DNA, 25 bp, Probe Sequence
cagagaaactgtcttgggacctgat

SEQ ID NO: 56318 - DNA, 25 bp, Probe Sequence
aaactgtcttgggacctgatctacc

SEQ ID NO: 56319 - DNA, 25 bp, Probe Sequence
gagaaactgtcttgggacctgatct

SEQ ID NO: 56320 - DNA, 25 bp, Probe Sequence
agagaaactgtcttgggacctgatc

SEQ ID NO: 56321 - DNA, 25 bp, Probe Sequence
ctgtcttgggacctgatctaccttg

SEQ ID NO: 56322 - DNA, 25 bp, Probe Sequence
gacctgatctaccttggacggaaac

SEQ ID NO: 56323 - DNA, 25 bp, Probe Sequence
gatgtggaggcagagaaactgtctt

SEQ ID NO: 56324 - DNA, 25 bp, Probe Sequence
actgtcttgggacctgatctacctt

SEQ ID NO: 56325 - DNA, 25 bp, Probe Sequence
aactgtcttgggacctgatctacct

SEQ ID NO: 56326 - DNA, 25 bp, Probe Sequence
cctgatctaccttggacggaaacag

SEQ ID NO: 56327 - DNA, 25 bp, Probe Sequence
atgtggaggcagagaaactgtcttg

SEQ ID NO: 56328 - DNA, 25 bp, Probe Sequence
tcttgggacctgatctaccttggac

SEQ ID NO: 56329 - DNA, 25 bp, Probe Sequence
ctgatctaccttggacggaaacagg

SEQ ID NO: 56330 - DNA, 25 bp, Probe Sequence
gtcttgggacctgatctaccttgga

SEQ ID NO: 56331 - DNA, 25 bp, Probe Sequence
gatctaccttggacggaaacaggtg

SEQ ID NO: 56332 - DNA, 25 bp, Probe Sequence
gaaacaggtgaaccctgagaaggag

SEQ ID NO: 56333 - DNA, 25 bp, Probe Sequence
aaacaggtgaaccctgagaaggaga

SEQ ID NO: 56334 - DNA, 25 bp, Probe Sequence
gtggacagtgctgaaccttatatat

SEQ ID NO: 56335 - DNA, 25 bp, Probe Sequence
tagagaaggctactaagtgactcat

SEQ ID NO: 56336 - DNA, 25 bp, Probe Sequence
atagagaaggctactaagtgactca

SEQ ID NO: 56337 - DNA, 25 bp, Probe Sequence
aggcacagtaagagattaacaataa

SEQ ID NO: 56338 - DNA, 25 bp, Probe Sequence
ttaggcacagtaagagattaacaat

SEQ ID NO: 56339 - DNA, 25 bp, Probe Sequence
attaggcacagtaagagattaacaa

SEQ ID NO: 56340 - DNA, 25 bp, Probe Sequence
ttatagagaaggctactaagtgact

SEQ ID NO: 56341 - DNA, 25 bp, Probe Sequence
aattaggcacagtaagagattaaca

SEQ ID NO: 56342 - DNA, 25 bp, Probe Sequence
tatagagaaggctactaagtgactc

SEQ ID NO: 56343 - DNA, 25 bp, Probe Sequence
agagaaggctactaagtgactcatg

SEQ ID NO: 56344 - DNA, 25 bp, Probe Sequence
atggataagggaggactactacaaa

SEQ ID NO: 56345 - DNA, 25 bp, Probe Sequence
taggcacagtaagagattaacaata

SEQ ID NO: 56346 - DNA, 25 bp, Probe Sequence
attatagagaaggctactaagtgac

SEQ ID NO: 56347 - DNA, 25 bp, Probe Sequence
tgattatagagaaggctactaagtg

SEQ ID NO: 56348 - DNA, 25 bp, Probe Sequence
ggcacagtaagagattaacaataat

SEQ ID NO: 56349 - DNA, 25 bp, Probe Sequence
tggacagtgctgaaccttatatata

SEQ ID NO: 56350 - DNA, 25 bp, Probe Sequence
actgattatagagaaggctactaag

SEQ ID NO: 56351 - DNA, 25 bp, Probe Sequence
gagaaggctactaagtgactcatgg

SEQ ID NO: 56352 - DNA, 25 bp, Probe Sequence
gattatagagaaggctactaagtga

SEQ ID NO: 56353 - DNA, 25 bp, Probe Sequence
ctgattatagagaaggctactaagt

SEQ ID NO: 56354 - DNA, 25 bp, Probe Sequence
agtcaaactgattatagagaaggct

SEQ ID NO: 56355 - DNA, 25 bp, Probe Sequence
ggtggacagtgctgaaccttatata

SEQ ID NO: 56356 - DNA, 25 bp, Probe Sequence
caagattccatcccactactcagaa

SEQ ID NO: 56357 - DNA, 25 bp, Probe Sequence
catggataagggaggactactacaa

SEQ ID NO: 56358 - DNA, 25 bp, Probe Sequence
ttaagaattggagacactgtgactt

SEQ ID NO: 56359 - DNA, 25 bp, Probe Sequence
cactacagttcagacaatacaacaa

SEQ ID NO: 56360 - DNA, 25 bp, Probe Sequence
aggatgtctggtgtgtgtgtaatat

SEQ ID NO: 56361 - DNA, 25 bp, Probe Sequence
taagaattggagacactgtgacttg

SEQ ID NO: 56362 - DNA, 25 bp, Probe Sequence
actacagttcagacaatacaacaag

SEQ ID NO: 56363 - DNA, 25 bp, Probe Sequence
tacagttcagacaatacaacaagag

SEQ ID NO: 56364 - DNA, 25 bp, Probe Sequence
ctacagttcagacaatacaacaaga

SEQ ID NO: 56365 - DNA, 25 bp, Probe Sequence
acacaactacaactactaagtctga

SEQ ID NO: 56366 - DNA, 25 bp, Probe Sequence
gcactacagttcagacaatacaaca

SEQ ID NO: 56367 - DNA, 25 bp, Probe Sequence
acagttcagacaatacaacaagagc

SEQ ID NO: 56368 - DNA, 25 bp, Probe Sequence
ctggaattgctctggttatgatgac

SEQ ID NO: 56369 - DNA, 25 bp, Probe Sequence
cgatgtcaagataacacaactacaa

SEQ ID NO: 56370 - DNA, 25 bp, Probe Sequence
ggaagtgtgagcattctatcaatat

SEQ ID NO: 56371 - DNA, 25 bp, Probe Sequence
gaggatgtctggtgtgtgtgtaata

SEQ ID NO: 56372 - DNA, 25 bp, Probe Sequence
gagatacttgtggtgtcagaaggat

SEQ ID NO: 56373 - DNA, 25 bp, Probe Sequence
aacacaactacaactactaagtctg

SEQ ID NO: 56374 - DNA, 25 bp, Probe Sequence
ggcactacagttcagacaatacaac

SEQ ID NO: 56375 - DNA, 25 bp, Probe Sequence
gatgtctggtgtgtgtgtaatattg

SEQ ID NO: 56376 - DNA, 25 bp, Probe Sequence
ggtgtgtgtgtaatattgactgttc

SEQ ID NO: 56377 - DNA, 25 bp, Probe Sequence
atgtctggtgtgtgtgtaatattga

SEQ ID NO: 56378 - DNA, 25 bp, Probe Sequence
tggtgtgtgtgtaatattgactgtt

SEQ ID NO: 56379 - DNA, 25 bp, Probe Sequence
cacaactacaactactaagtctgaa

SEQ ID NO: 56380 - DNA, 25 bp, Probe Sequence
atacttgtggtgtcagaaggatcat

SEQ ID NO: 56381 - DNA, 25 bp, Probe Sequence
gtgtgtgtgtaatattgactgttct

SEQ ID NO: 56382 - DNA, 25 bp, Probe Sequence
aactgttgccgttattacatcagat

SEQ ID NO: 56383 - DNA, 25 bp, Probe Sequence
ggtagaacaagtggtactaggatta

SEQ ID NO: 56384 - DNA, 25 bp, Probe Sequence
gaactgttgccgttattacatcaga

SEQ ID NO: 56385 - DNA, 25 bp, Probe Sequence
aggattatacattgtaagaggtgac

SEQ ID NO: 56386 - DNA, 25 bp, Probe Sequence
actgttgccgttattacatcagatg

SEQ ID NO: 56387 - DNA, 25 bp, Probe Sequence
ggattatacattgtaagaggtgaca

SEQ ID NO: 56388 - DNA, 25 bp, Probe Sequence
ttggagaactacatcaaccgaactg

SEQ ID NO: 56389 - DNA, 25 bp, Probe Sequence
gaacaagtggtactaggattataca

SEQ ID NO: 56390 - DNA, 25 bp, Probe Sequence
ctgttgccgttattacatcagatgg

SEQ ID NO: 56391 - DNA, 25 bp, Probe Sequence
cgaactgttgccgttattacatcag

SEQ ID NO: 56392 - DNA, 25 bp, Probe Sequence
ggagaactacatcaaccgaactgtt

SEQ ID NO: 56393 - DNA, 25 bp, Probe Sequence
taaattctgtagcacactgaggaaa

SEQ ID NO: 56394 - DNA, 25 bp, Probe Sequence
ttaaattctgtagcacactgaggaa

SEQ ID NO: 56395 - DNA, 25 bp, Probe Sequence
ccgttattacatcagatgggagaat

SEQ ID NO: 56396 - DNA, 25 bp, Probe Sequence
agaacaagtggtactaggattatac

SEQ ID NO: 56397 - DNA, 25 bp, Probe Sequence
gtagaacaagtggtactaggattat

SEQ ID NO: 56398 - DNA, 25 bp, Probe Sequence
cgttattacatcagatgggagaatg

SEQ ID NO: 56399 - DNA, 25 bp, Probe Sequence
ctttggagaactacatcaaccgaac

SEQ ID NO: 56400 - DNA, 25 bp, Probe Sequence
gggtagaacaagtggtactaggatt

SEQ ID NO: 56401 - DNA, 25 bp, Probe Sequence
aaccgaactgttgccgttattacat

SEQ ID NO: 56402 - DNA, 25 bp, Probe Sequence
aagtggtactaggattatacattgt

SEQ ID NO: 56403 - DNA, 25 bp, Probe Sequence
acaagtggtactaggattatacatt

SEQ ID NO: 56404 - DNA, 25 bp, Probe Sequence
aacaagtggtactaggattatacat

SEQ ID NO: 56405 - DNA, 25 bp, Probe Sequence
tttggagaactacatcaaccgaact

SEQ ID NO: 56406 - DNA, 25 bp, Probe Sequence
atccagccattactaacctattcct

SEQ ID NO: 56407 - DNA, 25 bp, Probe Sequence
tccagccattactaacctattcctt

SEQ ID NO: 56408 - DNA, 25 bp, Probe Sequence
gaagtatgtctcttaaccagttcac

SEQ ID NO: 56409 - DNA, 25 bp, Probe Sequence
gtctcttaaccagttcacttattgt

SEQ ID NO: 56410 - DNA, 25 bp, Probe Sequence
tgtctcttaaccagttcacttattg

SEQ ID NO: 56411 - DNA, 25 bp, Probe Sequence
agaagtatgtctcttaaccagttca

SEQ ID NO: 56412 - DNA, 25 bp, Probe Sequence
cagaagtatgtctcttaaccagttc

SEQ ID NO: 56413 - DNA, 25 bp, Probe Sequence
cagatccagccattactaacctatt

SEQ ID NO: 56414 - DNA, 25 bp, Probe Sequence
agatccagccattactaacctattc

SEQ ID NO: 56415 - DNA, 25 bp, Probe Sequence
gacattcagatccagccattactaa

SEQ ID NO: 56416 - DNA, 25 bp, Probe Sequence
agtatgtctcttaaccagttcactt

SEQ ID NO: 56417 - DNA, 25 bp, Probe Sequence
aagtatgtctcttaaccagttcact

SEQ ID NO: 56418 - DNA, 25 bp, Probe Sequence
gatccagccattactaacctattcc

SEQ ID NO: 56419 - DNA, 25 bp, Probe Sequence
tcagatccagccattactaacctat

SEQ ID NO: 56420 - DNA, 25 bp, Probe Sequence
tcgtatggtgctagagttagattaa

SEQ ID NO: 56421 - DNA, 25 bp, Probe Sequence
acattcagatccagccattactaac

SEQ ID NO: 56422 - DNA, 25 bp, Probe Sequence
ttcagatccagccattactaaccta

SEQ ID NO: 56423 - DNA, 25 bp, Probe Sequence
agacattcagatccagccattacta

SEQ ID NO: 56424 - DNA, 25 bp, Probe Sequence
tagacattcagatccagccattact

SEQ ID NO: 56425 - DNA, 25 bp, Probe Sequence
agtagacattcagatccagccatta

SEQ ID NO: 56426 - DNA, 25 bp, Probe Sequence
gtagacattcagatccagccattac

SEQ ID NO: 56427 - DNA, 25 bp, Probe Sequence
acagaagtatgtctcttaaccagtt

SEQ ID NO: 56428 - DNA, 25 bp, Probe Sequence
attcagatccagccattactaacct

SEQ ID NO: 56429 - DNA, 25 bp, Probe Sequence
cattcagatccagccattactaacc

SEQ ID NO: 56430 - DNA, 25 bp, Probe Sequence
ccctcctctaaatgctataaatacg

SEQ ID NO: 56431 - DNA, 25 bp, Probe Sequence
gttctggatttattccctcctctaa

SEQ ID NO: 56432 - DNA, 25 bp, Probe Sequence
tccctcctctaaatgctataaatac

SEQ ID NO: 56433 - DNA, 25 bp, Probe Sequence
ggttctggatttattccctcctcta

SEQ ID NO: 56434 - DNA, 25 bp, Probe Sequence
ttctggatttattccctcctctaaa

SEQ ID NO: 56435 - DNA, 25 bp, Probe Sequence
ataaatacgttagcacttgagtcga

SEQ ID NO: 56436 - DNA, 25 bp, Probe Sequence
attccctcctctaaatgctataaat

SEQ ID NO: 56437 - DNA, 25 bp, Probe Sequence
tataaatacgttagcacttgagtcg

SEQ ID NO: 56438 - DNA, 25 bp, Probe Sequence
aaggttctggatttattccctcctc

SEQ ID NO: 56439 - DNA, 25 bp, Probe Sequence
gaaggttctggatttattccctcct

SEQ ID NO: 56440 - DNA, 25 bp, Probe Sequence
ggatttattccctcctctaaatgct

SEQ ID NO: 56441 - DNA, 25 bp, Probe Sequence
tggatttattccctcctctaaatgc

SEQ ID NO: 56442 - DNA, 25 bp, Probe Sequence
gaagagccgttcagtgtttagagag

SEQ ID NO: 56443 - DNA, 25 bp, Probe Sequence
ttccctcctctaaatgctataaata

SEQ ID NO: 56444 - DNA, 25 bp, Probe Sequence
tattccctcctctaaatgctataaa

SEQ ID NO: 56445 - DNA, 25 bp, Probe Sequence
cctcctctaaatgctataaatacgt

SEQ ID NO: 56446 - DNA, 25 bp, Probe Sequence
aggttctggatttattccctcctct

SEQ ID NO: 56447 - DNA, 25 bp, Probe Sequence
ctggatttattccctcctctaaatg

SEQ ID NO: 56448 - DNA, 25 bp, Probe Sequence
tctggatttattccctcctctaaat

SEQ ID NO: 56449 - DNA, 25 bp, Probe Sequence
ttattccctcctctaaatgctataa

SEQ ID NO: 56450 - DNA, 25 bp, Probe Sequence
tttattccctcctctaaatgctata

SEQ ID NO: 56451 - DNA, 25 bp, Probe Sequence
aagagccgttcagtgtttagagagt

SEQ ID NO: 56452 - DNA, 25 bp, Probe Sequence
ctataaatacgttagcacttgagtc

SEQ ID NO: 56453 - DNA, 25 bp, Probe Sequence
gatttattccctcctctaaatgcta

SEQ ID NO: 56454 - DNA, 25 bp, Probe Sequence
gtcaggcttgaatatctcagaactt

SEQ ID NO: 56455 - DNA, 25 bp, Probe Sequence
tcaggcttgaatatctcagaactta

SEQ ID NO: 56456 - DNA, 25 bp, Probe Sequence
caggcttgaatatctcagaacttaa

SEQ ID NO: 56457 - DNA, 25 bp, Probe Sequence
gtctcagaactccaggctacatatc

SEQ ID NO: 56458 - DNA, 25 bp, Probe Sequence
ctccaggctacatatcgtcttcttc

SEQ ID NO: 56459 - DNA, 25 bp, Probe Sequence
agtctcagaactccaggctacatat

SEQ ID NO: 56460 - DNA, 25 bp, Probe Sequence
gaactccaggctacatatcgtcttc

SEQ ID NO: 56461 - DNA, 25 bp, Probe Sequence
actccaggctacatatcgtcttctt

SEQ ID NO: 56462 - DNA, 25 bp, Probe Sequence
aactccaggctacatatcgtcttct

SEQ ID NO: 56463 - DNA, 25 bp, Probe Sequence
cgtcaggcttgaatatctcagaact

SEQ ID NO: 56464 - DNA, 25 bp, Probe Sequence
aagtctcagaactccaggctacata

SEQ ID NO: 56465 - DNA, 25 bp, Probe Sequence
agaactccaggctacatatcgtctt

SEQ ID NO: 56466 - DNA, 25 bp, Probe Sequence
tgggattcctactttatgtaatggg

SEQ ID NO: 56467 - DNA, 25 bp, Probe Sequence
aaattgctatctactggtcctttgg

SEQ ID NO: 56468 - DNA, 25 bp, Probe Sequence
caggctacatatcgtcttcttcgtg

SEQ ID NO: 56469 - DNA, 25 bp, Probe Sequence
ttgaagtagtagaaacctaaaggct

SEQ ID NO: 56470 - DNA, 25 bp, Probe Sequence
aagtagtagaaacctaaaggcttgg

SEQ ID NO: 56471 - DNA, 25 bp, Probe Sequence
tgaagtagtagaaacctaaaggctt

SEQ ID NO: 56472 - DNA, 25 bp, Probe Sequence
cagaagcaatttaaggagcagtttc

SEQ ID NO: 56473 - DNA, 25 bp, Probe Sequence
gtgggattcctactttatgtaatgg

SEQ ID NO: 56474 - DNA, 25 bp, Probe Sequence
gaagtagtagaaacctaaaggcttg

SEQ ID NO: 56475 - DNA, 25 bp, Probe Sequence
tctcagaactccaggctacatatcg

SEQ ID NO: 56476 - DNA, 25 bp, Probe Sequence
attgaagtagtagaaacctaaaggc

SEQ ID NO: 56477 - DNA, 25 bp, Probe Sequence
tacatatcgtcttcttcgtgggaaa

SEQ ID NO: 56478 - DNA, 25 bp, Probe Sequence
ttcggtggagataaaagttgatttg

SEQ ID NO: 56479 - DNA, 25 bp, Probe Sequence
tttcggtggagataaaagttgattt

SEQ ID NO: 56480 - DNA, 25 bp, Probe Sequence
ttaatcaggacaccgtgaggacaag

SEQ ID NO: 56481 - DNA, 25 bp, Probe Sequence
ctcctcctcgtctctgctttaatca

SEQ ID NO: 56482 - DNA, 25 bp, Probe Sequence
ctcgtctctgctttaatcaggacac

SEQ ID NO: 56483 - DNA, 25 bp, Probe Sequence
gtggagataaaagttgatttgctct

SEQ ID NO: 56484 - DNA, 25 bp, Probe Sequence
ggtggagataaaagttgatttgctc

SEQ ID NO: 56485 - DNA, 25 bp, Probe Sequence
cggtggagataaaagttgatttgct

SEQ ID NO: 56486 - DNA, 25 bp, Probe Sequence
tcggtggagataaaagttgatttgc

SEQ ID NO: 56487 - DNA, 25 bp, Probe Sequence
ctccagaagacacgaatcatgactc

SEQ ID NO: 56488 - DNA, 25 bp, Probe Sequence
gaagacacgaatcatgactcacgat

SEQ ID NO: 56489 - DNA, 25 bp, Probe Sequence
cttcctccagaagacacgaatcatg

SEQ ID NO: 56490 - DNA, 25 bp, Probe Sequence
ttttcggtggagataaaagttgatt

SEQ ID NO: 56491 - DNA, 25 bp, Probe Sequence
aatgggtcttttcggtggagataaa

SEQ ID NO: 56492 - DNA, 25 bp, Probe Sequence
tcctcctcgtctctgctttaatcag

SEQ ID NO: 56493 - DNA, 25 bp, Probe Sequence
tttaatcaggacaccgtgaggacaa

SEQ ID NO: 56494 - DNA, 25 bp, Probe Sequence
gaatcatgactcacgattgctgaag

SEQ ID NO: 56495 - DNA, 25 bp, Probe Sequence
gaatgggtcttttcggtggagataa

SEQ ID NO: 56496 - DNA, 25 bp, Probe Sequence
ccagaagacacgaatcatgactcac

SEQ ID NO: 56497 - DNA, 25 bp, Probe Sequence
tccagaagacacgaatcatgactca

SEQ ID NO: 56498 - DNA, 25 bp, Probe Sequence
aagacacgaatcatgactcacgatt

SEQ ID NO: 56499 - DNA, 25 bp, Probe Sequence
ttcctccagaagacacgaatcatga

SEQ ID NO: 56500 - DNA, 25 bp, Probe Sequence
atgggtcttttcggtggagataaaa

SEQ ID NO: 56501 - DNA, 25 bp, Probe Sequence
ctttaatcaggacaccgtgaggaca

SEQ ID NO: 56502 - DNA, 25 bp, Probe Sequence
gttacttgattcacctactgacctt

SEQ ID NO: 56503 - DNA, 25 bp, Probe Sequence
ttgttacttgattcacctactgacc

SEQ ID NO: 56504 - DNA, 25 bp, Probe Sequence
tgttacttgattcacctactgacct

SEQ ID NO: 56505 - DNA, 25 bp, Probe Sequence
agtgtaagctagtattctgtgtgtt

SEQ ID NO: 56506 - DNA, 25 bp, Probe Sequence
aagctagtattctgtgtgttcgtag

SEQ ID NO: 56507 - DNA, 25 bp, Probe Sequence
ttattccactacctgctagagccta

SEQ ID NO: 56508 - DNA, 25 bp, Probe Sequence
gtgtaagctagtattctgtgtgttc

SEQ ID NO: 56509 - DNA, 25 bp, Probe Sequence
gtaagctagtattctgtgtgttcgt

SEQ ID NO: 56510 - DNA, 25 bp, Probe Sequence
tgtaagctagtattctgtgtgttcg

SEQ ID NO: 56511 - DNA, 25 bp, Probe Sequence
taagctagtattctgtgtgttcgta

SEQ ID NO: 56512 - DNA, 25 bp, Probe Sequence
tagtgtaagctagtattctgtgtgt

SEQ ID NO: 56513 - DNA, 25 bp, Probe Sequence
ggcatagagtagagaatagcttcat

SEQ ID NO: 56514 - DNA, 25 bp, Probe Sequence
tgccttattgcttaacttaatgtag

SEQ ID NO: 56515 - DNA, 25 bp, Probe Sequence
atatgtgatgcagtgtaagaaggaa

SEQ ID NO: 56516 - DNA, 25 bp, Probe Sequence
taacttgcagaataatagagccact

SEQ ID NO: 56517 - DNA, 25 bp, Probe Sequence
actaacttgcagaataatagagcca

SEQ ID NO: 56518 - DNA, 25 bp, Probe Sequence
ctaacttgcagaataatagagccac

SEQ ID NO: 56519 - DNA, 25 bp, Probe Sequence
agctagtattctgtgtgttcgtaga

SEQ ID NO: 56520 - DNA, 25 bp, Probe Sequence
aaatgggcatagagtagagaatagc

SEQ ID NO: 56521 - DNA, 25 bp, Probe Sequence
tatatgtgatgcagtgtaagaagga

SEQ ID NO: 56522 - DNA, 25 bp, Probe Sequence
atgtagtgaaataaagcagaccaag

SEQ ID NO: 56523 - DNA, 25 bp, Probe Sequence
cactggtttaatgtttcctcaagat

SEQ ID NO: 56524 - DNA, 25 bp, Probe Sequence
ggaaatgggcatagagtagagaata

SEQ ID NO: 56525 - DNA, 25 bp, Probe Sequence
aggaaatgggcatagagtagagaat

SEQ ID NO: 56526 - DNA, 25 bp, Probe Sequence
acacagtaattggtcacttgttaag

SEQ ID NO: 56527 - DNA, 25 bp, Probe Sequence
cacagtaattggtcacttgttaaga

SEQ ID NO: 56528 - DNA, 25 bp, Probe Sequence
acagtaattggtcacttgttaagaa

SEQ ID NO: 56529 - DNA, 25 bp, Probe Sequence
acctatgtgtatcagctaattggag

SEQ ID NO: 56530 - DNA, 25 bp, Probe Sequence
cctatgtgtatcagctaattggaga

SEQ ID NO: 56531 - DNA, 25 bp, Probe Sequence
atgtgtatcagctaattggagatga

SEQ ID NO: 56532 - DNA, 25 bp, Probe Sequence
ggagatgatgtgaaagtagaacgaa

SEQ ID NO: 56533 - DNA, 25 bp, Probe Sequence
tctctgttaatacataattgctcca

SEQ ID NO: 56534 - DNA, 25 bp, Probe Sequence
ttggagatgatgtgaaagtagaacg

SEQ ID NO: 56535 - DNA, 25 bp, Probe Sequence
gagatgatgtgaaagtagaacgaat

SEQ ID NO: 56536 - DNA, 25 bp, Probe Sequence
tatgtgtatcagctaattggagatg

SEQ ID NO: 56537 - DNA, 25 bp, Probe Sequence
atattaaagtggacgagatgacctt

SEQ ID NO: 56538 - DNA, 25 bp, Probe Sequence
agatgatgtgaaagtagaacgaatc

SEQ ID NO: 56539 - DNA, 25 bp, Probe Sequence
attggagatgatgtgaaagtagaac

SEQ ID NO: 56540 - DNA, 25 bp, Probe Sequence
ttctacagtggtcacctatgtgtat

SEQ ID NO: 56541 - DNA, 25 bp, Probe Sequence
aatgtccacaacacagtaattggtc

SEQ ID NO: 56542 - DNA, 25 bp, Probe Sequence
gctaattggagatgatgtgaaagta

SEQ ID NO: 56543 - DNA, 25 bp, Probe Sequence
cacctatgtgtatcagctaattgga

SEQ ID NO: 56544 - DNA, 25 bp, Probe Sequence
tcacctatgtgtatcagctaattgg

SEQ ID NO: 56545 - DNA, 25 bp, Probe Sequence
ggtcacctatgtgtatcagctaatt

SEQ ID NO: 56546 - DNA, 25 bp, Probe Sequence
ggaaccaagtgaaactacggatata

SEQ ID NO: 56547 - DNA, 25 bp, Probe Sequence
tggagatgatgtgaaagtagaacga

SEQ ID NO: 56548 - DNA, 25 bp, Probe Sequence
gatgatgtgaaagtagaacgaatcg

SEQ ID NO: 56549 - DNA, 25 bp, Probe Sequence
ctatgtgtatcagctaattggagat

SEQ ID NO: 56550 - DNA, 25 bp, Probe Sequence
gaatacagtcccttgttcaacagag

SEQ ID NO: 56551 - DNA, 25 bp, Probe Sequence
aatacagtcccttgttcaacagaga

SEQ ID NO: 56552 - DNA, 25 bp, Probe Sequence
atacagtcccttgttcaacagagag

SEQ ID NO: 56553 - DNA, 25 bp, Probe Sequence
gcccagttatggatgttatgtgatc

SEQ ID NO: 56554 - DNA, 25 bp, Probe Sequence
tgtcaataaacagcattctgattaa

SEQ ID NO: 56555 - DNA, 25 bp, Probe Sequence
ttgtcaataaacagcattctgatta

SEQ ID NO: 56556 - DNA, 25 bp, Probe Sequence
ggaatacagtcccttgttcaacaga

SEQ ID NO: 56557 - DNA, 25 bp, Probe Sequence
ccagttatggatgttatgtgatcaa

SEQ ID NO: 56558 - DNA, 25 bp, Probe Sequence
cgcccagttatggatgttatgtgat

SEQ ID NO: 56559 - DNA, 25 bp, Probe Sequence
gtcaataaacagcattctgattaaa

SEQ ID NO: 56560 - DNA, 25 bp, Probe Sequence
cccagttatggatgttatgtgatca

SEQ ID NO: 56561 - DNA, 25 bp, Probe Sequence
cacgcccagttatggatgttatgtg

SEQ ID NO: 56562 - DNA, 25 bp, Probe Sequence
cagttatggatgttatgtgatcaaa

SEQ ID NO: 56563 - DNA, 25 bp, Probe Sequence
tacagtcccttgttcaacagagagc

SEQ ID NO: 56564 - DNA, 25 bp, Probe Sequence
acgcccagttatggatgttatgtga

SEQ ID NO: 56565 - DNA, 25 bp, Probe Sequence
agtcccttgttcaacagagagcttt

SEQ ID NO: 56566 - DNA, 25 bp, Probe Sequence
agtacattttgggttaccgtacctc

SEQ ID NO: 56567 - DNA, 25 bp, Probe Sequence
aggcagtacattttgggttaccgta

SEQ ID NO: 56568 - DNA, 25 bp, Probe Sequence
cagtcccttgttcaacagagagctt

SEQ ID NO: 56569 - DNA, 25 bp, Probe Sequence
cagtacattttgggttaccgtacct

SEQ ID NO: 56570 - DNA, 25 bp, Probe Sequence
tcccttgttcaacagagagcttttg

SEQ ID NO: 56571 - DNA, 25 bp, Probe Sequence
gtcccttgttcaacagagagctttt

SEQ ID NO: 56572 - DNA, 25 bp, Probe Sequence
tcaataaacagcattctgattaaaa

SEQ ID NO: 56573 - DNA, 25 bp, Probe Sequence
cttgttcaacagagagcttttgctg

SEQ ID NO: 56574 - DNA, 25 bp, Probe Sequence
caataaactgtagaggaatcggaaa

SEQ ID NO: 56575 - DNA, 25 bp, Probe Sequence
gttagtggtcctcaggatgtgataa

SEQ ID NO: 56576 - DNA, 25 bp, Probe Sequence
acaataaactgtagaggaatcggaa

SEQ ID NO: 56577 - DNA, 25 bp, Probe Sequence
aacaataaactgtagaggaatcgga

SEQ ID NO: 56578 - DNA, 25 bp, Probe Sequence
taacaataaactgtagaggaatcgg

SEQ ID NO: 56579 - DNA, 25 bp, Probe Sequence
ttagtggtcctcaggatgtgataaa

SEQ ID NO: 56580 - DNA, 25 bp, Probe Sequence
cttctcattaaccccttaggactct

SEQ ID NO: 56581 - DNA, 25 bp, Probe Sequence
tttggtagctcagtgtgcatctaaa

SEQ ID NO: 56582 - DNA, 25 bp, Probe Sequence
ttctcattaaccccttaggactctg

SEQ ID NO: 56583 - DNA, 25 bp, Probe Sequence
aataaactgtagaggaatcggaaaa

SEQ ID NO: 56584 - DNA, 25 bp, Probe Sequence
ataacaataaactgtagaggaatcg

SEQ ID NO: 56585 - DNA, 25 bp, Probe Sequence
tcattaaccccttaggactctgaag

SEQ ID NO: 56586 - DNA, 25 bp, Probe Sequence
ctcattaaccccttaggactctgaa

SEQ ID NO: 56587 - DNA, 25 bp, Probe Sequence
ttggtagctcagtgtgcatctaaag

SEQ ID NO: 56588 - DNA, 25 bp, Probe Sequence
ctttggtagctcagtgtgcatctaa

SEQ ID NO: 56589 - DNA, 25 bp, Probe Sequence
tctcattaaccccttaggactctga

SEQ ID NO: 56590 - DNA, 25 bp, Probe Sequence
cttaggactctgaagggtatggacc

SEQ ID NO: 56591 - DNA, 25 bp, Probe Sequence
gcttctcattaaccccttaggactc

SEQ ID NO: 56592 - DNA, 25 bp, Probe Sequence
gtagctcagtgtgcatctaaagtgg

SEQ ID NO: 56593 - DNA, 25 bp, Probe Sequence
ggtagctcagtgtgcatctaaagtg

SEQ ID NO: 56594 - DNA, 25 bp, Probe Sequence
tagtggtcctcaggatgtgataaaa

SEQ ID NO: 56595 - DNA, 25 bp, Probe Sequence
tggtagctcagtgtgcatctaaagt

SEQ ID NO: 56596 - DNA, 25 bp, Probe Sequence
ggcttctcattaaccccttaggact

SEQ ID NO: 56597 - DNA, 25 bp, Probe Sequence
tggcttctcattaaccccttaggac

SEQ ID NO: 56598 - DNA, 25 bp, Probe Sequence
gaactaataagccttcacttgtcag

SEQ ID NO: 56599 - DNA, 25 bp, Probe Sequence
ttggaactaataagccttcacttgt

SEQ ID NO: 56600 - DNA, 25 bp, Probe Sequence
ggaactaataagccttcacttgtca

SEQ ID NO: 56601 - DNA, 25 bp, Probe Sequence
tggaactaataagccttcacttgtc

SEQ ID NO: 56602 - DNA, 25 bp, Probe Sequence
aagccttcacttgtcagtatcataa

SEQ ID NO: 56603 - DNA, 25 bp, Probe Sequence
ataagccttcacttgtcagtatcat

SEQ ID NO: 56604 - DNA, 25 bp, Probe Sequence
aataagccttcacttgtcagtatca

SEQ ID NO: 56605 - DNA, 25 bp, Probe Sequence
aactaataagccttcacttgtcagt

SEQ ID NO: 56606 - DNA, 25 bp, Probe Sequence
actaataagccttcacttgtcagta

SEQ ID NO: 56607 - DNA, 25 bp, Probe Sequence
cttgatattccttgtctccagtacc

SEQ ID NO: 56608 - DNA, 25 bp, Probe Sequence
taagccttcacttgtcagtatcata

SEQ ID NO: 56609 - DNA, 25 bp, Probe Sequence
gtgagaatactggttcaatggacat

SEQ ID NO: 56610 - DNA, 25 bp, Probe Sequence
ttacttgatattccttgtctccagt

SEQ ID NO: 56611 - DNA, 25 bp, Probe Sequence
ttgatattccttgtctccagtacca

SEQ ID NO: 56612 - DNA, 25 bp, Probe Sequence
gagtgagaatactggttcaatggac

SEQ ID NO: 56613 - DNA, 25 bp, Probe Sequence
ctgagtgagaatactggttcaatgg

SEQ ID NO: 56614 - DNA, 25 bp, Probe Sequence
attacttgatattccttgtctccag

SEQ ID NO: 56615 - DNA, 25 bp, Probe Sequence
ctatgtaggttcagtcagatccaac

SEQ ID NO: 56616 - DNA, 25 bp, Probe Sequence
tctatgtaggttcagtcagatccaa

SEQ ID NO: 56617 - DNA, 25 bp, Probe Sequence
tgagtgagaatactggttcaatgga

SEQ ID NO: 56618 - DNA, 25 bp, Probe Sequence
acttgatattccttgtctccagtac

SEQ ID NO: 56619 - DNA, 25 bp, Probe Sequence
tgatattccttgtctccagtaccac

SEQ ID NO: 56620 - DNA, 25 bp, Probe Sequence
taataagccttcacttgtcagtatc

SEQ ID NO: 56621 - DNA, 25 bp, Probe Sequence
ctaataagccttcacttgtcagtat

SEQ ID NO: 56622 - DNA, 25 bp, Probe Sequence
cgatattcaccgttccattaagtat

SEQ ID NO: 56623 - DNA, 25 bp, Probe Sequence
taacaagagactggatgctgcttat

SEQ ID NO: 56624 - DNA, 25 bp, Probe Sequence
atgaccttcaagagaattaggactt

SEQ ID NO: 56625 - DNA, 25 bp, Probe Sequence
aatgaccttcaagagaattaggact

SEQ ID NO: 56626 - DNA, 25 bp, Probe Sequence
gtaacaagagactggatgctgctta

SEQ ID NO: 56627 - DNA, 25 bp, Probe Sequence
tagagaacaacgagaataaaccagt

SEQ ID NO: 56628 - DNA, 25 bp, Probe Sequence
atgtttcttcagtttcttgttcagc

SEQ ID NO: 56629 - DNA, 25 bp, Probe Sequence
ctttggttgtgatttcagagcataa

SEQ ID NO: 56630 - DNA, 25 bp, Probe Sequence
ttggttgtgatttcagagcataatg

SEQ ID NO: 56631 - DNA, 25 bp, Probe Sequence
tttggttgtgatttcagagcataat

SEQ ID NO: 56632 - DNA, 25 bp, Probe Sequence
aacaagagactggatgctgcttatc

SEQ ID NO: 56633 - DNA, 25 bp, Probe Sequence
gagaacaacgagaataaaccagtga

SEQ ID NO: 56634 - DNA, 25 bp, Probe Sequence
agagaacaacgagaataaaccagtg

SEQ ID NO: 56635 - DNA, 25 bp, Probe Sequence
cttggagaacacttgagttgtgaag

SEQ ID NO: 56636 - DNA, 25 bp, Probe Sequence
ccaaagaggaagaagaaagtgttaa

SEQ ID NO: 56637 - DNA, 25 bp, Probe Sequence
ttgtgtctttaagggtggttcattt

SEQ ID NO: 56638 - DNA, 25 bp, Probe Sequence
gccaaagaggaagaagaaagtgtta

SEQ ID NO: 56639 - DNA, 25 bp, Probe Sequence
agaacaacgagaataaaccagtgac

SEQ ID NO: 56640 - DNA, 25 bp, Probe Sequence
cctagagaacaacgagaataaacca

SEQ ID NO: 56641 - DNA, 25 bp, Probe Sequence
ctagagaacaacgagaataaaccag

SEQ ID NO: 56642 - DNA, 25 bp, Probe Sequence
agaaatgaaatctgctgtggactac

SEQ ID NO: 56643 - DNA, 25 bp, Probe Sequence
aatgtttcttcagtttcttgttcag

SEQ ID NO: 56644 - DNA, 25 bp, Probe Sequence
gagaataaaccagtgaccaactcta

SEQ ID NO: 56645 - DNA, 25 bp, Probe Sequence
gttgtgtctttaagggtggttcatt

SEQ ID NO: 56646 - DNA, 25 bp, Probe Sequence
atgaggatgaagatgaagatgagtc

SEQ ID NO: 56647 - DNA, 25 bp, Probe Sequence
gatgaggatgaagatgaagatgagt

SEQ ID NO: 56648 - DNA, 25 bp, Probe Sequence
agatgaggatgaagatgaagatgag

SEQ ID NO: 56649 - DNA, 25 bp, Probe Sequence
gagatgaggatgaagatgaagatga

SEQ ID NO: 56650 - DNA, 25 bp, Probe Sequence
agagatgaggatgaagatgaagatg

SEQ ID NO: 56651 - DNA, 25 bp, Probe Sequence
ctagagatgaggatgaagatgaaga

SEQ ID NO: 56652 - DNA, 25 bp, Probe Sequence
tagagatgaggatgaagatgaagat

SEQ ID NO: 56653 - DNA, 25 bp, Probe Sequence
tgaggatgaagatgaagatgagtca

SEQ ID NO: 56654 - DNA, 25 bp, Probe Sequence
tcatccacagtcatcaagaaaccta

SEQ ID NO: 56655 - DNA, 25 bp, Probe Sequence
catccacagtcatcaagaaacctag

SEQ ID NO: 56656 - DNA, 25 bp, Probe Sequence
gaggatgaagatgaagatgagtcat

SEQ ID NO: 56657 - DNA, 25 bp, Probe Sequence
atccacagtcatcaagaaacctagt

SEQ ID NO: 56658 - DNA, 25 bp, Probe Sequence
caaatccaccatgaagaagtctttc

SEQ ID NO: 56659 - DNA, 25 bp, Probe Sequence
ccagatgattctagagatgaggatg

SEQ ID NO: 56660 - DNA, 25 bp, Probe Sequence
aagagccagatgattctagagatga

SEQ ID NO: 56661 - DNA, 25 bp, Probe Sequence
agagccagatgattctagagatgag

SEQ ID NO: 56662 - DNA, 25 bp, Probe Sequence
cagatgattctagagatgaggatga

SEQ ID NO: 56663 - DNA, 25 bp, Probe Sequence
tctagagatgaggatgaagatgaag

SEQ ID NO: 56664 - DNA, 25 bp, Probe Sequence
ctcatccacagtcatcaagaaacct

SEQ ID NO: 56665 - DNA, 25 bp, Probe Sequence
gccagatgattctagagatgaggat

SEQ ID NO: 56666 - DNA, 25 bp, Probe Sequence
ttctagagatgaggatgaagatgaa

SEQ ID NO: 56667 - DNA, 25 bp, Probe Sequence
attctagagatgaggatgaagatga

SEQ ID NO: 56668 - DNA, 25 bp, Probe Sequence
tgattctagagatgaggatgaagat

SEQ ID NO: 56669 - DNA, 25 bp, Probe Sequence
atgattctagagatgaggatgaaga

SEQ ID NO: 56670 - DNA, 25 bp, Probe Sequence
ttgatgatgatacctctttcttccc

SEQ ID NO: 56671 - DNA, 25 bp, Probe Sequence
gctgtgcttggagtctttatttatt

SEQ ID NO: 56672 - DNA, 25 bp, Probe Sequence
cttccctgagtgtatatgttcgtaa

SEQ ID NO: 56673 - DNA, 25 bp, Probe Sequence
tttcttccctgagtgtatatgttcg

SEQ ID NO: 56674 - DNA, 25 bp, Probe Sequence
gatgatgatacctctttcttccctg

SEQ ID NO: 56675 - DNA, 25 bp, Probe Sequence
cctgatagacattgtcacagagata

SEQ ID NO: 56676 - DNA, 25 bp, Probe Sequence
tcttccctgagtgtatatgttcgta

SEQ ID NO: 56677 - DNA, 25 bp, Probe Sequence
atgatgatacctctttcttccctga

SEQ ID NO: 56678 - DNA, 25 bp, Probe Sequence
tgatgatgatacctctttcttccct

SEQ ID NO: 56679 - DNA, 25 bp, Probe Sequence
ttccctgagtgtatatgttcgtaat

SEQ ID NO: 56680 - DNA, 25 bp, Probe Sequence
tctttcttccctgagtgtatatgtt

SEQ ID NO: 56681 - DNA, 25 bp, Probe Sequence
tccacatttgatgatgatacctctt

SEQ ID NO: 56682 - DNA, 25 bp, Probe Sequence
ttccacatttgatgatgatacctct

SEQ ID NO: 56683 - DNA, 25 bp, Probe Sequence
cgaacattccacatttgatgatgat

SEQ ID NO: 56684 - DNA, 25 bp, Probe Sequence
acattccacatttgatgatgatacc

SEQ ID NO: 56685 - DNA, 25 bp, Probe Sequence
ctttcttccctgagtgtatatgttc

SEQ ID NO: 56686 - DNA, 25 bp, Probe Sequence
cattccacatttgatgatgatacct

SEQ ID NO: 56687 - DNA, 25 bp, Probe Sequence
ttcttccctgagtgtatatgttcgt

SEQ ID NO: 56688 - DNA, 25 bp, Probe Sequence
ccacatttgatgatgatacctcttt

SEQ ID NO: 56689 - DNA, 25 bp, Probe Sequence
tttgatgatgatacctctttcttcc

SEQ ID NO: 56690 - DNA, 25 bp, Probe Sequence
tccctgagtgtatatgttcgtaata

SEQ ID NO: 56691 - DNA, 25 bp, Probe Sequence
attccacatttgatgatgatacctc

SEQ ID NO: 56692 - DNA, 25 bp, Probe Sequence
cctctttcttccctgagtgtatatg

SEQ ID NO: 56693 - DNA, 25 bp, Probe Sequence
tacctctttcttccctgagtgtata

SEQ ID NO: 56694 - DNA, 25 bp, Probe Sequence
tggatcactacaaggaggagaagtt

SEQ ID NO: 56695 - DNA, 25 bp, Probe Sequence
atcactacaaggaggagaagtttga

SEQ ID NO: 56696 - DNA, 25 bp, Probe Sequence
ttgacaagaagaagctgatctctgt

SEQ ID NO: 56697 - DNA, 25 bp, Probe Sequence
gatcactacaaggaggagaagtttg

SEQ ID NO: 56698 - DNA, 25 bp, Probe Sequence
catagtcgtggatcactacaaggag

SEQ ID NO: 56699 - DNA, 25 bp, Probe Sequence
tcactacaaggaggagaagtttgag

SEQ ID NO: 56700 - DNA, 25 bp, Probe Sequence
gacatagtcgtggatcactacaagg

SEQ ID NO: 56701 - DNA, 25 bp, Probe Sequence
ggacatagtcgtggatcactacaag

SEQ ID NO: 56702 - DNA, 25 bp, Probe Sequence
ctacaaggaggagaagtttgaggac

SEQ ID NO: 56703 - DNA, 25 bp, Probe Sequence
tgacaagaagaagctgatctctgtg

SEQ ID NO: 56704 - DNA, 25 bp, Probe Sequence
ggatcactacaaggaggagaagttt

SEQ ID NO: 56705 - DNA, 25 bp, Probe Sequence
acatagtcgtggatcactacaagga

SEQ ID NO: 56706 - DNA, 25 bp, Probe Sequence
tttgacaagaagaagctgatctctg

SEQ ID NO: 56707 - DNA, 25 bp, Probe Sequence
gtttgacaagaagaagctgatctct

SEQ ID NO: 56708 - DNA, 25 bp, Probe Sequence
agtttgacaagaagaagctgatctc

SEQ ID NO: 56709 - DNA, 25 bp, Probe Sequence
caagaagaagctgatctctgtggag

SEQ ID NO: 56710 - DNA, 25 bp, Probe Sequence
actacaaggaggagaagtttgagga

SEQ ID NO: 56711 - DNA, 25 bp, Probe Sequence
cactacaaggaggagaagtttgagg

SEQ ID NO: 56712 - DNA, 25 bp, Probe Sequence
gtggatcactacaaggaggagaagt

SEQ ID NO: 56713 - DNA, 25 bp, Probe Sequence
tacaaggaggagaagtttgaggaca

SEQ ID NO: 56714 - DNA, 25 bp, Probe Sequence
atagtcgtggatcactacaaggagg

SEQ ID NO: 56715 - DNA, 25 bp, Probe Sequence
gacaagaagaagctgatctctgtgg

SEQ ID NO: 56716 - DNA, 25 bp, Probe Sequence
acaagaagaagctgatctctgtgga

SEQ ID NO: 56717 - DNA, 25 bp, Probe Sequence
tagtcgtggatcactacaaggagga

SEQ ID NO: 56718 - DNA, 25 bp, Probe Sequence
caagaatgccaggatgaatgaagag

SEQ ID NO: 56719 - DNA, 25 bp, Probe Sequence
agaccactgcttatctgtatcttcc

SEQ ID NO: 56720 - DNA, 25 bp, Probe Sequence
agaatgccaggatgaatgaagagtt

SEQ ID NO: 56721 - DNA, 25 bp, Probe Sequence
aagaatgccaggatgaatgaagagt

SEQ ID NO: 56722 - DNA, 25 bp, Probe Sequence
tcaagaatgccaggatgaatgaaga

SEQ ID NO: 56723 - DNA, 25 bp, Probe Sequence
actgcttatctgtatcttcccattt

SEQ ID NO: 56724 - DNA, 25 bp, Probe Sequence
cactgcttatctgtatcttcccatt

SEQ ID NO: 56725 - DNA, 25 bp, Probe Sequence
aatgccaggatgaatgaagagttta

SEQ ID NO: 56726 - DNA, 25 bp, Probe Sequence
gccaggatgaatgaagagtttacta

SEQ ID NO: 56727 - DNA, 25 bp, Probe Sequence
gaacattcttctcttcaaaggatgc

SEQ ID NO: 56728 - DNA, 25 bp, Probe Sequence
atgccaggatgaatgaagagtttac

SEQ ID NO: 56729 - DNA, 25 bp, Probe Sequence
ctaaggttaaggctggtctaaactt

SEQ ID NO: 56730 - DNA, 25 bp, Probe Sequence
aaacttcgttctttatcagcctcat

SEQ ID NO: 56731 - DNA, 25 bp, Probe Sequence
aagaccactgcttatctgtatcttc

SEQ ID NO: 56732 - DNA, 25 bp, Probe Sequence
gaatgccaggatgaatgaagagttt

SEQ ID NO: 56733 - DNA, 25 bp, Probe Sequence
ttcaatatggagaagacctagaatt

SEQ ID NO: 56734 - DNA, 25 bp, Probe Sequence
gctgcaaggatatatataagaccac

SEQ ID NO: 56735 - DNA, 25 bp, Probe Sequence
agctgcaaggatatatataagacca

SEQ ID NO: 56736 - DNA, 25 bp, Probe Sequence
tgagatgcaggaattactgtaacaa

SEQ ID NO: 56737 - DNA, 25 bp, Probe Sequence
ttgagatgcaggaattactgtaaca

SEQ ID NO: 56738 - DNA, 25 bp, Probe Sequence
taagaccactgcttatctgtatctt

SEQ ID NO: 56739 - DNA, 25 bp, Probe Sequence
ccaggatgaatgaagagtttactaa

SEQ ID NO: 56740 - DNA, 25 bp, Probe Sequence
ccactgcttatctgtatcttcccat

SEQ ID NO: 56741 - DNA, 25 bp, Probe Sequence
tgccaggatgaatgaagagtttact

SEQ ID NO: 56742 - DNA, 25 bp, Probe Sequence
ctgtggaatctgatatgtctggtag

SEQ ID NO: 56743 - DNA, 25 bp, Probe Sequence
cctgtggaatctgatatgtctggta

SEQ ID NO: 56744 - DNA, 25 bp, Probe Sequence
ttgcctctgatacatacctaagtaa

SEQ ID NO: 56745 - DNA, 25 bp, Probe Sequence
tggaatctgatatgtctggtagcat

SEQ ID NO: 56746 - DNA, 25 bp, Probe Sequence
tattgcctctgatacatacctaagt

SEQ ID NO: 56747 - DNA, 25 bp, Probe Sequence
attgcctctgatacatacctaagta

SEQ ID NO: 56748 - DNA, 25 bp, Probe Sequence
gtggaatctgatatgtctggtagca

SEQ ID NO: 56749 - DNA, 25 bp, Probe Sequence
tgtggaatctgatatgtctggtagc

SEQ ID NO: 56750 - DNA, 25 bp, Probe Sequence
atatgtctggtagcatgtcattgat

SEQ ID NO: 56751 - DNA, 25 bp, Probe Sequence
aatctgatatgtctggtagcatgtc

SEQ ID NO: 56752 - DNA, 25 bp, Probe Sequence
gaatctgatatgtctggtagcatgt

SEQ ID NO: 56753 - DNA, 25 bp, Probe Sequence
gatatgtctggtagcatgtcattga

SEQ ID NO: 56754 - DNA, 25 bp, Probe Sequence
tatgtctggtagcatgtcattgatg

SEQ ID NO: 56755 - DNA, 25 bp, Probe Sequence
ggaatctgatatgtctggtagcatg

SEQ ID NO: 56756 - DNA, 25 bp, Probe Sequence
ttattgcctctgatacatacctaag

SEQ ID NO: 56757 - DNA, 25 bp, Probe Sequence
ctgatatgtctggtagcatgtcatt

SEQ ID NO: 56758 - DNA, 25 bp, Probe Sequence
tgatatgtctggtagcatgtcattg

SEQ ID NO: 56759 - DNA, 25 bp, Probe Sequence
tatcctgtggaatctgatatgtctg

SEQ ID NO: 56760 - DNA, 25 bp, Probe Sequence
tctgatatgtctggtagcatgtcat

SEQ ID NO: 56761 - DNA, 25 bp, Probe Sequence
atctgatatgtctggtagcatgtca

SEQ ID NO: 56762 - DNA, 25 bp, Probe Sequence
gccattatcctgtggaatctgatat

SEQ ID NO: 56763 - DNA, 25 bp, Probe Sequence
ttatcctgtggaatctgatatgtct

SEQ ID NO: 56764 - DNA, 25 bp, Probe Sequence
ccattatcctgtggaatctgatatg

SEQ ID NO: 56765 - DNA, 25 bp, Probe Sequence
atcctgtggaatctgatatgtctgg

SEQ ID NO: 56766 - DNA, 25 bp, Probe Sequence
tatagtgatgcgttggaaggttaat

SEQ ID NO: 56767 - DNA, 25 bp, Probe Sequence
ttatagtgatgcgttggaaggttaa

SEQ ID NO: 56768 - DNA, 25 bp, Probe Sequence
cttatagtgatgcgttggaaggtta

SEQ ID NO: 56769 - DNA, 25 bp, Probe Sequence
atagtgatgcgttggaaggttaatc

SEQ ID NO: 56770 - DNA, 25 bp, Probe Sequence
atggacataacttgtgaaggatgaa

SEQ ID NO: 56771 - DNA, 25 bp, Probe Sequence
gaaccaatctacaagtctctgtctt

SEQ ID NO: 56772 - DNA, 25 bp, Probe Sequence
ttgaaccaatctacaagtctctgtc

SEQ ID NO: 56773 - DNA, 25 bp, Probe Sequence
tatggacataacttgtgaaggatga

SEQ ID NO: 56774 - DNA, 25 bp, Probe Sequence
tgaaccaatctacaagtctctgtct

SEQ ID NO: 56775 - DNA, 25 bp, Probe Sequence
atatggacataacttgtgaaggatg

SEQ ID NO: 56776 - DNA, 25 bp, Probe Sequence
acttatagtgatgcgttggaaggtt

SEQ ID NO: 56777 - DNA, 25 bp, Probe Sequence
aacttatagtgatgcgttggaaggt

SEQ ID NO: 56778 - DNA, 25 bp, Probe Sequence
atagatgagataaggagagtcagaa

SEQ ID NO: 56779 - DNA, 25 bp, Probe Sequence
aatagatgagataaggagagtcaga

SEQ ID NO: 56780 - DNA, 25 bp, Probe Sequence
tctcttgttatctgcatctcattgt

SEQ ID NO: 56781 - DNA, 25 bp, Probe Sequence
ctcttgttatctgcatctcattgtt

SEQ ID NO: 56782 - DNA, 25 bp, Probe Sequence
tgtatctcttgttatctgcatctca

SEQ ID NO: 56783 - DNA, 25 bp, Probe Sequence
atctcttgttatctgcatctcattg

SEQ ID NO: 56784 - DNA, 25 bp, Probe Sequence
gagataaggagagtcagaaacaaac

SEQ ID NO: 56785 - DNA, 25 bp, Probe Sequence
tatacacaacaggcatttaagcaat

SEQ ID NO: 56786 - DNA, 25 bp, Probe Sequence
catttcctgatattcctttgtccat

SEQ ID NO: 56787 - DNA, 25 bp, Probe Sequence
agcatttcctgatattcctttgtcc

SEQ ID NO: 56788 - DNA, 25 bp, Probe Sequence
tagcatttcctgatattcctttgtc

SEQ ID NO: 56789 - DNA, 25 bp, Probe Sequence
agagaagtggatgaaatagatgaga

SEQ ID NO: 56790 - DNA, 25 bp, Probe Sequence
tattgatgcgatgaagagagttgaa

SEQ ID NO: 56791 - DNA, 25 bp, Probe Sequence
ctattgatgcgatgaagagagttga

SEQ ID NO: 56792 - DNA, 25 bp, Probe Sequence
gttccaacttgtgattcctgataga

SEQ ID NO: 56793 - DNA, 25 bp, Probe Sequence
ttccaacttgtgattcctgatagaa

SEQ ID NO: 56794 - DNA, 25 bp, Probe Sequence
tccaacttgtgattcctgatagaac

SEQ ID NO: 56795 - DNA, 25 bp, Probe Sequence
attgatgcgatgaagagagttgaag

SEQ ID NO: 56796 - DNA, 25 bp, Probe Sequence
tcagatattacggatgttagattgc

SEQ ID NO: 56797 - DNA, 25 bp, Probe Sequence
actattgatgcgatgaagagagttg

SEQ ID NO: 56798 - DNA, 25 bp, Probe Sequence
cttctgataggtagttgtggatgct

SEQ ID NO: 56799 - DNA, 25 bp, Probe Sequence
ccaacttgtgattcctgatagaaca

SEQ ID NO: 56800 - DNA, 25 bp, Probe Sequence
gcatcttagaagagcataatgacat

SEQ ID NO: 56801 - DNA, 25 bp, Probe Sequence
cttgtgattcctgatagaacagact

SEQ ID NO: 56802 - DNA, 25 bp, Probe Sequence
acttgtgattcctgatagaacagac

SEQ ID NO: 56803 - DNA, 25 bp, Probe Sequence
caacttgtgattcctgatagaacag

SEQ ID NO: 56804 - DNA, 25 bp, Probe Sequence
agaatactcagttccaacttgtgat

SEQ ID NO: 56805 - DNA, 25 bp, Probe Sequence
ttgtgattcctgatagaacagactt

SEQ ID NO: 56806 - DNA, 25 bp, Probe Sequence
aacttgtgattcctgatagaacaga

SEQ ID NO: 56807 - DNA, 25 bp, Probe Sequence
ttctgataggtagttgtggatgctg

SEQ ID NO: 56808 - DNA, 25 bp, Probe Sequence
agttccaacttgtgattcctgatag

SEQ ID NO: 56809 - DNA, 25 bp, Probe Sequence
atactcagttccaacttgtgattcc

SEQ ID NO: 56810 - DNA, 25 bp, Probe Sequence
aatactcagttccaacttgtgattc

SEQ ID NO: 56811 - DNA, 25 bp, Probe Sequence
gaatactcagttccaacttgtgatt

SEQ ID NO: 56812 - DNA, 25 bp, Probe Sequence
gcattgccatctacataatatcaga

SEQ ID NO: 56813 - DNA, 25 bp, Probe Sequence
gagaatactcagttccaacttgtga

SEQ ID NO: 56814 - DNA, 25 bp, Probe Sequence
taacagaggaagcgagagaaggtat

SEQ ID NO: 56815 - DNA, 25 bp, Probe Sequence
ttaacagaggaagcgagagaaggta

SEQ ID NO: 56816 - DNA, 25 bp, Probe Sequence
aatatagagggttggagttgttagc

SEQ ID NO: 56817 - DNA, 25 bp, Probe Sequence
ggtatacaatggactgcaaggatat

SEQ ID NO: 56818 - DNA, 25 bp, Probe Sequence
atatagagggttggagttgttagca

SEQ ID NO: 56819 - DNA, 25 bp, Probe Sequence
aaacacaatatagagggttggagtt

SEQ ID NO: 56820 - DNA, 25 bp, Probe Sequence
gaaacacaatatagagggttggagt

SEQ ID NO: 56821 - DNA, 25 bp, Probe Sequence
agaaacacaatatagagggttggag

SEQ ID NO: 56822 - DNA, 25 bp, Probe Sequence
aggtatacaatggactgcaaggata

SEQ ID NO: 56823 - DNA, 25 bp, Probe Sequence
actgcaaggatattgagagtgaata

SEQ ID NO: 56824 - DNA, 25 bp, Probe Sequence
aagaaacacaatatagagggttgga

SEQ ID NO: 56825 - DNA, 25 bp, Probe Sequence
gactgcaaggatattgagagtgaat

SEQ ID NO: 56826 - DNA, 25 bp, Probe Sequence
aacacaatatagagggttggagttg

SEQ ID NO: 56827 - DNA, 25 bp, Probe Sequence
acaacaacaatatcaagggctcttt

SEQ ID NO: 56828 - DNA, 25 bp, Probe Sequence
tggagttgttagcaatttcattcaa

SEQ ID NO: 56829 - DNA, 25 bp, Probe Sequence
ttggagttgttagcaatttcattca

SEQ ID NO: 56830 - DNA, 25 bp, Probe Sequence
ggttggagttgttagcaatttcatt

SEQ ID NO: 56831 - DNA, 25 bp, Probe Sequence
cccaactttgacaacaacaatatca

SEQ ID NO: 56832 - DNA, 25 bp, Probe Sequence
gtatacaatggactgcaaggatatt

SEQ ID NO: 56833 - DNA, 25 bp, Probe Sequence
gttggagttgttagcaatttcattc

SEQ ID NO: 56834 - DNA, 25 bp, Probe Sequence
caacaacaatatcaagggctctttg

SEQ ID NO: 56835 - DNA, 25 bp, Probe Sequence
aaagaaacacaatatagagggttgg

SEQ ID NO: 56836 - DNA, 25 bp, Probe Sequence
ctgcaaggatattgagagtgaataa

SEQ ID NO: 56837 - DNA, 25 bp, Probe Sequence
tatagagggttggagttgttagcaa

SEQ ID NO: 56838 - DNA, 25 bp, Probe Sequence
gtggtatccgaggttcttaatatga

SEQ ID NO: 56839 - DNA, 25 bp, Probe Sequence
agtggtatccgaggttcttaatatg

SEQ ID NO: 56840 - DNA, 25 bp, Probe Sequence
tggtatccgaggttcttaatatgag

SEQ ID NO: 56841 - DNA, 25 bp, Probe Sequence
cttggaagagataggaatgagttct

SEQ ID NO: 56842 - DNA, 25 bp, Probe Sequence
ttgaagaagactgatgagactaggt

SEQ ID NO: 56843 - DNA, 25 bp, Probe Sequence
ggtatccgaggttcttaatatgaga

SEQ ID NO: 56844 - DNA, 25 bp, Probe Sequence
aagtggtatccgaggttcttaatat

SEQ ID NO: 56845 - DNA, 25 bp, Probe Sequence
ggaatgagttcttatctagtgttgc

SEQ ID NO: 56846 - DNA, 25 bp, Probe Sequence
tgaagaagactgatgagactaggtg

SEQ ID NO: 56847 - DNA, 25 bp, Probe Sequence
tcttggaagagataggaatgagttc

SEQ ID NO: 56848 - DNA, 25 bp, Probe Sequence
ttcttggaagagataggaatgagtt

SEQ ID NO: 56849 - DNA, 25 bp, Probe Sequence
ctaagtggtatccgaggttcttaat

SEQ ID NO: 56850 - DNA, 25 bp, Probe Sequence
gagagcattcctactcacataagtg

SEQ ID NO: 56851 - DNA, 25 bp, Probe Sequence
ttctgtcacaatgctaagtggtatc

SEQ ID NO: 56852 - DNA, 25 bp, Probe Sequence
cttctgtcacaatgctaagtggtat

SEQ ID NO: 56853 - DNA, 25 bp, Probe Sequence
aggaatgagttcttatctagtgttg

SEQ ID NO: 56854 - DNA, 25 bp, Probe Sequence
cattcagtgatgttggatgtatatc

SEQ ID NO: 56855 - DNA, 25 bp, Probe Sequence
cgagagcattcctactcacataagt

SEQ ID NO: 56856 - DNA, 25 bp, Probe Sequence
taagtggtatccgaggttcttaata

SEQ ID NO: 56857 - DNA, 25 bp, Probe Sequence
gaagaagactgatgagactaggtgc

SEQ ID NO: 56858 - DNA, 25 bp, Probe Sequence
gctaagtggtatccgaggttcttaa

SEQ ID NO: 56859 - DNA, 25 bp, Probe Sequence
tcttctgtcacaatgctaagtggta

SEQ ID NO: 56860 - DNA, 25 bp, Probe Sequence
atgagttcttatctagtgttgcagg

SEQ ID NO: 56861 - DNA, 25 bp, Probe Sequence
gtatccgaggttcttaatatgagat

SEQ ID NO: 56862 - DNA, 25 bp, Probe Sequence
cttaggagacagaatggaaacggag

SEQ ID NO: 56863 - DNA, 25 bp, Probe Sequence
tactttctggagtaatcaggtggaa

SEQ ID NO: 56864 - DNA, 25 bp, Probe Sequence
gctgttgctccataactctaaccag

SEQ ID NO: 56865 - DNA, 25 bp, Probe Sequence
tttctggagtaatcaggtggaaatc

SEQ ID NO: 56866 - DNA, 25 bp, Probe Sequence
ctttctggagtaatcaggtggaaat

SEQ ID NO: 56867 - DNA, 25 bp, Probe Sequence
ttctggagtaatcaggtggaaatcc

SEQ ID NO: 56868 - DNA, 25 bp, Probe Sequence
aattccaagacagactctcgtcctc

SEQ ID NO: 56869 - DNA, 25 bp, Probe Sequence
aggtggaaatccatagacaaatgaa

SEQ ID NO: 56870 - DNA, 25 bp, Probe Sequence
atcaggtggaaatccatagacaaat

SEQ ID NO: 56871 - DNA, 25 bp, Probe Sequence
aatcaggtggaaatccatagacaaa

SEQ ID NO: 56872 - DNA, 25 bp, Probe Sequence
gtaatcaggtggaaatccatagaca

SEQ ID NO: 56873 - DNA, 25 bp, Probe Sequence
aaacctaaaccctgtttcacaatct

SEQ ID NO: 56874 - DNA, 25 bp, Probe Sequence
agtaatcaggtggaaatccatagac

SEQ ID NO: 56875 - DNA, 25 bp, Probe Sequence
gagtaatcaggtggaaatccataga

SEQ ID NO: 56876 - DNA, 25 bp, Probe Sequence
ggagtaatcaggtggaaatccatag

SEQ ID NO: 56877 - DNA, 25 bp, Probe Sequence
ggtggaaatccatagacaaatgaaa

SEQ ID NO: 56878 - DNA, 25 bp, Probe Sequence
taatcaggtggaaatccatagacaa

SEQ ID NO: 56879 - DNA, 25 bp, Probe Sequence
caggtggaaatccatagacaaatga

SEQ ID NO: 56880 - DNA, 25 bp, Probe Sequence
tcaggtggaaatccatagacaaatg

SEQ ID NO: 56881 - DNA, 25 bp, Probe Sequence
actttctggagtaatcaggtggaaa

SEQ ID NO: 56882 - DNA, 25 bp, Probe Sequence
aacctaaaccctgtttcacaatctg

SEQ ID NO: 56883 - DNA, 25 bp, Probe Sequence
caattccaagacagactctcgtcct

SEQ ID NO: 56884 - DNA, 25 bp, Probe Sequence
ggctgttgctccataactctaacca

SEQ ID NO: 56885 - DNA, 25 bp, Probe Sequence
ttaggagacagaatggaaacggagg

SEQ ID NO: 56886 - DNA, 25 bp, Probe Sequence
aaggtacatttctttgggtttctag

SEQ ID NO: 56887 - DNA, 25 bp, Probe Sequence
ctaagtcacctgcttcattagacgg

SEQ ID NO: 56888 - DNA, 25 bp, Probe Sequence
cctaagtcacctgcttcattagacg

SEQ ID NO: 56889 - DNA, 25 bp, Probe Sequence
ttaaggtacatttctttgggtttct

SEQ ID NO: 56890 - DNA, 25 bp, Probe Sequence
tgtccacacagtaataaacggttta

SEQ ID NO: 56891 - DNA, 25 bp, Probe Sequence
tttaaggtacatttctttgggtttc

SEQ ID NO: 56892 - DNA, 25 bp, Probe Sequence
taaggtacatttctttgggtttcta

SEQ ID NO: 56893 - DNA, 25 bp, Probe Sequence
gagatggacatccagagaagacaag

SEQ ID NO: 56894 - DNA, 25 bp, Probe Sequence
gtccacacagtaataaacggtttac

SEQ ID NO: 56895 - DNA, 25 bp, Probe Sequence
atgagatggacatccagagaagaca

SEQ ID NO: 56896 - DNA, 25 bp, Probe Sequence
atttaaggtacatttctttgggttt

SEQ ID NO: 56897 - DNA, 25 bp, Probe Sequence
gatggacatccagagaagacaagtg

SEQ ID NO: 56898 - DNA, 25 bp, Probe Sequence
taagtcacctgcttcattagacggt

SEQ ID NO: 56899 - DNA, 25 bp, Probe Sequence
ccctaagtcacctgcttcattagac

SEQ ID NO: 56900 - DNA, 25 bp, Probe Sequence
agatggacatccagagaagacaagt

SEQ ID NO: 56901 - DNA, 25 bp, Probe Sequence
tgagatggacatccagagaagacaa

SEQ ID NO: 56902 - DNA, 25 bp, Probe Sequence
gatgaagcaggagatcctagaggag

SEQ ID NO: 56903 - DNA, 25 bp, Probe Sequence
gtgtccacacagtaataaacggttt

SEQ ID NO: 56904 - DNA, 25 bp, Probe Sequence
tcatggtgttgaaactgtctgtcat

SEQ ID NO: 56905 - DNA, 25 bp, Probe Sequence
gcttcattagacggtttccaggttt

SEQ ID NO: 56906 - DNA, 25 bp, Probe Sequence
tggacatccagagaagacaagtgat

SEQ ID NO: 56907 - DNA, 25 bp, Probe Sequence
atggacatccagagaagacaagtga

SEQ ID NO: 56908 - DNA, 25 bp, Probe Sequence
cgtcaggaatctctagaaagaagaa

SEQ ID NO: 56909 - DNA, 25 bp, Probe Sequence
cttcattagacggtttccaggtttt

SEQ ID NO: 56910 - DNA, 25 bp, Probe Sequence
aggttaatggcttgtggaagagttc

SEQ ID NO: 56911 - DNA, 25 bp, Probe Sequence
gaggttaatggcttgtggaagagtt

SEQ ID NO: 56912 - DNA, 25 bp, Probe Sequence
ctcacatctgtaatcccaatgcttt

SEQ ID NO: 56913 - DNA, 25 bp, Probe Sequence
gctttggagtacagtctttatgaag

SEQ ID NO: 56914 - DNA, 25 bp, Probe Sequence
tagaggtctagcacttcctagtagg

SEQ ID NO: 56915 - DNA, 25 bp, Probe Sequence
cgctttggagtacagtctttatgaa

SEQ ID NO: 56916 - DNA, 25 bp, Probe Sequence
gtctttatgaagttgtttgtaagca

SEQ ID NO: 56917 - DNA, 25 bp, Probe Sequence
ctagaggtctagcacttcctagtag

SEQ ID NO: 56918 - DNA, 25 bp, Probe Sequence
ctctgtcctagttggttaaacatca

SEQ ID NO: 56919 - DNA, 25 bp, Probe Sequence
tctctgtcctagttggttaaacatc

SEQ ID NO: 56920 - DNA, 25 bp, Probe Sequence
tctgtcctagttggttaaacatcat

SEQ ID NO: 56921 - DNA, 25 bp, Probe Sequence
tcacatctgtaatcccaatgctttg

SEQ ID NO: 56922 - DNA, 25 bp, Probe Sequence
atctctgtcctagttggttaaacat

SEQ ID NO: 56923 - DNA, 25 bp, Probe Sequence
agtctttatgaagttgtttgtaagc

SEQ ID NO: 56924 - DNA, 25 bp, Probe Sequence
ttggagtacagtctttatgaagttg

SEQ ID NO: 56925 - DNA, 25 bp, Probe Sequence
taccgctttggagtacagtctttat

SEQ ID NO: 56926 - DNA, 25 bp, Probe Sequence
ctttagtatctgaaggtttgagtca

SEQ ID NO: 56927 - DNA, 25 bp, Probe Sequence
ctgtcctagttggttaaacatcatt

SEQ ID NO: 56928 - DNA, 25 bp, Probe Sequence
tggagtacagtctttatgaagttgt

SEQ ID NO: 56929 - DNA, 25 bp, Probe Sequence
ctttggagtacagtctttatgaagt

SEQ ID NO: 56930 - DNA, 25 bp, Probe Sequence
tatctctgtcctagttggttaaaca

SEQ ID NO: 56931 - DNA, 25 bp, Probe Sequence
tgtcctagttggttaaacatcattt

SEQ ID NO: 56932 - DNA, 25 bp, Probe Sequence
ttatctctgtcctagttggttaaac

SEQ ID NO: 56933 - DNA, 25 bp, Probe Sequence
tttggagtacagtctttatgaagtt

SEQ ID NO: 56934 - DNA, 25 bp, Probe Sequence
ccaagttcctaagtagagcaagaat

SEQ ID NO: 56935 - DNA, 25 bp, Probe Sequence
actacagttcttactcctctcttcc

SEQ ID NO: 56936 - DNA, 25 bp, Probe Sequence
caagttcctaagtagagcaagaatt

SEQ ID NO: 56937 - DNA, 25 bp, Probe Sequence
tactacagttcttactcctctcttc

SEQ ID NO: 56938 - DNA, 25 bp, Probe Sequence
gatactacagttcttactcctctct

SEQ ID NO: 56939 - DNA, 25 bp, Probe Sequence
agatactacagttcttactcctctc

SEQ ID NO: 56940 - DNA, 25 bp, Probe Sequence
atactacagttcttactcctctctt

SEQ ID NO: 56941 - DNA, 25 bp, Probe Sequence
tcttactcctctcttccctttgtta

SEQ ID NO: 56942 - DNA, 25 bp, Probe Sequence
ctctcttccctttgttattcagtgt

SEQ ID NO: 56943 - DNA, 25 bp, Probe Sequence
tactcctctcttccctttgttattc

SEQ ID NO: 56944 - DNA, 25 bp, Probe Sequence
cttactcctctcttccctttgttat

SEQ ID NO: 56945 - DNA, 25 bp, Probe Sequence
ctcctctcttccctttgttattcag

SEQ ID NO: 56946 - DNA, 25 bp, Probe Sequence
tttgtaaatcttaacctcctgccta

SEQ ID NO: 56947 - DNA, 25 bp, Probe Sequence
tctcttccctttgttattcagtgtg

SEQ ID NO: 56948 - DNA, 25 bp, Probe Sequence
tttcctttaatttctcgcagtcttc

SEQ ID NO: 56949 - DNA, 25 bp, Probe Sequence
tttgtgtgtgtgtgtctgtctattt

SEQ ID NO: 56950 - DNA, 25 bp, Probe Sequence
catcttacaggtcctaaatcactca

SEQ ID NO: 56951 - DNA, 25 bp, Probe Sequence
cctctcttccctttgttattcagtg

SEQ ID NO: 56952 - DNA, 25 bp, Probe Sequence
ttactcctctcttccctttgttatt

SEQ ID NO: 56953 - DNA, 25 bp, Probe Sequence
ttcttactcctctcttccctttgtt

SEQ ID NO: 56954 - DNA, 25 bp, Probe Sequence
gattctctaccctcattcacatcta

SEQ ID NO: 56955 - DNA, 25 bp, Probe Sequence
tcttacaggtcctaaatcactcatc

SEQ ID NO: 56956 - DNA, 25 bp, Probe Sequence
tcatcttacaggtcctaaatcactc

SEQ ID NO: 56957 - DNA, 25 bp, Probe Sequence
tcctctcttccctttgttattcagt

SEQ ID NO: 56958 - DNA, 25 bp, Probe Sequence
ttgccatagcctgcttcttatacaa

SEQ ID NO: 56959 - DNA, 25 bp, Probe Sequence
tgccatagcctgcttcttatacaag

SEQ ID NO: 56960 - DNA, 25 bp, Probe Sequence
aatcacacgggaacttctatttgac

SEQ ID NO: 56961 - DNA, 25 bp, Probe Sequence
caatcacacgggaacttctatttga

SEQ ID NO: 56962 - DNA, 25 bp, Probe Sequence
ctttgccatagcctgcttcttatac

SEQ ID NO: 56963 - DNA, 25 bp, Probe Sequence
tctttgccatagcctgcttcttata

SEQ ID NO: 56964 - DNA, 25 bp, Probe Sequence
tttgccatagcctgcttcttataca

SEQ ID NO: 56965 - DNA, 25 bp, Probe Sequence
ggtgggaggaacttgcataaatata

SEQ ID NO: 56966 - DNA, 25 bp, Probe Sequence
ttgacctgcaaccttctacttaacc

SEQ ID NO: 56967 - DNA, 25 bp, Probe Sequence
tttgcatcagaacgtgtttatagaa

SEQ ID NO: 56968 - DNA, 25 bp, Probe Sequence
atatatttatggacacacagtttgc

SEQ ID NO: 56969 - DNA, 25 bp, Probe Sequence
tatttatggacacacagtttgcatc

SEQ ID NO: 56970 - DNA, 25 bp, Probe Sequence
ttctttgccatagcctgcttcttat

SEQ ID NO: 56971 - DNA, 25 bp, Probe Sequence
gcatcagaacgtgtttatagaatgt

SEQ ID NO: 56972 - DNA, 25 bp, Probe Sequence
tgcatcagaacgtgtttatagaatg

SEQ ID NO: 56973 - DNA, 25 bp, Probe Sequence
ttgcatcagaacgtgtttatagaat

SEQ ID NO: 56974 - DNA, 25 bp, Probe Sequence
gcaatcacacgggaacttctatttg

SEQ ID NO: 56975 - DNA, 25 bp, Probe Sequence
gtttgcatcagaacgtgtttataga

SEQ ID NO: 56976 - DNA, 25 bp, Probe Sequence
agtttgcatcagaacgtgtttatag

SEQ ID NO: 56977 - DNA, 25 bp, Probe Sequence
cagtttgcatcagaacgtgtttata

SEQ ID NO: 56978 - DNA, 25 bp, Probe Sequence
atatttatggacacacagtttgcat

SEQ ID NO: 56979 - DNA, 25 bp, Probe Sequence
gacctgcaaccttctacttaacctg

SEQ ID NO: 56980 - DNA, 25 bp, Probe Sequence
tatatttatggacacacagtttgca

SEQ ID NO: 56981 - DNA, 25 bp, Probe Sequence
atttgacctgcaaccttctacttaa

SEQ ID NO: 56982 - DNA, 25 bp, Probe Sequence
ataagtgctgtaaggcttgtaactg

SEQ ID NO: 56983 - DNA, 25 bp, Probe Sequence
cataagtgctgtaaggcttgtaact

SEQ ID NO: 56984 - DNA, 25 bp, Probe Sequence
gcataagtgctgtaaggcttgtaac

SEQ ID NO: 56985 - DNA, 25 bp, Probe Sequence
tgcataagtgctgtaaggcttgtaa

SEQ ID NO: 56986 - DNA, 25 bp, Probe Sequence
atgcataagtgctgtaaggcttgta

SEQ ID NO: 56987 - DNA, 25 bp, Probe Sequence
ttcattttagcagtgatgatatgca

SEQ ID NO: 56988 - DNA, 25 bp, Probe Sequence
tcattttagcagtgatgatatgcat

SEQ ID NO: 56989 - DNA, 25 bp, Probe Sequence
gtggatggactgaagtgtgtatatt

SEQ ID NO: 56990 - DNA, 25 bp, Probe Sequence
cttcttcttcctggtctactctctg

SEQ ID NO: 56991 - DNA, 25 bp, Probe Sequence
ggtggatggactgaagtgtgtatat

SEQ ID NO: 56992 - DNA, 25 bp, Probe Sequence
ttcttcttcctggtctactctctgg

SEQ ID NO: 56993 - DNA, 25 bp, Probe Sequence
tggatggactgaagtgtgtatattt

SEQ ID NO: 56994 - DNA, 25 bp, Probe Sequence
caactgttgctgataagatcctgtg

SEQ ID NO: 56995 - DNA, 25 bp, Probe Sequence
tggtggatggactgaagtgtgtata

SEQ ID NO: 56996 - DNA, 25 bp, Probe Sequence
gcttcttcttcctggtctactctct

SEQ ID NO: 56997 - DNA, 25 bp, Probe Sequence
tgcttcttcttcctggtctactctc

SEQ ID NO: 56998 - DNA, 25 bp, Probe Sequence
ctgcttcttcttcctggtctactct

SEQ ID NO: 56999 - DNA, 25 bp, Probe Sequence
aactgttgctgataagatcctgtgg

SEQ ID NO: 57000 - DNA, 25 bp, Probe Sequence
atggtggatggactgaagtgtgtat

SEQ ID NO: 57001 - DNA, 25 bp, Probe Sequence
cttcttcctggtctactctctggtg

SEQ ID NO: 57002 - DNA, 25 bp, Probe Sequence
gtctactctctggtggtcatccttc

SEQ ID NO: 57003 - DNA, 25 bp, Probe Sequence
tcttcttcctggtctactctctggt

SEQ ID NO: 57004 - DNA, 25 bp, Probe Sequence
agctgaggactttaatatctatggc

SEQ ID NO: 57005 - DNA, 25 bp, Probe Sequence
atcctcttctcctacaaatgccaag

SEQ ID NO: 57006 - DNA, 25 bp, Probe Sequence
aaccttcctgtacttcagcttcttc

SEQ ID NO: 57007 - DNA, 25 bp, Probe Sequence
gatcctcttctcctacaaatgccaa

SEQ ID NO: 57008 - DNA, 25 bp, Probe Sequence
caaccttcctgtacttcagcttctt

SEQ ID NO: 57009 - DNA, 25 bp, Probe Sequence
cctgcttcttcttcctggtctactc

SEQ ID NO: 57010 - DNA, 25 bp, Probe Sequence
ctcctgcttcttcttcctggtctac

SEQ ID NO: 57011 - DNA, 25 bp, Probe Sequence
tagatgccacaaccttcctgtactt

SEQ ID NO: 57012 - DNA, 25 bp, Probe Sequence
tcctgcttcttcttcctggtctact

SEQ ID NO: 57013 - DNA, 25 bp, Probe Sequence
atattgtggatgtgttcattcaagc

SEQ ID NO: 57014 - DNA, 25 bp, Probe Sequence
tgtatgattccaatctctgttctgt

SEQ ID NO: 57015 - DNA, 25 bp, Probe Sequence
caagattgttgataggaactgtctc

SEQ ID NO: 57016 - DNA, 25 bp, Probe Sequence
aagattgttgataggaactgtctca

SEQ ID NO: 57017 - DNA, 25 bp, Probe Sequence
gtatgattccaatctctgttctgtt

SEQ ID NO: 57018 - DNA, 25 bp, Probe Sequence
tgtatattgtggatgtgttcattca

SEQ ID NO: 57019 - DNA, 25 bp, Probe Sequence
tgttgtatgattccaatctctgttc

SEQ ID NO: 57020 - DNA, 25 bp, Probe Sequence
ttgtatgattccaatctctgttctg

SEQ ID NO: 57021 - DNA, 25 bp, Probe Sequence
gttgtatgattccaatctctgttct

SEQ ID NO: 57022 - DNA, 25 bp, Probe Sequence
atgttgtatgattccaatctctgtt

SEQ ID NO: 57023 - DNA, 25 bp, Probe Sequence
gtagagacaatacagtaagcatagt

SEQ ID NO: 57024 - DNA, 25 bp, Probe Sequence
atattagacatcaatcctggtaacc

SEQ ID NO: 57025 - DNA, 25 bp, Probe Sequence
ttgtatattgtggatgtgttcattc

SEQ ID NO: 57026 - DNA, 25 bp, Probe Sequence
gtatattgtggatgtgttcattcaa

SEQ ID NO: 57027 - DNA, 25 bp, Probe Sequence
tgtggatgtgttcattcaagctatt

SEQ ID NO: 57028 - DNA, 25 bp, Probe Sequence
tatgttgtatgattccaatctctgt

SEQ ID NO: 57029 - DNA, 25 bp, Probe Sequence
gacaatacagtaagcatagttaagg

SEQ ID NO: 57030 - DNA, 25 bp, Probe Sequence
ctgttctgtttggcacttgtattta

SEQ ID NO: 57031 - DNA, 25 bp, Probe Sequence
ttgtggatgtgttcattcaagctat

SEQ ID NO: 57032 - DNA, 25 bp, Probe Sequence
attgtggatgtgttcattcaagcta

SEQ ID NO: 57033 - DNA, 25 bp, Probe Sequence
tattgtggatgtgttcattcaagct

SEQ ID NO: 57034 - DNA, 25 bp, Probe Sequence
taatatctggcactgttaatacaca

SEQ ID NO: 57035 - DNA, 25 bp, Probe Sequence
tgttctgtttggcacttgtatttaa

SEQ ID NO: 57036 - DNA, 25 bp, Probe Sequence
tatattgtggatgtgttcattcaag

SEQ ID NO: 57037 - DNA, 25 bp, Probe Sequence
tcacacttaactcatctaactgctt

SEQ ID NO: 57038 - DNA, 25 bp, Probe Sequence
catcacacttaactcatctaactgc

SEQ ID NO: 57039 - DNA, 25 bp, Probe Sequence
gcatcacacttaactcatctaactg

SEQ ID NO: 57040 - DNA, 25 bp, Probe Sequence
tcctatcacatatcctactactgcc

SEQ ID NO: 57041 - DNA, 25 bp, Probe Sequence
cacacttaactcatctaactgcttc

SEQ ID NO: 57042 - DNA, 25 bp, Probe Sequence
atcacacttaactcatctaactgct

SEQ ID NO: 57043 - DNA, 25 bp, Probe Sequence
acacttaactcatctaactgcttcc

SEQ ID NO: 57044 - DNA, 25 bp, Probe Sequence
ttcctatcacatatcctactactgc

SEQ ID NO: 57045 - DNA, 25 bp, Probe Sequence
aacaacaagaatgctgacaacgatt

SEQ ID NO: 57046 - DNA, 25 bp, Probe Sequence
tgacattcctatcacatatcctact

SEQ ID NO: 57047 - DNA, 25 bp, Probe Sequence
tatgtggagaacaacaagaatgctg

SEQ ID NO: 57048 - DNA, 25 bp, Probe Sequence
gtatgtggagaacaacaagaatgct

SEQ ID NO: 57049 - DNA, 25 bp, Probe Sequence
aggtgtcatatataggacggagtaa

SEQ ID NO: 57050 - DNA, 25 bp, Probe Sequence
gaacaacaagaatgctgacaacgat

SEQ ID NO: 57051 - DNA, 25 bp, Probe Sequence
tgataggtgtcatatataggacgga

SEQ ID NO: 57052 - DNA, 25 bp, Probe Sequence
ataggtgtcatatataggacggagt

SEQ ID NO: 57053 - DNA, 25 bp, Probe Sequence
gataggtgtcatatataggacggag

SEQ ID NO: 57054 - DNA, 25 bp, Probe Sequence
taggtgtcatatataggacggagta

SEQ ID NO: 57055 - DNA, 25 bp, Probe Sequence
ccacctctagttgttactaagtagc

SEQ ID NO: 57056 - DNA, 25 bp, Probe Sequence
tcatatataggacggagtaatctgt

SEQ ID NO: 57057 - DNA, 25 bp, Probe Sequence
ggtgtcatatataggacggagtaat

SEQ ID NO: 57058 - DNA, 25 bp, Probe Sequence
tgcatcacacttaactcatctaact

SEQ ID NO: 57059 - DNA, 25 bp, Probe Sequence
ttgacattcctatcacatatcctac

SEQ ID NO: 57060 - DNA, 25 bp, Probe Sequence
cctccacctctagttgttactaagt

SEQ ID NO: 57061 - DNA, 25 bp, Probe Sequence
gtgtgttctctctatagttctgtgt

SEQ ID NO: 57062 - DNA, 25 bp, Probe Sequence
tgtgtgttctctctatagttctgtg

SEQ ID NO: 57063 - DNA, 25 bp, Probe Sequence
gtgttctctctatagttctgtgtca

SEQ ID NO: 57064 - DNA, 25 bp, Probe Sequence
tgtgttctctctatagttctgtgtc

SEQ ID NO: 57065 - DNA, 25 bp, Probe Sequence
ctgtgtgttctctctatagttctgt

SEQ ID NO: 57066 - DNA, 25 bp, Probe Sequence
gctgtgtgttctctctatagttctg

SEQ ID NO: 57067 - DNA, 25 bp, Probe Sequence
ctgctgtgtgttctctctatagttc

SEQ ID NO: 57068 - DNA, 25 bp, Probe Sequence
attaagaatgtgacagagctgaagc

SEQ ID NO: 57069 - DNA, 25 bp, Probe Sequence
tgctgtgtgttctctctatagttct

SEQ ID NO: 57070 - DNA, 25 bp, Probe Sequence
tgttctctctatagttctgtgtcat

SEQ ID NO: 57071 - DNA, 25 bp, Probe Sequence
aaggatggatttcaaatacactgtg

SEQ ID NO: 57072 - DNA, 25 bp, Probe Sequence
tcgaagatagcagagtcatagttgg

SEQ ID NO: 57073 - DNA, 25 bp, Probe Sequence
aaaggatggatttcaaatacactgt

SEQ ID NO: 57074 - DNA, 25 bp, Probe Sequence
taacaaagatgccgtcattgaattt

SEQ ID NO: 57075 - DNA, 25 bp, Probe Sequence
ataacaaagatgccgtcattgaatt

SEQ ID NO: 57076 - DNA, 25 bp, Probe Sequence
tgaagacaaggatggaggagagaag

SEQ ID NO: 57077 - DNA, 25 bp, Probe Sequence
ctgaagacaaggatggaggagagaa

SEQ ID NO: 57078 - DNA, 25 bp, Probe Sequence
gatttcaaatacactgtgcccacta

SEQ ID NO: 57079 - DNA, 25 bp, Probe Sequence
atttcaaatacactgtgcccactag

SEQ ID NO: 57080 - DNA, 25 bp, Probe Sequence
aacaaagatgccgtcattgaatttc

SEQ ID NO: 57081 - DNA, 25 bp, Probe Sequence
aaagatgccgtcattgaatttctct

SEQ ID NO: 57082 - DNA, 25 bp, Probe Sequence
aggatggatttcaaatacactgtgc

SEQ ID NO: 57083 - DNA, 25 bp, Probe Sequence
ttgaatttctcttggacaaatctgc

SEQ ID NO: 57084 - DNA, 25 bp, Probe Sequence
caaagatgccgtcattgaatttctc

SEQ ID NO: 57085 - DNA, 25 bp, Probe Sequence
tcaagtctataagaggtatgtgctt

SEQ ID NO: 57086 - DNA, 25 bp, Probe Sequence
ctcaagtctataagaggtatgtgct

SEQ ID NO: 57087 - DNA, 25 bp, Probe Sequence
tctcaagtctataagaggtatgtgc

SEQ ID NO: 57088 - DNA, 25 bp, Probe Sequence
gaaccacactgatgccttgataatt

SEQ ID NO: 57089 - DNA, 25 bp, Probe Sequence
taagaaccacactgatgccttgata

SEQ ID NO: 57090 - DNA, 25 bp, Probe Sequence
agaaccacactgatgccttgataat

SEQ ID NO: 57091 - DNA, 25 bp, Probe Sequence
aagaaccacactgatgccttgataa

SEQ ID NO: 57092 - DNA, 25 bp, Probe Sequence
ttaagaaccacactgatgccttgat

SEQ ID NO: 57093 - DNA, 25 bp, Probe Sequence
gcaattctcaagtctataagaggta

SEQ ID NO: 57094 - DNA, 25 bp, Probe Sequence
caagtctataagaggtatgtgctta

SEQ ID NO: 57095 - DNA, 25 bp, Probe Sequence
ttctcaagtctataagaggtatgtg

SEQ ID NO: 57096 - DNA, 25 bp, Probe Sequence
tgcaattctcaagtctataagaggt

SEQ ID NO: 57097 - DNA, 25 bp, Probe Sequence
ctgtaaacttcattctgtgggctag

SEQ ID NO: 57098 - DNA, 25 bp, Probe Sequence
atgcaattctcaagtctataagagg

SEQ ID NO: 57099 - DNA, 25 bp, Probe Sequence
aagtctataagaggtatgtgcttaa

SEQ ID NO: 57100 - DNA, 25 bp, Probe Sequence
gtaaacttcattctgtgggctagtg

SEQ ID NO: 57101 - DNA, 25 bp, Probe Sequence
ctttaagaaccacactgatgccttg

SEQ ID NO: 57102 - DNA, 25 bp, Probe Sequence
agttaggtactgtaagtgttcttaa

SEQ ID NO: 57103 - DNA, 25 bp, Probe Sequence
aagttaggtactgtaagtgttctta

SEQ ID NO: 57104 - DNA, 25 bp, Probe Sequence
agtctataagaggtatgtgcttaat

SEQ ID NO: 57105 - DNA, 25 bp, Probe Sequence
tgtaaacttcattctgtgggctagt

SEQ ID NO: 57106 - DNA, 25 bp, Probe Sequence
attctcaagtctataagaggtatgt

SEQ ID NO: 57107 - DNA, 25 bp, Probe Sequence
tcaatgcaattctcaagtctataag

SEQ ID NO: 57108 - DNA, 25 bp, Probe Sequence
tttaagaaccacactgatgccttga

SEQ ID NO: 57109 - DNA, 25 bp, Probe Sequence
acctccttattgctgtagtaattgg

SEQ ID NO: 57110 - DNA, 25 bp, Probe Sequence
tccttattgctgtagtaattggcta

SEQ ID NO: 57111 - DNA, 25 bp, Probe Sequence
ctccttattgctgtagtaattggct

SEQ ID NO: 57112 - DNA, 25 bp, Probe Sequence
ttacctgtctacctccttattgctg

SEQ ID NO: 57113 - DNA, 25 bp, Probe Sequence
cctccttattgctgtagtaattggc

SEQ ID NO: 57114 - DNA, 25 bp, Probe Sequence
tacctccttattgctgtagtaattg

SEQ ID NO: 57115 - DNA, 25 bp, Probe Sequence
tacctgtctacctccttattgctgt

SEQ ID NO: 57116 - DNA, 25 bp, Probe Sequence
acctgtctacctccttattgctgta

SEQ ID NO: 57117 - DNA, 25 bp, Probe Sequence
agttgaccttctcttagattatgtt

SEQ ID NO: 57118 - DNA, 25 bp, Probe Sequence
aagttgaccttctcttagattatgt

SEQ ID NO: 57119 - DNA, 25 bp, Probe Sequence
gttgaccttctcttagattatgttc

SEQ ID NO: 57120 - DNA, 25 bp, Probe Sequence
cttattgctgtagtaattggctacg

SEQ ID NO: 57121 - DNA, 25 bp, Probe Sequence
tgtctacctccttattgctgtagta

SEQ ID NO: 57122 - DNA, 25 bp, Probe Sequence
ccttattgctgtagtaattggctac

SEQ ID NO: 57123 - DNA, 25 bp, Probe Sequence
gtctacctccttattgctgtagtaa

SEQ ID NO: 57124 - DNA, 25 bp, Probe Sequence
atgtaagttgaccttctcttagatt

SEQ ID NO: 57125 - DNA, 25 bp, Probe Sequence
aatgtaagttgaccttctcttagat

SEQ ID NO: 57126 - DNA, 25 bp, Probe Sequence
ctgtctacctccttattgctgtagt

SEQ ID NO: 57127 - DNA, 25 bp, Probe Sequence
tctacctccttattgctgtagtaat

SEQ ID NO: 57128 - DNA, 25 bp, Probe Sequence
cctgtctacctccttattgctgtag

SEQ ID NO: 57129 - DNA, 25 bp, Probe Sequence
tgtaagttgaccttctcttagatta

SEQ ID NO: 57130 - DNA, 25 bp, Probe Sequence
ctacctccttattgctgtagtaatt

SEQ ID NO: 57131 - DNA, 25 bp, Probe Sequence
gtggaggagacagatggtactttac

SEQ ID NO: 57132 - DNA, 25 bp, Probe Sequence
ttattgctgtagtaattggctacgt

SEQ ID NO: 57133 - DNA, 25 bp, Probe Sequence
acctccttattgctgtagtaattgg

SEQ ID NO: 57134 - DNA, 25 bp, Probe Sequence
tccttattgctgtagtaattggcta

SEQ ID NO: 57135 - DNA, 25 bp, Probe Sequence
ctccttattgctgtagtaattggct

SEQ ID NO: 57136 - DNA, 25 bp, Probe Sequence
ttacctgtctacctccttattgctg

SEQ ID NO: 57137 - DNA, 25 bp, Probe Sequence
cctccttattgctgtagtaattggc

SEQ ID NO: 57138 - DNA, 25 bp, Probe Sequence
tacctccttattgctgtagtaattg

SEQ ID NO: 57139 - DNA, 25 bp, Probe Sequence
tacctgtctacctccttattgctgt

SEQ ID NO: 57140 - DNA, 25 bp, Probe Sequence
acctgtctacctccttattgctgta

SEQ ID NO: 57141 - DNA, 25 bp, Probe Sequence
agttgaccttctcttagattatgtt

SEQ ID NO: 57142 - DNA, 25 bp, Probe Sequence
aagttgaccttctcttagattatgt

SEQ ID NO: 57143 - DNA, 25 bp, Probe Sequence
gttgaccttctcttagattatgttc

SEQ ID NO: 57144 - DNA, 25 bp, Probe Sequence
cttattgctgtagtaattggctacg

SEQ ID NO: 57145 - DNA, 25 bp, Probe Sequence
tgtctacctccttattgctgtagta

SEQ ID NO: 57146 - DNA, 25 bp, Probe Sequence
ccttattgctgtagtaattggctac

SEQ ID NO: 57147 - DNA, 25 bp, Probe Sequence
gtctacctccttattgctgtagtaa

SEQ ID NO: 57148 - DNA, 25 bp, Probe Sequence
atgtaagttgaccttctcttagatt

SEQ ID NO: 57149 - DNA, 25 bp, Probe Sequence
aatgtaagttgaccttctcttagat

SEQ ID NO: 57150 - DNA, 25 bp, Probe Sequence
ctgtctacctccttattgctgtagt

SEQ ID NO: 57151 - DNA, 25 bp, Probe Sequence
tctacctccttattgctgtagtaat

SEQ ID NO: 57152 - DNA, 25 bp, Probe Sequence
cctgtctacctccttattgctgtag

SEQ ID NO: 57153 - DNA, 25 bp, Probe Sequence
tgtaagttgaccttctcttagatta

SEQ ID NO: 57154 - DNA, 25 bp, Probe Sequence
ctacctccttattgctgtagtaatt

SEQ ID NO: 57155 - DNA, 25 bp, Probe Sequence
gtggaggagacagatggtactttac

SEQ ID NO: 57156 - DNA, 25 bp, Probe Sequence
ttattgctgtagtaattggctacgt

SEQ ID NO: 57157 - DNA, 25 bp, Probe Sequence
accgattaacacttctaatgagtca

SEQ ID NO: 57158 - DNA, 25 bp, Probe Sequence
ccgattaacacttctaatgagtcaa

SEQ ID NO: 57159 - DNA, 25 bp, Probe Sequence
aaccgattaacacttctaatgagtc

SEQ ID NO: 57160 - DNA, 25 bp, Probe Sequence
cgattaacacttctaatgagtcaag

SEQ ID NO: 57161 - DNA, 25 bp, Probe Sequence
gactttataccttcatttcagcgtg

SEQ ID NO: 57162 - DNA, 25 bp, Probe Sequence
actttataccttcatttcagcgtgg

SEQ ID NO: 57163 - DNA, 25 bp, Probe Sequence
tgactttataccttcatttcagcgt

SEQ ID NO: 57164 - DNA, 25 bp, Probe Sequence
gcacagactgactttataccttcat

SEQ ID NO: 57165 - DNA, 25 bp, Probe Sequence
aaaccgattaacacttctaatgagt

SEQ ID NO: 57166 - DNA, 25 bp, Probe Sequence
cacagactgactttataccttcatt

SEQ ID NO: 57167 - DNA, 25 bp, Probe Sequence
agcacagactgactttataccttca

SEQ ID NO: 57168 - DNA, 25 bp, Probe Sequence
acacttctaatgagtcaagtcctag

SEQ ID NO: 57169 - DNA, 25 bp, Probe Sequence
aacacttctaatgagtcaagtccta

SEQ ID NO: 57170 - DNA, 25 bp, Probe Sequence
taacacttctaatgagtcaagtcct

SEQ ID NO: 57171 - DNA, 25 bp, Probe Sequence
cagcacagactgactttataccttc

SEQ ID NO: 57172 - DNA, 25 bp, Probe Sequence
atgatcttacttccaaatctccttg

SEQ ID NO: 57173 - DNA, 25 bp, Probe Sequence
aaatctccttggaatttcacgacag

SEQ ID NO: 57174 - DNA, 25 bp, Probe Sequence
acagcacagactgactttatacctt

SEQ ID NO: 57175 - DNA, 25 bp, Probe Sequence
ttaacacttctaatgagtcaagtcc

SEQ ID NO: 57176 - DNA, 25 bp, Probe Sequence
acagactgactttataccttcattt

SEQ ID NO: 57177 - DNA, 25 bp, Probe Sequence
aatgatcttacttccaaatctcctt

SEQ ID NO: 57178 - DNA, 25 bp, Probe Sequence
caaatctccttggaatttcacgaca

SEQ ID NO: 57179 - DNA, 25 bp, Probe Sequence
agactgactttataccttcatttca

SEQ ID NO: 57180 - DNA, 25 bp, Probe Sequence
gacagcacagactgactttatacct

SEQ ID NO: 57181 - DNA, 25 bp, Probe Sequence
agatgtgtgtgtgagagtatgtatg

SEQ ID NO: 57182 - DNA, 25 bp, Probe Sequence
gatgtgtgtgtgagagtatgtatgt

SEQ ID NO: 57183 - DNA, 25 bp, Probe Sequence
atgtgtgtgtgagagtatgtatgtg

SEQ ID NO: 57184 - DNA, 25 bp, Probe Sequence
gagagtatgtatgtgtgtgtgtgtg

SEQ ID NO: 57185 - DNA, 25 bp, Probe Sequence
gtgagagtatgtatgtgtgtgtgtg

SEQ ID NO: 57186 - DNA, 25 bp, Probe Sequence
gtgtgagagtatgtatgtgtgtgtg

SEQ ID NO: 57187 - DNA, 25 bp, Probe Sequence
gtgtgtgagagtatgtatgtgtgtg

SEQ ID NO: 57188 - DNA, 25 bp, Probe Sequence
gtgtgtgtgagagtatgtatgtgtg

SEQ ID NO: 57189 - DNA, 25 bp, Probe Sequence
tgagagtatgtatgtgtgtgtgtgt

SEQ ID NO: 57190 - DNA, 25 bp, Probe Sequence
tgtgagagtatgtatgtgtgtgtgt

SEQ ID NO: 57191 - DNA, 25 bp, Probe Sequence
tgtgtgagagtatgtatgtgtgtgt

SEQ ID NO: 57192 - DNA, 25 bp, Probe Sequence
tgtgtgtgagagtatgtatgtgtgt

SEQ ID NO: 57193 - DNA, 25 bp, Probe Sequence
tgtgtgtgtgagagtatgtatgtgt

SEQ ID NO: 57194 - DNA, 25 bp, Probe Sequence
gagtatgtatgtgtgtgtgtgtgtg

SEQ ID NO: 57195 - DNA, 25 bp, Probe Sequence
agagtatgtatgtgtgtgtgtgtgt

SEQ ID NO: 57196 - DNA, 25 bp, Probe Sequence
aagatgtgtgtgtgagagtatgtat

SEQ ID NO: 57197 - DNA, 25 bp, Probe Sequence
gtatgtatgtgtgtgtgtgtgtgtg

SEQ ID NO: 57198 - DNA, 25 bp, Probe Sequence
agtatgtatgtgtgtgtgtgtgtgt

SEQ ID NO: 57199 - DNA, 25 bp, Probe Sequence
tactaacaggatataggacaaggtg

SEQ ID NO: 57200 - DNA, 25 bp, Probe Sequence
gagacattgatggcagttcttatct

SEQ ID NO: 57201 - DNA, 25 bp, Probe Sequence
agagacattgatggcagttcttatc

SEQ ID NO: 57202 - DNA, 25 bp, Probe Sequence
cagagacattgatggcagttcttat

SEQ ID NO: 57203 - DNA, 25 bp, Probe Sequence
tatgtatgtgtgtgtgtgtgtgtgt

SEQ ID NO: 57204 - DNA, 25 bp, Probe Sequence
actaacaggatataggacaaggtgt

SEQ ID NO: 57205 - DNA, 25 bp, Probe Sequence
aagttctagtgagtgagttatggtg

SEQ ID NO: 57206 - DNA, 25 bp, Probe Sequence
agtgagttatggtgctggctatatt

SEQ ID NO: 57207 - DNA, 25 bp, Probe Sequence
taagttctagtgagtgagttatggt

SEQ ID NO: 57208 - DNA, 25 bp, Probe Sequence
gagtgagttatggtgctggctatat

SEQ ID NO: 57209 - DNA, 25 bp, Probe Sequence
tgctctgaataagttctagtgagtg

SEQ ID NO: 57210 - DNA, 25 bp, Probe Sequence
gctctgaataagttctagtgagtga

SEQ ID NO: 57211 - DNA, 25 bp, Probe Sequence
tctgaataagttctagtgagtgagt

SEQ ID NO: 57212 - DNA, 25 bp, Probe Sequence
ttgctctgaataagttctagtgagt

SEQ ID NO: 57213 - DNA, 25 bp, Probe Sequence
actactattgcttgtatattgtggt

SEQ ID NO: 57214 - DNA, 25 bp, Probe Sequence
ttctagtgagtgagttatggtgctg

SEQ ID NO: 57215 - DNA, 25 bp, Probe Sequence
gttctagtgagtgagttatggtgct

SEQ ID NO: 57216 - DNA, 25 bp, Probe Sequence
agttctagtgagtgagttatggtgc

SEQ ID NO: 57217 - DNA, 25 bp, Probe Sequence
ctgaataagttctagtgagtgagtt

SEQ ID NO: 57218 - DNA, 25 bp, Probe Sequence
aattgctctgaataagttctagtga

SEQ ID NO: 57219 - DNA, 25 bp, Probe Sequence
attgctctgaataagttctagtgag

SEQ ID NO: 57220 - DNA, 25 bp, Probe Sequence
ctctgaataagttctagtgagtgag

SEQ ID NO: 57221 - DNA, 25 bp, Probe Sequence
ataagttctagtgagtgagttatgg

SEQ ID NO: 57222 - DNA, 25 bp, Probe Sequence
gtgagttatggtgctggctatattt

SEQ ID NO: 57223 - DNA, 25 bp, Probe Sequence
tgagtgagttatggtgctggctata

SEQ ID NO: 57224 - DNA, 25 bp, Probe Sequence
tatattgtggtatacggtgtcaggt

SEQ ID NO: 57225 - DNA, 25 bp, Probe Sequence
cttagagttccacggtttgtttaca

SEQ ID NO: 57226 - DNA, 25 bp, Probe Sequence
tgactgtttattctcttgaccaaat

SEQ ID NO: 57227 - DNA, 25 bp, Probe Sequence
atgactgtttattctcttgaccaaa

SEQ ID NO: 57228 - DNA, 25 bp, Probe Sequence
aatgactgtttattctcttgaccaa

SEQ ID NO: 57229 - DNA, 25 bp, Probe Sequence
cttctctgtccacttctacatcttc

SEQ ID NO: 57230 - DNA, 25 bp, Probe Sequence
tctctgtccacttctacatcttctt

SEQ ID NO: 57231 - DNA, 25 bp, Probe Sequence
ttctctgtccacttctacatcttct

SEQ ID NO: 57232 - DNA, 25 bp, Probe Sequence
ccttctctgtccacttctacatctt

SEQ ID NO: 57233 - DNA, 25 bp, Probe Sequence
caccttctctgtccacttctacatc

SEQ ID NO: 57234 - DNA, 25 bp, Probe Sequence
accttctctgtccacttctacatct

SEQ ID NO: 57235 - DNA, 25 bp, Probe Sequence
tctacaccttcaccatgttcttctc

SEQ ID NO: 57236 - DNA, 25 bp, Probe Sequence
gtctacaccttcaccatgttcttct

SEQ ID NO: 57237 - DNA, 25 bp, Probe Sequence
agtctacaccttcaccatgttcttc

SEQ ID NO: 57238 - DNA, 25 bp, Probe Sequence
ctctgtccacttctacatcttcttt

SEQ ID NO: 57239 - DNA, 25 bp, Probe Sequence
tctgtccacttctacatcttctttg

SEQ ID NO: 57240 - DNA, 25 bp, Probe Sequence
acaccttctctgtccacttctacat

SEQ ID NO: 57241 - DNA, 25 bp, Probe Sequence
cagtctacaccttcaccatgttctt

SEQ ID NO: 57242 - DNA, 25 bp, Probe Sequence
tcttctacagacagagacagcagtg

SEQ ID NO: 57243 - DNA, 25 bp, Probe Sequence
ctacaccttcaccatgttcttctcc

SEQ ID NO: 57244 - DNA, 25 bp, Probe Sequence
ctgtccacttctacatcttctttgg

SEQ ID NO: 57245 - DNA, 25 bp, Probe Sequence
tacaccttcaccatgttcttctcca

SEQ ID NO: 57246 - DNA, 25 bp, Probe Sequence
agacacattggagtaaatgaacaaa

SEQ ID NO: 57247 - DNA, 25 bp, Probe Sequence
aagacacattggagtaaatgaacaa

SEQ ID NO: 57248 - DNA, 25 bp, Probe Sequence
taagacacattggagtaaatgaaca

SEQ ID NO: 57249 - DNA, 25 bp, Probe Sequence
tgtaagacacattggagtaaatgaa

SEQ ID NO: 57250 - DNA, 25 bp, Probe Sequence
ttgtaagacacattggagtaaatga

SEQ ID NO: 57251 - DNA, 25 bp, Probe Sequence
actgtcatgcatagataatggtcat

SEQ ID NO: 57252 - DNA, 25 bp, Probe Sequence
aactgtcatgcatagataatggtca

SEQ ID NO: 57253 - DNA, 25 bp, Probe Sequence
gaagccaattactgatgatgatgtg

SEQ ID NO: 57254 - DNA, 25 bp, Probe Sequence
agaagccaattactgatgatgatgt

SEQ ID NO: 57255 - DNA, 25 bp, Probe Sequence
cctaagaagccaattactgatgatg

SEQ ID NO: 57256 - DNA, 25 bp, Probe Sequence
tcctaagaagccaattactgatgat

SEQ ID NO: 57257 - DNA, 25 bp, Probe Sequence
aagaagccaattactgatgatgatg

SEQ ID NO: 57258 - DNA, 25 bp, Probe Sequence
aattgtgtggttctcagtgatattc

SEQ ID NO: 57259 - DNA, 25 bp, Probe Sequence
ttcctaagaagccaattactgatga

SEQ ID NO: 57260 - DNA, 25 bp, Probe Sequence
attgtgtggttctcagtgatattca

SEQ ID NO: 57261 - DNA, 25 bp, Probe Sequence
ctaagaagccaattactgatgatga

SEQ ID NO: 57262 - DNA, 25 bp, Probe Sequence
atattgtcctggatgtacttgttgt

SEQ ID NO: 57263 - DNA, 25 bp, Probe Sequence
tgatattgtcctggatgtacttgtt

SEQ ID NO: 57264 - DNA, 25 bp, Probe Sequence
gatattgtcctggatgtacttgttg

SEQ ID NO: 57265 - DNA, 25 bp, Probe Sequence
atgatattgtcctggatgtacttgt

SEQ ID NO: 57266 - DNA, 25 bp, Probe Sequence
caattactgatgatgatgtggatcg

SEQ ID NO: 57267 - DNA, 25 bp, Probe Sequence
tattgtcctggatgtacttgttgtg

SEQ ID NO: 57268 - DNA, 25 bp, Probe Sequence
taagaagccaattactgatgatgat

SEQ ID NO: 57269 - DNA, 25 bp, Probe Sequence
tactgatgatgatgtggatcgaatt

SEQ ID NO: 57270 - DNA, 25 bp, Probe Sequence
ttactgatgatgatgtggatcgaat

SEQ ID NO: 57271 - DNA, 25 bp, Probe Sequence
attactgatgatgatgtggatcgaa

SEQ ID NO: 57272 - DNA, 25 bp, Probe Sequence
aattactgatgatgatgtggatcga

SEQ ID NO: 57273 - DNA, 25 bp, Probe Sequence
attgtcctggatgtacttgttgtga

SEQ ID NO: 57274 - DNA, 25 bp, Probe Sequence
tatgatattgtcctggatgtacttg

SEQ ID NO: 57275 - DNA, 25 bp, Probe Sequence
tcacatcgacatcatggactatatc

SEQ ID NO: 57276 - DNA, 25 bp, Probe Sequence
ctatgttgctcatggctactatcct

SEQ ID NO: 57277 - DNA, 25 bp, Probe Sequence
atttcagccactttcaagatgttag

SEQ ID NO: 57278 - DNA, 25 bp, Probe Sequence
aagatgttagaaagttcaagccaga

SEQ ID NO: 57279 - DNA, 25 bp, Probe Sequence
caagatgttagaaagttcaagccag

SEQ ID NO: 57280 - DNA, 25 bp, Probe Sequence
tcaagatgttagaaagttcaagcca

SEQ ID NO: 57281 - DNA, 25 bp, Probe Sequence
tttcagccactttcaagatgttaga

SEQ ID NO: 57282 - DNA, 25 bp, Probe Sequence
gttagaaagttcaagccagaagttt

SEQ ID NO: 57283 - DNA, 25 bp, Probe Sequence
gatgttagaaagttcaagccagaag

SEQ ID NO: 57284 - DNA, 25 bp, Probe Sequence
catttcagccactttcaagatgtta

SEQ ID NO: 57285 - DNA, 25 bp, Probe Sequence
ttcaagatgttagaaagttcaagcc

SEQ ID NO: 57286 - DNA, 25 bp, Probe Sequence
atcggattggttagccttcattgag

SEQ ID NO: 57287 - DNA, 25 bp, Probe Sequence
agatgttagaaagttcaagccagaa

SEQ ID NO: 57288 - DNA, 25 bp, Probe Sequence
cttcagggtttggtctatctcattg

SEQ ID NO: 57289 - DNA, 25 bp, Probe Sequence
tcttcagggtttggtctatctcatt

SEQ ID NO: 57290 - DNA, 25 bp, Probe Sequence
ttcttcagggtttggtctatctcat

SEQ ID NO: 57291 - DNA, 25 bp, Probe Sequence
gtttcttcagggtttggtctatctc

SEQ ID NO: 57292 - DNA, 25 bp, Probe Sequence
atgttagaaagttcaagccagaagt

SEQ ID NO: 57293 - DNA, 25 bp, Probe Sequence
ttcagccactttcaagatgttagaa

SEQ ID NO: 57294 - DNA, 25 bp, Probe Sequence
aagtttcttcagggtttggtctatc

SEQ ID NO: 57295 - DNA, 25 bp, Probe Sequence
tgttagaaagttcaagccagaagtt

SEQ ID NO: 57296 - DNA, 25 bp, Probe Sequence
tttcttcagggtttggtctatctca

SEQ ID NO: 57297 - DNA, 25 bp, Probe Sequence
agtttcttcagggtttggtctatct

SEQ ID NO: 57298 - DNA, 25 bp, Probe Sequence
catcggattggttagccttcattga

SEQ ID NO: 57299 - DNA, 25 bp, Probe Sequence
ttcagggtttggtctatctcattgg

SEQ ID NO: 57300 - DNA, 25 bp, Probe Sequence
ccatttcagccactttcaagatgtt

SEQ ID NO: 57301 - DNA, 25 bp, Probe Sequence
aagccaacaagagttctgaagatat

SEQ ID NO: 57302 - DNA, 25 bp, Probe Sequence
ccatcaaggtcatcattgtcatcta

SEQ ID NO: 57303 - DNA, 25 bp, Probe Sequence
gaagccaacaagagttctgaagata

SEQ ID NO: 57304 - DNA, 25 bp, Probe Sequence
catcaaggtcatcattgtcatctac

SEQ ID NO: 57305 - DNA, 25 bp, Probe Sequence
tgaagccaacaagagttctgaagat

SEQ ID NO: 57306 - DNA, 25 bp, Probe Sequence
cacaatgaggaggagaatgaggatg

SEQ ID NO: 57307 - DNA, 25 bp, Probe Sequence
atcaaggtcatcattgtcatctacc

SEQ ID NO: 57308 - DNA, 25 bp, Probe Sequence
atatactgagcaactgcacaatgag

SEQ ID NO: 57309 - DNA, 25 bp, Probe Sequence
gtcatcattgtcatctacctgtccg

SEQ ID NO: 57310 - DNA, 25 bp, Probe Sequence
atagaaacatcagtgggcacattta

SEQ ID NO: 57311 - DNA, 25 bp, Probe Sequence
tatagaaacatcagtgggcacattt

SEQ ID NO: 57312 - DNA, 25 bp, Probe Sequence
ttatagaaacatcagtgggcacatt

SEQ ID NO: 57313 - DNA, 25 bp, Probe Sequence
cttatagaaacatcagtgggcacat

SEQ ID NO: 57314 - DNA, 25 bp, Probe Sequence
ctgaagccaacaagagttctgaaga

SEQ ID NO: 57315 - DNA, 25 bp, Probe Sequence
agccaacaagagttctgaagatatc

SEQ ID NO: 57316 - DNA, 25 bp, Probe Sequence
catatactgagcaactgcacaatga

SEQ ID NO: 57317 - DNA, 25 bp, Probe Sequence
catcattgtcatctacctgtccgtg

SEQ ID NO: 57318 - DNA, 25 bp, Probe Sequence
caccatcaaggtcatcattgtcatc

SEQ ID NO: 57319 - DNA, 25 bp, Probe Sequence
tagaaacatcagtgggcacatttac

SEQ ID NO: 57320 - DNA, 25 bp, Probe Sequence
accatcaaggtcatcattgtcatct

SEQ ID NO: 57321 - DNA, 25 bp, Probe Sequence
tcatcattgtcatctacctgtccgt

SEQ ID NO: 57322 - DNA, 25 bp, Probe Sequence
ccaacaagagttctgaagatatccg

SEQ ID NO: 57323 - DNA, 25 bp, Probe Sequence
gccaacaagagttctgaagatatcc

SEQ ID NO: 57324 - DNA, 25 bp, Probe Sequence
gcatctgtccaccttatagaaacat

SEQ ID NO: 57325 - DNA, 25 bp, Probe Sequence
gacatcaatgaccagatccagaacg

SEQ ID NO: 57326 - DNA, 25 bp, Probe Sequence
caatgaactgttctagggaaagtgg

SEQ ID NO: 57327 - DNA, 25 bp, Probe Sequence
ggacatcaatgaccagatccagaac

SEQ ID NO: 57328 - DNA, 25 bp, Probe Sequence
gcaatgaactgttctagggaaagtg

SEQ ID NO: 57329 - DNA, 25 bp, Probe Sequence
agcaatgaactgttctagggaaagt

SEQ ID NO: 57330 - DNA, 25 bp, Probe Sequence
aggacatcaatgaccagatccagaa

SEQ ID NO: 57331 - DNA, 25 bp, Probe Sequence
cagcaatgaactgttctagggaaag

SEQ ID NO: 57332 - DNA, 25 bp, Probe Sequence
gaggacatcaatgaccagatccaga

SEQ ID NO: 57333 - DNA, 25 bp, Probe Sequence
agcaattaaaacggactcatctctg

SEQ ID NO: 57334 - DNA, 25 bp, Probe Sequence
cagcaattaaaacggactcatctct

SEQ ID NO: 57335 - DNA, 25 bp, Probe Sequence
aatgaactgttctagggaaagtggc

SEQ ID NO: 57336 - DNA, 25 bp, Probe Sequence
tgaggacatcaatgaccagatccag

SEQ ID NO: 57337 - DNA, 25 bp, Probe Sequence
ccagcaatgaactgttctagggaaa

SEQ ID NO: 57338 - DNA, 25 bp, Probe Sequence
gaactgttctagggaaagtggcttc

SEQ ID NO: 57339 - DNA, 25 bp, Probe Sequence
gatcccagcaatgaactgttctagg

SEQ ID NO: 57340 - DNA, 25 bp, Probe Sequence
caattaaaacggactcatctctggc

SEQ ID NO: 57341 - DNA, 25 bp, Probe Sequence
gcaattaaaacggactcatctctgg

SEQ ID NO: 57342 - DNA, 25 bp, Probe Sequence
ccagcaattaaaacggactcatctc

SEQ ID NO: 57343 - DNA, 25 bp, Probe Sequence
atgaactgttctagggaaagtggct

SEQ ID NO: 57344 - DNA, 25 bp, Probe Sequence
tgaactgttctagggaaagtggctt

SEQ ID NO: 57345 - DNA, 25 bp, Probe Sequence
cccagcaattaaaacggactcatct

SEQ ID NO: 57346 - DNA, 25 bp, Probe Sequence
cattgacctcatcaacaacctgctg

SEQ ID NO: 57347 - DNA, 25 bp, Probe Sequence
ctccctgtttccccagcaattaaaa

SEQ ID NO: 57348 - DNA, 25 bp, Probe Sequence
ccccagcaattaaaacggactcatc

SEQ ID NO: 57349 - DNA, 25 bp, Probe Sequence
ttggagttagtatgttcaacagacc

SEQ ID NO: 57350 - DNA, 25 bp, Probe Sequence
attatgggaatgaggttctaccact

SEQ ID NO: 57351 - DNA, 25 bp, Probe Sequence
ttatgggaatgaggttctaccactc

SEQ ID NO: 57352 - DNA, 25 bp, Probe Sequence
tggagttagtatgttcaacagaccc

SEQ ID NO: 57353 - DNA, 25 bp, Probe Sequence
cattatgggaatgaggttctaccac

SEQ ID NO: 57354 - DNA, 25 bp, Probe Sequence
ctggtgggatcattggctatgtaaa

SEQ ID NO: 57355 - DNA, 25 bp, Probe Sequence
ccaaagttggagttagtatgttcaa

SEQ ID NO: 57356 - DNA, 25 bp, Probe Sequence
gaatgaggttctaccactctggaaa

SEQ ID NO: 57357 - DNA, 25 bp, Probe Sequence
ggaatgaggttctaccactctggaa

SEQ ID NO: 57358 - DNA, 25 bp, Probe Sequence
gttggagttagtatgttcaacagac

SEQ ID NO: 57359 - DNA, 25 bp, Probe Sequence
agttggagttagtatgttcaacaga

SEQ ID NO: 57360 - DNA, 25 bp, Probe Sequence
gccaaagttggagttagtatgttca

SEQ ID NO: 57361 - DNA, 25 bp, Probe Sequence
aagttggagttagtatgttcaacag

SEQ ID NO: 57362 - DNA, 25 bp, Probe Sequence
tatgggaatgaggttctaccactct

SEQ ID NO: 57363 - DNA, 25 bp, Probe Sequence
ctggcattatgggaatgaggttcta

SEQ ID NO: 57364 - DNA, 25 bp, Probe Sequence
tctggtgggatcattggctatgtaa

SEQ ID NO: 57365 - DNA, 25 bp, Probe Sequence
ttctggtgggatcattggctatgta

SEQ ID NO: 57366 - DNA, 25 bp, Probe Sequence
cgccaaagttggagttagtatgttc

SEQ ID NO: 57367 - DNA, 25 bp, Probe Sequence
gcattatgggaatgaggttctacca

SEQ ID NO: 57368 - DNA, 25 bp, Probe Sequence
tggcattatgggaatgaggttctac

SEQ ID NO: 57369 - DNA, 25 bp, Probe Sequence
tcgccaaagttggagttagtatgtt

SEQ ID NO: 57370 - DNA, 25 bp, Probe Sequence
tagtatgttcaacagaccccattag

SEQ ID NO: 57371 - DNA, 25 bp, Probe Sequence
ggtgggatcattggctatgtaaaag

SEQ ID NO: 57372 - DNA, 25 bp, Probe Sequence
ttagtatgttcaacagaccccatta

SEQ ID NO: 57373 - DNA, 25 bp, Probe Sequence
tattctctcacagatttcattcctg

SEQ ID NO: 57374 - DNA, 25 bp, Probe Sequence
atattctctcacagatttcattcct

SEQ ID NO: 57375 - DNA, 25 bp, Probe Sequence
aatattctctcacagatttcattcc

SEQ ID NO: 57376 - DNA, 25 bp, Probe Sequence
taacatctccacgtccctagcataa

SEQ ID NO: 57377 - DNA, 25 bp, Probe Sequence
ttaacatctccacgtccctagcata

SEQ ID NO: 57378 - DNA, 25 bp, Probe Sequence
aacatctccacgtccctagcataaa

SEQ ID NO: 57379 - DNA, 25 bp, Probe Sequence
tttaacatctccacgtccctagcat

SEQ ID NO: 57380 - DNA, 25 bp, Probe Sequence
tctctcacagatttcattcctgttt

SEQ ID NO: 57381 - DNA, 25 bp, Probe Sequence
ttctctcacagatttcattcctgtt

SEQ ID NO: 57382 - DNA, 25 bp, Probe Sequence
attctctcacagatttcattcctgt

SEQ ID NO: 57383 - DNA, 25 bp, Probe Sequence
ttttgttgtcgttttaacatctcca

SEQ ID NO: 57384 - DNA, 25 bp, Probe Sequence
tttgttgtcgttttaacatctccac

SEQ ID NO: 57385 - DNA, 25 bp, Probe Sequence
aaatattctctcacagatttcattc

SEQ ID NO: 57386 - DNA, 25 bp, Probe Sequence
gttttaacatctccacgtccctagc

SEQ ID NO: 57387 - DNA, 25 bp, Probe Sequence
acatctccacgtccctagcataaaa

SEQ ID NO: 57388 - DNA, 25 bp, Probe Sequence
ttgttgtcgttttaacatctccacg

SEQ ID NO: 57389 - DNA, 25 bp, Probe Sequence
ttttaacatctccacgtccctagca

SEQ ID NO: 57390 - DNA, 25 bp, Probe Sequence
gatgcacccgtctttagaaccaaaa

SEQ ID NO: 57391 - DNA, 25 bp, Probe Sequence
ctctcacagatttcattcctgtttt

SEQ ID NO: 57392 - DNA, 25 bp, Probe Sequence
gttgtcgttttaacatctccacgtc

SEQ ID NO: 57393 - DNA, 25 bp, Probe Sequence
cgttttaacatctccacgtccctag

SEQ ID NO: 57394 - DNA, 25 bp, Probe Sequence
tcgttttaacatctccacgtcccta

SEQ ID NO: 57395 - DNA, 25 bp, Probe Sequence
tgttgtcgttttaacatctccacgt

SEQ ID NO: 57396 - DNA, 25 bp, Probe Sequence
ttgtcgttttaacatctccacgtcc

SEQ ID NO: 57397 - DNA, 25 bp, Probe Sequence
gcttgcttcatattgtcttactcag

SEQ ID NO: 57398 - DNA, 25 bp, Probe Sequence
ttggcttgcttcatattgtcttact

SEQ ID NO: 57399 - DNA, 25 bp, Probe Sequence
gttggcttgcttcatattgtcttac

SEQ ID NO: 57400 - DNA, 25 bp, Probe Sequence
agttggcttgcttcatattgtctta

SEQ ID NO: 57401 - DNA, 25 bp, Probe Sequence
ttcatattgtcttactcagcattcc

SEQ ID NO: 57402 - DNA, 25 bp, Probe Sequence
ggcttgcttcatattgtcttactca

SEQ ID NO: 57403 - DNA, 25 bp, Probe Sequence
tggcttgcttcatattgtcttactc

SEQ ID NO: 57404 - DNA, 25 bp, Probe Sequence
gagttggcttgcttcatattgtctt

SEQ ID NO: 57405 - DNA, 25 bp, Probe Sequence
cttcatattgtcttactcagcattc

SEQ ID NO: 57406 - DNA, 25 bp, Probe Sequence
cttctctcctgagtgtactaattcc

SEQ ID NO: 57407 - DNA, 25 bp, Probe Sequence
gcttctctcctgagtgtactaattc

SEQ ID NO: 57408 - DNA, 25 bp, Probe Sequence
tatacgaagtatgatccaactcact

SEQ ID NO: 57409 - DNA, 25 bp, Probe Sequence
tattgtcttactcagcattcccttc

SEQ ID NO: 57410 - DNA, 25 bp, Probe Sequence
atattgtcttactcagcattccctt

SEQ ID NO: 57411 - DNA, 25 bp, Probe Sequence
catattgtcttactcagcattccct

SEQ ID NO: 57412 - DNA, 25 bp, Probe Sequence
tcatattgtcttactcagcattccc

SEQ ID NO: 57413 - DNA, 25 bp, Probe Sequence
ctatacgaagtatgatccaactcac

SEQ ID NO: 57414 - DNA, 25 bp, Probe Sequence
atccaactcacttcatcctaaacac

SEQ ID NO: 57415 - DNA, 25 bp, Probe Sequence
tctatacgaagtatgatccaactca

SEQ ID NO: 57416 - DNA, 25 bp, Probe Sequence
agcttctctcctgagtgtactaatt

SEQ ID NO: 57417 - DNA, 25 bp, Probe Sequence
ttctggcaagtttctatacgaagta

SEQ ID NO: 57418 - DNA, 25 bp, Probe Sequence
tttctggcaagtttctatacgaagt

SEQ ID NO: 57419 - DNA, 25 bp, Probe Sequence
ccaactcacttcatcctaaacacag

SEQ ID NO: 57420 - DNA, 25 bp, Probe Sequence
cttgcttcatattgtcttactcagc

SEQ ID NO: 57421 - DNA, 25 bp, Probe Sequence
ccatcagagagtaagaaggaagact

SEQ ID NO: 57422 - DNA, 25 bp, Probe Sequence
agatggcatgatatggaagtgtatt

SEQ ID NO: 57423 - DNA, 25 bp, Probe Sequence
taagagatggcatgatatggaagtg

SEQ ID NO: 57424 - DNA, 25 bp, Probe Sequence
gtaagagatggcatgatatggaagt

SEQ ID NO: 57425 - DNA, 25 bp, Probe Sequence
tgtaagagatggcatgatatggaag

SEQ ID NO: 57426 - DNA, 25 bp, Probe Sequence
gagatggcatgatatggaagtgtat

SEQ ID NO: 57427 - DNA, 25 bp, Probe Sequence
gatggcatgatatggaagtgtattc

SEQ ID NO: 57428 - DNA, 25 bp, Probe Sequence
gtgtaagagatggcatgatatggaa

SEQ ID NO: 57429 - DNA, 25 bp, Probe Sequence
agagatggcatgatatggaagtgta

SEQ ID NO: 57430 - DNA, 25 bp, Probe Sequence
agtgtaagagatggcatgatatgga

SEQ ID NO: 57431 - DNA, 25 bp, Probe Sequence
cagtgtaagagatggcatgatatgg

SEQ ID NO: 57432 - DNA, 25 bp, Probe Sequence
gtcaggctacatggagtattacttg

SEQ ID NO: 57433 - DNA, 25 bp, Probe Sequence
ctctacttctctcgatgctaatcac

SEQ ID NO: 57434 - DNA, 25 bp, Probe Sequence
tcaggctacatggagtattacttgt

SEQ ID NO: 57435 - DNA, 25 bp, Probe Sequence
tgtcaggctacatggagtattactt

SEQ ID NO: 57436 - DNA, 25 bp, Probe Sequence
ctacttctctcgatgctaatcacac

SEQ ID NO: 57437 - DNA, 25 bp, Probe Sequence
aagagatggcatgatatggaagtgt

SEQ ID NO: 57438 - DNA, 25 bp, Probe Sequence
tctacttctctcgatgctaatcaca

SEQ ID NO: 57439 - DNA, 25 bp, Probe Sequence
ctgtcaggctacatggagtattact

SEQ ID NO: 57440 - DNA, 25 bp, Probe Sequence
tacttctctcgatgctaatcacaca

SEQ ID NO: 57441 - DNA, 25 bp, Probe Sequence
gctctacttctctcgatgctaatca

SEQ ID NO: 57442 - DNA, 25 bp, Probe Sequence
ccagtgtaagagatggcatgatatg

SEQ ID NO: 57443 - DNA, 25 bp, Probe Sequence
caggctacatggagtattacttgta

SEQ ID NO: 57444 - DNA, 25 bp, Probe Sequence
cccatcagagagtaagaaggaagac

SEQ ID NO: 57445 - DNA, 25 bp, Probe Sequence
agatattgcctagaactcactgaag

SEQ ID NO: 57446 - DNA, 25 bp, Probe Sequence
gatattgcctagaactcactgaagc

SEQ ID NO: 57447 - DNA, 25 bp, Probe Sequence
cagatattgcctagaactcactgaa

SEQ ID NO: 57448 - DNA, 25 bp, Probe Sequence
aacagatattgcctagaactcactg

SEQ ID NO: 57449 - DNA, 25 bp, Probe Sequence
acagatattgcctagaactcactga

SEQ ID NO: 57450 - DNA, 25 bp, Probe Sequence
tctactccttgttggatacactcag

SEQ ID NO: 57451 - DNA, 25 bp, Probe Sequence
agtctactccttgttggatacactc

SEQ ID NO: 57452 - DNA, 25 bp, Probe Sequence
gtggaaacaaaggaaagaaacagat

SEQ ID NO: 57453 - DNA, 25 bp, Probe Sequence
gtctactccttgttggatacactca

SEQ ID NO: 57454 - DNA, 25 bp, Probe Sequence
cagtctactccttgttggatacact

SEQ ID NO: 57455 - DNA, 25 bp, Probe Sequence
tgtaaatgatgttctctttgctgtt

SEQ ID NO: 57456 - DNA, 25 bp, Probe Sequence
ttgtaaatgatgttctctttgctgt

SEQ ID NO: 57457 - DNA, 25 bp, Probe Sequence
gttgtaaatgatgttctctttgctg

SEQ ID NO: 57458 - DNA, 25 bp, Probe Sequence
agttgtaaatgatgttctctttgct

SEQ ID NO: 57459 - DNA, 25 bp, Probe Sequence
cagttgtaaatgatgttctctttgc

SEQ ID NO: 57460 - DNA, 25 bp, Probe Sequence
gcagttgtaaatgatgttctctttg

SEQ ID NO: 57461 - DNA, 25 bp, Probe Sequence
agcagttgtaaatgatgttctcttt

SEQ ID NO: 57462 - DNA, 25 bp, Probe Sequence
acagtctactccttgttggatacac

SEQ ID NO: 57463 - DNA, 25 bp, Probe Sequence
tgaagcagttgtaaatgatgttctc

SEQ ID NO: 57464 - DNA, 25 bp, Probe Sequence
gaagcagttgtaaatgatgttctct

SEQ ID NO: 57465 - DNA, 25 bp, Probe Sequence
tggaaacaaaggaaagaaacagata

SEQ ID NO: 57466 - DNA, 25 bp, Probe Sequence
aagcagttgtaaatgatgttctctt

SEQ ID NO: 57467 - DNA, 25 bp, Probe Sequence
aaacagatattgcctagaactcact

SEQ ID NO: 57468 - DNA, 25 bp, Probe Sequence
acaaaggaaagaaacagatattgcc

SEQ ID NO: 57469 - DNA, 25 bp, Probe Sequence
tgtgaaggcagtattagaagactta

SEQ ID NO: 57470 - DNA, 25 bp, Probe Sequence
ctacaagttagtcagcagatgagtg

SEQ ID NO: 57471 - DNA, 25 bp, Probe Sequence
tgtcatattactgaggctacaagtt

SEQ ID NO: 57472 - DNA, 25 bp, Probe Sequence
tattactgaggctacaagttagtca

SEQ ID NO: 57473 - DNA, 25 bp, Probe Sequence
atgtcatattactgaggctacaagt

SEQ ID NO: 57474 - DNA, 25 bp, Probe Sequence
ctgtgaaggcagtattagaagactt

SEQ ID NO: 57475 - DNA, 25 bp, Probe Sequence
tgagttctaatgttacatctgagga

SEQ ID NO: 57476 - DNA, 25 bp, Probe Sequence
tgtgattattaacggtcattctcat

SEQ ID NO: 57477 - DNA, 25 bp, Probe Sequence
atgtgattattaacggtcattctca

SEQ ID NO: 57478 - DNA, 25 bp, Probe Sequence
tgaagatgtgattattaacggtcat

SEQ ID NO: 57479 - DNA, 25 bp, Probe Sequence
atgaagatgtgattattaacggtca

SEQ ID NO: 57480 - DNA, 25 bp, Probe Sequence
gtgaaggcagtattagaagacttaa

SEQ ID NO: 57481 - DNA, 25 bp, Probe Sequence
aggctaatctatcacttgttaatgt

SEQ ID NO: 57482 - DNA, 25 bp, Probe Sequence
caatgaagatgtgattattaacggt

SEQ ID NO: 57483 - DNA, 25 bp, Probe Sequence
ttgagttccaactgttaagcatatt

SEQ ID NO: 57484 - DNA, 25 bp, Probe Sequence
ctatgcctgtatggagtctaacata

SEQ ID NO: 57485 - DNA, 25 bp, Probe Sequence
agatgtgattattaacggtcattct

SEQ ID NO: 57486 - DNA, 25 bp, Probe Sequence
gttctaatgttacatctgaggaagt

SEQ ID NO: 57487 - DNA, 25 bp, Probe Sequence
ttgagttctaatgttacatctgagg

SEQ ID NO: 57488 - DNA, 25 bp, Probe Sequence
ggctaatctatcacttgttaatgtc

SEQ ID NO: 57489 - DNA, 25 bp, Probe Sequence
aatgaagatgtgattattaacggtc

SEQ ID NO: 57490 - DNA, 25 bp, Probe Sequence
catattactgaggctacaagttagt

SEQ ID NO: 57491 - DNA, 25 bp, Probe Sequence
gtcatattactgaggctacaagtta

SEQ ID NO: 57492 - DNA, 25 bp, Probe Sequence
gatgtgattattaacggtcattctc

SEQ ID NO: 57493 - DNA, 25 bp, Probe Sequence
ccattactctatcttcagcctatca

SEQ ID NO: 57494 - DNA, 25 bp, Probe Sequence
gtccattactctatcttcagcctat

SEQ ID NO: 57495 - DNA, 25 bp, Probe Sequence
tccattactctatcttcagcctatc

SEQ ID NO: 57496 - DNA, 25 bp, Probe Sequence
agtccattactctatcttcagccta

SEQ ID NO: 57497 - DNA, 25 bp, Probe Sequence
aacagtccattactctatcttcagc

SEQ ID NO: 57498 - DNA, 25 bp, Probe Sequence
tatgaacttactgtgtactacctgc

SEQ ID NO: 57499 - DNA, 25 bp, Probe Sequence
cattactctatcttcagcctatcag

SEQ ID NO: 57500 - DNA, 25 bp, Probe Sequence
cagtccattactctatcttcagcct

SEQ ID NO: 57501 - DNA, 25 bp, Probe Sequence
ttactagattcaatcgtctctgagt

SEQ ID NO: 57502 - DNA, 25 bp, Probe Sequence
acagtccattactctatcttcagcc

SEQ ID NO: 57503 - DNA, 25 bp, Probe Sequence
ttactctatcttcagcctatcagga

SEQ ID NO: 57504 - DNA, 25 bp, Probe Sequence
tactctatcttcagcctatcaggat

SEQ ID NO: 57505 - DNA, 25 bp, Probe Sequence
actagattcaatcgtctctgagtat

SEQ ID NO: 57506 - DNA, 25 bp, Probe Sequence
atgaggaactaacagtccattactc

SEQ ID NO: 57507 - DNA, 25 bp, Probe Sequence
attactctatcttcagcctatcagg

SEQ ID NO: 57508 - DNA, 25 bp, Probe Sequence
tgaggaactaacagtccattactct

SEQ ID NO: 57509 - DNA, 25 bp, Probe Sequence
gaggaactaacagtccattactcta

SEQ ID NO: 57510 - DNA, 25 bp, Probe Sequence
ctctatcttcagcctatcaggatca

SEQ ID NO: 57511 - DNA, 25 bp, Probe Sequence
actctatcttcagcctatcaggatc

SEQ ID NO: 57512 - DNA, 25 bp, Probe Sequence
tctatcttcagcctatcaggatcac

SEQ ID NO: 57513 - DNA, 25 bp, Probe Sequence
ttatgaacttactgtgtactacctg

SEQ ID NO: 57514 - DNA, 25 bp, Probe Sequence
gaacttactgtgtactacctgcatt

SEQ ID NO: 57515 - DNA, 25 bp, Probe Sequence
tctaaactgctggatgaatctgaaa

SEQ ID NO: 57516 - DNA, 25 bp, Probe Sequence
tatcttcagcctatcaggatcacag

SEQ ID NO: 57517 - DNA, 25 bp, Probe Sequence
tatgtgtaactctggcaggactaat

SEQ ID NO: 57518 - DNA, 25 bp, Probe Sequence
attatgtgtaactctggcaggacta

SEQ ID NO: 57519 - DNA, 25 bp, Probe Sequence
ttatgtgtaactctggcaggactaa

SEQ ID NO: 57520 - DNA, 25 bp, Probe Sequence
caagacacagtgctatcatacatcc

SEQ ID NO: 57521 - DNA, 25 bp, Probe Sequence
tgaagccatagtcacagtaataatg

SEQ ID NO: 57522 - DNA, 25 bp, Probe Sequence
atgtgtaactctggcaggactaatc

SEQ ID NO: 57523 - DNA, 25 bp, Probe Sequence
ctcaagcaccatcacttacctaact

SEQ ID NO: 57524 - DNA, 25 bp, Probe Sequence
cattatgtgtaactctggcaggact

SEQ ID NO: 57525 - DNA, 25 bp, Probe Sequence
tcaagcaccatcacttacctaactg

SEQ ID NO: 57526 - DNA, 25 bp, Probe Sequence
ttctcttaccacattatcccaactg

SEQ ID NO: 57527 - DNA, 25 bp, Probe Sequence
cagtaataatgggtatgggagtagc

SEQ ID NO: 57528 - DNA, 25 bp, Probe Sequence
tttctcttaccacattatcccaact

SEQ ID NO: 57529 - DNA, 25 bp, Probe Sequence
gtcacagtaataatgggtatgggag

SEQ ID NO: 57530 - DNA, 25 bp, Probe Sequence
agtaataatgggtatgggagtagca

SEQ ID NO: 57531 - DNA, 25 bp, Probe Sequence
ctttcctctcatttccagcgtatat

SEQ ID NO: 57532 - DNA, 25 bp, Probe Sequence
cacagtaataatgggtatgggagta

SEQ ID NO: 57533 - DNA, 25 bp, Probe Sequence
tcacagtaataatgggtatgggagt

SEQ ID NO: 57534 - DNA, 25 bp, Probe Sequence
agtcacagtaataatgggtatggga

SEQ ID NO: 57535 - DNA, 25 bp, Probe Sequence
tagtcacagtaataatgggtatggg

SEQ ID NO: 57536 - DNA, 25 bp, Probe Sequence
aagcaccatcacttacctaactgac

SEQ ID NO: 57537 - DNA, 25 bp, Probe Sequence
caagcaccatcacttacctaactga

SEQ ID NO: 57538 - DNA, 25 bp, Probe Sequence
acagtaataatgggtatgggagtag

SEQ ID NO: 57539 - DNA, 25 bp, Probe Sequence
agccaaaccagactaccttaattta

SEQ ID NO: 57540 - DNA, 25 bp, Probe Sequence
ccaaaccagactaccttaatttagc

SEQ ID NO: 57541 - DNA, 25 bp, Probe Sequence
ccagtctttgaaacatcaggagata

SEQ ID NO: 57542 - DNA, 25 bp, Probe Sequence
agtctttgaaacatcaggagatact

SEQ ID NO: 57543 - DNA, 25 bp, Probe Sequence
cagtctttgaaacatcaggagatac

SEQ ID NO: 57544 - DNA, 25 bp, Probe Sequence
aaagagattgaacaggtttaccgac

SEQ ID NO: 57545 - DNA, 25 bp, Probe Sequence
gtctttgaaacatcaggagatactt

SEQ ID NO: 57546 - DNA, 25 bp, Probe Sequence
ggaaatcctgaaagagataagagag

SEQ ID NO: 57547 - DNA, 25 bp, Probe Sequence
caaagagattgaacaggtttaccga

SEQ ID NO: 57548 - DNA, 25 bp, Probe Sequence
tctttgaaacatcaggagatacttc

SEQ ID NO: 57549 - DNA, 25 bp, Probe Sequence
gcattgaggcagaatttacatgaaa

SEQ ID NO: 57550 - DNA, 25 bp, Probe Sequence
tttaccgacaagactgtgaaacttt

SEQ ID NO: 57551 - DNA, 25 bp, Probe Sequence
aaatcctgaaagagataagagaggc

SEQ ID NO: 57552 - DNA, 25 bp, Probe Sequence
cattgcagagtatgatacttccact

SEQ ID NO: 57553 - DNA, 25 bp, Probe Sequence
aagagattgaacaggtttaccgaca

SEQ ID NO: 57554 - DNA, 25 bp, Probe Sequence
gagattgaacaggtttaccgacaag

SEQ ID NO: 57555 - DNA, 25 bp, Probe Sequence
gaatttacatgaaataggtgagcgg

SEQ ID NO: 57556 - DNA, 25 bp, Probe Sequence
agaatttacatgaaataggtgagcg

SEQ ID NO: 57557 - DNA, 25 bp, Probe Sequence
ggcagaatttacatgaaataggtga

SEQ ID NO: 57558 - DNA, 25 bp, Probe Sequence
ttaccgacaagactgtgaaactttc

SEQ ID NO: 57559 - DNA, 25 bp, Probe Sequence
aggcagaatttacatgaaataggtg

SEQ ID NO: 57560 - DNA, 25 bp, Probe Sequence
aatttacatgaaataggtgagcggt

SEQ ID NO: 57561 - DNA, 25 bp, Probe Sequence
gaggcagaatttacatgaaataggt

SEQ ID NO: 57562 - DNA, 25 bp, Probe Sequence
tgaggcagaatttacatgaaatagg

SEQ ID NO: 57563 - DNA, 25 bp, Probe Sequence
gattgaacaggtttaccgacaagac

SEQ ID NO: 57564 - DNA, 25 bp, Probe Sequence
agattgaacaggtttaccgacaaga

SEQ ID NO: 57565 - DNA, 25 bp, Probe Sequence
agactcttctacactcaagtatagg

SEQ ID NO: 57566 - DNA, 25 bp, Probe Sequence
ctaccatatccaacagctaacctag

SEQ ID NO: 57567 - DNA, 25 bp, Probe Sequence
ccatatccaacagctaacctagtac

SEQ ID NO: 57568 - DNA, 25 bp, Probe Sequence
accatatccaacagctaacctagta

SEQ ID NO: 57569 - DNA, 25 bp, Probe Sequence
taccatatccaacagctaacctagt

SEQ ID NO: 57570 - DNA, 25 bp, Probe Sequence
tataatgctacctatttcctgctgg

SEQ ID NO: 57571 - DNA, 25 bp, Probe Sequence
gtataatgctacctatttcctgctg

SEQ ID NO: 57572 - DNA, 25 bp, Probe Sequence
gagactcttctacactcaagtatag

SEQ ID NO: 57573 - DNA, 25 bp, Probe Sequence
ttctttctgaacgggtggtataatg

SEQ ID NO: 57574 - DNA, 25 bp, Probe Sequence
taccatcttctaaaccaggaccatc

SEQ ID NO: 57575 - DNA, 25 bp, Probe Sequence
actcttctacactcaagtataggga

SEQ ID NO: 57576 - DNA, 25 bp, Probe Sequence
ggacacgatttgaagtacagaattt

SEQ ID NO: 57577 - DNA, 25 bp, Probe Sequence
tatggacacgatttgaagtacagaa

SEQ ID NO: 57578 - DNA, 25 bp, Probe Sequence
gactcttctacactcaagtataggg

SEQ ID NO: 57579 - DNA, 25 bp, Probe Sequence
agagactcttctacactcaagtata

SEQ ID NO: 57580 - DNA, 25 bp, Probe Sequence
atggacacgatttgaagtacagaat

SEQ ID NO: 57581 - DNA, 25 bp, Probe Sequence
tcttctacactcaagtatagggagg

SEQ ID NO: 57582 - DNA, 25 bp, Probe Sequence
gtatggacacgatttgaagtacaga

SEQ ID NO: 57583 - DNA, 25 bp, Probe Sequence
agtatggacacgatttgaagtacag

SEQ ID NO: 57584 - DNA, 25 bp, Probe Sequence
tggacacgatttgaagtacagaatt

SEQ ID NO: 57585 - DNA, 25 bp, Probe Sequence
cacacatattgcttctggtacttta

SEQ ID NO: 57586 - DNA, 25 bp, Probe Sequence
ctcttctacactcaagtatagggag

SEQ ID NO: 57587 - DNA, 25 bp, Probe Sequence
cagtatggacacgatttgaagtaca

SEQ ID NO: 57588 - DNA, 25 bp, Probe Sequence
tttctgaacgggtggtataatgcta

SEQ ID NO: 57589 - DNA, 25 bp, Probe Sequence
ctgttagtccttctacttacctgct

SEQ ID NO: 57590 - DNA, 25 bp, Probe Sequence
tgttagtccttctacttacctgctg

SEQ ID NO: 57591 - DNA, 25 bp, Probe Sequence
gttagtccttctacttacctgctgg

SEQ ID NO: 57592 - DNA, 25 bp, Probe Sequence
cctgttagtccttctacttacctgc

SEQ ID NO: 57593 - DNA, 25 bp, Probe Sequence
atgagatcagaaggatactggtgtt

SEQ ID NO: 57594 - DNA, 25 bp, Probe Sequence
gatgagatcagaaggatactggtgt

SEQ ID NO: 57595 - DNA, 25 bp, Probe Sequence
caggatgagatcagaaggatactgg

SEQ ID NO: 57596 - DNA, 25 bp, Probe Sequence
ccaggatgagatcagaaggatactg

SEQ ID NO: 57597 - DNA, 25 bp, Probe Sequence
actctattctggtgagcattattaa

SEQ ID NO: 57598 - DNA, 25 bp, Probe Sequence
aactctattctggtgagcattatta

SEQ ID NO: 57599 - DNA, 25 bp, Probe Sequence
tagtccttctacttacctgctggat

SEQ ID NO: 57600 - DNA, 25 bp, Probe Sequence
ggatgagatcagaaggatactggtg

SEQ ID NO: 57601 - DNA, 25 bp, Probe Sequence
aggatgagatcagaaggatactggt

SEQ ID NO: 57602 - DNA, 25 bp, Probe Sequence
tccaggatgagatcagaaggatact

SEQ ID NO: 57603 - DNA, 25 bp, Probe Sequence
ttagtccttctacttacctgctgga

SEQ ID NO: 57604 - DNA, 25 bp, Probe Sequence
tctggtgagcattattaaatcttgt

SEQ ID NO: 57605 - DNA, 25 bp, Probe Sequence
caaactctattctggtgagcattat

SEQ ID NO: 57606 - DNA, 25 bp, Probe Sequence
gcaaactctattctggtgagcatta

SEQ ID NO: 57607 - DNA, 25 bp, Probe Sequence
ccctgttagtccttctacttacctg

SEQ ID NO: 57608 - DNA, 25 bp, Probe Sequence
ctggtgagcattattaaatcttgtt

SEQ ID NO: 57609 - DNA, 25 bp, Probe Sequence
agaccctgttagtccttctacttac

SEQ ID NO: 57610 - DNA, 25 bp, Probe Sequence
cagaccctgttagtccttctactta

SEQ ID NO: 57611 - DNA, 25 bp, Probe Sequence
ttctcttaatatttgctctgggtca

SEQ ID NO: 57612 - DNA, 25 bp, Probe Sequence
agtccttctacttacctgctggatt

SEQ ID NO: 57613 - DNA, 25 bp, Probe Sequence
cttcttcatcctctcctacttcttg

SEQ ID NO: 57614 - DNA, 25 bp, Probe Sequence
ttcttcatcctctcctacttcttgt

SEQ ID NO: 57615 - DNA, 25 bp, Probe Sequence
tcttcatcctctcctacttcttgtc

SEQ ID NO: 57616 - DNA, 25 bp, Probe Sequence
ccttcttcatcctctcctacttctt

SEQ ID NO: 57617 - DNA, 25 bp, Probe Sequence
cttcatcctctcctacttcttgtcc

SEQ ID NO: 57618 - DNA, 25 bp, Probe Sequence
ttcatcctctcctacttcttgtcca

SEQ ID NO: 57619 - DNA, 25 bp, Probe Sequence
tcatcctctcctacttcttgtccag

SEQ ID NO: 57620 - DNA, 25 bp, Probe Sequence
gccttcttcatcctctcctacttct

SEQ ID NO: 57621 - DNA, 25 bp, Probe Sequence
catcctctcctacttcttgtccagg

SEQ ID NO: 57622 - DNA, 25 bp, Probe Sequence
taattgtggccttcttcatcctctc

SEQ ID NO: 57623 - DNA, 25 bp, Probe Sequence
ctaattgtggccttcttcatcctct

SEQ ID NO: 57624 - DNA, 25 bp, Probe Sequence
tctaattgtggccttcttcatcctc

SEQ ID NO: 57625 - DNA, 25 bp, Probe Sequence
gtctaattgtggccttcttcatcct

SEQ ID NO: 57626 - DNA, 25 bp, Probe Sequence
ccacaggacttacctacaaaatact

SEQ ID NO: 57627 - DNA, 25 bp, Probe Sequence
ggtctaattgtggccttcttcatcc

SEQ ID NO: 57628 - DNA, 25 bp, Probe Sequence
tccacaggacttacctacaaaatac

SEQ ID NO: 57629 - DNA, 25 bp, Probe Sequence
acaggacttacctacaaaatactcc

SEQ ID NO: 57630 - DNA, 25 bp, Probe Sequence
ctccacaggacttacctacaaaata

SEQ ID NO: 57631 - DNA, 25 bp, Probe Sequence
cacaggacttacctacaaaatactc

SEQ ID NO: 57632 - DNA, 25 bp, Probe Sequence
ggccttcttcatcctctcctacttc

SEQ ID NO: 57633 - DNA, 25 bp, Probe Sequence
ggacttacctacaaaatactccttt

SEQ ID NO: 57634 - DNA, 25 bp, Probe Sequence
gctccacaggacttacctacaaaat

SEQ ID NO: 57635 - DNA, 25 bp, Probe Sequence
acttacctacaaaatactcctttgc

SEQ ID NO: 57636 - DNA, 25 bp, Probe Sequence
gggtctaattgtggccttcttcatc

SEQ ID NO: 57637 - DNA, 25 bp, Probe Sequence
aacttagacctctcaacacagtatg

SEQ ID NO: 57638 - DNA, 25 bp, Probe Sequence
gaacttagacctctcaacacagtat

SEQ ID NO: 57639 - DNA, 25 bp, Probe Sequence
tgaacttagacctctcaacacagta

SEQ ID NO: 57640 - DNA, 25 bp, Probe Sequence
ttcagcacaatcttagactcatatt

SEQ ID NO: 57641 - DNA, 25 bp, Probe Sequence
acttagacctctcaacacagtatgc

SEQ ID NO: 57642 - DNA, 25 bp, Probe Sequence
cactgaacttagacctctcaacaca

SEQ ID NO: 57643 - DNA, 25 bp, Probe Sequence
cttagacctctcaacacagtatgcc

SEQ ID NO: 57644 - DNA, 25 bp, Probe Sequence
ctgaacttagacctctcaacacagt

SEQ ID NO: 57645 - DNA, 25 bp, Probe Sequence
actgaacttagacctctcaacacag

SEQ ID NO: 57646 - DNA, 25 bp, Probe Sequence
aaagggtatttggtctggttcatat

SEQ ID NO: 57647 - DNA, 25 bp, Probe Sequence
atcagtgttagcctttccctatttc

SEQ ID NO: 57648 - DNA, 25 bp, Probe Sequence
ccctatttcagcacaatcttagact

SEQ ID NO: 57649 - DNA, 25 bp, Probe Sequence
tccctatttcagcacaatcttagac

SEQ ID NO: 57650 - DNA, 25 bp, Probe Sequence
ttccctatttcagcacaatcttaga

SEQ ID NO: 57651 - DNA, 25 bp, Probe Sequence
ttaaagggtatttggtctggttcat

SEQ ID NO: 57652 - DNA, 25 bp, Probe Sequence
attaaagggtatttggtctggttca

SEQ ID NO: 57653 - DNA, 25 bp, Probe Sequence
agagcatttacagcagaggttaata

SEQ ID NO: 57654 - DNA, 25 bp, Probe Sequence
taaagggtatttggtctggttcata

SEQ ID NO: 57655 - DNA, 25 bp, Probe Sequence
aagagcatttacagcagaggttaat

SEQ ID NO: 57656 - DNA, 25 bp, Probe Sequence
catcagtgttagcctttccctattt

SEQ ID NO: 57657 - DNA, 25 bp, Probe Sequence
cctatttcagcacaatcttagactc

SEQ ID NO: 57658 - DNA, 25 bp, Probe Sequence
tttccctatttcagcacaatcttag

SEQ ID NO: 57659 - DNA, 25 bp, Probe Sequence
ctttccctatttcagcacaatctta

SEQ ID NO: 57660 - DNA, 25 bp, Probe Sequence
aaagagcatttacagcagaggttaa

SEQ ID NO: 57661 - DNA, 25 bp, Probe Sequence
gggtaattattagcgtggcttttaa

SEQ ID NO: 57662 - DNA, 25 bp, Probe Sequence
ggggtaattattagcgtggctttta

SEQ ID NO: 57663 - DNA, 25 bp, Probe Sequence
ggtaattattagcgtggcttttaaa

SEQ ID NO: 57664 - DNA, 25 bp, Probe Sequence
gtaattattagcgtggcttttaaaa

SEQ ID NO: 57665 - DNA, 25 bp, Probe Sequence
tggtaatgttgaaggagttagtctg

SEQ ID NO: 57666 - DNA, 25 bp, Probe Sequence
ttggtaatgttgaaggagttagtct

SEQ ID NO: 57667 - DNA, 25 bp, Probe Sequence
atattatgcctgcctaagttctgaa

SEQ ID NO: 57668 - DNA, 25 bp, Probe Sequence
ggtaatgttgaaggagttagtctgg

SEQ ID NO: 57669 - DNA, 25 bp, Probe Sequence
tatattatgcctgcctaagttctga

SEQ ID NO: 57670 - DNA, 25 bp, Probe Sequence
taatgttgaaggagttagtctggct

SEQ ID NO: 57671 - DNA, 25 bp, Probe Sequence
gtaatgttgaaggagttagtctggc

SEQ ID NO: 57672 - DNA, 25 bp, Probe Sequence
ataatcatctgtagaagtctggaga

SEQ ID NO: 57673 - DNA, 25 bp, Probe Sequence
aagtattgactcttctaccaagttg

SEQ ID NO: 57674 - DNA, 25 bp, Probe Sequence
tattatgcctgcctaagttctgaac

SEQ ID NO: 57675 - DNA, 25 bp, Probe Sequence
aatgttgaaggagttagtctggctt

SEQ ID NO: 57676 - DNA, 25 bp, Probe Sequence
atatattatgcctgcctaagttctg

SEQ ID NO: 57677 - DNA, 25 bp, Probe Sequence
atattccaggcagctcaatgattat

SEQ ID NO: 57678 - DNA, 25 bp, Probe Sequence
tattccaggcagctcaatgattatc

SEQ ID NO: 57679 - DNA, 25 bp, Probe Sequence
gatattccaggcagctcaatgatta

SEQ ID NO: 57680 - DNA, 25 bp, Probe Sequence
ccagtacatatattatgcctgccta

SEQ ID NO: 57681 - DNA, 25 bp, Probe Sequence
ataggtgtttggtaatgttgaagga

SEQ ID NO: 57682 - DNA, 25 bp, Probe Sequence
gataggtgtttggtaatgttgaagg

SEQ ID NO: 57683 - DNA, 25 bp, Probe Sequence
ggataggtgtttggtaatgttgaag

SEQ ID NO: 57684 - DNA, 25 bp, Probe Sequence
aggataggtgtttggtaatgttgaa

SEQ ID NO: 57685 - DNA, 25 bp, Probe Sequence
aaggataggtgtttggtaatgttga

SEQ ID NO: 57686 - DNA, 25 bp, Probe Sequence
gtgtttggtaatgttgaaggagtta

SEQ ID NO: 57687 - DNA, 25 bp, Probe Sequence
gctattcgtcctgtaatctgtttct

SEQ ID NO: 57688 - DNA, 25 bp, Probe Sequence
taggtgtttggtaatgttgaaggag

SEQ ID NO: 57689 - DNA, 25 bp, Probe Sequence
aagagtcaagttgctatatggtcaa

SEQ ID NO: 57690 - DNA, 25 bp, Probe Sequence
atcaagagtcaagttgctatatggt

SEQ ID NO: 57691 - DNA, 25 bp, Probe Sequence
tcaagagtcaagttgctatatggtc

SEQ ID NO: 57692 - DNA, 25 bp, Probe Sequence
catcaagagtcaagttgctatatgg

SEQ ID NO: 57693 - DNA, 25 bp, Probe Sequence
caagagtcaagttgctatatggtca

SEQ ID NO: 57694 - DNA, 25 bp, Probe Sequence
attggaggtgatttacagtgaaaga

SEQ ID NO: 57695 - DNA, 25 bp, Probe Sequence
gattggaggtgatttacagtgaaag

SEQ ID NO: 57696 - DNA, 25 bp, Probe Sequence
agattggaggtgatttacagtgaaa

SEQ ID NO: 57697 - DNA, 25 bp, Probe Sequence
aagattggaggtgatttacagtgaa

SEQ ID NO: 57698 - DNA, 25 bp, Probe Sequence
aaagattggaggtgatttacagtga

SEQ ID NO: 57699 - DNA, 25 bp, Probe Sequence
ttggaggtgatttacagtgaaagac

SEQ ID NO: 57700 - DNA, 25 bp, Probe Sequence
agagaagagaggtaatttgttagca

SEQ ID NO: 57701 - DNA, 25 bp, Probe Sequence
ttgaagtccagcctaagcaacatag

SEQ ID NO: 57702 - DNA, 25 bp, Probe Sequence
agagtcaagttgctatatggtcaaa

SEQ ID NO: 57703 - DNA, 25 bp, Probe Sequence
tttgttagcatcaagagtcaagttg

SEQ ID NO: 57704 - DNA, 25 bp, Probe Sequence
gagagaagagaggtaatttgttagc

SEQ ID NO: 57705 - DNA, 25 bp, Probe Sequence
gagtcaagttgctatatggtcaaag

SEQ ID NO: 57706 - DNA, 25 bp, Probe Sequence
tcaagttgctatatggtcaaaggtt

SEQ ID NO: 57707 - DNA, 25 bp, Probe Sequence
gaagagaggtaatttgttagcatca

SEQ ID NO: 57708 - DNA, 25 bp, Probe Sequence
agtcaagttgctatatggtcaaagg

SEQ ID NO: 57709 - DNA, 25 bp, Probe Sequence
atttgttagcatcaagagtcaagtt

SEQ ID NO: 57710 - DNA, 25 bp, Probe Sequence
caagttgctatatggtcaaaggtta

SEQ ID NO: 57711 - DNA, 25 bp, Probe Sequence
ggtaatttgttagcatcaagagtca

SEQ ID NO: 57712 - DNA, 25 bp, Probe Sequence
agaagagaggtaatttgttagcatc

SEQ ID NO: 57713 - DNA, 25 bp, Probe Sequence
tcctaattcacaataacaatggcat

SEQ ID NO: 57714 - DNA, 25 bp, Probe Sequence
atcctaattcacaataacaatggca

SEQ ID NO: 57715 - DNA, 25 bp, Probe Sequence
tatagaagagtccatctgctgtgaa

SEQ ID NO: 57716 - DNA, 25 bp, Probe Sequence
ttcacaataacaatggcattaaggt

SEQ ID NO: 57717 - DNA, 25 bp, Probe Sequence
tcatactcttctaagtcctcttcca

SEQ ID NO: 57718 - DNA, 25 bp, Probe Sequence
catactcttctaagtcctcttccag

SEQ ID NO: 57719 - DNA, 25 bp, Probe Sequence
ttctgacaatcaatcaatcaatggc

SEQ ID NO: 57720 - DNA, 25 bp, Probe Sequence
tcacaataacaatggcattaaggtt

SEQ ID NO: 57721 - DNA, 25 bp, Probe Sequence
ttcatactcttctaagtcctcttcc

SEQ ID NO: 57722 - DNA, 25 bp, Probe Sequence
atactcttctaagtcctcttccagc

SEQ ID NO: 57723 - DNA, 25 bp, Probe Sequence
attcacaataacaatggcattaagg

SEQ ID NO: 57724 - DNA, 25 bp, Probe Sequence
cctaattcacaataacaatggcatt

SEQ ID NO: 57725 - DNA, 25 bp, Probe Sequence
aatcctaattcacaataacaatggc

SEQ ID NO: 57726 - DNA, 25 bp, Probe Sequence
atagaagagtccatctgctgtgaag

SEQ ID NO: 57727 - DNA, 25 bp, Probe Sequence
ctcttgtgtagtcacttctgattct

SEQ ID NO: 57728 - DNA, 25 bp, Probe Sequence
cttgtgtagtcacttctgattctga

SEQ ID NO: 57729 - DNA, 25 bp, Probe Sequence
tcttgtgtagtcacttctgattctg

SEQ ID NO: 57730 - DNA, 25 bp, Probe Sequence
ctaatgctcttgtgtagtcacttct

SEQ ID NO: 57731 - DNA, 25 bp, Probe Sequence
taatgctcttgtgtagtcacttctg

SEQ ID NO: 57732 - DNA, 25 bp, Probe Sequence
attctgacaatcaatcaatcaatgg

SEQ ID NO: 57733 - DNA, 25 bp, Probe Sequence
ttgacttgagttggttcttagtatt

SEQ ID NO: 57734 - DNA, 25 bp, Probe Sequence
gctcttgtgtagtcacttctgattc

SEQ ID NO: 57735 - DNA, 25 bp, Probe Sequence
aagtctggctaatgctcttgtgtag

SEQ ID NO: 57736 - DNA, 25 bp, Probe Sequence
attaacagccacctatagaagagtc

SEQ ID NO: 57737 - DNA, 25 bp, Probe Sequence
gtgacagtatttggagatttaggga

SEQ ID NO: 57738 - DNA, 25 bp, Probe Sequence
cggagggagtttattattgagtctt

SEQ ID NO: 57739 - DNA, 25 bp, Probe Sequence
ttcggagggagtttattattgagtc

SEQ ID NO: 57740 - DNA, 25 bp, Probe Sequence
tttcggagggagtttattattgagt

SEQ ID NO: 57741 - DNA, 25 bp, Probe Sequence
tcggagggagtttattattgagtct

SEQ ID NO: 57742 - DNA, 25 bp, Probe Sequence
tgacagtatttggagatttagggat

SEQ ID NO: 57743 - DNA, 25 bp, Probe Sequence
ctttcggagggagtttattattgag

SEQ ID NO: 57744 - DNA, 25 bp, Probe Sequence
tgtgacagtatttggagatttaggg

SEQ ID NO: 57745 - DNA, 25 bp, Probe Sequence
actttcggagggagtttattattga

SEQ ID NO: 57746 - DNA, 25 bp, Probe Sequence
gacagtatttggagatttagggatt

SEQ ID NO: 57747 - DNA, 25 bp, Probe Sequence
ggagggagtttattattgagtcttt

SEQ ID NO: 57748 - DNA, 25 bp, Probe Sequence
agatttagggatttgatacttaggc

SEQ ID NO: 57749 - DNA, 25 bp, Probe Sequence
acagtatttggagatttagggattt

SEQ ID NO: 57750 - DNA, 25 bp, Probe Sequence
cagtatttggagatttagggatttg

SEQ ID NO: 57751 - DNA, 25 bp, Probe Sequence
ttggagatttagggatttgatactt

SEQ ID NO: 57752 - DNA, 25 bp, Probe Sequence
tttggagatttagggatttgatact

SEQ ID NO: 57753 - DNA, 25 bp, Probe Sequence
agtatttggagatttagggatttga

SEQ ID NO: 57754 - DNA, 25 bp, Probe Sequence
ctgtgacagtatttggagatttagg

SEQ ID NO: 57755 - DNA, 25 bp, Probe Sequence
tggagatttagggatttgatactta

SEQ ID NO: 57756 - DNA, 25 bp, Probe Sequence
gtctttatctgtgacagtatttgga

SEQ ID NO: 57757 - DNA, 25 bp, Probe Sequence
agtctttatctgtgacagtatttgg

SEQ ID NO: 57758 - DNA, 25 bp, Probe Sequence
atttggagatttagggatttgatac

SEQ ID NO: 57759 - DNA, 25 bp, Probe Sequence
gtatttggagatttagggatttgat

SEQ ID NO: 57760 - DNA, 25 bp, Probe Sequence
gctcacacctgtaatcccaatactg

SEQ ID NO: 57761 - DNA, 25 bp, Probe Sequence
caaggataagattctgtcataggca

SEQ ID NO: 57762 - DNA, 25 bp, Probe Sequence
aaggataagattctgtcataggcat

SEQ ID NO: 57763 - DNA, 25 bp, Probe Sequence
attctgtcataggcatagagagttg

SEQ ID NO: 57764 - DNA, 25 bp, Probe Sequence
gattctgtcataggcatagagagtt

SEQ ID NO: 57765 - DNA, 25 bp, Probe Sequence
agattctgtcataggcatagagagt

SEQ ID NO: 57766 - DNA, 25 bp, Probe Sequence
gcctagaatgatggttagacttgta

SEQ ID NO: 57767 - DNA, 25 bp, Probe Sequence
aagattctgtcataggcatagagag

SEQ ID NO: 57768 - DNA, 25 bp, Probe Sequence
gagcctagaatgatggttagacttg

SEQ ID NO: 57769 - DNA, 25 bp, Probe Sequence
aggataagattctgtcataggcata

SEQ ID NO: 57770 - DNA, 25 bp, Probe Sequence
gaagagttgctaggattcagagtaa

SEQ ID NO: 57771 - DNA, 25 bp, Probe Sequence
tgagcctagaatgatggttagactt

SEQ ID NO: 57772 - DNA, 25 bp, Probe Sequence
ttgagcctagaatgatggttagact

SEQ ID NO: 57773 - DNA, 25 bp, Probe Sequence
ggataagattctgtcataggcatag

SEQ ID NO: 57774 - DNA, 25 bp, Probe Sequence
agcctagaatgatggttagacttgt

SEQ ID NO: 57775 - DNA, 25 bp, Probe Sequence
acaaggataagattctgtcataggc

SEQ ID NO: 57776 - DNA, 25 bp, Probe Sequence
taagattctgtcataggcatagaga

SEQ ID NO: 57777 - DNA, 25 bp, Probe Sequence
cctagaatgatggttagacttgtag

SEQ ID NO: 57778 - DNA, 25 bp, Probe Sequence
aacaaggataagattctgtcatagg

SEQ ID NO: 57779 - DNA, 25 bp, Probe Sequence
ataagattctgtcataggcatagag

SEQ ID NO: 57780 - DNA, 25 bp, Probe Sequence
gataagattctgtcataggcataga

SEQ ID NO: 57781 - DNA, 25 bp, Probe Sequence
ttatggaaatcattgaaggtctgga

SEQ ID NO: 57782 - DNA, 25 bp, Probe Sequence
tgctttatggaaatcattgaaggtc

SEQ ID NO: 57783 - DNA, 25 bp, Probe Sequence
tatggaaatcattgaaggtctggat

SEQ ID NO: 57784 - DNA, 25 bp, Probe Sequence
ctagaatgatggttagacttgtagt

SEQ ID NO: 57785 - DNA, 25 bp, Probe Sequence
aaggctggactaattcaatcaagat

SEQ ID NO: 57786 - DNA, 25 bp, Probe Sequence
actgttggaattgctctgtcataat

SEQ ID NO: 57787 - DNA, 25 bp, Probe Sequence
ctgttggaattgctctgtcataata

SEQ ID NO: 57788 - DNA, 25 bp, Probe Sequence
ggaattgctctgtcataataagtca

SEQ ID NO: 57789 - DNA, 25 bp, Probe Sequence
tggaattgctctgtcataataagtc

SEQ ID NO: 57790 - DNA, 25 bp, Probe Sequence
gaaggctggactaattcaatcaaga

SEQ ID NO: 57791 - DNA, 25 bp, Probe Sequence
tgttggaattgctctgtcataataa

SEQ ID NO: 57792 - DNA, 25 bp, Probe Sequence
gctggactaattcaatcaagatcaa

SEQ ID NO: 57793 - DNA, 25 bp, Probe Sequence
aggctggactaattcaatcaagatc

SEQ ID NO: 57794 - DNA, 25 bp, Probe Sequence
ttggaattgctctgtcataataagt

SEQ ID NO: 57795 - DNA, 25 bp, Probe Sequence
ggctggactaattcaatcaagatca

SEQ ID NO: 57796 - DNA, 25 bp, Probe Sequence
gttggaattgctctgtcataataag

SEQ ID NO: 57797 - DNA, 25 bp, Probe Sequence
aattgctctgtcataataagtcagg

SEQ ID NO: 57798 - DNA, 25 bp, Probe Sequence
tggactaattcaatcaagatcaact

SEQ ID NO: 57799 - DNA, 25 bp, Probe Sequence
gactgttggaattgctctgtcataa

SEQ ID NO: 57800 - DNA, 25 bp, Probe Sequence
ctggactaattcaatcaagatcaac

SEQ ID NO: 57801 - DNA, 25 bp, Probe Sequence
ggactaattcaatcaagatcaactc

SEQ ID NO: 57802 - DNA, 25 bp, Probe Sequence
ataagtcagggatatttaggaggct

SEQ ID NO: 57803 - DNA, 25 bp, Probe Sequence
gaattgctctgtcataataagtcag

SEQ ID NO: 57804 - DNA, 25 bp, Probe Sequence
ttcaatcaagatcaactctaagtga

SEQ ID NO: 57805 - DNA, 25 bp, Probe Sequence
gggatatttaggaggctcatagtct

SEQ ID NO: 57806 - DNA, 25 bp, Probe Sequence
agggatatttaggaggctcatagtc

SEQ ID NO: 57807 - DNA, 25 bp, Probe Sequence
tcagggatatttaggaggctcatag

SEQ ID NO: 57808 - DNA, 25 bp, Probe Sequence
taagtcagggatatttaggaggctc

SEQ ID NO: 57809 - DNA, 25 bp, Probe Sequence
tgactatatgaaggaagaggaaggt

SEQ ID NO: 57810 - DNA, 25 bp, Probe Sequence
gactatatgaaggaagaggaaggtt

SEQ ID NO: 57811 - DNA, 25 bp, Probe Sequence
ttgtaagactctgtggtattgttgg

SEQ ID NO: 57812 - DNA, 25 bp, Probe Sequence
atgactatatgaaggaagaggaagg

SEQ ID NO: 57813 - DNA, 25 bp, Probe Sequence
tgtaagactctgtggtattgttgga

SEQ ID NO: 57814 - DNA, 25 bp, Probe Sequence
cagttctcttatggtgacagttact

SEQ ID NO: 57815 - DNA, 25 bp, Probe Sequence
tcagttctcttatggtgacagttac

SEQ ID NO: 57816 - DNA, 25 bp, Probe Sequence
ctcagttctcttatggtgacagtta

SEQ ID NO: 57817 - DNA, 25 bp, Probe Sequence
agtatgaatacgaagtagacaagga

SEQ ID NO: 57818 - DNA, 25 bp, Probe Sequence
tctgtggtattgttggaggaatctt

SEQ ID NO: 57819 - DNA, 25 bp, Probe Sequence
gattcagagtaggctacaagaagag

SEQ ID NO: 57820 - DNA, 25 bp, Probe Sequence
atctcagttctcttatggtgacagt

SEQ ID NO: 57821 - DNA, 25 bp, Probe Sequence
gtcaatatgttggagcggatgtatt

SEQ ID NO: 57822 - DNA, 25 bp, Probe Sequence
tgattcagagtaggctacaagaaga

SEQ ID NO: 57823 - DNA, 25 bp, Probe Sequence
gtaagactctgtggtattgttggag

SEQ ID NO: 57824 - DNA, 25 bp, Probe Sequence
tctcagttctcttatggtgacagtt

SEQ ID NO: 57825 - DNA, 25 bp, Probe Sequence
atatgttggagcggatgtattggat

SEQ ID NO: 57826 - DNA, 25 bp, Probe Sequence
gcatgactatatgaaggaagaggaa

SEQ ID NO: 57827 - DNA, 25 bp, Probe Sequence
aagcatgactatatgaaggaagagg

SEQ ID NO: 57828 - DNA, 25 bp, Probe Sequence
acacaagcatgactatatgaaggaa

SEQ ID NO: 57829 - DNA, 25 bp, Probe Sequence
aacacaagcatgactatatgaagga

SEQ ID NO: 57830 - DNA, 25 bp, Probe Sequence
ggaccataacacaagcatgactata

SEQ ID NO: 57831 - DNA, 25 bp, Probe Sequence
atgatctcagttctcttatggtgac

SEQ ID NO: 57832 - DNA, 25 bp, Probe Sequence
aagtatgaatacgaagtagacaagg

SEQ ID NO: 57833 - DNA, 25 bp, Probe Sequence
aatggaatatgtaagacttggctca

SEQ ID NO: 57834 - DNA, 25 bp, Probe Sequence
tgaatggaatatgtaagacttggct

SEQ ID NO: 57835 - DNA, 25 bp, Probe Sequence
gaatggaatatgtaagacttggctc

SEQ ID NO: 57836 - DNA, 25 bp, Probe Sequence
atgaatggaatatgtaagacttggc

SEQ ID NO: 57837 - DNA, 25 bp, Probe Sequence
atggaatatgtaagacttggctcat

SEQ ID NO: 57838 - DNA, 25 bp, Probe Sequence
tatgaagagagactaacttggcatt

SEQ ID NO: 57839 - DNA, 25 bp, Probe Sequence
ttatgaagagagactaacttggcat

SEQ ID NO: 57840 - DNA, 25 bp, Probe Sequence
atgaagagagactaacttggcattc

SEQ ID NO: 57841 - DNA, 25 bp, Probe Sequence
atgtccatagtcattactcagtcaa

SEQ ID NO: 57842 - DNA, 25 bp, Probe Sequence
tgaagagagactaacttggcattct

SEQ ID NO: 57843 - DNA, 25 bp, Probe Sequence
agagagactaacttggcattcttgt

SEQ ID NO: 57844 - DNA, 25 bp, Probe Sequence
attcattacatggaggctcaatctt

SEQ ID NO: 57845 - DNA, 25 bp, Probe Sequence
aattcattacatggaggctcaatct

SEQ ID NO: 57846 - DNA, 25 bp, Probe Sequence
caattcattacatggaggctcaatc

SEQ ID NO: 57847 - DNA, 25 bp, Probe Sequence
ctaatcagatggttagaggtgttgg

SEQ ID NO: 57848 - DNA, 25 bp, Probe Sequence
ttcattacatggaggctcaatcttg

SEQ ID NO: 57849 - DNA, 25 bp, Probe Sequence
taatcagatggttagaggtgttggc

SEQ ID NO: 57850 - DNA, 25 bp, Probe Sequence
cctaatcagatggttagaggtgttg

SEQ ID NO: 57851 - DNA, 25 bp, Probe Sequence
tggaatatgtaagacttggctcata

SEQ ID NO: 57852 - DNA, 25 bp, Probe Sequence
tgtgtgtgtgtgtgtgtatccataa

SEQ ID NO: 57853 - DNA, 25 bp, Probe Sequence
gatgaatggaatatgtaagacttgg

SEQ ID NO: 57854 - DNA, 25 bp, Probe Sequence
gagagactaacttggcattcttgtc

SEQ ID NO: 57855 - DNA, 25 bp, Probe Sequence
ggaatatgtaagacttggctcatag

SEQ ID NO: 57856 - DNA, 25 bp, Probe Sequence
tgtccagaagatgaagctcaataat

SEQ ID NO: 57857 - DNA, 25 bp, Probe Sequence
atatccaacggtatagatcacaagg

SEQ ID NO: 57858 - DNA, 25 bp, Probe Sequence
acagtaatacctgaatatccaacgg

SEQ ID NO: 57859 - DNA, 25 bp, Probe Sequence
cctgaatatccaacggtatagatca

SEQ ID NO: 57860 - DNA, 25 bp, Probe Sequence
cacagtaatacctgaatatccaacg

SEQ ID NO: 57861 - DNA, 25 bp, Probe Sequence
acacacagtaatacctgaatatcca

SEQ ID NO: 57862 - DNA, 25 bp, Probe Sequence
tgaatatccaacggtatagatcaca

SEQ ID NO: 57863 - DNA, 25 bp, Probe Sequence
cacacacagtaatacctgaatatcc

SEQ ID NO: 57864 - DNA, 25 bp, Probe Sequence
aatatccaacggtatagatcacaag

SEQ ID NO: 57865 - DNA, 25 bp, Probe Sequence
gaatatccaacggtatagatcacaa

SEQ ID NO: 57866 - DNA, 25 bp, Probe Sequence
tgttacacacacagtaatacctgaa

SEQ ID NO: 57867 - DNA, 25 bp, Probe Sequence
ctgaatatccaacggtatagatcac

SEQ ID NO: 57868 - DNA, 25 bp, Probe Sequence
acacagtaatacctgaatatccaac

SEQ ID NO: 57869 - DNA, 25 bp, Probe Sequence
cacacagtaatacctgaatatccaa

SEQ ID NO: 57870 - DNA, 25 bp, Probe Sequence
acacacacagtaatacctgaatatc

SEQ ID NO: 57871 - DNA, 25 bp, Probe Sequence
cagtaatacctgaatatccaacggt

SEQ ID NO: 57872 - DNA, 25 bp, Probe Sequence
gttacacacacagtaatacctgaat

SEQ ID NO: 57873 - DNA, 25 bp, Probe Sequence
ttagtccgtcttcacacacaaataa

SEQ ID NO: 57874 - DNA, 25 bp, Probe Sequence
tttagtccgtcttcacacacaaata

SEQ ID NO: 57875 - DNA, 25 bp, Probe Sequence
acctgaatatccaacggtatagatc

SEQ ID NO: 57876 - DNA, 25 bp, Probe Sequence
cgaaagatatgtgggataaactgag

SEQ ID NO: 57877 - DNA, 25 bp, Probe Sequence
gcgaaagatatgtgggataaactga

SEQ ID NO: 57878 - DNA, 25 bp, Probe Sequence
caaatgttaccaatcagtgagcaag

SEQ ID NO: 57879 - DNA, 25 bp, Probe Sequence
tagtccgtcttcacacacaaataag

SEQ ID NO: 57880 - DNA, 25 bp, Probe Sequence
gccacctactatattaatcatgcta

SEQ ID NO: 57881 - DNA, 25 bp, Probe Sequence
agaggaggtggctatgtcttcttaa

SEQ ID NO: 57882 - DNA, 25 bp, Probe Sequence
ggagaaggtctacagttatcattat

SEQ ID NO: 57883 - DNA, 25 bp, Probe Sequence
taagggagaaggtctacagttatca

SEQ ID NO: 57884 - DNA, 25 bp, Probe Sequence
gagaggaggtggctatgtcttctta

SEQ ID NO: 57885 - DNA, 25 bp, Probe Sequence
agggagaaggtctacagttatcatt

SEQ ID NO: 57886 - DNA, 25 bp, Probe Sequence
aagggagaaggtctacagttatcat

SEQ ID NO: 57887 - DNA, 25 bp, Probe Sequence
gggagaaggtctacagttatcatta

SEQ ID NO: 57888 - DNA, 25 bp, Probe Sequence
ttaagggagaaggtctacagttatc

SEQ ID NO: 57889 - DNA, 25 bp, Probe Sequence
tttctcttcaatttccagggtttcc

SEQ ID NO: 57890 - DNA, 25 bp, Probe Sequence
cctatctcctggctagttaccacta

SEQ ID NO: 57891 - DNA, 25 bp, Probe Sequence
tcctcatggaattgaacctgacatt

SEQ ID NO: 57892 - DNA, 25 bp, Probe Sequence
ataatttccctggtgccaatttctt

SEQ ID NO: 57893 - DNA, 25 bp, Probe Sequence
taatttccctggtgccaatttcttt

SEQ ID NO: 57894 - DNA, 25 bp, Probe Sequence
ctcttcaatttccagggtttcctag

SEQ ID NO: 57895 - DNA, 25 bp, Probe Sequence
tctcttcaatttccagggtttccta

SEQ ID NO: 57896 - DNA, 25 bp, Probe Sequence
gaggaggtggctatgtcttcttaag

SEQ ID NO: 57897 - DNA, 25 bp, Probe Sequence
cataatttccctggtgccaatttct

SEQ ID NO: 57898 - DNA, 25 bp, Probe Sequence
cctcatggaattgaacctgacattt

SEQ ID NO: 57899 - DNA, 25 bp, Probe Sequence
ttctcttcaatttccagggtttcct

SEQ ID NO: 57900 - DNA, 25 bp, Probe Sequence
gtgatgggtttaagtaccttggtag

SEQ ID NO: 57901 - DNA, 25 bp, Probe Sequence
ctagagaatccagggaaactgtgag

SEQ ID NO: 57902 - DNA, 25 bp, Probe Sequence
ttaccactaggctaccaggtctcta

SEQ ID NO: 57903 - DNA, 25 bp, Probe Sequence
agtgatgggtttaagtaccttggta

SEQ ID NO: 57904 - DNA, 25 bp, Probe Sequence
cacagtgatgggtttaagtaccttg

SEQ ID NO: 57905 - DNA, 25 bp, Probe Sequence
tgttgagtcttagttaagcaggaat

SEQ ID NO: 57906 - DNA, 25 bp, Probe Sequence
atgttgagtcttagttaagcaggaa

SEQ ID NO: 57907 - DNA, 25 bp, Probe Sequence
aatgttgagtcttagttaagcagga

SEQ ID NO: 57908 - DNA, 25 bp, Probe Sequence
gttgagtcttagttaagcaggaatt

SEQ ID NO: 57909 - DNA, 25 bp, Probe Sequence
ttgtcctgtgccataaagtgatata

SEQ ID NO: 57910 - DNA, 25 bp, Probe Sequence
atttatgaacacccatttcctgact

SEQ ID NO: 57911 - DNA, 25 bp, Probe Sequence
ttaagcaggaatttatgaacaccca

SEQ ID NO: 57912 - DNA, 25 bp, Probe Sequence
ttatgaacacccatttcctgacttt

SEQ ID NO: 57913 - DNA, 25 bp, Probe Sequence
tttatgaacacccatttcctgactt

SEQ ID NO: 57914 - DNA, 25 bp, Probe Sequence
gttgtcctgtgccataaagtgatat

SEQ ID NO: 57915 - DNA, 25 bp, Probe Sequence
aatttatgaacacccatttcctgac

SEQ ID NO: 57916 - DNA, 25 bp, Probe Sequence
taagcaggaatttatgaacacccat

SEQ ID NO: 57917 - DNA, 25 bp, Probe Sequence
gaatttatgaacacccatttcctga

SEQ ID NO: 57918 - DNA, 25 bp, Probe Sequence
gttaagcaggaatttatgaacaccc

SEQ ID NO: 57919 - DNA, 25 bp, Probe Sequence
agttaagcaggaatttatgaacacc

SEQ ID NO: 57920 - DNA, 25 bp, Probe Sequence
aaatgttgagtcttagttaagcagg

SEQ ID NO: 57921 - DNA, 25 bp, Probe Sequence
gcaggaatttatgaacacccatttc

SEQ ID NO: 57922 - DNA, 25 bp, Probe Sequence
agcaggaatttatgaacacccattt

SEQ ID NO: 57923 - DNA, 25 bp, Probe Sequence
aagcaggaatttatgaacacccatt

SEQ ID NO: 57924 - DNA, 25 bp, Probe Sequence
tgtcctgtgccataaagtgatatat

SEQ ID NO: 57925 - DNA, 25 bp, Probe Sequence
ttgagtcttagttaagcaggaattt

SEQ ID NO: 57926 - DNA, 25 bp, Probe Sequence
aatgtgatctgtaatttctttgtgc

SEQ ID NO: 57927 - DNA, 25 bp, Probe Sequence
gtcctgtgccataaagtgatatatt

SEQ ID NO: 57928 - DNA, 25 bp, Probe Sequence
tgttgtcctgtgccataaagtgata

SEQ ID NO: 57929 - DNA, 25 bp, Probe Sequence
tcataggcaattagaactggaagaa

SEQ ID NO: 57930 - DNA, 25 bp, Probe Sequence
atcataggcaattagaactggaaga

SEQ ID NO: 57931 - DNA, 25 bp, Probe Sequence
ccaagcatcatatcctaaggcatac

SEQ ID NO: 57932 - DNA, 25 bp, Probe Sequence
caagcatcatatcctaaggcatacg

SEQ ID NO: 57933 - DNA, 25 bp, Probe Sequence
gatcataggcaattagaactggaag

SEQ ID NO: 57934 - DNA, 25 bp, Probe Sequence
catcatatcctaaggcatacggaat

SEQ ID NO: 57935 - DNA, 25 bp, Probe Sequence
atcatatcctaaggcatacggaatt

SEQ ID NO: 57936 - DNA, 25 bp, Probe Sequence
aagcatcatatcctaaggcatacgg

SEQ ID NO: 57937 - DNA, 25 bp, Probe Sequence
taggcaattagaactggaagaaact

SEQ ID NO: 57938 - DNA, 25 bp, Probe Sequence
gaaactaaactctgtggaagggaag

SEQ ID NO: 57939 - DNA, 25 bp, Probe Sequence
ataggcaattagaactggaagaaac

SEQ ID NO: 57940 - DNA, 25 bp, Probe Sequence
cataggcaattagaactggaagaaa

SEQ ID NO: 57941 - DNA, 25 bp, Probe Sequence
gccaatgagggatttatagcatctt

SEQ ID NO: 57942 - DNA, 25 bp, Probe Sequence
aagccaatgagggatttatagcatc

SEQ ID NO: 57943 - DNA, 25 bp, Probe Sequence
gaagccaatgagggatttatagcat

SEQ ID NO: 57944 - DNA, 25 bp, Probe Sequence
aggcaattagaactggaagaaactt

SEQ ID NO: 57945 - DNA, 25 bp, Probe Sequence
tcttgaagccaatgagggatttata

SEQ ID NO: 57946 - DNA, 25 bp, Probe Sequence
ccaatgagggatttatagcatcttg

SEQ ID NO: 57947 - DNA, 25 bp, Probe Sequence
cttgaagccaatgagggatttatag

SEQ ID NO: 57948 - DNA, 25 bp, Probe Sequence
aatgaggaaactaaactctgtggaa

SEQ ID NO: 57949 - DNA, 25 bp, Probe Sequence
aaatgaggaaactaaactctgtgga

SEQ ID NO: 57950 - DNA, 25 bp, Probe Sequence
caaatgaggaaactaaactctgtgg

SEQ ID NO: 57951 - DNA, 25 bp, Probe Sequence
atgaggaaactaaactctgtggaag

SEQ ID NO: 57952 - DNA, 25 bp, Probe Sequence
ttgaagccaatgagggatttatagc

SEQ ID NO: 57953 - DNA, 25 bp, Probe Sequence
taatgtatatggaacagcctggatt

SEQ ID NO: 57954 - DNA, 25 bp, Probe Sequence
atatggataagccaccttggaatag

SEQ ID NO: 57955 - DNA, 25 bp, Probe Sequence
tactcactcttcttgcttaggctct

SEQ ID NO: 57956 - DNA, 25 bp, Probe Sequence
gatagattcaaacttcctgtggtag

SEQ ID NO: 57957 - DNA, 25 bp, Probe Sequence
gtactcactcttcttgcttaggctc

SEQ ID NO: 57958 - DNA, 25 bp, Probe Sequence
tatggataagccaccttggaatagg

SEQ ID NO: 57959 - DNA, 25 bp, Probe Sequence
ataagccaccttggaataggaagag

SEQ ID NO: 57960 - DNA, 25 bp, Probe Sequence
gataagccaccttggaataggaaga

SEQ ID NO: 57961 - DNA, 25 bp, Probe Sequence
tagattcaaacttcctgtggtagtg

SEQ ID NO: 57962 - DNA, 25 bp, Probe Sequence
atagattcaaacttcctgtggtagt

SEQ ID NO: 57963 - DNA, 25 bp, Probe Sequence
cttggaataggaagaggtgttgagc

SEQ ID NO: 57964 - DNA, 25 bp, Probe Sequence
ccttggaataggaagaggtgttgag

SEQ ID NO: 57965 - DNA, 25 bp, Probe Sequence
aatgtatatggaacagcctggattt

SEQ ID NO: 57966 - DNA, 25 bp, Probe Sequence
atgtatatggaacagcctggatttc

SEQ ID NO: 57967 - DNA, 25 bp, Probe Sequence
ctcactcttcttgcttaggctctct

SEQ ID NO: 57968 - DNA, 25 bp, Probe Sequence
aaagtttgccttctgacctcatttc

SEQ ID NO: 57969 - DNA, 25 bp, Probe Sequence
gcaatttatgtttgagaagaagtga

SEQ ID NO: 57970 - DNA, 25 bp, Probe Sequence
gtatatggaacagcctggatttctg

SEQ ID NO: 57971 - DNA, 25 bp, Probe Sequence
ggataagccaccttggaataggaag

SEQ ID NO: 57972 - DNA, 25 bp, Probe Sequence
tcactcttcttgcttaggctctctg

SEQ ID NO: 57973 - DNA, 25 bp, Probe Sequence
actcactcttcttgcttaggctctc

SEQ ID NO: 57974 - DNA, 25 bp, Probe Sequence
ggatagattcaaacttcctgtggta

SEQ ID NO: 57975 - DNA, 25 bp, Probe Sequence
tgtatatggaacagcctggatttct

SEQ ID NO: 57976 - DNA, 25 bp, Probe Sequence
ttcagtactcactcttcttgcttag

SEQ ID NO: 57977 - DNA, 25 bp, Probe Sequence
catagtctgctccatcttgatagtt

SEQ ID NO: 57978 - DNA, 25 bp, Probe Sequence
ctgctccatcttgatagttaagtga

SEQ ID NO: 57979 - DNA, 25 bp, Probe Sequence
tctgctccatcttgatagttaagtg

SEQ ID NO: 57980 - DNA, 25 bp, Probe Sequence
gtctgctccatcttgatagttaagt

SEQ ID NO: 57981 - DNA, 25 bp, Probe Sequence
agtctgctccatcttgatagttaag

SEQ ID NO: 57982 - DNA, 25 bp, Probe Sequence
tgctccatcttgatagttaagtgat

SEQ ID NO: 57983 - DNA, 25 bp, Probe Sequence
tagtctgctccatcttgatagttaa

SEQ ID NO: 57984 - DNA, 25 bp, Probe Sequence
tgctaagccttctgttctctaatag

SEQ ID NO: 57985 - DNA, 25 bp, Probe Sequence
atagtctgctccatcttgatagtta

SEQ ID NO: 57986 - DNA, 25 bp, Probe Sequence
ctcatagtctgctccatcttgatag

SEQ ID NO: 57987 - DNA, 25 bp, Probe Sequence
tctcatagtctgctccatcttgata

SEQ ID NO: 57988 - DNA, 25 bp, Probe Sequence
atgctaagccttctgttctctaata

SEQ ID NO: 57989 - DNA, 25 bp, Probe Sequence
tatgctaagccttctgttctctaat

SEQ ID NO: 57990 - DNA, 25 bp, Probe Sequence
atatgctaagccttctgttctctaa

SEQ ID NO: 57991 - DNA, 25 bp, Probe Sequence
tcatagtctgctccatcttgatagt

SEQ ID NO: 57992 - DNA, 25 bp, Probe Sequence
gctccatcttgatagttaagtgatt

SEQ ID NO: 57993 - DNA, 25 bp, Probe Sequence
gctaagccttctgttctctaataga

SEQ ID NO: 57994 - DNA, 25 bp, Probe Sequence
atatatgctaagccttctgttctct

SEQ ID NO: 57995 - DNA, 25 bp, Probe Sequence
tatatgctaagccttctgttctcta

SEQ ID NO: 57996 - DNA, 25 bp, Probe Sequence
ctctcatagtctgctccatcttgat

SEQ ID NO: 57997 - DNA, 25 bp, Probe Sequence
aattaaccagccagtagattgtctg

SEQ ID NO: 57998 - DNA, 25 bp, Probe Sequence
attaaccagccagtagattgtctgt

SEQ ID NO: 57999 - DNA, 25 bp, Probe Sequence
tctgtcagtgaccttctgtagtaat

SEQ ID NO: 58000 - DNA, 25 bp, Probe Sequence
ctgtcagtgaccttctgtagtaata

SEQ ID NO: 58001 - DNA, 25 bp, Probe Sequence
tcaggataacagagagataccacat

SEQ ID NO: 58002 - DNA, 25 bp, Probe Sequence
gagtcaggataacagagagatacca

SEQ ID NO: 58003 - DNA, 25 bp, Probe Sequence
agatgagtcaggataacagagagat

SEQ ID NO: 58004 - DNA, 25 bp, Probe Sequence
agtcaggataacagagagataccac

SEQ ID NO: 58005 - DNA, 25 bp, Probe Sequence
tagatgagtcaggataacagagaga

SEQ ID NO: 58006 - DNA, 25 bp, Probe Sequence
tgagtcaggataacagagagatacc

SEQ ID NO: 58007 - DNA, 25 bp, Probe Sequence
gtcaggataacagagagataccaca

SEQ ID NO: 58008 - DNA, 25 bp, Probe Sequence
atgagtcaggataacagagagatac

SEQ ID NO: 58009 - DNA, 25 bp, Probe Sequence
ctagatgagtcaggataacagagag

SEQ ID NO: 58010 - DNA, 25 bp, Probe Sequence
gatgagtcaggataacagagagata

SEQ ID NO: 58011 - DNA, 25 bp, Probe Sequence
caggataacagagagataccacatg

SEQ ID NO: 58012 - DNA, 25 bp, Probe Sequence
aggataacagagagataccacatgg

SEQ ID NO: 58013 - DNA, 25 bp, Probe Sequence
ataacagagagataccacatggcaa

SEQ ID NO: 58014 - DNA, 25 bp, Probe Sequence
cctagatgagtcaggataacagaga

SEQ ID NO: 58015 - DNA, 25 bp, Probe Sequence
gctagacctagatgagtcaggataa

SEQ ID NO: 58016 - DNA, 25 bp, Probe Sequence
tagacctagatgagtcaggataaca

SEQ ID NO: 58017 - DNA, 25 bp, Probe Sequence
acctagatgagtcaggataacagag

SEQ ID NO: 58018 - DNA, 25 bp, Probe Sequence
gacctagatgagtcaggataacaga

SEQ ID NO: 58019 - DNA, 25 bp, Probe Sequence
agacctagatgagtcaggataacag

SEQ ID NO: 58020 - DNA, 25 bp, Probe Sequence
ctagacctagatgagtcaggataac

SEQ ID NO: 58021 - DNA, 25 bp, Probe Sequence
gataacagagagataccacatggca

SEQ ID NO: 58022 - DNA, 25 bp, Probe Sequence
tgctagacctagatgagtcaggata

SEQ ID NO: 58023 - DNA, 25 bp, Probe Sequence
taacagagagataccacatggcaag

SEQ ID NO: 58024 - DNA, 25 bp, Probe Sequence
ttgctagacctagatgagtcaggat

SEQ ID NO: 58025 - DNA, 25 bp, Probe Sequence
tattatacaactgctgtgaccagac

SEQ ID NO: 58026 - DNA, 25 bp, Probe Sequence
ttacatgaagatggagtgctaatgg

SEQ ID NO: 58027 - DNA, 25 bp, Probe Sequence
gtattatacaactgctgtgaccaga

SEQ ID NO: 58028 - DNA, 25 bp, Probe Sequence
agtattatacaactgctgtgaccag

SEQ ID NO: 58029 - DNA, 25 bp, Probe Sequence
ctggatctacggagtcttctaagag

SEQ ID NO: 58030 - DNA, 25 bp, Probe Sequence
ggtcttgcttcaatgactccaatat

SEQ ID NO: 58031 - DNA, 25 bp, Probe Sequence
tggatctacggagtcttctaagaga

SEQ ID NO: 58032 - DNA, 25 bp, Probe Sequence
tacatgaagatggagtgctaatgga

SEQ ID NO: 58033 - DNA, 25 bp, Probe Sequence
ttattgagcatctcttctccataag

SEQ ID NO: 58034 - DNA, 25 bp, Probe Sequence
attatacaactgctgtgaccagact

SEQ ID NO: 58035 - DNA, 25 bp, Probe Sequence
gattaaggaccagatcactgatgtg

SEQ ID NO: 58036 - DNA, 25 bp, Probe Sequence
ttatacaactgctgtgaccagactt

SEQ ID NO: 58037 - DNA, 25 bp, Probe Sequence
atgaagatggagtgctaatggaaat

SEQ ID NO: 58038 - DNA, 25 bp, Probe Sequence
acatgaagatggagtgctaatggaa

SEQ ID NO: 58039 - DNA, 25 bp, Probe Sequence
gtcttgcttcaatgactccaatatt

SEQ ID NO: 58040 - DNA, 25 bp, Probe Sequence
gcaagacattagccctttagttatg

SEQ ID NO: 58041 - DNA, 25 bp, Probe Sequence
agacattagccctttagttatgagc

SEQ ID NO: 58042 - DNA, 25 bp, Probe Sequence
cctggatctacggagtcttctaaga

SEQ ID NO: 58043 - DNA, 25 bp, Probe Sequence
tgaagatggagtgctaatggaaatg

SEQ ID NO: 58044 - DNA, 25 bp, Probe Sequence
ggatctacggagtcttctaagagat

SEQ ID NO: 58045 - DNA, 25 bp, Probe Sequence
attagccctttagttatgagcctgt

SEQ ID NO: 58046 - DNA, 25 bp, Probe Sequence
gcatctcttctccataagatagtgt

SEQ ID NO: 58047 - DNA, 25 bp, Probe Sequence
cattagccctttagttatgagcctg

SEQ ID NO: 58048 - DNA, 25 bp, Probe Sequence
gacattagccctttagttatgagcc

SEQ ID NO: 58049 - DNA, 25 bp, Probe Sequence
tattatacaactgctgtgaccagac

SEQ ID NO: 58050 - DNA, 25 bp, Probe Sequence
ttacatgaagatggagtgctaatgg

SEQ ID NO: 58051 - DNA, 25 bp, Probe Sequence
gtattatacaactgctgtgaccaga

SEQ ID NO: 58052 - DNA, 25 bp, Probe Sequence
agtattatacaactgctgtgaccag

SEQ ID NO: 58053 - DNA, 25 bp, Probe Sequence
ctggatctacggagtcttctaagag

SEQ ID NO: 58054 - DNA, 25 bp, Probe Sequence
ggtcttgcttcaatgactccaatat

SEQ ID NO: 58055 - DNA, 25 bp, Probe Sequence
tggatctacggagtcttctaagaga

SEQ ID NO: 58056 - DNA, 25 bp, Probe Sequence
tacatgaagatggagtgctaatgga

SEQ ID NO: 58057 - DNA, 25 bp, Probe Sequence
ttattgagcatctcttctccataag

SEQ ID NO: 58058 - DNA, 25 bp, Probe Sequence
attatacaactgctgtgaccagact

SEQ ID NO: 58059 - DNA, 25 bp, Probe Sequence
gattaaggaccagatcactgatgtg

SEQ ID NO: 58060 - DNA, 25 bp, Probe Sequence
ttatacaactgctgtgaccagactt

SEQ ID NO: 58061 - DNA, 25 bp, Probe Sequence
atgaagatggagtgctaatggaaat

SEQ ID NO: 58062 - DNA, 25 bp, Probe Sequence
acatgaagatggagtgctaatggaa

SEQ ID NO: 58063 - DNA, 25 bp, Probe Sequence
gtcttgcttcaatgactccaatatt

SEQ ID NO: 58064 - DNA, 25 bp, Probe Sequence
gcaagacattagccctttagttatg

SEQ ID NO: 58065 - DNA, 25 bp, Probe Sequence
agacattagccctttagttatgagc

SEQ ID NO: 58066 - DNA, 25 bp, Probe Sequence
cctggatctacggagtcttctaaga

SEQ ID NO: 58067 - DNA, 25 bp, Probe Sequence
tgaagatggagtgctaatggaaatg

SEQ ID NO: 58068 - DNA, 25 bp, Probe Sequence
ggatctacggagtcttctaagagat

SEQ ID NO: 58069 - DNA, 25 bp, Probe Sequence
attagccctttagttatgagcctgt

SEQ ID NO: 58070 - DNA, 25 bp, Probe Sequence
gcatctcttctccataagatagtgt

SEQ ID NO: 58071 - DNA, 25 bp, Probe Sequence
cattagccctttagttatgagcctg

SEQ ID NO: 58072 - DNA, 25 bp, Probe Sequence
gacattagccctttagttatgagcc

SEQ ID NO: 58073 - DNA, 25 bp, Probe Sequence
tcctacctatatgtgtgtgtattgt

SEQ ID NO: 58074 - DNA, 25 bp, Probe Sequence
tatcagattcagaggatgacagttg

SEQ ID NO: 58075 - DNA, 25 bp, Probe Sequence
gtcctacctatatgtgtgtgtattg

SEQ ID NO: 58076 - DNA, 25 bp, Probe Sequence
atatcagattcagaggatgacagtt

SEQ ID NO: 58077 - DNA, 25 bp, Probe Sequence
aatatcagattcagaggatgacagt

SEQ ID NO: 58078 - DNA, 25 bp, Probe Sequence
ttggaagtagctgatgaagataaca

SEQ ID NO: 58079 - DNA, 25 bp, Probe Sequence
cgttggaagtagctgatgaagataa

SEQ ID NO: 58080 - DNA, 25 bp, Probe Sequence
tggtcctacctatatgtgtgtgtat

SEQ ID NO: 58081 - DNA, 25 bp, Probe Sequence
cctacctatatgtgtgtgtattgta

SEQ ID NO: 58082 - DNA, 25 bp, Probe Sequence
ttggtcctacctatatgtgtgtgta

SEQ ID NO: 58083 - DNA, 25 bp, Probe Sequence
gttggaagtagctgatgaagataac

SEQ ID NO: 58084 - DNA, 25 bp, Probe Sequence
ggtcctacctatatgtgtgtgtatt

SEQ ID NO: 58085 - DNA, 25 bp, Probe Sequence
actatcttcgagagaacagagagaa

SEQ ID NO: 58086 - DNA, 25 bp, Probe Sequence
attcactatcttcgagagaacagag

SEQ ID NO: 58087 - DNA, 25 bp, Probe Sequence
ttcactatcttcgagagaacagaga

SEQ ID NO: 58088 - DNA, 25 bp, Probe Sequence
cctgtattcactatcttcgagagaa

SEQ ID NO: 58089 - DNA, 25 bp, Probe Sequence
tctattatgggactgtttgctttga

SEQ ID NO: 58090 - DNA, 25 bp, Probe Sequence
ctattatgggactgtttgctttgaa

SEQ ID NO: 58091 - DNA, 25 bp, Probe Sequence
ttctattatgggactgtttgctttg

SEQ ID NO: 58092 - DNA, 25 bp, Probe Sequence
aatgggtaggacaagtggaaataag

SEQ ID NO: 58093 - DNA, 25 bp, Probe Sequence
gaatgggtaggacaagtggaaataa

SEQ ID NO: 58094 - DNA, 25 bp, Probe Sequence
cactatcttcgagagaacagagaga

SEQ ID NO: 58095 - DNA, 25 bp, Probe Sequence
tcactatcttcgagagaacagagag

SEQ ID NO: 58096 - DNA, 25 bp, Probe Sequence
tagtgccatacaaggaaagttaagt

SEQ ID NO: 58097 - DNA, 25 bp, Probe Sequence
atgagatgattcgtctgaactgatt

SEQ ID NO: 58098 - DNA, 25 bp, Probe Sequence
aatgagatgattcgtctgaactgat

SEQ ID NO: 58099 - DNA, 25 bp, Probe Sequence
aatgagaccatcttattgctgactt

SEQ ID NO: 58100 - DNA, 25 bp, Probe Sequence
tgagatgattcgtctgaactgatta

SEQ ID NO: 58101 - DNA, 25 bp, Probe Sequence
atgagaccatcttattgctgacttc

SEQ ID NO: 58102 - DNA, 25 bp, Probe Sequence
aactgactattctagcctatctcct

SEQ ID NO: 58103 - DNA, 25 bp, Probe Sequence
ctgactattctagcctatctcctgt

SEQ ID NO: 58104 - DNA, 25 bp, Probe Sequence
actgactattctagcctatctcctg

SEQ ID NO: 58105 - DNA, 25 bp, Probe Sequence
tgactattctagcctatctcctgtg

SEQ ID NO: 58106 - DNA, 25 bp, Probe Sequence
gagaccatcttattgctgacttcaa

SEQ ID NO: 58107 - DNA, 25 bp, Probe Sequence
gaactgactattctagcctatctcc

SEQ ID NO: 58108 - DNA, 25 bp, Probe Sequence
ggaactgactattctagcctatctc

SEQ ID NO: 58109 - DNA, 25 bp, Probe Sequence
atgaagaggaactgactattctagc

SEQ ID NO: 58110 - DNA, 25 bp, Probe Sequence
gagatgattcgtctgaactgattaa

SEQ ID NO: 58111 - DNA, 25 bp, Probe Sequence
aaccatgaagaggaactgactattc

SEQ ID NO: 58112 - DNA, 25 bp, Probe Sequence
tgaagaggaactgactattctagcc

SEQ ID NO: 58113 - DNA, 25 bp, Probe Sequence
gactattctagcctatctcctgtgc

SEQ ID NO: 58114 - DNA, 25 bp, Probe Sequence
ccatgaagaggaactgactattcta

SEQ ID NO: 58115 - DNA, 25 bp, Probe Sequence
tgagaccatcttattgctgacttca

SEQ ID NO: 58116 - DNA, 25 bp, Probe Sequence
accatgaagaggaactgactattct

SEQ ID NO: 58117 - DNA, 25 bp, Probe Sequence
aagaggaactgactattctagccta

SEQ ID NO: 58118 - DNA, 25 bp, Probe Sequence
aggaactgactattctagcctatct

SEQ ID NO: 58119 - DNA, 25 bp, Probe Sequence
agaggaactgactattctagcctat

SEQ ID NO: 58120 - DNA, 25 bp, Probe Sequence
gaggaactgactattctagcctatc

SEQ ID NO: 58121 - DNA, 25 bp, Probe Sequence
tatattaacgcagtcttgtaggcag

SEQ ID NO: 58122 - DNA, 25 bp, Probe Sequence
ttgagaagcatcatcatagagaagt

SEQ ID NO: 58123 - DNA, 25 bp, Probe Sequence
atatattaacgcagtcttgtaggca

SEQ ID NO: 58124 - DNA, 25 bp, Probe Sequence
tgagaagcatcatcatagagaagta

SEQ ID NO: 58125 - DNA, 25 bp, Probe Sequence
gagaagcatcatcatagagaagtaa

SEQ ID NO: 58126 - DNA, 25 bp, Probe Sequence
taaacatcacacccaacttccttat

SEQ ID NO: 58127 - DNA, 25 bp, Probe Sequence
tcatagagaagtaaacatcacaccc

SEQ ID NO: 58128 - DNA, 25 bp, Probe Sequence
catagagaagtaaacatcacaccca

SEQ ID NO: 58129 - DNA, 25 bp, Probe Sequence
atagagaagtaaacatcacacccaa

SEQ ID NO: 58130 - DNA, 25 bp, Probe Sequence
tagagaagtaaacatcacacccaac

SEQ ID NO: 58131 - DNA, 25 bp, Probe Sequence
attatgttacttgtttggctgttca

SEQ ID NO: 58132 - DNA, 25 bp, Probe Sequence
atcacacccaacttccttatctttc

SEQ ID NO: 58133 - DNA, 25 bp, Probe Sequence
catcacacccaacttccttatcttt

SEQ ID NO: 58134 - DNA, 25 bp, Probe Sequence
gtaaacatcacacccaacttcctta

SEQ ID NO: 58135 - DNA, 25 bp, Probe Sequence
ttatgttacttgtttggctgttcat

SEQ ID NO: 58136 - DNA, 25 bp, Probe Sequence
aaacatcacacccaacttccttatc

SEQ ID NO: 58137 - DNA, 25 bp, Probe Sequence
cttccttatctttccagtggctaaa

SEQ ID NO: 58138 - DNA, 25 bp, Probe Sequence
ttccttatctttccagtggctaaac

SEQ ID NO: 58139 - DNA, 25 bp, Probe Sequence
agtttgagaagcatcatcatagaga

SEQ ID NO: 58140 - DNA, 25 bp, Probe Sequence
atcatagagaagtaaacatcacacc

SEQ ID NO: 58141 - DNA, 25 bp, Probe Sequence
atattaacgcagtcttgtaggcagc

SEQ ID NO: 58142 - DNA, 25 bp, Probe Sequence
aattatgttacttgtttggctgttc

SEQ ID NO: 58143 - DNA, 25 bp, Probe Sequence
acatcacacccaacttccttatctt

SEQ ID NO: 58144 - DNA, 25 bp, Probe Sequence
aacatcacacccaacttccttatct

SEQ ID NO: 58145 - DNA, 25 bp, Probe Sequence
taatgaaacttcctttccagggaga

SEQ ID NO: 58146 - DNA, 25 bp, Probe Sequence
atgaaacttcctttccagggagaaa

SEQ ID NO: 58147 - DNA, 25 bp, Probe Sequence
aatgaaacttcctttccagggagaa

SEQ ID NO: 58148 - DNA, 25 bp, Probe Sequence
tgaaacttcctttccagggagaaaa

SEQ ID NO: 58149 - DNA, 25 bp, Probe Sequence
ttagtgttgagtctcttgattgtgt

SEQ ID NO: 58150 - DNA, 25 bp, Probe Sequence
tagtgttgagtctcttgattgtgtc

SEQ ID NO: 58151 - DNA, 25 bp, Probe Sequence
taggatgctacataggattctggta

SEQ ID NO: 58152 - DNA, 25 bp, Probe Sequence
ggatgctacataggattctggtatt

SEQ ID NO: 58153 - DNA, 25 bp, Probe Sequence
aggatgctacataggattctggtat

SEQ ID NO: 58154 - DNA, 25 bp, Probe Sequence
ccatcatcacaactgtagtctcatt

SEQ ID NO: 58155 - DNA, 25 bp, Probe Sequence
attagtgttgagtctcttgattgtg

SEQ ID NO: 58156 - DNA, 25 bp, Probe Sequence
ttccaattagtgttgagtctcttga

SEQ ID NO: 58157 - DNA, 25 bp, Probe Sequence
tccaattagtgttgagtctcttgat

SEQ ID NO: 58158 - DNA, 25 bp, Probe Sequence
aatcagcattccaattagtgttgag

SEQ ID NO: 58159 - DNA, 25 bp, Probe Sequence
aactaggatgctacataggattctg

SEQ ID NO: 58160 - DNA, 25 bp, Probe Sequence
tgttgagtctcttgattgtgtcatt

SEQ ID NO: 58161 - DNA, 25 bp, Probe Sequence
gatgctacataggattctggtattc

SEQ ID NO: 58162 - DNA, 25 bp, Probe Sequence
atcagcattccaattagtgttgagt

SEQ ID NO: 58163 - DNA, 25 bp, Probe Sequence
accatcatcacaactgtagtctcat

SEQ ID NO: 58164 - DNA, 25 bp, Probe Sequence
ccaattagtgttgagtctcttgatt

SEQ ID NO: 58165 - DNA, 25 bp, Probe Sequence
attccaattagtgttgagtctcttg

SEQ ID NO: 58166 - DNA, 25 bp, Probe Sequence
cattccaattagtgttgagtctctt

SEQ ID NO: 58167 - DNA, 25 bp, Probe Sequence
gcattccaattagtgttgagtctct

SEQ ID NO: 58168 - DNA, 25 bp, Probe Sequence
agcattccaattagtgttgagtctc

SEQ ID NO: 58169 - DNA, 25 bp, Probe Sequence
ctaggatgctacataggattctggt

SEQ ID NO: 58170 - DNA, 25 bp, Probe Sequence
actaggatgctacataggattctgg

SEQ ID NO: 58171 - DNA, 25 bp, Probe Sequence
aattagtgttgagtctcttgattgt

SEQ ID NO: 58172 - DNA, 25 bp, Probe Sequence
gtgttgagtctcttgattgtgtcat

SEQ ID NO: 58173 - DNA, 25 bp, Probe Sequence
tctctacttgtgaacagattaagga

SEQ ID NO: 58174 - DNA, 25 bp, Probe Sequence
ctctacttgtgaacagattaaggat

SEQ ID NO: 58175 - DNA, 25 bp, Probe Sequence
gatgtgtgttaagaatagcactggt

SEQ ID NO: 58176 - DNA, 25 bp, Probe Sequence
atgtgtgttaagaatagcactggtg

SEQ ID NO: 58177 - DNA, 25 bp, Probe Sequence
ggttgttgaagacattggatactgg

SEQ ID NO: 58178 - DNA, 25 bp, Probe Sequence
ttaagaatagcactggtgtggagat

SEQ ID NO: 58179 - DNA, 25 bp, Probe Sequence
ttctccaatccttgatccgtaacaa

SEQ ID NO: 58180 - DNA, 25 bp, Probe Sequence
cggttgttgaagacattggatactg

SEQ ID NO: 58181 - DNA, 25 bp, Probe Sequence
aattgcatctctacttgtgaacaga

SEQ ID NO: 58182 - DNA, 25 bp, Probe Sequence
cgatgtgtgttaagaatagcactgg

SEQ ID NO: 58183 - DNA, 25 bp, Probe Sequence
tatttctctgtcctggtcaatatgg

SEQ ID NO: 58184 - DNA, 25 bp, Probe Sequence
gtgtgttaagaatagcactggtgtg

SEQ ID NO: 58185 - DNA, 25 bp, Probe Sequence
taagaatagcactggtgtggagatc

SEQ ID NO: 58186 - DNA, 25 bp, Probe Sequence
gttaagaatagcactggtgtggaga

SEQ ID NO: 58187 - DNA, 25 bp, Probe Sequence
gtatttctctgtcctggtcaatatg

SEQ ID NO: 58188 - DNA, 25 bp, Probe Sequence
gcatctctacttgtgaacagattaa

SEQ ID NO: 58189 - DNA, 25 bp, Probe Sequence
agtatttctctgtcctggtcaatat

SEQ ID NO: 58190 - DNA, 25 bp, Probe Sequence
tgtgtgttaagaatagcactggtgt

SEQ ID NO: 58191 - DNA, 25 bp, Probe Sequence
gctgttgatctacctcctgaattta

SEQ ID NO: 58192 - DNA, 25 bp, Probe Sequence
gagtatttctctgtcctggtcaata

SEQ ID NO: 58193 - DNA, 25 bp, Probe Sequence
aattaatgcagtcaagccagatcac

SEQ ID NO: 58194 - DNA, 25 bp, Probe Sequence
tgttaagaatagcactggtgtggag

SEQ ID NO: 58195 - DNA, 25 bp, Probe Sequence
tctacttgtgaacagattaaggata

SEQ ID NO: 58196 - DNA, 25 bp, Probe Sequence
ctggtgtggagatcaaacgaataat

SEQ ID NO: 58197 - DNA, 25 bp, Probe Sequence
ccattgccttctattcctacacctt

SEQ ID NO: 58198 - DNA, 25 bp, Probe Sequence
aatgccattgccttctattcctaca

SEQ ID NO: 58199 - DNA, 25 bp, Probe Sequence
agaggatcaatgagatggtgaacag

SEQ ID NO: 58200 - DNA, 25 bp, Probe Sequence
cattgccttctattcctacaccttt

SEQ ID NO: 58201 - DNA, 25 bp, Probe Sequence
atgccattgccttctattcctacac

SEQ ID NO: 58202 - DNA, 25 bp, Probe Sequence
gagaggatcaatgagatggtgaaca

SEQ ID NO: 58203 - DNA, 25 bp, Probe Sequence
ggagaggatcaatgagatggtgaac

SEQ ID NO: 58204 - DNA, 25 bp, Probe Sequence
gtgtgtggagaggatcaatgagatg

SEQ ID NO: 58205 - DNA, 25 bp, Probe Sequence
agtgtgtggagaggatcaatgagat

SEQ ID NO: 58206 - DNA, 25 bp, Probe Sequence
aatagtgtttgactccattgacaac

SEQ ID NO: 58207 - DNA, 25 bp, Probe Sequence
aaatagtgtttgactccattgacaa

SEQ ID NO: 58208 - DNA, 25 bp, Probe Sequence
aagtgtgtggagaggatcaatgaga

SEQ ID NO: 58209 - DNA, 25 bp, Probe Sequence
caagtgtgtggagaggatcaatgag

SEQ ID NO: 58210 - DNA, 25 bp, Probe Sequence
tttagtctcagaggatgggaagatc

SEQ ID NO: 58211 - DNA, 25 bp, Probe Sequence
atagtgtttgactccattgacaacc

SEQ ID NO: 58212 - DNA, 25 bp, Probe Sequence
gaggatcaatgagatggtgaacagg

SEQ ID NO: 58213 - DNA, 25 bp, Probe Sequence
tggagaggatcaatgagatggtgaa

SEQ ID NO: 58214 - DNA, 25 bp, Probe Sequence
tagggatactcactcacctgtatag

SEQ ID NO: 58215 - DNA, 25 bp, Probe Sequence
actcacctgtatagggactttgata

SEQ ID NO: 58216 - DNA, 25 bp, Probe Sequence
cctgtatagggactttgataaatgc

SEQ ID NO: 58217 - DNA, 25 bp, Probe Sequence
ctcacctgtatagggactttgataa

SEQ ID NO: 58218 - DNA, 25 bp, Probe Sequence
gtttgactccattgacaacctagag

SEQ ID NO: 58219 - DNA, 25 bp, Probe Sequence
ctagggatactcactcacctgtata

SEQ ID NO: 58220 - DNA, 25 bp, Probe Sequence
tcacctgtatagggactttgataaa

SEQ ID NO: 58221 - DNA, 25 bp, Probe Sequence
gtcatcttgtatatcctactcagcg

SEQ ID NO: 58222 - DNA, 25 bp, Probe Sequence
cgtcatcttgtatatcctactcagc

SEQ ID NO: 58223 - DNA, 25 bp, Probe Sequence
gcgtcatcttgtatatcctactcag

SEQ ID NO: 58224 - DNA, 25 bp, Probe Sequence
tcatcttgtatatcctactcagcgg

SEQ ID NO: 58225 - DNA, 25 bp, Probe Sequence
ggcgtcatcttgtatatcctactca

SEQ ID NO: 58226 - DNA, 25 bp, Probe Sequence
ttaattccaatgtaccaggtgaact

SEQ ID NO: 58227 - DNA, 25 bp, Probe Sequence
ttactgtgaatgagtgaagatcctg

SEQ ID NO: 58228 - DNA, 25 bp, Probe Sequence
gttactgtgaatgagtgaagatcct

SEQ ID NO: 58229 - DNA, 25 bp, Probe Sequence
accgttactgtgaatgagtgaagat

SEQ ID NO: 58230 - DNA, 25 bp, Probe Sequence
gaaccgttactgtgaatgagtgaag

SEQ ID NO: 58231 - DNA, 25 bp, Probe Sequence
taattccaatgtaccaggtgaactg

SEQ ID NO: 58232 - DNA, 25 bp, Probe Sequence
cgttactgtgaatgagtgaagatcc

SEQ ID NO: 58233 - DNA, 25 bp, Probe Sequence
ccgttactgtgaatgagtgaagatc

SEQ ID NO: 58234 - DNA, 25 bp, Probe Sequence
cttgtatatcctactcagcggctac

SEQ ID NO: 58235 - DNA, 25 bp, Probe Sequence
aaccgttactgtgaatgagtgaaga

SEQ ID NO: 58236 - DNA, 25 bp, Probe Sequence
agaaccgttactgtgaatgagtgaa

SEQ ID NO: 58237 - DNA, 25 bp, Probe Sequence
tcttgtatatcctactcagcggcta

SEQ ID NO: 58238 - DNA, 25 bp, Probe Sequence
catcttgtatatcctactcagcggc

SEQ ID NO: 58239 - DNA, 25 bp, Probe Sequence
tactgtgaatgagtgaagatcctgg

SEQ ID NO: 58240 - DNA, 25 bp, Probe Sequence
aaacatccaagcactttaattccaa

SEQ ID NO: 58241 - DNA, 25 bp, Probe Sequence
aacatccaagcactttaattccaat

SEQ ID NO: 58242 - DNA, 25 bp, Probe Sequence
catccaagcactttaattccaatgt

SEQ ID NO: 58243 - DNA, 25 bp, Probe Sequence
acatccaagcactttaattccaatg

SEQ ID NO: 58244 - DNA, 25 bp, Probe Sequence
ctgtgaatgagtgaagatcctggag

SEQ ID NO: 58245 - DNA, 25 bp, Probe Sequence
cttgatagaggagttggtagatgtc

SEQ ID NO: 58246 - DNA, 25 bp, Probe Sequence
gagttggtagatgtccttcagataa

SEQ ID NO: 58247 - DNA, 25 bp, Probe Sequence
tataatggcttgatagaggagttgg

SEQ ID NO: 58248 - DNA, 25 bp, Probe Sequence
taatggcttgatagaggagttggta

SEQ ID NO: 58249 - DNA, 25 bp, Probe Sequence
gcagtcctcaatctcctatatgtat

SEQ ID NO: 58250 - DNA, 25 bp, Probe Sequence
ggcagtcctcaatctcctatatgta

SEQ ID NO: 58251 - DNA, 25 bp, Probe Sequence
tgtataatggcttgatagaggagtt

SEQ ID NO: 58252 - DNA, 25 bp, Probe Sequence
ttgtataatggcttgatagaggagt

SEQ ID NO: 58253 - DNA, 25 bp, Probe Sequence
agttggtagatgtccttcagataac

SEQ ID NO: 58254 - DNA, 25 bp, Probe Sequence
ataatggcttgatagaggagttggt

SEQ ID NO: 58255 - DNA, 25 bp, Probe Sequence
gtataatggcttgatagaggagttg

SEQ ID NO: 58256 - DNA, 25 bp, Probe Sequence
gtggaatgatggaagccttattgaa

SEQ ID NO: 58257 - DNA, 25 bp, Probe Sequence
cttgtataatggcttgatagaggag

SEQ ID NO: 58258 - DNA, 25 bp, Probe Sequence
atattagtgtattccaatgccttgc

SEQ ID NO: 58259 - DNA, 25 bp, Probe Sequence
tggaatgatggaagccttattgaag

SEQ ID NO: 58260 - DNA, 25 bp, Probe Sequence
gttggtagatgtccttcagataacg

SEQ ID NO: 58261 - DNA, 25 bp, Probe Sequence
tattattgactgtactggaactgcc

SEQ ID NO: 58262 - DNA, 25 bp, Probe Sequence
gcttgatagaggagttggtagatgt

SEQ ID NO: 58263 - DNA, 25 bp, Probe Sequence
tcttgtataatggcttgatagagga

SEQ ID NO: 58264 - DNA, 25 bp, Probe Sequence
gtattattgactgtactggaactgc

SEQ ID NO: 58265 - DNA, 25 bp, Probe Sequence
ttggtagatgtccttcagataacgg

SEQ ID NO: 58266 - DNA, 25 bp, Probe Sequence
aatggcttgatagaggagttggtag

SEQ ID NO: 58267 - DNA, 25 bp, Probe Sequence
ctgtggaatgatggaagccttattg

SEQ ID NO: 58268 - DNA, 25 bp, Probe Sequence
atattcacatagagcaacttgacaa

SEQ ID NO: 58269 - DNA, 25 bp, Probe Sequence
ggctaatgtcacttgctattaccag

SEQ ID NO: 58270 - DNA, 25 bp, Probe Sequence
attggaagaccgcaagtatgagtat

SEQ ID NO: 58271 - DNA, 25 bp, Probe Sequence
atgtggctaatgtcacttgctatta

SEQ ID NO: 58272 - DNA, 25 bp, Probe Sequence
taatgtggctaatgtcacttgctat

SEQ ID NO: 58273 - DNA, 25 bp, Probe Sequence
attcctaatgtggctaatgtcactt

SEQ ID NO: 58274 - DNA, 25 bp, Probe Sequence
ctaatgtggctaatgtcacttgcta

SEQ ID NO: 58275 - DNA, 25 bp, Probe Sequence
aatgtggctaatgtcacttgctatt

SEQ ID NO: 58276 - DNA, 25 bp, Probe Sequence
ttcctaatgtggctaatgtcacttg

SEQ ID NO: 58277 - DNA, 25 bp, Probe Sequence
tgtggctaatgtcacttgctattac

SEQ ID NO: 58278 - DNA, 25 bp, Probe Sequence
ttggaagaccgcaagtatgagtatc

SEQ ID NO: 58279 - DNA, 25 bp, Probe Sequence
gattggaagaccgcaagtatgagta

SEQ ID NO: 58280 - DNA, 25 bp, Probe Sequence
gtggctaatgtcacttgctattacc

SEQ ID NO: 58281 - DNA, 25 bp, Probe Sequence
atgtcattcctaatgtggctaatgt

SEQ ID NO: 58282 - DNA, 25 bp, Probe Sequence
ggaagaccgcaagtatgagtatctc

SEQ ID NO: 58283 - DNA, 25 bp, Probe Sequence
aatgtcattcctaatgtggctaatg

SEQ ID NO: 58284 - DNA, 25 bp, Probe Sequence
cattcctaatgtggctaatgtcact

SEQ ID NO: 58285 - DNA, 25 bp, Probe Sequence
tcattcctaatgtggctaatgtcac

SEQ ID NO: 58286 - DNA, 25 bp, Probe Sequence
gtcattcctaatgtggctaatgtca

SEQ ID NO: 58287 - DNA, 25 bp, Probe Sequence
tgtcattcctaatgtggctaatgtc

SEQ ID NO: 58288 - DNA, 25 bp, Probe Sequence
tggaagaccgcaagtatgagtatct

SEQ ID NO: 58289 - DNA, 25 bp, Probe Sequence
aattactacattgcacaggttcagc

SEQ ID NO: 58290 - DNA, 25 bp, Probe Sequence
tggctaatgtcacttgctattacca

SEQ ID NO: 58291 - DNA, 25 bp, Probe Sequence
cctatgtagcagatgccaactttag

SEQ ID NO: 58292 - DNA, 25 bp, Probe Sequence
ctaatgtcacttgctattaccagcc

SEQ ID NO: 58293 - DNA, 25 bp, Probe Sequence
tcatagaattgtcagaatcaacaca

SEQ ID NO: 58294 - DNA, 25 bp, Probe Sequence
tcactttctctcttcggataaatgt

SEQ ID NO: 58295 - DNA, 25 bp, Probe Sequence
actttctctcttcggataaatgtct

SEQ ID NO: 58296 - DNA, 25 bp, Probe Sequence
cactttctctcttcggataaatgtc

SEQ ID NO: 58297 - DNA, 25 bp, Probe Sequence
attgggagaataaacagtatgaggt

SEQ ID NO: 58298 - DNA, 25 bp, Probe Sequence
ttcctacttcatagaattgtcagaa

SEQ ID NO: 58299 - DNA, 25 bp, Probe Sequence
ttaggtagttcactttctctcttcg

SEQ ID NO: 58300 - DNA, 25 bp, Probe Sequence
agttcactttctctcttcggataaa

SEQ ID NO: 58301 - DNA, 25 bp, Probe Sequence
gtagttcactttctctcttcggata

SEQ ID NO: 58302 - DNA, 25 bp, Probe Sequence
ctttctctcttcggataaatgtctc

SEQ ID NO: 58303 - DNA, 25 bp, Probe Sequence
acttcatagaattgtcagaatcaac

SEQ ID NO: 58304 - DNA, 25 bp, Probe Sequence
ttcactttctctcttcggataaatg

SEQ ID NO: 58305 - DNA, 25 bp, Probe Sequence
gttcactttctctcttcggataaat

SEQ ID NO: 58306 - DNA, 25 bp, Probe Sequence
tgttaggtagttcactttctctctt

SEQ ID NO: 58307 - DNA, 25 bp, Probe Sequence
ttgttaggtagttcactttctctct

SEQ ID NO: 58308 - DNA, 25 bp, Probe Sequence
ttgggagaataaacagtatgaggtt

SEQ ID NO: 58309 - DNA, 25 bp, Probe Sequence
ttcatagaattgtcagaatcaacac

SEQ ID NO: 58310 - DNA, 25 bp, Probe Sequence
tcctacttcatagaattgtcagaat

SEQ ID NO: 58311 - DNA, 25 bp, Probe Sequence
gtctccacatttcctacttcataga

SEQ ID NO: 58312 - DNA, 25 bp, Probe Sequence
tagttcactttctctcttcggataa

SEQ ID NO: 58313 - DNA, 25 bp, Probe Sequence
cctacttcatagaattgtcagaatc

SEQ ID NO: 58314 - DNA, 25 bp, Probe Sequence
taggtagttcactttctctcttcgg

SEQ ID NO: 58315 - DNA, 25 bp, Probe Sequence
gttaggtagttcactttctctcttc

SEQ ID NO: 58316 - DNA, 25 bp, Probe Sequence
tgggagaataaacagtatgaggtta

SEQ ID NO: 58317 - DNA, 25 bp, Probe Sequence
tcaataaatgtgaactgctgctgcc

SEQ ID NO: 58318 - DNA, 25 bp, Probe Sequence
ttgccacttcaactctaaggaatat

SEQ ID NO: 58319 - DNA, 25 bp, Probe Sequence
attgccacttcaactctaaggaata

SEQ ID NO: 58320 - DNA, 25 bp, Probe Sequence
ataacattgccacttcaactctaag

SEQ ID NO: 58321 - DNA, 25 bp, Probe Sequence
cgtatggactggataactctgagaa

SEQ ID NO: 58322 - DNA, 25 bp, Probe Sequence
taacattgccacttcaactctaagg

SEQ ID NO: 58323 - DNA, 25 bp, Probe Sequence
cattgccacttcaactctaaggaat

SEQ ID NO: 58324 - DNA, 25 bp, Probe Sequence
aagagcctggacactaacaattcta

SEQ ID NO: 58325 - DNA, 25 bp, Probe Sequence
gctatataacattgccacttcaact

SEQ ID NO: 58326 - DNA, 25 bp, Probe Sequence
tataacattgccacttcaactctaa

SEQ ID NO: 58327 - DNA, 25 bp, Probe Sequence
tgccacttcaactctaaggaatatt

SEQ ID NO: 58328 - DNA, 25 bp, Probe Sequence
gagcctggacactaacaattctaca

SEQ ID NO: 58329 - DNA, 25 bp, Probe Sequence
gtataactgaataagcagagcatca

SEQ ID NO: 58330 - DNA, 25 bp, Probe Sequence
agagcctggacactaacaattctac

SEQ ID NO: 58331 - DNA, 25 bp, Probe Sequence
atataacattgccacttcaactcta

SEQ ID NO: 58332 - DNA, 25 bp, Probe Sequence
agtataactgaataagcagagcatc

SEQ ID NO: 58333 - DNA, 25 bp, Probe Sequence
aattaccttatcatgtcttagagcc

SEQ ID NO: 58334 - DNA, 25 bp, Probe Sequence
agcctggacactaacaattctacac

SEQ ID NO: 58335 - DNA, 25 bp, Probe Sequence
acattgccacttcaactctaaggaa

SEQ ID NO: 58336 - DNA, 25 bp, Probe Sequence
aacattgccacttcaactctaagga

SEQ ID NO: 58337 - DNA, 25 bp, Probe Sequence
ctggacactaacaattctacaccaa

SEQ ID NO: 58338 - DNA, 25 bp, Probe Sequence
tatataacattgccacttcaactct

SEQ ID NO: 58339 - DNA, 25 bp, Probe Sequence
tataactgaataagcagagcatcaa

SEQ ID NO: 58340 - DNA, 25 bp, Probe Sequence
gaagagcctggacactaacaattct

SEQ ID NO: 58341 - DNA, 25 bp, Probe Sequence
gactggataactctgagaaacacat

SEQ ID NO: 58342 - DNA, 25 bp, Probe Sequence
attcgttacactgataaggcttctc

SEQ ID NO: 58343 - DNA, 25 bp, Probe Sequence
cattcgttacactgataaggcttct

SEQ ID NO: 58344 - DNA, 25 bp, Probe Sequence
acattcgttacactgataaggcttc

SEQ ID NO: 58345 - DNA, 25 bp, Probe Sequence
cacattcgttacactgataaggctt

SEQ ID NO: 58346 - DNA, 25 bp, Probe Sequence
ttcgttacactgataaggcttctcc

SEQ ID NO: 58347 - DNA, 25 bp, Probe Sequence
cttattcaccatcagagaatccaca

SEQ ID NO: 58348 - DNA, 25 bp, Probe Sequence
ttattcaccatcagagaatccacac

SEQ ID NO: 58349 - DNA, 25 bp, Probe Sequence
cacatatataacgtctctctcctgg

SEQ ID NO: 58350 - DNA, 25 bp, Probe Sequence
ccacattcagcacatatataacgtc

SEQ ID NO: 58351 - DNA, 25 bp, Probe Sequence
ccttattcaccatcagagaatccac

SEQ ID NO: 58352 - DNA, 25 bp, Probe Sequence
gcacatatataacgtctctctcctg

SEQ ID NO: 58353 - DNA, 25 bp, Probe Sequence
agcacatatataacgtctctctcct

SEQ ID NO: 58354 - DNA, 25 bp, Probe Sequence
cagcacatatataacgtctctctcc

SEQ ID NO: 58355 - DNA, 25 bp, Probe Sequence
tcagcacatatataacgtctctctc

SEQ ID NO: 58356 - DNA, 25 bp, Probe Sequence
ccacattcgttacactgataaggct

SEQ ID NO: 58357 - DNA, 25 bp, Probe Sequence
ttcagcacatatataacgtctctct

SEQ ID NO: 58358 - DNA, 25 bp, Probe Sequence
tattcaccatcagagaatccacact

SEQ ID NO: 58359 - DNA, 25 bp, Probe Sequence
cacattcagcacatatataacgtct

SEQ ID NO: 58360 - DNA, 25 bp, Probe Sequence
ttcccacattcgttacactgataag

SEQ ID NO: 58361 - DNA, 25 bp, Probe Sequence
cttcccacattcgttacactgataa

SEQ ID NO: 58362 - DNA, 25 bp, Probe Sequence
gaactgattctctacctttcttgga

SEQ ID NO: 58363 - DNA, 25 bp, Probe Sequence
acattcagcacatatataacgtctc

SEQ ID NO: 58364 - DNA, 25 bp, Probe Sequence
ggtttattggcgataatcacagaaa

SEQ ID NO: 58365 - DNA, 25 bp, Probe Sequence
aggtttattggcgataatcacagaa

SEQ ID NO: 58366 - DNA, 25 bp, Probe Sequence
gacaggactcagtatatggttcttg

SEQ ID NO: 58367 - DNA, 25 bp, Probe Sequence
agacaggactcagtatatggttctt

SEQ ID NO: 58368 - DNA, 25 bp, Probe Sequence
acaggactcagtatatggttcttgg

SEQ ID NO: 58369 - DNA, 25 bp, Probe Sequence
gagacaggactcagtatatggttct

SEQ ID NO: 58370 - DNA, 25 bp, Probe Sequence
cttgtagtcctacttcttccaactt

SEQ ID NO: 58371 - DNA, 25 bp, Probe Sequence
ccttgtagtcctacttcttccaact

SEQ ID NO: 58372 - DNA, 25 bp, Probe Sequence
ttccagaagaatatagcaccgcatt

SEQ ID NO: 58373 - DNA, 25 bp, Probe Sequence
ccacttccttccatctcatttctaa

SEQ ID NO: 58374 - DNA, 25 bp, Probe Sequence
tcctacttcttccaactttccattc

SEQ ID NO: 58375 - DNA, 25 bp, Probe Sequence
ttccttccatctcatttctaaaccc

SEQ ID NO: 58376 - DNA, 25 bp, Probe Sequence
cttccttccatctcatttctaaacc

SEQ ID NO: 58377 - DNA, 25 bp, Probe Sequence
gtcctacttcttccaactttccatt

SEQ ID NO: 58378 - DNA, 25 bp, Probe Sequence
actcagtatatggttcttgggtatg

SEQ ID NO: 58379 - DNA, 25 bp, Probe Sequence
ctcagtatatggttcttgggtatgc

SEQ ID NO: 58380 - DNA, 25 bp, Probe Sequence
tccagaagaatatagcaccgcattg

SEQ ID NO: 58381 - DNA, 25 bp, Probe Sequence
ttcttctgacaaatgattcctgctt

SEQ ID NO: 58382 - DNA, 25 bp, Probe Sequence
tccacttccttccatctcatttcta

SEQ ID NO: 58383 - DNA, 25 bp, Probe Sequence
gactcagtatatggttcttgggtat

SEQ ID NO: 58384 - DNA, 25 bp, Probe Sequence
ggactcagtatatggttcttgggta

SEQ ID NO: 58385 - DNA, 25 bp, Probe Sequence
acttccttccatctcatttctaaac

SEQ ID NO: 58386 - DNA, 25 bp, Probe Sequence
cacttccttccatctcatttctaaa

SEQ ID NO: 58387 - DNA, 25 bp, Probe Sequence
ctacttcttccaactttccattccc

SEQ ID NO: 58388 - DNA, 25 bp, Probe Sequence
cctacttcttccaactttccattcc

SEQ ID NO: 58389 - DNA, 25 bp, Probe Sequence
ttctgacaaatgattcctgcttctc

SEQ ID NO: 58390 - DNA, 25 bp, Probe Sequence
ttgtcaacttcctatatccgattaa

SEQ ID NO: 58391 - DNA, 25 bp, Probe Sequence
ttggaagactatcaaggttcagcaa

SEQ ID NO: 58392 - DNA, 25 bp, Probe Sequence
gaagctctcaagtgtaactatgaac

SEQ ID NO: 58393 - DNA, 25 bp, Probe Sequence
caagaagctctcaagtgtaactatg

SEQ ID NO: 58394 - DNA, 25 bp, Probe Sequence
agaagctctcaagtgtaactatgaa

SEQ ID NO: 58395 - DNA, 25 bp, Probe Sequence
aagaagctctcaagtgtaactatga

SEQ ID NO: 58396 - DNA, 25 bp, Probe Sequence
caagagtgacaaatgatggagaaat

SEQ ID NO: 58397 - DNA, 25 bp, Probe Sequence
gagtgacaaatgatggagaaatctg

SEQ ID NO: 58398 - DNA, 25 bp, Probe Sequence
gtatatggaaatgggcagagtgaaa

SEQ ID NO: 58399 - DNA, 25 bp, Probe Sequence
aagagtgacaaatgatggagaaatc

SEQ ID NO: 58400 - DNA, 25 bp, Probe Sequence
aagctctcaagtgtaactatgaaca

SEQ ID NO: 58401 - DNA, 25 bp, Probe Sequence
gtaactatgaacactggcagatttg

SEQ ID NO: 58402 - DNA, 25 bp, Probe Sequence
acaagaagctctcaagtgtaactat

SEQ ID NO: 58403 - DNA, 25 bp, Probe Sequence
ttctattgctgtcaagtaccacctc

SEQ ID NO: 58404 - DNA, 25 bp, Probe Sequence
tgggaagatgttgtcatttgttatg

SEQ ID NO: 58405 - DNA, 25 bp, Probe Sequence
gtgggaagatgttgtcatttgttat

SEQ ID NO: 58406 - DNA, 25 bp, Probe Sequence
tagaaatgtgggaagatgttgtcat

SEQ ID NO: 58407 - DNA, 25 bp, Probe Sequence
caaggagtttcaagagtgtgtagag

SEQ ID NO: 58408 - DNA, 25 bp, Probe Sequence
tgacaaatgatggagaaatctggag

SEQ ID NO: 58409 - DNA, 25 bp, Probe Sequence
tttatactgcttgcttggagatgtc

SEQ ID NO: 58410 - DNA, 25 bp, Probe Sequence
agagtgacaaatgatggagaaatct

SEQ ID NO: 58411 - DNA, 25 bp, Probe Sequence
catttaaggaagtcgttcaaagagc

SEQ ID NO: 58412 - DNA, 25 bp, Probe Sequence
tcatttaaggaagtcgttcaaagag

SEQ ID NO: 58413 - DNA, 25 bp, Probe Sequence
gtgacaaatgatggagaaatctgga

SEQ ID NO: 58414 - DNA, 25 bp, Probe Sequence
ttagtagcagaacttatctcaggaa

SEQ ID NO: 58415 - DNA, 25 bp, Probe Sequence
gcatggttggtgagaatctaataac

SEQ ID NO: 58416 - DNA, 25 bp, Probe Sequence
tggttggtgagaatctaataacatt

SEQ ID NO: 58417 - DNA, 25 bp, Probe Sequence
atggttggtgagaatctaataacat

SEQ ID NO: 58418 - DNA, 25 bp, Probe Sequence
catggttggtgagaatctaataaca

SEQ ID NO: 58419 - DNA, 25 bp, Probe Sequence
ttctctatccaggatgatgagtcaa

SEQ ID NO: 58420 - DNA, 25 bp, Probe Sequence
cttctctatccaggatgatgagtca

SEQ ID NO: 58421 - DNA, 25 bp, Probe Sequence
tctatccaggatgatgagtcaacag

SEQ ID NO: 58422 - DNA, 25 bp, Probe Sequence
tctctatccaggatgatgagtcaac

SEQ ID NO: 58423 - DNA, 25 bp, Probe Sequence
ctctatccaggatgatgagtcaaca

SEQ ID NO: 58424 - DNA, 25 bp, Probe Sequence
tgcatggttggtgagaatctaataa

SEQ ID NO: 58425 - DNA, 25 bp, Probe Sequence
aagatgcagtacaagttgaagagac

SEQ ID NO: 58426 - DNA, 25 bp, Probe Sequence
atcagtggttgtctccataagtcat

SEQ ID NO: 58427 - DNA, 25 bp, Probe Sequence
tcagtggttgtctccataagtcatt

SEQ ID NO: 58428 - DNA, 25 bp, Probe Sequence
tgttcagaaatcacctttagtcaaa

SEQ ID NO: 58429 - DNA, 25 bp, Probe Sequence
tttgttcagaaatcacctttagtca

SEQ ID NO: 58430 - DNA, 25 bp, Probe Sequence
gcagaacttatctcaggaaaggaaa

SEQ ID NO: 58431 - DNA, 25 bp, Probe Sequence
tagcagaacttatctcaggaaagga

SEQ ID NO: 58432 - DNA, 25 bp, Probe Sequence
gtagcagaacttatctcaggaaagg

SEQ ID NO: 58433 - DNA, 25 bp, Probe Sequence
gcttctctatccaggatgatgagtc

SEQ ID NO: 58434 - DNA, 25 bp, Probe Sequence
ctatccaggatgatgagtcaacagg

SEQ ID NO: 58435 - DNA, 25 bp, Probe Sequence
caagatgcagtacaagttgaagaga

SEQ ID NO: 58436 - DNA, 25 bp, Probe Sequence
tgatgagtcaacaggtttcactaat

SEQ ID NO: 58437 - DNA, 25 bp, Probe Sequence
atgatgagtcaacaggtttcactaa

SEQ ID NO: 58438 - DNA, 25 bp, Probe Sequence
ttgatacctgccatgtaacatctac

SEQ ID NO: 58439 - DNA, 25 bp, Probe Sequence
gatacctgccatgtaacatctactc

SEQ ID NO: 58440 - DNA, 25 bp, Probe Sequence
tgatacctgccatgtaacatctact

SEQ ID NO: 58441 - DNA, 25 bp, Probe Sequence
gacacagcataagagttcctgaatc

SEQ ID NO: 58442 - DNA, 25 bp, Probe Sequence
atacctgccatgtaacatctactcc

SEQ ID NO: 58443 - DNA, 25 bp, Probe Sequence
caggagagacacagcataagagttc

SEQ ID NO: 58444 - DNA, 25 bp, Probe Sequence
gacctgtgtagaactctctggtata

SEQ ID NO: 58445 - DNA, 25 bp, Probe Sequence
agacacagcataagagttcctgaat

SEQ ID NO: 58446 - DNA, 25 bp, Probe Sequence
gaatgaacagggctattacttagga

SEQ ID NO: 58447 - DNA, 25 bp, Probe Sequence
agaatgaacagggctattacttagg

SEQ ID NO: 58448 - DNA, 25 bp, Probe Sequence
ccagaatgaacagggctattactta

SEQ ID NO: 58449 - DNA, 25 bp, Probe Sequence
ctgaatcgggagaacattatgaact

SEQ ID NO: 58450 - DNA, 25 bp, Probe Sequence
accaaatcgtttactgctcttacat

SEQ ID NO: 58451 - DNA, 25 bp, Probe Sequence
ctgccatgtaacatctactcctgaa

SEQ ID NO: 58452 - DNA, 25 bp, Probe Sequence
tcaggagagacacagcataagagtt

SEQ ID NO: 58453 - DNA, 25 bp, Probe Sequence
aatgaacagggctattacttaggat

SEQ ID NO: 58454 - DNA, 25 bp, Probe Sequence
acccagcaataccataagaattact

SEQ ID NO: 58455 - DNA, 25 bp, Probe Sequence
gacccagcaataccataagaattac

SEQ ID NO: 58456 - DNA, 25 bp, Probe Sequence
agacccagcaataccataagaatta

SEQ ID NO: 58457 - DNA, 25 bp, Probe Sequence
atgatacatattcctgagagaccca

SEQ ID NO: 58458 - DNA, 25 bp, Probe Sequence
gagacccagcaataccataagaatt

SEQ ID NO: 58459 - DNA, 25 bp, Probe Sequence
tgaatcgggagaacattatgaactg

SEQ ID NO: 58460 - DNA, 25 bp, Probe Sequence
cagaatgaacagggctattacttag

SEQ ID NO: 58461 - DNA, 25 bp, Probe Sequence
aactctctggtatacactggctatt

SEQ ID NO: 58462 - DNA, 25 bp, Probe Sequence
aacgaatagaaggtgctcttaatct

SEQ ID NO: 58463 - DNA, 25 bp, Probe Sequence
cgaatagaaggtgctcttaatctgt

SEQ ID NO: 58464 - DNA, 25 bp, Probe Sequence
acgaatagaaggtgctcttaatctg

SEQ ID NO: 58465 - DNA, 25 bp, Probe Sequence
tagaaggtgctcttaatctgttaca

SEQ ID NO: 58466 - DNA, 25 bp, Probe Sequence
gaatagaaggtgctcttaatctgtt

SEQ ID NO: 58467 - DNA, 25 bp, Probe Sequence
atagaaggtgctcttaatctgttac

SEQ ID NO: 58468 - DNA, 25 bp, Probe Sequence
aatagaaggtgctcttaatctgtta

SEQ ID NO: 58469 - DNA, 25 bp, Probe Sequence
ggtgctcttaatctgttacagtgta

SEQ ID NO: 58470 - DNA, 25 bp, Probe Sequence
agaaggtgctcttaatctgttacag

SEQ ID NO: 58471 - DNA, 25 bp, Probe Sequence
agcatctataaagtgacagtaaccc

SEQ ID NO: 58472 - DNA, 25 bp, Probe Sequence
tgaacagcatctataaagtgacagt

SEQ ID NO: 58473 - DNA, 25 bp, Probe Sequence
gtgctcttaatctgttacagtgtac

SEQ ID NO: 58474 - DNA, 25 bp, Probe Sequence
gaaggtgctcttaatctgttacagt

SEQ ID NO: 58475 - DNA, 25 bp, Probe Sequence
cagcatctataaagtgacagtaacc

SEQ ID NO: 58476 - DNA, 25 bp, Probe Sequence
aaggtgctcttaatctgttacagtg

SEQ ID NO: 58477 - DNA, 25 bp, Probe Sequence
attgcctatgctttctttcatcttc

SEQ ID NO: 58478 - DNA, 25 bp, Probe Sequence
tctgaacagcatctataaagtgaca

SEQ ID NO: 58479 - DNA, 25 bp, Probe Sequence
aattgcctatgctttctttcatctt

SEQ ID NO: 58480 - DNA, 25 bp, Probe Sequence
acagcatctataaagtgacagtaac

SEQ ID NO: 58481 - DNA, 25 bp, Probe Sequence
ttgcctatgctttctttcatcttca

SEQ ID NO: 58482 - DNA, 25 bp, Probe Sequence
aaacgaatagaaggtgctcttaatc

SEQ ID NO: 58483 - DNA, 25 bp, Probe Sequence
gaaacgaatagaaggtgctcttaat

SEQ ID NO: 58484 - DNA, 25 bp, Probe Sequence
ggaaacgaatagaaggtgctcttaa

SEQ ID NO: 58485 - DNA, 25 bp, Probe Sequence
ttctgaacagcatctataaagtgac

SEQ ID NO: 58486 - DNA, 25 bp, Probe Sequence
atgtagtggattaagtgtctgtcaa

SEQ ID NO: 58487 - DNA, 25 bp, Probe Sequence
aatgtagtggattaagtgtctgtca

SEQ ID NO: 58488 - DNA, 25 bp, Probe Sequence
tgtagtggattaagtgtctgtcaac

SEQ ID NO: 58489 - DNA, 25 bp, Probe Sequence
tattctaatagtgctctcgcctcat

SEQ ID NO: 58490 - DNA, 25 bp, Probe Sequence
tagtggattaagtgtctgtcaacaa

SEQ ID NO: 58491 - DNA, 25 bp, Probe Sequence
atcattcatggaccagtagattgtt

SEQ ID NO: 58492 - DNA, 25 bp, Probe Sequence
gtagtggattaagtgtctgtcaaca

SEQ ID NO: 58493 - DNA, 25 bp, Probe Sequence
attctaatagtgctctcgcctcatc

SEQ ID NO: 58494 - DNA, 25 bp, Probe Sequence
tcattcatggaccagtagattgttg

SEQ ID NO: 58495 - DNA, 25 bp, Probe Sequence
tatcattcatggaccagtagattgt

SEQ ID NO: 58496 - DNA, 25 bp, Probe Sequence
gctaacacaaggattcagaattagg

SEQ ID NO: 58497 - DNA, 25 bp, Probe Sequence
aaccagtaatatgctaacctgatgc

SEQ ID NO: 58498 - DNA, 25 bp, Probe Sequence
aacacaaggattcagaattaggtaa

SEQ ID NO: 58499 - DNA, 25 bp, Probe Sequence
taatagtgctctcgcctcatcattc

SEQ ID NO: 58500 - DNA, 25 bp, Probe Sequence
ctaatagtgctctcgcctcatcatt

SEQ ID NO: 58501 - DNA, 25 bp, Probe Sequence
agtgccagtgtatgtatgttatact

SEQ ID NO: 58502 - DNA, 25 bp, Probe Sequence
cattcatggaccagtagattgttga

SEQ ID NO: 58503 - DNA, 25 bp, Probe Sequence
aagttggtgaatcggattataagct

SEQ ID NO: 58504 - DNA, 25 bp, Probe Sequence
ttatcattcatggaccagtagattg

SEQ ID NO: 58505 - DNA, 25 bp, Probe Sequence
tgccagtgtatgtatgttatacttg

SEQ ID NO: 58506 - DNA, 25 bp, Probe Sequence
gtgccagtgtatgtatgttatactt

SEQ ID NO: 58507 - DNA, 25 bp, Probe Sequence
aagtgccagtgtatgtatgttatac

SEQ ID NO: 58508 - DNA, 25 bp, Probe Sequence
ctaacacaaggattcagaattaggt

SEQ ID NO: 58509 - DNA, 25 bp, Probe Sequence
gccagtgtatgtatgttatacttga

SEQ ID NO: 58510 - DNA, 25 bp, Probe Sequence
gattattcacaccgatagcaacacc

SEQ ID NO: 58511 - DNA, 25 bp, Probe Sequence
attattcacaccgatagcaacaccg

SEQ ID NO: 58512 - DNA, 25 bp, Probe Sequence
atttgcgattcccatttctctgcta

SEQ ID NO: 58513 - DNA, 25 bp, Probe Sequence
taaataaagaaacaaatgcacctgc

SEQ ID NO: 58514 - DNA, 25 bp, Probe Sequence
tttgcgattcccatttctctgctag

SEQ ID NO: 58515 - DNA, 25 bp, Probe Sequence
ttattcacaccgatagcaacaccgt

SEQ ID NO: 58516 - DNA, 25 bp, Probe Sequence
ttccttttgttcctgtccgtttatc

SEQ ID NO: 58517 - DNA, 25 bp, Probe Sequence
gttccttttgttcctgtccgtttat

SEQ ID NO: 58518 - DNA, 25 bp, Probe Sequence
tattcacaccgatagcaacaccgtc

SEQ ID NO: 58519 - DNA, 25 bp, Probe Sequence
ttaaataaagaaacaaatgcacctg

SEQ ID NO: 58520 - DNA, 25 bp, Probe Sequence
tccttttgttcctgtccgtttatca

SEQ ID NO: 58521 - DNA, 25 bp, Probe Sequence
catttgcgattcccatttctctgct

SEQ ID NO: 58522 - DNA, 25 bp, Probe Sequence
ataaagaaacaaatgcacctgcaaa

SEQ ID NO: 58523 - DNA, 25 bp, Probe Sequence
aataaagaaacaaatgcacctgcaa

SEQ ID NO: 58524 - DNA, 25 bp, Probe Sequence
aaataaagaaacaaatgcacctgca

SEQ ID NO: 58525 - DNA, 25 bp, Probe Sequence
ccttttgttcctgtccgtttatcag

SEQ ID NO: 58526 - DNA, 25 bp, Probe Sequence
tttaaataaagaaacaaatgcacct

SEQ ID NO: 58527 - DNA, 25 bp, Probe Sequence
cgttccttttgttcctgtccgttta

SEQ ID NO: 58528 - DNA, 25 bp, Probe Sequence
ttgcgattcccatttctctgctagg

SEQ ID NO: 58529 - DNA, 25 bp, Probe Sequence
tgcatttgcgattcccatttctctg

SEQ ID NO: 58530 - DNA, 25 bp, Probe Sequence
ctgtggagacaatccctcaggacta

SEQ ID NO: 58531 - DNA, 25 bp, Probe Sequence
tgtggagacaatccctcaggactag

SEQ ID NO: 58532 - DNA, 25 bp, Probe Sequence
taaagaaacaaatgcacctgcaaaa

SEQ ID NO: 58533 - DNA, 25 bp, Probe Sequence
gcgattcccatttctctgctaggag

SEQ ID NO: 58534 - DNA, 25 bp, Probe Sequence
ttcaacaatctcaagcagtaaggat

SEQ ID NO: 58535 - DNA, 25 bp, Probe Sequence
gagagttcattgagatgtggagatt

SEQ ID NO: 58536 - DNA, 25 bp, Probe Sequence
tcaacaatctcaagcagtaaggatg

SEQ ID NO: 58537 - DNA, 25 bp, Probe Sequence
agagttcattgagatgtggagattg

SEQ ID NO: 58538 - DNA, 25 bp, Probe Sequence
agagagttcattgagatgtggagat

SEQ ID NO: 58539 - DNA, 25 bp, Probe Sequence
aacaatctcaagcagtaaggatgaa

SEQ ID NO: 58540 - DNA, 25 bp, Probe Sequence
caatctcaagcagtaaggatgaaga

SEQ ID NO: 58541 - DNA, 25 bp, Probe Sequence
gataggaatatggacatagcaatgg

SEQ ID NO: 58542 - DNA, 25 bp, Probe Sequence
ggataggaatatggacatagcaatg

SEQ ID NO: 58543 - DNA, 25 bp, Probe Sequence
acaatctcaagcagtaaggatgaag

SEQ ID NO: 58544 - DNA, 25 bp, Probe Sequence
caacaatctcaagcagtaaggatga

SEQ ID NO: 58545 - DNA, 25 bp, Probe Sequence
ttcattgagatgtggagattgcttg

SEQ ID NO: 58546 - DNA, 25 bp, Probe Sequence
gttcattgagatgtggagattgctt

SEQ ID NO: 58547 - DNA, 25 bp, Probe Sequence
cagagagttcattgagatgtggaga

SEQ ID NO: 58548 - DNA, 25 bp, Probe Sequence
gagttcattgagatgtggagattgc

SEQ ID NO: 58549 - DNA, 25 bp, Probe Sequence
taccagaacacatcactgaagaaga

SEQ ID NO: 58550 - DNA, 25 bp, Probe Sequence
agttcattgagatgtggagattgct

SEQ ID NO: 58551 - DNA, 25 bp, Probe Sequence
ctgaagagctagagttggataagtg

SEQ ID NO: 58552 - DNA, 25 bp, Probe Sequence
aagagctagagttggataagtggaa

SEQ ID NO: 58553 - DNA, 25 bp, Probe Sequence
tctgaagagctagagttggataagt

SEQ ID NO: 58554 - DNA, 25 bp, Probe Sequence
ttctgaagagctagagttggataag

SEQ ID NO: 58555 - DNA, 25 bp, Probe Sequence
cttctgaagagctagagttggataa

SEQ ID NO: 58556 - DNA, 25 bp, Probe Sequence
gtaccagaacacatcactgaagaag

SEQ ID NO: 58557 - DNA, 25 bp, Probe Sequence
gaagtaccagaacacatcactgaag

SEQ ID NO: 58558 - DNA, 25 bp, Probe Sequence
cataataaatgttcatgatgctgaa

SEQ ID NO: 58559 - DNA, 25 bp, Probe Sequence
ataataaatgttcatgatgctgaaa

SEQ ID NO: 58560 - DNA, 25 bp, Probe Sequence
taataaatgttcatgatgctgaaaa

SEQ ID NO: 58561 - DNA, 25 bp, Probe Sequence
tgaggaattaaggaataagaacaga

SEQ ID NO: 58562 - DNA, 25 bp, Probe Sequence
ttaaggaataagaacagagagtcat

SEQ ID NO: 58563 - DNA, 25 bp, Probe Sequence
attaaggaataagaacagagagtca

SEQ ID NO: 58564 - DNA, 25 bp, Probe Sequence
aggaattaaggaataagaacagaga

SEQ ID NO: 58565 - DNA, 25 bp, Probe Sequence
aaggaataagaacagagagtcatat

SEQ ID NO: 58566 - DNA, 25 bp, Probe Sequence
ggaattaaggaataagaacagagag

SEQ ID NO: 58567 - DNA, 25 bp, Probe Sequence
gaggaattaaggaataagaacagag

SEQ ID NO: 58568 - DNA, 25 bp, Probe Sequence
atcccaaccttgaagaaagtcctaa

SEQ ID NO: 58569 - DNA, 25 bp, Probe Sequence
aagtcaaagtaaacaagtatggaga

SEQ ID NO: 58570 - DNA, 25 bp, Probe Sequence
agaagtcaaagtaaacaagtatgga

SEQ ID NO: 58571 - DNA, 25 bp, Probe Sequence
tcccaaccttgaagaaagtcctaaa

SEQ ID NO: 58572 - DNA, 25 bp, Probe Sequence
agtcaaagtaaacaagtatggagat

SEQ ID NO: 58573 - DNA, 25 bp, Probe Sequence
gaagtcaaagtaaacaagtatggag

SEQ ID NO: 58574 - DNA, 25 bp, Probe Sequence
atgaggaattaaggaataagaacag

SEQ ID NO: 58575 - DNA, 25 bp, Probe Sequence
taaggaataagaacagagagtcata

SEQ ID NO: 58576 - DNA, 25 bp, Probe Sequence
aagaagtcaaagtaaacaagtatgg

SEQ ID NO: 58577 - DNA, 25 bp, Probe Sequence
aattaaggaataagaacagagagtc

SEQ ID NO: 58578 - DNA, 25 bp, Probe Sequence
gaattaaggaataagaacagagagt

SEQ ID NO: 58579 - DNA, 25 bp, Probe Sequence
gatcccaaccttgaagaaagtccta

SEQ ID NO: 58580 - DNA, 25 bp, Probe Sequence
aggaataagaacagagagtcatatg

SEQ ID NO: 58581 - DNA, 25 bp, Probe Sequence
atcatattgtccaaggacctgatcc

SEQ ID NO: 58582 - DNA, 25 bp, Probe Sequence
ttactgatcatattgtccaaggacc

SEQ ID NO: 58583 - DNA, 25 bp, Probe Sequence
tactgatcatattgtccaaggacct

SEQ ID NO: 58584 - DNA, 25 bp, Probe Sequence
gtcaaagtaaacaagtatggagata

SEQ ID NO: 58585 - DNA, 25 bp, Probe Sequence
tgtaagtgaagattgtcgtattcca

SEQ ID NO: 58586 - DNA, 25 bp, Probe Sequence
ttctccagtcacacgatacattcta

SEQ ID NO: 58587 - DNA, 25 bp, Probe Sequence
ctgtaagtgaagattgtcgtattcc

SEQ ID NO: 58588 - DNA, 25 bp, Probe Sequence
ttctcttctctaacgatgctgaatc

SEQ ID NO: 58589 - DNA, 25 bp, Probe Sequence
ttctctgtaagtgaagattgtcgta

SEQ ID NO: 58590 - DNA, 25 bp, Probe Sequence
tctctgtaagtgaagattgtcgtat

SEQ ID NO: 58591 - DNA, 25 bp, Probe Sequence
aagtgaagattgtcgtattccaagt

SEQ ID NO: 58592 - DNA, 25 bp, Probe Sequence
tgaagattgtcgtattccaagtcta

SEQ ID NO: 58593 - DNA, 25 bp, Probe Sequence
cacacgatacattctaggctacttc

SEQ ID NO: 58594 - DNA, 25 bp, Probe Sequence
gtgaagattgtcgtattccaagtct

SEQ ID NO: 58595 - DNA, 25 bp, Probe Sequence
agtgaagattgtcgtattccaagtc

SEQ ID NO: 58596 - DNA, 25 bp, Probe Sequence
gtaagtgaagattgtcgtattccaa

SEQ ID NO: 58597 - DNA, 25 bp, Probe Sequence
gtctagtcaatcaacatagcagaga

SEQ ID NO: 58598 - DNA, 25 bp, Probe Sequence
tcacacgatacattctaggctactt

SEQ ID NO: 58599 - DNA, 25 bp, Probe Sequence
taagtgaagattgtcgtattccaag

SEQ ID NO: 58600 - DNA, 25 bp, Probe Sequence
tctgtaagtgaagattgtcgtattc

SEQ ID NO: 58601 - DNA, 25 bp, Probe Sequence
ctctgtaagtgaagattgtcgtatt

SEQ ID NO: 58602 - DNA, 25 bp, Probe Sequence
gaagattgtcgtattccaagtctaa

SEQ ID NO: 58603 - DNA, 25 bp, Probe Sequence
tctccagtcacacgatacattctag

SEQ ID NO: 58604 - DNA, 25 bp, Probe Sequence
tagtcaatcaacatagcagagacag

SEQ ID NO: 58605 - DNA, 25 bp, Probe Sequence
tgtctagtcaatcaacatagcagag

SEQ ID NO: 58606 - DNA, 25 bp, Probe Sequence
ctgaacagtgtagtggcagtaataa

SEQ ID NO: 58607 - DNA, 25 bp, Probe Sequence
acacgatacattctaggctacttcc

SEQ ID NO: 58608 - DNA, 25 bp, Probe Sequence
gtcacacgatacattctaggctact

SEQ ID NO: 58609 - DNA, 25 bp, Probe Sequence
gtgtgtagtgagtgtaggagataac

SEQ ID NO: 58610 - DNA, 25 bp, Probe Sequence
cgtgtgtagtgagtgtaggagataa

SEQ ID NO: 58611 - DNA, 25 bp, Probe Sequence
tgtagtgagtgtaggagataactgt

SEQ ID NO: 58612 - DNA, 25 bp, Probe Sequence
gtgtagtgagtgtaggagataactg

SEQ ID NO: 58613 - DNA, 25 bp, Probe Sequence
tgtgtagtgagtgtaggagataact

SEQ ID NO: 58614 - DNA, 25 bp, Probe Sequence
taagccataactaaggagcagcatt

SEQ ID NO: 58615 - DNA, 25 bp, Probe Sequence
gtagtgagtgtaggagataactgta

SEQ ID NO: 58616 - DNA, 25 bp, Probe Sequence
ttaagccataactaaggagcagcat

SEQ ID NO: 58617 - DNA, 25 bp, Probe Sequence
agtgagtgtaggagataactgtata

SEQ ID NO: 58618 - DNA, 25 bp, Probe Sequence
tagtgagtgtaggagataactgtat

SEQ ID NO: 58619 - DNA, 25 bp, Probe Sequence
taaggagcagcatttgagtagattt

SEQ ID NO: 58620 - DNA, 25 bp, Probe Sequence
tgtaggagataactgtatataggct

SEQ ID NO: 58621 - DNA, 25 bp, Probe Sequence
gtgtaggagataactgtatataggc

SEQ ID NO: 58622 - DNA, 25 bp, Probe Sequence
ttagatttattgaaagggcaccact

SEQ ID NO: 58623 - DNA, 25 bp, Probe Sequence
ctaaggagcagcatttgagtagatt

SEQ ID NO: 58624 - DNA, 25 bp, Probe Sequence
cttagatttattgaaagggcaccac

SEQ ID NO: 58625 - DNA, 25 bp, Probe Sequence
tagatttattgaaagggcaccactt

SEQ ID NO: 58626 - DNA, 25 bp, Probe Sequence
ggagataactgtatataggctactg

SEQ ID NO: 58627 - DNA, 25 bp, Probe Sequence
aaggagcagcatttgagtagatttc

SEQ ID NO: 58628 - DNA, 25 bp, Probe Sequence
aggagataactgtatataggctact

SEQ ID NO: 58629 - DNA, 25 bp, Probe Sequence
ataactaaggagcagcatttgagta

SEQ ID NO: 58630 - DNA, 25 bp, Probe Sequence
taactaaggagcagcatttgagtag

SEQ ID NO: 58631 - DNA, 25 bp, Probe Sequence
ctacggagtttacagaaggcaattt

SEQ ID NO: 58632 - DNA, 25 bp, Probe Sequence
ccataactaaggagcagcatttgag

SEQ ID NO: 58633 - DNA, 25 bp, Probe Sequence
aagaggagtcatcaattcatagagc

SEQ ID NO: 58634 - DNA, 25 bp, Probe Sequence
tcatcaattcatagagcacactagg

SEQ ID NO: 58635 - DNA, 25 bp, Probe Sequence
gaggagtcatcaattcatagagcac

SEQ ID NO: 58636 - DNA, 25 bp, Probe Sequence
agaggagtcatcaattcatagagca

SEQ ID NO: 58637 - DNA, 25 bp, Probe Sequence
gtcatcaattcatagagcacactag

SEQ ID NO: 58638 - DNA, 25 bp, Probe Sequence
agtcatcaattcatagagcacacta

SEQ ID NO: 58639 - DNA, 25 bp, Probe Sequence
gagtcatcaattcatagagcacact

SEQ ID NO: 58640 - DNA, 25 bp, Probe Sequence
ggagtcatcaattcatagagcacac

SEQ ID NO: 58641 - DNA, 25 bp, Probe Sequence
aggagtcatcaattcatagagcaca

SEQ ID NO: 58642 - DNA, 25 bp, Probe Sequence
gatggtaggatgaggaggaacagat

SEQ ID NO: 58643 - DNA, 25 bp, Probe Sequence
tctagcctctgaatgttccaaataa

SEQ ID NO: 58644 - DNA, 25 bp, Probe Sequence
atggtaggatgaggaggaacagatg

SEQ ID NO: 58645 - DNA, 25 bp, Probe Sequence
atgcccttctttaattggttctcag

SEQ ID NO: 58646 - DNA, 25 bp, Probe Sequence
gatgcccttctttaattggttctca

SEQ ID NO: 58647 - DNA, 25 bp, Probe Sequence
ctagcctctgaatgttccaaataaa

SEQ ID NO: 58648 - DNA, 25 bp, Probe Sequence
ttctagcctctgaatgttccaaata

SEQ ID NO: 58649 - DNA, 25 bp, Probe Sequence
cccttctttaattggttctcagtta

SEQ ID NO: 58650 - DNA, 25 bp, Probe Sequence
tttctagcctctgaatgttccaaat

SEQ ID NO: 58651 - DNA, 25 bp, Probe Sequence
catcaattcatagagcacactaggg

SEQ ID NO: 58652 - DNA, 25 bp, Probe Sequence
gcccttctttaattggttctcagtt

SEQ ID NO: 58653 - DNA, 25 bp, Probe Sequence
agatgcccttctttaattggttctc

SEQ ID NO: 58654 - DNA, 25 bp, Probe Sequence
aacagatgcccttctttaattggtt

SEQ ID NO: 58655 - DNA, 25 bp, Probe Sequence
cagatgcccttctttaattggttct

SEQ ID NO: 58656 - DNA, 25 bp, Probe Sequence
ctttctagcctctgaatgttccaaa

SEQ ID NO: 58657 - DNA, 25 bp, Probe Sequence
ttgctgctgtgatccgtagtaataa

SEQ ID NO: 58658 - DNA, 25 bp, Probe Sequence
taataaattctcagaggactcagcc

SEQ ID NO: 58659 - DNA, 25 bp, Probe Sequence
gtaataaattctcagaggactcagc

SEQ ID NO: 58660 - DNA, 25 bp, Probe Sequence
gttgctgctgtgatccgtagtaata

SEQ ID NO: 58661 - DNA, 25 bp, Probe Sequence
ccgtagtaataaattctcagaggac

SEQ ID NO: 58662 - DNA, 25 bp, Probe Sequence
tgctgtgatccgtagtaataaattc

SEQ ID NO: 58663 - DNA, 25 bp, Probe Sequence
ctgctgtgatccgtagtaataaatt

SEQ ID NO: 58664 - DNA, 25 bp, Probe Sequence
gctgctgtgatccgtagtaataaat

SEQ ID NO: 58665 - DNA, 25 bp, Probe Sequence
gctgtgatccgtagtaataaattct

SEQ ID NO: 58666 - DNA, 25 bp, Probe Sequence
atccgtagtaataaattctcagagg

SEQ ID NO: 58667 - DNA, 25 bp, Probe Sequence
ataaattctcagaggactcagcctt

SEQ ID NO: 58668 - DNA, 25 bp, Probe Sequence
aataaattctcagaggactcagcct

SEQ ID NO: 58669 - DNA, 25 bp, Probe Sequence
aattctcagaggactcagcctttaa

SEQ ID NO: 58670 - DNA, 25 bp, Probe Sequence
aaattctcagaggactcagccttta

SEQ ID NO: 58671 - DNA, 25 bp, Probe Sequence
taaattctcagaggactcagccttt

SEQ ID NO: 58672 - DNA, 25 bp, Probe Sequence
tgctgctgtgatccgtagtaataaa

SEQ ID NO: 58673 - DNA, 25 bp, Probe Sequence
cgtagtaataaattctcagaggact

SEQ ID NO: 58674 - DNA, 25 bp, Probe Sequence
tccgtagtaataaattctcagagga

SEQ ID NO: 58675 - DNA, 25 bp, Probe Sequence
agtaataaattctcagaggactcag

SEQ ID NO: 58676 - DNA, 25 bp, Probe Sequence
tgtgatccgtagtaataaattctca

SEQ ID NO: 58677 - DNA, 25 bp, Probe Sequence
ctgtgatccgtagtaataaattctc

SEQ ID NO: 58678 - DNA, 25 bp, Probe Sequence
caagcagatcaagttcgagaaagac

SEQ ID NO: 58679 - DNA, 25 bp, Probe Sequence
attctcagaggactcagcctttaaa

SEQ ID NO: 58680 - DNA, 25 bp, Probe Sequence
agatcaagttcgagaaagacctgag

SEQ ID NO: 58681 - DNA, 25 bp, Probe Sequence
ctaacctgctactaatcacagagaa

SEQ ID NO: 58682 - DNA, 25 bp, Probe Sequence
cctggtatgtcttcatagtcattga

SEQ ID NO: 58683 - DNA, 25 bp, Probe Sequence
cctaacctgctactaatcacagaga

SEQ ID NO: 58684 - DNA, 25 bp, Probe Sequence
tggtatgtcttcatagtcattgaga

SEQ ID NO: 58685 - DNA, 25 bp, Probe Sequence
ctggtatgtcttcatagtcattgag

SEQ ID NO: 58686 - DNA, 25 bp, Probe Sequence
gcctggtatgtcttcatagtcattg

SEQ ID NO: 58687 - DNA, 25 bp, Probe Sequence
agcctggtatgtcttcatagtcatt

SEQ ID NO: 58688 - DNA, 25 bp, Probe Sequence
atgtgaagaaggaggagaagaggaa

SEQ ID NO: 58689 - DNA, 25 bp, Probe Sequence
aatgtgaagaaggaggagaagagga

SEQ ID NO: 58690 - DNA, 25 bp, Probe Sequence
gagcctggtatgtcttcatagtcat

SEQ ID NO: 58691 - DNA, 25 bp, Probe Sequence
ggtatgtcttcatagtcattgagaa

SEQ ID NO: 58692 - DNA, 25 bp, Probe Sequence
tagtcattgagaatgtggagatacc

SEQ ID NO: 58693 - DNA, 25 bp, Probe Sequence
ttcatagtcattgagaatgtggaga

SEQ ID NO: 58694 - DNA, 25 bp, Probe Sequence
tcttcatagtcattgagaatgtgga

SEQ ID NO: 58695 - DNA, 25 bp, Probe Sequence
gtcttcatagtcattgagaatgtgg

SEQ ID NO: 58696 - DNA, 25 bp, Probe Sequence
cattgagaatgtggagataccagtt

SEQ ID NO: 58697 - DNA, 25 bp, Probe Sequence
tcatagtcattgagaatgtggagat

SEQ ID NO: 58698 - DNA, 25 bp, Probe Sequence
cttcatagtcattgagaatgtggag

SEQ ID NO: 58699 - DNA, 25 bp, Probe Sequence
tgtgaagaaggaggagaagaggaag

SEQ ID NO: 58700 - DNA, 25 bp, Probe Sequence
gtcattgagaatgtggagataccag

SEQ ID NO: 58701 - DNA, 25 bp, Probe Sequence
ttctcctctcttcatcccatctcta

SEQ ID NO: 58702 - DNA, 25 bp, Probe Sequence
cagagcctggtatgtcttcatagtc

SEQ ID NO: 58703 - DNA, 25 bp, Probe Sequence
tgtcttcatagtcattgagaatgtg

SEQ ID NO: 58704 - DNA, 25 bp, Probe Sequence
tcattgagaatgtggagataccagt

SEQ ID NO: 58705 - DNA, 25 bp, Probe Sequence
ccttatccaccacgctattatagtt

SEQ ID NO: 58706 - DNA, 25 bp, Probe Sequence
gtccttatccaccacgctattatag

SEQ ID NO: 58707 - DNA, 25 bp, Probe Sequence
tccttatccaccacgctattatagt

SEQ ID NO: 58708 - DNA, 25 bp, Probe Sequence
cttggcactatgaacagagaacatt

SEQ ID NO: 58709 - DNA, 25 bp, Probe Sequence
tcttggcactatgaacagagaacat

SEQ ID NO: 58710 - DNA, 25 bp, Probe Sequence
acattcttggcactatgaacagaga

SEQ ID NO: 58711 - DNA, 25 bp, Probe Sequence
cacattcttggcactatgaacagag

SEQ ID NO: 58712 - DNA, 25 bp, Probe Sequence
tattatagtttccgttgtcctccac

SEQ ID NO: 58713 - DNA, 25 bp, Probe Sequence
aagagagtcagagctaagcatacag

SEQ ID NO: 58714 - DNA, 25 bp, Probe Sequence
ctattatagtttccgttgtcctcca

SEQ ID NO: 58715 - DNA, 25 bp, Probe Sequence
tatccaccacgctattatagtttcc

SEQ ID NO: 58716 - DNA, 25 bp, Probe Sequence
tttattgtccaaagagagtcagagc

SEQ ID NO: 58717 - DNA, 25 bp, Probe Sequence
ttggcactatgaacagagaacattt

SEQ ID NO: 58718 - DNA, 25 bp, Probe Sequence
gctattatagtttccgttgtcctcc

SEQ ID NO: 58719 - DNA, 25 bp, Probe Sequence
cactatgaacagagaacatttgcct

SEQ ID NO: 58720 - DNA, 25 bp, Probe Sequence
cgctattatagtttccgttgtcctc

SEQ ID NO: 58721 - DNA, 25 bp, Probe Sequence
ttatccaccacgctattatagtttc

SEQ ID NO: 58722 - DNA, 25 bp, Probe Sequence
cttatccaccacgctattatagttt

SEQ ID NO: 58723 - DNA, 25 bp, Probe Sequence
tggcactatgaacagagaacatttg

SEQ ID NO: 58724 - DNA, 25 bp, Probe Sequence
attcttggcactatgaacagagaac

SEQ ID NO: 58725 - DNA, 25 bp, Probe Sequence
cattcttggcactatgaacagagaa

SEQ ID NO: 58726 - DNA, 25 bp, Probe Sequence
attatagtttccgttgtcctccacc

SEQ ID NO: 58727 - DNA, 25 bp, Probe Sequence
actatgaacagagaacatttgcctg

SEQ ID NO: 58728 - DNA, 25 bp, Probe Sequence
tattgtccaaagagagtcagagcta

SEQ ID NO: 58729 - DNA, 25 bp, Probe Sequence
gatgatggctgaatgaacttgagac

SEQ ID NO: 58730 - DNA, 25 bp, Probe Sequence
cttcttgaagatatgcttgttgctt

SEQ ID NO: 58731 - DNA, 25 bp, Probe Sequence
actcacttcttgaagatatgcttgt

SEQ ID NO: 58732 - DNA, 25 bp, Probe Sequence
gactcacttcttgaagatatgcttg

SEQ ID NO: 58733 - DNA, 25 bp, Probe Sequence
tcacttcttgaagatatgcttgttg

SEQ ID NO: 58734 - DNA, 25 bp, Probe Sequence
ggaggactcacttcttgaagatatg

SEQ ID NO: 58735 - DNA, 25 bp, Probe Sequence
aggaggactcacttcttgaagatat

SEQ ID NO: 58736 - DNA, 25 bp, Probe Sequence
acttcttgaagatatgcttgttgct

SEQ ID NO: 58737 - DNA, 25 bp, Probe Sequence
cacttcttgaagatatgcttgttgc

SEQ ID NO: 58738 - DNA, 25 bp, Probe Sequence
ggactcacttcttgaagatatgctt

SEQ ID NO: 58739 - DNA, 25 bp, Probe Sequence
ctcacttcttgaagatatgcttgtt

SEQ ID NO: 58740 - DNA, 25 bp, Probe Sequence
ataagcatggagtcatattgaggag

SEQ ID NO: 58741 - DNA, 25 bp, Probe Sequence
aacacactctatgtcaactctcctt

SEQ ID NO: 58742 - DNA, 25 bp, Probe Sequence
aataagcatggagtcatattgagga

SEQ ID NO: 58743 - DNA, 25 bp, Probe Sequence
gaggactcacttcttgaagatatgc

SEQ ID NO: 58744 - DNA, 25 bp, Probe Sequence
gaataagcatggagtcatattgagg

SEQ ID NO: 58745 - DNA, 25 bp, Probe Sequence
aggactcacttcttgaagatatgct

SEQ ID NO: 58746 - DNA, 25 bp, Probe Sequence
gaggaggactcacttcttgaagata

SEQ ID NO: 58747 - DNA, 25 bp, Probe Sequence
gtgaacacactctatgtcaactctc

SEQ ID NO: 58748 - DNA, 25 bp, Probe Sequence
gaacacactctatgtcaactctcct

SEQ ID NO: 58749 - DNA, 25 bp, Probe Sequence
gcacttagatacagaatgagttaga

SEQ ID NO: 58750 - DNA, 25 bp, Probe Sequence
agaataagcatggagtcatattgag

SEQ ID NO: 58751 - DNA, 25 bp, Probe Sequence
tgaacacactctatgtcaactctcc

SEQ ID NO: 58752 - DNA, 25 bp, Probe Sequence
tcagcattgcacttagatacagaat

SEQ ID NO: 58753 - DNA, 25 bp, Probe Sequence
atgtcaagagcatcactgttgttat

SEQ ID NO: 58754 - DNA, 25 bp, Probe Sequence
tgtcaagagcatcactgttgttatt

SEQ ID NO: 58755 - DNA, 25 bp, Probe Sequence
atctgactcatgtctcttctcatct

SEQ ID NO: 58756 - DNA, 25 bp, Probe Sequence
catctgactcatgtctcttctcatc

SEQ ID NO: 58757 - DNA, 25 bp, Probe Sequence
ctcatgtctcttctcatctggttca

SEQ ID NO: 58758 - DNA, 25 bp, Probe Sequence
actcatgtctcttctcatctggttc

SEQ ID NO: 58759 - DNA, 25 bp, Probe Sequence
tctgactcatgtctcttctcatctg

SEQ ID NO: 58760 - DNA, 25 bp, Probe Sequence
ccatctgactcatgtctcttctcat

SEQ ID NO: 58761 - DNA, 25 bp, Probe Sequence
gtcaagagcatcactgttgttattt

SEQ ID NO: 58762 - DNA, 25 bp, Probe Sequence
tcatgtctcttctcatctggttcag

SEQ ID NO: 58763 - DNA, 25 bp, Probe Sequence
gactcatgtctcttctcatctggtt

SEQ ID NO: 58764 - DNA, 25 bp, Probe Sequence
gaacagattgcgagcacattacttg

SEQ ID NO: 58765 - DNA, 25 bp, Probe Sequence
tcaagagcatcactgttgttattta

SEQ ID NO: 58766 - DNA, 25 bp, Probe Sequence
ctgactcatgtctcttctcatctgg

SEQ ID NO: 58767 - DNA, 25 bp, Probe Sequence
caagagcatcactgttgttatttaa

SEQ ID NO: 58768 - DNA, 25 bp, Probe Sequence
tgactcatgtctcttctcatctggt

SEQ ID NO: 58769 - DNA, 25 bp, Probe Sequence
gatgtcaagagcatcactgttgtta

SEQ ID NO: 58770 - DNA, 25 bp, Probe Sequence
tctcatctggttcagaacttagaag

SEQ ID NO: 58771 - DNA, 25 bp, Probe Sequence
cttctcatctggttcagaacttaga

SEQ ID NO: 58772 - DNA, 25 bp, Probe Sequence
tcttctcatctggttcagaacttag

SEQ ID NO: 58773 - DNA, 25 bp, Probe Sequence
ctcttctcatctggttcagaactta

SEQ ID NO: 58774 - DNA, 25 bp, Probe Sequence
ctcatctggttcagaacttagaagg

SEQ ID NO: 58775 - DNA, 25 bp, Probe Sequence
ttctcatctggttcagaacttagaa

SEQ ID NO: 58776 - DNA, 25 bp, Probe Sequence
cgaacagattgcgagcacattactt

SEQ ID NO: 58777 - DNA, 25 bp, Probe Sequence
tttagatcaattagaggctttgctg

SEQ ID NO: 58778 - DNA, 25 bp, Probe Sequence
ttagatcaattagaggctttgctgg

SEQ ID NO: 58779 - DNA, 25 bp, Probe Sequence
ctttagatcaattagaggctttgct

SEQ ID NO: 58780 - DNA, 25 bp, Probe Sequence
tctttagatcaattagaggctttgc

SEQ ID NO: 58781 - DNA, 25 bp, Probe Sequence
aattagaggctttgctgggacataa

SEQ ID NO: 58782 - DNA, 25 bp, Probe Sequence
gggacataacatccagaagtcattt

SEQ ID NO: 58783 - DNA, 25 bp, Probe Sequence
attagaggctttgctgggacataac

SEQ ID NO: 58784 - DNA, 25 bp, Probe Sequence
tagatcaattagaggctttgctggg

SEQ ID NO: 58785 - DNA, 25 bp, Probe Sequence
tgggacataacatccagaagtcatt

SEQ ID NO: 58786 - DNA, 25 bp, Probe Sequence
caattagaggctttgctgggacata

SEQ ID NO: 58787 - DNA, 25 bp, Probe Sequence
aaacagggtcttgatttcgcttagg

SEQ ID NO: 58788 - DNA, 25 bp, Probe Sequence
ttctttagatcaattagaggctttg

SEQ ID NO: 58789 - DNA, 25 bp, Probe Sequence
agcctcaaagatgatgtccatgttt

SEQ ID NO: 58790 - DNA, 25 bp, Probe Sequence
gaaacagggtcttgatttcgcttag

SEQ ID NO: 58791 - DNA, 25 bp, Probe Sequence
tagaggctttgctgggacataacat

SEQ ID NO: 58792 - DNA, 25 bp, Probe Sequence
gctcactgattttgctatttacttt

SEQ ID NO: 58793 - DNA, 25 bp, Probe Sequence
gagcctcaaagatgatgtccatgtt

SEQ ID NO: 58794 - DNA, 25 bp, Probe Sequence
ttagaggctttgctgggacataaca

SEQ ID NO: 58795 - DNA, 25 bp, Probe Sequence
aaagatgatgtccatgttttgtgtg

SEQ ID NO: 58796 - DNA, 25 bp, Probe Sequence
tgaaacagggtcttgatttcgctta

SEQ ID NO: 58797 - DNA, 25 bp, Probe Sequence
tcagctctggattaatcgaattaca

SEQ ID NO: 58798 - DNA, 25 bp, Probe Sequence
aagatgatgtccatgttttgtgtga

SEQ ID NO: 58799 - DNA, 25 bp, Probe Sequence
cagagcctcaaagatgatgtccatg

SEQ ID NO: 58800 - DNA, 25 bp, Probe Sequence
ttcagctctggattaatcgaattac

SEQ ID NO: 58801 - DNA, 25 bp, Probe Sequence
acatacttcatagaccactgagttc

SEQ ID NO: 58802 - DNA, 25 bp, Probe Sequence
catacttcatagaccactgagttct

SEQ ID NO: 58803 - DNA, 25 bp, Probe Sequence
tacatacttcatagaccactgagtt

SEQ ID NO: 58804 - DNA, 25 bp, Probe Sequence
atacatacttcatagaccactgagt

SEQ ID NO: 58805 - DNA, 25 bp, Probe Sequence
tcctcaacatactgtgtcaggtata

SEQ ID NO: 58806 - DNA, 25 bp, Probe Sequence
ttcctcaacatactgtgtcaggtat

SEQ ID NO: 58807 - DNA, 25 bp, Probe Sequence
acttcatagaccactgagttctagt

SEQ ID NO: 58808 - DNA, 25 bp, Probe Sequence
cttcatagaccactgagttctagtt

SEQ ID NO: 58809 - DNA, 25 bp, Probe Sequence
aatacatacttcatagaccactgag

SEQ ID NO: 58810 - DNA, 25 bp, Probe Sequence
tgttcatcttattcttaggaaggaa

SEQ ID NO: 58811 - DNA, 25 bp, Probe Sequence
tacttcatagaccactgagttctag

SEQ ID NO: 58812 - DNA, 25 bp, Probe Sequence
atgtgtagcttagtaaggcattaac

SEQ ID NO: 58813 - DNA, 25 bp, Probe Sequence
aagttacaagtcacaaaggagaatg

SEQ ID NO: 58814 - DNA, 25 bp, Probe Sequence
attgaggaaatgaagactggatact

SEQ ID NO: 58815 - DNA, 25 bp, Probe Sequence
tgtgtagcttagtaaggcattaaca

SEQ ID NO: 58816 - DNA, 25 bp, Probe Sequence
aattctggttgtaatagatgacagt

SEQ ID NO: 58817 - DNA, 25 bp, Probe Sequence
cacactacaacattctctttaacga

SEQ ID NO: 58818 - DNA, 25 bp, Probe Sequence
tcacactacaacattctctttaacg

SEQ ID NO: 58819 - DNA, 25 bp, Probe Sequence
atgttcatcttattcttaggaagga

SEQ ID NO: 58820 - DNA, 25 bp, Probe Sequence
ttgaggaaatgaagactggatactt

SEQ ID NO: 58821 - DNA, 25 bp, Probe Sequence
atacttcatagaccactgagttcta

SEQ ID NO: 58822 - DNA, 25 bp, Probe Sequence
aaagttacaagtcacaaaggagaat

SEQ ID NO: 58823 - DNA, 25 bp, Probe Sequence
taacgatgttgcaggtattctcaat

SEQ ID NO: 58824 - DNA, 25 bp, Probe Sequence
ttctggttgtaatagatgacagtac

SEQ ID NO: 58825 - DNA, 25 bp, Probe Sequence
gaacgagaacaagaatcagaagaag

SEQ ID NO: 58826 - DNA, 25 bp, Probe Sequence
acgagaacaagaatcagaagaagaa

SEQ ID NO: 58827 - DNA, 25 bp, Probe Sequence
aacgagaacaagaatcagaagaaga

SEQ ID NO: 58828 - DNA, 25 bp, Probe Sequence
tgaacgagaacaagaatcagaagaa

SEQ ID NO: 58829 - DNA, 25 bp, Probe Sequence
ctggctaaggatgactctaagtgta

SEQ ID NO: 58830 - DNA, 25 bp, Probe Sequence
gctaaggatgactctaagtgtactg

SEQ ID NO: 58831 - DNA, 25 bp, Probe Sequence
ctaaggatgactctaagtgtactgt

SEQ ID NO: 58832 - DNA, 25 bp, Probe Sequence
ttatagatatgctcaaggttactgg

SEQ ID NO: 58833 - DNA, 25 bp, Probe Sequence
ggctaaggatgactctaagtgtact

SEQ ID NO: 58834 - DNA, 25 bp, Probe Sequence
tggctaaggatgactctaagtgtac

SEQ ID NO: 58835 - DNA, 25 bp, Probe Sequence
taaggatgactctaagtgtactgtt

SEQ ID NO: 58836 - DNA, 25 bp, Probe Sequence
ggaacaatgtacttctggagctatt

SEQ ID NO: 58837 - DNA, 25 bp, Probe Sequence
atcagttcacttcctgtgtccttaa

SEQ ID NO: 58838 - DNA, 25 bp, Probe Sequence
cctttatcttctacaaccacactca

SEQ ID NO: 58839 - DNA, 25 bp, Probe Sequence
gcttgctactatttgtaactccttg

SEQ ID NO: 58840 - DNA, 25 bp, Probe Sequence
ataaacaaggtcactggaatcaact

SEQ ID NO: 58841 - DNA, 25 bp, Probe Sequence
actataaacaaggtcactggaatca

SEQ ID NO: 58842 - DNA, 25 bp, Probe Sequence
ggaattacaatagttggcatggctt

SEQ ID NO: 58843 - DNA, 25 bp, Probe Sequence
gctactatttgtaactccttgacca

SEQ ID NO: 58844 - DNA, 25 bp, Probe Sequence
tgctactatttgtaactccttgacc

SEQ ID NO: 58845 - DNA, 25 bp, Probe Sequence
tactgggcttgctactatttgtaac

SEQ ID NO: 58846 - DNA, 25 bp, Probe Sequence
gttactgggcttgctactatttgta

SEQ ID NO: 58847 - DNA, 25 bp, Probe Sequence
cgagaacaagaatcagaagaagaaa

SEQ ID NO: 58848 - DNA, 25 bp, Probe Sequence
aaagaacagaaacagcaacaacaaa

SEQ ID NO: 58849 - DNA, 25 bp, Probe Sequence
gcaatgagtagtataagccacctat

SEQ ID NO: 58850 - DNA, 25 bp, Probe Sequence
tgaatgatgataagtcagtcactca

SEQ ID NO: 58851 - DNA, 25 bp, Probe Sequence
tctatcttctaggatctaagccact

SEQ ID NO: 58852 - DNA, 25 bp, Probe Sequence
aggatgacaatcaatacaatgacaa

SEQ ID NO: 58853 - DNA, 25 bp, Probe Sequence
aaggatgacaatcaatacaatgaca

SEQ ID NO: 58854 - DNA, 25 bp, Probe Sequence
caatgagtagtataagccacctatt

SEQ ID NO: 58855 - DNA, 25 bp, Probe Sequence
atgaatgatgataagtcagtcactc

SEQ ID NO: 58856 - DNA, 25 bp, Probe Sequence
atctatcttctaggatctaagccac

SEQ ID NO: 58857 - DNA, 25 bp, Probe Sequence
aatgaatgatgataagtcagtcact

SEQ ID NO: 58858 - DNA, 25 bp, Probe Sequence
ctatcttctaggatctaagccacta

SEQ ID NO: 58859 - DNA, 25 bp, Probe Sequence
aatctatcttctaggatctaagcca

SEQ ID NO: 58860 - DNA, 25 bp, Probe Sequence
ctatagaacactgtgcataccttga

SEQ ID NO: 58861 - DNA, 25 bp, Probe Sequence
tagaacactgtgcataccttgaata

SEQ ID NO: 58862 - DNA, 25 bp, Probe Sequence
atagaacactgtgcataccttgaat

SEQ ID NO: 58863 - DNA, 25 bp, Probe Sequence
tatagaacactgtgcataccttgaa

SEQ ID NO: 58864 - DNA, 25 bp, Probe Sequence
gtagaagaaggaacgatgacaggtc

SEQ ID NO: 58865 - DNA, 25 bp, Probe Sequence
agaacactgtgcataccttgaataa

SEQ ID NO: 58866 - DNA, 25 bp, Probe Sequence
ctcctctcttcctatagaacactgt

SEQ ID NO: 58867 - DNA, 25 bp, Probe Sequence
cctatagaacactgtgcataccttg

SEQ ID NO: 58868 - DNA, 25 bp, Probe Sequence
tcctatagaacactgtgcatacctt

SEQ ID NO: 58869 - DNA, 25 bp, Probe Sequence
tgcaatgagtagtataagccaccta

SEQ ID NO: 58870 - DNA, 25 bp, Probe Sequence
tatcttctaggatctaagccactaa

SEQ ID NO: 58871 - DNA, 25 bp, Probe Sequence
tcttcctatagaacactgtgcatac

SEQ ID NO: 58872 - DNA, 25 bp, Probe Sequence
cttcctatagaacactgtgcatacc

SEQ ID NO: 58873 - DNA, 25 bp, Probe Sequence
cattgttgtattctaaggagtgacg

SEQ ID NO: 58874 - DNA, 25 bp, Probe Sequence
agagcgaatactggaagagaataac

SEQ ID NO: 58875 - DNA, 25 bp, Probe Sequence
cgaatactggaagagaataaccgaa

SEQ ID NO: 58876 - DNA, 25 bp, Probe Sequence
gagcgaatactggaagagaataacc

SEQ ID NO: 58877 - DNA, 25 bp, Probe Sequence
tagagcgaatactggaagagaataa

SEQ ID NO: 58878 - DNA, 25 bp, Probe Sequence
ctatattagtggtctgaggaagagc

SEQ ID NO: 58879 - DNA, 25 bp, Probe Sequence
tatattagtggtctgaggaagagca

SEQ ID NO: 58880 - DNA, 25 bp, Probe Sequence
tggattctatattagtggtctgagg

SEQ ID NO: 58881 - DNA, 25 bp, Probe Sequence
aactatggatggtctgataaggctt

SEQ ID NO: 58882 - DNA, 25 bp, Probe Sequence
tactctgcttgctacatcataatgc

SEQ ID NO: 58883 - DNA, 25 bp, Probe Sequence
ggattctatattagtggtctgagga

SEQ ID NO: 58884 - DNA, 25 bp, Probe Sequence
ctagagcgaatactggaagagaata

SEQ ID NO: 58885 - DNA, 25 bp, Probe Sequence
cacgaagagtagaagaattggtagc

SEQ ID NO: 58886 - DNA, 25 bp, Probe Sequence
gcacgaagagtagaagaattggtag

SEQ ID NO: 58887 - DNA, 25 bp, Probe Sequence
atactctgcttgctacatcataatg

SEQ ID NO: 58888 - DNA, 25 bp, Probe Sequence
agttatactctgcttgctacatcat

SEQ ID NO: 58889 - DNA, 25 bp, Probe Sequence
cgaagagtagaagaattggtagcaa

SEQ ID NO: 58890 - DNA, 25 bp, Probe Sequence
aacagcacgaagagtagaagaattg

SEQ ID NO: 58891 - DNA, 25 bp, Probe Sequence
gttatactctgcttgctacatcata

SEQ ID NO: 58892 - DNA, 25 bp, Probe Sequence
acgaagagtagaagaattggtagca

SEQ ID NO: 58893 - DNA, 25 bp, Probe Sequence
agcacgaagagtagaagaattggta

SEQ ID NO: 58894 - DNA, 25 bp, Probe Sequence
tctatattagtggtctgaggaagag

SEQ ID NO: 58895 - DNA, 25 bp, Probe Sequence
tcattgttgtattctaaggagtgac

SEQ ID NO: 58896 - DNA, 25 bp, Probe Sequence
cagttcagtattgtctctgttcatt

SEQ ID NO: 58897 - DNA, 25 bp, Probe Sequence
ttacaactggtatgactgaggtatc

SEQ ID NO: 58898 - DNA, 25 bp, Probe Sequence
tacaactggtatgactgaggtatcc

SEQ ID NO: 58899 - DNA, 25 bp, Probe Sequence
tttacaactggtatgactgaggtat

SEQ ID NO: 58900 - DNA, 25 bp, Probe Sequence
gtttacaactggtatgactgaggta

SEQ ID NO: 58901 - DNA, 25 bp, Probe Sequence
caactggtatgactgaggtatcctg

SEQ ID NO: 58902 - DNA, 25 bp, Probe Sequence
ctttgcctttaccctatacctctct

SEQ ID NO: 58903 - DNA, 25 bp, Probe Sequence
gaggtttacaactggtatgactgag

SEQ ID NO: 58904 - DNA, 25 bp, Probe Sequence
cttgaggtttacaactggtatgact

SEQ ID NO: 58905 - DNA, 25 bp, Probe Sequence
gactttgtgaacattcccaggtatt

SEQ ID NO: 58906 - DNA, 25 bp, Probe Sequence
ttgaggtttacaactggtatgactg

SEQ ID NO: 58907 - DNA, 25 bp, Probe Sequence
tttgcctttaccctatacctctctg

SEQ ID NO: 58908 - DNA, 25 bp, Probe Sequence
tatctagagacagagactgagtcac

SEQ ID NO: 58909 - DNA, 25 bp, Probe Sequence
actttgtgaacattcccaggtattg

SEQ ID NO: 58910 - DNA, 25 bp, Probe Sequence
ttcctttgcctttaccctatacctc

SEQ ID NO: 58911 - DNA, 25 bp, Probe Sequence
cttcctttgcctttaccctatacct

SEQ ID NO: 58912 - DNA, 25 bp, Probe Sequence
acaactggtatgactgaggtatcct

SEQ ID NO: 58913 - DNA, 25 bp, Probe Sequence
tgaggtttacaactggtatgactga

SEQ ID NO: 58914 - DNA, 25 bp, Probe Sequence
atatctagagacagagactgagtca

SEQ ID NO: 58915 - DNA, 25 bp, Probe Sequence
gcatatctagagacagagactgagt

SEQ ID NO: 58916 - DNA, 25 bp, Probe Sequence
tgcatatctagagacagagactgag

SEQ ID NO: 58917 - DNA, 25 bp, Probe Sequence
cagttgatgactttgtgaacattcc

SEQ ID NO: 58918 - DNA, 25 bp, Probe Sequence
ccagttgatgactttgtgaacattc

SEQ ID NO: 58919 - DNA, 25 bp, Probe Sequence
catatctagagacagagactgagtc

SEQ ID NO: 58920 - DNA, 25 bp, Probe Sequence
ctgtaccaggaacttgcatatctag

SEQ ID NO: 58921 - DNA, 25 bp, Probe Sequence
gcacatctaacatctacacttctct

SEQ ID NO: 58922 - DNA, 25 bp, Probe Sequence
ggcacatctaacatctacacttctc

SEQ ID NO: 58923 - DNA, 25 bp, Probe Sequence
catctaacatctacacttctctagc

SEQ ID NO: 58924 - DNA, 25 bp, Probe Sequence
cggcacatctaacatctacacttct

SEQ ID NO: 58925 - DNA, 25 bp, Probe Sequence
taacatctacacttctctagctcag

SEQ ID NO: 58926 - DNA, 25 bp, Probe Sequence
ctaacatctacacttctctagctca

SEQ ID NO: 58927 - DNA, 25 bp, Probe Sequence
cacatctaacatctacacttctcta

SEQ ID NO: 58928 - DNA, 25 bp, Probe Sequence
tctaacatctacacttctctagctc

SEQ ID NO: 58929 - DNA, 25 bp, Probe Sequence
atctaacatctacacttctctagct

SEQ ID NO: 58930 - DNA, 25 bp, Probe Sequence
acatctaacatctacacttctctag

SEQ ID NO: 58931 - DNA, 25 bp, Probe Sequence
aacatctacacttctctagctcagc

SEQ ID NO: 58932 - DNA, 25 bp, Probe Sequence
atctacacttctctagctcagcctc

SEQ ID NO: 58933 - DNA, 25 bp, Probe Sequence
catctacacttctctagctcagcct

SEQ ID NO: 58934 - DNA, 25 bp, Probe Sequence
acatctacacttctctagctcagcc

SEQ ID NO: 58935 - DNA, 25 bp, Probe Sequence
ctacacttctctagctcagcctcac

SEQ ID NO: 58936 - DNA, 25 bp, Probe Sequence
tctacacttctctagctcagcctca

SEQ ID NO: 58937 - DNA, 25 bp, Probe Sequence
ccggcacatctaacatctacacttc

SEQ ID NO: 58938 - DNA, 25 bp, Probe Sequence
tacacttctctagctcagcctcaca

SEQ ID NO: 58939 - DNA, 25 bp, Probe Sequence
accggcacatctaacatctacactt

SEQ ID NO: 58940 - DNA, 25 bp, Probe Sequence
caccggcacatctaacatctacact

SEQ ID NO: 58941 - DNA, 25 bp, Probe Sequence
tctggtgattcttgtacctaatctg

SEQ ID NO: 58942 - DNA, 25 bp, Probe Sequence
tgattcttgtacctaatctggtgtg

SEQ ID NO: 58943 - DNA, 25 bp, Probe Sequence
gtgattcttgtacctaatctggtgt

SEQ ID NO: 58944 - DNA, 25 bp, Probe Sequence
ctctggtgattcttgtacctaatct

SEQ ID NO: 58945 - DNA, 25 bp, Probe Sequence
ctggtgattcttgtacctaatctgg

SEQ ID NO: 58946 - DNA, 25 bp, Probe Sequence
ggtgattcttgtacctaatctggtg

SEQ ID NO: 58947 - DNA, 25 bp, Probe Sequence
gctctggtgattcttgtacctaatc

SEQ ID NO: 58948 - DNA, 25 bp, Probe Sequence
tggtgattcttgtacctaatctggt

SEQ ID NO: 58949 - DNA, 25 bp, Probe Sequence
gattcttgtacctaatctggtgtgc

SEQ ID NO: 58950 - DNA, 25 bp, Probe Sequence
tgctctggtgattcttgtacctaat

SEQ ID NO: 58951 - DNA, 25 bp, Probe Sequence
attcttgtacctaatctggtgtgct

SEQ ID NO: 58952 - DNA, 25 bp, Probe Sequence
ctgctctggtgattcttgtacctaa

SEQ ID NO: 58953 - DNA, 25 bp, Probe Sequence
ttcttgtacctaatctggtgtgctc

SEQ ID NO: 58954 - DNA, 25 bp, Probe Sequence
aacttgaaactctcatcaggcttct

SEQ ID NO: 58955 - DNA, 25 bp, Probe Sequence
gatgctgctctggtgattcttgtac

SEQ ID NO: 58956 - DNA, 25 bp, Probe Sequence
cttgtacctaatctggtgtgctcac

SEQ ID NO: 58957 - DNA, 25 bp, Probe Sequence
tcttgtacctaatctggtgtgctca

SEQ ID NO: 58958 - DNA, 25 bp, Probe Sequence
gtcacttccacttcaaaccttcagt

SEQ ID NO: 58959 - DNA, 25 bp, Probe Sequence
acttgaaactctcatcaggcttctg

SEQ ID NO: 58960 - DNA, 25 bp, Probe Sequence
cgatgctgctctggtgattcttgta

SEQ ID NO: 58961 - DNA, 25 bp, Probe Sequence
gctgctctggtgattcttgtaccta

SEQ ID NO: 58962 - DNA, 25 bp, Probe Sequence
cttgaaactctcatcaggcttctgc

SEQ ID NO: 58963 - DNA, 25 bp, Probe Sequence
ggtcacttccacttcaaaccttcag

SEQ ID NO: 58964 - DNA, 25 bp, Probe Sequence
atgctgctctggtgattcttgtacc

SEQ ID NO: 58965 - DNA, 25 bp, Probe Sequence
gtgtcttcagtgtctcattgtcatc

SEQ ID NO: 58966 - DNA, 25 bp, Probe Sequence
tgtgtcttcagtgtctcattgtcat

SEQ ID NO: 58967 - DNA, 25 bp, Probe Sequence
tgtcttcagtgtctcattgtcatcc

SEQ ID NO: 58968 - DNA, 25 bp, Probe Sequence
tgtttggtcttagagtgtttggata

SEQ ID NO: 58969 - DNA, 25 bp, Probe Sequence
gtgtgtcttcagtgtctcattgtca

SEQ ID NO: 58970 - DNA, 25 bp, Probe Sequence
tggatataactgaattgtagatggt

SEQ ID NO: 58971 - DNA, 25 bp, Probe Sequence
ctgtttggtcttagagtgtttggat

SEQ ID NO: 58972 - DNA, 25 bp, Probe Sequence
cttcgtgtgtcttcagtgtctcatt

SEQ ID NO: 58973 - DNA, 25 bp, Probe Sequence
cttctgtttggtcttagagtgtttg

SEQ ID NO: 58974 - DNA, 25 bp, Probe Sequence
gtttggtcttagagtgtttggatat

SEQ ID NO: 58975 - DNA, 25 bp, Probe Sequence
ttctgtttggtcttagagtgtttgg

SEQ ID NO: 58976 - DNA, 25 bp, Probe Sequence
ttcgtgtgtcttcagtgtctcattg

SEQ ID NO: 58977 - DNA, 25 bp, Probe Sequence
atttaactcttgaagtcacaccctc

SEQ ID NO: 58978 - DNA, 25 bp, Probe Sequence
gatttaactcttgaagtcacaccct

SEQ ID NO: 58979 - DNA, 25 bp, Probe Sequence
gcctaagtgtgatttaactcttgaa

SEQ ID NO: 58980 - DNA, 25 bp, Probe Sequence
tgatttaactcttgaagtcacaccc

SEQ ID NO: 58981 - DNA, 25 bp, Probe Sequence
gcttctgtttggtcttagagtgttt

SEQ ID NO: 58982 - DNA, 25 bp, Probe Sequence
gtgtctggcatgaaattactgtaaa

SEQ ID NO: 58983 - DNA, 25 bp, Probe Sequence
tgtctggcatgaaattactgtaaag

SEQ ID NO: 58984 - DNA, 25 bp, Probe Sequence
tctgtttggtcttagagtgtttgga

SEQ ID NO: 58985 - DNA, 25 bp, Probe Sequence
aagtgtgatttaactcttgaagtca

SEQ ID NO: 58986 - DNA, 25 bp, Probe Sequence
actgaattgtagatggtaaaggaaa

SEQ ID NO: 58987 - DNA, 25 bp, Probe Sequence
aactgaattgtagatggtaaaggaa

SEQ ID NO: 58988 - DNA, 25 bp, Probe Sequence
tggcatgaaattactgtaaagaact

SEQ ID NO: 58989 - DNA, 25 bp, Probe Sequence
ctatgtgagaggaagagaatgtgtg

SEQ ID NO: 58990 - DNA, 25 bp, Probe Sequence
cagtctatgtgagaggaagagaatg

SEQ ID NO: 58991 - DNA, 25 bp, Probe Sequence
gtctatgtgagaggaagagaatgtg

SEQ ID NO: 58992 - DNA, 25 bp, Probe Sequence
agtctatgtgagaggaagagaatgt

SEQ ID NO: 58993 - DNA, 25 bp, Probe Sequence
tatgtgagaggaagagaatgtgtgt

SEQ ID NO: 58994 - DNA, 25 bp, Probe Sequence
tctatgtgagaggaagagaatgtgt

SEQ ID NO: 58995 - DNA, 25 bp, Probe Sequence
tcagtctatgtgagaggaagagaat

SEQ ID NO: 58996 - DNA, 25 bp, Probe Sequence
gtctctacaagtgacagatgtgttg

SEQ ID NO: 58997 - DNA, 25 bp, Probe Sequence
atgtgagaggaagagaatgtgtgtg

SEQ ID NO: 58998 - DNA, 25 bp, Probe Sequence
agtgtacctcctacctcagtctatg

SEQ ID NO: 58999 - DNA, 25 bp, Probe Sequence
cagtgtacctcctacctcagtctat

SEQ ID NO: 59000 - DNA, 25 bp, Probe Sequence
tgtacctcctacctcagtctatgtg

SEQ ID NO: 59001 - DNA, 25 bp, Probe Sequence
gtgtacctcctacctcagtctatgt

SEQ ID NO: 59002 - DNA, 25 bp, Probe Sequence
gtacctcctacctcagtctatgtga

SEQ ID NO: 59003 - DNA, 25 bp, Probe Sequence
catcctctatttctcctggttcaac

SEQ ID NO: 59004 - DNA, 25 bp, Probe Sequence
ggtctctacaagtgacagatgtgtt

SEQ ID NO: 59005 - DNA, 25 bp, Probe Sequence
atcctctatttctcctggttcaacg

SEQ ID NO: 59006 - DNA, 25 bp, Probe Sequence
catgacccatttagcacagaagttt

SEQ ID NO: 59007 - DNA, 25 bp, Probe Sequence
ccagtgtacctcctacctcagtcta

SEQ ID NO: 59008 - DNA, 25 bp, Probe Sequence
ctctacaagtgacagatgtgttgtt

SEQ ID NO: 59009 - DNA, 25 bp, Probe Sequence
ccatcctctatttctcctggttcaa

SEQ ID NO: 59010 - DNA, 25 bp, Probe Sequence
tctctacaagtgacagatgtgttgt

SEQ ID NO: 59011 - DNA, 25 bp, Probe Sequence
ttatgtgccaggaacatcattctgt

SEQ ID NO: 59012 - DNA, 25 bp, Probe Sequence
tctaaaatgactggtataggtgctg

SEQ ID NO: 59013 - DNA, 25 bp, Probe Sequence
tcacttaacttgttagccatccatt

SEQ ID NO: 59014 - DNA, 25 bp, Probe Sequence
ttaacttgttagccatccattatcg

SEQ ID NO: 59015 - DNA, 25 bp, Probe Sequence
cacttaacttgttagccatccatta

SEQ ID NO: 59016 - DNA, 25 bp, Probe Sequence
gtcacttaacttgttagccatccat

SEQ ID NO: 59017 - DNA, 25 bp, Probe Sequence
taacttgttagccatccattatcgc

SEQ ID NO: 59018 - DNA, 25 bp, Probe Sequence
taatgaccatatcttaggacacaga

SEQ ID NO: 59019 - DNA, 25 bp, Probe Sequence
aatgtatgtaagacacttggcacaa

SEQ ID NO: 59020 - DNA, 25 bp, Probe Sequence
ccttacaccagtcacttaacttgtt

SEQ ID NO: 59021 - DNA, 25 bp, Probe Sequence
cttgttagccatccattatcgcatc

SEQ ID NO: 59022 - DNA, 25 bp, Probe Sequence
acttaacttgttagccatccattat

SEQ ID NO: 59023 - DNA, 25 bp, Probe Sequence
tacaccagtcacttaacttgttagc

SEQ ID NO: 59024 - DNA, 25 bp, Probe Sequence
cagtcacttaacttgttagccatcc

SEQ ID NO: 59025 - DNA, 25 bp, Probe Sequence
ccagtcacttaacttgttagccatc

SEQ ID NO: 59026 - DNA, 25 bp, Probe Sequence
ttacaccagtcacttaacttgttag

SEQ ID NO: 59027 - DNA, 25 bp, Probe Sequence
cttacaccagtcacttaacttgtta

SEQ ID NO: 59028 - DNA, 25 bp, Probe Sequence
ttgttagccatccattatcgcatct

SEQ ID NO: 59029 - DNA, 25 bp, Probe Sequence
gaccttacaccagtcacttaacttg

SEQ ID NO: 59030 - DNA, 25 bp, Probe Sequence
cttaacttgttagccatccattatc

SEQ ID NO: 59031 - DNA, 25 bp, Probe Sequence
accttacaccagtcacttaacttgt

SEQ ID NO: 59032 - DNA, 25 bp, Probe Sequence
tctaatgaccatatcttaggacaca

SEQ ID NO: 59033 - DNA, 25 bp, Probe Sequence
agtcacttaacttgttagccatcca

SEQ ID NO: 59034 - DNA, 25 bp, Probe Sequence
acttgttagccatccattatcgcat

SEQ ID NO: 59035 - DNA, 25 bp, Probe Sequence
ctaatgaccatatcttaggacacag

SEQ ID NO: 59036 - DNA, 25 bp, Probe Sequence
gtctaatgaccatatcttaggacac

SEQ ID NO: 59037 - DNA, 25 bp, Probe Sequence
agaagtttctgaaaccaagaagcag

SEQ ID NO: 59038 - DNA, 25 bp, Probe Sequence
tttctgaaaccaagaagcaggacag

SEQ ID NO: 59039 - DNA, 25 bp, Probe Sequence
gaagtttctgaaaccaagaagcagg

SEQ ID NO: 59040 - DNA, 25 bp, Probe Sequence
aagtttctgaaaccaagaagcagga

SEQ ID NO: 59041 - DNA, 25 bp, Probe Sequence
cagaagtttctgaaaccaagaagca

SEQ ID NO: 59042 - DNA, 25 bp, Probe Sequence
agtttctgaaaccaagaagcaggac

SEQ ID NO: 59043 - DNA, 25 bp, Probe Sequence
gtttctgaaaccaagaagcaggaca

SEQ ID NO: 59044 - DNA, 25 bp, Probe Sequence
agcataaggtttatctcaagtctca

SEQ ID NO: 59045 - DNA, 25 bp, Probe Sequence
gcataaggtttatctcaagtctcaa

SEQ ID NO: 59046 - DNA, 25 bp, Probe Sequence
ggagcataaggtttatctcaagtct

SEQ ID NO: 59047 - DNA, 25 bp, Probe Sequence
tggagcataaggtttatctcaagtc

SEQ ID NO: 59048 - DNA, 25 bp, Probe Sequence
ctggagcataaggtttatctcaagt

SEQ ID NO: 59049 - DNA, 25 bp, Probe Sequence
tctggagcataaggtttatctcaag

SEQ ID NO: 59050 - DNA, 25 bp, Probe Sequence
gtctggagcataaggtttatctcaa

SEQ ID NO: 59051 - DNA, 25 bp, Probe Sequence
gagcataaggtttatctcaagtctc

SEQ ID NO: 59052 - DNA, 25 bp, Probe Sequence
ggtctggagcataaggtttatctca

SEQ ID NO: 59053 - DNA, 25 bp, Probe Sequence
gggtctggagcataaggtttatctc

SEQ ID NO: 59054 - DNA, 25 bp, Probe Sequence
ttggacagagtcttgaggatacacg

SEQ ID NO: 59055 - DNA, 25 bp, Probe Sequence
ctagagaccacctatggagagtact

SEQ ID NO: 59056 - DNA, 25 bp, Probe Sequence
cataaggtttatctcaagtctcaat

SEQ ID NO: 59057 - DNA, 25 bp, Probe Sequence
aattgaactgcctcctcttgtcagg

SEQ ID NO: 59058 - DNA, 25 bp, Probe Sequence
ataaggtttatctcaagtctcaatt

SEQ ID NO: 59059 - DNA, 25 bp, Probe Sequence
caattgaactgcctcctcttgtcag

SEQ ID NO: 59060 - DNA, 25 bp, Probe Sequence
gtactcactaacagccatgaccctc

SEQ ID NO: 59061 - DNA, 25 bp, Probe Sequence
ggggtctggagcataaggtttatct

SEQ ID NO: 59062 - DNA, 25 bp, Probe Sequence
taaggtttatctcaagtctcaattg

SEQ ID NO: 59063 - DNA, 25 bp, Probe Sequence
tactcactaacagccatgaccctca

SEQ ID NO: 59064 - DNA, 25 bp, Probe Sequence
gacagagtcttgaggatacacggga

SEQ ID NO: 59065 - DNA, 25 bp, Probe Sequence
cggggtctggagcataaggtttatc

SEQ ID NO: 59066 - DNA, 25 bp, Probe Sequence
agtactcactaacagccatgaccct

SEQ ID NO: 59067 - DNA, 25 bp, Probe Sequence
agcataaggtttatctcaagtctca

SEQ ID NO: 59068 - DNA, 25 bp, Probe Sequence
gcataaggtttatctcaagtctcaa

SEQ ID NO: 59069 - DNA, 25 bp, Probe Sequence
ggagcataaggtttatctcaagtct

SEQ ID NO: 59070 - DNA, 25 bp, Probe Sequence
tggagcataaggtttatctcaagtc

SEQ ID NO: 59071 - DNA, 25 bp, Probe Sequence
ctggagcataaggtttatctcaagt

SEQ ID NO: 59072 - DNA, 25 bp, Probe Sequence
tctggagcataaggtttatctcaag

SEQ ID NO: 59073 - DNA, 25 bp, Probe Sequence
gtctggagcataaggtttatctcaa

SEQ ID NO: 59074 - DNA, 25 bp, Probe Sequence
gagcataaggtttatctcaagtctc

SEQ ID NO: 59075 - DNA, 25 bp, Probe Sequence
ggtctggagcataaggtttatctca

SEQ ID NO: 59076 - DNA, 25 bp, Probe Sequence
gggtctggagcataaggtttatctc

SEQ ID NO: 59077 - DNA, 25 bp, Probe Sequence
ttggacagagtcttgaggatacacg

SEQ ID NO: 59078 - DNA, 25 bp, Probe Sequence
ctagagaccacctatggagagtact

SEQ ID NO: 59079 - DNA, 25 bp, Probe Sequence
cataaggtttatctcaagtctcaat

SEQ ID NO: 59080 - DNA, 25 bp, Probe Sequence
aattgaactgcctcctcttgtcagg

SEQ ID NO: 59081 - DNA, 25 bp, Probe Sequence
ataaggtttatctcaagtctcaatt

SEQ ID NO: 59082 - DNA, 25 bp, Probe Sequence
caattgaactgcctcctcttgtcag

SEQ ID NO: 59083 - DNA, 25 bp, Probe Sequence
gtactcactaacagccatgaccctc

SEQ ID NO: 59084 - DNA, 25 bp, Probe Sequence
ggggtctggagcataaggtttatct

SEQ ID NO: 59085 - DNA, 25 bp, Probe Sequence
taaggtttatctcaagtctcaattg

SEQ ID NO: 59086 - DNA, 25 bp, Probe Sequence
tactcactaacagccatgaccctca

SEQ ID NO: 59087 - DNA, 25 bp, Probe Sequence
gacagagtcttgaggatacacggga

SEQ ID NO: 59088 - DNA, 25 bp, Probe Sequence
cggggtctggagcataaggtttatc

SEQ ID NO: 59089 - DNA, 25 bp, Probe Sequence
agtactcactaacagccatgaccct

SEQ ID NO: 59090 - DNA, 25 bp, Probe Sequence
ttatgtatctgccttcaagtctctg

SEQ ID NO: 59091 - DNA, 25 bp, Probe Sequence
gttatgtatctgccttcaagtctct

SEQ ID NO: 59092 - DNA, 25 bp, Probe Sequence
agttatgtatctgccttcaagtctc

SEQ ID NO: 59093 - DNA, 25 bp, Probe Sequence
gctgtagttatgtatctgccttcaa

SEQ ID NO: 59094 - DNA, 25 bp, Probe Sequence
tgtagttatgtatctgccttcaagt

SEQ ID NO: 59095 - DNA, 25 bp, Probe Sequence
tagttatgtatctgccttcaagtct

SEQ ID NO: 59096 - DNA, 25 bp, Probe Sequence
gtagttatgtatctgccttcaagtc

SEQ ID NO: 59097 - DNA, 25 bp, Probe Sequence
ctgtagttatgtatctgccttcaag

SEQ ID NO: 59098 - DNA, 25 bp, Probe Sequence
tatgtatctgccttcaagtctctga

SEQ ID NO: 59099 - DNA, 25 bp, Probe Sequence
aagtacactaagatcgttgaagagc

SEQ ID NO: 59100 - DNA, 25 bp, Probe Sequence
acactaagatcgttgaagagcaata

SEQ ID NO: 59101 - DNA, 25 bp, Probe Sequence
tacactaagatcgttgaagagcaat

SEQ ID NO: 59102 - DNA, 25 bp, Probe Sequence
actaagatcgttgaagagcaataga

SEQ ID NO: 59103 - DNA, 25 bp, Probe Sequence
cactaagatcgttgaagagcaatag

SEQ ID NO: 59104 - DNA, 25 bp, Probe Sequence
gtacactaagatcgttgaagagcaa

SEQ ID NO: 59105 - DNA, 25 bp, Probe Sequence
agtacactaagatcgttgaagagca

SEQ ID NO: 59106 - DNA, 25 bp, Probe Sequence
taagatcgttgaagagcaatagaac

SEQ ID NO: 59107 - DNA, 25 bp, Probe Sequence
gatcgttgaagagcaatagaacctt

SEQ ID NO: 59108 - DNA, 25 bp, Probe Sequence
aagatcgttgaagagcaatagaacc

SEQ ID NO: 59109 - DNA, 25 bp, Probe Sequence
ctaagatcgttgaagagcaatagaa

SEQ ID NO: 59110 - DNA, 25 bp, Probe Sequence
agatcgttgaagagcaatagaacct

SEQ ID NO: 59111 - DNA, 25 bp, Probe Sequence
agctgtagttatgtatctgccttca

SEQ ID NO: 59112 - DNA, 25 bp, Probe Sequence
atgtgctgtgttagtagagtttgat

SEQ ID NO: 59113 - DNA, 25 bp, Probe Sequence
aaatgtgctgtgttagtagagtttg

SEQ ID NO: 59114 - DNA, 25 bp, Probe Sequence
ccaggacactctacactctattctt

SEQ ID NO: 59115 - DNA, 25 bp, Probe Sequence
tgaagaacttacctctgctaatgac

SEQ ID NO: 59116 - DNA, 25 bp, Probe Sequence
ttgaagaacttacctctgctaatga

SEQ ID NO: 59117 - DNA, 25 bp, Probe Sequence
ccttgaagaacttacctctgctaat

SEQ ID NO: 59118 - DNA, 25 bp, Probe Sequence
aaccaggacactctacactctattc

SEQ ID NO: 59119 - DNA, 25 bp, Probe Sequence
cttgaagaacttacctctgctaatg

SEQ ID NO: 59120 - DNA, 25 bp, Probe Sequence
caaccaggacactctacactctatt

SEQ ID NO: 59121 - DNA, 25 bp, Probe Sequence
gaagaacttacctctgctaatgacg

SEQ ID NO: 59122 - DNA, 25 bp, Probe Sequence
tgagagttacaagtgtagtatggaa

SEQ ID NO: 59123 - DNA, 25 bp, Probe Sequence
tacttccacagttatgattgtcctc

SEQ ID NO: 59124 - DNA, 25 bp, Probe Sequence
accaggacactctacactctattct

SEQ ID NO: 59125 - DNA, 25 bp, Probe Sequence
agtgtagtatggaacaaggtctgta

SEQ ID NO: 59126 - DNA, 25 bp, Probe Sequence
ttgagagttacaagtgtagtatgga

SEQ ID NO: 59127 - DNA, 25 bp, Probe Sequence
gagagttacaagtgtagtatggaac

SEQ ID NO: 59128 - DNA, 25 bp, Probe Sequence
tacaagtgtagtatggaacaaggtc

SEQ ID NO: 59129 - DNA, 25 bp, Probe Sequence
caagtgtagtatggaacaaggtctg

SEQ ID NO: 59130 - DNA, 25 bp, Probe Sequence
ttacaagtgtagtatggaacaaggt

SEQ ID NO: 59131 - DNA, 25 bp, Probe Sequence
gttacaagtgtagtatggaacaagg

SEQ ID NO: 59132 - DNA, 25 bp, Probe Sequence
aagtgtagtatggaacaaggtctgt

SEQ ID NO: 59133 - DNA, 25 bp, Probe Sequence
acaagtgtagtatggaacaaggtct

SEQ ID NO: 59134 - DNA, 25 bp, Probe Sequence
agagttacaagtgtagtatggaaca

SEQ ID NO: 59135 - DNA, 25 bp, Probe Sequence
gtacttccacagttatgattgtcct

SEQ ID NO: 59136 - DNA, 25 bp, Probe Sequence
tgtacttccacagttatgattgtcc

SEQ ID NO: 59137 - DNA, 25 bp, Probe Sequence
gtgtagtatggaacaaggtctgtac

SEQ ID NO: 59138 - DNA, 25 bp, Probe Sequence
tgcttatagaacatcagaagactca

SEQ ID NO: 59139 - DNA, 25 bp, Probe Sequence
ttgcttatagaacatcagaagactc

SEQ ID NO: 59140 - DNA, 25 bp, Probe Sequence
gcttatagaacatcagaagactcat

SEQ ID NO: 59141 - DNA, 25 bp, Probe Sequence
attgcttatagaacatcagaagact

SEQ ID NO: 59142 - DNA, 25 bp, Probe Sequence
aaactaaattgggaaggtgctattg

SEQ ID NO: 59143 - DNA, 25 bp, Probe Sequence
ggtgaaggtagtaccattgtatgta

SEQ ID NO: 59144 - DNA, 25 bp, Probe Sequence
tgaaactaaattgggaaggtgctat

SEQ ID NO: 59145 - DNA, 25 bp, Probe Sequence
gaaactaaattgggaaggtgctatt

SEQ ID NO: 59146 - DNA, 25 bp, Probe Sequence
ttgaaactaaattgggaaggtgcta

SEQ ID NO: 59147 - DNA, 25 bp, Probe Sequence
aacttgaaactaaattgggaaggtg

SEQ ID NO: 59148 - DNA, 25 bp, Probe Sequence
aaacttgaaactaaattgggaaggt

SEQ ID NO: 59149 - DNA, 25 bp, Probe Sequence
gtgctcatcttgaaacttgaaacta

SEQ ID NO: 59150 - DNA, 25 bp, Probe Sequence
gaaacttgaaactaaattgggaagg

SEQ ID NO: 59151 - DNA, 25 bp, Probe Sequence
tgctcatcttgaaacttgaaactaa

SEQ ID NO: 59152 - DNA, 25 bp, Probe Sequence
ttatagaacatcagaagactcatct

SEQ ID NO: 59153 - DNA, 25 bp, Probe Sequence
tttcgctaaacttctgactttcata

SEQ ID NO: 59154 - DNA, 25 bp, Probe Sequence
aactaaattgggaaggtgctattgc

SEQ ID NO: 59155 - DNA, 25 bp, Probe Sequence
cttgaaacttgaaactaaattggga

SEQ ID NO: 59156 - DNA, 25 bp, Probe Sequence
tcttgaaacttgaaactaaattggg

SEQ ID NO: 59157 - DNA, 25 bp, Probe Sequence
ttcgctaaacttctgactttcatat

SEQ ID NO: 59158 - DNA, 25 bp, Probe Sequence
atggtgctcatcttgaaacttgaaa

SEQ ID NO: 59159 - DNA, 25 bp, Probe Sequence
cttgaaactaaattgggaaggtgct

SEQ ID NO: 59160 - DNA, 25 bp, Probe Sequence
cttatagaacatcagaagactcatc

SEQ ID NO: 59161 - DNA, 25 bp, Probe Sequence
tgaaacttgaaactaaattgggaag

SEQ ID NO: 59162 - DNA, 25 bp, Probe Sequence
ggtagttccattagccagtgttatt

SEQ ID NO: 59163 - DNA, 25 bp, Probe Sequence
ggatggtatagttatgttgcctgga

SEQ ID NO: 59164 - DNA, 25 bp, Probe Sequence
acagcaggatggtatagttatgttg

SEQ ID NO: 59165 - DNA, 25 bp, Probe Sequence
tacagcaggatggtatagttatgtt

SEQ ID NO: 59166 - DNA, 25 bp, Probe Sequence
ttacagcaggatggtatagttatgt

SEQ ID NO: 59167 - DNA, 25 bp, Probe Sequence
cggtagttccattagccagtgttat

SEQ ID NO: 59168 - DNA, 25 bp, Probe Sequence
aggatggtatagttatgttgcctgg

SEQ ID NO: 59169 - DNA, 25 bp, Probe Sequence
cttaggcttctctttgcgaaataaa

SEQ ID NO: 59170 - DNA, 25 bp, Probe Sequence
tcttaggcttctctttgcgaaataa

SEQ ID NO: 59171 - DNA, 25 bp, Probe Sequence
ttcttaggcttctctttgcgaaata

SEQ ID NO: 59172 - DNA, 25 bp, Probe Sequence
tggtataaagtgttctctctggaaa

SEQ ID NO: 59173 - DNA, 25 bp, Probe Sequence
atggtataaagtgttctctctggaa

SEQ ID NO: 59174 - DNA, 25 bp, Probe Sequence
attcttaggcttctctttgcgaaat

SEQ ID NO: 59175 - DNA, 25 bp, Probe Sequence
tatggtataaagtgttctctctgga

SEQ ID NO: 59176 - DNA, 25 bp, Probe Sequence
aattcttaggcttctctttgcgaaa

SEQ ID NO: 59177 - DNA, 25 bp, Probe Sequence
aaattcttaggcttctctttgcgaa

SEQ ID NO: 59178 - DNA, 25 bp, Probe Sequence
taaagtgttctctctggaaatgttt

SEQ ID NO: 59179 - DNA, 25 bp, Probe Sequence
tttacagcaggatggtatagttatg

SEQ ID NO: 59180 - DNA, 25 bp, Probe Sequence
ataaagtgttctctctggaaatgtt

SEQ ID NO: 59181 - DNA, 25 bp, Probe Sequence
ggtataaagtgttctctctggaaat

SEQ ID NO: 59182 - DNA, 25 bp, Probe Sequence
gttacagactaccggattacagatt

SEQ ID NO: 59183 - DNA, 25 bp, Probe Sequence
ttatggtataaagtgttctctctgg

SEQ ID NO: 59184 - DNA, 25 bp, Probe Sequence
agttacagactaccggattacagat

SEQ ID NO: 59185 - DNA, 25 bp, Probe Sequence
tataaagtgttctctctggaaatgt

SEQ ID NO: 59186 - DNA, 25 bp, Probe Sequence
ggtagttccattagccagtgttatt

SEQ ID NO: 59187 - DNA, 25 bp, Probe Sequence
ggatggtatagttatgttgcctgga

SEQ ID NO: 59188 - DNA, 25 bp, Probe Sequence
acagcaggatggtatagttatgttg

SEQ ID NO: 59189 - DNA, 25 bp, Probe Sequence
tacagcaggatggtatagttatgtt

SEQ ID NO: 59190 - DNA, 25 bp, Probe Sequence
ttacagcaggatggtatagttatgt

SEQ ID NO: 59191 - DNA, 25 bp, Probe Sequence
cggtagttccattagccagtgttat

SEQ ID NO: 59192 - DNA, 25 bp, Probe Sequence
aggatggtatagttatgttgcctgg

SEQ ID NO: 59193 - DNA, 25 bp, Probe Sequence
cttaggcttctctttgcgaaataaa

SEQ ID NO: 59194 - DNA, 25 bp, Probe Sequence
tcttaggcttctctttgcgaaataa

SEQ ID NO: 59195 - DNA, 25 bp, Probe Sequence
ttcttaggcttctctttgcgaaata

SEQ ID NO: 59196 - DNA, 25 bp, Probe Sequence
tggtataaagtgttctctctggaaa

SEQ ID NO: 59197 - DNA, 25 bp, Probe Sequence
atggtataaagtgttctctctggaa

SEQ ID NO: 59198 - DNA, 25 bp, Probe Sequence
attcttaggcttctctttgcgaaat

SEQ ID NO: 59199 - DNA, 25 bp, Probe Sequence
tatggtataaagtgttctctctgga

SEQ ID NO: 59200 - DNA, 25 bp, Probe Sequence
aattcttaggcttctctttgcgaaa

SEQ ID NO: 59201 - DNA, 25 bp, Probe Sequence
aaattcttaggcttctctttgcgaa

SEQ ID NO: 59202 - DNA, 25 bp, Probe Sequence
taaagtgttctctctggaaatgttt

SEQ ID NO: 59203 - DNA, 25 bp, Probe Sequence
tttacagcaggatggtatagttatg

SEQ ID NO: 59204 - DNA, 25 bp, Probe Sequence
ataaagtgttctctctggaaatgtt

SEQ ID NO: 59205 - DNA, 25 bp, Probe Sequence
ggtataaagtgttctctctggaaat

SEQ ID NO: 59206 - DNA, 25 bp, Probe Sequence
gttacagactaccggattacagatt

SEQ ID NO: 59207 - DNA, 25 bp, Probe Sequence
ttatggtataaagtgttctctctgg

SEQ ID NO: 59208 - DNA, 25 bp, Probe Sequence
agttacagactaccggattacagat

SEQ ID NO: 59209 - DNA, 25 bp, Probe Sequence
tataaagtgttctctctggaaatgt

SEQ ID NO: 59210 - DNA, 25 bp, Probe Sequence
aacgtgtgtatcaagtatgacattc

SEQ ID NO: 59211 - DNA, 25 bp, Probe Sequence
acgtgtgtatcaagtatgacattcc

SEQ ID NO: 59212 - DNA, 25 bp, Probe Sequence
cgtgtgtatcaagtatgacattccc

SEQ ID NO: 59213 - DNA, 25 bp, Probe Sequence
gtttcagagactccaaagaagaaat

SEQ ID NO: 59214 - DNA, 25 bp, Probe Sequence
aagagcagagcttacttcattgtct

SEQ ID NO: 59215 - DNA, 25 bp, Probe Sequence
cgtttcagagactccaaagaagaaa

SEQ ID NO: 59216 - DNA, 25 bp, Probe Sequence
aaacgtgtgtatcaagtatgacatt

SEQ ID NO: 59217 - DNA, 25 bp, Probe Sequence
gcgtttcagagactccaaagaagaa

SEQ ID NO: 59218 - DNA, 25 bp, Probe Sequence
aagcgtttcagagactccaaagaag

SEQ ID NO: 59219 - DNA, 25 bp, Probe Sequence
gaagcgtttcagagactccaaagaa

SEQ ID NO: 59220 - DNA, 25 bp, Probe Sequence
tgaagaacagaagacaggaagcgtt

SEQ ID NO: 59221 - DNA, 25 bp, Probe Sequence
aagaacagaagacaggaagcgtttc

SEQ ID NO: 59222 - DNA, 25 bp, Probe Sequence
gaagaacagaagacaggaagcgttt

SEQ ID NO: 59223 - DNA, 25 bp, Probe Sequence
atcaggaaagtttgagaaaagcatc

SEQ ID NO: 59224 - DNA, 25 bp, Probe Sequence
tcaggaaagtttgagaaaagcatct

SEQ ID NO: 59225 - DNA, 25 bp, Probe Sequence
taaagagcagagcttacttcattgt

SEQ ID NO: 59226 - DNA, 25 bp, Probe Sequence
actaaagagcagagcttacttcatt

SEQ ID NO: 59227 - DNA, 25 bp, Probe Sequence
ctaaagagcagagcttacttcattg

SEQ ID NO: 59228 - DNA, 25 bp, Probe Sequence
tactaaagagcagagcttacttcat

SEQ ID NO: 59229 - DNA, 25 bp, Probe Sequence
atactaaagagcagagcttacttca

SEQ ID NO: 59230 - DNA, 25 bp, Probe Sequence
gatcaggaaagtttgagaaaagcat

SEQ ID NO: 59231 - DNA, 25 bp, Probe Sequence
caggatcaggaaagtttgagaaaag

SEQ ID NO: 59232 - DNA, 25 bp, Probe Sequence
acaggaatcaaagtgttaggaacat

SEQ ID NO: 59233 - DNA, 25 bp, Probe Sequence
aaagagcagagcttacttcattgtc

SEQ ID NO: 59234 - DNA, 25 bp, Probe Sequence
aagtaaggacattctacagcaagta

SEQ ID NO: 59235 - DNA, 25 bp, Probe Sequence
caggcattggaagacttagattatc

SEQ ID NO: 59236 - DNA, 25 bp, Probe Sequence
gcaggcattggaagacttagattat

SEQ ID NO: 59237 - DNA, 25 bp, Probe Sequence
aggtaactacttaatgctgacacat

SEQ ID NO: 59238 - DNA, 25 bp, Probe Sequence
tgagaacaactacatcaggattacc

SEQ ID NO: 59239 - DNA, 25 bp, Probe Sequence
gtcaacaatgaataaggaacagcaa

SEQ ID NO: 59240 - DNA, 25 bp, Probe Sequence
agtctatcttagcgtcctgtgaatt

SEQ ID NO: 59241 - DNA, 25 bp, Probe Sequence
aagtctatcttagcgtcctgtgaat

SEQ ID NO: 59242 - DNA, 25 bp, Probe Sequence
ttggaagacttagattatctggcag

SEQ ID NO: 59243 - DNA, 25 bp, Probe Sequence
ttgactgtgtagatgaagtgctaac

SEQ ID NO: 59244 - DNA, 25 bp, Probe Sequence
atggatcaggtaactacttaatgct

SEQ ID NO: 59245 - DNA, 25 bp, Probe Sequence
attggaagacttagattatctggca

SEQ ID NO: 59246 - DNA, 25 bp, Probe Sequence
cattggaagacttagattatctggc

SEQ ID NO: 59247 - DNA, 25 bp, Probe Sequence
gcattggaagacttagattatctgg

SEQ ID NO: 59248 - DNA, 25 bp, Probe Sequence
ggcattggaagacttagattatctg

SEQ ID NO: 59249 - DNA, 25 bp, Probe Sequence
gatggatcaggtaactacttaatgc

SEQ ID NO: 59250 - DNA, 25 bp, Probe Sequence
aggcattggaagacttagattatct

SEQ ID NO: 59251 - DNA, 25 bp, Probe Sequence
ctgtgtagatgaagtgctaacaatc

SEQ ID NO: 59252 - DNA, 25 bp, Probe Sequence
actgtgtagatgaagtgctaacaat

SEQ ID NO: 59253 - DNA, 25 bp, Probe Sequence
tgtgtcaacaatgaataaggaacag

SEQ ID NO: 59254 - DNA, 25 bp, Probe Sequence
ctgtgtcaacaatgaataaggaaca

SEQ ID NO: 59255 - DNA, 25 bp, Probe Sequence
ggtaactacttaatgctgacacata

SEQ ID NO: 59256 - DNA, 25 bp, Probe Sequence
gttactcaatcaccaagaagatgcc

SEQ ID NO: 59257 - DNA, 25 bp, Probe Sequence
gcttaccaagacacaactctgaatt

SEQ ID NO: 59258 - DNA, 25 bp, Probe Sequence
tgtaaataaacgtgggacatttggc

SEQ ID NO: 59259 - DNA, 25 bp, Probe Sequence
atgtaaataaacgtgggacatttgg

SEQ ID NO: 59260 - DNA, 25 bp, Probe Sequence
gtaaataaacgtgggacatttggcc

SEQ ID NO: 59261 - DNA, 25 bp, Probe Sequence
taaataaacgtgggacatttggccc

SEQ ID NO: 59262 - DNA, 25 bp, Probe Sequence
ggtgccattagacatcttgattatt

SEQ ID NO: 59263 - DNA, 25 bp, Probe Sequence
tggtgccattagacatcttgattat

SEQ ID NO: 59264 - DNA, 25 bp, Probe Sequence
gaattggaactagaatgtgtgactc

SEQ ID NO: 59265 - DNA, 25 bp, Probe Sequence
ctggtgccattagacatcttgatta

SEQ ID NO: 59266 - DNA, 25 bp, Probe Sequence
gaggaattggaactagaatgtgtga

SEQ ID NO: 59267 - DNA, 25 bp, Probe Sequence
aaggaggaattggaactagaatgtg

SEQ ID NO: 59268 - DNA, 25 bp, Probe Sequence
ggaattggaactagaatgtgtgact

SEQ ID NO: 59269 - DNA, 25 bp, Probe Sequence
aggaattggaactagaatgtgtgac

SEQ ID NO: 59270 - DNA, 25 bp, Probe Sequence
aattggaactagaatgtgtgactct

SEQ ID NO: 59271 - DNA, 25 bp, Probe Sequence
attggaactagaatgtgtgactctg

SEQ ID NO: 59272 - DNA, 25 bp, Probe Sequence
gtgccattagacatcttgattattg

SEQ ID NO: 59273 - DNA, 25 bp, Probe Sequence
ggaggaattggaactagaatgtgtg

SEQ ID NO: 59274 - DNA, 25 bp, Probe Sequence
aggaggaattggaactagaatgtgt

SEQ ID NO: 59275 - DNA, 25 bp, Probe Sequence
ggagtgtagtcaacagtaagttctt

SEQ ID NO: 59276 - DNA, 25 bp, Probe Sequence
taatcatgctcaatgtctacaggtt

SEQ ID NO: 59277 - DNA, 25 bp, Probe Sequence
ttgttaagcagcacttatgtagact

SEQ ID NO: 59278 - DNA, 25 bp, Probe Sequence
ttgcttctatgatacagagatgtct

SEQ ID NO: 59279 - DNA, 25 bp, Probe Sequence
gtaatcatgctcaatgtctacaggt

SEQ ID NO: 59280 - DNA, 25 bp, Probe Sequence
tgttaagcagcacttatgtagactg

SEQ ID NO: 59281 - DNA, 25 bp, Probe Sequence
ttggaactagaatgtgtgactctgt

SEQ ID NO: 59282 - DNA, 25 bp, Probe Sequence
acatccagacgctattaccaacatt

SEQ ID NO: 59283 - DNA, 25 bp, Probe Sequence
ttcaagacatccagacgctattacc

SEQ ID NO: 59284 - DNA, 25 bp, Probe Sequence
tgccattagacatcttgattattgt

SEQ ID NO: 59285 - DNA, 25 bp, Probe Sequence
tgcttctatgatacagagatgtcta

SEQ ID NO: 59286 - DNA, 25 bp, Probe Sequence
tatgaatatgtgtggcagtgaagag

SEQ ID NO: 59287 - DNA, 25 bp, Probe Sequence
ttgtatgaatatgtgtggcagtgaa

SEQ ID NO: 59288 - DNA, 25 bp, Probe Sequence
gtatgaatatgtgtggcagtgaaga

SEQ ID NO: 59289 - DNA, 25 bp, Probe Sequence
tgtatgaatatgtgtggcagtgaag

SEQ ID NO: 59290 - DNA, 25 bp, Probe Sequence
tactcttgaacttcttactggaaca

SEQ ID NO: 59291 - DNA, 25 bp, Probe Sequence
actcttgaacttcttactggaacaa

SEQ ID NO: 59292 - DNA, 25 bp, Probe Sequence
tcttgaacttcttactggaacaatg

SEQ ID NO: 59293 - DNA, 25 bp, Probe Sequence
cttgaacttcttactggaacaatgt

SEQ ID NO: 59294 - DNA, 25 bp, Probe Sequence
ctcttgaacttcttactggaacaat

SEQ ID NO: 59295 - DNA, 25 bp, Probe Sequence
gatgtaagagtgttcaactgtgagt

SEQ ID NO: 59296 - DNA, 25 bp, Probe Sequence
tgactgctgaatcatcatatctact

SEQ ID NO: 59297 - DNA, 25 bp, Probe Sequence
aacatcttaggtataacagcacaat

SEQ ID NO: 59298 - DNA, 25 bp, Probe Sequence
ggtgaagacatgctacaactactat

SEQ ID NO: 59299 - DNA, 25 bp, Probe Sequence
atgtactcttgaacttcttactgga

SEQ ID NO: 59300 - DNA, 25 bp, Probe Sequence
tgtactcttgaacttcttactggaa

SEQ ID NO: 59301 - DNA, 25 bp, Probe Sequence
gaatatgtgtggcagtgaagagaac

SEQ ID NO: 59302 - DNA, 25 bp, Probe Sequence
ggatgtaagagtgttcaactgtgag

SEQ ID NO: 59303 - DNA, 25 bp, Probe Sequence
acatcttaggtataacagcacaatt

SEQ ID NO: 59304 - DNA, 25 bp, Probe Sequence
gtactcttgaacttcttactggaac

SEQ ID NO: 59305 - DNA, 25 bp, Probe Sequence
atgaatatgtgtggcagtgaagaga

SEQ ID NO: 59306 - DNA, 25 bp, Probe Sequence
aatgtactcttgaacttcttactgg

SEQ ID NO: 59307 - DNA, 25 bp, Probe Sequence
tgaatatgtgtggcagtgaagagaa

SEQ ID NO: 59308 - DNA, 25 bp, Probe Sequence
ttgaactggttatggaaggtgactt

SEQ ID NO: 59309 - DNA, 25 bp, Probe Sequence
gtgaagacatgctacaactactatt

SEQ ID NO: 59310 - DNA, 25 bp, Probe Sequence
ataagacaccagcagtagatacaac

SEQ ID NO: 59311 - DNA, 25 bp, Probe Sequence
acagtataagacaccagcagtagat

SEQ ID NO: 59312 - DNA, 25 bp, Probe Sequence
cagtataagacaccagcagtagata

SEQ ID NO: 59313 - DNA, 25 bp, Probe Sequence
atgacagtataagacaccagcagta

SEQ ID NO: 59314 - DNA, 25 bp, Probe Sequence
tataagacaccagcagtagatacaa

SEQ ID NO: 59315 - DNA, 25 bp, Probe Sequence
gacagtataagacaccagcagtaga

SEQ ID NO: 59316 - DNA, 25 bp, Probe Sequence
accagcagtagatacaactatgatg

SEQ ID NO: 59317 - DNA, 25 bp, Probe Sequence
caccagcagtagatacaactatgat

SEQ ID NO: 59318 - DNA, 25 bp, Probe Sequence
ccagcagtagatacaactatgatga

SEQ ID NO: 59319 - DNA, 25 bp, Probe Sequence
gttgtctaatggtactctggattca

SEQ ID NO: 59320 - DNA, 25 bp, Probe Sequence
tgttgtctaatggtactctggattc

SEQ ID NO: 59321 - DNA, 25 bp, Probe Sequence
tgacagtataagacaccagcagtag

SEQ ID NO: 59322 - DNA, 25 bp, Probe Sequence
gacaccagcagtagatacaactatg

SEQ ID NO: 59323 - DNA, 25 bp, Probe Sequence
agacaccagcagtagatacaactat

SEQ ID NO: 59324 - DNA, 25 bp, Probe Sequence
atgttgtctaatggtactctggatt

SEQ ID NO: 59325 - DNA, 25 bp, Probe Sequence
agcagtagatacaactatgatgaca

SEQ ID NO: 59326 - DNA, 25 bp, Probe Sequence
aagacaccagcagtagatacaacta

SEQ ID NO: 59327 - DNA, 25 bp, Probe Sequence
taagacaccagcagtagatacaact

SEQ ID NO: 59328 - DNA, 25 bp, Probe Sequence
acaccagcagtagatacaactatga

SEQ ID NO: 59329 - DNA, 25 bp, Probe Sequence
acagtagcatgacagtataagacac

SEQ ID NO: 59330 - DNA, 25 bp, Probe Sequence
cacagtagcatgacagtataagaca

SEQ ID NO: 59331 - DNA, 25 bp, Probe Sequence
cagcagtagatacaactatgatgac

SEQ ID NO: 59332 - DNA, 25 bp, Probe Sequence
taactgatgtcatacaacctggaat

SEQ ID NO: 59333 - DNA, 25 bp, Probe Sequence
tgagtaactgatgtcatacaacctg

SEQ ID NO: 59334 - DNA, 25 bp, Probe Sequence
taagttgttgcctattcagtgttac

SEQ ID NO: 59335 - DNA, 25 bp, Probe Sequence
aataagttgttgcctattcagtgtt

SEQ ID NO: 59336 - DNA, 25 bp, Probe Sequence
ataagttgttgcctattcagtgtta

SEQ ID NO: 59337 - DNA, 25 bp, Probe Sequence
tgttgcctattcagtgttacagatt

SEQ ID NO: 59338 - DNA, 25 bp, Probe Sequence
ttgttgcctattcagtgttacagat

SEQ ID NO: 59339 - DNA, 25 bp, Probe Sequence
aagttgttgcctattcagtgttaca

SEQ ID NO: 59340 - DNA, 25 bp, Probe Sequence
gttgttgcctattcagtgttacaga

SEQ ID NO: 59341 - DNA, 25 bp, Probe Sequence
agttgttgcctattcagtgttacag

SEQ ID NO: 59342 - DNA, 25 bp, Probe Sequence
agatttcaagagagcctacagtatg

SEQ ID NO: 59343 - DNA, 25 bp, Probe Sequence
gagatttcaagagagcctacagtat

SEQ ID NO: 59344 - DNA, 25 bp, Probe Sequence
caagagagcctacagtatgaaatca

SEQ ID NO: 59345 - DNA, 25 bp, Probe Sequence
tgcctattcagtgttacagatttct

SEQ ID NO: 59346 - DNA, 25 bp, Probe Sequence
gttgcctattcagtgttacagattt

SEQ ID NO: 59347 - DNA, 25 bp, Probe Sequence
taagaagttgatgtgcttgtttgac

SEQ ID NO: 59348 - DNA, 25 bp, Probe Sequence
ttaagaagttgatgtgcttgtttga

SEQ ID NO: 59349 - DNA, 25 bp, Probe Sequence
ttgcctattcagtgttacagatttc

SEQ ID NO: 59350 - DNA, 25 bp, Probe Sequence
gcctattcagtgttacagatttctt

SEQ ID NO: 59351 - DNA, 25 bp, Probe Sequence
agtgaggaggcagtaaatgaagtta

SEQ ID NO: 59352 - DNA, 25 bp, Probe Sequence
tttaagaagttgatgtgcttgtttg

SEQ ID NO: 59353 - DNA, 25 bp, Probe Sequence
aaataagttgttgcctattcagtgt

SEQ ID NO: 59354 - DNA, 25 bp, Probe Sequence
tcaagagagcctacagtatgaaatc

SEQ ID NO: 59355 - DNA, 25 bp, Probe Sequence
gatttcaagagagcctacagtatga

SEQ ID NO: 59356 - DNA, 25 bp, Probe Sequence
acttgacagtgacttgaaacatttg

SEQ ID NO: 59357 - DNA, 25 bp, Probe Sequence
tgagatttcaagagagcctacagta

SEQ ID NO: 59358 - DNA, 25 bp, Probe Sequence
tgttatgtgcttagtaatgttctgg

SEQ ID NO: 59359 - DNA, 25 bp, Probe Sequence
gttatgtgcttagtaatgttctgga

SEQ ID NO: 59360 - DNA, 25 bp, Probe Sequence
acactcaccttcaggaccttaataa

SEQ ID NO: 59361 - DNA, 25 bp, Probe Sequence
tgagttgttatgtgcttagtaatgt

SEQ ID NO: 59362 - DNA, 25 bp, Probe Sequence
gacactcaccttcaggaccttaata

SEQ ID NO: 59363 - DNA, 25 bp, Probe Sequence
tatgtgcttagtaatgttctggatt

SEQ ID NO: 59364 - DNA, 25 bp, Probe Sequence
ttatgtgcttagtaatgttctggat

SEQ ID NO: 59365 - DNA, 25 bp, Probe Sequence
tgtgcttagtaatgttctggattat

SEQ ID NO: 59366 - DNA, 25 bp, Probe Sequence
atgtgcttagtaatgttctggatta

SEQ ID NO: 59367 - DNA, 25 bp, Probe Sequence
ttgttatgtgcttagtaatgttctg

SEQ ID NO: 59368 - DNA, 25 bp, Probe Sequence
gttgttatgtgcttagtaatgttct

SEQ ID NO: 59369 - DNA, 25 bp, Probe Sequence
agttgttatgtgcttagtaatgttc

SEQ ID NO: 59370 - DNA, 25 bp, Probe Sequence
gagttgttatgtgcttagtaatgtt

SEQ ID NO: 59371 - DNA, 25 bp, Probe Sequence
atgagttgttatgtgcttagtaatg

SEQ ID NO: 59372 - DNA, 25 bp, Probe Sequence
attctaaagtggatgacaaatggga

SEQ ID NO: 59373 - DNA, 25 bp, Probe Sequence
tctaaagtggatgacaaatgggaaa

SEQ ID NO: 59374 - DNA, 25 bp, Probe Sequence
gtgaagaaacagagcagattaacaa

SEQ ID NO: 59375 - DNA, 25 bp, Probe Sequence
cagtgaagaaacagagcagattaac

SEQ ID NO: 59376 - DNA, 25 bp, Probe Sequence
agtgaagaaacagagcagattaaca

SEQ ID NO: 59377 - DNA, 25 bp, Probe Sequence
aagaaacagagcagattaacaaaca

SEQ ID NO: 59378 - DNA, 25 bp, Probe Sequence
ctgaggtaggtttcccatttcttac

SEQ ID NO: 59379 - DNA, 25 bp, Probe Sequence
agaaacagagcagattaacaaacat

SEQ ID NO: 59380 - DNA, 25 bp, Probe Sequence
ttctaaagtggatgacaaatgggaa

SEQ ID NO: 59381 - DNA, 25 bp, Probe Sequence
aattctaaagtggatgacaaatggg

SEQ ID NO: 59382 - DNA, 25 bp, Probe Sequence
ctgacagcattccaataaagcatac

SEQ ID NO: 59383 - DNA, 25 bp, Probe Sequence
cctgacagcattccaataaagcata

SEQ ID NO: 59384 - DNA, 25 bp, Probe Sequence
tgacagcattccaataaagcatacg

SEQ ID NO: 59385 - DNA, 25 bp, Probe Sequence
gacagcattccaataaagcatacgg

SEQ ID NO: 59386 - DNA, 25 bp, Probe Sequence
acctgacagcattccaataaagcat

SEQ ID NO: 59387 - DNA, 25 bp, Probe Sequence
acagcattccaataaagcatacggg

SEQ ID NO: 59388 - DNA, 25 bp, Probe Sequence
gggtctttgagtgtctttctccaag

SEQ ID NO: 59389 - DNA, 25 bp, Probe Sequence
gacctgacagcattccaataaagca

SEQ ID NO: 59390 - DNA, 25 bp, Probe Sequence
tttgagtgtctttctccaagctgag

SEQ ID NO: 59391 - DNA, 25 bp, Probe Sequence
ctttgagtgtctttctccaagctga

SEQ ID NO: 59392 - DNA, 25 bp, Probe Sequence
tctttgagtgtctttctccaagctg

SEQ ID NO: 59393 - DNA, 25 bp, Probe Sequence
gtctttgagtgtctttctccaagct

SEQ ID NO: 59394 - DNA, 25 bp, Probe Sequence
ggtctttgagtgtctttctccaagc

SEQ ID NO: 59395 - DNA, 25 bp, Probe Sequence
cagcattccaataaagcatacggga

SEQ ID NO: 59396 - DNA, 25 bp, Probe Sequence
attccaataaagcatacgggaacat

SEQ ID NO: 59397 - DNA, 25 bp, Probe Sequence
cggacctgacagcattccaataaag

SEQ ID NO: 59398 - DNA, 25 bp, Probe Sequence
actcagtcacttgcagaacaggatg

SEQ ID NO: 59399 - DNA, 25 bp, Probe Sequence
gactcagtcacttgcagaacaggat

SEQ ID NO: 59400 - DNA, 25 bp, Probe Sequence
ttccaataaagcatacgggaacatg

SEQ ID NO: 59401 - DNA, 25 bp, Probe Sequence
cattccaataaagcatacgggaaca

SEQ ID NO: 59402 - DNA, 25 bp, Probe Sequence
ggacctgacagcattccaataaagc

SEQ ID NO: 59403 - DNA, 25 bp, Probe Sequence
gaacaggatgggaccgagatttcag

SEQ ID NO: 59404 - DNA, 25 bp, Probe Sequence
cagaacaggatgggaccgagatttc

SEQ ID NO: 59405 - DNA, 25 bp, Probe Sequence
gcattccaataaagcatacgggaac

SEQ ID NO: 59406 - DNA, 25 bp, Probe Sequence
ataacaatgatggcagcaattaagg

SEQ ID NO: 59407 - DNA, 25 bp, Probe Sequence
taacaatgatggcagcaattaaggt

SEQ ID NO: 59408 - DNA, 25 bp, Probe Sequence
ttatgcttgagttgttatgtgccat

SEQ ID NO: 59409 - DNA, 25 bp, Probe Sequence
aataacaatgatggcagcaattaag

SEQ ID NO: 59410 - DNA, 25 bp, Probe Sequence
tatgcttgagttgttatgtgccata

SEQ ID NO: 59411 - DNA, 25 bp, Probe Sequence
aacaatgatggcagcaattaaggtc

SEQ ID NO: 59412 - DNA, 25 bp, Probe Sequence
atgcttgagttgttatgtgccatat

SEQ ID NO: 59413 - DNA, 25 bp, Probe Sequence
tgcttgagttgttatgtgccatatt

SEQ ID NO: 59414 - DNA, 25 bp, Probe Sequence
aagaaataacaatgatggcagcaat

SEQ ID NO: 59415 - DNA, 25 bp, Probe Sequence
atttatgcttgagttgttatgtgcc

SEQ ID NO: 59416 - DNA, 25 bp, Probe Sequence
gccatatttgctttgaactctgatt

SEQ ID NO: 59417 - DNA, 25 bp, Probe Sequence
ggtcacagaaatcattaggtaaagg

SEQ ID NO: 59418 - DNA, 25 bp, Probe Sequence
gatttatgcttgagttgttatgtgc

SEQ ID NO: 59419 - DNA, 25 bp, Probe Sequence
caagaaataacaatgatggcagcaa

SEQ ID NO: 59420 - DNA, 25 bp, Probe Sequence
gattaaactgtgatggatgggctat

SEQ ID NO: 59421 - DNA, 25 bp, Probe Sequence
cagcaattaaggtcacagaaatcat

SEQ ID NO: 59422 - DNA, 25 bp, Probe Sequence
agaaataacaatgatggcagcaatt

SEQ ID NO: 59423 - DNA, 25 bp, Probe Sequence
attaaactgtgatggatgggctatc

SEQ ID NO: 59424 - DNA, 25 bp, Probe Sequence
ttagattaaactgtgatggatgggc

SEQ ID NO: 59425 - DNA, 25 bp, Probe Sequence
ccatcttgatttatgcttgagttgt

SEQ ID NO: 59426 - DNA, 25 bp, Probe Sequence
tccatcttgatttatgcttgagttg

SEQ ID NO: 59427 - DNA, 25 bp, Probe Sequence
tacatctcagtccataaagcaaagc

SEQ ID NO: 59428 - DNA, 25 bp, Probe Sequence
gaagaaggaattagacactctgcct

SEQ ID NO: 59429 - DNA, 25 bp, Probe Sequence
ttagatacgtgttcctgaatgaagc

SEQ ID NO: 59430 - DNA, 25 bp, Probe Sequence
tgctgatattacatctcgttatgga

SEQ ID NO: 59431 - DNA, 25 bp, Probe Sequence
gtgctgatattacatctcgttatgg

SEQ ID NO: 59432 - DNA, 25 bp, Probe Sequence
gaagcaggatgaagtaagaggaatg

SEQ ID NO: 59433 - DNA, 25 bp, Probe Sequence
tgaagcaggatgaagtaagaggaat

SEQ ID NO: 59434 - DNA, 25 bp, Probe Sequence
tacttaacacttgtagccatcaact

SEQ ID NO: 59435 - DNA, 25 bp, Probe Sequence
gtctcttactgtactgtctatctgc

SEQ ID NO: 59436 - DNA, 25 bp, Probe Sequence
ctcttagaattgtcactcagcataa

SEQ ID NO: 59437 - DNA, 25 bp, Probe Sequence
gctgatattacatctcgttatggaa

SEQ ID NO: 59438 - DNA, 25 bp, Probe Sequence
cttaacacttgtagccatcaactga

SEQ ID NO: 59439 - DNA, 25 bp, Probe Sequence
ttaacacttgtagccatcaactgac

SEQ ID NO: 59440 - DNA, 25 bp, Probe Sequence
acttaacacttgtagccatcaactg

SEQ ID NO: 59441 - DNA, 25 bp, Probe Sequence
tgtctcttactgtactgtctatctg

SEQ ID NO: 59442 - DNA, 25 bp, Probe Sequence
gaatcaacacttcataggctcactg

SEQ ID NO: 59443 - DNA, 25 bp, Probe Sequence
agaatcaacacttcataggctcact

SEQ ID NO: 59444 - DNA, 25 bp, Probe Sequence
gtacttaacacttgtagccatcaac

SEQ ID NO: 59445 - DNA, 25 bp, Probe Sequence
actgtctcttactgtactgtctatc

SEQ ID NO: 59446 - DNA, 25 bp, Probe Sequence
cttagaattgtcactcagcataatg

SEQ ID NO: 59447 - DNA, 25 bp, Probe Sequence
ctgtctcttactgtactgtctatct

SEQ ID NO: 59448 - DNA, 25 bp, Probe Sequence
ggtacttaacacttgtagccatcaa

SEQ ID NO: 59449 - DNA, 25 bp, Probe Sequence
ttcttactgtactgtctcttactgt

SEQ ID NO: 59450 - DNA, 25 bp, Probe Sequence
tcttagaattgtcactcagcataat

SEQ ID NO: 59451 - DNA, 25 bp, Probe Sequence
tgtgctgatattacatctcgttatg

SEQ ID NO: 59452 - DNA, 25 bp, Probe Sequence
aattgtgctgatattacatctcgtt

SEQ ID NO: 59453 - DNA, 25 bp, Probe Sequence
gagaatcaacacttcataggctcac

SEQ ID NO: 59454 - DNA, 25 bp, Probe Sequence
gtcaacagtgtgattctacttccta

SEQ ID NO: 59455 - DNA, 25 bp, Probe Sequence
atattaccgtcaacagtgtgattct

SEQ ID NO: 59456 - DNA, 25 bp, Probe Sequence
agatattaccgtcaacagtgtgatt

SEQ ID NO: 59457 - DNA, 25 bp, Probe Sequence
gatattaccgtcaacagtgtgattc

SEQ ID NO: 59458 - DNA, 25 bp, Probe Sequence
tattaccgtcaacagtgtgattcta

SEQ ID NO: 59459 - DNA, 25 bp, Probe Sequence
tcaacagtgtgattctacttcctaa

SEQ ID NO: 59460 - DNA, 25 bp, Probe Sequence
cagatattaccgtcaacagtgtgat

SEQ ID NO: 59461 - DNA, 25 bp, Probe Sequence
gattgctacctacagtgaagatgga

SEQ ID NO: 59462 - DNA, 25 bp, Probe Sequence
attaccgtcaacagtgtgattctac

SEQ ID NO: 59463 - DNA, 25 bp, Probe Sequence
ggaatatgaagaccacagaatgttc

SEQ ID NO: 59464 - DNA, 25 bp, Probe Sequence
attgctacctacagtgaagatggac

SEQ ID NO: 59465 - DNA, 25 bp, Probe Sequence
tacctacagtgaagatggactccta

SEQ ID NO: 59466 - DNA, 25 bp, Probe Sequence
taccgtcaacagtgtgattctactt

SEQ ID NO: 59467 - DNA, 25 bp, Probe Sequence
ttaccgtcaacagtgtgattctact

SEQ ID NO: 59468 - DNA, 25 bp, Probe Sequence
acagatattaccgtcaacagtgtga

SEQ ID NO: 59469 - DNA, 25 bp, Probe Sequence
gacagatattaccgtcaacagtgtg

SEQ ID NO: 59470 - DNA, 25 bp, Probe Sequence
tggaatatgaagaccacagaatgtt

SEQ ID NO: 59471 - DNA, 25 bp, Probe Sequence
ctggaatatgaagaccacagaatgt

SEQ ID NO: 59472 - DNA, 25 bp, Probe Sequence
acctacagtgaagatggactcctaa

SEQ ID NO: 59473 - DNA, 25 bp, Probe Sequence
cacgagaaggatgtgattggtattg

SEQ ID NO: 59474 - DNA, 25 bp, Probe Sequence
aagatggacattacattattagtgc

SEQ ID NO: 59475 - DNA, 25 bp, Probe Sequence
cgtcaacagtgtgattctacttcct

SEQ ID NO: 59476 - DNA, 25 bp, Probe Sequence
cgattgctacctacagtgaagatgg

SEQ ID NO: 59477 - DNA, 25 bp, Probe Sequence
ccgattgctacctacagtgaagatg

SEQ ID NO: 59478 - DNA, 25 bp, Probe Sequence
tgtctctatcatcaacttcactact

SEQ ID NO: 59479 - DNA, 25 bp, Probe Sequence
tctctatcatcaacttcactactca

SEQ ID NO: 59480 - DNA, 25 bp, Probe Sequence
gtctctatcatcaacttcactactc

SEQ ID NO: 59481 - DNA, 25 bp, Probe Sequence
gcaattcagtggattaagtacattc

SEQ ID NO: 59482 - DNA, 25 bp, Probe Sequence
ctctatcatcaacttcactactcat

SEQ ID NO: 59483 - DNA, 25 bp, Probe Sequence
ttgtctctatcatcaacttcactac

SEQ ID NO: 59484 - DNA, 25 bp, Probe Sequence
taagtacattctcattgttgtccag

SEQ ID NO: 59485 - DNA, 25 bp, Probe Sequence
cagtggattaagtacattctcattg

SEQ ID NO: 59486 - DNA, 25 bp, Probe Sequence
catcaccatcatccatctccagaag

SEQ ID NO: 59487 - DNA, 25 bp, Probe Sequence
aagtacattctcattgttgtccagc

SEQ ID NO: 59488 - DNA, 25 bp, Probe Sequence
tcagtggattaagtacattctcatt

SEQ ID NO: 59489 - DNA, 25 bp, Probe Sequence
ttcagtggattaagtacattctcat

SEQ ID NO: 59490 - DNA, 25 bp, Probe Sequence
attcagtggattaagtacattctca

SEQ ID NO: 59491 - DNA, 25 bp, Probe Sequence
ttaagtacattctcattgttgtcca

SEQ ID NO: 59492 - DNA, 25 bp, Probe Sequence
tgcaattcagtggattaagtacatt

SEQ ID NO: 59493 - DNA, 25 bp, Probe Sequence
atcaccatcatccatctccagaagt

SEQ ID NO: 59494 - DNA, 25 bp, Probe Sequence
tacattctcattgttgtccagccat

SEQ ID NO: 59495 - DNA, 25 bp, Probe Sequence
agtggattaagtacattctcattgt

SEQ ID NO: 59496 - DNA, 25 bp, Probe Sequence
atgcaattcagtggattaagtacat

SEQ ID NO: 59497 - DNA, 25 bp, Probe Sequence
tatgcaattcagtggattaagtaca

SEQ ID NO: 59498 - DNA, 25 bp, Probe Sequence
tcaccatcatccatctccagaagtt

SEQ ID NO: 59499 - DNA, 25 bp, Probe Sequence
caattcagtggattaagtacattct

SEQ ID NO: 59500 - DNA, 25 bp, Probe Sequence
tctcatgtaagtggaatcatacagt

SEQ ID NO: 59501 - DNA, 25 bp, Probe Sequence
attaagtacattctcattgttgtcc

SEQ ID NO: 59502 - DNA, 25 bp, Probe Sequence
ttaacctggtagacggtataaaagc

SEQ ID NO: 59503 - DNA, 25 bp, Probe Sequence
acggtataaaagcagtgcaaataaa

SEQ ID NO: 59504 - DNA, 25 bp, Probe Sequence
gacggtataaaagcagtgcaaataa

SEQ ID NO: 59505 - DNA, 25 bp, Probe Sequence
cggtataaaagcagtgcaaataaac

SEQ ID NO: 59506 - DNA, 25 bp, Probe Sequence
agacggtataaaagcagtgcaaata

SEQ ID NO: 59507 - DNA, 25 bp, Probe Sequence
tagacggtataaaagcagtgcaaat

SEQ ID NO: 59508 - DNA, 25 bp, Probe Sequence
taacctggtagacggtataaaagca

SEQ ID NO: 59509 - DNA, 25 bp, Probe Sequence
ggtataaaagcagtgcaaataaaca

SEQ ID NO: 59510 - DNA, 25 bp, Probe Sequence
tttaacctggtagacggtataaaag

SEQ ID NO: 59511 - DNA, 25 bp, Probe Sequence
gtagacggtataaaagcagtgcaaa

SEQ ID NO: 59512 - DNA, 25 bp, Probe Sequence
aacctggtagacggtataaaagcag

SEQ ID NO: 59513 - DNA, 25 bp, Probe Sequence
cctggtagacggtataaaagcagtg

SEQ ID NO: 59514 - DNA, 25 bp, Probe Sequence
ttttaacctggtagacggtataaaa

SEQ ID NO: 59515 - DNA, 25 bp, Probe Sequence
acctggtagacggtataaaagcagt

SEQ ID NO: 59516 - DNA, 25 bp, Probe Sequence
ggtagacggtataaaagcagtgcaa

SEQ ID NO: 59517 - DNA, 25 bp, Probe Sequence
ctggtagacggtataaaagcagtgc

SEQ ID NO: 59518 - DNA, 25 bp, Probe Sequence
tggtagacggtataaaagcagtgca

SEQ ID NO: 59519 - DNA, 25 bp, Probe Sequence
tcagccaagaatcctatcataatgt

SEQ ID NO: 59520 - DNA, 25 bp, Probe Sequence
tgttatctcagtccagaaccaatat

SEQ ID NO: 59521 - DNA, 25 bp, Probe Sequence
ttgttatctcagtccagaaccaata

SEQ ID NO: 59522 - DNA, 25 bp, Probe Sequence
ttcagccaagaatcctatcataatg

SEQ ID NO: 59523 - DNA, 25 bp, Probe Sequence
cagccaagaatcctatcataatgta

SEQ ID NO: 59524 - DNA, 25 bp, Probe Sequence
ctcagtccagaaccaatattatcgt

SEQ ID NO: 59525 - DNA, 25 bp, Probe Sequence
tcagtccagaaccaatattatcgta

SEQ ID NO: 59526 - DNA, 25 bp, Probe Sequence
tctcagtccagaaccaatattatcg

SEQ ID NO: 59527 - DNA, 25 bp, Probe Sequence
agccaagaatcctatcataatgtaa

SEQ ID NO: 59528 - DNA, 25 bp, Probe Sequence
cagtccagaaccaatattatcgtaa

SEQ ID NO: 59529 - DNA, 25 bp, Probe Sequence
aaagcagtagtccacaaagtattct

SEQ ID NO: 59530 - DNA, 25 bp, Probe Sequence
gtgtttgtttgttatctcagtccag

SEQ ID NO: 59531 - DNA, 25 bp, Probe Sequence
aagtgtttgtttgttatctcagtcc

SEQ ID NO: 59532 - DNA, 25 bp, Probe Sequence
agtgtttgtttgttatctcagtcca

SEQ ID NO: 59533 - DNA, 25 bp, Probe Sequence
gtagtccacaaagtattctgctcat

SEQ ID NO: 59534 - DNA, 25 bp, Probe Sequence
tatgtatttgctggtgtcgtgtaaa

SEQ ID NO: 59535 - DNA, 25 bp, Probe Sequence
gttatctcagtccagaaccaatatt

SEQ ID NO: 59536 - DNA, 25 bp, Probe Sequence
tgtttgtttgttatctcagtccaga

SEQ ID NO: 59537 - DNA, 25 bp, Probe Sequence
taaagcagtagtccacaaagtattc

SEQ ID NO: 59538 - DNA, 25 bp, Probe Sequence
tttgtttgttatctcagtccagaac

SEQ ID NO: 59539 - DNA, 25 bp, Probe Sequence
gtttgtttgttatctcagtccagaa

SEQ ID NO: 59540 - DNA, 25 bp, Probe Sequence
ctcttgctttaagtgtttgtttgtt

SEQ ID NO: 59541 - DNA, 25 bp, Probe Sequence
tttgttatctcagtccagaaccaat

SEQ ID NO: 59542 - DNA, 25 bp, Probe Sequence
gtatgtatttgctggtgtcgtgtaa

SEQ ID NO: 59543 - DNA, 25 bp, Probe Sequence
agcagaataagtgatggacattagt

SEQ ID NO: 59544 - DNA, 25 bp, Probe Sequence
catattagagtgactgagtgacctt

SEQ ID NO: 59545 - DNA, 25 bp, Probe Sequence
acattagcagaataagtgatggaca

SEQ ID NO: 59546 - DNA, 25 bp, Probe Sequence
tgacattagcagaataagtgatgga

SEQ ID NO: 59547 - DNA, 25 bp, Probe Sequence
gcagaataagtgatggacattagtt

SEQ ID NO: 59548 - DNA, 25 bp, Probe Sequence
gacattagcagaataagtgatggac

SEQ ID NO: 59549 - DNA, 25 bp, Probe Sequence
ataagtgatggacattagttgaacc

SEQ ID NO: 59550 - DNA, 25 bp, Probe Sequence
cattagcagaataagtgatggacat

SEQ ID NO: 59551 - DNA, 25 bp, Probe Sequence
ttaactcgttcttgaagcacagatt

SEQ ID NO: 59552 - DNA, 25 bp, Probe Sequence
tcatattagagtgactgagtgacct

SEQ ID NO: 59553 - DNA, 25 bp, Probe Sequence
atcatattagagtgactgagtgacc

SEQ ID NO: 59554 - DNA, 25 bp, Probe Sequence
attagcagaataagtgatggacatt

SEQ ID NO: 59555 - DNA, 25 bp, Probe Sequence
tagcagaataagtgatggacattag

SEQ ID NO: 59556 - DNA, 25 bp, Probe Sequence
ctgacattagcagaataagtgatgg

SEQ ID NO: 59557 - DNA, 25 bp, Probe Sequence
gcatgtcctgaatgaatgatctgta

SEQ ID NO: 59558 - DNA, 25 bp, Probe Sequence
cagaataagtgatggacattagttg

SEQ ID NO: 59559 - DNA, 25 bp, Probe Sequence
ttagcagaataagtgatggacatta

SEQ ID NO: 59560 - DNA, 25 bp, Probe Sequence
catgtcctgaatgaatgatctgtaa

SEQ ID NO: 59561 - DNA, 25 bp, Probe Sequence
aacctcctctgtgttgattcctatg

SEQ ID NO: 59562 - DNA, 25 bp, Probe Sequence
actgacattagcagaataagtgatg

SEQ ID NO: 59563 - DNA, 25 bp, Probe Sequence
aaggcactgacattagcagaataag

SEQ ID NO: 59564 - DNA, 25 bp, Probe Sequence
agaataagtgatggacattagttga

SEQ ID NO: 59565 - DNA, 25 bp, Probe Sequence
gatcatattagagtgactgagtgac

SEQ ID NO: 59566 - DNA, 25 bp, Probe Sequence
aataagtgatggacattagttgaac

SEQ ID NO: 59567 - DNA, 25 bp, Probe Sequence
aaccaagagaagagtcaagtgaata

SEQ ID NO: 59568 - DNA, 25 bp, Probe Sequence
agagaagagtcaagtgaatatcgtt

SEQ ID NO: 59569 - DNA, 25 bp, Probe Sequence
aagagaagagtcaagtgaatatcgt

SEQ ID NO: 59570 - DNA, 25 bp, Probe Sequence
accaagagaagagtcaagtgaatat

SEQ ID NO: 59571 - DNA, 25 bp, Probe Sequence
atcattcaaccaagagaagagtcaa

SEQ ID NO: 59572 - DNA, 25 bp, Probe Sequence
aatcattcaaccaagagaagagtca

SEQ ID NO: 59573 - DNA, 25 bp, Probe Sequence
caagagaagagtcaagtgaatatcg

SEQ ID NO: 59574 - DNA, 25 bp, Probe Sequence
caaccaagagaagagtcaagtgaat

SEQ ID NO: 59575 - DNA, 25 bp, Probe Sequence
tcattcaaccaagagaagagtcaag

SEQ ID NO: 59576 - DNA, 25 bp, Probe Sequence
ccaagagaagagtcaagtgaatatc

SEQ ID NO: 59577 - DNA, 25 bp, Probe Sequence
attcaaccaagagaagagtcaagtg

SEQ ID NO: 59578 - DNA, 25 bp, Probe Sequence
cattcaaccaagagaagagtcaagt

SEQ ID NO: 59579 - DNA, 25 bp, Probe Sequence
ttaagtagaagacattgaaggatgc

SEQ ID NO: 59580 - DNA, 25 bp, Probe Sequence
tggaacattcatatagtctctgtga

SEQ ID NO: 59581 - DNA, 25 bp, Probe Sequence
tcaaccaagagaagagtcaagtgaa

SEQ ID NO: 59582 - DNA, 25 bp, Probe Sequence
ttcaaccaagagaagagtcaagtga

SEQ ID NO: 59583 - DNA, 25 bp, Probe Sequence
gtacttgatgtatggttatcctgaa

SEQ ID NO: 59584 - DNA, 25 bp, Probe Sequence
atggaacattcatatagtctctgtg

SEQ ID NO: 59585 - DNA, 25 bp, Probe Sequence
taagtagaagacattgaaggatgca

SEQ ID NO: 59586 - DNA, 25 bp, Probe Sequence
ttgaaatcataaggcagtttaagca

SEQ ID NO: 59587 - DNA, 25 bp, Probe Sequence
atttcggagtatttggtgtgttctt

SEQ ID NO: 59588 - DNA, 25 bp, Probe Sequence
gctcaaatgtcatagtctcctttca

SEQ ID NO: 59589 - DNA, 25 bp, Probe Sequence
tgctcaaatgtcatagtctcctttc

SEQ ID NO: 59590 - DNA, 25 bp, Probe Sequence
tgaaatcataaggcagtttaagcat

SEQ ID NO: 59591 - DNA, 25 bp, Probe Sequence
atattcctgcctcttcatagtcaag

SEQ ID NO: 59592 - DNA, 25 bp, Probe Sequence
tatattcctgcctcttcatagtcaa

SEQ ID NO: 59593 - DNA, 25 bp, Probe Sequence
ttatattcctgcctcttcatagtca

SEQ ID NO: 59594 - DNA, 25 bp, Probe Sequence
ctcttcatagtcaaggctcttagta

SEQ ID NO: 59595 - DNA, 25 bp, Probe Sequence
gtcagtaatgagaggattggaagaa

SEQ ID NO: 59596 - DNA, 25 bp, Probe Sequence
tcagtaatgagaggattggaagaat

SEQ ID NO: 59597 - DNA, 25 bp, Probe Sequence
tgtcagtaatgagaggattggaaga

SEQ ID NO: 59598 - DNA, 25 bp, Probe Sequence
ctgtcagtaatgagaggattggaag

SEQ ID NO: 59599 - DNA, 25 bp, Probe Sequence
atctgtcagtaatgagaggattgga

SEQ ID NO: 59600 - DNA, 25 bp, Probe Sequence
catctgtcagtaatgagaggattgg

SEQ ID NO: 59601 - DNA, 25 bp, Probe Sequence
gtcaaggctcttagtacaggaatat

SEQ ID NO: 59602 - DNA, 25 bp, Probe Sequence
agtcaaggctcttagtacaggaata

SEQ ID NO: 59603 - DNA, 25 bp, Probe Sequence
tagtcaaggctcttagtacaggaat

SEQ ID NO: 59604 - DNA, 25 bp, Probe Sequence
atagtcaaggctcttagtacaggaa

SEQ ID NO: 59605 - DNA, 25 bp, Probe Sequence
ttcatagtcaaggctcttagtacag

SEQ ID NO: 59606 - DNA, 25 bp, Probe Sequence
cttcatagtcaaggctcttagtaca

SEQ ID NO: 59607 - DNA, 25 bp, Probe Sequence
tctgtcagtaatgagaggattggaa

SEQ ID NO: 59608 - DNA, 25 bp, Probe Sequence
tcttcatagtcaaggctcttagtac

SEQ ID NO: 59609 - DNA, 25 bp, Probe Sequence
cagtaatgagaggattggaagaata

SEQ ID NO: 59610 - DNA, 25 bp, Probe Sequence
catagtcaaggctcttagtacagga

SEQ ID NO: 59611 - DNA, 25 bp, Probe Sequence
tcatagtcaaggctcttagtacagg

SEQ ID NO: 59612 - DNA, 25 bp, Probe Sequence
aggctcttagtacaggaatattgac

SEQ ID NO: 59613 - DNA, 25 bp, Probe Sequence
atgttcagcaatgttgatctcataa

SEQ ID NO: 59614 - DNA, 25 bp, Probe Sequence
atatgttcagcaatgttgatctcat

SEQ ID NO: 59615 - DNA, 25 bp, Probe Sequence
ccacattcttgacaactatttgctt

SEQ ID NO: 59616 - DNA, 25 bp, Probe Sequence
aaccacattcttgacaactatttgc

SEQ ID NO: 59617 - DNA, 25 bp, Probe Sequence
tgtgagcatcaaatgtgtatgtaaa

SEQ ID NO: 59618 - DNA, 25 bp, Probe Sequence
ttgtaatgtgagcatcaaatgtgta

SEQ ID NO: 59619 - DNA, 25 bp, Probe Sequence
accacattcttgacaactatttgct

SEQ ID NO: 59620 - DNA, 25 bp, Probe Sequence
atgtgagcatcaaatgtgtatgtaa

SEQ ID NO: 59621 - DNA, 25 bp, Probe Sequence
aatgtgagcatcaaatgtgtatgta

SEQ ID NO: 59622 - DNA, 25 bp, Probe Sequence
taatgtgagcatcaaatgtgtatgt

SEQ ID NO: 59623 - DNA, 25 bp, Probe Sequence
tgtaatgtgagcatcaaatgtgtat

SEQ ID NO: 59624 - DNA, 25 bp, Probe Sequence
cacattcttgacaactatttgcttt

SEQ ID NO: 59625 - DNA, 25 bp, Probe Sequence
tccagggaatttgaaacatagattt

SEQ ID NO: 59626 - DNA, 25 bp, Probe Sequence
gtaatgtgagcatcaaatgtgtatg

SEQ ID NO: 59627 - DNA, 25 bp, Probe Sequence
tctgtcttgtaaaccacattcttga

SEQ ID NO: 59628 - DNA, 25 bp, Probe Sequence
atctgtcttgtaaaccacattcttg

SEQ ID NO: 59629 - DNA, 25 bp, Probe Sequence
atccagggaatttgaaacatagatt

SEQ ID NO: 59630 - DNA, 25 bp, Probe Sequence
aatccagggaatttgaaacatagat

SEQ ID NO: 59631 - DNA, 25 bp, Probe Sequence
aaaccacattcttgacaactatttg

SEQ ID NO: 59632 - DNA, 25 bp, Probe Sequence
tcatgtcaataaaggtagtcaggat

SEQ ID NO: 59633 - DNA, 25 bp, Probe Sequence
atcatgtcaataaaggtagtcagga

SEQ ID NO: 59634 - DNA, 25 bp, Probe Sequence
ctgtcttgtaaaccacattcttgac

SEQ ID NO: 59635 - DNA, 25 bp, Probe Sequence
gtaaaccacattcttgacaactatt

SEQ ID NO: 59636 - DNA, 25 bp, Probe Sequence
aatcatgtcaataaaggtagtcagg

SEQ ID NO: 59637 - DNA, 25 bp, Probe Sequence
tgtaaaccacattcttgacaactat

SEQ ID NO: 59638 - DNA, 25 bp, Probe Sequence
gatctgtcttgtaaaccacattctt

SEQ ID NO: 59639 - DNA, 25 bp, Probe Sequence
atgcttaccttgctctgaagaatat

SEQ ID NO: 59640 - DNA, 25 bp, Probe Sequence
aatgcttaccttgctctgaagaata

SEQ ID NO: 59641 - DNA, 25 bp, Probe Sequence
tgcttaccttgctctgaagaatatc

SEQ ID NO: 59642 - DNA, 25 bp, Probe Sequence
taccttcaggcagaattagttactc

SEQ ID NO: 59643 - DNA, 25 bp, Probe Sequence
ttgttaccttcaggcagaattagtt

SEQ ID NO: 59644 - DNA, 25 bp, Probe Sequence
tgttaccttcaggcagaattagtta

SEQ ID NO: 59645 - DNA, 25 bp, Probe Sequence
ttaccttcaggcagaattagttact

SEQ ID NO: 59646 - DNA, 25 bp, Probe Sequence
gttaccttcaggcagaattagttac

SEQ ID NO: 59647 - DNA, 25 bp, Probe Sequence
ccttcaggcagaattagttactctt

SEQ ID NO: 59648 - DNA, 25 bp, Probe Sequence
cttgttaccttcaggcagaattagt

SEQ ID NO: 59649 - DNA, 25 bp, Probe Sequence
gcttaccttgctctgaagaatatca

SEQ ID NO: 59650 - DNA, 25 bp, Probe Sequence
ttaccttccttactagactgtgagc

SEQ ID NO: 59651 - DNA, 25 bp, Probe Sequence
accttcaggcagaattagttactct

SEQ ID NO: 59652 - DNA, 25 bp, Probe Sequence
aattgttctatatcttcgctctagc

SEQ ID NO: 59653 - DNA, 25 bp, Probe Sequence
ttgttctatatcttcgctctagctc

SEQ ID NO: 59654 - DNA, 25 bp, Probe Sequence
gttctatatcttcgctctagctctt

SEQ ID NO: 59655 - DNA, 25 bp, Probe Sequence
tgttctatatcttcgctctagctct

SEQ ID NO: 59656 - DNA, 25 bp, Probe Sequence
attgttctatatcttcgctctagct

SEQ ID NO: 59657 - DNA, 25 bp, Probe Sequence
aagtgccatagacataatgtaactg

SEQ ID NO: 59658 - DNA, 25 bp, Probe Sequence
ccttgttaccttcaggcagaattag

SEQ ID NO: 59659 - DNA, 25 bp, Probe Sequence
tccttgttaccttcaggcagaatta

SEQ ID NO: 59660 - DNA, 25 bp, Probe Sequence
tgccatagacataatgtaactggat

SEQ ID NO: 59661 - DNA, 25 bp, Probe Sequence
gtgccatagacataatgtaactgga

SEQ ID NO: 59662 - DNA, 25 bp, Probe Sequence
agtgccatagacataatgtaactgg

SEQ ID NO: 59663 - DNA, 25 bp, Probe Sequence
cttagtccattgatgttgtcacttg

SEQ ID NO: 59664 - DNA, 25 bp, Probe Sequence
tacttagtccattgatgttgtcact

SEQ ID NO: 59665 - DNA, 25 bp, Probe Sequence
acttagtccattgatgttgtcactt

SEQ ID NO: 59666 - DNA, 25 bp, Probe Sequence
ttagtccattgatgttgtcacttgt

SEQ ID NO: 59667 - DNA, 25 bp, Probe Sequence
tagtccattgatgttgtcacttgtc

SEQ ID NO: 59668 - DNA, 25 bp, Probe Sequence
atacttagtccattgatgttgtcac

SEQ ID NO: 59669 - DNA, 25 bp, Probe Sequence
gctgaacaatcttggatgtagtcta

SEQ ID NO: 59670 - DNA, 25 bp, Probe Sequence
aacaatcttggatgtagtctagcag

SEQ ID NO: 59671 - DNA, 25 bp, Probe Sequence
gaacaatcttggatgtagtctagca

SEQ ID NO: 59672 - DNA, 25 bp, Probe Sequence
tgaacaatcttggatgtagtctagc

SEQ ID NO: 59673 - DNA, 25 bp, Probe Sequence
ggtgatatacttagtccattgatgt

SEQ ID NO: 59674 - DNA, 25 bp, Probe Sequence
gtccattgatgttgtcacttgtcat

SEQ ID NO: 59675 - DNA, 25 bp, Probe Sequence
aggtgatatacttagtccattgatg

SEQ ID NO: 59676 - DNA, 25 bp, Probe Sequence
aatcttggatgtagtctagcagcaa

SEQ ID NO: 59677 - DNA, 25 bp, Probe Sequence
ctgaacaatcttggatgtagtctag

SEQ ID NO: 59678 - DNA, 25 bp, Probe Sequence
ggaggtgatatacttagtccattga

SEQ ID NO: 59679 - DNA, 25 bp, Probe Sequence
gaggtgatatacttagtccattgat

SEQ ID NO: 59680 - DNA, 25 bp, Probe Sequence
caatcttggatgtagtctagcagca

SEQ ID NO: 59681 - DNA, 25 bp, Probe Sequence
tgaaataatactttgccagacagga

SEQ ID NO: 59682 - DNA, 25 bp, Probe Sequence
ttgaaataatactttgccagacagg

SEQ ID NO: 59683 - DNA, 25 bp, Probe Sequence
gaaataatactttgccagacaggaa

SEQ ID NO: 59684 - DNA, 25 bp, Probe Sequence
tatacttagtccattgatgttgtca

SEQ ID NO: 59685 - DNA, 25 bp, Probe Sequence
atcttggatgtagtctagcagcaac

SEQ ID NO: 59686 - DNA, 25 bp, Probe Sequence
aatggcgttatgtttggagttatga

SEQ ID NO: 59687 - DNA, 25 bp, Probe Sequence
aggtgtaggtataggaggtcaagaa

SEQ ID NO: 59688 - DNA, 25 bp, Probe Sequence
aacaggtgtaggtataggaggtcaa

SEQ ID NO: 59689 - DNA, 25 bp, Probe Sequence
gtgacaccagagttcattgttatgt

SEQ ID NO: 59690 - DNA, 25 bp, Probe Sequence
caggtgtaggtataggaggtcaaga

SEQ ID NO: 59691 - DNA, 25 bp, Probe Sequence
tgacaccagagttcattgttatgtg

SEQ ID NO: 59692 - DNA, 25 bp, Probe Sequence
taattatacaataggctggtgacac

SEQ ID NO: 59693 - DNA, 25 bp, Probe Sequence
acaggtgtaggtataggaggtcaag

SEQ ID NO: 59694 - DNA, 25 bp, Probe Sequence
caacaggtgtaggtataggaggtca

SEQ ID NO: 59695 - DNA, 25 bp, Probe Sequence
ggtgtaggtataggaggtcaagaaa

SEQ ID NO: 59696 - DNA, 25 bp, Probe Sequence
ttaattatacaataggctggtgaca

SEQ ID NO: 59697 - DNA, 25 bp, Probe Sequence
ttacaacaggtgtaggtataggagg

SEQ ID NO: 59698 - DNA, 25 bp, Probe Sequence
gttaattatacaataggctggtgac

SEQ ID NO: 59699 - DNA, 25 bp, Probe Sequence
agttaattatacaataggctggtga

SEQ ID NO: 59700 - DNA, 25 bp, Probe Sequence
acaacaggtgtaggtataggaggtc

SEQ ID NO: 59701 - DNA, 25 bp, Probe Sequence
gacaccagagttcattgttatgtgc

SEQ ID NO: 59702 - DNA, 25 bp, Probe Sequence
tacaacaggtgtaggtataggaggt

SEQ ID NO: 59703 - DNA, 25 bp, Probe Sequence
ttctcattacagagtttagtcaacg

SEQ ID NO: 59704 - DNA, 25 bp, Probe Sequence
aattatacaataggctggtgacacc

SEQ ID NO: 59705 - DNA, 25 bp, Probe Sequence
gcatagctaataacaaccacacatt

SEQ ID NO: 59706 - DNA, 25 bp, Probe Sequence
aagttaattatacaataggctggtg

SEQ ID NO: 59707 - DNA, 25 bp, Probe Sequence
accagagttcattgttatgtgccac

SEQ ID NO: 59708 - DNA, 25 bp, Probe Sequence
acgagaagttaattatacaataggc

SEQ ID NO: 59709 - DNA, 25 bp, Probe Sequence
ggcatagctaataacaaccacacat

SEQ ID NO: 59710 - DNA, 25 bp, Probe Sequence
gaagttaattatacaataggctggt

SEQ ID NO: 59711 - DNA, 25 bp, Probe Sequence
atatgaaggcattgtatgagaggaa

SEQ ID NO: 59712 - DNA, 25 bp, Probe Sequence
catctaattgccttgtcgtcattaa

SEQ ID NO: 59713 - DNA, 25 bp, Probe Sequence
tcatctaattgccttgtcgtcatta

SEQ ID NO: 59714 - DNA, 25 bp, Probe Sequence
tatatgaaggcattgtatgagagga

SEQ ID NO: 59715 - DNA, 25 bp, Probe Sequence
ctcatctaattgccttgtcgtcatt

SEQ ID NO: 59716 - DNA, 25 bp, Probe Sequence
ctatatgaaggcattgtatgagagg

SEQ ID NO: 59717 - DNA, 25 bp, Probe Sequence
gttatccactatgtcagatacacca

SEQ ID NO: 59718 - DNA, 25 bp, Probe Sequence
ctctgacgagtatgaagatgaatgc

SEQ ID NO: 59719 - DNA, 25 bp, Probe Sequence
gctctgacgagtatgaagatgaatg

SEQ ID NO: 59720 - DNA, 25 bp, Probe Sequence
ttatccactatgtcagatacaccat

SEQ ID NO: 59721 - DNA, 25 bp, Probe Sequence
agaacaagaactctgagtatcactt

SEQ ID NO: 59722 - DNA, 25 bp, Probe Sequence
gaacaagaactctgagtatcacttc

SEQ ID NO: 59723 - DNA, 25 bp, Probe Sequence
atgtcagatacaccatgttgaagat

SEQ ID NO: 59724 - DNA, 25 bp, Probe Sequence
caagatggtcagagagttcaaggag

SEQ ID NO: 59725 - DNA, 25 bp, Probe Sequence
actatgtcagatacaccatgttgaa

SEQ ID NO: 59726 - DNA, 25 bp, Probe Sequence
cactatgtcagatacaccatgttga

SEQ ID NO: 59727 - DNA, 25 bp, Probe Sequence
tatgtcagatacaccatgttgaaga

SEQ ID NO: 59728 - DNA, 25 bp, Probe Sequence
aattacaacaggcaagatggtcaga

SEQ ID NO: 59729 - DNA, 25 bp, Probe Sequence
tgtcagatacaccatgttgaagatc

SEQ ID NO: 59730 - DNA, 25 bp, Probe Sequence
tatccactatgtcagatacaccatg

SEQ ID NO: 59731 - DNA, 25 bp, Probe Sequence
ctatgtcagatacaccatgttgaag

SEQ ID NO: 59732 - DNA, 25 bp, Probe Sequence
ggttatccactatgtcagatacacc

SEQ ID NO: 59733 - DNA, 25 bp, Probe Sequence
tggttatccactatgtcagatacac

SEQ ID NO: 59734 - DNA, 25 bp, Probe Sequence
cctatatgaaggcattgtatgagag

SEQ ID NO: 59735 - DNA, 25 bp, Probe Sequence
gatcaatccatctgccagaatctag

SEQ ID NO: 59736 - DNA, 25 bp, Probe Sequence
gccaggtggaagtaactgaattatt

SEQ ID NO: 59737 - DNA, 25 bp, Probe Sequence
atcaatccatctgccagaatctagt

SEQ ID NO: 59738 - DNA, 25 bp, Probe Sequence
aattaagcagttctactcgatcacc

SEQ ID NO: 59739 - DNA, 25 bp, Probe Sequence
tcaatccatctgccagaatctagtg

SEQ ID NO: 59740 - DNA, 25 bp, Probe Sequence
attaagcagttctactcgatcacca

SEQ ID NO: 59741 - DNA, 25 bp, Probe Sequence
ggaaactcattcagactggtgatat

SEQ ID NO: 59742 - DNA, 25 bp, Probe Sequence
attatctctttgagtccttgcttct

SEQ ID NO: 59743 - DNA, 25 bp, Probe Sequence
ttatctctttgagtccttgcttctg

SEQ ID NO: 59744 - DNA, 25 bp, Probe Sequence
ttaagcagttctactcgatcaccaa

SEQ ID NO: 59745 - DNA, 25 bp, Probe Sequence
ttcagactggtgatatcgtgatgta

SEQ ID NO: 59746 - DNA, 25 bp, Probe Sequence
aattatctctttgagtccttgcttc

SEQ ID NO: 59747 - DNA, 25 bp, Probe Sequence
aacatagagtggtttcttcattcat

SEQ ID NO: 59748 - DNA, 25 bp, Probe Sequence
aggaaactcattcagactggtgata

SEQ ID NO: 59749 - DNA, 25 bp, Probe Sequence
cattcagactggtgatatcgtgatg

SEQ ID NO: 59750 - DNA, 25 bp, Probe Sequence
agatcaatccatctgccagaatcta

SEQ ID NO: 59751 - DNA, 25 bp, Probe Sequence
tcattcagactggtgatatcgtgat

SEQ ID NO: 59752 - DNA, 25 bp, Probe Sequence
taagcagttctactcgatcaccaag

SEQ ID NO: 59753 - DNA, 25 bp, Probe Sequence
tataccgtgtgaaccaaacaatctc

SEQ ID NO: 59754 - DNA, 25 bp, Probe Sequence
aactcattcagactggtgatatcgt

SEQ ID NO: 59755 - DNA, 25 bp, Probe Sequence
tatctctttgagtccttgcttctgt

SEQ ID NO: 59756 - DNA, 25 bp, Probe Sequence
attcagactggtgatatcgtgatgt

SEQ ID NO: 59757 - DNA, 25 bp, Probe Sequence
tagagtggtttcttcattcatgtga

SEQ ID NO: 59758 - DNA, 25 bp, Probe Sequence
atagagtggtttcttcattcatgtg

SEQ ID NO: 59759 - DNA, 25 bp, Probe Sequence
agattgagtcttcctgtcaccatag

SEQ ID NO: 59760 - DNA, 25 bp, Probe Sequence
gccagctatgtgatattagaggaag

SEQ ID NO: 59761 - DNA, 25 bp, Probe Sequence
ccagctatgtgatattagaggaaga

SEQ ID NO: 59762 - DNA, 25 bp, Probe Sequence
aataataactgagactgggagaggt

SEQ ID NO: 59763 - DNA, 25 bp, Probe Sequence
aaataataactgagactgggagagg

SEQ ID NO: 59764 - DNA, 25 bp, Probe Sequence
ataataactgagactgggagaggtg

SEQ ID NO: 59765 - DNA, 25 bp, Probe Sequence
gctacaacccaaagagagaaagatt

SEQ ID NO: 59766 - DNA, 25 bp, Probe Sequence
tttgtggtgtctaggtttctgataa

SEQ ID NO: 59767 - DNA, 25 bp, Probe Sequence
ctttgtggtgtctaggtttctgata

SEQ ID NO: 59768 - DNA, 25 bp, Probe Sequence
ttgtggtgtctaggtttctgataaa

SEQ ID NO: 59769 - DNA, 25 bp, Probe Sequence
tacaacccaaagagagaaagattga

SEQ ID NO: 59770 - DNA, 25 bp, Probe Sequence
ctacaacccaaagagagaaagattg

SEQ ID NO: 59771 - DNA, 25 bp, Probe Sequence
tatggagaattaaaggtgagaaagc

SEQ ID NO: 59772 - DNA, 25 bp, Probe Sequence
aacccaaagagagaaagattgagtc

SEQ ID NO: 59773 - DNA, 25 bp, Probe Sequence
ctactttgtggtgtctaggtttctg

SEQ ID NO: 59774 - DNA, 25 bp, Probe Sequence
caacccaaagagagaaagattgagt

SEQ ID NO: 59775 - DNA, 25 bp, Probe Sequence
acaacccaaagagagaaagattgag

SEQ ID NO: 59776 - DNA, 25 bp, Probe Sequence
gattgagtcttcctgtcaccatagg

SEQ ID NO: 59777 - DNA, 25 bp, Probe Sequence
tactttgtggtgtctaggtttctga

SEQ ID NO: 59778 - DNA, 25 bp, Probe Sequence
cagctatgtgatattagaggaagaa

SEQ ID NO: 59779 - DNA, 25 bp, Probe Sequence
acccaaagagagaaagattgagtct

SEQ ID NO: 59780 - DNA, 25 bp, Probe Sequence
aagattgagtcttcctgtcaccata

SEQ ID NO: 59781 - DNA, 25 bp, Probe Sequence
ttataagaggacgttcagtctcatt

SEQ ID NO: 59782 - DNA, 25 bp, Probe Sequence
aacagagcaaatgtagtaggaacaa

SEQ ID NO: 59783 - DNA, 25 bp, Probe Sequence
cacagaatatggaggactcaacaga

SEQ ID NO: 59784 - DNA, 25 bp, Probe Sequence
acacagaatatggaggactcaacag

SEQ ID NO: 59785 - DNA, 25 bp, Probe Sequence
acagaatatggaggactcaacagag

SEQ ID NO: 59786 - DNA, 25 bp, Probe Sequence
cacacagaatatggaggactcaaca

SEQ ID NO: 59787 - DNA, 25 bp, Probe Sequence
ccacacagaatatggaggactcaac

SEQ ID NO: 59788 - DNA, 25 bp, Probe Sequence
gaatatggaggactcaacagagttc

SEQ ID NO: 59789 - DNA, 25 bp, Probe Sequence
agaatatggaggactcaacagagtt

SEQ ID NO: 59790 - DNA, 25 bp, Probe Sequence
atatggaggactcaacagagttcat

SEQ ID NO: 59791 - DNA, 25 bp, Probe Sequence
aatatggaggactcaacagagttca

SEQ ID NO: 59792 - DNA, 25 bp, Probe Sequence
ctgtggaaaagtagaatgtcatctg

SEQ ID NO: 59793 - DNA, 25 bp, Probe Sequence
cagaatatggaggactcaacagagt

SEQ ID NO: 59794 - DNA, 25 bp, Probe Sequence
taatttctccttagtttggatcact

SEQ ID NO: 59795 - DNA, 25 bp, Probe Sequence
actgtggaaaagtagaatgtcatct

SEQ ID NO: 59796 - DNA, 25 bp, Probe Sequence
aatttctccttagtttggatcacta

SEQ ID NO: 59797 - DNA, 25 bp, Probe Sequence
aggactcaacagagttcatgttctt

SEQ ID NO: 59798 - DNA, 25 bp, Probe Sequence
tatggaggactcaacagagttcatg

SEQ ID NO: 59799 - DNA, 25 bp, Probe Sequence
ctaatttctccttagtttggatcac

SEQ ID NO: 59800 - DNA, 25 bp, Probe Sequence
gtggaaaagtagaatgtcatctgta

SEQ ID NO: 59801 - DNA, 25 bp, Probe Sequence
gaggactcaacagagttcatgttct

SEQ ID NO: 59802 - DNA, 25 bp, Probe Sequence
tggaaaagtagaatgtcatctgtat

SEQ ID NO: 59803 - DNA, 25 bp, Probe Sequence
ggattttacatttcctttcctgaga

SEQ ID NO: 59804 - DNA, 25 bp, Probe Sequence
gattttacatttcctttcctgagat

SEQ ID NO: 59805 - DNA, 25 bp, Probe Sequence
gactcaacagagttcatgttctttg

SEQ ID NO: 59806 - DNA, 25 bp, Probe Sequence
tttacatttcctttcctgagatttt

SEQ ID NO: 59807 - DNA, 25 bp, Probe Sequence
gtctgtctcttggtattgggtaaag

SEQ ID NO: 59808 - DNA, 25 bp, Probe Sequence
attatgtgtgaaagcatcctcttcc

SEQ ID NO: 59809 - DNA, 25 bp, Probe Sequence
tattatgtgtgaaagcatcctcttc

SEQ ID NO: 59810 - DNA, 25 bp, Probe Sequence
catttcagaaaggatggagaacatt

SEQ ID NO: 59811 - DNA, 25 bp, Probe Sequence
tcttcagatttagactcttctccat

SEQ ID NO: 59812 - DNA, 25 bp, Probe Sequence
ttattatgtgtgaaagcatcctctt

SEQ ID NO: 59813 - DNA, 25 bp, Probe Sequence
tttattatgtgtgaaagcatcctct

SEQ ID NO: 59814 - DNA, 25 bp, Probe Sequence
atttcagaaaggatggagaacattt

SEQ ID NO: 59815 - DNA, 25 bp, Probe Sequence
ctgtctcttggtattgggtaaagga

SEQ ID NO: 59816 - DNA, 25 bp, Probe Sequence
tctgtctcttggtattgggtaaagg

SEQ ID NO: 59817 - DNA, 25 bp, Probe Sequence
tcagaaaggatggagaacatttatt

SEQ ID NO: 59818 - DNA, 25 bp, Probe Sequence
ttcagaaaggatggagaacatttat

SEQ ID NO: 59819 - DNA, 25 bp, Probe Sequence
gcatttcagaaaggatggagaacat

SEQ ID NO: 59820 - DNA, 25 bp, Probe Sequence
cgtctgtctcttggtattgggtaaa

SEQ ID NO: 59821 - DNA, 25 bp, Probe Sequence
ttcagatttagactcttctccatgt

SEQ ID NO: 59822 - DNA, 25 bp, Probe Sequence
catttattatgtgtgaaagcatcct

SEQ ID NO: 59823 - DNA, 25 bp, Probe Sequence
tttcagaaaggatggagaacattta

SEQ ID NO: 59824 - DNA, 25 bp, Probe Sequence
aagtgaagaacttgtcctaagtgtg

SEQ ID NO: 59825 - DNA, 25 bp, Probe Sequence
tgtctcttggtattgggtaaaggag

SEQ ID NO: 59826 - DNA, 25 bp, Probe Sequence
gagcaaggaattatgtctcatgttt

SEQ ID NO: 59827 - DNA, 25 bp, Probe Sequence
cttcagatttagactcttctccatg

SEQ ID NO: 59828 - DNA, 25 bp, Probe Sequence
atttattatgtgtgaaagcatcctc

SEQ ID NO: 59829 - DNA, 25 bp, Probe Sequence
cagatttagactcttctccatgtca

SEQ ID NO: 59830 - DNA, 25 bp, Probe Sequence
agatttagactcttctccatgtcag

SEQ ID NO: 59831 - DNA, 25 bp, Probe Sequence
ggtaacttactgtcacatagctctg

SEQ ID NO: 59832 - DNA, 25 bp, Probe Sequence
tggtaacttactgtcacatagctct

SEQ ID NO: 59833 - DNA, 25 bp, Probe Sequence
gtaacttactgtcacatagctctga

SEQ ID NO: 59834 - DNA, 25 bp, Probe Sequence
gtggtaacttactgtcacatagctc

SEQ ID NO: 59835 - DNA, 25 bp, Probe Sequence
aatcttctacttcctacggagcctg

SEQ ID NO: 59836 - DNA, 25 bp, Probe Sequence
agaagtattttgtcacatcctacga

SEQ ID NO: 59837 - DNA, 25 bp, Probe Sequence
gaagtattttgtcacatcctacgaa

SEQ ID NO: 59838 - DNA, 25 bp, Probe Sequence
aagaagtattttgtcacatcctacg

SEQ ID NO: 59839 - DNA, 25 bp, Probe Sequence
aaatcttctacttcctacggagcct

SEQ ID NO: 59840 - DNA, 25 bp, Probe Sequence
aagtattttgtcacatcctacgaaa

SEQ ID NO: 59841 - DNA, 25 bp, Probe Sequence
gtcaagaagtattttgtcacatcct

SEQ ID NO: 59842 - DNA, 25 bp, Probe Sequence
agtcaagaagtattttgtcacatcc

SEQ ID NO: 59843 - DNA, 25 bp, Probe Sequence
catcctacgaaatgtgcctcaagtc

SEQ ID NO: 59844 - DNA, 25 bp, Probe Sequence
gcgagactctggctcataaaataat

SEQ ID NO: 59845 - DNA, 25 bp, Probe Sequence
gacatcgtggttaaggactggtttg

SEQ ID NO: 59846 - DNA, 25 bp, Probe Sequence
taacttactgtcacatagctctgac

SEQ ID NO: 59847 - DNA, 25 bp, Probe Sequence
ccgtgtgctgaagaggatatgtttg

SEQ ID NO: 59848 - DNA, 25 bp, Probe Sequence
ccagcttgtggtaacttactgtcac

SEQ ID NO: 59849 - DNA, 25 bp, Probe Sequence
gtattttgtcacatcctacgaaatg

SEQ ID NO: 59850 - DNA, 25 bp, Probe Sequence
tctcctacaccttctcagactaccc

SEQ ID NO: 59851 - DNA, 25 bp, Probe Sequence
catggcaaattgatttcaatggtgg

SEQ ID NO: 59852 - DNA, 25 bp, Probe Sequence
cgagactctggctcataaaataata

SEQ ID NO: 59853 - DNA, 25 bp, Probe Sequence
agtattttgtcacatcctacgaaat

SEQ ID NO: 59854 - DNA, 25 bp, Probe Sequence
caagaagtattttgtcacatcctac

SEQ ID NO: 59855 - DNA, 25 bp, Probe Sequence
gtggcaaatactttaggagcaataa

SEQ ID NO: 59856 - DNA, 25 bp, Probe Sequence
ggtggcaaatactttaggagcaata

SEQ ID NO: 59857 - DNA, 25 bp, Probe Sequence
tggcaaatactttaggagcaataat

SEQ ID NO: 59858 - DNA, 25 bp, Probe Sequence
ggcaaatactttaggagcaataatg

SEQ ID NO: 59859 - DNA, 25 bp, Probe Sequence
aggagcaataatgccttatggtaat

SEQ ID NO: 59860 - DNA, 25 bp, Probe Sequence
taggagcaataatgccttatggtaa

SEQ ID NO: 59861 - DNA, 25 bp, Probe Sequence
ttaggagcaataatgccttatggta

SEQ ID NO: 59862 - DNA, 25 bp, Probe Sequence
ggagcaataatgccttatggtaatt

SEQ ID NO: 59863 - DNA, 25 bp, Probe Sequence
aatgccttatggtaattattgatgt

SEQ ID NO: 59864 - DNA, 25 bp, Probe Sequence
tggtggcaaatactttaggagcaat

SEQ ID NO: 59865 - DNA, 25 bp, Probe Sequence
ttggtggcaaatactttaggagcaa

SEQ ID NO: 59866 - DNA, 25 bp, Probe Sequence
tgccttatggtaattattgatgtat

SEQ ID NO: 59867 - DNA, 25 bp, Probe Sequence
atgccttatggtaattattgatgta

SEQ ID NO: 59868 - DNA, 25 bp, Probe Sequence
tttaggagcaataatgccttatggt

SEQ ID NO: 59869 - DNA, 25 bp, Probe Sequence
ctttaggagcaataatgccttatgg

SEQ ID NO: 59870 - DNA, 25 bp, Probe Sequence
actttaggagcaataatgccttatg

SEQ ID NO: 59871 - DNA, 25 bp, Probe Sequence
gcaaatactttaggagcaataatgc

SEQ ID NO: 59872 - DNA, 25 bp, Probe Sequence
gagcaataatgccttatggtaatta

SEQ ID NO: 59873 - DNA, 25 bp, Probe Sequence
caaatactttaggagcaataatgcc

SEQ ID NO: 59874 - DNA, 25 bp, Probe Sequence
aatactttaggagcaataatgcctt

SEQ ID NO: 59875 - DNA, 25 bp, Probe Sequence
aaatactttaggagcaataatgcct

SEQ ID NO: 59876 - DNA, 25 bp, Probe Sequence
tactttaggagcaataatgccttat

SEQ ID NO: 59877 - DNA, 25 bp, Probe Sequence
atactttaggagcaataatgcctta

SEQ ID NO: 59878 - DNA, 25 bp, Probe Sequence
agcaataatgccttatggtaattat

SEQ ID NO: 59879 - DNA, 25 bp, Probe Sequence
aagaaggccatatacatggatgatg

SEQ ID NO: 59880 - DNA, 25 bp, Probe Sequence
aaagaaggccatatacatggatgat

SEQ ID NO: 59881 - DNA, 25 bp, Probe Sequence
caaagaaggccatatacatggatga

SEQ ID NO: 59882 - DNA, 25 bp, Probe Sequence
gcaaagaaggccatatacatggatg

SEQ ID NO: 59883 - DNA, 25 bp, Probe Sequence
cgcaaagaaggccatatacatggat

SEQ ID NO: 59884 - DNA, 25 bp, Probe Sequence
cagcgcaaagaaggccatatacatg

SEQ ID NO: 59885 - DNA, 25 bp, Probe Sequence
cctatgattcttattggtggatgga

SEQ ID NO: 59886 - DNA, 25 bp, Probe Sequence
ccttctcctatgactgatcctacta

SEQ ID NO: 59887 - DNA, 25 bp, Probe Sequence
tctcctatgactgatcctactatgt

SEQ ID NO: 59888 - DNA, 25 bp, Probe Sequence
catcctggtacttcctcaatgtatt

SEQ ID NO: 59889 - DNA, 25 bp, Probe Sequence
ctatgattcttattggtggatggat

SEQ ID NO: 59890 - DNA, 25 bp, Probe Sequence
cctatgactgatcctactatgttga

SEQ ID NO: 59891 - DNA, 25 bp, Probe Sequence
tcctatgactgatcctactatgttg

SEQ ID NO: 59892 - DNA, 25 bp, Probe Sequence
ttcttattggtggatggatcaacat

SEQ ID NO: 59893 - DNA, 25 bp, Probe Sequence
attcttattggtggatggatcaaca

SEQ ID NO: 59894 - DNA, 25 bp, Probe Sequence
gattcttattggtggatggatcaac

SEQ ID NO: 59895 - DNA, 25 bp, Probe Sequence
ctcctatgactgatcctactatgtt

SEQ ID NO: 59896 - DNA, 25 bp, Probe Sequence
accttctcctatgactgatcctact

SEQ ID NO: 59897 - DNA, 25 bp, Probe Sequence
caccttctcctatgactgatcctac

SEQ ID NO: 59898 - DNA, 25 bp, Probe Sequence
tatgactgatcctactatgttgaca

SEQ ID NO: 59899 - DNA, 25 bp, Probe Sequence
ttaagcctatgttacagcaaggaat

SEQ ID NO: 59900 - DNA, 25 bp, Probe Sequence
ttctcctatgactgatcctactatg

SEQ ID NO: 59901 - DNA, 25 bp, Probe Sequence
taagcctatgttacagcaaggaatc

SEQ ID NO: 59902 - DNA, 25 bp, Probe Sequence
tcttattggtggatggatcaacatg

SEQ ID NO: 59903 - DNA, 25 bp, Probe Sequence
cttattggtggatggatcaacatga

SEQ ID NO: 59904 - DNA, 25 bp, Probe Sequence
cttctcctatgactgatcctactat

SEQ ID NO: 59905 - DNA, 25 bp, Probe Sequence
gactgatcctactatgttgacagac

SEQ ID NO: 59906 - DNA, 25 bp, Probe Sequence
tatgattcttattggtggatggatc

SEQ ID NO: 59907 - DNA, 25 bp, Probe Sequence
atgactgatcctactatgttgacag

SEQ ID NO: 59908 - DNA, 25 bp, Probe Sequence
tgactgatcctactatgttgacaga

SEQ ID NO: 59909 - DNA, 25 bp, Probe Sequence
tcggataagagttaaggacaaggag

SEQ ID NO: 59910 - DNA, 25 bp, Probe Sequence
cggataagagttaaggacaaggagg

SEQ ID NO: 59911 - DNA, 25 bp, Probe Sequence
gtcggataagagttaaggacaagga

SEQ ID NO: 59912 - DNA, 25 bp, Probe Sequence
atataaagaggaggaggaagaccaa

SEQ ID NO: 59913 - DNA, 25 bp, Probe Sequence
aatataaagaggaggaggaagacca

SEQ ID NO: 59914 - DNA, 25 bp, Probe Sequence
gaatataaagaggaggaggaagacc

SEQ ID NO: 59915 - DNA, 25 bp, Probe Sequence
ataagagttaaggacaaggagggta

SEQ ID NO: 59916 - DNA, 25 bp, Probe Sequence
taagagttaaggacaaggagggtaa

SEQ ID NO: 59917 - DNA, 25 bp, Probe Sequence
tataaagaggaggaggaagaccaag

SEQ ID NO: 59918 - DNA, 25 bp, Probe Sequence
gatttaggcaatttggataagggac

SEQ ID NO: 59919 - DNA, 25 bp, Probe Sequence
tgatttaggcaatttggataaggga

SEQ ID NO: 59920 - DNA, 25 bp, Probe Sequence
gtgatttaggcaatttggataaggg

SEQ ID NO: 59921 - DNA, 25 bp, Probe Sequence
tcgtgatttaggcaatttggataag

SEQ ID NO: 59922 - DNA, 25 bp, Probe Sequence
ctcgtgatttaggcaatttggataa

SEQ ID NO: 59923 - DNA, 25 bp, Probe Sequence
atttaggcaatttggataagggaca

SEQ ID NO: 59924 - DNA, 25 bp, Probe Sequence
aagagttaaggacaaggagggtaat

SEQ ID NO: 59925 - DNA, 25 bp, Probe Sequence
cgtgatttaggcaatttggataagg

SEQ ID NO: 59926 - DNA, 25 bp, Probe Sequence
tgaatataaagaggaggaggaagac

SEQ ID NO: 59927 - DNA, 25 bp, Probe Sequence
catcactgtcactttctttaatggt

SEQ ID NO: 59928 - DNA, 25 bp, Probe Sequence
accatcactgtcactttctttaatg

SEQ ID NO: 59929 - DNA, 25 bp, Probe Sequence
attacccagatggaaggaaagaaat

SEQ ID NO: 59930 - DNA, 25 bp, Probe Sequence
ctgaatataaagaggaggaggaaga

SEQ ID NO: 59931 - DNA, 25 bp, Probe Sequence
gataagagttaaggacaaggagggt

SEQ ID NO: 59932 - DNA, 25 bp, Probe Sequence
ttacccagatggaaggaaagaaatc

SEQ ID NO: 59933 - DNA, 25 bp, Probe Sequence
tcattcatctcttacatctctcacc

SEQ ID NO: 59934 - DNA, 25 bp, Probe Sequence
accttcattcatctcttacatctct

SEQ ID NO: 59935 - DNA, 25 bp, Probe Sequence
ggtccataagaagatgaggtctaac

SEQ ID NO: 59936 - DNA, 25 bp, Probe Sequence
ttgtcaaccttcattcatctcttac

SEQ ID NO: 59937 - DNA, 25 bp, Probe Sequence
gtcaaccttcattcatctcttacat

SEQ ID NO: 59938 - DNA, 25 bp, Probe Sequence
caaccttcattcatctcttacatct

SEQ ID NO: 59939 - DNA, 25 bp, Probe Sequence
tcaaccttcattcatctcttacatc

SEQ ID NO: 59940 - DNA, 25 bp, Probe Sequence
ccttcattcatctcttacatctctc

SEQ ID NO: 59941 - DNA, 25 bp, Probe Sequence
gttcatatccttcagtgacattgag

SEQ ID NO: 59942 - DNA, 25 bp, Probe Sequence
aaccttcattcatctcttacatctc

SEQ ID NO: 59943 - DNA, 25 bp, Probe Sequence
ttcattcatctcttacatctctcac

SEQ ID NO: 59944 - DNA, 25 bp, Probe Sequence
tgtcaaccttcattcatctcttaca

SEQ ID NO: 59945 - DNA, 25 bp, Probe Sequence
tgttcatatccttcagtgacattga

SEQ ID NO: 59946 - DNA, 25 bp, Probe Sequence
ctgttcatatccttcagtgacattg

SEQ ID NO: 59947 - DNA, 25 bp, Probe Sequence
cttcattcatctcttacatctctca

SEQ ID NO: 59948 - DNA, 25 bp, Probe Sequence
cctgttcatatccttcagtgacatt

SEQ ID NO: 59949 - DNA, 25 bp, Probe Sequence
agttgtcaaccttcattcatctctt

SEQ ID NO: 59950 - DNA, 25 bp, Probe Sequence
tagttgtcaaccttcattcatctct

SEQ ID NO: 59951 - DNA, 25 bp, Probe Sequence
ttcatatccttcagtgacattgagg

SEQ ID NO: 59952 - DNA, 25 bp, Probe Sequence
ttcctcttgcctgttcatatccttc

SEQ ID NO: 59953 - DNA, 25 bp, Probe Sequence
gttgtcaaccttcattcatctctta

SEQ ID NO: 59954 - DNA, 25 bp, Probe Sequence
atagttgtcaaccttcattcatctc

SEQ ID NO: 59955 - DNA, 25 bp, Probe Sequence
gtccataagaagatgaggtctaacc

SEQ ID NO: 59956 - DNA, 25 bp, Probe Sequence
aatagttgtcaaccttcattcatct

SEQ ID NO: 59957 - DNA, 25 bp, Probe Sequence
tttggctttcacttcatctaatcac

SEQ ID NO: 59958 - DNA, 25 bp, Probe Sequence
ttggctttcacttcatctaatcact

SEQ ID NO: 59959 - DNA, 25 bp, Probe Sequence
tggctttcacttcatctaatcactg

SEQ ID NO: 59960 - DNA, 25 bp, Probe Sequence
atttggctttcacttcatctaatca

SEQ ID NO: 59961 - DNA, 25 bp, Probe Sequence
ggctttcacttcatctaatcactga

SEQ ID NO: 59962 - DNA, 25 bp, Probe Sequence
aatttggctttcacttcatctaatc

SEQ ID NO: 59963 - DNA, 25 bp, Probe Sequence
acttcatctaatcactgaattgtca

SEQ ID NO: 59964 - DNA, 25 bp, Probe Sequence
tcacttcatctaatcactgaattgt

SEQ ID NO: 59965 - DNA, 25 bp, Probe Sequence
cacttcatctaatcactgaattgtc

SEQ ID NO: 59966 - DNA, 25 bp, Probe Sequence
atctaatcactgaattgtcaggctt

SEQ ID NO: 59967 - DNA, 25 bp, Probe Sequence
catctaatcactgaattgtcaggct

SEQ ID NO: 59968 - DNA, 25 bp, Probe Sequence
tcatctaatcactgaattgtcaggc

SEQ ID NO: 59969 - DNA, 25 bp, Probe Sequence
ttcacttcatctaatcactgaattg

SEQ ID NO: 59970 - DNA, 25 bp, Probe Sequence
ttcatctaatcactgaattgtcagg

SEQ ID NO: 59971 - DNA, 25 bp, Probe Sequence
gctttcacttcatctaatcactgaa

SEQ ID NO: 59972 - DNA, 25 bp, Probe Sequence
aactaacctgccttaagaacagaaa

SEQ ID NO: 59973 - DNA, 25 bp, Probe Sequence
aaactaacctgccttaagaacagaa

SEQ ID NO: 59974 - DNA, 25 bp, Probe Sequence
taaactaacctgccttaagaacaga

SEQ ID NO: 59975 - DNA, 25 bp, Probe Sequence
attaaactaacctgccttaagaaca

SEQ ID NO: 59976 - DNA, 25 bp, Probe Sequence
ttaaactaacctgccttaagaacag

SEQ ID NO: 59977 - DNA, 25 bp, Probe Sequence
cttcatctaatcactgaattgtcag

SEQ ID NO: 59978 - DNA, 25 bp, Probe Sequence
aattaaactaacctgccttaagaac

SEQ ID NO: 59979 - DNA, 25 bp, Probe Sequence
ctaatcactgaattgtcaggctttg

SEQ ID NO: 59980 - DNA, 25 bp, Probe Sequence
tctaatcactgaattgtcaggcttt

SEQ ID NO: 59981 - DNA, 25 bp, Probe Sequence
tactctgattacccactcactacat

SEQ ID NO: 59982 - DNA, 25 bp, Probe Sequence
ttactctgattacccactcactaca

SEQ ID NO: 59983 - DNA, 25 bp, Probe Sequence
ctctttactctgattacccactcac

SEQ ID NO: 59984 - DNA, 25 bp, Probe Sequence
tttactctgattacccactcactac

SEQ ID NO: 59985 - DNA, 25 bp, Probe Sequence
tctttactctgattacccactcact

SEQ ID NO: 59986 - DNA, 25 bp, Probe Sequence
ctttactctgattacccactcacta

SEQ ID NO: 59987 - DNA, 25 bp, Probe Sequence
ccctctttactctgattacccactc

SEQ ID NO: 59988 - DNA, 25 bp, Probe Sequence
cctctttactctgattacccactca

SEQ ID NO: 59989 - DNA, 25 bp, Probe Sequence
gacagaaccgtatcactgatgactg

SEQ ID NO: 59990 - DNA, 25 bp, Probe Sequence
cagaaccgtatcactgatgactgat

SEQ ID NO: 59991 - DNA, 25 bp, Probe Sequence
acagaaccgtatcactgatgactga

SEQ ID NO: 59992 - DNA, 25 bp, Probe Sequence
tgacagaaccgtatcactgatgact

SEQ ID NO: 59993 - DNA, 25 bp, Probe Sequence
agaaagccctctttactctgattac

SEQ ID NO: 59994 - DNA, 25 bp, Probe Sequence
atgactgatagaaagccctctttac

SEQ ID NO: 59995 - DNA, 25 bp, Probe Sequence
gatgactgatagaaagccctcttta

SEQ ID NO: 59996 - DNA, 25 bp, Probe Sequence
gatagaaagccctctttactctgat

SEQ ID NO: 59997 - DNA, 25 bp, Probe Sequence
ctgatagaaagccctctttactctg

SEQ ID NO: 59998 - DNA, 25 bp, Probe Sequence
gactgatagaaagccctctttactc

SEQ ID NO: 59999 - DNA, 25 bp, Probe Sequence
aagccctctttactctgattaccca

SEQ ID NO: 60000 - DNA, 25 bp, Probe Sequence
tgatagaaagccctctttactctga

SEQ ID NO: 60001 - DNA, 25 bp, Probe Sequence
actgatagaaagccctctttactct

SEQ ID NO: 60002 - DNA, 25 bp, Probe Sequence
atagaaagccctctttactctgatt

SEQ ID NO: 60003 - DNA, 25 bp, Probe Sequence
gaaagccctctttactctgattacc

SEQ ID NO: 60004 - DNA, 25 bp, Probe Sequence
tgactgatagaaagccctctttact

SEQ ID NO: 60005 - DNA, 25 bp, Probe Sequence
gcctgtcagagttgttcagtataat

SEQ ID NO: 60006 - DNA, 25 bp, Probe Sequence
agcctgtcagagttgttcagtataa

SEQ ID NO: 60007 - DNA, 25 bp, Probe Sequence
aagcctgtcagagttgttcagtata

SEQ ID NO: 60008 - DNA, 25 bp, Probe Sequence
taagcctgtcagagttgttcagtat

SEQ ID NO: 60009 - DNA, 25 bp, Probe Sequence
ctaagcctgtcagagttgttcagta

SEQ ID NO: 60010 - DNA, 25 bp, Probe Sequence
cctgtcagagttgttcagtataata

SEQ ID NO: 60011 - DNA, 25 bp, Probe Sequence
aagtatagtaaagcaagcagtttga

SEQ ID NO: 60012 - DNA, 25 bp, Probe Sequence
agtatagtaaagcaagcagtttgat

SEQ ID NO: 60013 - DNA, 25 bp, Probe Sequence
aaagtatagtaaagcaagcagtttg

SEQ ID NO: 60014 - DNA, 25 bp, Probe Sequence
gtatagtaaagcaagcagtttgatt

SEQ ID NO: 60015 - DNA, 25 bp, Probe Sequence
gtcagagttgttcagtataatatca

SEQ ID NO: 60016 - DNA, 25 bp, Probe Sequence
tgtcagagttgttcagtataatatc

SEQ ID NO: 60017 - DNA, 25 bp, Probe Sequence
tatagtaaagcaagcagtttgattt

SEQ ID NO: 60018 - DNA, 25 bp, Probe Sequence
ctgtcagagttgttcagtataatat

SEQ ID NO: 60019 - DNA, 25 bp, Probe Sequence
taaagtatagtaaagcaagcagttt

SEQ ID NO: 60020 - DNA, 25 bp, Probe Sequence
tcaataaagtatagtaaagcaagca

SEQ ID NO: 60021 - DNA, 25 bp, Probe Sequence
ataaagtatagtaaagcaagcagtt

SEQ ID NO: 60022 - DNA, 25 bp, Probe Sequence
aataaagtatagtaaagcaagcagt

SEQ ID NO: 60023 - DNA, 25 bp, Probe Sequence
taaagcaagcagtttgattttggaa

SEQ ID NO: 60024 - DNA, 25 bp, Probe Sequence
caataaagtatagtaaagcaagcag

SEQ ID NO: 60025 - DNA, 25 bp, Probe Sequence
cctaagcctgtcagagttgttcagt

SEQ ID NO: 60026 - DNA, 25 bp, Probe Sequence
aaagcaagcagtttgattttggaaa

SEQ ID NO: 60027 - DNA, 25 bp, Probe Sequence
gtaaagcaagcagtttgattttgga

SEQ ID NO: 60028 - DNA, 25 bp, Probe Sequence
agtaaagcaagcagtttgattttgg

SEQ ID NO: 60029 - DNA, 25 bp, Probe Sequence
ccgtagtcttctaatacagtctctc

SEQ ID NO: 60030 - DNA, 25 bp, Probe Sequence
cgtagtcttctaatacagtctctca

SEQ ID NO: 60031 - DNA, 25 bp, Probe Sequence
atgtgaactccttaactcatcaagt

SEQ ID NO: 60032 - DNA, 25 bp, Probe Sequence
aatgaggagagagaagatgaggttg

SEQ ID NO: 60033 - DNA, 25 bp, Probe Sequence
tgtgaactccttaactcatcaagta

SEQ ID NO: 60034 - DNA, 25 bp, Probe Sequence
gagagaagatgaggttggacaagat

SEQ ID NO: 60035 - DNA, 25 bp, Probe Sequence
agagaagatgaggttggacaagatg

SEQ ID NO: 60036 - DNA, 25 bp, Probe Sequence
gtgaactccttaactcatcaagtaa

SEQ ID NO: 60037 - DNA, 25 bp, Probe Sequence
ctacatcagacaggaccacatctag

SEQ ID NO: 60038 - DNA, 25 bp, Probe Sequence
gagagagaagatgaggttggacaag

SEQ ID NO: 60039 - DNA, 25 bp, Probe Sequence
gatggatgtgaactccttaactcat

SEQ ID NO: 60040 - DNA, 25 bp, Probe Sequence
tagatggatgtgaactccttaactc

SEQ ID NO: 60041 - DNA, 25 bp, Probe Sequence
gtagtcttctaatacagtctctcag

SEQ ID NO: 60042 - DNA, 25 bp, Probe Sequence
ctagatggatgtgaactccttaact

SEQ ID NO: 60043 - DNA, 25 bp, Probe Sequence
cttaactcatcaagtaaggtggtac

SEQ ID NO: 60044 - DNA, 25 bp, Probe Sequence
tgaactccttaactcatcaagtaag

SEQ ID NO: 60045 - DNA, 25 bp, Probe Sequence
agatggatgtgaactccttaactca

SEQ ID NO: 60046 - DNA, 25 bp, Probe Sequence
agagagaagatgaggttggacaaga

SEQ ID NO: 60047 - DNA, 25 bp, Probe Sequence
tagtcttctaatacagtctctcaga

SEQ ID NO: 60048 - DNA, 25 bp, Probe Sequence
tggaacagagcacggtataaataat

SEQ ID NO: 60049 - DNA, 25 bp, Probe Sequence
ttggaacagagcacggtataaataa

SEQ ID NO: 60050 - DNA, 25 bp, Probe Sequence
tttggaacagagcacggtataaata

SEQ ID NO: 60051 - DNA, 25 bp, Probe Sequence
atcccgtagtcttctaatacagtct

SEQ ID NO: 60052 - DNA, 25 bp, Probe Sequence
catcccgtagtcttctaatacagtc

SEQ ID NO: 60053 - DNA, 25 bp, Probe Sequence
catactgttagagaccactggattg

SEQ ID NO: 60054 - DNA, 25 bp, Probe Sequence
cttatcaatgaagctactaggcaag

SEQ ID NO: 60055 - DNA, 25 bp, Probe Sequence
tatcaatgaagctactaggcaagtt

SEQ ID NO: 60056 - DNA, 25 bp, Probe Sequence
ttatcaatgaagctactaggcaagt

SEQ ID NO: 60057 - DNA, 25 bp, Probe Sequence
gcctttgatagtctctctggaataa

SEQ ID NO: 60058 - DNA, 25 bp, Probe Sequence
tgcctttgatagtctctctggaata

SEQ ID NO: 60059 - DNA, 25 bp, Probe Sequence
gatagtctctctggaataagtttgc

SEQ ID NO: 60060 - DNA, 25 bp, Probe Sequence
atcaatgaagctactaggcaagttg

SEQ ID NO: 60061 - DNA, 25 bp, Probe Sequence
atactgttagagaccactggattgg

SEQ ID NO: 60062 - DNA, 25 bp, Probe Sequence
atgcctttgatagtctctctggaat

SEQ ID NO: 60063 - DNA, 25 bp, Probe Sequence
ccttatcaatgaagctactaggcaa

SEQ ID NO: 60064 - DNA, 25 bp, Probe Sequence
cctttgatagtctctctggaataag

SEQ ID NO: 60065 - DNA, 25 bp, Probe Sequence
tgatagtctctctggaataagtttg

SEQ ID NO: 60066 - DNA, 25 bp, Probe Sequence
aatggccttagagctattgagaatt

SEQ ID NO: 60067 - DNA, 25 bp, Probe Sequence
atcttcatgcctttgatagtctctc

SEQ ID NO: 60068 - DNA, 25 bp, Probe Sequence
gatcttcatgcctttgatagtctct

SEQ ID NO: 60069 - DNA, 25 bp, Probe Sequence
tagggagtgatatttaccttgatgg

SEQ ID NO: 60070 - DNA, 25 bp, Probe Sequence
cttcatgcctttgatagtctctctg

SEQ ID NO: 60071 - DNA, 25 bp, Probe Sequence
tcttcatgcctttgatagtctctct

SEQ ID NO: 60072 - DNA, 25 bp, Probe Sequence
ctttgatagtctctctggaataagt

SEQ ID NO: 60073 - DNA, 25 bp, Probe Sequence
agggagtgatatttaccttgatggt

SEQ ID NO: 60074 - DNA, 25 bp, Probe Sequence
atagtctctctggaataagtttgca

SEQ ID NO: 60075 - DNA, 25 bp, Probe Sequence
catgcctttgatagtctctctggaa

SEQ ID NO: 60076 - DNA, 25 bp, Probe Sequence
ttgatagtctctctggaataagttt

SEQ ID NO: 60077 - DNA, 25 bp, Probe Sequence
caggtttgtttgaatgcctctaaag

SEQ ID NO: 60078 - DNA, 25 bp, Probe Sequence
atgctccatctactttggttaggta

SEQ ID NO: 60079 - DNA, 25 bp, Probe Sequence
gtcagatccttaccctgtctacttc

SEQ ID NO: 60080 - DNA, 25 bp, Probe Sequence
ccaggtttgtttgaatgcctctaaa

SEQ ID NO: 60081 - DNA, 25 bp, Probe Sequence
gtttgtttgaatgcctctaaagccc

SEQ ID NO: 60082 - DNA, 25 bp, Probe Sequence
ggtttgtttgaatgcctctaaagcc

SEQ ID NO: 60083 - DNA, 25 bp, Probe Sequence
agtcagatccttaccctgtctactt

SEQ ID NO: 60084 - DNA, 25 bp, Probe Sequence
aggtttgtttgaatgcctctaaagc

SEQ ID NO: 60085 - DNA, 25 bp, Probe Sequence
ttgtttgaatgcctctaaagcccat

SEQ ID NO: 60086 - DNA, 25 bp, Probe Sequence
cacatgctccatctactttggttag

SEQ ID NO: 60087 - DNA, 25 bp, Probe Sequence
tttgtttgaatgcctctaaagccca

SEQ ID NO: 60088 - DNA, 25 bp, Probe Sequence
atccttaccctgtctacttccagtc

SEQ ID NO: 60089 - DNA, 25 bp, Probe Sequence
agatccttaccctgtctacttccag

SEQ ID NO: 60090 - DNA, 25 bp, Probe Sequence
tcagatccttaccctgtctacttcc

SEQ ID NO: 60091 - DNA, 25 bp, Probe Sequence
cagtcagatccttaccctgtctact

SEQ ID NO: 60092 - DNA, 25 bp, Probe Sequence
tgctccatctactttggttaggtag

SEQ ID NO: 60093 - DNA, 25 bp, Probe Sequence
gatccttaccctgtctacttccagt

SEQ ID NO: 60094 - DNA, 25 bp, Probe Sequence
cagatccttaccctgtctacttcca

SEQ ID NO: 60095 - DNA, 25 bp, Probe Sequence
catgctccatctactttggttaggt

SEQ ID NO: 60096 - DNA, 25 bp, Probe Sequence
acatgctccatctactttggttagg

SEQ ID NO: 60097 - DNA, 25 bp, Probe Sequence
ccacatgctccatctactttggtta

SEQ ID NO: 60098 - DNA, 25 bp, Probe Sequence
atctactttggttaggtagctccag

SEQ ID NO: 60099 - DNA, 25 bp, Probe Sequence
tccatctactttggttaggtagctc

SEQ ID NO: 60100 - DNA, 25 bp, Probe Sequence
ctccatctactttggttaggtagct

SEQ ID NO: 60101 - DNA, 25 bp, Probe Sequence
catcatccaagaccatccattattc

SEQ ID NO: 60102 - DNA, 25 bp, Probe Sequence
ccatcatccaagaccatccattatt

SEQ ID NO: 60103 - DNA, 25 bp, Probe Sequence
atcatccaagaccatccattattct

SEQ ID NO: 60104 - DNA, 25 bp, Probe Sequence
tccatcatccaagaccatccattat

SEQ ID NO: 60105 - DNA, 25 bp, Probe Sequence
atccatcatccaagaccatccatta

SEQ ID NO: 60106 - DNA, 25 bp, Probe Sequence
tatccatcatccaagaccatccatt

SEQ ID NO: 60107 - DNA, 25 bp, Probe Sequence
ttatccatcatccaagaccatccat

SEQ ID NO: 60108 - DNA, 25 bp, Probe Sequence
tcatccaagaccatccattattcta

SEQ ID NO: 60109 - DNA, 25 bp, Probe Sequence
catccaagaccatccattattctag

SEQ ID NO: 60110 - DNA, 25 bp, Probe Sequence
gaggttaagagtagcatgaagaact

SEQ ID NO: 60111 - DNA, 25 bp, Probe Sequence
ggaggttaagagtagcatgaagaac

SEQ ID NO: 60112 - DNA, 25 bp, Probe Sequence
aggttaagagtagcatgaagaactt

SEQ ID NO: 60113 - DNA, 25 bp, Probe Sequence
cctatttatccatcatccaagacca

SEQ ID NO: 60114 - DNA, 25 bp, Probe Sequence
tgtccctatttatccatcatccaag

SEQ ID NO: 60115 - DNA, 25 bp, Probe Sequence
ctgtccctatttatccatcatccaa

SEQ ID NO: 60116 - DNA, 25 bp, Probe Sequence
atttatccatcatccaagaccatcc

SEQ ID NO: 60117 - DNA, 25 bp, Probe Sequence
tccctatttatccatcatccaagac

SEQ ID NO: 60118 - DNA, 25 bp, Probe Sequence
gtccctatttatccatcatccaaga

SEQ ID NO: 60119 - DNA, 25 bp, Probe Sequence
ccctatttatccatcatccaagacc

SEQ ID NO: 60120 - DNA, 25 bp, Probe Sequence
tcatgtatgtgacttagatactgct

SEQ ID NO: 60121 - DNA, 25 bp, Probe Sequence
ttaactgtccctgtccctatttatc

SEQ ID NO: 60122 - DNA, 25 bp, Probe Sequence
aaaggacagtgtttagaaagggtaa

SEQ ID NO: 60123 - DNA, 25 bp, Probe Sequence
taactgtccctgtccctatttatcc

SEQ ID NO: 60124 - DNA, 25 bp, Probe Sequence
tccctgtccctatttatccatcatc

SEQ ID NO: 60125 - DNA, 25 bp, Probe Sequence
agaagtccgcatagtcatcataatc

SEQ ID NO: 60126 - DNA, 25 bp, Probe Sequence
acaatatagaagtccgcatagtcat

SEQ ID NO: 60127 - DNA, 25 bp, Probe Sequence
tagaagtccgcatagtcatcataat

SEQ ID NO: 60128 - DNA, 25 bp, Probe Sequence
atagaagtccgcatagtcatcataa

SEQ ID NO: 60129 - DNA, 25 bp, Probe Sequence
aatatagaagtccgcatagtcatca

SEQ ID NO: 60130 - DNA, 25 bp, Probe Sequence
atatagaagtccgcatagtcatcat

SEQ ID NO: 60131 - DNA, 25 bp, Probe Sequence
caatatagaagtccgcatagtcatc

SEQ ID NO: 60132 - DNA, 25 bp, Probe Sequence
gaagtccgcatagtcatcataatcc

SEQ ID NO: 60133 - DNA, 25 bp, Probe Sequence
aatacacacaatgagatgaagacaa

SEQ ID NO: 60134 - DNA, 25 bp, Probe Sequence
ggtctacatcttactcagaatcact

SEQ ID NO: 60135 - DNA, 25 bp, Probe Sequence
aggtctacatcttactcagaatcac

SEQ ID NO: 60136 - DNA, 25 bp, Probe Sequence
acatcttactcagaatcactacaca

SEQ ID NO: 60137 - DNA, 25 bp, Probe Sequence
tatagaagtccgcatagtcatcata

SEQ ID NO: 60138 - DNA, 25 bp, Probe Sequence
atacacacaatgagatgaagacaat

SEQ ID NO: 60139 - DNA, 25 bp, Probe Sequence
acacacaatgagatgaagacaatat

SEQ ID NO: 60140 - DNA, 25 bp, Probe Sequence
ggagcaagaatctcatagttcagag

SEQ ID NO: 60141 - DNA, 25 bp, Probe Sequence
cgtaggtctacatcttactcagaat

SEQ ID NO: 60142 - DNA, 25 bp, Probe Sequence
tacacacaatgagatgaagacaata

SEQ ID NO: 60143 - DNA, 25 bp, Probe Sequence
taatacacacaatgagatgaagaca

SEQ ID NO: 60144 - DNA, 25 bp, Probe Sequence
gacaatatagaagtccgcatagtca

SEQ ID NO: 60145 - DNA, 25 bp, Probe Sequence
atgaagacaatatagaagtccgcat

SEQ ID NO: 60146 - DNA, 25 bp, Probe Sequence
agacaatatagaagtccgcatagtc

SEQ ID NO: 60147 - DNA, 25 bp, Probe Sequence
agatgaagacaatatagaagtccgc

SEQ ID NO: 60148 - DNA, 25 bp, Probe Sequence
gatgaagacaatatagaagtccgca

SEQ ID NO: 60149 - DNA, 25 bp, Probe Sequence
ttcaggtctgtgatgagaaacggag

SEQ ID NO: 60150 - DNA, 25 bp, Probe Sequence
cttcaggtctgtgatgagaaacgga

SEQ ID NO: 60151 - DNA, 25 bp, Probe Sequence
atctgccttcaggtctgtgatgaga

SEQ ID NO: 60152 - DNA, 25 bp, Probe Sequence
ctgccttcaggtctgtgatgagaaa

SEQ ID NO: 60153 - DNA, 25 bp, Probe Sequence
tgccttcaggtctgtgatgagaaac

SEQ ID NO: 60154 - DNA, 25 bp, Probe Sequence
gagaactgcaaggtcacctacttcc

SEQ ID NO: 60155 - DNA, 25 bp, Probe Sequence
ggagaactgcaaggtcacctacttc

SEQ ID NO: 60156 - DNA, 25 bp, Probe Sequence
caggtctgtgatgagaaacggagtg

SEQ ID NO: 60157 - DNA, 25 bp, Probe Sequence
ccttcaggtctgtgatgagaaacgg

SEQ ID NO: 60158 - DNA, 25 bp, Probe Sequence
aggagaactgcaaggtcacctactt

SEQ ID NO: 60159 - DNA, 25 bp, Probe Sequence
catctgccttcaggtctgtgatgag

SEQ ID NO: 60160 - DNA, 25 bp, Probe Sequence
tgacatttgatctctggccttgacc

SEQ ID NO: 60161 - DNA, 25 bp, Probe Sequence
ggcagagttgtctgaatccttcctg

SEQ ID NO: 60162 - DNA, 25 bp, Probe Sequence
caggcagagttgtctgaatccttcc

SEQ ID NO: 60163 - DNA, 25 bp, Probe Sequence
ccaggcagagttgtctgaatccttc

SEQ ID NO: 60164 - DNA, 25 bp, Probe Sequence
cttgaccgcagatttcggaaacttc

SEQ ID NO: 60165 - DNA, 25 bp, Probe Sequence
ttgaccgcagatttcggaaacttct

SEQ ID NO: 60166 - DNA, 25 bp, Probe Sequence
ttaaaccttggtctttcttgaatcc

SEQ ID NO: 60167 - DNA, 25 bp, Probe Sequence
gctttaaaccttggtctttcttgaa

SEQ ID NO: 60168 - DNA, 25 bp, Probe Sequence
gagctttaaaccttggtctttcttg

SEQ ID NO: 60169 - DNA, 25 bp, Probe Sequence
agctttaaaccttggtctttcttga

SEQ ID NO: 60170 - DNA, 25 bp, Probe Sequence
taaaccttggtctttcttgaatcca

SEQ ID NO: 60171 - DNA, 25 bp, Probe Sequence
ggagctttaaaccttggtctttctt

SEQ ID NO: 60172 - DNA, 25 bp, Probe Sequence
tttaaaccttggtctttcttgaatc

SEQ ID NO: 60173 - DNA, 25 bp, Probe Sequence
ctttaaaccttggtctttcttgaat

SEQ ID NO: 60174 - DNA, 25 bp, Probe Sequence
atagaaaatcagaacattgcccaag

SEQ ID NO: 60175 - DNA, 25 bp, Probe Sequence
aatagaaaatcagaacattgcccaa

SEQ ID NO: 60176 - DNA, 25 bp, Probe Sequence
taatagaaaatcagaacattgccca

SEQ ID NO: 60177 - DNA, 25 bp, Probe Sequence
tagaaaatcagaacattgcccaagg

SEQ ID NO: 60178 - DNA, 25 bp, Probe Sequence
aggagctttaaaccttggtctttct

SEQ ID NO: 60179 - DNA, 25 bp, Probe Sequence
atagacttgttaggcaataatagaa

SEQ ID NO: 60180 - DNA, 25 bp, Probe Sequence
tgctgattgaaaataactatgcttt

SEQ ID NO: 60181 - DNA, 25 bp, Probe Sequence
ccatgctgattgaaaataactatgc

SEQ ID NO: 60182 - DNA, 25 bp, Probe Sequence
ataatagaaaatcagaacattgccc

SEQ ID NO: 60183 - DNA, 25 bp, Probe Sequence
atgctgattgaaaataactatgctt

SEQ ID NO: 60184 - DNA, 25 bp, Probe Sequence
aaatcagaacattgcccaagggatg

SEQ ID NO: 60185 - DNA, 25 bp, Probe Sequence
ggtctttcttgaatccaaaattcca

SEQ ID NO: 60186 - DNA, 25 bp, Probe Sequence
tggtctttcttgaatccaaaattcc

SEQ ID NO: 60187 - DNA, 25 bp, Probe Sequence
catgctgattgaaaataactatgct

SEQ ID NO: 60188 - DNA, 25 bp, Probe Sequence
ccatcttcttttcattataccatgc

SEQ ID NO: 60189 - DNA, 25 bp, Probe Sequence
tcttcttttcattataccatgctga

SEQ ID NO: 60190 - DNA, 25 bp, Probe Sequence
atatacacagagatggtcttggaga

SEQ ID NO: 60191 - DNA, 25 bp, Probe Sequence
gatatacacagagatggtcttggag

SEQ ID NO: 60192 - DNA, 25 bp, Probe Sequence
ttgatatacacagagatggtcttgg

SEQ ID NO: 60193 - DNA, 25 bp, Probe Sequence
tatacacagagatggtcttggagaa

SEQ ID NO: 60194 - DNA, 25 bp, Probe Sequence
ccttgatatacacagagatggtctt

SEQ ID NO: 60195 - DNA, 25 bp, Probe Sequence
tgatatacacagagatggtcttgga

SEQ ID NO: 60196 - DNA, 25 bp, Probe Sequence
ggtcttggagaattgtgaatgtatg

SEQ ID NO: 60197 - DNA, 25 bp, Probe Sequence
tggtcttggagaattgtgaatgtat

SEQ ID NO: 60198 - DNA, 25 bp, Probe Sequence
atggtcttggagaattgtgaatgta

SEQ ID NO: 60199 - DNA, 25 bp, Probe Sequence
gtcttggagaattgtgaatgtatgt

SEQ ID NO: 60200 - DNA, 25 bp, Probe Sequence
atacacagagatggtcttggagaat

SEQ ID NO: 60201 - DNA, 25 bp, Probe Sequence
gagatggtcttggagaattgtgaat

SEQ ID NO: 60202 - DNA, 25 bp, Probe Sequence
agatggtcttggagaattgtgaatg

SEQ ID NO: 60203 - DNA, 25 bp, Probe Sequence
cttgatatacacagagatggtcttg

SEQ ID NO: 60204 - DNA, 25 bp, Probe Sequence
tacacagagatggtcttggagaatt

SEQ ID NO: 60205 - DNA, 25 bp, Probe Sequence
gatggtcttggagaattgtgaatgt

SEQ ID NO: 60206 - DNA, 25 bp, Probe Sequence
ggagaattgtgaatgtatgtactgt

SEQ ID NO: 60207 - DNA, 25 bp, Probe Sequence
tggagaattgtgaatgtatgtactg

SEQ ID NO: 60208 - DNA, 25 bp, Probe Sequence
agagatggtcttggagaattgtgaa

SEQ ID NO: 60209 - DNA, 25 bp, Probe Sequence
ttaaccttgatatacacagagatgg

SEQ ID NO: 60210 - DNA, 25 bp, Probe Sequence
actgtattgtcatcaaggatactgt

SEQ ID NO: 60211 - DNA, 25 bp, Probe Sequence
tcttggagaattgtgaatgtatgta

SEQ ID NO: 60212 - DNA, 25 bp, Probe Sequence
ttggagaattgtgaatgtatgtact

SEQ ID NO: 60213 - DNA, 25 bp, Probe Sequence
tgtattgtcatcaaggatactgtcc

SEQ ID NO: 60214 - DNA, 25 bp, Probe Sequence
ggcttatgagaatcacaactgtatg

SEQ ID NO: 60215 - DNA, 25 bp, Probe Sequence
aggcttatgagaatcacaactgtat

SEQ ID NO: 60216 - DNA, 25 bp, Probe Sequence
gcttatgagaatcacaactgtatgt

SEQ ID NO: 60217 - DNA, 25 bp, Probe Sequence
caggcttatgagaatcacaactgta

SEQ ID NO: 60218 - DNA, 25 bp, Probe Sequence
ctgtgatactgagagctacctattg

SEQ ID NO: 60219 - DNA, 25 bp, Probe Sequence
atactgagagctacctattggcata

SEQ ID NO: 60220 - DNA, 25 bp, Probe Sequence
tactgagagctacctattggcataa

SEQ ID NO: 60221 - DNA, 25 bp, Probe Sequence
tgtgatactgagagctacctattgg

SEQ ID NO: 60222 - DNA, 25 bp, Probe Sequence
tcaggcttatgagaatcacaactgt

SEQ ID NO: 60223 - DNA, 25 bp, Probe Sequence
gatactgagagctacctattggcat

SEQ ID NO: 60224 - DNA, 25 bp, Probe Sequence
aatgaggtagactggatcaatgtgg

SEQ ID NO: 60225 - DNA, 25 bp, Probe Sequence
ttatgagaatcacaactgtatgtct

SEQ ID NO: 60226 - DNA, 25 bp, Probe Sequence
cttatgagaatcacaactgtatgtc

SEQ ID NO: 60227 - DNA, 25 bp, Probe Sequence
atgagaatcacaactgtatgtctat

SEQ ID NO: 60228 - DNA, 25 bp, Probe Sequence
gtgatactgagagctacctattggc

SEQ ID NO: 60229 - DNA, 25 bp, Probe Sequence
tgatactgagagctacctattggca

SEQ ID NO: 60230 - DNA, 25 bp, Probe Sequence
tgagaatcacaactgtatgtctata

SEQ ID NO: 60231 - DNA, 25 bp, Probe Sequence
tatgagaatcacaactgtatgtcta

SEQ ID NO: 60232 - DNA, 25 bp, Probe Sequence
aaatgaggtagactggatcaatgtg

SEQ ID NO: 60233 - DNA, 25 bp, Probe Sequence
aagaatatgaaggacatacaggtaa

SEQ ID NO: 60234 - DNA, 25 bp, Probe Sequence
aaagagaaagagctgtgatactgag

SEQ ID NO: 60235 - DNA, 25 bp, Probe Sequence
aagagaaagagctgtgatactgaga

SEQ ID NO: 60236 - DNA, 25 bp, Probe Sequence
aatcacaactgtatgtctataggac

SEQ ID NO: 60237 - DNA, 25 bp, Probe Sequence
gaatcacaactgtatgtctatagga

SEQ ID NO: 60238 - DNA, 25 bp, Probe Sequence
cgtcatcaatcctatcatcttcaat

SEQ ID NO: 60239 - DNA, 25 bp, Probe Sequence
ataactgttaccgccgttcttattc

SEQ ID NO: 60240 - DNA, 25 bp, Probe Sequence
caataactgttaccgccgttcttat

SEQ ID NO: 60241 - DNA, 25 bp, Probe Sequence
taactgttaccgccgttcttattct

SEQ ID NO: 60242 - DNA, 25 bp, Probe Sequence
ctgataccagatacaggttgttgat

SEQ ID NO: 60243 - DNA, 25 bp, Probe Sequence
tgataccagatacaggttgttgatt

SEQ ID NO: 60244 - DNA, 25 bp, Probe Sequence
acgtcatcaatcctatcatcttcaa

SEQ ID NO: 60245 - DNA, 25 bp, Probe Sequence
cacgtcatcaatcctatcatcttca

SEQ ID NO: 60246 - DNA, 25 bp, Probe Sequence
tcctatcatcttcaataacaacccg

SEQ ID NO: 60247 - DNA, 25 bp, Probe Sequence
tatcatcttcaataacaacccgctt

SEQ ID NO: 60248 - DNA, 25 bp, Probe Sequence
tctctcccttaactcattgtctttg

SEQ ID NO: 60249 - DNA, 25 bp, Probe Sequence
ttctctcccttaactcattgtcttt

SEQ ID NO: 60250 - DNA, 25 bp, Probe Sequence
attctctcccttaactcattgtctt

SEQ ID NO: 60251 - DNA, 25 bp, Probe Sequence
ctatcatcttcaataacaacccgct

SEQ ID NO: 60252 - DNA, 25 bp, Probe Sequence
ctctcccttaactcattgtctttgg

SEQ ID NO: 60253 - DNA, 25 bp, Probe Sequence
cgttcttattctctcccttaactca

SEQ ID NO: 60254 - DNA, 25 bp, Probe Sequence
ccgttcttattctctcccttaactc

SEQ ID NO: 60255 - DNA, 25 bp, Probe Sequence
aatcctatcatcttcaataacaacc

SEQ ID NO: 60256 - DNA, 25 bp, Probe Sequence
gcacgtcatcaatcctatcatcttc

SEQ ID NO: 60257 - DNA, 25 bp, Probe Sequence
tattctctcccttaactcattgtct

SEQ ID NO: 60258 - DNA, 25 bp, Probe Sequence
ctgttaccgccgttcttattctctc

SEQ ID NO: 60259 - DNA, 25 bp, Probe Sequence
atcctatcatcttcaataacaaccc

SEQ ID NO: 60260 - DNA, 25 bp, Probe Sequence
aataactgttaccgccgttcttatt

SEQ ID NO: 60261 - DNA, 25 bp, Probe Sequence
aactgttaccgccgttcttattctc

SEQ ID NO: 60262 - DNA, 25 bp, Probe Sequence
tctctctcctactggttattcttga

SEQ ID NO: 60263 - DNA, 25 bp, Probe Sequence
ctctctctcctactggttattcttg

SEQ ID NO: 60264 - DNA, 25 bp, Probe Sequence
tctctctctcctactggttattctt

SEQ ID NO: 60265 - DNA, 25 bp, Probe Sequence
ttctctctctcctactggttattct

SEQ ID NO: 60266 - DNA, 25 bp, Probe Sequence
ttcacactcactacttaatactgcc

SEQ ID NO: 60267 - DNA, 25 bp, Probe Sequence
cacactcactacttaatactgccat

SEQ ID NO: 60268 - DNA, 25 bp, Probe Sequence
ctctctcctactggttattcttgaa

SEQ ID NO: 60269 - DNA, 25 bp, Probe Sequence
tcacactcactacttaatactgcca

SEQ ID NO: 60270 - DNA, 25 bp, Probe Sequence
attcacactcactacttaatactgc

SEQ ID NO: 60271 - DNA, 25 bp, Probe Sequence
attcttgaattaagcacagactcgt

SEQ ID NO: 60272 - DNA, 25 bp, Probe Sequence
tattcttgaattaagcacagactcg

SEQ ID NO: 60273 - DNA, 25 bp, Probe Sequence
actggttattcttgaattaagcaca

SEQ ID NO: 60274 - DNA, 25 bp, Probe Sequence
tctctcctactggttattcttgaat

SEQ ID NO: 60275 - DNA, 25 bp, Probe Sequence
acactcactacttaatactgccatg

SEQ ID NO: 60276 - DNA, 25 bp, Probe Sequence
ttcttgaattaagcacagactcgtc

SEQ ID NO: 60277 - DNA, 25 bp, Probe Sequence
tggttattcttgaattaagcacaga

SEQ ID NO: 60278 - DNA, 25 bp, Probe Sequence
ttctgtgatgtattgtcttccagtt

SEQ ID NO: 60279 - DNA, 25 bp, Probe Sequence
atggcattcagtgttctgtatagat

SEQ ID NO: 60280 - DNA, 25 bp, Probe Sequence
ggttattcttgaattaagcacagac

SEQ ID NO: 60281 - DNA, 25 bp, Probe Sequence
tctgtgatgtattgtcttccagttg

SEQ ID NO: 60282 - DNA, 25 bp, Probe Sequence
ctctcctactggttattcttgaatt

SEQ ID NO: 60283 - DNA, 25 bp, Probe Sequence
cgtgatgttctgttatgttcatgta

SEQ ID NO: 60284 - DNA, 25 bp, Probe Sequence
tggcattcagtgttctgtatagatc

SEQ ID NO: 60285 - DNA, 25 bp, Probe Sequence
cttgaattaagcacagactcgtcag

SEQ ID NO: 60286 - DNA, 25 bp, Probe Sequence
atgaagaccagtgaattacgatatt

SEQ ID NO: 60287 - DNA, 25 bp, Probe Sequence
attatgaagaccagtgaattacgat

SEQ ID NO: 60288 - DNA, 25 bp, Probe Sequence
ttatgaagaccagtgaattacgata

SEQ ID NO: 60289 - DNA, 25 bp, Probe Sequence
tattatgaagaccagtgaattacga

SEQ ID NO: 60290 - DNA, 25 bp, Probe Sequence
tatgaagaccagtgaattacgatat

SEQ ID NO: 60291 - DNA, 25 bp, Probe Sequence
ttattatgaagaccagtgaattacg

SEQ ID NO: 60292 - DNA, 25 bp, Probe Sequence
tgaagaccagtgaattacgatattt

SEQ ID NO: 60293 - DNA, 25 bp, Probe Sequence
tttaaagatggaagctaagcaatgg

SEQ ID NO: 60294 - DNA, 25 bp, Probe Sequence
taaagatggaagctaagcaatggaa

SEQ ID NO: 60295 - DNA, 25 bp, Probe Sequence
ttaaagatggaagctaagcaatgga

SEQ ID NO: 60296 - DNA, 25 bp, Probe Sequence
aagtttaaagatggaagctaagcaa

SEQ ID NO: 60297 - DNA, 25 bp, Probe Sequence
aagatggaagctaagcaatggaaat

SEQ ID NO: 60298 - DNA, 25 bp, Probe Sequence
gtttaaagatggaagctaagcaatg

SEQ ID NO: 60299 - DNA, 25 bp, Probe Sequence
agtttaaagatggaagctaagcaat

SEQ ID NO: 60300 - DNA, 25 bp, Probe Sequence
aaagatggaagctaagcaatggaaa

SEQ ID NO: 60301 - DNA, 25 bp, Probe Sequence
agatggaagctaagcaatggaaatg

SEQ ID NO: 60302 - DNA, 25 bp, Probe Sequence
taagtttaaagatggaagctaagca

SEQ ID NO: 60303 - DNA, 25 bp, Probe Sequence
agatgtgtgaaatgttctctgcaaa

SEQ ID NO: 60304 - DNA, 25 bp, Probe Sequence
aagatgtgtgaaatgttctctgcaa

SEQ ID NO: 60305 - DNA, 25 bp, Probe Sequence
aaagatgtgtgaaatgttctctgca

SEQ ID NO: 60306 - DNA, 25 bp, Probe Sequence
gaagaccagtgaattacgatattta

SEQ ID NO: 60307 - DNA, 25 bp, Probe Sequence
ttaagtttaaagatggaagctaagc

SEQ ID NO: 60308 - DNA, 25 bp, Probe Sequence
tgagtttacttttgttcctgttgtt

SEQ ID NO: 60309 - DNA, 25 bp, Probe Sequence
atgagtttacttttgttcctgttgt

SEQ ID NO: 60310 - DNA, 25 bp, Probe Sequence
aatgtgtgctcaagctaataagtta

SEQ ID NO: 60311 - DNA, 25 bp, Probe Sequence
atgtgtgctcaagctaataagttat

SEQ ID NO: 60312 - DNA, 25 bp, Probe Sequence
tgtgtgctcaagctaataagttatt

SEQ ID NO: 60313 - DNA, 25 bp, Probe Sequence
tgtgctcaagctaataagttattgt

SEQ ID NO: 60314 - DNA, 25 bp, Probe Sequence
gtgctcaagctaataagttattgtg

SEQ ID NO: 60315 - DNA, 25 bp, Probe Sequence
gtgtgctcaagctaataagttattg

SEQ ID NO: 60316 - DNA, 25 bp, Probe Sequence
tgctcaagctaataagttattgtga

SEQ ID NO: 60317 - DNA, 25 bp, Probe Sequence
gctcaagctaataagttattgtgaa

SEQ ID NO: 60318 - DNA, 25 bp, Probe Sequence
caaatgtgtgctcaagctaataagt

SEQ ID NO: 60319 - DNA, 25 bp, Probe Sequence
aaatgtgtgctcaagctaataagtt

SEQ ID NO: 60320 - DNA, 25 bp, Probe Sequence
catatcacctgaggtcagcagttaa

SEQ ID NO: 60321 - DNA, 25 bp, Probe Sequence
agcaagaacagtccatgttgtatat

SEQ ID NO: 60322 - DNA, 25 bp, Probe Sequence
acttacaaagctagttgccatattt

SEQ ID NO: 60323 - DNA, 25 bp, Probe Sequence
ttacaaagctagttgccatatttct

SEQ ID NO: 60324 - DNA, 25 bp, Probe Sequence
gcaagaacagtccatgttgtatata

SEQ ID NO: 60325 - DNA, 25 bp, Probe Sequence
cagcaagaacagtccatgttgtata

SEQ ID NO: 60326 - DNA, 25 bp, Probe Sequence
acaaagctagttgccatatttctat

SEQ ID NO: 60327 - DNA, 25 bp, Probe Sequence
cttacaaagctagttgccatatttc

SEQ ID NO: 60328 - DNA, 25 bp, Probe Sequence
gtatggtggtacatgcctgtaatcc

SEQ ID NO: 60329 - DNA, 25 bp, Probe Sequence
ggtatggtggtacatgcctgtaatc

SEQ ID NO: 60330 - DNA, 25 bp, Probe Sequence
tacaaagctagttgccatatttcta

SEQ ID NO: 60331 - DNA, 25 bp, Probe Sequence
atagaacttttagggttgtgactgg

SEQ ID NO: 60332 - DNA, 25 bp, Probe Sequence
atatcacctgaggtcagcagttaaa

SEQ ID NO: 60333 - DNA, 25 bp, Probe Sequence
caaagctagttgccatatttctatt

SEQ ID NO: 60334 - DNA, 25 bp, Probe Sequence
atgtttctccagtattacctcaacg

SEQ ID NO: 60335 - DNA, 25 bp, Probe Sequence
gagatcgagtctatacgctgaagaa

SEQ ID NO: 60336 - DNA, 25 bp, Probe Sequence
tgtttctccagtattacctcaacga

SEQ ID NO: 60337 - DNA, 25 bp, Probe Sequence
cgatcatgtttctccagtattacct

SEQ ID NO: 60338 - DNA, 25 bp, Probe Sequence
aagcgatcatgtttctccagtatta

SEQ ID NO: 60339 - DNA, 25 bp, Probe Sequence
taagcgatcatgtttctccagtatt

SEQ ID NO: 60340 - DNA, 25 bp, Probe Sequence
ataagcgatcatgtttctccagtat

SEQ ID NO: 60341 - DNA, 25 bp, Probe Sequence
gtttctccagtattacctcaacgag

SEQ ID NO: 60342 - DNA, 25 bp, Probe Sequence
tcatgtttctccagtattacctcaa

SEQ ID NO: 60343 - DNA, 25 bp, Probe Sequence
tataagcgatcatgtttctccagta

SEQ ID NO: 60344 - DNA, 25 bp, Probe Sequence
agcgatcatgtttctccagtattac

SEQ ID NO: 60345 - DNA, 25 bp, Probe Sequence
atcatgtttctccagtattacctca

SEQ ID NO: 60346 - DNA, 25 bp, Probe Sequence
ttataagcgatcatgtttctccagt

SEQ ID NO: 60347 - DNA, 25 bp, Probe Sequence
catgtttctccagtattacctcaac

SEQ ID NO: 60348 - DNA, 25 bp, Probe Sequence
gatcatgtttctccagtattacctc

SEQ ID NO: 60349 - DNA, 25 bp, Probe Sequence
ttctccagtattacctcaacgagca

SEQ ID NO: 60350 - DNA, 25 bp, Probe Sequence
gcgatcatgtttctccagtattacc

SEQ ID NO: 60351 - DNA, 25 bp, Probe Sequence
aatcaccatcaagaaacgcttcaag

SEQ ID NO: 60352 - DNA, 25 bp, Probe Sequence
gaatcaccatcaagaaacgcttcaa

SEQ ID NO: 60353 - DNA, 25 bp, Probe Sequence
attgattatgcttgtgtgaggcaat

SEQ ID NO: 60354 - DNA, 25 bp, Probe Sequence
atcgagtctatacgctgaagaaatt

SEQ ID NO: 60355 - DNA, 25 bp, Probe Sequence
tggcgattgattatgcttgtgtgag

SEQ ID NO: 60356 - DNA, 25 bp, Probe Sequence
gatcgagtctatacgctgaagaaat

SEQ ID NO: 60357 - DNA, 25 bp, Probe Sequence
tctccagtattacctcaacgagcag

SEQ ID NO: 60358 - DNA, 25 bp, Probe Sequence
aggtcttgtgttagttgtatctgaa

SEQ ID NO: 60359 - DNA, 25 bp, Probe Sequence
tgttatgtatctctctaccttctgg

SEQ ID NO: 60360 - DNA, 25 bp, Probe Sequence
gttatgtatctctctaccttctgga

SEQ ID NO: 60361 - DNA, 25 bp, Probe Sequence
actgttatgtatctctctaccttct

SEQ ID NO: 60362 - DNA, 25 bp, Probe Sequence
caggtcttgtgttagttgtatctga

SEQ ID NO: 60363 - DNA, 25 bp, Probe Sequence
acaggtcttgtgttagttgtatctg

SEQ ID NO: 60364 - DNA, 25 bp, Probe Sequence
ttatgtatctctctaccttctggaa

SEQ ID NO: 60365 - DNA, 25 bp, Probe Sequence
ctgttatgtatctctctaccttctg

SEQ ID NO: 60366 - DNA, 25 bp, Probe Sequence
gtacctggacatacacaattactgt

SEQ ID NO: 60367 - DNA, 25 bp, Probe Sequence
atggttagatacacagcatgttgat

SEQ ID NO: 60368 - DNA, 25 bp, Probe Sequence
tggttagatacacagcatgttgatt

SEQ ID NO: 60369 - DNA, 25 bp, Probe Sequence
gatggttagatacacagcatgttga

SEQ ID NO: 60370 - DNA, 25 bp, Probe Sequence
aactgttatgtatctctctaccttc

SEQ ID NO: 60371 - DNA, 25 bp, Probe Sequence
cagagaaagaacccaagagaactaa

SEQ ID NO: 60372 - DNA, 25 bp, Probe Sequence
agagaaagaacccaagagaactaaa

SEQ ID NO: 60373 - DNA, 25 bp, Probe Sequence
gagaaagaacccaagagaactaaag

SEQ ID NO: 60374 - DNA, 25 bp, Probe Sequence
agaaagaacccaagagaactaaagt

SEQ ID NO: 60375 - DNA, 25 bp, Probe Sequence
ggtcttgtgttagttgtatctgaaa

SEQ ID NO: 60376 - DNA, 25 bp, Probe Sequence
agaaacctgcttacatttaaccaag

SEQ ID NO: 60377 - DNA, 25 bp, Probe Sequence
ggatggttagatacacagcatgttg

SEQ ID NO: 60378 - DNA, 25 bp, Probe Sequence
aggatggttagatacacagcatgtt

SEQ ID NO: 60379 - DNA, 25 bp, Probe Sequence
ctgtacctggacatacacaattact

SEQ ID NO: 60380 - DNA, 25 bp, Probe Sequence
tgtacctggacatacacaattactg

SEQ ID NO: 60381 - DNA, 25 bp, Probe Sequence
tagaaacctgcttacatttaaccaa

SEQ ID NO: 60382 - DNA, 25 bp, Probe Sequence
ccttctgcttggtaacttagattaa

SEQ ID NO: 60383 - DNA, 25 bp, Probe Sequence
tcgcaagatgaacagttgttaataa

SEQ ID NO: 60384 - DNA, 25 bp, Probe Sequence
atcgcaagatgaacagttgttaata

SEQ ID NO: 60385 - DNA, 25 bp, Probe Sequence
accttctgcttggtaacttagatta

SEQ ID NO: 60386 - DNA, 25 bp, Probe Sequence
atgaatagcacaatgaagcaagtgt

SEQ ID NO: 60387 - DNA, 25 bp, Probe Sequence
tagatgcagagagaagctataggaa

SEQ ID NO: 60388 - DNA, 25 bp, Probe Sequence
ttgtagatgcagagagaagctatag

SEQ ID NO: 60389 - DNA, 25 bp, Probe Sequence
gtagatgcagagagaagctatagga

SEQ ID NO: 60390 - DNA, 25 bp, Probe Sequence
aatagcacaatgaagcaagtgtctc

SEQ ID NO: 60391 - DNA, 25 bp, Probe Sequence
gaatagcacaatgaagcaagtgtct

SEQ ID NO: 60392 - DNA, 25 bp, Probe Sequence
tttcattagtatttctcgggaggac

SEQ ID NO: 60393 - DNA, 25 bp, Probe Sequence
tgtagatgcagagagaagctatagg

SEQ ID NO: 60394 - DNA, 25 bp, Probe Sequence
gggttagggaagttaaagtctgttt

SEQ ID NO: 60395 - DNA, 25 bp, Probe Sequence
accgagaaacttacttccttgtatt

SEQ ID NO: 60396 - DNA, 25 bp, Probe Sequence
catgaatagcacaatgaagcaagtg

SEQ ID NO: 60397 - DNA, 25 bp, Probe Sequence
caccgagaaacttacttccttgtat

SEQ ID NO: 60398 - DNA, 25 bp, Probe Sequence
tttctgggttagggaagttaaagtc

SEQ ID NO: 60399 - DNA, 25 bp, Probe Sequence
gtgagatttgttatgttctggcttt

SEQ ID NO: 60400 - DNA, 25 bp, Probe Sequence
aaagtgagatttgttatgttctggc

SEQ ID NO: 60401 - DNA, 25 bp, Probe Sequence
gtttctgggttagggaagttaaagt

SEQ ID NO: 60402 - DNA, 25 bp, Probe Sequence
tgtttctgggttagggaagttaaag

SEQ ID NO: 60403 - DNA, 25 bp, Probe Sequence
agtgagatttgttatgttctggctt

SEQ ID NO: 60404 - DNA, 25 bp, Probe Sequence
aagtgagatttgttatgttctggct

SEQ ID NO: 60405 - DNA, 25 bp, Probe Sequence
taaggtcagcttgttcactgtaatt

SEQ ID NO: 60406 - DNA, 25 bp, Probe Sequence
ctagcagttgtagatgaatggagaa

SEQ ID NO: 60407 - DNA, 25 bp, Probe Sequence
aagtggtattgaggtgaggctaatc

SEQ ID NO: 60408 - DNA, 25 bp, Probe Sequence
aatggaagtcagtgtatcagacaag

SEQ ID NO: 60409 - DNA, 25 bp, Probe Sequence
tctgatgaagagtgcttgaagagag

SEQ ID NO: 60410 - DNA, 25 bp, Probe Sequence
atgaagtgtctgatgaagagtgctt

SEQ ID NO: 60411 - DNA, 25 bp, Probe Sequence
aatgaagtgtctgatgaagagtgct

SEQ ID NO: 60412 - DNA, 25 bp, Probe Sequence
ctgatgaagagtgcttgaagagagt

SEQ ID NO: 60413 - DNA, 25 bp, Probe Sequence
gtctgatgaagagtgcttgaagaga

SEQ ID NO: 60414 - DNA, 25 bp, Probe Sequence
aagtgtctgatgaagagtgcttgaa

SEQ ID NO: 60415 - DNA, 25 bp, Probe Sequence
tgatgaagagtgcttgaagagagtg

SEQ ID NO: 60416 - DNA, 25 bp, Probe Sequence
agtggtattgaggtgaggctaatct

SEQ ID NO: 60417 - DNA, 25 bp, Probe Sequence
tgtctgatgaagagtgcttgaagag

SEQ ID NO: 60418 - DNA, 25 bp, Probe Sequence
tagcagttgtagatgaatggagaaa

SEQ ID NO: 60419 - DNA, 25 bp, Probe Sequence
gtgtctgatgaagagtgcttgaaga

SEQ ID NO: 60420 - DNA, 25 bp, Probe Sequence
agtgtctgatgaagagtgcttgaag

SEQ ID NO: 60421 - DNA, 25 bp, Probe Sequence
gaagtgtctgatgaagagtgcttga

SEQ ID NO: 60422 - DNA, 25 bp, Probe Sequence
gtggtattgaggtgaggctaatctc

SEQ ID NO: 60423 - DNA, 25 bp, Probe Sequence
cttggaaatgaagtgtctgatgaag

SEQ ID NO: 60424 - DNA, 25 bp, Probe Sequence
atcttggaaatgaagtgtctgatga

SEQ ID NO: 60425 - DNA, 25 bp, Probe Sequence
gcatatcttggaaatgaagtgtctg

SEQ ID NO: 60426 - DNA, 25 bp, Probe Sequence
gaagtggcatatcttggaaatgaag

SEQ ID NO: 60427 - DNA, 25 bp, Probe Sequence
tcttggaaatgaagtgtctgatgaa

SEQ ID NO: 60428 - DNA, 25 bp, Probe Sequence
gaaatgaagtgtctgatgaagagtg

SEQ ID NO: 60429 - DNA, 25 bp, Probe Sequence
aagtggcatatcttggaaatgaagt

SEQ ID NO: 60430 - DNA, 25 bp, Probe Sequence
atagccatgtgaattaactgtagca

SEQ ID NO: 60431 - DNA, 25 bp, Probe Sequence
tagccatgtgaattaactgtagcaa

SEQ ID NO: 60432 - DNA, 25 bp, Probe Sequence
tatagccatgtgaattaactgtagc

SEQ ID NO: 60433 - DNA, 25 bp, Probe Sequence
acttgtagactattatagccatgtg

SEQ ID NO: 60434 - DNA, 25 bp, Probe Sequence
gcattgaggagaaacttgtagacta

SEQ ID NO: 60435 - DNA, 25 bp, Probe Sequence
aaacacgagccctaatatcttactt

SEQ ID NO: 60436 - DNA, 25 bp, Probe Sequence
atatttggcattgaggagaaacttg

SEQ ID NO: 60437 - DNA, 25 bp, Probe Sequence
agatatttggcattgaggagaaact

SEQ ID NO: 60438 - DNA, 25 bp, Probe Sequence
gatatttggcattgaggagaaactt

SEQ ID NO: 60439 - DNA, 25 bp, Probe Sequence
agtagatatttggcattgaggagaa

SEQ ID NO: 60440 - DNA, 25 bp, Probe Sequence
actctgtcatcattaccctttatca

SEQ ID NO: 60441 - DNA, 25 bp, Probe Sequence
ttgtaaacacgagccctaatatctt

SEQ ID NO: 60442 - DNA, 25 bp, Probe Sequence
tttgtaaacacgagccctaatatct

SEQ ID NO: 60443 - DNA, 25 bp, Probe Sequence
cttgtagactattatagccatgtga

SEQ ID NO: 60444 - DNA, 25 bp, Probe Sequence
atttggcattgaggagaaacttgta

SEQ ID NO: 60445 - DNA, 25 bp, Probe Sequence
tatttggcattgaggagaaacttgt

SEQ ID NO: 60446 - DNA, 25 bp, Probe Sequence
aacacgagccctaatatcttactta

SEQ ID NO: 60447 - DNA, 25 bp, Probe Sequence
taaacacgagccctaatatcttact

SEQ ID NO: 60448 - DNA, 25 bp, Probe Sequence
ggatgtgtttcgtgtctaccatata

SEQ ID NO: 60449 - DNA, 25 bp, Probe Sequence
ctctgtcatcattaccctttatcac

SEQ ID NO: 60450 - DNA, 25 bp, Probe Sequence
tgtaaacacgagccctaatatctta

SEQ ID NO: 60451 - DNA, 25 bp, Probe Sequence
tagatatttggcattgaggagaaac

SEQ ID NO: 60452 - DNA, 25 bp, Probe Sequence
gtagatatttggcattgaggagaaa

SEQ ID NO: 60453 - DNA, 25 bp, Probe Sequence
gactattaagctgtcgtcttcctaa

SEQ ID NO: 60454 - DNA, 25 bp, Probe Sequence
tgagaacaaggacgactatacaatc

SEQ ID NO: 60455 - DNA, 25 bp, Probe Sequence
gatgagaacaaggacgactatacaa

SEQ ID NO: 60456 - DNA, 25 bp, Probe Sequence
atgagaacaaggacgactatacaat

SEQ ID NO: 60457 - DNA, 25 bp, Probe Sequence
gtgatgagaacaaggacgactatac

SEQ ID NO: 60458 - DNA, 25 bp, Probe Sequence
tgttcctgttggtatagactatgtg

SEQ ID NO: 60459 - DNA, 25 bp, Probe Sequence
gttcctgttggtatagactatgtga

SEQ ID NO: 60460 - DNA, 25 bp, Probe Sequence
ttatcagaatggcaacagacagaag

SEQ ID NO: 60461 - DNA, 25 bp, Probe Sequence
tgatgagaacaaggacgactataca

SEQ ID NO: 60462 - DNA, 25 bp, Probe Sequence
atcttactgcttgtcacttgaatcc

SEQ ID NO: 60463 - DNA, 25 bp, Probe Sequence
agtatagaattggaccatatcagcc

SEQ ID NO: 60464 - DNA, 25 bp, Probe Sequence
atgttcctgttggtatagactatgt

SEQ ID NO: 60465 - DNA, 25 bp, Probe Sequence
ctgcttatatctgtggattcaagtt

SEQ ID NO: 60466 - DNA, 25 bp, Probe Sequence
actgcttatatctgtggattcaagt

SEQ ID NO: 60467 - DNA, 25 bp, Probe Sequence
agtgtgtagaccatctcttcatatt

SEQ ID NO: 60468 - DNA, 25 bp, Probe Sequence
aagtgtgtagaccatctcttcatat

SEQ ID NO: 60469 - DNA, 25 bp, Probe Sequence
ttcctgttggtatagactatgtgat

SEQ ID NO: 60470 - DNA, 25 bp, Probe Sequence
gatcttactgcttgtcacttgaatc

SEQ ID NO: 60471 - DNA, 25 bp, Probe Sequence
agtgatgagaacaaggacgactata

SEQ ID NO: 60472 - DNA, 25 bp, Probe Sequence
gagtatagaattggaccatatcagc

SEQ ID NO: 60473 - DNA, 25 bp, Probe Sequence
atcagaatggcaacagacagaagta

SEQ ID NO: 60474 - DNA, 25 bp, Probe Sequence
tatcagaatggcaacagacagaagt

SEQ ID NO: 60475 - DNA, 25 bp, Probe Sequence
gatgtctgttcatgtgttaagtgtt

SEQ ID NO: 60476 - DNA, 25 bp, Probe Sequence
tactgcttatatctgtggattcaag

SEQ ID NO: 60477 - DNA, 25 bp, Probe Sequence
agatgtctgttcatgtgttaagtgt

SEQ ID NO: 60478 - DNA, 25 bp, Probe Sequence
gatccttagtggcacatgaatgaac

SEQ ID NO: 60479 - DNA, 25 bp, Probe Sequence
gatgatccttagtggcacatgaatg

SEQ ID NO: 60480 - DNA, 25 bp, Probe Sequence
atgatccttagtggcacatgaatga

SEQ ID NO: 60481 - DNA, 25 bp, Probe Sequence
tgatgatccttagtggcacatgaat

SEQ ID NO: 60482 - DNA, 25 bp, Probe Sequence
tgatccttagtggcacatgaatgaa

SEQ ID NO: 60483 - DNA, 25 bp, Probe Sequence
gatacatacatgcctatgatgaagt

SEQ ID NO: 60484 - DNA, 25 bp, Probe Sequence
tgatacatacatgcctatgatgaag

SEQ ID NO: 60485 - DNA, 25 bp, Probe Sequence
tcaaattgtcttggagaagcagaaa

SEQ ID NO: 60486 - DNA, 25 bp, Probe Sequence
ttcaaattgtcttggagaagcagaa

SEQ ID NO: 60487 - DNA, 25 bp, Probe Sequence
tgatgcttcaaattgtcttggagaa

SEQ ID NO: 60488 - DNA, 25 bp, Probe Sequence
atacatacatgcctatgatgaagtt

SEQ ID NO: 60489 - DNA, 25 bp, Probe Sequence
atgatacatacatgcctatgatgaa

SEQ ID NO: 60490 - DNA, 25 bp, Probe Sequence
atccttagtggcacatgaatgaacg

SEQ ID NO: 60491 - DNA, 25 bp, Probe Sequence
gtgatgatccttagtggcacatgaa

SEQ ID NO: 60492 - DNA, 25 bp, Probe Sequence
tatgatacatacatgcctatgatga

SEQ ID NO: 60493 - DNA, 25 bp, Probe Sequence
acatacatgcctatgatgaagttta

SEQ ID NO: 60494 - DNA, 25 bp, Probe Sequence
tacatacatgcctatgatgaagttt

SEQ ID NO: 60495 - DNA, 25 bp, Probe Sequence
acatgcctatgatgaagtttaattt

SEQ ID NO: 60496 - DNA, 25 bp, Probe Sequence
atgcctatgatgaagtttaatttct

SEQ ID NO: 60497 - DNA, 25 bp, Probe Sequence
ttatgatacatacatgcctatgatg

SEQ ID NO: 60498 - DNA, 25 bp, Probe Sequence
atgaatgaacgtccagatgtttgtg

SEQ ID NO: 60499 - DNA, 25 bp, Probe Sequence
catgaatgaacgtccagatgtttgt

SEQ ID NO: 60500 - DNA, 25 bp, Probe Sequence
caaattgtcttggagaagcagaaaa

SEQ ID NO: 60501 - DNA, 25 bp, Probe Sequence
catgcctatgatgaagtttaatttc

SEQ ID NO: 60502 - DNA, 25 bp, Probe Sequence
ttgaagtaccaagtaacctacaagc

SEQ ID NO: 60503 - DNA, 25 bp, Probe Sequence
gttgaagtaccaagtaacctacaag

SEQ ID NO: 60504 - DNA, 25 bp, Probe Sequence
taccaagtaacctacaagcctccta

SEQ ID NO: 60505 - DNA, 25 bp, Probe Sequence
aagtaacctacaagcctcctagttc

SEQ ID NO: 60506 - DNA, 25 bp, Probe Sequence
tgttgaagtaccaagtaacctacaa

SEQ ID NO: 60507 - DNA, 25 bp, Probe Sequence
caagtaacctacaagcctcctagtt

SEQ ID NO: 60508 - DNA, 25 bp, Probe Sequence
gtgttgaagtaccaagtaacctaca

SEQ ID NO: 60509 - DNA, 25 bp, Probe Sequence
aagtaccaagtaacctacaagcctc

SEQ ID NO: 60510 - DNA, 25 bp, Probe Sequence
gaagtaccaagtaacctacaagcct

SEQ ID NO: 60511 - DNA, 25 bp, Probe Sequence
taacctacaagcctcctagttctga

SEQ ID NO: 60512 - DNA, 25 bp, Probe Sequence
gtaacctacaagcctcctagttctg

SEQ ID NO: 60513 - DNA, 25 bp, Probe Sequence
agtaacctacaagcctcctagttct

SEQ ID NO: 60514 - DNA, 25 bp, Probe Sequence
tgaagtaccaagtaacctacaagcc

SEQ ID NO: 60515 - DNA, 25 bp, Probe Sequence
aacctacaagcctcctagttctgaa

SEQ ID NO: 60516 - DNA, 25 bp, Probe Sequence
ccaagtaacctacaagcctcctagt

SEQ ID NO: 60517 - DNA, 25 bp, Probe Sequence
accaagtaacctacaagcctcctag

SEQ ID NO: 60518 - DNA, 25 bp, Probe Sequence
gtaccaagtaacctacaagcctcct

SEQ ID NO: 60519 - DNA, 25 bp, Probe Sequence
agtaccaagtaacctacaagcctcc

SEQ ID NO: 60520 - DNA, 25 bp, Probe Sequence
ggaccaaatgaacagaaagtctcag

SEQ ID NO: 60521 - DNA, 25 bp, Probe Sequence
acctacaagcctcctagttctgaaa

SEQ ID NO: 60522 - DNA, 25 bp, Probe Sequence
gaccaaatgaacagaaagtctcagc

SEQ ID NO: 60523 - DNA, 25 bp, Probe Sequence
agggaccaaatgaacagaaagtctc

SEQ ID NO: 60524 - DNA, 25 bp, Probe Sequence
aaatgaacagaaagtctcagcccag

SEQ ID NO: 60525 - DNA, 25 bp, Probe Sequence
gggaccaaatgaacagaaagtctca

SEQ ID NO: 60526 - DNA, 25 bp, Probe Sequence
atagaagatggtcagcagaagttac

SEQ ID NO: 60527 - DNA, 25 bp, Probe Sequence
cagattatagaagatggtcagcaga

SEQ ID NO: 60528 - DNA, 25 bp, Probe Sequence
ttattacctactacctgaacgacca

SEQ ID NO: 60529 - DNA, 25 bp, Probe Sequence
ttatagaagatggtcagcagaagtt

SEQ ID NO: 60530 - DNA, 25 bp, Probe Sequence
attattacctactacctgaacgacc

SEQ ID NO: 60531 - DNA, 25 bp, Probe Sequence
attatagaagatggtcagcagaagt

SEQ ID NO: 60532 - DNA, 25 bp, Probe Sequence
agattatagaagatggtcagcagaa

SEQ ID NO: 60533 - DNA, 25 bp, Probe Sequence
tattacctactacctgaacgaccac

SEQ ID NO: 60534 - DNA, 25 bp, Probe Sequence
tagaagatggtcagcagaagttact

SEQ ID NO: 60535 - DNA, 25 bp, Probe Sequence
acattattacctactacctgaacga

SEQ ID NO: 60536 - DNA, 25 bp, Probe Sequence
cacattattacctactacctgaacg

SEQ ID NO: 60537 - DNA, 25 bp, Probe Sequence
tatagaagatggtcagcagaagtta

SEQ ID NO: 60538 - DNA, 25 bp, Probe Sequence
gattatagaagatggtcagcagaag

SEQ ID NO: 60539 - DNA, 25 bp, Probe Sequence
cattattacctactacctgaacgac

SEQ ID NO: 60540 - DNA, 25 bp, Probe Sequence
ggaagaaggttagttcaacacatta

SEQ ID NO: 60541 - DNA, 25 bp, Probe Sequence
acacattattacctactacctgaac

SEQ ID NO: 60542 - DNA, 25 bp, Probe Sequence
caacacattattacctactacctga

SEQ ID NO: 60543 - DNA, 25 bp, Probe Sequence
tcaacacattattacctactacctg

SEQ ID NO: 60544 - DNA, 25 bp, Probe Sequence
agaagatggtcagcagaagttactt

SEQ ID NO: 60545 - DNA, 25 bp, Probe Sequence
aagccagattatagaagatggtcag

SEQ ID NO: 60546 - DNA, 25 bp, Probe Sequence
ccagattatagaagatggtcagcag

SEQ ID NO: 60547 - DNA, 25 bp, Probe Sequence
tttagggaagcagaagaaacaaatg

SEQ ID NO: 60548 - DNA, 25 bp, Probe Sequence
gttcaacacattattacctactacc

SEQ ID NO: 60549 - DNA, 25 bp, Probe Sequence
cgtgaagcgtaaacatttatcctat

SEQ ID NO: 60550 - DNA, 25 bp, Probe Sequence
agaagcaagatatcaatgtagcaga

SEQ ID NO: 60551 - DNA, 25 bp, Probe Sequence
gagaagcaagatatcaatgtagcag

SEQ ID NO: 60552 - DNA, 25 bp, Probe Sequence
gaagcaagatatcaatgtagcagaa

SEQ ID NO: 60553 - DNA, 25 bp, Probe Sequence
tgagaagcaagatatcaatgtagca

SEQ ID NO: 60554 - DNA, 25 bp, Probe Sequence
agcaagatatcaatgtagcagaatt

SEQ ID NO: 60555 - DNA, 25 bp, Probe Sequence
aagcaagatatcaatgtagcagaat

SEQ ID NO: 60556 - DNA, 25 bp, Probe Sequence
ctgagaagcaagatatcaatgtagc

SEQ ID NO: 60557 - DNA, 25 bp, Probe Sequence
ggactgagaagcaagatatcaatgt

SEQ ID NO: 60558 - DNA, 25 bp, Probe Sequence
acttgtgcctcacgaacatacataa

SEQ ID NO: 60559 - DNA, 25 bp, Probe Sequence
actgagaagcaagatatcaatgtag

SEQ ID NO: 60560 - DNA, 25 bp, Probe Sequence
gactgagaagcaagatatcaatgta

SEQ ID NO: 60561 - DNA, 25 bp, Probe Sequence
tgtgcctcacgaacatacataaatt

SEQ ID NO: 60562 - DNA, 25 bp, Probe Sequence
ttgtgcctcacgaacatacataaat

SEQ ID NO: 60563 - DNA, 25 bp, Probe Sequence
cacttgtgcctcacgaacatacata

SEQ ID NO: 60564 - DNA, 25 bp, Probe Sequence
cttgtgcctcacgaacatacataaa

SEQ ID NO: 60565 - DNA, 25 bp, Probe Sequence
taataaagtgtgagacagcttcctt

SEQ ID NO: 60566 - DNA, 25 bp, Probe Sequence
ctaataaagtgtgagacagcttcct

SEQ ID NO: 60567 - DNA, 25 bp, Probe Sequence
gcaagatatcaatgtagcagaattg

SEQ ID NO: 60568 - DNA, 25 bp, Probe Sequence
tatcaatgtagcagaattgcacttg

SEQ ID NO: 60569 - DNA, 25 bp, Probe Sequence
aataaagtgtgagacagcttccttg

SEQ ID NO: 60570 - DNA, 25 bp, Probe Sequence
gtgtctctcacagctaataaagtgt

SEQ ID NO: 60571 - DNA, 25 bp, Probe Sequence
atatcaatgtagcagaattgcactt

SEQ ID NO: 60572 - DNA, 25 bp, Probe Sequence
gatatcaatgtagcagaattgcact

SEQ ID NO: 60573 - DNA, 25 bp, Probe Sequence
agatatcaatgtagcagaattgcac

SEQ ID NO: 60574 - DNA, 25 bp, Probe Sequence
tgttaattcttcagtcatggcattc

SEQ ID NO: 60575 - DNA, 25 bp, Probe Sequence
gttaattcttcagtcatggcattcg

SEQ ID NO: 60576 - DNA, 25 bp, Probe Sequence
ctgttaattcttcagtcatggcatt

SEQ ID NO: 60577 - DNA, 25 bp, Probe Sequence
ttaattcttcagtcatggcattcgc

SEQ ID NO: 60578 - DNA, 25 bp, Probe Sequence
gctgttaattcttcagtcatggcat

SEQ ID NO: 60579 - DNA, 25 bp, Probe Sequence
gtactctttctgactacaacatcca

SEQ ID NO: 60580 - DNA, 25 bp, Probe Sequence
caagatccaagataaagaaggcatc

SEQ ID NO: 60581 - DNA, 25 bp, Probe Sequence
aagatccaagataaagaaggcatcc

SEQ ID NO: 60582 - DNA, 25 bp, Probe Sequence
gtggctgttaattcttcagtcatgg

SEQ ID NO: 60583 - DNA, 25 bp, Probe Sequence
ggtggctgttaattcttcagtcatg

SEQ ID NO: 60584 - DNA, 25 bp, Probe Sequence
ccaagatccaagataaagaaggcat

SEQ ID NO: 60585 - DNA, 25 bp, Probe Sequence
cgtactctttctgactacaacatcc

SEQ ID NO: 60586 - DNA, 25 bp, Probe Sequence
ccgtactctttctgactacaacatc

SEQ ID NO: 60587 - DNA, 25 bp, Probe Sequence
tactctttctgactacaacatccag

SEQ ID NO: 60588 - DNA, 25 bp, Probe Sequence
aagatccaggataaggaaggcattc

SEQ ID NO: 60589 - DNA, 25 bp, Probe Sequence
caagatccaggataaagaaggcatc

SEQ ID NO: 60590 - DNA, 25 bp, Probe Sequence
taattcttcagtcatggcattcgca

SEQ ID NO: 60591 - DNA, 25 bp, Probe Sequence
caagatccaggataaggaaggcatt

SEQ ID NO: 60592 - DNA, 25 bp, Probe Sequence
agatccaagataaagaaggcatccc

SEQ ID NO: 60593 - DNA, 25 bp, Probe Sequence
cattactctgcactatagccatttg

SEQ ID NO: 60594 - DNA, 25 bp, Probe Sequence
gttaataaaggtttcgttgcatggt

SEQ ID NO: 60595 - DNA, 25 bp, Probe Sequence
tgttaataaaggtttcgttgcatgg

SEQ ID NO: 60596 - DNA, 25 bp, Probe Sequence
ttaataaaggtttcgttgcatggta

SEQ ID NO: 60597 - DNA, 25 bp, Probe Sequence
atgtgaaggccaagatccaagataa

SEQ ID NO: 60598 - DNA, 25 bp, Probe Sequence
ctgaagaagagtatgtgaaggaaga

SEQ ID NO: 60599 - DNA, 25 bp, Probe Sequence
tgaagaagagtatgtgaaggaagaa

SEQ ID NO: 60600 - DNA, 25 bp, Probe Sequence
ctgatgaggagtaagaagaagaaga

SEQ ID NO: 60601 - DNA, 25 bp, Probe Sequence
ccacagaataagagaactccagatt

SEQ ID NO: 60602 - DNA, 25 bp, Probe Sequence
tgatgaggagtaagaagaagaagaa

SEQ ID NO: 60603 - DNA, 25 bp, Probe Sequence
gaaccacagaataagagaactccag

SEQ ID NO: 60604 - DNA, 25 bp, Probe Sequence
accacagaataagagaactccagat

SEQ ID NO: 60605 - DNA, 25 bp, Probe Sequence
tgaggagtaagaagaagaagaagaa

SEQ ID NO: 60606 - DNA, 25 bp, Probe Sequence
aaccacagaataagagaactccaga

SEQ ID NO: 60607 - DNA, 25 bp, Probe Sequence
atgaggagtaagaagaagaagaaga

SEQ ID NO: 60608 - DNA, 25 bp, Probe Sequence
gatgaggagtaagaagaagaagaag

SEQ ID NO: 60609 - DNA, 25 bp, Probe Sequence
ttggatctatcaacagttacacagg

SEQ ID NO: 60610 - DNA, 25 bp, Probe Sequence
acttggatctatcaacagttacaca

SEQ ID NO: 60611 - DNA, 25 bp, Probe Sequence
cttggatctatcaacagttacacag

SEQ ID NO: 60612 - DNA, 25 bp, Probe Sequence
cctgatgaggagtaagaagaagaag

SEQ ID NO: 60613 - DNA, 25 bp, Probe Sequence
cctgaagaagagtatgtgaaggaag

SEQ ID NO: 60614 - DNA, 25 bp, Probe Sequence
taactatgtgtgatgatgatccacc

SEQ ID NO: 60615 - DNA, 25 bp, Probe Sequence
aatccaggagaatgaagaagcagtc

SEQ ID NO: 60616 - DNA, 25 bp, Probe Sequence
tggatctatcaacagttacacaggc

SEQ ID NO: 60617 - DNA, 25 bp, Probe Sequence
catttcaggcagcataagtaatctc

SEQ ID NO: 60618 - DNA, 25 bp, Probe Sequence
gctgttgctctgtaagtcctagatt

SEQ ID NO: 60619 - DNA, 25 bp, Probe Sequence
atttgcctgaagaagagtatgtgaa

SEQ ID NO: 60620 - DNA, 25 bp, Probe Sequence
gcctgatgaggagtaagaagaagaa

SEQ ID NO: 60621 - DNA, 25 bp, Probe Sequence
gatttgcctgaagaagagtatgtga

SEQ ID NO: 60622 - DNA, 25 bp, Probe Sequence
gattaaccaattctccagcattagg

SEQ ID NO: 60623 - DNA, 25 bp, Probe Sequence
tgattaaccaattctccagcattag

SEQ ID NO: 60624 - DNA, 25 bp, Probe Sequence
agtcacctgattaaccaattctcca

SEQ ID NO: 60625 - DNA, 25 bp, Probe Sequence
cttgacatagtagataggcttgtgg

SEQ ID NO: 60626 - DNA, 25 bp, Probe Sequence
tgacatagtagataggcttgtggtt

SEQ ID NO: 60627 - DNA, 25 bp, Probe Sequence
ttgacatagtagataggcttgtggt

SEQ ID NO: 60628 - DNA, 25 bp, Probe Sequence
ctgattaaccaattctccagcatta

SEQ ID NO: 60629 - DNA, 25 bp, Probe Sequence
gaccttgacatagtagataggcttg

SEQ ID NO: 60630 - DNA, 25 bp, Probe Sequence
ccttgacatagtagataggcttgtg

SEQ ID NO: 60631 - DNA, 25 bp, Probe Sequence
tgaccttgacatagtagataggctt

SEQ ID NO: 60632 - DNA, 25 bp, Probe Sequence
ttgaccttgacatagtagataggct

SEQ ID NO: 60633 - DNA, 25 bp, Probe Sequence
ttgtaaggtctcttgtatgttgtta

SEQ ID NO: 60634 - DNA, 25 bp, Probe Sequence
accttgacatagtagataggcttgt

SEQ ID NO: 60635 - DNA, 25 bp, Probe Sequence
tgtaaggtctcttgtatgttgttaa

SEQ ID NO: 60636 - DNA, 25 bp, Probe Sequence
attaaccaattctccagcattagga

SEQ ID NO: 60637 - DNA, 25 bp, Probe Sequence
cctgattaaccaattctccagcatt

SEQ ID NO: 60638 - DNA, 25 bp, Probe Sequence
gtcacctgattaaccaattctccag

SEQ ID NO: 60639 - DNA, 25 bp, Probe Sequence
cagtcacctgattaaccaattctcc

SEQ ID NO: 60640 - DNA, 25 bp, Probe Sequence
ccagtcacctgattaaccaattctc

SEQ ID NO: 60641 - DNA, 25 bp, Probe Sequence
ttaaccaattctccagcattaggac

SEQ ID NO: 60642 - DNA, 25 bp, Probe Sequence
aattctccagcattaggacttacct

SEQ ID NO: 60643 - DNA, 25 bp, Probe Sequence
caattctccagcattaggacttacc

SEQ ID NO: 60644 - DNA, 25 bp, Probe Sequence
ccaattctccagcattaggacttac

SEQ ID NO: 60645 - DNA, 25 bp, Probe Sequence
accaattctccagcattaggactta

SEQ ID NO: 60646 - DNA, 25 bp, Probe Sequence
tgtgtgcctgatgagattgtaagtt

SEQ ID NO: 60647 - DNA, 25 bp, Probe Sequence
cctgatgagattgtaagtttgtgtg

SEQ ID NO: 60648 - DNA, 25 bp, Probe Sequence
agtgtgtgcctgatgagattgtaag

SEQ ID NO: 60649 - DNA, 25 bp, Probe Sequence
gagtgtgtgcctgatgagattgtaa

SEQ ID NO: 60650 - DNA, 25 bp, Probe Sequence
gtgtgtgcctgatgagattgtaagt

SEQ ID NO: 60651 - DNA, 25 bp, Probe Sequence
gcctgatgagattgtaagtttgtgt

SEQ ID NO: 60652 - DNA, 25 bp, Probe Sequence
tgcctgatgagattgtaagtttgtg

SEQ ID NO: 60653 - DNA, 25 bp, Probe Sequence
gtgcctgatgagattgtaagtttgt

SEQ ID NO: 60654 - DNA, 25 bp, Probe Sequence
tgtgcctgatgagattgtaagtttg

SEQ ID NO: 60655 - DNA, 25 bp, Probe Sequence
gtgtgcctgatgagattgtaagttt

SEQ ID NO: 60656 - DNA, 25 bp, Probe Sequence
gtagaataagcccacctgttcaatg

SEQ ID NO: 60657 - DNA, 25 bp, Probe Sequence
agagtgtgtgcctgatgagattgta

SEQ ID NO: 60658 - DNA, 25 bp, Probe Sequence
aagagagtgtgtgcctgatgagatt

SEQ ID NO: 60659 - DNA, 25 bp, Probe Sequence
taatggtagaataagcccacctgtt

SEQ ID NO: 60660 - DNA, 25 bp, Probe Sequence
tagaataagcccacctgttcaatgc

SEQ ID NO: 60661 - DNA, 25 bp, Probe Sequence
agagagtgtgtgcctgatgagattg

SEQ ID NO: 60662 - DNA, 25 bp, Probe Sequence
caagagagtgtgtgcctgatgagat

SEQ ID NO: 60663 - DNA, 25 bp, Probe Sequence
gtaatggtagaataagcccacctgt

SEQ ID NO: 60664 - DNA, 25 bp, Probe Sequence
gagagtgtgtgcctgatgagattgt

SEQ ID NO: 60665 - DNA, 25 bp, Probe Sequence
ggtagaataagcccacctgttcaat

SEQ ID NO: 60666 - DNA, 25 bp, Probe Sequence
aatggtagaataagcccacctgttc

SEQ ID NO: 60667 - DNA, 25 bp, Probe Sequence
aagtctcttgataaccgaaacaaaa

SEQ ID NO: 60668 - DNA, 25 bp, Probe Sequence
caagtctcttgataaccgaaacaaa

SEQ ID NO: 60669 - DNA, 25 bp, Probe Sequence
aaagcaagtctcttgataaccgaaa

SEQ ID NO: 60670 - DNA, 25 bp, Probe Sequence
cctttgtcacagattaggaaattga

SEQ ID NO: 60671 - DNA, 25 bp, Probe Sequence
ctttgtcacagattaggaaattgag

SEQ ID NO: 60672 - DNA, 25 bp, Probe Sequence
ggaatgtttaatctaccatgtccgc

SEQ ID NO: 60673 - DNA, 25 bp, Probe Sequence
cctcctttgtcacagattaggaaat

SEQ ID NO: 60674 - DNA, 25 bp, Probe Sequence
tcctttgtcacagattaggaaattg

SEQ ID NO: 60675 - DNA, 25 bp, Probe Sequence
ctcctttgtcacagattaggaaatt

SEQ ID NO: 60676 - DNA, 25 bp, Probe Sequence
gaatgtttaatctaccatgtccgcg

SEQ ID NO: 60677 - DNA, 25 bp, Probe Sequence
ccctcctttgtcacagattaggaaa

SEQ ID NO: 60678 - DNA, 25 bp, Probe Sequence
aatgtttaatctaccatgtccgcgt

SEQ ID NO: 60679 - DNA, 25 bp, Probe Sequence
ttaatctaccatgtccgcgtgtcat

SEQ ID NO: 60680 - DNA, 25 bp, Probe Sequence
taatctaccatgtccgcgtgtcatc

SEQ ID NO: 60681 - DNA, 25 bp, Probe Sequence
atgtttaatctaccatgtccgcgtg

SEQ ID NO: 60682 - DNA, 25 bp, Probe Sequence
gtttaatctaccatgtccgcgtgtc

SEQ ID NO: 60683 - DNA, 25 bp, Probe Sequence
tttaatctaccatgtccgcgtgtca

SEQ ID NO: 60684 - DNA, 25 bp, Probe Sequence
ctgcccctcctttgtcacagattag

SEQ ID NO: 60685 - DNA, 25 bp, Probe Sequence
tgtttaatctaccatgtccgcgtgt

SEQ ID NO: 60686 - DNA, 25 bp, Probe Sequence
cccctcctttgtcacagattaggaa

SEQ ID NO: 60687 - DNA, 25 bp, Probe Sequence
gatgtatttcaaggactaaagtggg

SEQ ID NO: 60688 - DNA, 25 bp, Probe Sequence
gcttctcagatgtatttcaaggact

SEQ ID NO: 60689 - DNA, 25 bp, Probe Sequence
atgtatttcaaggactaaagtgggc

SEQ ID NO: 60690 - DNA, 25 bp, Probe Sequence
cattggcttctcagatgtatttcaa

SEQ ID NO: 60691 - DNA, 25 bp, Probe Sequence
attggcttctcagatgtatttcaag

SEQ ID NO: 60692 - DNA, 25 bp, Probe Sequence
gtatttcaaggactaaagtgggctc

SEQ ID NO: 60693 - DNA, 25 bp, Probe Sequence
atttcaaggactaaagtgggctcta

SEQ ID NO: 60694 - DNA, 25 bp, Probe Sequence
tatttcaaggactaaagtgggctct

SEQ ID NO: 60695 - DNA, 25 bp, Probe Sequence
tttcaaggactaaagtgggctctaa

SEQ ID NO: 60696 - DNA, 25 bp, Probe Sequence
agatgtatttcaaggactaaagtgg

SEQ ID NO: 60697 - DNA, 25 bp, Probe Sequence
ttggcttctcagatgtatttcaagg

SEQ ID NO: 60698 - DNA, 25 bp, Probe Sequence
ggcttctcagatgtatttcaaggac

SEQ ID NO: 60699 - DNA, 25 bp, Probe Sequence
ccattggcttctcagatgtatttca

SEQ ID NO: 60700 - DNA, 25 bp, Probe Sequence
caaggactaaagtgggctctaagat

SEQ ID NO: 60701 - DNA, 25 bp, Probe Sequence
tgtatttcaaggactaaagtgggct

SEQ ID NO: 60702 - DNA, 25 bp, Probe Sequence
tggcttctcagatgtatttcaagga

SEQ ID NO: 60703 - DNA, 25 bp, Probe Sequence
ttcaaggactaaagtgggctctaag

SEQ ID NO: 60704 - DNA, 25 bp, Probe Sequence
aaggactaaagtgggctctaagatc

SEQ ID NO: 60705 - DNA, 25 bp, Probe Sequence
cagatgtatttcaaggactaaagtg

SEQ ID NO: 60706 - DNA, 25 bp, Probe Sequence
cttctcagatgtatttcaaggacta

SEQ ID NO: 60707 - DNA, 25 bp, Probe Sequence
tcagatgtatttcaaggactaaagt

SEQ ID NO: 60708 - DNA, 25 bp, Probe Sequence
tctcagatgtatttcaaggactaaa

SEQ ID NO: 60709 - DNA, 25 bp, Probe Sequence
ttctcagatgtatttcaaggactaa

SEQ ID NO: 60710 - DNA, 25 bp, Probe Sequence
tcaaggactaaagtgggctctaaga

SEQ ID NO: 60711 - DNA, 25 bp, Probe Sequence
gagcaataaaggagaaactgaggta

SEQ ID NO: 60712 - DNA, 25 bp, Probe Sequence
agcaataaaggagaaactgaggtac

SEQ ID NO: 60713 - DNA, 25 bp, Probe Sequence
gtacaggagcaataaaggagaaact

SEQ ID NO: 60714 - DNA, 25 bp, Probe Sequence
tacaggagcaataaaggagaaactg

SEQ ID NO: 60715 - DNA, 25 bp, Probe Sequence
aggagcaataaaggagaaactgagg

SEQ ID NO: 60716 - DNA, 25 bp, Probe Sequence
cgtacaggagcaataaaggagaaac

SEQ ID NO: 60717 - DNA, 25 bp, Probe Sequence
tcgtacaggagcaataaaggagaaa

SEQ ID NO: 60718 - DNA, 25 bp, Probe Sequence
ttcgtacaggagcaataaaggagaa

SEQ ID NO: 60719 - DNA, 25 bp, Probe Sequence
caggagcaataaaggagaaactgag

SEQ ID NO: 60720 - DNA, 25 bp, Probe Sequence
ggagcaataaaggagaaactgaggt

SEQ ID NO: 60721 - DNA, 25 bp, Probe Sequence
acaggagcaataaaggagaaactga

SEQ ID NO: 60722 - DNA, 25 bp, Probe Sequence
gttcgtacaggagcaataaaggaga

SEQ ID NO: 60723 - DNA, 25 bp, Probe Sequence
aatgaagctgagaccaagaaacttt

SEQ ID NO: 60724 - DNA, 25 bp, Probe Sequence
aaatgaagctgagaccaagaaactt

SEQ ID NO: 60725 - DNA, 25 bp, Probe Sequence
gaaatgaagctgagaccaagaaact

SEQ ID NO: 60726 - DNA, 25 bp, Probe Sequence
atgaagctgagaccaagaaactttc

SEQ ID NO: 60727 - DNA, 25 bp, Probe Sequence
ggaaatgaagctgagaccaagaaac

SEQ ID NO: 60728 - DNA, 25 bp, Probe Sequence
ggttcgtacaggagcaataaaggag

SEQ ID NO: 60729 - DNA, 25 bp, Probe Sequence
ctctttccctccacctcctacaatg

SEQ ID NO: 60730 - DNA, 25 bp, Probe Sequence
ccagaatcctgtggacacctatgac

SEQ ID NO: 60731 - DNA, 25 bp, Probe Sequence
cggaaatgaagctgagaccaagaaa

SEQ ID NO: 60732 - DNA, 25 bp, Probe Sequence
tgaagctgagaccaagaaactttcg

SEQ ID NO: 60733 - DNA, 25 bp, Probe Sequence
cagaatcctgtggacacctatgacg

SEQ ID NO: 60734 - DNA, 25 bp, Probe Sequence
gggttcgtacaggagcaataaagga

SEQ ID NO: 60735 - DNA, 25 bp, Probe Sequence
tagcgtattactgttctgtgacttc

SEQ ID NO: 60736 - DNA, 25 bp, Probe Sequence
cttcctctcttcttctgttcttcac

SEQ ID NO: 60737 - DNA, 25 bp, Probe Sequence
ctagcgtattactgttctgtgactt

SEQ ID NO: 60738 - DNA, 25 bp, Probe Sequence
ttcctctcttcttctgttcttcacg

SEQ ID NO: 60739 - DNA, 25 bp, Probe Sequence
gcttcctctcttcttctgttcttca

SEQ ID NO: 60740 - DNA, 25 bp, Probe Sequence
agcgtattactgttctgtgacttcc

SEQ ID NO: 60741 - DNA, 25 bp, Probe Sequence
gtattactgttctgtgacttccctg

SEQ ID NO: 60742 - DNA, 25 bp, Probe Sequence
tattactgttctgtgacttccctgt

SEQ ID NO: 60743 - DNA, 25 bp, Probe Sequence
cgcttcctctcttcttctgttcttc

SEQ ID NO: 60744 - DNA, 25 bp, Probe Sequence
cgtattactgttctgtgacttccct

SEQ ID NO: 60745 - DNA, 25 bp, Probe Sequence
acgcttcctctcttcttctgttctt

SEQ ID NO: 60746 - DNA, 25 bp, Probe Sequence
attactgttctgtgacttccctgtg

SEQ ID NO: 60747 - DNA, 25 bp, Probe Sequence
aacgcttcctctcttcttctgttct

SEQ ID NO: 60748 - DNA, 25 bp, Probe Sequence
tcctctcttcttctgttcttcacgc

SEQ ID NO: 60749 - DNA, 25 bp, Probe Sequence
aaacgcttcctctcttcttctgttc

SEQ ID NO: 60750 - DNA, 25 bp, Probe Sequence
gaaacgcttcctctcttcttctgtt

SEQ ID NO: 60751 - DNA, 25 bp, Probe Sequence
ttactgttctgtgacttccctgtga

SEQ ID NO: 60752 - DNA, 25 bp, Probe Sequence
cttgatttcttctctggaggcttgg

SEQ ID NO: 60753 - DNA, 25 bp, Probe Sequence
gcgtattactgttctgtgacttccc

SEQ ID NO: 60754 - DNA, 25 bp, Probe Sequence
gatgcttttctcaaactttcctgat

SEQ ID NO: 60755 - DNA, 25 bp, Probe Sequence
ttgatttcttctctggaggcttgga

SEQ ID NO: 60756 - DNA, 25 bp, Probe Sequence
tactgcctggtaaaagaattggttc

SEQ ID NO: 60757 - DNA, 25 bp, Probe Sequence
agatgcttttctcaaactttcctga

SEQ ID NO: 60758 - DNA, 25 bp, Probe Sequence
tgatttcttctctggaggcttggaa

SEQ ID NO: 60759 - DNA, 25 bp, Probe Sequence
agttctatctgaatcctgaccaatc

SEQ ID NO: 60760 - DNA, 25 bp, Probe Sequence
gagttctatctgaatcctgaccaat

SEQ ID NO: 60761 - DNA, 25 bp, Probe Sequence
tattacaatccttgacctcagtgaa

SEQ ID NO: 60762 - DNA, 25 bp, Probe Sequence
gttctatctgaatcctgaccaatca

SEQ ID NO: 60763 - DNA, 25 bp, Probe Sequence
atattacaatccttgacctcagtga

SEQ ID NO: 60764 - DNA, 25 bp, Probe Sequence
aactatactccgatcaccaatgtac

SEQ ID NO: 60765 - DNA, 25 bp, Probe Sequence
caactatactccgatcaccaatgta

SEQ ID NO: 60766 - DNA, 25 bp, Probe Sequence
gattgctccgtactctaacatctag

SEQ ID NO: 60767 - DNA, 25 bp, Probe Sequence
tatactccgatcaccaatgtacctc

SEQ ID NO: 60768 - DNA, 25 bp, Probe Sequence
ctatactccgatcaccaatgtacct

SEQ ID NO: 60769 - DNA, 25 bp, Probe Sequence
cgagttctatctgaatcctgaccaa

SEQ ID NO: 60770 - DNA, 25 bp, Probe Sequence
actatactccgatcaccaatgtacc

SEQ ID NO: 60771 - DNA, 25 bp, Probe Sequence
ctccaactatactccgatcaccaat

SEQ ID NO: 60772 - DNA, 25 bp, Probe Sequence
cgattgctccgtactctaacatcta

SEQ ID NO: 60773 - DNA, 25 bp, Probe Sequence
gcaatattacaatccttgacctcag

SEQ ID NO: 60774 - DNA, 25 bp, Probe Sequence
tccaactatactccgatcaccaatg

SEQ ID NO: 60775 - DNA, 25 bp, Probe Sequence
ggcaatattacaatccttgacctca

SEQ ID NO: 60776 - DNA, 25 bp, Probe Sequence
tggcaatattacaatccttgacctc

SEQ ID NO: 60777 - DNA, 25 bp, Probe Sequence
ctggcaatattacaatccttgacct

SEQ ID NO: 60778 - DNA, 25 bp, Probe Sequence
ccaactatactccgatcaccaatgt

SEQ ID NO: 60779 - DNA, 25 bp, Probe Sequence
aagctggcaatattacaatccttga

SEQ ID NO: 60780 - DNA, 25 bp, Probe Sequence
gtttgactttgatggtgatgagatt

SEQ ID NO: 60781 - DNA, 25 bp, Probe Sequence
aatattacaatccttgacctcagtg

SEQ ID NO: 60782 - DNA, 25 bp, Probe Sequence
caatattacaatccttgacctcagt

SEQ ID NO: 60783 - DNA, 25 bp, Probe Sequence
ggcttatccaaccagtctagttatg

SEQ ID NO: 60784 - DNA, 25 bp, Probe Sequence
caagttagttatgttgtaggagtgt

SEQ ID NO: 60785 - DNA, 25 bp, Probe Sequence
tcagagcagtatgagtggatatgac

SEQ ID NO: 60786 - DNA, 25 bp, Probe Sequence
gtcagagcagtatgagtggatatga

SEQ ID NO: 60787 - DNA, 25 bp, Probe Sequence
cttacagagccactgagaatgatat

SEQ ID NO: 60788 - DNA, 25 bp, Probe Sequence
gttagttatgttgtaggagtgtacc

SEQ ID NO: 60789 - DNA, 25 bp, Probe Sequence
ttacagagccactgagaatgatatt

SEQ ID NO: 60790 - DNA, 25 bp, Probe Sequence
tcaagttagttatgttgtaggagtg

SEQ ID NO: 60791 - DNA, 25 bp, Probe Sequence
agtgtacctaagcagtaagcgtatt

SEQ ID NO: 60792 - DNA, 25 bp, Probe Sequence
cagagcagtatgagtggatatgacc

SEQ ID NO: 60793 - DNA, 25 bp, Probe Sequence
aatataggagctgtgtctacgattc

SEQ ID NO: 60794 - DNA, 25 bp, Probe Sequence
ggcttgtgattcatgcttactgtaa

SEQ ID NO: 60795 - DNA, 25 bp, Probe Sequence
gagtgtacctaagcagtaagcgtat

SEQ ID NO: 60796 - DNA, 25 bp, Probe Sequence
atataggagctgtgtctacgattca

SEQ ID NO: 60797 - DNA, 25 bp, Probe Sequence
tataggagctgtgtctacgattcaa

SEQ ID NO: 60798 - DNA, 25 bp, Probe Sequence
cctcaagttagttatgttgtaggag

SEQ ID NO: 60799 - DNA, 25 bp, Probe Sequence
ccttacagagccactgagaatgata

SEQ ID NO: 60800 - DNA, 25 bp, Probe Sequence
ctcaagttagttatgttgtaggagt

SEQ ID NO: 60801 - DNA, 25 bp, Probe Sequence
attacaggcttgtgattcatgctta

SEQ ID NO: 60802 - DNA, 25 bp, Probe Sequence
tatgagtggatatgaccaagttctg

SEQ ID NO: 60803 - DNA, 25 bp, Probe Sequence
cagtatgagtggatatgaccaagtt

SEQ ID NO: 60804 - DNA, 25 bp, Probe Sequence
gtatgagtggatatgaccaagttct

SEQ ID NO: 60805 - DNA, 25 bp, Probe Sequence
agtatgagtggatatgaccaagttc

SEQ ID NO: 60806 - DNA, 25 bp, Probe Sequence
agttagttatgttgtaggagtgtac

SEQ ID NO: 60807 - DNA, 25 bp, Probe Sequence
caatcaacagtcttacacagagagg

SEQ ID NO: 60808 - DNA, 25 bp, Probe Sequence
gcaatcaacagtcttacacagagag

SEQ ID NO: 60809 - DNA, 25 bp, Probe Sequence
ctaacagtcttgtgtgacagatgaa

SEQ ID NO: 60810 - DNA, 25 bp, Probe Sequence
tacctaacagtcttgtgtgacagat

SEQ ID NO: 60811 - DNA, 25 bp, Probe Sequence
acctgcttcttctatatgatacaat

SEQ ID NO: 60812 - DNA, 25 bp, Probe Sequence
aaggataaatcagagttacagcagg

SEQ ID NO: 60813 - DNA, 25 bp, Probe Sequence
gataaatcagagttacagcagggat

SEQ ID NO: 60814 - DNA, 25 bp, Probe Sequence
agcaaatcaatataaccagcaaaga

SEQ ID NO: 60815 - DNA, 25 bp, Probe Sequence
ggcaatcaacagtcttacacagaga

SEQ ID NO: 60816 - DNA, 25 bp, Probe Sequence
cctaacagtcttgtgtgacagatga

SEQ ID NO: 60817 - DNA, 25 bp, Probe Sequence
ttgtacctaacagtcttgtgtgaca

SEQ ID NO: 60818 - DNA, 25 bp, Probe Sequence
gtacctaacagtcttgtgtgacaga

SEQ ID NO: 60819 - DNA, 25 bp, Probe Sequence
atgaaatggcttaatggtgctgtta

SEQ ID NO: 60820 - DNA, 25 bp, Probe Sequence
aacagtcttacacagagagggtatt

SEQ ID NO: 60821 - DNA, 25 bp, Probe Sequence
accaaggaaactattgacttaatgc

SEQ ID NO: 60822 - DNA, 25 bp, Probe Sequence
aagcaaatcaatataaccagcaaag

SEQ ID NO: 60823 - DNA, 25 bp, Probe Sequence
acctaacagtcttgtgtgacagatg

SEQ ID NO: 60824 - DNA, 25 bp, Probe Sequence
ccaaggaaactattgacttaatgct

SEQ ID NO: 60825 - DNA, 25 bp, Probe Sequence
ttacagcagggatttaacaaacagg

SEQ ID NO: 60826 - DNA, 25 bp, Probe Sequence
tagatgaaatggcttaatggtgctg

SEQ ID NO: 60827 - DNA, 25 bp, Probe Sequence
tgtacctaacagtcttgtgtgacag

SEQ ID NO: 60828 - DNA, 25 bp, Probe Sequence
tacctgcttcttctatatgatacaa

SEQ ID NO: 60829 - DNA, 25 bp, Probe Sequence
gcaaatcaatataaccagcaaagat

SEQ ID NO: 60830 - DNA, 25 bp, Probe Sequence
acagtcttacacagagagggtattc

SEQ ID NO: 60831 - DNA, 25 bp, Probe Sequence
gaatgacttcagctacctacacacc

SEQ ID NO: 60832 - DNA, 25 bp, Probe Sequence
caagttccctcacgagaatgaattg

SEQ ID NO: 60833 - DNA, 25 bp, Probe Sequence
acaagttccctcacgagaatgaatt

SEQ ID NO: 60834 - DNA, 25 bp, Probe Sequence
catgaatgacttcagctacctacac

SEQ ID NO: 60835 - DNA, 25 bp, Probe Sequence
atgacttcagctacctacacaccaa

SEQ ID NO: 60836 - DNA, 25 bp, Probe Sequence
aatgacttcagctacctacacacca

SEQ ID NO: 60837 - DNA, 25 bp, Probe Sequence
gacaagttccctcacgagaatgaat

SEQ ID NO: 60838 - DNA, 25 bp, Probe Sequence
atgaatgacttcagctacctacaca

SEQ ID NO: 60839 - DNA, 25 bp, Probe Sequence
ctacctacacaccaactgctttgag

SEQ ID NO: 60840 - DNA, 25 bp, Probe Sequence
gagcatgaatgacttcagctaccta

SEQ ID NO: 60841 - DNA, 25 bp, Probe Sequence
gacttcagctacctacacaccaact

SEQ ID NO: 60842 - DNA, 25 bp, Probe Sequence
tgaatgacttcagctacctacacac

SEQ ID NO: 60843 - DNA, 25 bp, Probe Sequence
agcatgaatgacttcagctacctac

SEQ ID NO: 60844 - DNA, 25 bp, Probe Sequence
aagttccctcacgagaatgaattgc

SEQ ID NO: 60845 - DNA, 25 bp, Probe Sequence
tgacttcagctacctacacaccaac

SEQ ID NO: 60846 - DNA, 25 bp, Probe Sequence
gcatgaatgacttcagctacctaca

SEQ ID NO: 60847 - DNA, 25 bp, Probe Sequence
tgacaagttccctcacgagaatgaa

SEQ ID NO: 60848 - DNA, 25 bp, Probe Sequence
acttcagctacctacacaccaactg

SEQ ID NO: 60849 - DNA, 25 bp, Probe Sequence
tacctacacaccaactgctttgagg

SEQ ID NO: 60850 - DNA, 25 bp, Probe Sequence
gctacctacacaccaactgctttga

SEQ ID NO: 60851 - DNA, 25 bp, Probe Sequence
ggagcatgaatgacttcagctacct

SEQ ID NO: 60852 - DNA, 25 bp, Probe Sequence
agttccctcacgagaatgaattgcc

SEQ ID NO: 60853 - DNA, 25 bp, Probe Sequence
ctacacaccaactgctttgaggtca

SEQ ID NO: 60854 - DNA, 25 bp, Probe Sequence
taccattcagtgacacggaactgtc

SEQ ID NO: 60855 - DNA, 25 bp, Probe Sequence
ccttcttcagttctagcgtcaaccc

SEQ ID NO: 60856 - DNA, 25 bp, Probe Sequence
ttacttacagtggaccaatggataa

SEQ ID NO: 60857 - DNA, 25 bp, Probe Sequence
tacttacagtggaccaatggataag

SEQ ID NO: 60858 - DNA, 25 bp, Probe Sequence
tacagtggaccaatggataagtcta

SEQ ID NO: 60859 - DNA, 25 bp, Probe Sequence
cagtggaccaatggataagtctatg

SEQ ID NO: 60860 - DNA, 25 bp, Probe Sequence
acagtggaccaatggataagtctat

SEQ ID NO: 60861 - DNA, 25 bp, Probe Sequence
cttacagtggaccaatggataagtc

SEQ ID NO: 60862 - DNA, 25 bp, Probe Sequence
ttacagtggaccaatggataagtct

SEQ ID NO: 60863 - DNA, 25 bp, Probe Sequence
gcatggttagtgtgtgatacaataa

SEQ ID NO: 60864 - DNA, 25 bp, Probe Sequence
ggcatggttagtgtgtgatacaata

SEQ ID NO: 60865 - DNA, 25 bp, Probe Sequence
ctttcactgacaattccaacattct

SEQ ID NO: 60866 - DNA, 25 bp, Probe Sequence
tctttcactgacaattccaacattc

SEQ ID NO: 60867 - DNA, 25 bp, Probe Sequence
ttcactgacaattccaacattcttt

SEQ ID NO: 60868 - DNA, 25 bp, Probe Sequence
tttcactgacaattccaacattctt

SEQ ID NO: 60869 - DNA, 25 bp, Probe Sequence
agtggaccaatggataagtctatgc

SEQ ID NO: 60870 - DNA, 25 bp, Probe Sequence
ccagtgactagaatataagggaggt

SEQ ID NO: 60871 - DNA, 25 bp, Probe Sequence
accagtgactagaatataagggagg

SEQ ID NO: 60872 - DNA, 25 bp, Probe Sequence
cactgacaattccaacattctttac

SEQ ID NO: 60873 - DNA, 25 bp, Probe Sequence
tcactgacaattccaacattcttta

SEQ ID NO: 60874 - DNA, 25 bp, Probe Sequence
gccaactaacattgcattgattcat

SEQ ID NO: 60875 - DNA, 25 bp, Probe Sequence
actgacaattccaacattctttact

SEQ ID NO: 60876 - DNA, 25 bp, Probe Sequence
caacattctttacttacagtggacc

SEQ ID NO: 60877 - DNA, 25 bp, Probe Sequence
ccaactaacattgcattgattcatt

SEQ ID NO: 60878 - DNA, 25 bp, Probe Sequence
aaccagtgactagaatataagggag

SEQ ID NO: 60879 - DNA, 25 bp, Probe Sequence
acattctttacttacagtggaccaa

SEQ ID NO: 60880 - DNA, 25 bp, Probe Sequence
cgtatgagatcctacaatggaagaa

SEQ ID NO: 60881 - DNA, 25 bp, Probe Sequence
tcgtatgagatcctacaatggaaga

SEQ ID NO: 60882 - DNA, 25 bp, Probe Sequence
gtcgtatgagatcctacaatggaag

SEQ ID NO: 60883 - DNA, 25 bp, Probe Sequence
atatgctttgtttcagggtttatgg

SEQ ID NO: 60884 - DNA, 25 bp, Probe Sequence
tttgtttcagggtttatggatttgt

SEQ ID NO: 60885 - DNA, 25 bp, Probe Sequence
gctttgtttcagggtttatggattt

SEQ ID NO: 60886 - DNA, 25 bp, Probe Sequence
tagaacgtcgtatgagatcctacaa

SEQ ID NO: 60887 - DNA, 25 bp, Probe Sequence
ttagaacgtcgtatgagatcctaca

SEQ ID NO: 60888 - DNA, 25 bp, Probe Sequence
tatgctttgtttcagggtttatgga

SEQ ID NO: 60889 - DNA, 25 bp, Probe Sequence
ctttgtttcagggtttatggatttg

SEQ ID NO: 60890 - DNA, 25 bp, Probe Sequence
gaacgtcgtatgagatcctacaatg

SEQ ID NO: 60891 - DNA, 25 bp, Probe Sequence
atgctttgtttcagggtttatggat

SEQ ID NO: 60892 - DNA, 25 bp, Probe Sequence
aactgtgggtataaactgttgaaac

SEQ ID NO: 60893 - DNA, 25 bp, Probe Sequence
agaacgtcgtatgagatcctacaat

SEQ ID NO: 60894 - DNA, 25 bp, Probe Sequence
ttgtttcagggtttatggatttgta

SEQ ID NO: 60895 - DNA, 25 bp, Probe Sequence
tgctttgtttcagggtttatggatt

SEQ ID NO: 60896 - DNA, 25 bp, Probe Sequence
tgtttcagggtttatggatttgtat

SEQ ID NO: 60897 - DNA, 25 bp, Probe Sequence
aaactgtgggtataaactgttgaaa

SEQ ID NO: 60898 - DNA, 25 bp, Probe Sequence
ttcagggtttatggatttgtattca

SEQ ID NO: 60899 - DNA, 25 bp, Probe Sequence
cgtcgtatgagatcctacaatggaa

SEQ ID NO: 60900 - DNA, 25 bp, Probe Sequence
cataggtttgtcagtttcacatcaa

SEQ ID NO: 60901 - DNA, 25 bp, Probe Sequence
aatcacctcattcttcatttcagat

SEQ ID NO: 60902 - DNA, 25 bp, Probe Sequence
gtatgagatcctacaatggaagaat

SEQ ID NO: 60903 - DNA, 25 bp, Probe Sequence
tcagggtttatggatttgtattcat

SEQ ID NO: 60904 - DNA, 25 bp, Probe Sequence
catcaagaacgtgagtgctataacc

SEQ ID NO: 60905 - DNA, 25 bp, Probe Sequence
ccatcaagaacgtgagtgctataac

SEQ ID NO: 60906 - DNA, 25 bp, Probe Sequence
atcaagaacgtgagtgctataacct

SEQ ID NO: 60907 - DNA, 25 bp, Probe Sequence
accatcaagaacgtgagtgctataa

SEQ ID NO: 60908 - DNA, 25 bp, Probe Sequence
gaccatcaagaacgtgagtgctata

SEQ ID NO: 60909 - DNA, 25 bp, Probe Sequence
tcaagaacgtgagtgctataacctg

SEQ ID NO: 60910 - DNA, 25 bp, Probe Sequence
caagaacgtgagtgctataacctgg

SEQ ID NO: 60911 - DNA, 25 bp, Probe Sequence
atttcaataaaagagagaagcaagc

SEQ ID NO: 60912 - DNA, 25 bp, Probe Sequence
tgaccatcaagaacgtgagtgctat

SEQ ID NO: 60913 - DNA, 25 bp, Probe Sequence
ctgaccatcaagaacgtgagtgcta

SEQ ID NO: 60914 - DNA, 25 bp, Probe Sequence
aagaacgtgagtgctataacctggg

SEQ ID NO: 60915 - DNA, 25 bp, Probe Sequence
tatttcaataaaagagagaagcaag

SEQ ID NO: 60916 - DNA, 25 bp, Probe Sequence
atatttcaataaaagagagaagcaa

SEQ ID NO: 60917 - DNA, 25 bp, Probe Sequence
gtatgactaccgttacctactgttg

SEQ ID NO: 60918 - DNA, 25 bp, Probe Sequence
tatgactaccgttacctactgttgt

SEQ ID NO: 60919 - DNA, 25 bp, Probe Sequence
ccgttacctactgttgtcattgtta

SEQ ID NO: 60920 - DNA, 25 bp, Probe Sequence
cgttacctactgttgtcattgttat

SEQ ID NO: 60921 - DNA, 25 bp, Probe Sequence
ctaccgttacctactgttgtcattg

SEQ ID NO: 60922 - DNA, 25 bp, Probe Sequence
actaccgttacctactgttgtcatt

SEQ ID NO: 60923 - DNA, 25 bp, Probe Sequence
atctcaactggatctacaatgtctg

SEQ ID NO: 60924 - DNA, 25 bp, Probe Sequence
taccgttacctactgttgtcattgt

SEQ ID NO: 60925 - DNA, 25 bp, Probe Sequence
caactggatctacaatgtctggaag

SEQ ID NO: 60926 - DNA, 25 bp, Probe Sequence
tcaactggatctacaatgtctggaa

SEQ ID NO: 60927 - DNA, 25 bp, Probe Sequence
tatctcaactggatctacaatgtct

SEQ ID NO: 60928 - DNA, 25 bp, Probe Sequence
gtattgctaagccaagaaggaactt

SEQ ID NO: 60929 - DNA, 25 bp, Probe Sequence
accgttacctactgttgtcattgtt

SEQ ID NO: 60930 - DNA, 25 bp, Probe Sequence
ctcaactggatctacaatgtctgga

SEQ ID NO: 60931 - DNA, 25 bp, Probe Sequence
tctcaactggatctacaatgtctgg

SEQ ID NO: 60932 - DNA, 25 bp, Probe Sequence
aactggatctacaatgtctggaagg

SEQ ID NO: 60933 - DNA, 25 bp, Probe Sequence
acctactgttgtcattgttattaca

SEQ ID NO: 60934 - DNA, 25 bp, Probe Sequence
gttacctactgttgtcattgttatt

SEQ ID NO: 60935 - DNA, 25 bp, Probe Sequence
gactaccgttacctactgttgtcat

SEQ ID NO: 60936 - DNA, 25 bp, Probe Sequence
atgactaccgttacctactgttgtc

SEQ ID NO: 60937 - DNA, 25 bp, Probe Sequence
ttgtcattgttattacagctatggc

SEQ ID NO: 60938 - DNA, 25 bp, Probe Sequence
gatctacaatgtctggaaggctgag

SEQ ID NO: 60939 - DNA, 25 bp, Probe Sequence
ggtattgctaagccaagaaggaact

SEQ ID NO: 60940 - DNA, 25 bp, Probe Sequence
actagagcaagaaaccagttgtaat

SEQ ID NO: 60941 - DNA, 25 bp, Probe Sequence
tcaacattcaagataagaacagcag

SEQ ID NO: 60942 - DNA, 25 bp, Probe Sequence
ttcaacattcaagataagaacagca

SEQ ID NO: 60943 - DNA, 25 bp, Probe Sequence
caacattcaagataagaacagcagc

SEQ ID NO: 60944 - DNA, 25 bp, Probe Sequence
atgaacgacttggtgtctgaatatc

SEQ ID NO: 60945 - DNA, 25 bp, Probe Sequence
attcaagataagaacagcagctact

SEQ ID NO: 60946 - DNA, 25 bp, Probe Sequence
cattcaagataagaacagcagctac

SEQ ID NO: 60947 - DNA, 25 bp, Probe Sequence
ttcaagataagaacagcagctactt

SEQ ID NO: 60948 - DNA, 25 bp, Probe Sequence
acattcaagataagaacagcagcta

SEQ ID NO: 60949 - DNA, 25 bp, Probe Sequence
aacattcaagataagaacagcagct

SEQ ID NO: 60950 - DNA, 25 bp, Probe Sequence
catgaacgacttggtgtctgaatat

SEQ ID NO: 60951 - DNA, 25 bp, Probe Sequence
tgaacgacttggtgtctgaatatca

SEQ ID NO: 60952 - DNA, 25 bp, Probe Sequence
acatgaacgacttggtgtctgaata

SEQ ID NO: 60953 - DNA, 25 bp, Probe Sequence
gaatatcagcaatatcaggatgcca

SEQ ID NO: 60954 - DNA, 25 bp, Probe Sequence
tgaatatcagcaatatcaggatgcc

SEQ ID NO: 60955 - DNA, 25 bp, Probe Sequence
aatatcagcaatatcaggatgccac

SEQ ID NO: 60956 - DNA, 25 bp, Probe Sequence
tcaagataagaacagcagctacttt

SEQ ID NO: 60957 - DNA, 25 bp, Probe Sequence
catggatgagatggaattcactgag

SEQ ID NO: 60958 - DNA, 25 bp, Probe Sequence
caagataagaacagcagctactttg

SEQ ID NO: 60959 - DNA, 25 bp, Probe Sequence
aacatgaacgacttggtgtctgaat

SEQ ID NO: 60960 - DNA, 25 bp, Probe Sequence
tttgatgctaagaacatgatggctg

SEQ ID NO: 60961 - DNA, 25 bp, Probe Sequence
gtttgatgctaagaacatgatggct

SEQ ID NO: 60962 - DNA, 25 bp, Probe Sequence
gttcaacattcaagataagaacagc

SEQ ID NO: 60963 - DNA, 25 bp, Probe Sequence
atggatgagatggaattcactgagg

SEQ ID NO: 60964 - DNA, 25 bp, Probe Sequence
tggtgtctgaatatcagcaatatca

SEQ ID NO: 60965 - DNA, 25 bp, Probe Sequence
ttccttcttcaagatcagttacctc

SEQ ID NO: 60966 - DNA, 25 bp, Probe Sequence
cttcaagatcagttacctcaccttc

SEQ ID NO: 60967 - DNA, 25 bp, Probe Sequence
attccttcttcaagatcagttacct

SEQ ID NO: 60968 - DNA, 25 bp, Probe Sequence
cattccttcttcaagatcagttacc

SEQ ID NO: 60969 - DNA, 25 bp, Probe Sequence
cttcttcaagatcagttacctcacc

SEQ ID NO: 60970 - DNA, 25 bp, Probe Sequence
ccttcttcaagatcagttacctcac

SEQ ID NO: 60971 - DNA, 25 bp, Probe Sequence
tccttcttcaagatcagttacctca

SEQ ID NO: 60972 - DNA, 25 bp, Probe Sequence
tcttcaagatcagttacctcacctt

SEQ ID NO: 60973 - DNA, 25 bp, Probe Sequence
ttcttcaagatcagttacctcacct

SEQ ID NO: 60974 - DNA, 25 bp, Probe Sequence
tcattccttcttcaagatcagttac

SEQ ID NO: 60975 - DNA, 25 bp, Probe Sequence
ttcaagatcagttacctcaccttcc

SEQ ID NO: 60976 - DNA, 25 bp, Probe Sequence
caagatcagttacctcaccttcctc

SEQ ID NO: 60977 - DNA, 25 bp, Probe Sequence
atcattccttcttcaagatcagtta

SEQ ID NO: 60978 - DNA, 25 bp, Probe Sequence
cttctgctgatgagatttatgactg

SEQ ID NO: 60979 - DNA, 25 bp, Probe Sequence
ccttctgctgatgagatttatgact

SEQ ID NO: 60980 - DNA, 25 bp, Probe Sequence
tcaagatcagttacctcaccttcct

SEQ ID NO: 60981 - DNA, 25 bp, Probe Sequence
ttctgctgatgagatttatgactgc

SEQ ID NO: 60982 - DNA, 25 bp, Probe Sequence
cccttctgctgatgagatttatgac

SEQ ID NO: 60983 - DNA, 25 bp, Probe Sequence
tcccttctgctgatgagatttatga

SEQ ID NO: 60984 - DNA, 25 bp, Probe Sequence
catgatgagacagtccaactctacc

SEQ ID NO: 60985 - DNA, 25 bp, Probe Sequence
ctcccttctgctgatgagatttatg

SEQ ID NO: 60986 - DNA, 25 bp, Probe Sequence
aagatcagttacctcaccttcctcc

SEQ ID NO: 60987 - DNA, 25 bp, Probe Sequence
gatcattccttcttcaagatcagtt

SEQ ID NO: 60988 - DNA, 25 bp, Probe Sequence
cctcccttctgctgatgagatttat

SEQ ID NO: 60989 - DNA, 25 bp, Probe Sequence
ttcaagaacataagctaccaccttc

SEQ ID NO: 60990 - DNA, 25 bp, Probe Sequence
gttcaagaacataagctaccacctt

SEQ ID NO: 60991 - DNA, 25 bp, Probe Sequence
tagatttatcaagggtgttatgggc

SEQ ID NO: 60992 - DNA, 25 bp, Probe Sequence
cgtagatttatcaagggtgttatgg

SEQ ID NO: 60993 - DNA, 25 bp, Probe Sequence
ccgtagatttatcaagggtgttatg

SEQ ID NO: 60994 - DNA, 25 bp, Probe Sequence
caggcgaagagagaaattaaagatt

SEQ ID NO: 60995 - DNA, 25 bp, Probe Sequence
gtagatttatcaagggtgttatggg

SEQ ID NO: 60996 - DNA, 25 bp, Probe Sequence
ccaggcgaagagagaaattaaagat

SEQ ID NO: 60997 - DNA, 25 bp, Probe Sequence
ctcgttcaagaacataagctaccac

SEQ ID NO: 60998 - DNA, 25 bp, Probe Sequence
ctcaaagtgcctctaaagaaaccag

SEQ ID NO: 60999 - DNA, 25 bp, Probe Sequence
accaggcgaagagagaaattaaaga

SEQ ID NO: 61000 - DNA, 25 bp, Probe Sequence
caccaggcgaagagagaaattaaag

SEQ ID NO: 61001 - DNA, 25 bp, Probe Sequence
ggcgaagagagaaattaaagatttg

SEQ ID NO: 61002 - DNA, 25 bp, Probe Sequence
aggcgaagagagaaattaaagattt

SEQ ID NO: 61003 - DNA, 25 bp, Probe Sequence
cgttcaagaacataagctaccacct

SEQ ID NO: 61004 - DNA, 25 bp, Probe Sequence
tcgttcaagaacataagctaccacc

SEQ ID NO: 61005 - DNA, 25 bp, Probe Sequence
caagaacataagctaccaccttctc

SEQ ID NO: 61006 - DNA, 25 bp, Probe Sequence
gcgaagagagaaattaaagatttga

SEQ ID NO: 61007 - DNA, 25 bp, Probe Sequence
actcaaagtgcctctaaagaaacca

SEQ ID NO: 61008 - DNA, 25 bp, Probe Sequence
tcaagaacataagctaccaccttct

SEQ ID NO: 61009 - DNA, 25 bp, Probe Sequence
aagaacataagctaccaccttctcc

SEQ ID NO: 61010 - DNA, 25 bp, Probe Sequence
tcaaagtgcctctaaagaaaccagc

SEQ ID NO: 61011 - DNA, 25 bp, Probe Sequence
cccgtagatttatcaagggtgttat

SEQ ID NO: 61012 - DNA, 25 bp, Probe Sequence
gcaccaggcgaagagagaaattaaa

SEQ ID NO: 61013 - DNA, 25 bp, Probe Sequence
tcagagttcatattctccaagcaat

SEQ ID NO: 61014 - DNA, 25 bp, Probe Sequence
ttctcagagttcatattctccaagc

SEQ ID NO: 61015 - DNA, 25 bp, Probe Sequence
ctcagagttcatattctccaagcaa

SEQ ID NO: 61016 - DNA, 25 bp, Probe Sequence
ggctctcctaatactccacattcaa

SEQ ID NO: 61017 - DNA, 25 bp, Probe Sequence
gagttcatattctccaagcaatagg

SEQ ID NO: 61018 - DNA, 25 bp, Probe Sequence
tcttctcagagttcatattctccaa

SEQ ID NO: 61019 - DNA, 25 bp, Probe Sequence
ttcttctcagagttcatattctcca

SEQ ID NO: 61020 - DNA, 25 bp, Probe Sequence
tctcagagttcatattctccaagca

SEQ ID NO: 61021 - DNA, 25 bp, Probe Sequence
cagagttcatattctccaagcaata

SEQ ID NO: 61022 - DNA, 25 bp, Probe Sequence
cttctcagagttcatattctccaag

SEQ ID NO: 61023 - DNA, 25 bp, Probe Sequence
cttcttctcagagttcatattctcc

SEQ ID NO: 61024 - DNA, 25 bp, Probe Sequence
agagttcatattctccaagcaatag

SEQ ID NO: 61025 - DNA, 25 bp, Probe Sequence
ctcatcttacacttgaacacagagc

SEQ ID NO: 61026 - DNA, 25 bp, Probe Sequence
gctcatcttacacttgaacacagag

SEQ ID NO: 61027 - DNA, 25 bp, Probe Sequence
tatacggagacatctcttcaagaac

SEQ ID NO: 61028 - DNA, 25 bp, Probe Sequence
ctatacggagacatctcttcaagaa

SEQ ID NO: 61029 - DNA, 25 bp, Probe Sequence
caggtctgtcactcttgttacattg

SEQ ID NO: 61030 - DNA, 25 bp, Probe Sequence
tcaggtctgtcactcttgttacatt

SEQ ID NO: 61031 - DNA, 25 bp, Probe Sequence
ttcaggtctgtcactcttgttacat

SEQ ID NO: 61032 - DNA, 25 bp, Probe Sequence
gtctgtcactcttgttacattgtgt

SEQ ID NO: 61033 - DNA, 25 bp, Probe Sequence
aggtctgtcactcttgttacattgt

SEQ ID NO: 61034 - DNA, 25 bp, Probe Sequence
ctacaatcacacaatccacagcaac

SEQ ID NO: 61035 - DNA, 25 bp, Probe Sequence
ctctaatgaagctgctgtgtgtatt

SEQ ID NO: 61036 - DNA, 25 bp, Probe Sequence
tacggagacatctcttcaagaacat

SEQ ID NO: 61037 - DNA, 25 bp, Probe Sequence
tatatctgctgtcatcttagttgga

SEQ ID NO: 61038 - DNA, 25 bp, Probe Sequence
aatctccagacttgcttacatctag

SEQ ID NO: 61039 - DNA, 25 bp, Probe Sequence
tactacagtacatggctaatcttcc

SEQ ID NO: 61040 - DNA, 25 bp, Probe Sequence
acagttacatcttaattccatccaa

SEQ ID NO: 61041 - DNA, 25 bp, Probe Sequence
atatctgctgtcatcttagttggac

SEQ ID NO: 61042 - DNA, 25 bp, Probe Sequence
taggcattactacagtacatggcta

SEQ ID NO: 61043 - DNA, 25 bp, Probe Sequence
ggcattactacagtacatggctaat

SEQ ID NO: 61044 - DNA, 25 bp, Probe Sequence
gcattactacagtacatggctaatc

SEQ ID NO: 61045 - DNA, 25 bp, Probe Sequence
ttgaagacagaagtgtactctctac

SEQ ID NO: 61046 - DNA, 25 bp, Probe Sequence
aggcattactacagtacatggctaa

SEQ ID NO: 61047 - DNA, 25 bp, Probe Sequence
atatatctgctgtcatcttagttgg

SEQ ID NO: 61048 - DNA, 25 bp, Probe Sequence
tacagttacatcttaattccatcca

SEQ ID NO: 61049 - DNA, 25 bp, Probe Sequence
tatctgctgtcatcttagttggacc

SEQ ID NO: 61050 - DNA, 25 bp, Probe Sequence
aatagagggaaacttggatgctaaa

SEQ ID NO: 61051 - DNA, 25 bp, Probe Sequence
aaatagagggaaacttggatgctaa

SEQ ID NO: 61052 - DNA, 25 bp, Probe Sequence
ataaatagagggaaacttggatgct

SEQ ID NO: 61053 - DNA, 25 bp, Probe Sequence
ttactacagtacatggctaatcttc

SEQ ID NO: 61054 - DNA, 25 bp, Probe Sequence
tgatgattggtgtagaaatgtgtga

SEQ ID NO: 61055 - DNA, 25 bp, Probe Sequence
atgatgattggtgtagaaatgtgtg

SEQ ID NO: 61056 - DNA, 25 bp, Probe Sequence
gatgattggtgtagaaatgtgtgat

SEQ ID NO: 61057 - DNA, 25 bp, Probe Sequence
cattactacagtacatggctaatct

SEQ ID NO: 61058 - DNA, 25 bp, Probe Sequence
taaatagagggaaacttggatgcta

SEQ ID NO: 61059 - DNA, 25 bp, Probe Sequence
aataaatagagggaaacttggatgc

SEQ ID NO: 61060 - DNA, 25 bp, Probe Sequence
aaagcaaagtgttaaatggagaaga

SEQ ID NO: 61061 - DNA, 25 bp, Probe Sequence
cgtgggcaaaatacaatttcattta

SEQ ID NO: 61062 - DNA, 25 bp, Probe Sequence
ccgtgggcaaaatacaatttcattt

SEQ ID NO: 61063 - DNA, 25 bp, Probe Sequence
gggcaaaatacaatttcatttaaca

SEQ ID NO: 61064 - DNA, 25 bp, Probe Sequence
tgggcaaaatacaatttcatttaac

SEQ ID NO: 61065 - DNA, 25 bp, Probe Sequence
gtgggcaaaatacaatttcatttaa

SEQ ID NO: 61066 - DNA, 25 bp, Probe Sequence
ggcaaaatacaatttcatttaacaa

SEQ ID NO: 61067 - DNA, 25 bp, Probe Sequence
gccgtgggcaaaatacaatttcatt

SEQ ID NO: 61068 - DNA, 25 bp, Probe Sequence
agccgtgggcaaaatacaatttcat

SEQ ID NO: 61069 - DNA, 25 bp, Probe Sequence
cagccgtgggcaaaatacaatttca

SEQ ID NO: 61070 - DNA, 25 bp, Probe Sequence
tacttctctggactgatcctattca

SEQ ID NO: 61071 - DNA, 25 bp, Probe Sequence
ttacttctctggactgatcctattc

SEQ ID NO: 61072 - DNA, 25 bp, Probe Sequence
gagatatttgggctttatggacaga

SEQ ID NO: 61073 - DNA, 25 bp, Probe Sequence
agatatttgggctttatggacagac

SEQ ID NO: 61074 - DNA, 25 bp, Probe Sequence
tgagatatttgggctttatggacag

SEQ ID NO: 61075 - DNA, 25 bp, Probe Sequence
gtgagatatttgggctttatggaca

SEQ ID NO: 61076 - DNA, 25 bp, Probe Sequence
tatattgactgatgtttggacggtg

SEQ ID NO: 61077 - DNA, 25 bp, Probe Sequence
gtatattgactgatgtttggacggt

SEQ ID NO: 61078 - DNA, 25 bp, Probe Sequence
ttctctggactgatcctattcacag

SEQ ID NO: 61079 - DNA, 25 bp, Probe Sequence
cttctctggactgatcctattcaca

SEQ ID NO: 61080 - DNA, 25 bp, Probe Sequence
acttctctggactgatcctattcac

SEQ ID NO: 61081 - DNA, 25 bp, Probe Sequence
gatatttgggctttatggacagacc

SEQ ID NO: 61082 - DNA, 25 bp, Probe Sequence
agtatattgactgatgtttggacgg

SEQ ID NO: 61083 - DNA, 25 bp, Probe Sequence
cgtgagatatttgggctttatggac

SEQ ID NO: 61084 - DNA, 25 bp, Probe Sequence
tgatcctattcacagcttcctcatg

SEQ ID NO: 61085 - DNA, 25 bp, Probe Sequence
ctgatcctattcacagcttcctcat

SEQ ID NO: 61086 - DNA, 25 bp, Probe Sequence
atattgactgatgtttggacggtga

SEQ ID NO: 61087 - DNA, 25 bp, Probe Sequence
ctccgtgagatatttgggctttatg

SEQ ID NO: 61088 - DNA, 25 bp, Probe Sequence
tattgactgatgtttggacggtgaa

SEQ ID NO: 61089 - DNA, 25 bp, Probe Sequence
actccgtgagatatttgggctttat

SEQ ID NO: 61090 - DNA, 25 bp, Probe Sequence
aactccgtgagatatttgggcttta

SEQ ID NO: 61091 - DNA, 25 bp, Probe Sequence
ccgtgagatatttgggctttatgga

SEQ ID NO: 61092 - DNA, 25 bp, Probe Sequence
tccgtgagatatttgggctttatgg

SEQ ID NO: 61093 - DNA, 25 bp, Probe Sequence
gactgatcctattcacagcttcctc

SEQ ID NO: 61094 - DNA, 25 bp, Probe Sequence
aagcattcactccttcatccaattc

SEQ ID NO: 61095 - DNA, 25 bp, Probe Sequence
cattcactccttcatccaattccac

SEQ ID NO: 61096 - DNA, 25 bp, Probe Sequence
gagacatggagacattaaccttcag

SEQ ID NO: 61097 - DNA, 25 bp, Probe Sequence
attgacatgatctgtgccattctag

SEQ ID NO: 61098 - DNA, 25 bp, Probe Sequence
attcactccttcatccaattccacc

SEQ ID NO: 61099 - DNA, 25 bp, Probe Sequence
ggagacatggagacattaaccttca

SEQ ID NO: 61100 - DNA, 25 bp, Probe Sequence
tggagacatggagacattaaccttc

SEQ ID NO: 61101 - DNA, 25 bp, Probe Sequence
ctggagacatggagacattaacctt

SEQ ID NO: 61102 - DNA, 25 bp, Probe Sequence
agcattcactccttcatccaattcc

SEQ ID NO: 61103 - DNA, 25 bp, Probe Sequence
agacatggagacattaaccttcagc

SEQ ID NO: 61104 - DNA, 25 bp, Probe Sequence
aaagcattcactccttcatccaatt

SEQ ID NO: 61105 - DNA, 25 bp, Probe Sequence
gaaagcattcactccttcatccaat

SEQ ID NO: 61106 - DNA, 25 bp, Probe Sequence
gcattcactccttcatccaattcca

SEQ ID NO: 61107 - DNA, 25 bp, Probe Sequence
tactcagaattcaagaactcacagc

SEQ ID NO: 61108 - DNA, 25 bp, Probe Sequence
ctactcagaattcaagaactcacag

SEQ ID NO: 61109 - DNA, 25 bp, Probe Sequence
tcagaattcaagaactcacagcatt

SEQ ID NO: 61110 - DNA, 25 bp, Probe Sequence
cctctactcagaattcaagaactca

SEQ ID NO: 61111 - DNA, 25 bp, Probe Sequence
gacatggagacattaaccttcagct

SEQ ID NO: 61112 - DNA, 25 bp, Probe Sequence
aagctggagacatggagacattaac

SEQ ID NO: 61113 - DNA, 25 bp, Probe Sequence
caagctggagacatggagacattaa

SEQ ID NO: 61114 - DNA, 25 bp, Probe Sequence
caagaaagcattcactccttcatcc

SEQ ID NO: 61115 - DNA, 25 bp, Probe Sequence
tctactcagaattcaagaactcaca

SEQ ID NO: 61116 - DNA, 25 bp, Probe Sequence
ctcagaattcaagaactcacagcat

SEQ ID NO: 61117 - DNA, 25 bp, Probe Sequence
ttcactccttcatccaattccacct

SEQ ID NO: 61118 - DNA, 25 bp, Probe Sequence
atggttatgatgatggttcttcctt

SEQ ID NO: 61119 - DNA, 25 bp, Probe Sequence
aatggttatgatgatggttcttcct

SEQ ID NO: 61120 - DNA, 25 bp, Probe Sequence
caatggttatgatgatggttcttcc

SEQ ID NO: 61121 - DNA, 25 bp, Probe Sequence
taccttctggatcttatgtagtgga

SEQ ID NO: 61122 - DNA, 25 bp, Probe Sequence
ctggatcttatgtagtggaagttgt

SEQ ID NO: 61123 - DNA, 25 bp, Probe Sequence
tctggatcttatgtagtggaagttg

SEQ ID NO: 61124 - DNA, 25 bp, Probe Sequence
ataccttctggatcttatgtagtgg

SEQ ID NO: 61125 - DNA, 25 bp, Probe Sequence
accttctggatcttatgtagtggaa

SEQ ID NO: 61126 - DNA, 25 bp, Probe Sequence
ttctggatcttatgtagtggaagtt

SEQ ID NO: 61127 - DNA, 25 bp, Probe Sequence
tggatcttatgtagtggaagttgta

SEQ ID NO: 61128 - DNA, 25 bp, Probe Sequence
cataggagatcgcttcaagattgag

SEQ ID NO: 61129 - DNA, 25 bp, Probe Sequence
tcttatgtagtggaagttgtatctc

SEQ ID NO: 61130 - DNA, 25 bp, Probe Sequence
ccaatggttatgatgatggttcttc

SEQ ID NO: 61131 - DNA, 25 bp, Probe Sequence
atgagagcaagatatgtgaattaca

SEQ ID NO: 61132 - DNA, 25 bp, Probe Sequence
ggatcttatgtagtggaagttgtat

SEQ ID NO: 61133 - DNA, 25 bp, Probe Sequence
tggttatgatgatggttcttccttt

SEQ ID NO: 61134 - DNA, 25 bp, Probe Sequence
ccctatcctctccaaatgaaatctt

SEQ ID NO: 61135 - DNA, 25 bp, Probe Sequence
aatgagagcaagatatgtgaattac

SEQ ID NO: 61136 - DNA, 25 bp, Probe Sequence
aaccgtgtgaagcaactactataaa

SEQ ID NO: 61137 - DNA, 25 bp, Probe Sequence
aaaccgtgtgaagcaactactataa

SEQ ID NO: 61138 - DNA, 25 bp, Probe Sequence
cttatgtagtggaagttgtatctcc

SEQ ID NO: 61139 - DNA, 25 bp, Probe Sequence
ataggagatcgcttcaagattgagg

SEQ ID NO: 61140 - DNA, 25 bp, Probe Sequence
ggaaatggagcagtcaatgaatatg

SEQ ID NO: 61141 - DNA, 25 bp, Probe Sequence
attgatatttgtgcttctgcctaaa

SEQ ID NO: 61142 - DNA, 25 bp, Probe Sequence
taggtcattgcttgtaccaggtaat

SEQ ID NO: 61143 - DNA, 25 bp, Probe Sequence
ttaggtcattgcttgtaccaggtaa

SEQ ID NO: 61144 - DNA, 25 bp, Probe Sequence
tggacatctattaaagtgattgaca

SEQ ID NO: 61145 - DNA, 25 bp, Probe Sequence
tgaactacctatggacatctattaa

SEQ ID NO: 61146 - DNA, 25 bp, Probe Sequence
aggtcattgcttgtaccaggtaatt

SEQ ID NO: 61147 - DNA, 25 bp, Probe Sequence
atgaactacctatggacatctatta

SEQ ID NO: 61148 - DNA, 25 bp, Probe Sequence
tatgaactacctatggacatctatt

SEQ ID NO: 61149 - DNA, 25 bp, Probe Sequence
tttcctaaagtcccatacatttgga

SEQ ID NO: 61150 - DNA, 25 bp, Probe Sequence
atatgaactacctatggacatctat

SEQ ID NO: 61151 - DNA, 25 bp, Probe Sequence
cagaaatatgtaaactgagagatgc

SEQ ID NO: 61152 - DNA, 25 bp, Probe Sequence
gctttcctaaagtcccatacatttg

SEQ ID NO: 61153 - DNA, 25 bp, Probe Sequence
ggacatctattaaagtgattgacaa

SEQ ID NO: 61154 - DNA, 25 bp, Probe Sequence
ctttcctaaagtcccatacatttgg

SEQ ID NO: 61155 - DNA, 25 bp, Probe Sequence
tgtaaactgagagatgcaaatgtaa

SEQ ID NO: 61156 - DNA, 25 bp, Probe Sequence
acctatggacatctattaaagtgat

SEQ ID NO: 61157 - DNA, 25 bp, Probe Sequence
cttagcttgttcagatctctgcatt

SEQ ID NO: 61158 - DNA, 25 bp, Probe Sequence
atgtaaactgagagatgcaaatgta

SEQ ID NO: 61159 - DNA, 25 bp, Probe Sequence
tatgtaaactgagagatgcaaatgt

SEQ ID NO: 61160 - DNA, 25 bp, Probe Sequence
atggacatctattaaagtgattgac

SEQ ID NO: 61161 - DNA, 25 bp, Probe Sequence
ggtcattgcttgtaccaggtaattt

SEQ ID NO: 61162 - DNA, 25 bp, Probe Sequence
tttaggtcattgcttgtaccaggta

SEQ ID NO: 61163 - DNA, 25 bp, Probe Sequence
agaaatatgtaaactgagagatgca

SEQ ID NO: 61164 - DNA, 25 bp, Probe Sequence
acttagcttgttcagatctctgcat

SEQ ID NO: 61165 - DNA, 25 bp, Probe Sequence
tacctatggacatctattaaagtga

SEQ ID NO: 61166 - DNA, 25 bp, Probe Sequence
tattctcctcccacctaagtctctg

SEQ ID NO: 61167 - DNA, 25 bp, Probe Sequence
gtattctcctcccacctaagtctct

SEQ ID NO: 61168 - DNA, 25 bp, Probe Sequence
gaaaggtttctgctttgtctcatac

SEQ ID NO: 61169 - DNA, 25 bp, Probe Sequence
aaaggtttctgctttgtctcatacc

SEQ ID NO: 61170 - DNA, 25 bp, Probe Sequence
tcaacacatggacatcactggagag

SEQ ID NO: 61171 - DNA, 25 bp, Probe Sequence
agaaaggtttctgctttgtctcata

SEQ ID NO: 61172 - DNA, 25 bp, Probe Sequence
gtttctgctttgtctcatacctggc

SEQ ID NO: 61173 - DNA, 25 bp, Probe Sequence
ggtattctcctcccacctaagtctc

SEQ ID NO: 61174 - DNA, 25 bp, Probe Sequence
tgatgcttttcaggtttaatcctta

SEQ ID NO: 61175 - DNA, 25 bp, Probe Sequence
ctacgagaaaggtttctgctttgtc

SEQ ID NO: 61176 - DNA, 25 bp, Probe Sequence
gtcaacacatggacatcactggaga

SEQ ID NO: 61177 - DNA, 25 bp, Probe Sequence
ggtttctgctttgtctcatacctgg

SEQ ID NO: 61178 - DNA, 25 bp, Probe Sequence
tacgagaaaggtttctgctttgtct

SEQ ID NO: 61179 - DNA, 25 bp, Probe Sequence
caacacatggacatcactggagagg

SEQ ID NO: 61180 - DNA, 25 bp, Probe Sequence
gagaaaggtttctgctttgtctcat

SEQ ID NO: 61181 - DNA, 25 bp, Probe Sequence
gatgcttttcaggtttaatccttat

SEQ ID NO: 61182 - DNA, 25 bp, Probe Sequence
tgcttttcaggtttaatccttattt

SEQ ID NO: 61183 - DNA, 25 bp, Probe Sequence
atgcttttcaggtttaatccttatt

SEQ ID NO: 61184 - DNA, 25 bp, Probe Sequence
attctcctcccacctaagtctctgg

SEQ ID NO: 61185 - DNA, 25 bp, Probe Sequence
atcagtttgacagttttctcaaggc

SEQ ID NO: 61186 - DNA, 25 bp, Probe Sequence
gcttttcaggtttaatccttatttt

SEQ ID NO: 61187 - DNA, 25 bp, Probe Sequence
ctgatgcttttcaggtttaatcctt

SEQ ID NO: 61188 - DNA, 25 bp, Probe Sequence
ttctgatgcttttcaggtttaatcc

SEQ ID NO: 61189 - DNA, 25 bp, Probe Sequence
tctgatgcttttcaggtttaatcct

SEQ ID NO: 61190 - DNA, 25 bp, Probe Sequence
cggacctaatagacatctacagaac

SEQ ID NO: 61191 - DNA, 25 bp, Probe Sequence
ggacctaatagacatctacagaact

SEQ ID NO: 61192 - DNA, 25 bp, Probe Sequence
aatagacatctacagaactctccac

SEQ ID NO: 61193 - DNA, 25 bp, Probe Sequence
cattagacagatcaacgagacagaa

SEQ ID NO: 61194 - DNA, 25 bp, Probe Sequence
atagacatctacagaactctccacc

SEQ ID NO: 61195 - DNA, 25 bp, Probe Sequence
aacattagacagatcaacgagacag

SEQ ID NO: 61196 - DNA, 25 bp, Probe Sequence
tcaacattagacagatcaacgagac

SEQ ID NO: 61197 - DNA, 25 bp, Probe Sequence
gcggacctaatagacatctacagaa

SEQ ID NO: 61198 - DNA, 25 bp, Probe Sequence
aagcggacctaatagacatctacag

SEQ ID NO: 61199 - DNA, 25 bp, Probe Sequence
caacattagacagatcaacgagaca

SEQ ID NO: 61200 - DNA, 25 bp, Probe Sequence
caagcggacctaatagacatctaca

SEQ ID NO: 61201 - DNA, 25 bp, Probe Sequence
acattagacagatcaacgagacaga

SEQ ID NO: 61202 - DNA, 25 bp, Probe Sequence
gctaacatcataatgacaggatcaa

SEQ ID NO: 61203 - DNA, 25 bp, Probe Sequence
agcggacctaatagacatctacaga

SEQ ID NO: 61204 - DNA, 25 bp, Probe Sequence
gacctaatagacatctacagaactc

SEQ ID NO: 61205 - DNA, 25 bp, Probe Sequence
taatagacatctacagaactctcca

SEQ ID NO: 61206 - DNA, 25 bp, Probe Sequence
acctaatagacatctacagaactct

SEQ ID NO: 61207 - DNA, 25 bp, Probe Sequence
gtcaacattagacagatcaacgaga

SEQ ID NO: 61208 - DNA, 25 bp, Probe Sequence
ccaagcggacctaatagacatctac

SEQ ID NO: 61209 - DNA, 25 bp, Probe Sequence
ttcaacaagaagagctaactatcct

SEQ ID NO: 61210 - DNA, 25 bp, Probe Sequence
ggatcaattcaacaagaagagctaa

SEQ ID NO: 61211 - DNA, 25 bp, Probe Sequence
accaagcggacctaatagacatcta

SEQ ID NO: 61212 - DNA, 25 bp, Probe Sequence
tcaacaagaagagctaactatccta

SEQ ID NO: 61213 - DNA, 25 bp, Probe Sequence
agctaacatcataatgacaggatca

SEQ ID NO: 61214 - DNA, 25 bp, Probe Sequence
gtagtacaactcattgctggaattg

SEQ ID NO: 61215 - DNA, 25 bp, Probe Sequence
agtagtacaactcattgctggaatt

SEQ ID NO: 61216 - DNA, 25 bp, Probe Sequence
aagtagtacaactcattgctggaat

SEQ ID NO: 61217 - DNA, 25 bp, Probe Sequence
gaagtagtacaactcattgctggaa

SEQ ID NO: 61218 - DNA, 25 bp, Probe Sequence
ttggaagtagtacaactcattgctg

SEQ ID NO: 61219 - DNA, 25 bp, Probe Sequence
aattattcaaggcgtgatctctgtc

SEQ ID NO: 61220 - DNA, 25 bp, Probe Sequence
tgtctaatacactgatatgaagcag

SEQ ID NO: 61221 - DNA, 25 bp, Probe Sequence
atgaataaggaccagaaatcgtgag

SEQ ID NO: 61222 - DNA, 25 bp, Probe Sequence
gaataaggaccagaaatcgtgagat

SEQ ID NO: 61223 - DNA, 25 bp, Probe Sequence
ccctacttcttaatgcctctctaaa

SEQ ID NO: 61224 - DNA, 25 bp, Probe Sequence
ttactcaggaggtttctataatgcc

SEQ ID NO: 61225 - DNA, 25 bp, Probe Sequence
aataaggaccagaaatcgtgagatg

SEQ ID NO: 61226 - DNA, 25 bp, Probe Sequence
gatgaataaggaccagaaatcgtga

SEQ ID NO: 61227 - DNA, 25 bp, Probe Sequence
caggaggtttctataatgccacata

SEQ ID NO: 61228 - DNA, 25 bp, Probe Sequence
attattcaaggcgtgatctctgtca

SEQ ID NO: 61229 - DNA, 25 bp, Probe Sequence
tacttcttaatgcctctctaaagcc

SEQ ID NO: 61230 - DNA, 25 bp, Probe Sequence
tactcaggaggtttctataatgcca

SEQ ID NO: 61231 - DNA, 25 bp, Probe Sequence
catgcaatgatgtaggagttctctt

SEQ ID NO: 61232 - DNA, 25 bp, Probe Sequence
ggaagtagtacaactcattgctgga

SEQ ID NO: 61233 - DNA, 25 bp, Probe Sequence
aattgactgtgtccatgtgatgatg

SEQ ID NO: 61234 - DNA, 25 bp, Probe Sequence
gttactcaggaggtttctataatgc

SEQ ID NO: 61235 - DNA, 25 bp, Probe Sequence
ctacttcttaatgcctctctaaagc

SEQ ID NO: 61236 - DNA, 25 bp, Probe Sequence
tgaataaggaccagaaatcgtgaga

SEQ ID NO: 61237 - DNA, 25 bp, Probe Sequence
ataaggaccagaaatcgtgagatgt

SEQ ID NO: 61238 - DNA, 25 bp, Probe Sequence
tacttctataccgattgtcttgtgc

SEQ ID NO: 61239 - DNA, 25 bp, Probe Sequence
aagcagtcattcatatcagcgtaat

SEQ ID NO: 61240 - DNA, 25 bp, Probe Sequence
caagcagtcattcatatcagcgtaa

SEQ ID NO: 61241 - DNA, 25 bp, Probe Sequence
ttacttctataccgattgtcttgtg

SEQ ID NO: 61242 - DNA, 25 bp, Probe Sequence
gttacttctataccgattgtcttgt

SEQ ID NO: 61243 - DNA, 25 bp, Probe Sequence
tcaagcagtcattcatatcagcgta

SEQ ID NO: 61244 - DNA, 25 bp, Probe Sequence
ttctataccgattgtcttgtgccaa

SEQ ID NO: 61245 - DNA, 25 bp, Probe Sequence
cttctataccgattgtcttgtgcca

SEQ ID NO: 61246 - DNA, 25 bp, Probe Sequence
acttctataccgattgtcttgtgcc

SEQ ID NO: 61247 - DNA, 25 bp, Probe Sequence
tggttacttctataccgattgtctt

SEQ ID NO: 61248 - DNA, 25 bp, Probe Sequence
ttggttacttctataccgattgtct

SEQ ID NO: 61249 - DNA, 25 bp, Probe Sequence
ggttacttctataccgattgtcttg

SEQ ID NO: 61250 - DNA, 25 bp, Probe Sequence
ttcaagcagtcattcatatcagcgt

SEQ ID NO: 61251 - DNA, 25 bp, Probe Sequence
acactgaatatgtctaagattggtt

SEQ ID NO: 61252 - DNA, 25 bp, Probe Sequence
ctttcaagcagtcattcatatcagc

SEQ ID NO: 61253 - DNA, 25 bp, Probe Sequence
tctttcaagcagtcattcatatcag

SEQ ID NO: 61254 - DNA, 25 bp, Probe Sequence
tcctgaaatagatgattccgagttt

SEQ ID NO: 61255 - DNA, 25 bp, Probe Sequence
ttcctgaaatagatgattccgagtt

SEQ ID NO: 61256 - DNA, 25 bp, Probe Sequence
attcctgaaatagatgattccgagt

SEQ ID NO: 61257 - DNA, 25 bp, Probe Sequence
taaagagccttaactgggaagaaat

SEQ ID NO: 61258 - DNA, 25 bp, Probe Sequence
ataaagagccttaactgggaagaaa

SEQ ID NO: 61259 - DNA, 25 bp, Probe Sequence
aataaagagccttaactgggaagaa

SEQ ID NO: 61260 - DNA, 25 bp, Probe Sequence
aaataaagagccttaactgggaaga

SEQ ID NO: 61261 - DNA, 25 bp, Probe Sequence
ggcttcagatactcaaaccacttag

SEQ ID NO: 61262 - DNA, 25 bp, Probe Sequence
acggtaataggtggtaacttggtaa

SEQ ID NO: 61263 - DNA, 25 bp, Probe Sequence
gacggtaataggtggtaacttggta

SEQ ID NO: 61264 - DNA, 25 bp, Probe Sequence
taaggttatctgtctgatactgagc

SEQ ID NO: 61265 - DNA, 25 bp, Probe Sequence
ggtaaggttatctgtctgatactga

SEQ ID NO: 61266 - DNA, 25 bp, Probe Sequence
aaggttatctgtctgatactgagca

SEQ ID NO: 61267 - DNA, 25 bp, Probe Sequence
ttgacggtaataggtggtaacttgg

SEQ ID NO: 61268 - DNA, 25 bp, Probe Sequence
aggttatctgtctgatactgagcag

SEQ ID NO: 61269 - DNA, 25 bp, Probe Sequence
gtaaggttatctgtctgatactgag

SEQ ID NO: 61270 - DNA, 25 bp, Probe Sequence
cggtaataggtggtaacttggtaaa

SEQ ID NO: 61271 - DNA, 25 bp, Probe Sequence
tttgacggtaataggtggtaacttg

SEQ ID NO: 61272 - DNA, 25 bp, Probe Sequence
ttgagggtaaggttatctgtctgat

SEQ ID NO: 61273 - DNA, 25 bp, Probe Sequence
tttgagggtaaggttatctgtctga

SEQ ID NO: 61274 - DNA, 25 bp, Probe Sequence
atctttgagggtaaggttatctgtc

SEQ ID NO: 61275 - DNA, 25 bp, Probe Sequence
ccagaatctttgagggtaaggttat

SEQ ID NO: 61276 - DNA, 25 bp, Probe Sequence
ctttgagggtaaggttatctgtctg

SEQ ID NO: 61277 - DNA, 25 bp, Probe Sequence
tctttgagggtaaggttatctgtct

SEQ ID NO: 61278 - DNA, 25 bp, Probe Sequence
aatctttgagggtaaggttatctgt

SEQ ID NO: 61279 - DNA, 25 bp, Probe Sequence
acattgtgctttacctactacccta

SEQ ID NO: 61280 - DNA, 25 bp, Probe Sequence
cattgtgctttacctactaccctag

SEQ ID NO: 61281 - DNA, 25 bp, Probe Sequence
aaacattgtgctttacctactaccc

SEQ ID NO: 61282 - DNA, 25 bp, Probe Sequence
tgacggtaataggtggtaacttggt

SEQ ID NO: 61283 - DNA, 25 bp, Probe Sequence
gaatctttgagggtaaggttatctg

SEQ ID NO: 61284 - DNA, 25 bp, Probe Sequence
cagaatctttgagggtaaggttatc

SEQ ID NO: 61285 - DNA, 25 bp, Probe Sequence
agaatctttgagggtaaggttatct

SEQ ID NO: 61286 - DNA, 25 bp, Probe Sequence
atctcttacattctagttctggtgc

SEQ ID NO: 61287 - DNA, 25 bp, Probe Sequence
tacattctagttctggtgctctcta

SEQ ID NO: 61288 - DNA, 25 bp, Probe Sequence
attctagttctggtgctctctatct

SEQ ID NO: 61289 - DNA, 25 bp, Probe Sequence
cattctagttctggtgctctctatc

SEQ ID NO: 61290 - DNA, 25 bp, Probe Sequence
acattctagttctggtgctctctat

SEQ ID NO: 61291 - DNA, 25 bp, Probe Sequence
cttacattctagttctggtgctctc

SEQ ID NO: 61292 - DNA, 25 bp, Probe Sequence
ctcttacattctagttctggtgctc

SEQ ID NO: 61293 - DNA, 25 bp, Probe Sequence
ttacattctagttctggtgctctct

SEQ ID NO: 61294 - DNA, 25 bp, Probe Sequence
tcttacattctagttctggtgctct

SEQ ID NO: 61295 - DNA, 25 bp, Probe Sequence
tctcttacattctagttctggtgct

SEQ ID NO: 61296 - DNA, 25 bp, Probe Sequence
ttctagttctggtgctctctatctg

SEQ ID NO: 61297 - DNA, 25 bp, Probe Sequence
atgactgtcgtactggatgtaacta

SEQ ID NO: 61298 - DNA, 25 bp, Probe Sequence
ctagttctggtgctctctatctgtt

SEQ ID NO: 61299 - DNA, 25 bp, Probe Sequence
catctcttacattctagttctggtg

SEQ ID NO: 61300 - DNA, 25 bp, Probe Sequence
tcatctcttacattctagttctggt

SEQ ID NO: 61301 - DNA, 25 bp, Probe Sequence
gtcatctcttacattctagttctgg

SEQ ID NO: 61302 - DNA, 25 bp, Probe Sequence
ggtcatctcttacattctagttctg

SEQ ID NO: 61303 - DNA, 25 bp, Probe Sequence
aggtcatctcttacattctagttct

SEQ ID NO: 61304 - DNA, 25 bp, Probe Sequence
tgactgtcgtactggatgtaactag

SEQ ID NO: 61305 - DNA, 25 bp, Probe Sequence
tcacatctgaagtcaacatgaagtt

SEQ ID NO: 61306 - DNA, 25 bp, Probe Sequence
tctagttctggtgctctctatctgt

SEQ ID NO: 61307 - DNA, 25 bp, Probe Sequence
ctcacatctgaagtcaacatgaagt

SEQ ID NO: 61308 - DNA, 25 bp, Probe Sequence
ctagatcactcactgttgtagcttc

SEQ ID NO: 61309 - DNA, 25 bp, Probe Sequence
ttggctagatcactcactgttgtag

SEQ ID NO: 61310 - DNA, 25 bp, Probe Sequence
atggaactcgaaatcccaatggaaa

SEQ ID NO: 61311 - DNA, 25 bp, Probe Sequence
gatggaactcgaaatcccaatggaa

SEQ ID NO: 61312 - DNA, 25 bp, Probe Sequence
aagatggaactcgaaatcccaatgg

SEQ ID NO: 61313 - DNA, 25 bp, Probe Sequence
gaaaacctacccagcaaagaagcat

SEQ ID NO: 61314 - DNA, 25 bp, Probe Sequence
aagtaatggtgcaaagcctgaactg

SEQ ID NO: 61315 - DNA, 25 bp, Probe Sequence
caagtaatggtgcaaagcctgaact

SEQ ID NO: 61316 - DNA, 25 bp, Probe Sequence
tcaagtaatggtgcaaagcctgaac

SEQ ID NO: 61317 - DNA, 25 bp, Probe Sequence
agatggaactcgaaatcccaatgga

SEQ ID NO: 61318 - DNA, 25 bp, Probe Sequence
ctcgaaatcccaatggaaaacctac

SEQ ID NO: 61319 - DNA, 25 bp, Probe Sequence
aatggaaaacctacccagcaaagaa

SEQ ID NO: 61320 - DNA, 25 bp, Probe Sequence
aaatcccaatggaaaacctacccag

SEQ ID NO: 61321 - DNA, 25 bp, Probe Sequence
gaaatcccaatggaaaacctaccca

SEQ ID NO: 61322 - DNA, 25 bp, Probe Sequence
actcgaaatcccaatggaaaaccta

SEQ ID NO: 61323 - DNA, 25 bp, Probe Sequence
atggaaaacctacccagcaaagaag

SEQ ID NO: 61324 - DNA, 25 bp, Probe Sequence
gtaatggtgcaaagcctgaactgtc

SEQ ID NO: 61325 - DNA, 25 bp, Probe Sequence
gaactcgaaatcccaatggaaaacc

SEQ ID NO: 61326 - DNA, 25 bp, Probe Sequence
ggaactcgaaatcccaatggaaaac

SEQ ID NO: 61327 - DNA, 25 bp, Probe Sequence
caatggaaaacctacccagcaaaga

SEQ ID NO: 61328 - DNA, 25 bp, Probe Sequence
aactcgaaatcccaatggaaaacct

SEQ ID NO: 61329 - DNA, 25 bp, Probe Sequence
tggaactcgaaatcccaatggaaaa

SEQ ID NO: 61330 - DNA, 25 bp, Probe Sequence
tcgaaatcccaatggaaaacctacc

SEQ ID NO: 61331 - DNA, 25 bp, Probe Sequence
cgaaatcccaatggaaaacctaccc

SEQ ID NO: 61332 - DNA, 25 bp, Probe Sequence
agtaatggtgcaaagcctgaactgt

SEQ ID NO: 61333 - DNA, 25 bp, Probe Sequence
aagcctgaactgtcggaaaaggtaa

SEQ ID NO: 61334 - DNA, 25 bp, Probe Sequence
gacaggaagaatctaaagcaaacat

SEQ ID NO: 61335 - DNA, 25 bp, Probe Sequence
acaggaagaatctaaagcaaacatt

SEQ ID NO: 61336 - DNA, 25 bp, Probe Sequence
gtccatcataatgtttcgccttatt

SEQ ID NO: 61337 - DNA, 25 bp, Probe Sequence
tgtccatcataatgtttcgccttat

SEQ ID NO: 61338 - DNA, 25 bp, Probe Sequence
ggacaggaagaatctaaagcaaaca

SEQ ID NO: 61339 - DNA, 25 bp, Probe Sequence
tggacaggaagaatctaaagcaaac

SEQ ID NO: 61340 - DNA, 25 bp, Probe Sequence
gtatgataaatgatggcacctcctg

SEQ ID NO: 61341 - DNA, 25 bp, Probe Sequence
aaacattgaaagtaaacgacccaaa

SEQ ID NO: 61342 - DNA, 25 bp, Probe Sequence
ctggacaggaagaatctaaagcaaa

SEQ ID NO: 61343 - DNA, 25 bp, Probe Sequence
aaactggacaggaagaatctaaagc

SEQ ID NO: 61344 - DNA, 25 bp, Probe Sequence
aaagcaaacattgaaagtaaacgac

SEQ ID NO: 61345 - DNA, 25 bp, Probe Sequence
aacattgaaagtaaacgacccaaag

SEQ ID NO: 61346 - DNA, 25 bp, Probe Sequence
tccatcataatgtttcgccttattt

SEQ ID NO: 61347 - DNA, 25 bp, Probe Sequence
caaacattgaaagtaaacgacccaa

SEQ ID NO: 61348 - DNA, 25 bp, Probe Sequence
tatgataaatgatggcacctcctgt

SEQ ID NO: 61349 - DNA, 25 bp, Probe Sequence
aagcaaacattgaaagtaaacgacc

SEQ ID NO: 61350 - DNA, 25 bp, Probe Sequence
gtgtccatcataatgtttcgcctta

SEQ ID NO: 61351 - DNA, 25 bp, Probe Sequence
aggaagaatctaaagcaaacattga

SEQ ID NO: 61352 - DNA, 25 bp, Probe Sequence
caggaagaatctaaagcaaacattg

SEQ ID NO: 61353 - DNA, 25 bp, Probe Sequence
aaagcaaagagtgtcaagaaacaaa

SEQ ID NO: 61354 - DNA, 25 bp, Probe Sequence
caaagcaaagagtgtcaagaaacaa

SEQ ID NO: 61355 - DNA, 25 bp, Probe Sequence
actggacaggaagaatctaaagcaa

SEQ ID NO: 61356 - DNA, 25 bp, Probe Sequence
aactggacaggaagaatctaaagca

SEQ ID NO: 61357 - DNA, 25 bp, Probe Sequence
ggaagaatctaaagcaaacattgaa

SEQ ID NO: 61358 - DNA, 25 bp, Probe Sequence
tgcattgtattctcaggctcctatg

SEQ ID NO: 61359 - DNA, 25 bp, Probe Sequence
ctgcattgtattctcaggctcctat

SEQ ID NO: 61360 - DNA, 25 bp, Probe Sequence
gtgaacctgaaggtgattctcctag

SEQ ID NO: 61361 - DNA, 25 bp, Probe Sequence
tgtgaacctgaaggtgattctccta

SEQ ID NO: 61362 - DNA, 25 bp, Probe Sequence
ctaccagacgattgactcagcagag

SEQ ID NO: 61363 - DNA, 25 bp, Probe Sequence
tagtgcctaccagacgattgactca

SEQ ID NO: 61364 - DNA, 25 bp, Probe Sequence
ctgtgaacctgaaggtgattctcct

SEQ ID NO: 61365 - DNA, 25 bp, Probe Sequence
cattgtattctcaggctcctatgcc

SEQ ID NO: 61366 - DNA, 25 bp, Probe Sequence
gtagtgcctaccagacgattgactc

SEQ ID NO: 61367 - DNA, 25 bp, Probe Sequence
gctgcattgtattctcaggctccta

SEQ ID NO: 61368 - DNA, 25 bp, Probe Sequence
tgctgtgaacctgaaggtgattctc

SEQ ID NO: 61369 - DNA, 25 bp, Probe Sequence
ctgctgtgaacctgaaggtgattct

SEQ ID NO: 61370 - DNA, 25 bp, Probe Sequence
tgaacctgaaggtgattctcctagg

SEQ ID NO: 61371 - DNA, 25 bp, Probe Sequence
cactggtttccttgggtcttctcag

SEQ ID NO: 61372 - DNA, 25 bp, Probe Sequence
catcgacgccataagcatgtttctg

SEQ ID NO: 61373 - DNA, 25 bp, Probe Sequence
gcattgtattctcaggctcctatgc

SEQ ID NO: 61374 - DNA, 25 bp, Probe Sequence
ctgaaggtgattctcctaggtcact

SEQ ID NO: 61375 - DNA, 25 bp, Probe Sequence
tgaaggtgattctcctaggtcactg

SEQ ID NO: 61376 - DNA, 25 bp, Probe Sequence
aacctgaaggtgattctcctaggtc

SEQ ID NO: 61377 - DNA, 25 bp, Probe Sequence
gaacctgaaggtgattctcctaggt

SEQ ID NO: 61378 - DNA, 25 bp, Probe Sequence
gaaggtgattctcctaggtcactgg

SEQ ID NO: 61379 - DNA, 25 bp, Probe Sequence
cctgaaggtgattctcctaggtcac

SEQ ID NO: 61380 - DNA, 25 bp, Probe Sequence
cataagcatgtttctgggtggcttg

SEQ ID NO: 61381 - DNA, 25 bp, Probe Sequence
acctgaaggtgattctcctaggtca

SEQ ID NO: 61382 - DNA, 25 bp, Probe Sequence
cattagcaactgttacttcaaccat

SEQ ID NO: 61383 - DNA, 25 bp, Probe Sequence
ttcattagcaactgttacttcaacc

SEQ ID NO: 61384 - DNA, 25 bp, Probe Sequence
tagcaactgttacttcaaccatcta

SEQ ID NO: 61385 - DNA, 25 bp, Probe Sequence
ttagcaactgttacttcaaccatct

SEQ ID NO: 61386 - DNA, 25 bp, Probe Sequence
attagcaactgttacttcaaccatc

SEQ ID NO: 61387 - DNA, 25 bp, Probe Sequence
acttcattagcaactgttacttcaa

SEQ ID NO: 61388 - DNA, 25 bp, Probe Sequence
tcattagcaactgttacttcaacca

SEQ ID NO: 61389 - DNA, 25 bp, Probe Sequence
acttccattcctgagttacttcatt

SEQ ID NO: 61390 - DNA, 25 bp, Probe Sequence
tccattcctgagttacttcattagc

SEQ ID NO: 61391 - DNA, 25 bp, Probe Sequence
ccattcctgagttacttcattagca

SEQ ID NO: 61392 - DNA, 25 bp, Probe Sequence
ctaacttggtgtatgatcttgagca

SEQ ID NO: 61393 - DNA, 25 bp, Probe Sequence
actaacttggtgtatgatcttgagc

SEQ ID NO: 61394 - DNA, 25 bp, Probe Sequence
cttcattagcaactgttacttcaac

SEQ ID NO: 61395 - DNA, 25 bp, Probe Sequence
attcctgagttacttcattagcaac

SEQ ID NO: 61396 - DNA, 25 bp, Probe Sequence
cattcctgagttacttcattagcaa

SEQ ID NO: 61397 - DNA, 25 bp, Probe Sequence
tccaagtgttctcattgttcaattc

SEQ ID NO: 61398 - DNA, 25 bp, Probe Sequence
gtccaagtgttctcattgttcaatt

SEQ ID NO: 61399 - DNA, 25 bp, Probe Sequence
agcaactgttacttcaaccatctag

SEQ ID NO: 61400 - DNA, 25 bp, Probe Sequence
ttcttaatccagtctaccattgatg

SEQ ID NO: 61401 - DNA, 25 bp, Probe Sequence
tacttcattagcaactgttacttca

SEQ ID NO: 61402 - DNA, 25 bp, Probe Sequence
ccaagtgttctcattgttcaattcc

SEQ ID NO: 61403 - DNA, 25 bp, Probe Sequence
taacttggtgtatgatcttgagcaa

SEQ ID NO: 61404 - DNA, 25 bp, Probe Sequence
tgtccaagtgttctcattgttcaat

SEQ ID NO: 61405 - DNA, 25 bp, Probe Sequence
ttccagtaattctaggtcagcaatt

SEQ ID NO: 61406 - DNA, 25 bp, Probe Sequence
ttgaattgaacttaactatcggctt

SEQ ID NO: 61407 - DNA, 25 bp, Probe Sequence
gaagcagcctgtgtatattcctaac

SEQ ID NO: 61408 - DNA, 25 bp, Probe Sequence
agaagcagcctgtgtatattcctaa

SEQ ID NO: 61409 - DNA, 25 bp, Probe Sequence
gagaagcagcctgtgtatattccta

SEQ ID NO: 61410 - DNA, 25 bp, Probe Sequence
aagcagcctgtgtatattcctaaca

SEQ ID NO: 61411 - DNA, 25 bp, Probe Sequence
ggagagagaaatgactgagatgaat

SEQ ID NO: 61412 - DNA, 25 bp, Probe Sequence
gatttgtgtattgtagggtgtttgt

SEQ ID NO: 61413 - DNA, 25 bp, Probe Sequence
gttggtaataactccagagaagcag

SEQ ID NO: 61414 - DNA, 25 bp, Probe Sequence
agagagaaatgactgagatgaatgt

SEQ ID NO: 61415 - DNA, 25 bp, Probe Sequence
tttgtgtattgtagggtgtttgttt

SEQ ID NO: 61416 - DNA, 25 bp, Probe Sequence
agatttgtgtattgtagggtgtttg

SEQ ID NO: 61417 - DNA, 25 bp, Probe Sequence
cacattaagagggaagcaaagttac

SEQ ID NO: 61418 - DNA, 25 bp, Probe Sequence
tattagcacattaagagggaagcaa

SEQ ID NO: 61419 - DNA, 25 bp, Probe Sequence
atttgtgtattgtagggtgtttgtt

SEQ ID NO: 61420 - DNA, 25 bp, Probe Sequence
cttaactatcggctttcttactggt

SEQ ID NO: 61421 - DNA, 25 bp, Probe Sequence
acttaactatcggctttcttactgg

SEQ ID NO: 61422 - DNA, 25 bp, Probe Sequence
ctattagcacattaagagggaagca

SEQ ID NO: 61423 - DNA, 25 bp, Probe Sequence
actattagcacattaagagggaagc

SEQ ID NO: 61424 - DNA, 25 bp, Probe Sequence
cacaactattagcacattaagaggg

SEQ ID NO: 61425 - DNA, 25 bp, Probe Sequence
acaactattagcacattaagaggga

SEQ ID NO: 61426 - DNA, 25 bp, Probe Sequence
ttaactatcggctttcttactggta

SEQ ID NO: 61427 - DNA, 25 bp, Probe Sequence
gcactttctgtaactttgtctaagg

SEQ ID NO: 61428 - DNA, 25 bp, Probe Sequence
attagcacattaagagggaagcaaa

SEQ ID NO: 61429 - DNA, 25 bp, Probe Sequence
gagagagaaatgactgagatgaatg

SEQ ID NO: 61430 - DNA, 25 bp, Probe Sequence
ttgaattgaacttaactatcggctt

SEQ ID NO: 61431 - DNA, 25 bp, Probe Sequence
gaagcagcctgtgtatattcctaac

SEQ ID NO: 61432 - DNA, 25 bp, Probe Sequence
agaagcagcctgtgtatattcctaa

SEQ ID NO: 61433 - DNA, 25 bp, Probe Sequence
gagaagcagcctgtgtatattccta

SEQ ID NO: 61434 - DNA, 25 bp, Probe Sequence
aagcagcctgtgtatattcctaaca

SEQ ID NO: 61435 - DNA, 25 bp, Probe Sequence
ggagagagaaatgactgagatgaat

SEQ ID NO: 61436 - DNA, 25 bp, Probe Sequence
gatttgtgtattgtagggtgtttgt

SEQ ID NO: 61437 - DNA, 25 bp, Probe Sequence
gttggtaataactccagagaagcag

SEQ ID NO: 61438 - DNA, 25 bp, Probe Sequence
agagagaaatgactgagatgaatgt

SEQ ID NO: 61439 - DNA, 25 bp, Probe Sequence
tttgtgtattgtagggtgtttgttt

SEQ ID NO: 61440 - DNA, 25 bp, Probe Sequence
agatttgtgtattgtagggtgtttg

SEQ ID NO: 61441 - DNA, 25 bp, Probe Sequence
cacattaagagggaagcaaagttac

SEQ ID NO: 61442 - DNA, 25 bp, Probe Sequence
tattagcacattaagagggaagcaa

SEQ ID NO: 61443 - DNA, 25 bp, Probe Sequence
atttgtgtattgtagggtgtttgtt

SEQ ID NO: 61444 - DNA, 25 bp, Probe Sequence
cttaactatcggctttcttactggt

SEQ ID NO: 61445 - DNA, 25 bp, Probe Sequence
acttaactatcggctttcttactgg

SEQ ID NO: 61446 - DNA, 25 bp, Probe Sequence
ctattagcacattaagagggaagca

SEQ ID NO: 61447 - DNA, 25 bp, Probe Sequence
actattagcacattaagagggaagc

SEQ ID NO: 61448 - DNA, 25 bp, Probe Sequence
cacaactattagcacattaagaggg

SEQ ID NO: 61449 - DNA, 25 bp, Probe Sequence
acaactattagcacattaagaggga

SEQ ID NO: 61450 - DNA, 25 bp, Probe Sequence
ttaactatcggctttcttactggta

SEQ ID NO: 61451 - DNA, 25 bp, Probe Sequence
gcactttctgtaactttgtctaagg

SEQ ID NO: 61452 - DNA, 25 bp, Probe Sequence
attagcacattaagagggaagcaaa

SEQ ID NO: 61453 - DNA, 25 bp, Probe Sequence
gagagagaaatgactgagatgaatg

SEQ ID NO: 61454 - DNA, 25 bp, Probe Sequence
atagactgtggtattcatgcaagag

SEQ ID NO: 61455 - DNA, 25 bp, Probe Sequence
gatagactgtggtattcatgcaaga

SEQ ID NO: 61456 - DNA, 25 bp, Probe Sequence
tgtttggatagactgtggtattcat

SEQ ID NO: 61457 - DNA, 25 bp, Probe Sequence
ctgtttggatagactgtggtattca

SEQ ID NO: 61458 - DNA, 25 bp, Probe Sequence
taacatataagagtgacccagccat

SEQ ID NO: 61459 - DNA, 25 bp, Probe Sequence
tagactgtggtattcatgcaagaga

SEQ ID NO: 61460 - DNA, 25 bp, Probe Sequence
ggatagactgtggtattcatgcaag

SEQ ID NO: 61461 - DNA, 25 bp, Probe Sequence
ttctaacatataagagtgacccagc

SEQ ID NO: 61462 - DNA, 25 bp, Probe Sequence
gctgtttggatagactgtggtattc

SEQ ID NO: 61463 - DNA, 25 bp, Probe Sequence
caatagaaactggaaagtgaagtgg

SEQ ID NO: 61464 - DNA, 25 bp, Probe Sequence
aatagaaactggaaagtgaagtggt

SEQ ID NO: 61465 - DNA, 25 bp, Probe Sequence
gaaagtgaagtggtgtggtaagttt

SEQ ID NO: 61466 - DNA, 25 bp, Probe Sequence
tggatagactgtggtattcatgcaa

SEQ ID NO: 61467 - DNA, 25 bp, Probe Sequence
ttggatagactgtggtattcatgca

SEQ ID NO: 61468 - DNA, 25 bp, Probe Sequence
ctaacatataagagtgacccagcca

SEQ ID NO: 61469 - DNA, 25 bp, Probe Sequence
tctaacatataagagtgacccagcc

SEQ ID NO: 61470 - DNA, 25 bp, Probe Sequence
atagaaactggaaagtgaagtggtg

SEQ ID NO: 61471 - DNA, 25 bp, Probe Sequence
aaagtgaagtggtgtggtaagtttg

SEQ ID NO: 61472 - DNA, 25 bp, Probe Sequence
gtttggatagactgtggtattcatg

SEQ ID NO: 61473 - DNA, 25 bp, Probe Sequence
ttctatatcatgcctgtgtttaacg

SEQ ID NO: 61474 - DNA, 25 bp, Probe Sequence
agactgtggtattcatgcaagagaa

SEQ ID NO: 61475 - DNA, 25 bp, Probe Sequence
tttggatagactgtggtattcatgc

SEQ ID NO: 61476 - DNA, 25 bp, Probe Sequence
cttctaacatataagagtgacccag

SEQ ID NO: 61477 - DNA, 25 bp, Probe Sequence
gtattcatgcaagagaatggattgg

SEQ ID NO: 61478 - DNA, 25 bp, Probe Sequence
acaggagaattagagtatgctacaa

SEQ ID NO: 61479 - DNA, 25 bp, Probe Sequence
tacaggagaattagagtatgctaca

SEQ ID NO: 61480 - DNA, 25 bp, Probe Sequence
tcttacaggagaattagagtatgct

SEQ ID NO: 61481 - DNA, 25 bp, Probe Sequence
atcttacaggagaattagagtatgc

SEQ ID NO: 61482 - DNA, 25 bp, Probe Sequence
ttacaggagaattagagtatgctac

SEQ ID NO: 61483 - DNA, 25 bp, Probe Sequence
cccacagacacactttatttcctaa

SEQ ID NO: 61484 - DNA, 25 bp, Probe Sequence
attccacagatgtcctttgatgata

SEQ ID NO: 61485 - DNA, 25 bp, Probe Sequence
tattccacagatgtcctttgatgat

SEQ ID NO: 61486 - DNA, 25 bp, Probe Sequence
atattccacagatgtcctttgatga

SEQ ID NO: 61487 - DNA, 25 bp, Probe Sequence
cttacaggagaattagagtatgcta

SEQ ID NO: 61488 - DNA, 25 bp, Probe Sequence
ttccacagatgtcctttgatgatac

SEQ ID NO: 61489 - DNA, 25 bp, Probe Sequence
tataatgggagaggatgatgactca

SEQ ID NO: 61490 - DNA, 25 bp, Probe Sequence
acagatgtcctttgatgatacagaa

SEQ ID NO: 61491 - DNA, 25 bp, Probe Sequence
cacagatgtcctttgatgatacaga

SEQ ID NO: 61492 - DNA, 25 bp, Probe Sequence
caggagaattagagtatgctacaaa

SEQ ID NO: 61493 - DNA, 25 bp, Probe Sequence
cgggatcttacaggagaattagagt

SEQ ID NO: 61494 - DNA, 25 bp, Probe Sequence
ataatgggagaggatgatgactcac

SEQ ID NO: 61495 - DNA, 25 bp, Probe Sequence
ctgtttaatattccatttacgggca

SEQ ID NO: 61496 - DNA, 25 bp, Probe Sequence
cagatgtcctttgatgatacagaaa

SEQ ID NO: 61497 - DNA, 25 bp, Probe Sequence
ccacagatgtcctttgatgatacag

SEQ ID NO: 61498 - DNA, 25 bp, Probe Sequence
tctgtttaatattccatttacgggc

SEQ ID NO: 61499 - DNA, 25 bp, Probe Sequence
tgtttaatattccatttacgggcaa

SEQ ID NO: 61500 - DNA, 25 bp, Probe Sequence
ggatcttacaggagaattagagtat

SEQ ID NO: 61501 - DNA, 25 bp, Probe Sequence
gggatcttacaggagaattagagta

SEQ ID NO: 61502 - DNA, 25 bp, Probe Sequence
agatgctttagatcagactaggttt

SEQ ID NO: 61503 - DNA, 25 bp, Probe Sequence
aagatgctttagatcagactaggtt

SEQ ID NO: 61504 - DNA, 25 bp, Probe Sequence
ttctgtcactgaaattggcttaatt

SEQ ID NO: 61505 - DNA, 25 bp, Probe Sequence
tggataagatgctttagatcagact

SEQ ID NO: 61506 - DNA, 25 bp, Probe Sequence
cgctcaaacactacatgaagttatt

SEQ ID NO: 61507 - DNA, 25 bp, Probe Sequence
taagatgctttagatcagactaggt

SEQ ID NO: 61508 - DNA, 25 bp, Probe Sequence
tcgctcaaacactacatgaagttat

SEQ ID NO: 61509 - DNA, 25 bp, Probe Sequence
ttcgctcaaacactacatgaagtta

SEQ ID NO: 61510 - DNA, 25 bp, Probe Sequence
atggataagatgctttagatcagac

SEQ ID NO: 61511 - DNA, 25 bp, Probe Sequence
catggataagatgctttagatcaga

SEQ ID NO: 61512 - DNA, 25 bp, Probe Sequence
attacctagttcgctcaaacactac

SEQ ID NO: 61513 - DNA, 25 bp, Probe Sequence
tgtcactgaaattggcttaattagt

SEQ ID NO: 61514 - DNA, 25 bp, Probe Sequence
tctgtcactgaaattggcttaatta

SEQ ID NO: 61515 - DNA, 25 bp, Probe Sequence
gctcaaacactacatgaagttattt

SEQ ID NO: 61516 - DNA, 25 bp, Probe Sequence
ctttctgtcactgaaattggcttaa

SEQ ID NO: 61517 - DNA, 25 bp, Probe Sequence
tgaaatgctttctgtcactgaaatt

SEQ ID NO: 61518 - DNA, 25 bp, Probe Sequence
ttgaaatgctttctgtcactgaaat

SEQ ID NO: 61519 - DNA, 25 bp, Probe Sequence
tttgaaatgctttctgtcactgaaa

SEQ ID NO: 61520 - DNA, 25 bp, Probe Sequence
ctgtcactgaaattggcttaattag

SEQ ID NO: 61521 - DNA, 25 bp, Probe Sequence
gaaatgctttctgtcactgaaattg

SEQ ID NO: 61522 - DNA, 25 bp, Probe Sequence
gttcgctcaaacactacatgaagtt

SEQ ID NO: 61523 - DNA, 25 bp, Probe Sequence
tttctgtcactgaaattggcttaat

SEQ ID NO: 61524 - DNA, 25 bp, Probe Sequence
tacctagttcgctcaaacactacat

SEQ ID NO: 61525 - DNA, 25 bp, Probe Sequence
ataagatgctttagatcagactagg

SEQ ID NO: 61526 - DNA, 25 bp, Probe Sequence
tctggtaataataatggcaaggtcc

SEQ ID NO: 61527 - DNA, 25 bp, Probe Sequence
ggcaatcaattagtagaatgtcagg

SEQ ID NO: 61528 - DNA, 25 bp, Probe Sequence
agaagtcaagacatccacagttatt

SEQ ID NO: 61529 - DNA, 25 bp, Probe Sequence
taagagaacagaagtcaagacatcc

SEQ ID NO: 61530 - DNA, 25 bp, Probe Sequence
tcaattagtagaatgtcaggagtgc

SEQ ID NO: 61531 - DNA, 25 bp, Probe Sequence
cagaagtcaagacatccacagttat

SEQ ID NO: 61532 - DNA, 25 bp, Probe Sequence
taataataatggcaaggtcctcaca

SEQ ID NO: 61533 - DNA, 25 bp, Probe Sequence
ggtaataataatggcaaggtcctca

SEQ ID NO: 61534 - DNA, 25 bp, Probe Sequence
tggtaataataatggcaaggtcctc

SEQ ID NO: 61535 - DNA, 25 bp, Probe Sequence
ctggtaataataatggcaaggtcct

SEQ ID NO: 61536 - DNA, 25 bp, Probe Sequence
aataataatggcaaggtcctcacaa

SEQ ID NO: 61537 - DNA, 25 bp, Probe Sequence
ttctggtaataataatggcaaggtc

SEQ ID NO: 61538 - DNA, 25 bp, Probe Sequence
gtaataataatggcaaggtcctcac

SEQ ID NO: 61539 - DNA, 25 bp, Probe Sequence
tagtagaatgtcaggagtgccataa

SEQ ID NO: 61540 - DNA, 25 bp, Probe Sequence
ttagtagaatgtcaggagtgccata

SEQ ID NO: 61541 - DNA, 25 bp, Probe Sequence
tggcaatcaattagtagaatgtcag

SEQ ID NO: 61542 - DNA, 25 bp, Probe Sequence
ctggcaatcaattagtagaatgtca

SEQ ID NO: 61543 - DNA, 25 bp, Probe Sequence
gtagaatgtcaggagtgccataatc

SEQ ID NO: 61544 - DNA, 25 bp, Probe Sequence
gcaatcaattagtagaatgtcagga

SEQ ID NO: 61545 - DNA, 25 bp, Probe Sequence
gcatctggcaatcaattagtagaat

SEQ ID NO: 61546 - DNA, 25 bp, Probe Sequence
cttccttctggtaataataatggca

SEQ ID NO: 61547 - DNA, 25 bp, Probe Sequence
aataggttccaataacagcactacg

SEQ ID NO: 61548 - DNA, 25 bp, Probe Sequence
caattagtagaatgtcaggagtgcc

SEQ ID NO: 61549 - DNA, 25 bp, Probe Sequence
tagaatgtcaggagtgccataatct

SEQ ID NO: 61550 - DNA, 25 bp, Probe Sequence
taataatcaccattctgactggcat

SEQ ID NO: 61551 - DNA, 25 bp, Probe Sequence
ttaataatcaccattctgactggca

SEQ ID NO: 61552 - DNA, 25 bp, Probe Sequence
tttctttatccagcctatcgttgat

SEQ ID NO: 61553 - DNA, 25 bp, Probe Sequence
tcgttgatggatatttggtttgatt

SEQ ID NO: 61554 - DNA, 25 bp, Probe Sequence
ttctttatccagcctatcgttgatg

SEQ ID NO: 61555 - DNA, 25 bp, Probe Sequence
cgttgatggatatttggtttgattc

SEQ ID NO: 61556 - DNA, 25 bp, Probe Sequence
atcgttgatggatatttggtttgat

SEQ ID NO: 61557 - DNA, 25 bp, Probe Sequence
attctgactggcatgagatggtatc

SEQ ID NO: 61558 - DNA, 25 bp, Probe Sequence
gaaccaatttacattcccaacagtg

SEQ ID NO: 61559 - DNA, 25 bp, Probe Sequence
ttgaaccaatttacattcccaacag

SEQ ID NO: 61560 - DNA, 25 bp, Probe Sequence
cattctgactggcatgagatggtat

SEQ ID NO: 61561 - DNA, 25 bp, Probe Sequence
tgaaccaatttacattcccaacagt

SEQ ID NO: 61562 - DNA, 25 bp, Probe Sequence
aataatcaccattctgactggcatg

SEQ ID NO: 61563 - DNA, 25 bp, Probe Sequence
gggtcaaatggtatttctggttcta

SEQ ID NO: 61564 - DNA, 25 bp, Probe Sequence
cctatcgttgatggatatttggttt

SEQ ID NO: 61565 - DNA, 25 bp, Probe Sequence
ggtcaaatggtatttctggttctag

SEQ ID NO: 61566 - DNA, 25 bp, Probe Sequence
gcctatcgttgatggatatttggtt

SEQ ID NO: 61567 - DNA, 25 bp, Probe Sequence
ataatcaccattctgactggcatga

SEQ ID NO: 61568 - DNA, 25 bp, Probe Sequence
aaccaatttacattcccaacagtgt

SEQ ID NO: 61569 - DNA, 25 bp, Probe Sequence
tatcgttgatggatatttggtttga

SEQ ID NO: 61570 - DNA, 25 bp, Probe Sequence
gattgctgggtcaaatggtatttct

SEQ ID NO: 61571 - DNA, 25 bp, Probe Sequence
ctatcgttgatggatatttggtttg

SEQ ID NO: 61572 - DNA, 25 bp, Probe Sequence
cagcctatcgttgatggatatttgg

SEQ ID NO: 61573 - DNA, 25 bp, Probe Sequence
ctgggtcaaatggtatttctggttc

SEQ ID NO: 61574 - DNA, 25 bp, Probe Sequence
ctgtgtgttagagagatactatacc

SEQ ID NO: 61575 - DNA, 25 bp, Probe Sequence
agttctgtatagctcgtaatgatgg

SEQ ID NO: 61576 - DNA, 25 bp, Probe Sequence
gttctgtatagctcgtaatgatggt

SEQ ID NO: 61577 - DNA, 25 bp, Probe Sequence
ttctgtatagctcgtaatgatggta

SEQ ID NO: 61578 - DNA, 25 bp, Probe Sequence
tctgtatagctcgtaatgatggtat

SEQ ID NO: 61579 - DNA, 25 bp, Probe Sequence
aagttctgtatagctcgtaatgatg

SEQ ID NO: 61580 - DNA, 25 bp, Probe Sequence
ctttgaaatgctctctgtgtgttag

SEQ ID NO: 61581 - DNA, 25 bp, Probe Sequence
tttgaaatgctctctgtgtgttaga

SEQ ID NO: 61582 - DNA, 25 bp, Probe Sequence
ctgtatagctcgtaatgatggtatt

SEQ ID NO: 61583 - DNA, 25 bp, Probe Sequence
tgtgtgttagagagatactataccc

SEQ ID NO: 61584 - DNA, 25 bp, Probe Sequence
cctttgaaatgctctctgtgtgtta

SEQ ID NO: 61585 - DNA, 25 bp, Probe Sequence
gtgtgttagagagatactataccct

SEQ ID NO: 61586 - DNA, 25 bp, Probe Sequence
ctataccctagaaactctgaacacg

SEQ ID NO: 61587 - DNA, 25 bp, Probe Sequence
actataccctagaaactctgaacac

SEQ ID NO: 61588 - DNA, 25 bp, Probe Sequence
ttgatagtatctagaatggcaggtg

SEQ ID NO: 61589 - DNA, 25 bp, Probe Sequence
tctgtgtgttagagagatactatac

SEQ ID NO: 61590 - DNA, 25 bp, Probe Sequence
ttctgcactcttagctggattctaa

SEQ ID NO: 61591 - DNA, 25 bp, Probe Sequence
gatagtatctagaatggcaggtggt

SEQ ID NO: 61592 - DNA, 25 bp, Probe Sequence
tgatagtatctagaatggcaggtgg

SEQ ID NO: 61593 - DNA, 25 bp, Probe Sequence
attgatagtatctagaatggcaggt

SEQ ID NO: 61594 - DNA, 25 bp, Probe Sequence
atagtatctagaatggcaggtggtg

SEQ ID NO: 61595 - DNA, 25 bp, Probe Sequence
tataccctagaaactctgaacacgc

SEQ ID NO: 61596 - DNA, 25 bp, Probe Sequence
gattgatagtatctagaatggcagg

SEQ ID NO: 61597 - DNA, 25 bp, Probe Sequence
tactataccctagaaactctgaaca

SEQ ID NO: 61598 - DNA, 25 bp, Probe Sequence
tccaagcagaagaagaagaagacaa

SEQ ID NO: 61599 - DNA, 25 bp, Probe Sequence
ctctccaagcagaagaagaagaaga

SEQ ID NO: 61600 - DNA, 25 bp, Probe Sequence
tctctccaagcagaagaagaagaag

SEQ ID NO: 61601 - DNA, 25 bp, Probe Sequence
ctccaagcagaagaagaagaagaca

SEQ ID NO: 61602 - DNA, 25 bp, Probe Sequence
tctccaagcagaagaagaagaagac

SEQ ID NO: 61603 - DNA, 25 bp, Probe Sequence
gtctctccaagcagaagaagaagaa

SEQ ID NO: 61604 - DNA, 25 bp, Probe Sequence
cagaagaagaagaagacaaagaagc

SEQ ID NO: 61605 - DNA, 25 bp, Probe Sequence
gcagaagaagaagaagacaaagaag

SEQ ID NO: 61606 - DNA, 25 bp, Probe Sequence
agcagaagaagaagaagacaaagaa

SEQ ID NO: 61607 - DNA, 25 bp, Probe Sequence
aagcagaagaagaagaagacaaaga

SEQ ID NO: 61608 - DNA, 25 bp, Probe Sequence
caagcagaagaagaagaagacaaag

SEQ ID NO: 61609 - DNA, 25 bp, Probe Sequence
agtgtttataggcttcttgtgtgtt

SEQ ID NO: 61610 - DNA, 25 bp, Probe Sequence
attggtttctgttctctggctattt

SEQ ID NO: 61611 - DNA, 25 bp, Probe Sequence
ataggcttcttgtgtgttaaacttg

SEQ ID NO: 61612 - DNA, 25 bp, Probe Sequence
ggcttcttgtgtgttaaacttgatt

SEQ ID NO: 61613 - DNA, 25 bp, Probe Sequence
gtgtttataggcttcttgtgtgtta

SEQ ID NO: 61614 - DNA, 25 bp, Probe Sequence
taggcttcttgtgtgttaaacttga

SEQ ID NO: 61615 - DNA, 25 bp, Probe Sequence
agaagaagaagaagacaaagaagcc

SEQ ID NO: 61616 - DNA, 25 bp, Probe Sequence
gcttcttgtgtgttaaacttgattt

SEQ ID NO: 61617 - DNA, 25 bp, Probe Sequence
cagtgtttataggcttcttgtgtgt

SEQ ID NO: 61618 - DNA, 25 bp, Probe Sequence
aggcttcttgtgtgttaaacttgat

SEQ ID NO: 61619 - DNA, 25 bp, Probe Sequence
cattggtttctgttctctggctatt

SEQ ID NO: 61620 - DNA, 25 bp, Probe Sequence
ttggtttctgttctctggctatttg

SEQ ID NO: 61621 - DNA, 25 bp, Probe Sequence
ccaagcagaagaagaagaagacaaa

SEQ ID NO: 61622 - DNA, 25 bp, Probe Sequence
agttactgacttcctcttcctgttg

SEQ ID NO: 61623 - DNA, 25 bp, Probe Sequence
gttactgacttcctcttcctgttgg

SEQ ID NO: 61624 - DNA, 25 bp, Probe Sequence
ttattactgggttcctatactgacg

SEQ ID NO: 61625 - DNA, 25 bp, Probe Sequence
tattactgggttcctatactgacgg

SEQ ID NO: 61626 - DNA, 25 bp, Probe Sequence
attactgggttcctatactgacggt

SEQ ID NO: 61627 - DNA, 25 bp, Probe Sequence
tttcttcttcttcacccaccgtatc

SEQ ID NO: 61628 - DNA, 25 bp, Probe Sequence
ctttcttcttcttcacccaccgtat

SEQ ID NO: 61629 - DNA, 25 bp, Probe Sequence
aagttactgacttcctcttcctgtt

SEQ ID NO: 61630 - DNA, 25 bp, Probe Sequence
ccttaataggaatgcctacatcatg

SEQ ID NO: 61631 - DNA, 25 bp, Probe Sequence
cctggagaagttcatcaaattcctt

SEQ ID NO: 61632 - DNA, 25 bp, Probe Sequence
gtgcctggagaagttcatcaaattc

SEQ ID NO: 61633 - DNA, 25 bp, Probe Sequence
attattactgggttcctatactgac

SEQ ID NO: 61634 - DNA, 25 bp, Probe Sequence
ctggagaagttcatcaaattcctta

SEQ ID NO: 61635 - DNA, 25 bp, Probe Sequence
gtgatcgttggctcctacttgattg

SEQ ID NO: 61636 - DNA, 25 bp, Probe Sequence
cctcaattattactgggttcctata

SEQ ID NO: 61637 - DNA, 25 bp, Probe Sequence
cttacttcatgtcttccaccctcaa

SEQ ID NO: 61638 - DNA, 25 bp, Probe Sequence
ttgaacaagaccaacaagaaggcag

SEQ ID NO: 61639 - DNA, 25 bp, Probe Sequence
gctgtcctggataaagttactgact

SEQ ID NO: 61640 - DNA, 25 bp, Probe Sequence
caaacttctgatcgttggtagtgtg

SEQ ID NO: 61641 - DNA, 25 bp, Probe Sequence
tggagaagttcatcaaattccttaa

SEQ ID NO: 61642 - DNA, 25 bp, Probe Sequence
ttacttcatgtcttccaccctcaag

SEQ ID NO: 61643 - DNA, 25 bp, Probe Sequence
gagtggctgtcctggataaagttac

SEQ ID NO: 61644 - DNA, 25 bp, Probe Sequence
agagtggctgtcctggataaagtta

SEQ ID NO: 61645 - DNA, 25 bp, Probe Sequence
tggctgtcctggataaagttactga

SEQ ID NO: 61646 - DNA, 25 bp, Probe Sequence
ctcatcatatactggctgactttcc

SEQ ID NO: 61647 - DNA, 25 bp, Probe Sequence
cctcatcatatactggctgactttc

SEQ ID NO: 61648 - DNA, 25 bp, Probe Sequence
ccctcatcatatactggctgacttt

SEQ ID NO: 61649 - DNA, 25 bp, Probe Sequence
catcatatactggctgactttccac

SEQ ID NO: 61650 - DNA, 25 bp, Probe Sequence
tcatcatatactggctgactttcca

SEQ ID NO: 61651 - DNA, 25 bp, Probe Sequence
tcattgaagatttgatttccttgaa

SEQ ID NO: 61652 - DNA, 25 bp, Probe Sequence
ttcattgaagatttgatttccttga

SEQ ID NO: 61653 - DNA, 25 bp, Probe Sequence
atcatatactggctgactttccacc

SEQ ID NO: 61654 - DNA, 25 bp, Probe Sequence
tcattcattgaagatttgatttcct

SEQ ID NO: 61655 - DNA, 25 bp, Probe Sequence
ctacaaatacgtgggaatgatcctc

SEQ ID NO: 61656 - DNA, 25 bp, Probe Sequence
tacaaatacgtgggaatgatcctca

SEQ ID NO: 61657 - DNA, 25 bp, Probe Sequence
catatactggctgactttccacctg

SEQ ID NO: 61658 - DNA, 25 bp, Probe Sequence
tcatatactggctgactttccacct

SEQ ID NO: 61659 - DNA, 25 bp, Probe Sequence
attcattgaagatttgatttccttg

SEQ ID NO: 61660 - DNA, 25 bp, Probe Sequence
cattcattgaagatttgatttcctt

SEQ ID NO: 61661 - DNA, 25 bp, Probe Sequence
tggctacaaatacgtgggaatgatc

SEQ ID NO: 61662 - DNA, 25 bp, Probe Sequence
gtggctacaaatacgtgggaatgat

SEQ ID NO: 61663 - DNA, 25 bp, Probe Sequence
aaatacgtgggaatgatcctcagtg

SEQ ID NO: 61664 - DNA, 25 bp, Probe Sequence
caaatacgtgggaatgatcctcagt

SEQ ID NO: 61665 - DNA, 25 bp, Probe Sequence
acaaatacgtgggaatgatcctcag

SEQ ID NO: 61666 - DNA, 25 bp, Probe Sequence
gctacaaatacgtgggaatgatcct

SEQ ID NO: 61667 - DNA, 25 bp, Probe Sequence
cattgaagatttgatttccttgaaa

SEQ ID NO: 61668 - DNA, 25 bp, Probe Sequence
cttcattacttacgtgctcctggct

SEQ ID NO: 61669 - DNA, 25 bp, Probe Sequence
atatactggctgactttccacctgg

SEQ ID NO: 61670 - DNA, 25 bp, Probe Sequence
tgtgttaattctatctccagtaggc

SEQ ID NO: 61671 - DNA, 25 bp, Probe Sequence
gctgtgttaattctatctccagtag

SEQ ID NO: 61672 - DNA, 25 bp, Probe Sequence
tccatgagctgtgttaattctatct

SEQ ID NO: 61673 - DNA, 25 bp, Probe Sequence
tctcatatcctgttcaagttaatca

SEQ ID NO: 61674 - DNA, 25 bp, Probe Sequence
ttccatgagctgtgttaattctatc

SEQ ID NO: 61675 - DNA, 25 bp, Probe Sequence
ctgtgttaattctatctccagtagg

SEQ ID NO: 61676 - DNA, 25 bp, Probe Sequence
ggatgctttagggtgagtctataat

SEQ ID NO: 61677 - DNA, 25 bp, Probe Sequence
agaacctgatagataatcccattgc

SEQ ID NO: 61678 - DNA, 25 bp, Probe Sequence
gctaatgatatttgccaagttgagt

SEQ ID NO: 61679 - DNA, 25 bp, Probe Sequence
cctgatagataatcccattgccttt

SEQ ID NO: 61680 - DNA, 25 bp, Probe Sequence
atgagctgtgttaattctatctcca

SEQ ID NO: 61681 - DNA, 25 bp, Probe Sequence
atcgctaatgatatttgccaagttg

SEQ ID NO: 61682 - DNA, 25 bp, Probe Sequence
catgagctgtgttaattctatctcc

SEQ ID NO: 61683 - DNA, 25 bp, Probe Sequence
ccatgagctgtgttaattctatctc

SEQ ID NO: 61684 - DNA, 25 bp, Probe Sequence
aaagtcgcatcgctaatgatatttg

SEQ ID NO: 61685 - DNA, 25 bp, Probe Sequence
catcgctaatgatatttgccaagtt

SEQ ID NO: 61686 - DNA, 25 bp, Probe Sequence
cgctaatgatatttgccaagttgag

SEQ ID NO: 61687 - DNA, 25 bp, Probe Sequence
gaacctgatagataatcccattgcc

SEQ ID NO: 61688 - DNA, 25 bp, Probe Sequence
aatgatatttgccaagttgagtgta

SEQ ID NO: 61689 - DNA, 25 bp, Probe Sequence
taatgatatttgccaagttgagtgt

SEQ ID NO: 61690 - DNA, 25 bp, Probe Sequence
gagctgtgttaattctatctccagt

SEQ ID NO: 61691 - DNA, 25 bp, Probe Sequence
tgagctgtgttaattctatctccag

SEQ ID NO: 61692 - DNA, 25 bp, Probe Sequence
tcgctaatgatatttgccaagttga

SEQ ID NO: 61693 - DNA, 25 bp, Probe Sequence
tgctttagggtgagtctataataca

SEQ ID NO: 61694 - DNA, 25 bp, Probe Sequence
cctctctgctaagaacatacttggc

SEQ ID NO: 61695 - DNA, 25 bp, Probe Sequence
gcctctctgctaagaacatacttgg

SEQ ID NO: 61696 - DNA, 25 bp, Probe Sequence
ttaatctctgggaactttgggtttc

SEQ ID NO: 61697 - DNA, 25 bp, Probe Sequence
gttaatctctgggaactttgggttt

SEQ ID NO: 61698 - DNA, 25 bp, Probe Sequence
gctatgatgctaggtggtttctaag

SEQ ID NO: 61699 - DNA, 25 bp, Probe Sequence
ctctgggaactttgggtttcttatc

SEQ ID NO: 61700 - DNA, 25 bp, Probe Sequence
tctctgggaactttgggtttcttat

SEQ ID NO: 61701 - DNA, 25 bp, Probe Sequence
atctctgggaactttgggtttctta

SEQ ID NO: 61702 - DNA, 25 bp, Probe Sequence
taatctctgggaactttgggtttct

SEQ ID NO: 61703 - DNA, 25 bp, Probe Sequence
gatgtagcaaattgagtgtgggttt

SEQ ID NO: 61704 - DNA, 25 bp, Probe Sequence
aagtgatcttgggcaagttaatctc

SEQ ID NO: 61705 - DNA, 25 bp, Probe Sequence
aatctctgggaactttgggtttctt

SEQ ID NO: 61706 - DNA, 25 bp, Probe Sequence
gtgatcttgggcaagttaatctctg

SEQ ID NO: 61707 - DNA, 25 bp, Probe Sequence
ggaactttgggtttcttatcctcaa

SEQ ID NO: 61708 - DNA, 25 bp, Probe Sequence
agtgatcttgggcaagttaatctct

SEQ ID NO: 61709 - DNA, 25 bp, Probe Sequence
agatgtagcaaattgagtgtgggtt

SEQ ID NO: 61710 - DNA, 25 bp, Probe Sequence
ctgggagatgtagcaaattgagtgt

SEQ ID NO: 61711 - DNA, 25 bp, Probe Sequence
gagatgtagcaaattgagtgtgggt

SEQ ID NO: 61712 - DNA, 25 bp, Probe Sequence
tgggagatgtagcaaattgagtgtg

SEQ ID NO: 61713 - DNA, 25 bp, Probe Sequence
ctctctgctaagaacatacttggca

SEQ ID NO: 61714 - DNA, 25 bp, Probe Sequence
tgatcttgggcaagttaatctctgg

SEQ ID NO: 61715 - DNA, 25 bp, Probe Sequence
ctatgatgctaggtggtttctaagc

SEQ ID NO: 61716 - DNA, 25 bp, Probe Sequence
tctctgctaagaacatacttggcac

SEQ ID NO: 61717 - DNA, 25 bp, Probe Sequence
ggaagtgattaaataaaagcaacgc

SEQ ID NO: 61718 - DNA, 25 bp, Probe Sequence
gtacttatatccacactgcacactg

SEQ ID NO: 61719 - DNA, 25 bp, Probe Sequence
gggacgagaaagatcattgaaattc

SEQ ID NO: 61720 - DNA, 25 bp, Probe Sequence
tgtacttatatccacactgcacact

SEQ ID NO: 61721 - DNA, 25 bp, Probe Sequence
tatttattgtgcttcgagtgactga

SEQ ID NO: 61722 - DNA, 25 bp, Probe Sequence
atatttattgtgcttcgagtgactg

SEQ ID NO: 61723 - DNA, 25 bp, Probe Sequence
aacgtcttattgtggtaggatcagc

SEQ ID NO: 61724 - DNA, 25 bp, Probe Sequence
ggctgaaagaacatggacttgtata

SEQ ID NO: 61725 - DNA, 25 bp, Probe Sequence
gctgaaagaacatggacttgtatat

SEQ ID NO: 61726 - DNA, 25 bp, Probe Sequence
caggagtgttaagcgttcagtgatg

SEQ ID NO: 61727 - DNA, 25 bp, Probe Sequence
aaacgtcttattgtggtaggatcag

SEQ ID NO: 61728 - DNA, 25 bp, Probe Sequence
gtttgtgttaccctcctgtaaatgg

SEQ ID NO: 61729 - DNA, 25 bp, Probe Sequence
atttattgtgcttcgagtgactgac

SEQ ID NO: 61730 - DNA, 25 bp, Probe Sequence
gagtgttaagcgttcagtgatgtgg

SEQ ID NO: 61731 - DNA, 25 bp, Probe Sequence
ggagtgttaagcgttcagtgatgtg

SEQ ID NO: 61732 - DNA, 25 bp, Probe Sequence
aggagtgttaagcgttcagtgatgt

SEQ ID NO: 61733 - DNA, 25 bp, Probe Sequence
tatatttattgtgcttcgagtgact

SEQ ID NO: 61734 - DNA, 25 bp, Probe Sequence
ccctatgatgactgtgtgtttggag

SEQ ID NO: 61735 - DNA, 25 bp, Probe Sequence
ggtttgtgttaccctcctgtaaatg

SEQ ID NO: 61736 - DNA, 25 bp, Probe Sequence
aggtttgtgttaccctcctgtaaat

SEQ ID NO: 61737 - DNA, 25 bp, Probe Sequence
gtgttaccctcctgtaaatggtgta

SEQ ID NO: 61738 - DNA, 25 bp, Probe Sequence
tttgtgttaccctcctgtaaatggt

SEQ ID NO: 61739 - DNA, 25 bp, Probe Sequence
aaggtttgtgttaccctcctgtaaa

SEQ ID NO: 61740 - DNA, 25 bp, Probe Sequence
ggacgagaaagatcattgaaattct

SEQ ID NO: 61741 - DNA, 25 bp, Probe Sequence
tgttaccctcctgtaaatggtgtac

SEQ ID NO: 61742 - DNA, 25 bp, Probe Sequence
gatgatgatgatgatgatgatgtcg

SEQ ID NO: 61743 - DNA, 25 bp, Probe Sequence
cgatgatgatgatgatgatgatgat

SEQ ID NO: 61744 - DNA, 25 bp, Probe Sequence
tgatgatgatgatgatgatgatgtc

SEQ ID NO: 61745 - DNA, 25 bp, Probe Sequence
atgatgatgatgatgatgatgatgt

SEQ ID NO: 61746 - DNA, 25 bp, Probe Sequence
atgatgatgatgatgatgatgtcga

SEQ ID NO: 61747 - DNA, 25 bp, Probe Sequence
tcgatgatgatgatgatgatgatga

SEQ ID NO: 61748 - DNA, 25 bp, Probe Sequence
ctcgatgatgatgatgatgatgatg

SEQ ID NO: 61749 - DNA, 25 bp, Probe Sequence
tcagttaagcctcagtattcttagc

SEQ ID NO: 61750 - DNA, 25 bp, Probe Sequence
ggtcagttaagcctcagtattctta

SEQ ID NO: 61751 - DNA, 25 bp, Probe Sequence
gtcagttaagcctcagtattcttag

SEQ ID NO: 61752 - DNA, 25 bp, Probe Sequence
cctcgatgatgatgatgatgatgat

SEQ ID NO: 61753 - DNA, 25 bp, Probe Sequence
gacctcgatgatgatgatgatgatg

SEQ ID NO: 61754 - DNA, 25 bp, Probe Sequence
acctcgatgatgatgatgatgatga

SEQ ID NO: 61755 - DNA, 25 bp, Probe Sequence
atttcattcccaatttgtgtgtgtt

SEQ ID NO: 61756 - DNA, 25 bp, Probe Sequence
tatttcattcccaatttgtgtgtgt

SEQ ID NO: 61757 - DNA, 25 bp, Probe Sequence
cagtgaagcaaaggcaaattaagat

SEQ ID NO: 61758 - DNA, 25 bp, Probe Sequence
agtgaagcaaaggcaaattaagata

SEQ ID NO: 61759 - DNA, 25 bp, Probe Sequence
aagcaaaggcaaattaagataaagc

SEQ ID NO: 61760 - DNA, 25 bp, Probe Sequence
aactacataaagcagtgaagcaaag

SEQ ID NO: 61761 - DNA, 25 bp, Probe Sequence
atatttcattcccaatttgtgtgtg

SEQ ID NO: 61762 - DNA, 25 bp, Probe Sequence
catatttcattcccaatttgtgtgt

SEQ ID NO: 61763 - DNA, 25 bp, Probe Sequence
gtgaagcaaaggcaaattaagataa

SEQ ID NO: 61764 - DNA, 25 bp, Probe Sequence
taactacataaagcagtgaagcaaa

SEQ ID NO: 61765 - DNA, 25 bp, Probe Sequence
tttcattcccaatttgtgtgtgttg

SEQ ID NO: 61766 - DNA, 25 bp, Probe Sequence
tatgctcacctactgctattccatc

SEQ ID NO: 61767 - DNA, 25 bp, Probe Sequence
ctatgctcacctactgctattccat

SEQ ID NO: 61768 - DNA, 25 bp, Probe Sequence
agaatttctagggaagtcatctcac

SEQ ID NO: 61769 - DNA, 25 bp, Probe Sequence
gaatttctagggaagtcatctcact

SEQ ID NO: 61770 - DNA, 25 bp, Probe Sequence
gagagaatttctagggaagtcatct

SEQ ID NO: 61771 - DNA, 25 bp, Probe Sequence
cctatgctcacctactgctattcca

SEQ ID NO: 61772 - DNA, 25 bp, Probe Sequence
tgagagaatttctagggaagtcatc

SEQ ID NO: 61773 - DNA, 25 bp, Probe Sequence
ctgagagaatttctagggaagtcat

SEQ ID NO: 61774 - DNA, 25 bp, Probe Sequence
cctgagagaatttctagggaagtca

SEQ ID NO: 61775 - DNA, 25 bp, Probe Sequence
ctactgctattccatcgacctctca

SEQ ID NO: 61776 - DNA, 25 bp, Probe Sequence
atgctcacctactgctattccatcg

SEQ ID NO: 61777 - DNA, 25 bp, Probe Sequence
tactgctattccatcgacctctcag

SEQ ID NO: 61778 - DNA, 25 bp, Probe Sequence
cctactgctattccatcgacctctc

SEQ ID NO: 61779 - DNA, 25 bp, Probe Sequence
gcctatgctcacctactgctattcc

SEQ ID NO: 61780 - DNA, 25 bp, Probe Sequence
atttctagggaagtcatctcacttg

SEQ ID NO: 61781 - DNA, 25 bp, Probe Sequence
aatttctagggaagtcatctcactt

SEQ ID NO: 61782 - DNA, 25 bp, Probe Sequence
atatccgtgttcaagtacgtctcag

SEQ ID NO: 61783 - DNA, 25 bp, Probe Sequence
cctaagagtctcctgacaaaagtta

SEQ ID NO: 61784 - DNA, 25 bp, Probe Sequence
tttctagggaagtcatctcacttgg

SEQ ID NO: 61785 - DNA, 25 bp, Probe Sequence
gatatccgtgttcaagtacgtctca

SEQ ID NO: 61786 - DNA, 25 bp, Probe Sequence
taagagtctcctgacaaaagttact

SEQ ID NO: 61787 - DNA, 25 bp, Probe Sequence
cacctactgctattccatcgacctc

SEQ ID NO: 61788 - DNA, 25 bp, Probe Sequence
ctcacctactgctattccatcgacc

SEQ ID NO: 61789 - DNA, 25 bp, Probe Sequence
ctaagagtctcctgacaaaagttac

SEQ ID NO: 61790 - DNA, 25 bp, Probe Sequence
cgattatctcctaagtgacagtgaa

SEQ ID NO: 61791 - DNA, 25 bp, Probe Sequence
cctaagtgacagtgaagatatgaga

SEQ ID NO: 61792 - DNA, 25 bp, Probe Sequence
tcctaagtgacagtgaagatatgag

SEQ ID NO: 61793 - DNA, 25 bp, Probe Sequence
ctcctaagtgacagtgaagatatga

SEQ ID NO: 61794 - DNA, 25 bp, Probe Sequence
gctgaatgttaaggtgtatgtaggt

SEQ ID NO: 61795 - DNA, 25 bp, Probe Sequence
tctcctaagtgacagtgaagatatg

SEQ ID NO: 61796 - DNA, 25 bp, Probe Sequence
tgttaaggtgtatgtaggttattgc

SEQ ID NO: 61797 - DNA, 25 bp, Probe Sequence
gattatctcctaagtgacagtgaag

SEQ ID NO: 61798 - DNA, 25 bp, Probe Sequence
ctgaatgttaaggtgtatgtaggtt

SEQ ID NO: 61799 - DNA, 25 bp, Probe Sequence
attatctcctaagtgacagtgaaga

SEQ ID NO: 61800 - DNA, 25 bp, Probe Sequence
ctaagtgacagtgaagatatgagaa

SEQ ID NO: 61801 - DNA, 25 bp, Probe Sequence
aagtgacagtgaagatatgagaatt

SEQ ID NO: 61802 - DNA, 25 bp, Probe Sequence
agctgaatgttaaggtgtatgtagg

SEQ ID NO: 61803 - DNA, 25 bp, Probe Sequence
ttcgattatctcctaagtgacagtg

SEQ ID NO: 61804 - DNA, 25 bp, Probe Sequence
tcgattatctcctaagtgacagtga

SEQ ID NO: 61805 - DNA, 25 bp, Probe Sequence
cttcgattatctcctaagtgacagt

SEQ ID NO: 61806 - DNA, 25 bp, Probe Sequence
aagctgaatgttaaggtgtatgtag

SEQ ID NO: 61807 - DNA, 25 bp, Probe Sequence
tgaatgttaaggtgtatgtaggtta

SEQ ID NO: 61808 - DNA, 25 bp, Probe Sequence
tcttcgattatctcctaagtgacag

SEQ ID NO: 61809 - DNA, 25 bp, Probe Sequence
taagtgacagtgaagatatgagaat

SEQ ID NO: 61810 - DNA, 25 bp, Probe Sequence
taaggtgtatgtaggttattgcagg

SEQ ID NO: 61811 - DNA, 25 bp, Probe Sequence
ttcttcgattatctcctaagtgaca

SEQ ID NO: 61812 - DNA, 25 bp, Probe Sequence
tgtatgtaggttattgcaggaactt

SEQ ID NO: 61813 - DNA, 25 bp, Probe Sequence
gtgtatgtaggttattgcaggaact

SEQ ID NO: 61814 - DNA, 25 bp, Probe Sequence
tattaaggtgttgaattacgccaga

SEQ ID NO: 61815 - DNA, 25 bp, Probe Sequence
gtattaaggtgttgaattacgccag

SEQ ID NO: 61816 - DNA, 25 bp, Probe Sequence
agtgtattaaggtgttgaattacgc

SEQ ID NO: 61817 - DNA, 25 bp, Probe Sequence
gtgtattaaggtgttgaattacgcc

SEQ ID NO: 61818 - DNA, 25 bp, Probe Sequence
tgtattaaggtgttgaattacgcca

SEQ ID NO: 61819 - DNA, 25 bp, Probe Sequence
aagcagtgtattaaggtgttgaatt

SEQ ID NO: 61820 - DNA, 25 bp, Probe Sequence
attaaggtgttgaattacgccagaa

SEQ ID NO: 61821 - DNA, 25 bp, Probe Sequence
ttgacagcagaatagaagaatgatt

SEQ ID NO: 61822 - DNA, 25 bp, Probe Sequence
ttaaggtgttgaattacgccagaag

SEQ ID NO: 61823 - DNA, 25 bp, Probe Sequence
gcagtgtattaaggtgttgaattac

SEQ ID NO: 61824 - DNA, 25 bp, Probe Sequence
agcagtgtattaaggtgttgaatta

SEQ ID NO: 61825 - DNA, 25 bp, Probe Sequence
cagtgtattaaggtgttgaattacg

SEQ ID NO: 61826 - DNA, 25 bp, Probe Sequence
taaggtgttgaattacgccagaaga

SEQ ID NO: 61827 - DNA, 25 bp, Probe Sequence
gacagcagaatagaagaatgattca

SEQ ID NO: 61828 - DNA, 25 bp, Probe Sequence
tgacagcagaatagaagaatgattc

SEQ ID NO: 61829 - DNA, 25 bp, Probe Sequence
gaaagcagtgtattaaggtgttgaa

SEQ ID NO: 61830 - DNA, 25 bp, Probe Sequence
agaaagcagtgtattaaggtgttga

SEQ ID NO: 61831 - DNA, 25 bp, Probe Sequence
cagaaagcagtgtattaaggtgttg

SEQ ID NO: 61832 - DNA, 25 bp, Probe Sequence
caattctccctatgacctatgtagc

SEQ ID NO: 61833 - DNA, 25 bp, Probe Sequence
ccaattctccctatgacctatgtag

SEQ ID NO: 61834 - DNA, 25 bp, Probe Sequence
aaagcagtgtattaaggtgttgaat

SEQ ID NO: 61835 - DNA, 25 bp, Probe Sequence
cagaagttcgttgtcatagtgctca

SEQ ID NO: 61836 - DNA, 25 bp, Probe Sequence
cccaattctccctatgacctatgta

SEQ ID NO: 61837 - DNA, 25 bp, Probe Sequence
aattctccctatgacctatgtagcc

SEQ ID NO: 61838 - DNA, 25 bp, Probe Sequence
aatgtgtggagtatcttggtgtatt

SEQ ID NO: 61839 - DNA, 25 bp, Probe Sequence
gtaatgtgtggagtatcttggtgta

SEQ ID NO: 61840 - DNA, 25 bp, Probe Sequence
tgctactgttgatatggattgctta

SEQ ID NO: 61841 - DNA, 25 bp, Probe Sequence
taatgtgtggagtatcttggtgtat

SEQ ID NO: 61842 - DNA, 25 bp, Probe Sequence
ttgctactgttgatatggattgctt

SEQ ID NO: 61843 - DNA, 25 bp, Probe Sequence
gctactgttgatatggattgcttat

SEQ ID NO: 61844 - DNA, 25 bp, Probe Sequence
actgttgatatggattgcttatgtt

SEQ ID NO: 61845 - DNA, 25 bp, Probe Sequence
gaaggaacaagtatctcaggatgaa

SEQ ID NO: 61846 - DNA, 25 bp, Probe Sequence
atgaaggaacaagtatctcaggatg

SEQ ID NO: 61847 - DNA, 25 bp, Probe Sequence
gaatgaaggaacaagtatctcagga

SEQ ID NO: 61848 - DNA, 25 bp, Probe Sequence
agaatgaaggaacaagtatctcagg

SEQ ID NO: 61849 - DNA, 25 bp, Probe Sequence
tcactcagaatgaaggaacaagtat

SEQ ID NO: 61850 - DNA, 25 bp, Probe Sequence
aatgaaggaacaagtatctcaggat

SEQ ID NO: 61851 - DNA, 25 bp, Probe Sequence
tcagaatgaaggaacaagtatctca

SEQ ID NO: 61852 - DNA, 25 bp, Probe Sequence
actcagaatgaaggaacaagtatct

SEQ ID NO: 61853 - DNA, 25 bp, Probe Sequence
cactcagaatgaaggaacaagtatc

SEQ ID NO: 61854 - DNA, 25 bp, Probe Sequence
cagaatgaaggaacaagtatctcag

SEQ ID NO: 61855 - DNA, 25 bp, Probe Sequence
tgaaggaacaagtatctcaggatga

SEQ ID NO: 61856 - DNA, 25 bp, Probe Sequence
ctcagaatgaaggaacaagtatctc

SEQ ID NO: 61857 - DNA, 25 bp, Probe Sequence
aagagaatcctgtacttcatccttg

SEQ ID NO: 61858 - DNA, 25 bp, Probe Sequence
tactgttgatatggattgcttatgt

SEQ ID NO: 61859 - DNA, 25 bp, Probe Sequence
ctggtaatgtgtggagtatcttggt

SEQ ID NO: 61860 - DNA, 25 bp, Probe Sequence
atcagatggagattctagtgctcat

SEQ ID NO: 61861 - DNA, 25 bp, Probe Sequence
ggtaatgtgtggagtatcttggtgt

SEQ ID NO: 61862 - DNA, 25 bp, Probe Sequence
gataatggattggagatggctatgt

SEQ ID NO: 61863 - DNA, 25 bp, Probe Sequence
ataatggattggagatggctatgtg

SEQ ID NO: 61864 - DNA, 25 bp, Probe Sequence
ggataatggattggagatggctatg

SEQ ID NO: 61865 - DNA, 25 bp, Probe Sequence
gttgagtcagttgtataaggaggag

SEQ ID NO: 61866 - DNA, 25 bp, Probe Sequence
gtgttgagtcagttgtataaggagg

SEQ ID NO: 61867 - DNA, 25 bp, Probe Sequence
ggtgttgagtcagttgtataaggag

SEQ ID NO: 61868 - DNA, 25 bp, Probe Sequence
gaggtgttgagtcagttgtataagg

SEQ ID NO: 61869 - DNA, 25 bp, Probe Sequence
ggaggtgttgagtcagttgtataag

SEQ ID NO: 61870 - DNA, 25 bp, Probe Sequence
tgttgagtcagttgtataaggagga

SEQ ID NO: 61871 - DNA, 25 bp, Probe Sequence
gagtcagttgtataaggaggaggtt

SEQ ID NO: 61872 - DNA, 25 bp, Probe Sequence
aggtgttgagtcagttgtataagga

SEQ ID NO: 61873 - DNA, 25 bp, Probe Sequence
aggaggtgttgagtcagttgtataa

SEQ ID NO: 61874 - DNA, 25 bp, Probe Sequence
aaggaggtgttgagtcagttgtata

SEQ ID NO: 61875 - DNA, 25 bp, Probe Sequence
gtgactgctgcttattaagatgatt

SEQ ID NO: 61876 - DNA, 25 bp, Probe Sequence
ttgagtcagttgtataaggaggagg

SEQ ID NO: 61877 - DNA, 25 bp, Probe Sequence
gactgctgcttattaagatgattca

SEQ ID NO: 61878 - DNA, 25 bp, Probe Sequence
tgactgctgcttattaagatgattc

SEQ ID NO: 61879 - DNA, 25 bp, Probe Sequence
atggattggagatggctatgtgtaa

SEQ ID NO: 61880 - DNA, 25 bp, Probe Sequence
aatggattggagatggctatgtgta

SEQ ID NO: 61881 - DNA, 25 bp, Probe Sequence
taatggattggagatggctatgtgt

SEQ ID NO: 61882 - DNA, 25 bp, Probe Sequence
agtcagttgtataaggaggaggttg

SEQ ID NO: 61883 - DNA, 25 bp, Probe Sequence
ggtgactgctgcttattaagatgat

SEQ ID NO: 61884 - DNA, 25 bp, Probe Sequence
tgagtcagttgtataaggaggaggt

SEQ ID NO: 61885 - DNA, 25 bp, Probe Sequence
actgctgcttattaagatgattcat

SEQ ID NO: 61886 - DNA, 25 bp, Probe Sequence
cttgtagagattgagaaggtggttc

SEQ ID NO: 61887 - DNA, 25 bp, Probe Sequence
cagaaggtgcttgttaatgagagag

SEQ ID NO: 61888 - DNA, 25 bp, Probe Sequence
ggtgcttgttaatgagagagtgatg

SEQ ID NO: 61889 - DNA, 25 bp, Probe Sequence
aggtgcttgttaatgagagagtgat

SEQ ID NO: 61890 - DNA, 25 bp, Probe Sequence
gaaggtgcttgttaatgagagagtg

SEQ ID NO: 61891 - DNA, 25 bp, Probe Sequence
agaaggtgcttgttaatgagagagt

SEQ ID NO: 61892 - DNA, 25 bp, Probe Sequence
aaggtgcttgttaatgagagagtga

SEQ ID NO: 61893 - DNA, 25 bp, Probe Sequence
gtgcttgttaatgagagagtgatgc

SEQ ID NO: 61894 - DNA, 25 bp, Probe Sequence
acagaaggtgcttgttaatgagaga

SEQ ID NO: 61895 - DNA, 25 bp, Probe Sequence
gcttgtagagattgagaaggtggtt

SEQ ID NO: 61896 - DNA, 25 bp, Probe Sequence
ccatctgcctaccttcaaagaatta

SEQ ID NO: 61897 - DNA, 25 bp, Probe Sequence
tgcttgttaatgagagagtgatgcc

SEQ ID NO: 61898 - DNA, 25 bp, Probe Sequence
tagagattgagaaggtggttctaca

SEQ ID NO: 61899 - DNA, 25 bp, Probe Sequence
tgtagagattgagaaggtggttcta

SEQ ID NO: 61900 - DNA, 25 bp, Probe Sequence
gatcatcaaactcaaacagaaggtg

SEQ ID NO: 61901 - DNA, 25 bp, Probe Sequence
tctgcctaccttcaaagaattatgc

SEQ ID NO: 61902 - DNA, 25 bp, Probe Sequence
atctgcctaccttcaaagaattatg

SEQ ID NO: 61903 - DNA, 25 bp, Probe Sequence
catctgcctaccttcaaagaattat

SEQ ID NO: 61904 - DNA, 25 bp, Probe Sequence
ttgtagagattgagaaggtggttct

SEQ ID NO: 61905 - DNA, 25 bp, Probe Sequence
ggatcatcaaactcaaacagaaggt

SEQ ID NO: 61906 - DNA, 25 bp, Probe Sequence
tgggatcatcaaactcaaacagaag

SEQ ID NO: 61907 - DNA, 25 bp, Probe Sequence
atcatcaaactcaaacagaaggtgc

SEQ ID NO: 61908 - DNA, 25 bp, Probe Sequence
attgggatcatcaaactcaaacaga

SEQ ID NO: 61909 - DNA, 25 bp, Probe Sequence
tattgggatcatcaaactcaaacag

SEQ ID NO: 61910 - DNA, 25 bp, Probe Sequence
ttctgaatgttatctccaaccagga

SEQ ID NO: 61911 - DNA, 25 bp, Probe Sequence
cctttctgaatgttatctccaacca

SEQ ID NO: 61912 - DNA, 25 bp, Probe Sequence
ctttctgaatgttatctccaaccag

SEQ ID NO: 61913 - DNA, 25 bp, Probe Sequence
tttctgaatgttatctccaaccagg

SEQ ID NO: 61914 - DNA, 25 bp, Probe Sequence
gcctttctgaatgttatctccaacc

SEQ ID NO: 61915 - DNA, 25 bp, Probe Sequence
tacgggtaatgacacagtcctaaat

SEQ ID NO: 61916 - DNA, 25 bp, Probe Sequence
aacttcttgtcagacataaagccat

SEQ ID NO: 61917 - DNA, 25 bp, Probe Sequence
aaacttcttgtcagacataaagcca

SEQ ID NO: 61918 - DNA, 25 bp, Probe Sequence
acttcttgtcagacataaagccatg

SEQ ID NO: 61919 - DNA, 25 bp, Probe Sequence
gtacgggtaatgacacagtcctaaa

SEQ ID NO: 61920 - DNA, 25 bp, Probe Sequence
cgggtaatgacacagtcctaaatgt

SEQ ID NO: 61921 - DNA, 25 bp, Probe Sequence
acgggtaatgacacagtcctaaatg

SEQ ID NO: 61922 - DNA, 25 bp, Probe Sequence
aaatgtggcctttctgaatgttatc

SEQ ID NO: 61923 - DNA, 25 bp, Probe Sequence
caaccaggagtgtaacatcaagcac

SEQ ID NO: 61924 - DNA, 25 bp, Probe Sequence
ctaaatgtggcctttctgaatgtta

SEQ ID NO: 61925 - DNA, 25 bp, Probe Sequence
aatgtggcctttctgaatgttatct

SEQ ID NO: 61926 - DNA, 25 bp, Probe Sequence
agacataaagccatgtttcctcttt

SEQ ID NO: 61927 - DNA, 25 bp, Probe Sequence
atgtggcctttctgaatgttatctc

SEQ ID NO: 61928 - DNA, 25 bp, Probe Sequence
taaatgtggcctttctgaatgttat

SEQ ID NO: 61929 - DNA, 25 bp, Probe Sequence
tctctgtgtttgtggactggattca

SEQ ID NO: 61930 - DNA, 25 bp, Probe Sequence
cttgtcagacataaagccatgtttc

SEQ ID NO: 61931 - DNA, 25 bp, Probe Sequence
cagacataaagccatgtttcctctt

SEQ ID NO: 61932 - DNA, 25 bp, Probe Sequence
tcttgtcagacataaagccatgttt

SEQ ID NO: 61933 - DNA, 25 bp, Probe Sequence
ttcttgtcagacataaagccatgtt

SEQ ID NO: 61934 - DNA, 25 bp, Probe Sequence
cctagaagagatggtcaactccttg

SEQ ID NO: 61935 - DNA, 25 bp, Probe Sequence
tgtacctagaagagatggtcaactc

SEQ ID NO: 61936 - DNA, 25 bp, Probe Sequence
ctgtacctagaagagatggtcaact

SEQ ID NO: 61937 - DNA, 25 bp, Probe Sequence
tacctagaagagatggtcaactcct

SEQ ID NO: 61938 - DNA, 25 bp, Probe Sequence
gtgttgtgtctgtcaataaagtgta

SEQ ID NO: 61939 - DNA, 25 bp, Probe Sequence
tacatacgtgttgtgtctgtcaata

SEQ ID NO: 61940 - DNA, 25 bp, Probe Sequence
ttgctggacaagtcattaacacact

SEQ ID NO: 61941 - DNA, 25 bp, Probe Sequence
agtcattaacacactttaagcgaat

SEQ ID NO: 61942 - DNA, 25 bp, Probe Sequence
gtacctagaagagatggtcaactcc

SEQ ID NO: 61943 - DNA, 25 bp, Probe Sequence
atacatacgtgttgtgtctgtcaat

SEQ ID NO: 61944 - DNA, 25 bp, Probe Sequence
ctagaagagatggtcaactccttgc

SEQ ID NO: 61945 - DNA, 25 bp, Probe Sequence
tgttgtgtctgtcaataaagtgtaa

SEQ ID NO: 61946 - DNA, 25 bp, Probe Sequence
acatacgtgttgtgtctgtcaataa

SEQ ID NO: 61947 - DNA, 25 bp, Probe Sequence
tagaagagatggtcaactccttgct

SEQ ID NO: 61948 - DNA, 25 bp, Probe Sequence
catacatacgtgttgtgtctgtcaa

SEQ ID NO: 61949 - DNA, 25 bp, Probe Sequence
gaaggtaaagaaacttgctggacaa

SEQ ID NO: 61950 - DNA, 25 bp, Probe Sequence
acctagaagagatggtcaactcctt

SEQ ID NO: 61951 - DNA, 25 bp, Probe Sequence
attaacacactttaagcgaatggtg

SEQ ID NO: 61952 - DNA, 25 bp, Probe Sequence
gttgtgtctgtcaataaagtgtaaa

SEQ ID NO: 61953 - DNA, 25 bp, Probe Sequence
cgtgttgtgtctgtcaataaagtgt

SEQ ID NO: 61954 - DNA, 25 bp, Probe Sequence
gctgtacctagaagagatggtcaac

SEQ ID NO: 61955 - DNA, 25 bp, Probe Sequence
acatacatacgtgttgtgtctgtca

SEQ ID NO: 61956 - DNA, 25 bp, Probe Sequence
catacgtgttgtgtctgtcaataaa

SEQ ID NO: 61957 - DNA, 25 bp, Probe Sequence
tcattaacacactttaagcgaatgg

SEQ ID NO: 61958 - DNA, 25 bp, Probe Sequence
gtatcaactatgaagcgtttgtgag

SEQ ID NO: 61959 - DNA, 25 bp, Probe Sequence
ttgtatcaactatgaagcgtttgtg

SEQ ID NO: 61960 - DNA, 25 bp, Probe Sequence
tgtatcaactatgaagcgtttgtga

SEQ ID NO: 61961 - DNA, 25 bp, Probe Sequence
tatcaactatgaagcgtttgtgagg

SEQ ID NO: 61962 - DNA, 25 bp, Probe Sequence
ctatgaagcgtttgtgaggcatatc

SEQ ID NO: 61963 - DNA, 25 bp, Probe Sequence
caatggttgtatcaactatgaagcg

SEQ ID NO: 61964 - DNA, 25 bp, Probe Sequence
atggttgtatcaactatgaagcgtt

SEQ ID NO: 61965 - DNA, 25 bp, Probe Sequence
aatggttgtatcaactatgaagcgt

SEQ ID NO: 61966 - DNA, 25 bp, Probe Sequence
gcaatggttgtatcaactatgaagc

SEQ ID NO: 61967 - DNA, 25 bp, Probe Sequence
actatgaagcgtttgtgaggcatat

SEQ ID NO: 61968 - DNA, 25 bp, Probe Sequence
aactatgaagcgtttgtgaggcata

SEQ ID NO: 61969 - DNA, 25 bp, Probe Sequence
tatgaagcgtttgtgaggcatatcc

SEQ ID NO: 61970 - DNA, 25 bp, Probe Sequence
atcaactatgaagcgtttgtgaggc

SEQ ID NO: 61971 - DNA, 25 bp, Probe Sequence
caactatgaagcgtttgtgaggcat

SEQ ID NO: 61972 - DNA, 25 bp, Probe Sequence
gttgtatcaactatgaagcgtttgt

SEQ ID NO: 61973 - DNA, 25 bp, Probe Sequence
ggttgtatcaactatgaagcgtttg

SEQ ID NO: 61974 - DNA, 25 bp, Probe Sequence
tggttgtatcaactatgaagcgttt

SEQ ID NO: 61975 - DNA, 25 bp, Probe Sequence
atgaagcgtttgtgaggcatatcct

SEQ ID NO: 61976 - DNA, 25 bp, Probe Sequence
caccaaataaacttgctctctgggc

SEQ ID NO: 61977 - DNA, 25 bp, Probe Sequence
tcaactatgaagcgtttgtgaggca

SEQ ID NO: 61978 - DNA, 25 bp, Probe Sequence
caaataaacttgctctctgggcctc

SEQ ID NO: 61979 - DNA, 25 bp, Probe Sequence
ccaaataaacttgctctctgggcct

SEQ ID NO: 61980 - DNA, 25 bp, Probe Sequence
taccctaaatgtatgtccaacttcc

SEQ ID NO: 61981 - DNA, 25 bp, Probe Sequence
attctatcatttcaagcagtgtgtc

SEQ ID NO: 61982 - DNA, 25 bp, Probe Sequence
cctaaatgtatgtccaacttccact

SEQ ID NO: 61983 - DNA, 25 bp, Probe Sequence
aagttactgggattacattcattgc

SEQ ID NO: 61984 - DNA, 25 bp, Probe Sequence
ctaaatgtatgtccaacttccactt

SEQ ID NO: 61985 - DNA, 25 bp, Probe Sequence
ttccacttctcactcttatggtctc

SEQ ID NO: 61986 - DNA, 25 bp, Probe Sequence
aattctatcatttcaagcagtgtgt

SEQ ID NO: 61987 - DNA, 25 bp, Probe Sequence
tgttaccctaaatgtatgtccaact

SEQ ID NO: 61988 - DNA, 25 bp, Probe Sequence
aggaagttactgggattacattcat

SEQ ID NO: 61989 - DNA, 25 bp, Probe Sequence
gcacgagctgagaatatctaacatg

SEQ ID NO: 61990 - DNA, 25 bp, Probe Sequence
ccctaaatgtatgtccaacttccac

SEQ ID NO: 61991 - DNA, 25 bp, Probe Sequence
caattctatcatttcaagcagtgtg

SEQ ID NO: 61992 - DNA, 25 bp, Probe Sequence
tcaattctatcatttcaagcagtgt

SEQ ID NO: 61993 - DNA, 25 bp, Probe Sequence
ccacttctcactcttatggtctcaa

SEQ ID NO: 61994 - DNA, 25 bp, Probe Sequence
taaatgtatgtccaacttccacttt

SEQ ID NO: 61995 - DNA, 25 bp, Probe Sequence
ttaccctaaatgtatgtccaacttc

SEQ ID NO: 61996 - DNA, 25 bp, Probe Sequence
accctaaatgtatgtccaacttcca

SEQ ID NO: 61997 - DNA, 25 bp, Probe Sequence
ttctatcatttcaagcagtgtgtcg

SEQ ID NO: 61998 - DNA, 25 bp, Probe Sequence
ggaagttactgggattacattcatt

SEQ ID NO: 61999 - DNA, 25 bp, Probe Sequence
ttgttaccctaaatgtatgtccaac

SEQ ID NO: 62000 - DNA, 25 bp, Probe Sequence
gttaccctaaatgtatgtccaactt

SEQ ID NO: 62001 - DNA, 25 bp, Probe Sequence
gtcaggaagttactgggattacatt

SEQ ID NO: 62002 - DNA, 25 bp, Probe Sequence
cagatggaaattcttcaggatcaat

SEQ ID NO: 62003 - DNA, 25 bp, Probe Sequence
tccacttctcactcttatggtctca

SEQ ID NO: 62004 - DNA, 25 bp, Probe Sequence
gtgatccagttctaagtgtcatctt

SEQ ID NO: 62005 - DNA, 25 bp, Probe Sequence
aagtgatccagttctaagtgtcatc

SEQ ID NO: 62006 - DNA, 25 bp, Probe Sequence
caagtgatccagttctaagtgtcat

SEQ ID NO: 62007 - DNA, 25 bp, Probe Sequence
agtgatccagttctaagtgtcatct

SEQ ID NO: 62008 - DNA, 25 bp, Probe Sequence
aagaagattgtgctaaggcttgagt

SEQ ID NO: 62009 - DNA, 25 bp, Probe Sequence
gatctaagagaatgctggctattaa

SEQ ID NO: 62010 - DNA, 25 bp, Probe Sequence
aactgggaggagataagaagagaaa

SEQ ID NO: 62011 - DNA, 25 bp, Probe Sequence
tttgaactgggaggagataagaaga

SEQ ID NO: 62012 - DNA, 25 bp, Probe Sequence
actgggaggagataagaagagaaag

SEQ ID NO: 62013 - DNA, 25 bp, Probe Sequence
gaactgggaggagataagaagagaa

SEQ ID NO: 62014 - DNA, 25 bp, Probe Sequence
ccaagtgatccagttctaagtgtca

SEQ ID NO: 62015 - DNA, 25 bp, Probe Sequence
ttgaactgggaggagataagaagag

SEQ ID NO: 62016 - DNA, 25 bp, Probe Sequence
agaagattgtgctaaggcttgagtg

SEQ ID NO: 62017 - DNA, 25 bp, Probe Sequence
ctgggaggagataagaagagaaagg

SEQ ID NO: 62018 - DNA, 25 bp, Probe Sequence
ataaagtgacacagtacaagaaggg

SEQ ID NO: 62019 - DNA, 25 bp, Probe Sequence
cataaagtgacacagtacaagaagg

SEQ ID NO: 62020 - DNA, 25 bp, Probe Sequence
ccataaagtgacacagtacaagaag

SEQ ID NO: 62021 - DNA, 25 bp, Probe Sequence
cccataaagtgacacagtacaagaa

SEQ ID NO: 62022 - DNA, 25 bp, Probe Sequence
aaagaagattgtgctaaggcttgag

SEQ ID NO: 62023 - DNA, 25 bp, Probe Sequence
tgaactgggaggagataagaagaga

SEQ ID NO: 62024 - DNA, 25 bp, Probe Sequence
tgatccagttctaagtgtcatcttt

SEQ ID NO: 62025 - DNA, 25 bp, Probe Sequence
caaagaagattgtgctaaggcttga

SEQ ID NO: 62026 - DNA, 25 bp, Probe Sequence
gccaagtgatccagttctaagtgtc

SEQ ID NO: 62027 - DNA, 25 bp, Probe Sequence
atctaagagaatgctggctattaaa

SEQ ID NO: 62028 - DNA, 25 bp, Probe Sequence
ctatggatagatcaggaggcatcac

SEQ ID NO: 62029 - DNA, 25 bp, Probe Sequence
tatggatagatcaggaggcatcact

SEQ ID NO: 62030 - DNA, 25 bp, Probe Sequence
ccctccttcctctctatcttaaagt

SEQ ID NO: 62031 - DNA, 25 bp, Probe Sequence
gaaactgttgagaaaccgaaactac

SEQ ID NO: 62032 - DNA, 25 bp, Probe Sequence
aaactgttgagaaaccgaaactact

SEQ ID NO: 62033 - DNA, 25 bp, Probe Sequence
aactgttgagaaaccgaaactactg

SEQ ID NO: 62034 - DNA, 25 bp, Probe Sequence
ggaaactgttgagaaaccgaaacta

SEQ ID NO: 62035 - DNA, 25 bp, Probe Sequence
aaaggaaactgttgagaaaccgaaa

SEQ ID NO: 62036 - DNA, 25 bp, Probe Sequence
cctccttcctctctatcttaaagta

SEQ ID NO: 62037 - DNA, 25 bp, Probe Sequence
aaggaaactgttgagaaaccgaaac

SEQ ID NO: 62038 - DNA, 25 bp, Probe Sequence
cctatggatagatcaggaggcatca

SEQ ID NO: 62039 - DNA, 25 bp, Probe Sequence
caaaccttcttctctcctgtcaaca

SEQ ID NO: 62040 - DNA, 25 bp, Probe Sequence
aggaaactgttgagaaaccgaaact

SEQ ID NO: 62041 - DNA, 25 bp, Probe Sequence
atggatagatcaggaggcatcactg

SEQ ID NO: 62042 - DNA, 25 bp, Probe Sequence
actgttgagaaaccgaaactactgg

SEQ ID NO: 62043 - DNA, 25 bp, Probe Sequence
aaccttcttctctcctgtcaacagt

SEQ ID NO: 62044 - DNA, 25 bp, Probe Sequence
ccaaaccttcttctctcctgtcaac

SEQ ID NO: 62045 - DNA, 25 bp, Probe Sequence
tccaaaccttcttctctcctgtcaa

SEQ ID NO: 62046 - DNA, 25 bp, Probe Sequence
cacactgtccaaaccttcttctctc

SEQ ID NO: 62047 - DNA, 25 bp, Probe Sequence
ctccttcctctctatcttaaagtaa

SEQ ID NO: 62048 - DNA, 25 bp, Probe Sequence
ctgtatcagccctttatcctcacac

SEQ ID NO: 62049 - DNA, 25 bp, Probe Sequence
gtcacactgtccaaaccttcttctc

SEQ ID NO: 62050 - DNA, 25 bp, Probe Sequence
tctacaatggcattcaataaagtgc

SEQ ID NO: 62051 - DNA, 25 bp, Probe Sequence
tcacactgtccaaaccttcttctct

SEQ ID NO: 62052 - DNA, 25 bp, Probe Sequence
taagaagttaagttgttgctatcgc

SEQ ID NO: 62053 - DNA, 25 bp, Probe Sequence
gctaagtaagaagttaagttgttgc

SEQ ID NO: 62054 - DNA, 25 bp, Probe Sequence
gtaagaagttaagttgttgctatcg

SEQ ID NO: 62055 - DNA, 25 bp, Probe Sequence
tgctaagtaagaagttaagttgttg

SEQ ID NO: 62056 - DNA, 25 bp, Probe Sequence
ctaagtaagaagttaagttgttgct

SEQ ID NO: 62057 - DNA, 25 bp, Probe Sequence
agtaagaagttaagttgttgctatc

SEQ ID NO: 62058 - DNA, 25 bp, Probe Sequence
ttgctaagtaagaagttaagttgtt

SEQ ID NO: 62059 - DNA, 25 bp, Probe Sequence
aagtaagaagttaagttgttgctat

SEQ ID NO: 62060 - DNA, 25 bp, Probe Sequence
attgctaagtaagaagttaagttgt

SEQ ID NO: 62061 - DNA, 25 bp, Probe Sequence
cattgctaagtaagaagttaagttg

SEQ ID NO: 62062 - DNA, 25 bp, Probe Sequence
tcattgctaagtaagaagttaagtt

SEQ ID NO: 62063 - DNA, 25 bp, Probe Sequence
taagtaagaagttaagttgttgcta

SEQ ID NO: 62064 - DNA, 25 bp, Probe Sequence
agaagttaagttgttgctatcgcaa

SEQ ID NO: 62065 - DNA, 25 bp, Probe Sequence
aagagatgaggacagttcagaggag

SEQ ID NO: 62066 - DNA, 25 bp, Probe Sequence
gataaatcagatcgtgcctctttac

SEQ ID NO: 62067 - DNA, 25 bp, Probe Sequence
tgataaatcagatcgtgcctcttta

SEQ ID NO: 62068 - DNA, 25 bp, Probe Sequence
ataaatcagatcgtgcctctttacc

SEQ ID NO: 62069 - DNA, 25 bp, Probe Sequence
caagagatgaggacagttcagagga

SEQ ID NO: 62070 - DNA, 25 bp, Probe Sequence
atgaggacagttcagaggaggattc

SEQ ID NO: 62071 - DNA, 25 bp, Probe Sequence
gatgaggacagttcagaggaggatt

SEQ ID NO: 62072 - DNA, 25 bp, Probe Sequence
gaggacagttcagaggaggattcag

SEQ ID NO: 62073 - DNA, 25 bp, Probe Sequence
ggacagttcagaggaggattcagac

SEQ ID NO: 62074 - DNA, 25 bp, Probe Sequence
cagttcagaggaggattcagacgag

SEQ ID NO: 62075 - DNA, 25 bp, Probe Sequence
aggacagttcagaggaggattcaga

SEQ ID NO: 62076 - DNA, 25 bp, Probe Sequence
taaatcagatcgtgcctctttaccc

SEQ ID NO: 62077 - DNA, 25 bp, Probe Sequence
agatgaggacagttcagaggaggat

SEQ ID NO: 62078 - DNA, 25 bp, Probe Sequence
ccaagagatgaggacagttcagagg

SEQ ID NO: 62079 - DNA, 25 bp, Probe Sequence
gttcagaggaggattcagacgagtg

SEQ ID NO: 62080 - DNA, 25 bp, Probe Sequence
gacagttcagaggaggattcagacg

SEQ ID NO: 62081 - DNA, 25 bp, Probe Sequence
agttcagaggaggattcagacgagt

SEQ ID NO: 62082 - DNA, 25 bp, Probe Sequence
tgaggacagttcagaggaggattca

SEQ ID NO: 62083 - DNA, 25 bp, Probe Sequence
ttcagaggaggattcagacgagtgt

SEQ ID NO: 62084 - DNA, 25 bp, Probe Sequence
acagttcagaggaggattcagacga

SEQ ID NO: 62085 - DNA, 25 bp, Probe Sequence
gagatgaggacagttcagaggagga

SEQ ID NO: 62086 - DNA, 25 bp, Probe Sequence
agagatgaggacagttcagaggagg

SEQ ID NO: 62087 - DNA, 25 bp, Probe Sequence
aatcagatcgtgcctctttaccctt

SEQ ID NO: 62088 - DNA, 25 bp, Probe Sequence
aaatcagatcgtgcctctttaccct

SEQ ID NO: 62089 - DNA, 25 bp, Probe Sequence
caataacttcatctatggaggctgc

SEQ ID NO: 62090 - DNA, 25 bp, Probe Sequence
gcaataacttcatctatggaggctg

SEQ ID NO: 62091 - DNA, 25 bp, Probe Sequence
cactccagcgatatgttcaactatg

SEQ ID NO: 62092 - DNA, 25 bp, Probe Sequence
actccagcgatatgttcaactatga

SEQ ID NO: 62093 - DNA, 25 bp, Probe Sequence
ccactccagcgatatgttcaactat

SEQ ID NO: 62094 - DNA, 25 bp, Probe Sequence
actcctgcaataacttcatctatgg

SEQ ID NO: 62095 - DNA, 25 bp, Probe Sequence
ggaactcctgcaataacttcatcta

SEQ ID NO: 62096 - DNA, 25 bp, Probe Sequence
caataattacctgaccaaggaggag

SEQ ID NO: 62097 - DNA, 25 bp, Probe Sequence
gaagtgatgttggaatcgtttcttt

SEQ ID NO: 62098 - DNA, 25 bp, Probe Sequence
aactcctgcaataacttcatctatg

SEQ ID NO: 62099 - DNA, 25 bp, Probe Sequence
aataattacctgaccaaggaggagt

SEQ ID NO: 62100 - DNA, 25 bp, Probe Sequence
aacagcaataattacctgaccaagg

SEQ ID NO: 62101 - DNA, 25 bp, Probe Sequence
aataacttcatctatggaggctgcc

SEQ ID NO: 62102 - DNA, 25 bp, Probe Sequence
ctgcaataacttcatctatggaggc

SEQ ID NO: 62103 - DNA, 25 bp, Probe Sequence
gaactcctgcaataacttcatctat

SEQ ID NO: 62104 - DNA, 25 bp, Probe Sequence
cagcaataattacctgaccaaggag

SEQ ID NO: 62105 - DNA, 25 bp, Probe Sequence
ataattacctgaccaaggaggagtg

SEQ ID NO: 62106 - DNA, 25 bp, Probe Sequence
tgcaataacttcatctatggaggct

SEQ ID NO: 62107 - DNA, 25 bp, Probe Sequence
gatttctttcctccaggtagagttt

SEQ ID NO: 62108 - DNA, 25 bp, Probe Sequence
ttaaatagagggattgactcggatt

SEQ ID NO: 62109 - DNA, 25 bp, Probe Sequence
acagcaataattacctgaccaagga

SEQ ID NO: 62110 - DNA, 25 bp, Probe Sequence
aaatagagggattgactcggatttg

SEQ ID NO: 62111 - DNA, 25 bp, Probe Sequence
taaatagagggattgactcggattt

SEQ ID NO: 62112 - DNA, 25 bp, Probe Sequence
aatagagggattgactcggatttga

SEQ ID NO: 62113 - DNA, 25 bp, Probe Sequence
aaagaagaaagatgaggcagaggtc

SEQ ID NO: 62114 - DNA, 25 bp, Probe Sequence
aagatgaggcagaggtccaagtaaa

SEQ ID NO: 62115 - DNA, 25 bp, Probe Sequence
aaagatgaggcagaggtccaagtaa

SEQ ID NO: 62116 - DNA, 25 bp, Probe Sequence
gagacccaccttgctcataaacaaa

SEQ ID NO: 62117 - DNA, 25 bp, Probe Sequence
gaaagatgaggcagaggtccaagta

SEQ ID NO: 62118 - DNA, 25 bp, Probe Sequence
caaaagaagaaagatgaggcagagg

SEQ ID NO: 62119 - DNA, 25 bp, Probe Sequence
aaaagaagaaagatgaggcagaggt

SEQ ID NO: 62120 - DNA, 25 bp, Probe Sequence
agatgaggcagaggtccaagtaaac

SEQ ID NO: 62121 - DNA, 25 bp, Probe Sequence
aagaagaaagatgaggcagaggtcc

SEQ ID NO: 62122 - DNA, 25 bp, Probe Sequence
gacccaccttgctcataaacaaaat

SEQ ID NO: 62123 - DNA, 25 bp, Probe Sequence
gcaaaagaagaaagatgaggcagag

SEQ ID NO: 62124 - DNA, 25 bp, Probe Sequence
acccaccttgctcataaacaaaatg

SEQ ID NO: 62125 - DNA, 25 bp, Probe Sequence
aagaaagatgaggcagaggtccaag

SEQ ID NO: 62126 - DNA, 25 bp, Probe Sequence
gaagaaagatgaggcagaggtccaa

SEQ ID NO: 62127 - DNA, 25 bp, Probe Sequence
catgagagccaagtggaggaagaag

SEQ ID NO: 62128 - DNA, 25 bp, Probe Sequence
agacccaccttgctcataaacaaaa

SEQ ID NO: 62129 - DNA, 25 bp, Probe Sequence
caccttgctcataaacaaaatgccc

SEQ ID NO: 62130 - DNA, 25 bp, Probe Sequence
ccaccttgctcataaacaaaatgcc

SEQ ID NO: 62131 - DNA, 25 bp, Probe Sequence
cccaccttgctcataaacaaaatgc

SEQ ID NO: 62132 - DNA, 25 bp, Probe Sequence
agaagaaagatgaggcagaggtcca

SEQ ID NO: 62133 - DNA, 25 bp, Probe Sequence
gtagacggaacttcgcctttctctc

SEQ ID NO: 62134 - DNA, 25 bp, Probe Sequence
attaaatagccgtagacggaacttc

SEQ ID NO: 62135 - DNA, 25 bp, Probe Sequence
ccgctgttttagctgaagaattaaa

SEQ ID NO: 62136 - DNA, 25 bp, Probe Sequence
cattaaatagccgtagacggaactt

SEQ ID NO: 62137 - DNA, 25 bp, Probe Sequence
ctgacctctacctggaccttattaa

SEQ ID NO: 62138 - DNA, 25 bp, Probe Sequence
tgacctctacctggaccttattaac

SEQ ID NO: 62139 - DNA, 25 bp, Probe Sequence
tctgacctctacctggaccttatta

SEQ ID NO: 62140 - DNA, 25 bp, Probe Sequence
ggaccttattaaccagaagaagatg

SEQ ID NO: 62141 - DNA, 25 bp, Probe Sequence
gacctctacctggaccttattaacc

SEQ ID NO: 62142 - DNA, 25 bp, Probe Sequence
ttattaaccagaagaagatgagtcc

SEQ ID NO: 62143 - DNA, 25 bp, Probe Sequence
ttctgacctctacctggaccttatt

SEQ ID NO: 62144 - DNA, 25 bp, Probe Sequence
ccttattaaccagaagaagatgagt

SEQ ID NO: 62145 - DNA, 25 bp, Probe Sequence
accttattaaccagaagaagatgag

SEQ ID NO: 62146 - DNA, 25 bp, Probe Sequence
gaccttattaaccagaagaagatga

SEQ ID NO: 62147 - DNA, 25 bp, Probe Sequence
gttctgacctctacctggaccttat

SEQ ID NO: 62148 - DNA, 25 bp, Probe Sequence
tggaccttattaaccagaagaagat

SEQ ID NO: 62149 - DNA, 25 bp, Probe Sequence
tattaaccagaagaagatgagtccc

SEQ ID NO: 62150 - DNA, 25 bp, Probe Sequence
gcctgtgttatttcttgttcttgaa

SEQ ID NO: 62151 - DNA, 25 bp, Probe Sequence
cttattaaccagaagaagatgagtc

SEQ ID NO: 62152 - DNA, 25 bp, Probe Sequence
gaaggtcaagtcacagtccaagatg

SEQ ID NO: 62153 - DNA, 25 bp, Probe Sequence
gttcagtgaggagaatctggagttc

SEQ ID NO: 62154 - DNA, 25 bp, Probe Sequence
agaaggtcaagtcacagtccaagat

SEQ ID NO: 62155 - DNA, 25 bp, Probe Sequence
acctctacctggaccttattaacca

SEQ ID NO: 62156 - DNA, 25 bp, Probe Sequence
tctctggacagacggatagacatac

SEQ ID NO: 62157 - DNA, 25 bp, Probe Sequence
caagaaggtcaagtcacagtccaag

SEQ ID NO: 62158 - DNA, 25 bp, Probe Sequence
agttcagtgaggagaatctggagtt

SEQ ID NO: 62159 - DNA, 25 bp, Probe Sequence
aagaaggtcaagtcacagtccaaga

SEQ ID NO: 62160 - DNA, 25 bp, Probe Sequence
ttgtgaggacttcaagaaggtcaag

SEQ ID NO: 62161 - DNA, 25 bp, Probe Sequence
attccacaagcattgccttcttatt

SEQ ID NO: 62162 - DNA, 25 bp, Probe Sequence
cctttcccatctgtctatctatctg

SEQ ID NO: 62163 - DNA, 25 bp, Probe Sequence
cattccacaagcattgccttcttat

SEQ ID NO: 62164 - DNA, 25 bp, Probe Sequence
gcctttcccatctgtctatctatct

SEQ ID NO: 62165 - DNA, 25 bp, Probe Sequence
tgcctttcccatctgtctatctatc

SEQ ID NO: 62166 - DNA, 25 bp, Probe Sequence
ctgcctttcccatctgtctatctat

SEQ ID NO: 62167 - DNA, 25 bp, Probe Sequence
caaagaaacgattgaacaggagaag

SEQ ID NO: 62168 - DNA, 25 bp, Probe Sequence
catcaaagaactactgacaacgaag

SEQ ID NO: 62169 - DNA, 25 bp, Probe Sequence
ttcacatcaaagaactactgacaac

SEQ ID NO: 62170 - DNA, 25 bp, Probe Sequence
acatcaaagaactactgacaacgaa

SEQ ID NO: 62171 - DNA, 25 bp, Probe Sequence
atcaaagaactactgacaacgaagg

SEQ ID NO: 62172 - DNA, 25 bp, Probe Sequence
tttcacatcaaagaactactgacaa

SEQ ID NO: 62173 - DNA, 25 bp, Probe Sequence
catctgtctatctatctggctggca

SEQ ID NO: 62174 - DNA, 25 bp, Probe Sequence
cacatcaaagaactactgacaacga

SEQ ID NO: 62175 - DNA, 25 bp, Probe Sequence
tcacatcaaagaactactgacaacg

SEQ ID NO: 62176 - DNA, 25 bp, Probe Sequence
aaagaaacgattgaacaggagaagc

SEQ ID NO: 62177 - DNA, 25 bp, Probe Sequence
ccaaagaaacgattgaacaggagaa

SEQ ID NO: 62178 - DNA, 25 bp, Probe Sequence
tgaagaagacagagacgcaagagaa

SEQ ID NO: 62179 - DNA, 25 bp, Probe Sequence
acattccacaagcattgccttctta

SEQ ID NO: 62180 - DNA, 25 bp, Probe Sequence
tacattccacaagcattgccttctt

SEQ ID NO: 62181 - DNA, 25 bp, Probe Sequence
ttccacaagcattgccttcttattt

SEQ ID NO: 62182 - DNA, 25 bp, Probe Sequence
atctgtctatctatctggctggcag

SEQ ID NO: 62183 - DNA, 25 bp, Probe Sequence
ctttcccatctgtctatctatctgg

SEQ ID NO: 62184 - DNA, 25 bp, Probe Sequence
gcaaagaggttggatcaagtttaaa

SEQ ID NO: 62185 - DNA, 25 bp, Probe Sequence
attcatcggtattcatccaagttaa

SEQ ID NO: 62186 - DNA, 25 bp, Probe Sequence
atgtagataagtgttctgtctgact

SEQ ID NO: 62187 - DNA, 25 bp, Probe Sequence
atattcatcggtattcatccaagtt

SEQ ID NO: 62188 - DNA, 25 bp, Probe Sequence
caatgtagataagtgttctgtctga

SEQ ID NO: 62189 - DNA, 25 bp, Probe Sequence
aatgtagataagtgttctgtctgac

SEQ ID NO: 62190 - DNA, 25 bp, Probe Sequence
gcacaatgtagataagtgttctgtc

SEQ ID NO: 62191 - DNA, 25 bp, Probe Sequence
acaatgtagataagtgttctgtctg

SEQ ID NO: 62192 - DNA, 25 bp, Probe Sequence
tattcatcggtattcatccaagtta

SEQ ID NO: 62193 - DNA, 25 bp, Probe Sequence
attcactgtactatcaggttcacaa

SEQ ID NO: 62194 - DNA, 25 bp, Probe Sequence
aattcactgtactatcaggttcaca

SEQ ID NO: 62195 - DNA, 25 bp, Probe Sequence
ttattatgaagaaggtgaatagcca

SEQ ID NO: 62196 - DNA, 25 bp, Probe Sequence
tatattcatcggtattcatccaagt

SEQ ID NO: 62197 - DNA, 25 bp, Probe Sequence
cacaatgtagataagtgttctgtct

SEQ ID NO: 62198 - DNA, 25 bp, Probe Sequence
tattatgaagaaggtgaatagccat

SEQ ID NO: 62199 - DNA, 25 bp, Probe Sequence
aagagccactgccattaaagaatat

SEQ ID NO: 62200 - DNA, 25 bp, Probe Sequence
gatgtaatacttcttgtgtgtatgc

SEQ ID NO: 62201 - DNA, 25 bp, Probe Sequence
gccactgccattaaagaatatgaaa

SEQ ID NO: 62202 - DNA, 25 bp, Probe Sequence
tttgaagtatttaaggttcccgttg

SEQ ID NO: 62203 - DNA, 25 bp, Probe Sequence
agataattacctactctggctagaa

SEQ ID NO: 62204 - DNA, 25 bp, Probe Sequence
atcaggttcacaaacttcatttcag

SEQ ID NO: 62205 - DNA, 25 bp, Probe Sequence
agccactgccattaaagaatatgaa

SEQ ID NO: 62206 - DNA, 25 bp, Probe Sequence
caggttcacaaacttcatttcagag

SEQ ID NO: 62207 - DNA, 25 bp, Probe Sequence
aattgaatacttgaatgtgtctcac

SEQ ID NO: 62208 - DNA, 25 bp, Probe Sequence
gaagagccactgccattaaagaata

SEQ ID NO: 62209 - DNA, 25 bp, Probe Sequence
atgtccacttatgccaatgaatgta

SEQ ID NO: 62210 - DNA, 25 bp, Probe Sequence
gctctcagtatagattaccaggatg

SEQ ID NO: 62211 - DNA, 25 bp, Probe Sequence
tgctctcagtatagattaccaggat

SEQ ID NO: 62212 - DNA, 25 bp, Probe Sequence
ctcagtatagattaccaggatgtcc

SEQ ID NO: 62213 - DNA, 25 bp, Probe Sequence
cttatgccaatgaatgtactctgtg

SEQ ID NO: 62214 - DNA, 25 bp, Probe Sequence
acttatgccaatgaatgtactctgt

SEQ ID NO: 62215 - DNA, 25 bp, Probe Sequence
cacttatgccaatgaatgtactctg

SEQ ID NO: 62216 - DNA, 25 bp, Probe Sequence
tctcagtatagattaccaggatgtc

SEQ ID NO: 62217 - DNA, 25 bp, Probe Sequence
ccacttatgccaatgaatgtactct

SEQ ID NO: 62218 - DNA, 25 bp, Probe Sequence
ctctcagtatagattaccaggatgt

SEQ ID NO: 62219 - DNA, 25 bp, Probe Sequence
tccacttatgccaatgaatgtactc

SEQ ID NO: 62220 - DNA, 25 bp, Probe Sequence
gtccacttatgccaatgaatgtact

SEQ ID NO: 62221 - DNA, 25 bp, Probe Sequence
tgtccacttatgccaatgaatgtac

SEQ ID NO: 62222 - DNA, 25 bp, Probe Sequence
ctgctctcagtatagattaccagga

SEQ ID NO: 62223 - DNA, 25 bp, Probe Sequence
ttatgccaatgaatgtactctgtgc

SEQ ID NO: 62224 - DNA, 25 bp, Probe Sequence
catgtccacttatgccaatgaatgt

SEQ ID NO: 62225 - DNA, 25 bp, Probe Sequence
aaatcagggaaggtggtcataatat

SEQ ID NO: 62226 - DNA, 25 bp, Probe Sequence
ccttcactggcagactagataaatt

SEQ ID NO: 62227 - DNA, 25 bp, Probe Sequence
gtatagattaccaggatgtcccaga

SEQ ID NO: 62228 - DNA, 25 bp, Probe Sequence
agtatagattaccaggatgtcccag

SEQ ID NO: 62229 - DNA, 25 bp, Probe Sequence
tcagtatagattaccaggatgtccc

SEQ ID NO: 62230 - DNA, 25 bp, Probe Sequence
cttcactggcagactagataaattg

SEQ ID NO: 62231 - DNA, 25 bp, Probe Sequence
cagtatagattaccaggatgtccca

SEQ ID NO: 62232 - DNA, 25 bp, Probe Sequence
accttcactggcagactagataaat

SEQ ID NO: 62233 - DNA, 25 bp, Probe Sequence
tcttaaccaccagatcattccttct

SEQ ID NO: 62234 - DNA, 25 bp, Probe Sequence
attattccagggtttatgtgtcagg

SEQ ID NO: 62235 - DNA, 25 bp, Probe Sequence
cactggagagaaaggatttggttat

SEQ ID NO: 62236 - DNA, 25 bp, Probe Sequence
actggagagaaaggatttggttata

SEQ ID NO: 62237 - DNA, 25 bp, Probe Sequence
aattattccagggtttatgtgtcag

SEQ ID NO: 62238 - DNA, 25 bp, Probe Sequence
atcttaaccaccagatcattccttc

SEQ ID NO: 62239 - DNA, 25 bp, Probe Sequence
tatcttaaccaccagatcattcctt

SEQ ID NO: 62240 - DNA, 25 bp, Probe Sequence
ttatcttaaccaccagatcattcct

SEQ ID NO: 62241 - DNA, 25 bp, Probe Sequence
ctttcacagaattattccagggttt

SEQ ID NO: 62242 - DNA, 25 bp, Probe Sequence
cagtatcctagaatctttgtgctct

SEQ ID NO: 62243 - DNA, 25 bp, Probe Sequence
gagaacttcatcctaaagcatacgg

SEQ ID NO: 62244 - DNA, 25 bp, Probe Sequence
agtatcctagaatctttgtgctctc

SEQ ID NO: 62245 - DNA, 25 bp, Probe Sequence
tgagaacttcatcctaaagcatacg

SEQ ID NO: 62246 - DNA, 25 bp, Probe Sequence
ctcgcagtatcctagaatctttgtg

SEQ ID NO: 62247 - DNA, 25 bp, Probe Sequence
gaattattccagggtttatgtgtca

SEQ ID NO: 62248 - DNA, 25 bp, Probe Sequence
cagaattattccagggtttatgtgt

SEQ ID NO: 62249 - DNA, 25 bp, Probe Sequence
gtatcctagaatctttgtgctctcg

SEQ ID NO: 62250 - DNA, 25 bp, Probe Sequence
gcaaagtgaaagaaggcatgaatat

SEQ ID NO: 62251 - DNA, 25 bp, Probe Sequence
agaattattccagggtttatgtgtc

SEQ ID NO: 62252 - DNA, 25 bp, Probe Sequence
tcacagaattattccagggtttatg

SEQ ID NO: 62253 - DNA, 25 bp, Probe Sequence
gctttcacagaattattccagggtt

SEQ ID NO: 62254 - DNA, 25 bp, Probe Sequence
agagaaaggatttggttataagggt

SEQ ID NO: 62255 - DNA, 25 bp, Probe Sequence
gaaagaaggcatgaatattgtggag

SEQ ID NO: 62256 - DNA, 25 bp, Probe Sequence
agtgaaagaaggcatgaatattgtg

SEQ ID NO: 62257 - DNA, 25 bp, Probe Sequence
tatcacttcactgttctctacttgc

SEQ ID NO: 62258 - DNA, 25 bp, Probe Sequence
cctcataagtcgtcactaatacaca

SEQ ID NO: 62259 - DNA, 25 bp, Probe Sequence
tcataagtcgtcactaatacacagt

SEQ ID NO: 62260 - DNA, 25 bp, Probe Sequence
ctcataagtcgtcactaatacacag

SEQ ID NO: 62261 - DNA, 25 bp, Probe Sequence
taccacattactctgcctctgtata

SEQ ID NO: 62262 - DNA, 25 bp, Probe Sequence
atatcacttcactgttctctacttg

SEQ ID NO: 62263 - DNA, 25 bp, Probe Sequence
cttctagttaccacattactctgcc

SEQ ID NO: 62264 - DNA, 25 bp, Probe Sequence
ccttctagttaccacattactctgc

SEQ ID NO: 62265 - DNA, 25 bp, Probe Sequence
gccttctagttaccacattactctg

SEQ ID NO: 62266 - DNA, 25 bp, Probe Sequence
cataagtcgtcactaatacacagtt

SEQ ID NO: 62267 - DNA, 25 bp, Probe Sequence
accacattactctgcctctgtatat

SEQ ID NO: 62268 - DNA, 25 bp, Probe Sequence
ttctagttaccacattactctgcct

SEQ ID NO: 62269 - DNA, 25 bp, Probe Sequence
ttaccacattactctgcctctgtat

SEQ ID NO: 62270 - DNA, 25 bp, Probe Sequence
tagttaccacattactctgcctctg

SEQ ID NO: 62271 - DNA, 25 bp, Probe Sequence
ctagttaccacattactctgcctct

SEQ ID NO: 62272 - DNA, 25 bp, Probe Sequence
tctagttaccacattactctgcctc

SEQ ID NO: 62273 - DNA, 25 bp, Probe Sequence
ccacattactctgcctctgtatata

SEQ ID NO: 62274 - DNA, 25 bp, Probe Sequence
ttactctgcctctgtatataggtgg

SEQ ID NO: 62275 - DNA, 25 bp, Probe Sequence
gttaccacattactctgcctctgta

SEQ ID NO: 62276 - DNA, 25 bp, Probe Sequence
aatctctgccatatcagtgaacctt

SEQ ID NO: 62277 - DNA, 25 bp, Probe Sequence
attactctgcctctgtatataggtg

SEQ ID NO: 62278 - DNA, 25 bp, Probe Sequence
cattactctgcctctgtatataggt

SEQ ID NO: 62279 - DNA, 25 bp, Probe Sequence
acattactctgcctctgtatatagg

SEQ ID NO: 62280 - DNA, 25 bp, Probe Sequence
gccatatcagtgaacctttagaaac

SEQ ID NO: 62281 - DNA, 25 bp, Probe Sequence
ctcttcaaagaaataggagcaaacc

SEQ ID NO: 62282 - DNA, 25 bp, Probe Sequence
tcttcaaagaaataggagcaaaccc

SEQ ID NO: 62283 - DNA, 25 bp, Probe Sequence
cctcttcaaagaaataggagcaaac

SEQ ID NO: 62284 - DNA, 25 bp, Probe Sequence
acctcttcaaagaaataggagcaaa

SEQ ID NO: 62285 - DNA, 25 bp, Probe Sequence
cttcaaagaaataggagcaaacccc

SEQ ID NO: 62286 - DNA, 25 bp, Probe Sequence
agtatcataacaacacagccttcag

SEQ ID NO: 62287 - DNA, 25 bp, Probe Sequence
cagtatcataacaacacagccttca

SEQ ID NO: 62288 - DNA, 25 bp, Probe Sequence
ccagtatcataacaacacagccttc

SEQ ID NO: 62289 - DNA, 25 bp, Probe Sequence
actgaaggtagatggtgttatagtt

SEQ ID NO: 62290 - DNA, 25 bp, Probe Sequence
aactgaaggtagatggtgttatagt

SEQ ID NO: 62291 - DNA, 25 bp, Probe Sequence
tccagtatcataacaacacagcctt

SEQ ID NO: 62292 - DNA, 25 bp, Probe Sequence
gtatcataacaacacagccttcagc

SEQ ID NO: 62293 - DNA, 25 bp, Probe Sequence
ctccagtatcataacaacacagcct

SEQ ID NO: 62294 - DNA, 25 bp, Probe Sequence
tatcataacaacacagccttcagca

SEQ ID NO: 62295 - DNA, 25 bp, Probe Sequence
gatgaggacaggaagagagtgttag

SEQ ID NO: 62296 - DNA, 25 bp, Probe Sequence
ctgaaggtagatggtgttatagtta

SEQ ID NO: 62297 - DNA, 25 bp, Probe Sequence
ttgagtgttagagaaaggagtgaag

SEQ ID NO: 62298 - DNA, 25 bp, Probe Sequence
tttgagtgttagagaaaggagtgaa

SEQ ID NO: 62299 - DNA, 25 bp, Probe Sequence
atgaggacaggaagagagtgttaga

SEQ ID NO: 62300 - DNA, 25 bp, Probe Sequence
agatgaggacaggaagagagtgtta

SEQ ID NO: 62301 - DNA, 25 bp, Probe Sequence
ttagaaagggtaggactgagaaaca

SEQ ID NO: 62302 - DNA, 25 bp, Probe Sequence
tgttagaaagggtaggactgagaaa

SEQ ID NO: 62303 - DNA, 25 bp, Probe Sequence
gaagagagtgttagaaagggtagga

SEQ ID NO: 62304 - DNA, 25 bp, Probe Sequence
aggaagagagtgttagaaagggtag

SEQ ID NO: 62305 - DNA, 25 bp, Probe Sequence
tgaggacaggaagagagtgttagaa

SEQ ID NO: 62306 - DNA, 25 bp, Probe Sequence
ccaaagaaagaataagtctccaagg

SEQ ID NO: 62307 - DNA, 25 bp, Probe Sequence
aagagagtgttagaaagggtaggac

SEQ ID NO: 62308 - DNA, 25 bp, Probe Sequence
caggaagagagtgttagaaagggta

SEQ ID NO: 62309 - DNA, 25 bp, Probe Sequence
gttagaaagggtaggactgagaaac

SEQ ID NO: 62310 - DNA, 25 bp, Probe Sequence
cgtttctctttctgaactcttcttg

SEQ ID NO: 62311 - DNA, 25 bp, Probe Sequence
gtttctctttctgaactcttcttgc

SEQ ID NO: 62312 - DNA, 25 bp, Probe Sequence
tttctctttctgaactcttcttgcc

SEQ ID NO: 62313 - DNA, 25 bp, Probe Sequence
attgcgtttctctttctgaactctt

SEQ ID NO: 62314 - DNA, 25 bp, Probe Sequence
tttccattgcgtttctctttctgaa

SEQ ID NO: 62315 - DNA, 25 bp, Probe Sequence
gcgtttctctttctgaactcttctt

SEQ ID NO: 62316 - DNA, 25 bp, Probe Sequence
ttgcgtttctctttctgaactcttc

SEQ ID NO: 62317 - DNA, 25 bp, Probe Sequence
cattgcgtttctctttctgaactct

SEQ ID NO: 62318 - DNA, 25 bp, Probe Sequence
gtttccattgcgtttctctttctga

SEQ ID NO: 62319 - DNA, 25 bp, Probe Sequence
agtttccattgcgtttctctttctg

SEQ ID NO: 62320 - DNA, 25 bp, Probe Sequence
cagtttccattgcgtttctctttct

SEQ ID NO: 62321 - DNA, 25 bp, Probe Sequence
ccaccattagcttcttcctgacatt

SEQ ID NO: 62322 - DNA, 25 bp, Probe Sequence
ttccattgcgtttctctttctgaac

SEQ ID NO: 62323 - DNA, 25 bp, Probe Sequence
accattagcttcttcctgacatttc

SEQ ID NO: 62324 - DNA, 25 bp, Probe Sequence
tgcgtttctctttctgaactcttct

SEQ ID NO: 62325 - DNA, 25 bp, Probe Sequence
caccattagcttcttcctgacattt

SEQ ID NO: 62326 - DNA, 25 bp, Probe Sequence
ttctctttctgaactcttcttgccc

SEQ ID NO: 62327 - DNA, 25 bp, Probe Sequence
ccattgcgtttctctttctgaactc

SEQ ID NO: 62328 - DNA, 25 bp, Probe Sequence
ccattagcttcttcctgacatttca

SEQ ID NO: 62329 - DNA, 25 bp, Probe Sequence
ccagtttccattgcgtttctctttc

SEQ ID NO: 62330 - DNA, 25 bp, Probe Sequence
tccattgcgtttctctttctgaact

SEQ ID NO: 62331 - DNA, 25 bp, Probe Sequence
tccagtttccattgcgtttctcttt

SEQ ID NO: 62332 - DNA, 25 bp, Probe Sequence
ttccagtttccattgcgtttctctt

SEQ ID NO: 62333 - DNA, 25 bp, Probe Sequence
tttccagtttccattgcgtttctct

SEQ ID NO: 62334 - DNA, 25 bp, Probe Sequence
aagtcagttgctattatacaccacc

SEQ ID NO: 62335 - DNA, 25 bp, Probe Sequence
agtcagttgctattatacaccacct

SEQ ID NO: 62336 - DNA, 25 bp, Probe Sequence
acaagtcagttgctattatacacca

SEQ ID NO: 62337 - DNA, 25 bp, Probe Sequence
caagtcagttgctattatacaccac

SEQ ID NO: 62338 - DNA, 25 bp, Probe Sequence
cacaagtcagttgctattatacacc

SEQ ID NO: 62339 - DNA, 25 bp, Probe Sequence
tcacaagtcagttgctattatacac

SEQ ID NO: 62340 - DNA, 25 bp, Probe Sequence
aattaacttaatgtcctcgctccat

SEQ ID NO: 62341 - DNA, 25 bp, Probe Sequence
atcaattaacttaatgtcctcgctc

SEQ ID NO: 62342 - DNA, 25 bp, Probe Sequence
tcaattaacttaatgtcctcgctcc

SEQ ID NO: 62343 - DNA, 25 bp, Probe Sequence
gatcaattaacttaatgtcctcgct

SEQ ID NO: 62344 - DNA, 25 bp, Probe Sequence
caattaacttaatgtcctcgctcca

SEQ ID NO: 62345 - DNA, 25 bp, Probe Sequence
ttcacaagtcagttgctattataca

SEQ ID NO: 62346 - DNA, 25 bp, Probe Sequence
gtcagttgctattatacaccacctg

SEQ ID NO: 62347 - DNA, 25 bp, Probe Sequence
gcttaatattcacaagtcagttgct

SEQ ID NO: 62348 - DNA, 25 bp, Probe Sequence
tcagttgctattatacaccacctgt

SEQ ID NO: 62349 - DNA, 25 bp, Probe Sequence
tggcttaatattcacaagtcagttg

SEQ ID NO: 62350 - DNA, 25 bp, Probe Sequence
ggcttaatattcacaagtcagttgc

SEQ ID NO: 62351 - DNA, 25 bp, Probe Sequence
tacctaccacttcttcacatgacac

SEQ ID NO: 62352 - DNA, 25 bp, Probe Sequence
gtacctaccacttcttcacatgaca

SEQ ID NO: 62353 - DNA, 25 bp, Probe Sequence
tttcattctctttgccagtaacttg

SEQ ID NO: 62354 - DNA, 25 bp, Probe Sequence
cattctctttgccagtaacttgttt

SEQ ID NO: 62355 - DNA, 25 bp, Probe Sequence
tgatttcattctctttgccagtaac

SEQ ID NO: 62356 - DNA, 25 bp, Probe Sequence
gatttcattctctttgccagtaact

SEQ ID NO: 62357 - DNA, 25 bp, Probe Sequence
atgatggattgaaagggacttactt

SEQ ID NO: 62358 - DNA, 25 bp, Probe Sequence
acttgcttactaatgtgtgattcct

SEQ ID NO: 62359 - DNA, 25 bp, Probe Sequence
aacttgcttactaatgtgtgattcc

SEQ ID NO: 62360 - DNA, 25 bp, Probe Sequence
tgaacttgcttactaatgtgtgatt

SEQ ID NO: 62361 - DNA, 25 bp, Probe Sequence
aatgaacttgcttactaatgtgtga

SEQ ID NO: 62362 - DNA, 25 bp, Probe Sequence
atgaacttgcttactaatgtgtgat

SEQ ID NO: 62363 - DNA, 25 bp, Probe Sequence
taatgtgtgattcctagttgtagcc

SEQ ID NO: 62364 - DNA, 25 bp, Probe Sequence
cttgcttactaatgtgtgattccta

SEQ ID NO: 62365 - DNA, 25 bp, Probe Sequence
ctaatgtgtgattcctagttgtagc

SEQ ID NO: 62366 - DNA, 25 bp, Probe Sequence
gaacttgcttactaatgtgtgattc

SEQ ID NO: 62367 - DNA, 25 bp, Probe Sequence
ttgcttactaatgtgtgattcctag

SEQ ID NO: 62368 - DNA, 25 bp, Probe Sequence
aatgtgtgattcctagttgtagcca

SEQ ID NO: 62369 - DNA, 25 bp, Probe Sequence
tgcttactaatgtgtgattcctagt

SEQ ID NO: 62370 - DNA, 25 bp, Probe Sequence
ggaaatggaaatgaacttgcttact

SEQ ID NO: 62371 - DNA, 25 bp, Probe Sequence
aggaaatggaaatgaacttgcttac

SEQ ID NO: 62372 - DNA, 25 bp, Probe Sequence
caggaaatggaaatgaacttgctta

SEQ ID NO: 62373 - DNA, 25 bp, Probe Sequence
acaaagaatatccagaaggtgactc

SEQ ID NO: 62374 - DNA, 25 bp, Probe Sequence
gaatcctacgacacaaactttacaa

SEQ ID NO: 62375 - DNA, 25 bp, Probe Sequence
gaatatccagaaggtgactcaaaga

SEQ ID NO: 62376 - DNA, 25 bp, Probe Sequence
agaatatccagaaggtgactcaaag

SEQ ID NO: 62377 - DNA, 25 bp, Probe Sequence
tatccagaaggtgactcaaagaatg

SEQ ID NO: 62378 - DNA, 25 bp, Probe Sequence
caaagaatatccagaaggtgactca

SEQ ID NO: 62379 - DNA, 25 bp, Probe Sequence
aatatccagaaggtgactcaaagaa

SEQ ID NO: 62380 - DNA, 25 bp, Probe Sequence
aagaatatccagaaggtgactcaaa

SEQ ID NO: 62381 - DNA, 25 bp, Probe Sequence
aaagaatatccagaaggtgactcaa

SEQ ID NO: 62382 - DNA, 25 bp, Probe Sequence
ggtctagtgtgttcttagtggttat

SEQ ID NO: 62383 - DNA, 25 bp, Probe Sequence
agtgtgttcttagtggttatactgg

SEQ ID NO: 62384 - DNA, 25 bp, Probe Sequence
aagttcacaggcaatacattgtcta

SEQ ID NO: 62385 - DNA, 25 bp, Probe Sequence
ttcacaggcaatacattgtctagtc

SEQ ID NO: 62386 - DNA, 25 bp, Probe Sequence
agttcacaggcaatacattgtctag

SEQ ID NO: 62387 - DNA, 25 bp, Probe Sequence
gttcacaggcaatacattgtctagt

SEQ ID NO: 62388 - DNA, 25 bp, Probe Sequence
cgcctatgtatgaagctagttgatt

SEQ ID NO: 62389 - DNA, 25 bp, Probe Sequence
gaagttcacaggcaatacattgtct

SEQ ID NO: 62390 - DNA, 25 bp, Probe Sequence
tagtgtgttcttagtggttatactg

SEQ ID NO: 62391 - DNA, 25 bp, Probe Sequence
tctagtgtgttcttagtggttatac

SEQ ID NO: 62392 - DNA, 25 bp, Probe Sequence
gtctagtgtgttcttagtggttata

SEQ ID NO: 62393 - DNA, 25 bp, Probe Sequence
ctctgaagttcacaggcaatacatt

SEQ ID NO: 62394 - DNA, 25 bp, Probe Sequence
ggtctattcttcattagctcagtga

SEQ ID NO: 62395 - DNA, 25 bp, Probe Sequence
attcttcattagctcagtgacttgt

SEQ ID NO: 62396 - DNA, 25 bp, Probe Sequence
tctgaagttcacaggcaatacattg

SEQ ID NO: 62397 - DNA, 25 bp, Probe Sequence
ttcttcattagctcagtgacttgtc

SEQ ID NO: 62398 - DNA, 25 bp, Probe Sequence
aatccgcctatgtatgaagctagtt

SEQ ID NO: 62399 - DNA, 25 bp, Probe Sequence
tgaagttcacaggcaatacattgtc

SEQ ID NO: 62400 - DNA, 25 bp, Probe Sequence
tctattcttcattagctcagtgact

SEQ ID NO: 62401 - DNA, 25 bp, Probe Sequence
acaggcaatacattgtctagtcctt

SEQ ID NO: 62402 - DNA, 25 bp, Probe Sequence
tagtcctttgcgaatttctctgatt

SEQ ID NO: 62403 - DNA, 25 bp, Probe Sequence
ctgaagttcacaggcaatacattgt

SEQ ID NO: 62404 - DNA, 25 bp, Probe Sequence
ctagtgtgttcttagtggttatact

SEQ ID NO: 62405 - DNA, 25 bp, Probe Sequence
agttctctgtagatttctgaagtgc

SEQ ID NO: 62406 - DNA, 25 bp, Probe Sequence
aatgatgttgagcagaatgttgtac

SEQ ID NO: 62407 - DNA, 25 bp, Probe Sequence
attggaattgatgtcggtcatagtt

SEQ ID NO: 62408 - DNA, 25 bp, Probe Sequence
gatgttgagcagaatgttgtacttg

SEQ ID NO: 62409 - DNA, 25 bp, Probe Sequence
atgatgttgagcagaatgttgtact

SEQ ID NO: 62410 - DNA, 25 bp, Probe Sequence
atgttgagcagaatgttgtacttga

SEQ ID NO: 62411 - DNA, 25 bp, Probe Sequence
tgatgttgagcagaatgttgtactt

SEQ ID NO: 62412 - DNA, 25 bp, Probe Sequence
tgttgagcagaatgttgtacttgaa

SEQ ID NO: 62413 - DNA, 25 bp, Probe Sequence
cattggaattgatgtcggtcatagt

SEQ ID NO: 62414 - DNA, 25 bp, Probe Sequence
tataaccttgttctctgcttgacag

SEQ ID NO: 62415 - DNA, 25 bp, Probe Sequence
aatgctataagtgagatggtatgaa

SEQ ID NO: 62416 - DNA, 25 bp, Probe Sequence
ttataaccttgttctctgcttgaca

SEQ ID NO: 62417 - DNA, 25 bp, Probe Sequence
cttctctccagactatcgtaacctg

SEQ ID NO: 62418 - DNA, 25 bp, Probe Sequence
gtgtaaatgatgttgagcagaatgt

SEQ ID NO: 62419 - DNA, 25 bp, Probe Sequence
agtgtaaatgatgttgagcagaatg

SEQ ID NO: 62420 - DNA, 25 bp, Probe Sequence
ctggtaagcgatttgaaacactatt

SEQ ID NO: 62421 - DNA, 25 bp, Probe Sequence
ccttctctccagactatcgtaacct

SEQ ID NO: 62422 - DNA, 25 bp, Probe Sequence
aaatgatgttgagcagaatgttgta

SEQ ID NO: 62423 - DNA, 25 bp, Probe Sequence
taaatgatgttgagcagaatgttgt

SEQ ID NO: 62424 - DNA, 25 bp, Probe Sequence
tgtaaatgatgttgagcagaatgtt

SEQ ID NO: 62425 - DNA, 25 bp, Probe Sequence
tggtaagcgatttgaaacactattt

SEQ ID NO: 62426 - DNA, 25 bp, Probe Sequence
ctaatgagggaaatctgtaaagcca

SEQ ID NO: 62427 - DNA, 25 bp, Probe Sequence
actaatgagggaaatctgtaaagcc

SEQ ID NO: 62428 - DNA, 25 bp, Probe Sequence
gtgggagggaagatgagttatttaa

SEQ ID NO: 62429 - DNA, 25 bp, Probe Sequence
ttcctgaagcatttagttacaacct

SEQ ID NO: 62430 - DNA, 25 bp, Probe Sequence
cttagccaagtgttatccaagttaa

SEQ ID NO: 62431 - DNA, 25 bp, Probe Sequence
atagtcaagtctctgtcaagtgaac

SEQ ID NO: 62432 - DNA, 25 bp, Probe Sequence
catagtcaagtctctgtcaagtgaa

SEQ ID NO: 62433 - DNA, 25 bp, Probe Sequence
ggaatggattacatagtcaagtctc

SEQ ID NO: 62434 - DNA, 25 bp, Probe Sequence
tggagactcacagatacagagatta

SEQ ID NO: 62435 - DNA, 25 bp, Probe Sequence
ggagactcacagatacagagattag

SEQ ID NO: 62436 - DNA, 25 bp, Probe Sequence
tacatagtcaagtctctgtcaagtg

SEQ ID NO: 62437 - DNA, 25 bp, Probe Sequence
ggattacatagtcaagtctctgtca

SEQ ID NO: 62438 - DNA, 25 bp, Probe Sequence
tggattacatagtcaagtctctgtc

SEQ ID NO: 62439 - DNA, 25 bp, Probe Sequence
tcagcaagttgaataagcaagatat

SEQ ID NO: 62440 - DNA, 25 bp, Probe Sequence
ttacatagtcaagtctctgtcaagt

SEQ ID NO: 62441 - DNA, 25 bp, Probe Sequence
atggattacatagtcaagtctctgt

SEQ ID NO: 62442 - DNA, 25 bp, Probe Sequence
aatggattacatagtcaagtctctg

SEQ ID NO: 62443 - DNA, 25 bp, Probe Sequence
gagactcacagatacagagattaga

SEQ ID NO: 62444 - DNA, 25 bp, Probe Sequence
aattcaattagtctcctgctgcttg

SEQ ID NO: 62445 - DNA, 25 bp, Probe Sequence
acatagtcaagtctctgtcaagtga

SEQ ID NO: 62446 - DNA, 25 bp, Probe Sequence
gaatggattacatagtcaagtctct

SEQ ID NO: 62447 - DNA, 25 bp, Probe Sequence
ctggagactcacagatacagagatt

SEQ ID NO: 62448 - DNA, 25 bp, Probe Sequence
gatctcagtgttattacaggtgctt

SEQ ID NO: 62449 - DNA, 25 bp, Probe Sequence
atgatctcagtgttattacaggtgc

SEQ ID NO: 62450 - DNA, 25 bp, Probe Sequence
tagtcaagtctctgtcaagtgaacc

SEQ ID NO: 62451 - DNA, 25 bp, Probe Sequence
tgatgatctcagtgttattacaggt

SEQ ID NO: 62452 - DNA, 25 bp, Probe Sequence
atcctagctcagaatcttcacaatt

SEQ ID NO: 62453 - DNA, 25 bp, Probe Sequence
aatcctagctcagaatcttcacaat

SEQ ID NO: 62454 - DNA, 25 bp, Probe Sequence
aagcgaacattatatccagaatcat

SEQ ID NO: 62455 - DNA, 25 bp, Probe Sequence
caggacatgaggatataagaacagg

SEQ ID NO: 62456 - DNA, 25 bp, Probe Sequence
gacatgaggatataagaacaggcaa

SEQ ID NO: 62457 - DNA, 25 bp, Probe Sequence
tagcaggacatgaggatataagaac

SEQ ID NO: 62458 - DNA, 25 bp, Probe Sequence
gtagcaggacatgaggatataagaa

SEQ ID NO: 62459 - DNA, 25 bp, Probe Sequence
gcaggacatgaggatataagaacag

SEQ ID NO: 62460 - DNA, 25 bp, Probe Sequence
agcaggacatgaggatataagaaca

SEQ ID NO: 62461 - DNA, 25 bp, Probe Sequence
agcgaacattatatccagaatcatg

SEQ ID NO: 62462 - DNA, 25 bp, Probe Sequence
catgttgaggtcaatgtgaagatta

SEQ ID NO: 62463 - DNA, 25 bp, Probe Sequence
tcatgttgaggtcaatgtgaagatt

SEQ ID NO: 62464 - DNA, 25 bp, Probe Sequence
aggacatgaggatataagaacaggc

SEQ ID NO: 62465 - DNA, 25 bp, Probe Sequence
atgttgaggtcaatgtgaagattaa

SEQ ID NO: 62466 - DNA, 25 bp, Probe Sequence
tgtagcaggacatgaggatataaga

SEQ ID NO: 62467 - DNA, 25 bp, Probe Sequence
ttgtagcaggacatgaggatataag

SEQ ID NO: 62468 - DNA, 25 bp, Probe Sequence
cttgtagcaggacatgaggatataa

SEQ ID NO: 62469 - DNA, 25 bp, Probe Sequence
ggacatgaggatataagaacaggca

SEQ ID NO: 62470 - DNA, 25 bp, Probe Sequence
atgaggatataagaacaggcaaact

SEQ ID NO: 62471 - DNA, 25 bp, Probe Sequence
tgaggatataagaacaggcaaacta

SEQ ID NO: 62472 - DNA, 25 bp, Probe Sequence
ccttgtagcaggacatgaggatata

SEQ ID NO: 62473 - DNA, 25 bp, Probe Sequence
gcgaacattatatccagaatcatgg

SEQ ID NO: 62474 - DNA, 25 bp, Probe Sequence
ctcaggtaaatgcgaatgtaaggaa

SEQ ID NO: 62475 - DNA, 25 bp, Probe Sequence
cttctacactcaggtaaatgcgaat

SEQ ID NO: 62476 - DNA, 25 bp, Probe Sequence
tcaggtaaatgcgaatgtaaggaac

SEQ ID NO: 62477 - DNA, 25 bp, Probe Sequence
aaagcgaacattatatccagaatca

SEQ ID NO: 62478 - DNA, 25 bp, Probe Sequence
gctctgctatgactataagtttgac

SEQ ID NO: 62479 - DNA, 25 bp, Probe Sequence
caaggtatatcaaccattcgtgtgc

SEQ ID NO: 62480 - DNA, 25 bp, Probe Sequence
gcaaggtatatcaaccattcgtgtg

SEQ ID NO: 62481 - DNA, 25 bp, Probe Sequence
gaggttaaacggaatcacagaatgg

SEQ ID NO: 62482 - DNA, 25 bp, Probe Sequence
ttgaagatgaccagcacaagattcc

SEQ ID NO: 62483 - DNA, 25 bp, Probe Sequence
attgagtacatcgggactatcattc

SEQ ID NO: 62484 - DNA, 25 bp, Probe Sequence
cattgagtacatcgggactatcatt

SEQ ID NO: 62485 - DNA, 25 bp, Probe Sequence
tttgaagatgaccagcacaagattc

SEQ ID NO: 62486 - DNA, 25 bp, Probe Sequence
ctttgaagatgaccagcacaagatt

SEQ ID NO: 62487 - DNA, 25 bp, Probe Sequence
ggttaaacggaatcacagaatggtc

SEQ ID NO: 62488 - DNA, 25 bp, Probe Sequence
tcattgagtacatcgggactatcat

SEQ ID NO: 62489 - DNA, 25 bp, Probe Sequence
cgaggttaaacggaatcacagaatg

SEQ ID NO: 62490 - DNA, 25 bp, Probe Sequence
tgatttcctcagtcctttaggttaa

SEQ ID NO: 62491 - DNA, 25 bp, Probe Sequence
aggttaaacggaatcacagaatggt

SEQ ID NO: 62492 - DNA, 25 bp, Probe Sequence
ctctgctatgactataagtttgact

SEQ ID NO: 62493 - DNA, 25 bp, Probe Sequence
gatttcctcagtcctttaggttaaa

SEQ ID NO: 62494 - DNA, 25 bp, Probe Sequence
gtttgactttgaagatgaccagcac

SEQ ID NO: 62495 - DNA, 25 bp, Probe Sequence
ttgagtacatcgggactatcattcg

SEQ ID NO: 62496 - DNA, 25 bp, Probe Sequence
actttgaagatgaccagcacaagat

SEQ ID NO: 62497 - DNA, 25 bp, Probe Sequence
gtcattgagtacatcgggactatca

SEQ ID NO: 62498 - DNA, 25 bp, Probe Sequence
ctaattgtgtggctgaagtggtgac

SEQ ID NO: 62499 - DNA, 25 bp, Probe Sequence
tttgactttgaagatgaccagcaca

SEQ ID NO: 62500 - DNA, 25 bp, Probe Sequence
agtttgactttgaagatgaccagca

SEQ ID NO: 62501 - DNA, 25 bp, Probe Sequence
aaacgaagtagccaacaggaaagag

SEQ ID NO: 62502 - DNA, 25 bp, Probe Sequence
gggcagcagatcttctttataacta

SEQ ID NO: 62503 - DNA, 25 bp, Probe Sequence
tagggcagcagatcttctttataac

SEQ ID NO: 62504 - DNA, 25 bp, Probe Sequence
gtagggcagcagatcttctttataa

SEQ ID NO: 62505 - DNA, 25 bp, Probe Sequence
ggcagcagatcttctttataactat

SEQ ID NO: 62506 - DNA, 25 bp, Probe Sequence
agggcagcagatcttctttataact

SEQ ID NO: 62507 - DNA, 25 bp, Probe Sequence
ggtagggcagcagatcttctttata

SEQ ID NO: 62508 - DNA, 25 bp, Probe Sequence
cgaatcacttttaggatgtaacttt

SEQ ID NO: 62509 - DNA, 25 bp, Probe Sequence
catggcagtgatgaaaacctaacag

SEQ ID NO: 62510 - DNA, 25 bp, Probe Sequence
tcgaatcacttttaggatgtaactt

SEQ ID NO: 62511 - DNA, 25 bp, Probe Sequence
gcagcagatcttctttataactatt

SEQ ID NO: 62512 - DNA, 25 bp, Probe Sequence
atggcagtgatgaaaacctaacagg

SEQ ID NO: 62513 - DNA, 25 bp, Probe Sequence
gggtagggcagcagatcttctttat

SEQ ID NO: 62514 - DNA, 25 bp, Probe Sequence
gtcatggcagtgatgaaaacctaac

SEQ ID NO: 62515 - DNA, 25 bp, Probe Sequence
cagtgatgaaaacctaacagggtgg

SEQ ID NO: 62516 - DNA, 25 bp, Probe Sequence
tcatggcagtgatgaaaacctaaca

SEQ ID NO: 62517 - DNA, 25 bp, Probe Sequence
attgttcgaatcacttttaggatgt

SEQ ID NO: 62518 - DNA, 25 bp, Probe Sequence
tgttcgaatcacttttaggatgtaa

SEQ ID NO: 62519 - DNA, 25 bp, Probe Sequence
ttgttcgaatcacttttaggatgta

SEQ ID NO: 62520 - DNA, 25 bp, Probe Sequence
taactttataaataaacatgagcgc

SEQ ID NO: 62521 - DNA, 25 bp, Probe Sequence
ccagatcctctgctgactccatatg

SEQ ID NO: 62522 - DNA, 25 bp, Probe Sequence
ttcgaatcacttttaggatgtaact

SEQ ID NO: 62523 - DNA, 25 bp, Probe Sequence
gttcgaatcacttttaggatgtaac

SEQ ID NO: 62524 - DNA, 25 bp, Probe Sequence
gcagtgatgaaaacctaacagggtg

SEQ ID NO: 62525 - DNA, 25 bp, Probe Sequence
gaatcacttttaggatgtaacttta

SEQ ID NO: 62526 - DNA, 25 bp, Probe Sequence
tgaagtccatcaggttttctgtgca

SEQ ID NO: 62527 - DNA, 25 bp, Probe Sequence
ctgaagtccatcaggttttctgtgc

SEQ ID NO: 62528 - DNA, 25 bp, Probe Sequence
ttaggcttgaatatgatgctgaaca

SEQ ID NO: 62529 - DNA, 25 bp, Probe Sequence
gcttgaatatgatgctgaacagtaa

SEQ ID NO: 62530 - DNA, 25 bp, Probe Sequence
taggcttgaatatgatgctgaacag

SEQ ID NO: 62531 - DNA, 25 bp, Probe Sequence
gagtggagttgaggactattagaac

SEQ ID NO: 62532 - DNA, 25 bp, Probe Sequence
ggcttgaatatgatgctgaacagta

SEQ ID NO: 62533 - DNA, 25 bp, Probe Sequence
ttgaatatgatgctgaacagtaagt

SEQ ID NO: 62534 - DNA, 25 bp, Probe Sequence
ggagtggagttgaggactattagaa

SEQ ID NO: 62535 - DNA, 25 bp, Probe Sequence
tcatccttaattccaagtgaagcag

SEQ ID NO: 62536 - DNA, 25 bp, Probe Sequence
ccaattcatccttaattccaagtga

SEQ ID NO: 62537 - DNA, 25 bp, Probe Sequence
tgaatatgatgctgaacagtaagtt

SEQ ID NO: 62538 - DNA, 25 bp, Probe Sequence
gaaggtgaagaggttataggtggtc

SEQ ID NO: 62539 - DNA, 25 bp, Probe Sequence
cagaaggtgaagaggttataggtgg

SEQ ID NO: 62540 - DNA, 25 bp, Probe Sequence
gtaggtaataaggtgtccagcagag

SEQ ID NO: 62541 - DNA, 25 bp, Probe Sequence
ctggagtggagttgaggactattag

SEQ ID NO: 62542 - DNA, 25 bp, Probe Sequence
atcaggtgctagacatggttagaat

SEQ ID NO: 62543 - DNA, 25 bp, Probe Sequence
cttgaatatgatgctgaacagtaag

SEQ ID NO: 62544 - DNA, 25 bp, Probe Sequence
agaaggtgaagaggttataggtggt

SEQ ID NO: 62545 - DNA, 25 bp, Probe Sequence
agaggatgaaggtcagcaagataag

SEQ ID NO: 62546 - DNA, 25 bp, Probe Sequence
cagcagaaggtgaagaggttatagg

SEQ ID NO: 62547 - DNA, 25 bp, Probe Sequence
agtaggtaataaggtgtccagcaga

SEQ ID NO: 62548 - DNA, 25 bp, Probe Sequence
cagtaggtaataaggtgtccagcag

SEQ ID NO: 62549 - DNA, 25 bp, Probe Sequence
tggagtggagttgaggactattaga

SEQ ID NO: 62550 - DNA, 25 bp, Probe Sequence
aaggtgaagaggttataggtggtct

SEQ ID NO: 62551 - DNA, 25 bp, Probe Sequence
tcaggtgctagacatggttagaatc

SEQ ID NO: 62552 - DNA, 25 bp, Probe Sequence
aagattgtgacctagtagacttgga

SEQ ID NO: 62553 - DNA, 25 bp, Probe Sequence
agattgtgacctagtagacttggac

SEQ ID NO: 62554 - DNA, 25 bp, Probe Sequence
gcgtatattatactgcctcttaggt

SEQ ID NO: 62555 - DNA, 25 bp, Probe Sequence
tgcgtatattatactgcctcttagg

SEQ ID NO: 62556 - DNA, 25 bp, Probe Sequence
tatactgcctcttaggtgtactctt

SEQ ID NO: 62557 - DNA, 25 bp, Probe Sequence
ttatactgcctcttaggtgtactct

SEQ ID NO: 62558 - DNA, 25 bp, Probe Sequence
agtgcgtatattatactgcctctta

SEQ ID NO: 62559 - DNA, 25 bp, Probe Sequence
tagtgcgtatattatactgcctctt

SEQ ID NO: 62560 - DNA, 25 bp, Probe Sequence
ttagtgcgtatattatactgcctct

SEQ ID NO: 62561 - DNA, 25 bp, Probe Sequence
attatactgcctcttaggtgtactc

SEQ ID NO: 62562 - DNA, 25 bp, Probe Sequence
gattgtgacctagtagacttggacg

SEQ ID NO: 62563 - DNA, 25 bp, Probe Sequence
gtgcgtatattatactgcctcttag

SEQ ID NO: 62564 - DNA, 25 bp, Probe Sequence
ttgtgacctagtagacttggacgat

SEQ ID NO: 62565 - DNA, 25 bp, Probe Sequence
attgtgacctagtagacttggacga

SEQ ID NO: 62566 - DNA, 25 bp, Probe Sequence
cgtatattatactgcctcttaggtg

SEQ ID NO: 62567 - DNA, 25 bp, Probe Sequence
aaagattgtgacctagtagacttgg

SEQ ID NO: 62568 - DNA, 25 bp, Probe Sequence
tattatactgcctcttaggtgtact

SEQ ID NO: 62569 - DNA, 25 bp, Probe Sequence
ctgaagagatgcacagttggattaa

SEQ ID NO: 62570 - DNA, 25 bp, Probe Sequence
caacctctttgaaattgtaacaacg

SEQ ID NO: 62571 - DNA, 25 bp, Probe Sequence
tgtgacctagtagacttggacgatg

SEQ ID NO: 62572 - DNA, 25 bp, Probe Sequence
gtatattatactgcctcttaggtgt

SEQ ID NO: 62573 - DNA, 25 bp, Probe Sequence
atattatactgcctcttaggtgtac

SEQ ID NO: 62574 - DNA, 25 bp, Probe Sequence
agctctgttaagacctcaaagtaaa

SEQ ID NO: 62575 - DNA, 25 bp, Probe Sequence
aagctctgttaagacctcaaagtaa

SEQ ID NO: 62576 - DNA, 25 bp, Probe Sequence
gcaagaatgagacctaccagtatta

SEQ ID NO: 62577 - DNA, 25 bp, Probe Sequence
ggcaagaatgagacctaccagtatt

SEQ ID NO: 62578 - DNA, 25 bp, Probe Sequence
aagaatgagacctaccagtattatg

SEQ ID NO: 62579 - DNA, 25 bp, Probe Sequence
caagaatgagacctaccagtattat

SEQ ID NO: 62580 - DNA, 25 bp, Probe Sequence
gaatgagacctaccagtattatggc

SEQ ID NO: 62581 - DNA, 25 bp, Probe Sequence
atgagacctaccagtattatggctt

SEQ ID NO: 62582 - DNA, 25 bp, Probe Sequence
aatgagacctaccagtattatggct

SEQ ID NO: 62583 - DNA, 25 bp, Probe Sequence
agaatgagacctaccagtattatgg

SEQ ID NO: 62584 - DNA, 25 bp, Probe Sequence
agacctaccagtattatggcttctc

SEQ ID NO: 62585 - DNA, 25 bp, Probe Sequence
gagacctaccagtattatggcttct

SEQ ID NO: 62586 - DNA, 25 bp, Probe Sequence
taccagtattatggcttctcgcata

SEQ ID NO: 62587 - DNA, 25 bp, Probe Sequence
tgagacctaccagtattatggcttc

SEQ ID NO: 62588 - DNA, 25 bp, Probe Sequence
ctaccagtattatggcttctcgcat

SEQ ID NO: 62589 - DNA, 25 bp, Probe Sequence
gacctaccagtattatggcttctcg

SEQ ID NO: 62590 - DNA, 25 bp, Probe Sequence
accagtattatggcttctcgcatac

SEQ ID NO: 62591 - DNA, 25 bp, Probe Sequence
ccagtattatggcttctcgcatacc

SEQ ID NO: 62592 - DNA, 25 bp, Probe Sequence
cagtattatggcttctcgcataccg

SEQ ID NO: 62593 - DNA, 25 bp, Probe Sequence
cttctctgcccactcatttctagtc

SEQ ID NO: 62594 - DNA, 25 bp, Probe Sequence
gtattatggcttctcgcataccgtg

SEQ ID NO: 62595 - DNA, 25 bp, Probe Sequence
agtattatggcttctcgcataccgt

SEQ ID NO: 62596 - DNA, 25 bp, Probe Sequence
gggcaagaatgagacctaccagtat

SEQ ID NO: 62597 - DNA, 25 bp, Probe Sequence
gtggaactgaacaagaactcgaacc

SEQ ID NO: 62598 - DNA, 25 bp, Probe Sequence
ggtggaactgaacaagaactcgaac

SEQ ID NO: 62599 - DNA, 25 bp, Probe Sequence
cctaccagtattatggcttctcgca

SEQ ID NO: 62600 - DNA, 25 bp, Probe Sequence
tgactcagcaagaataggatggatg

SEQ ID NO: 62601 - DNA, 25 bp, Probe Sequence
gtgactcagcaagaataggatggat

SEQ ID NO: 62602 - DNA, 25 bp, Probe Sequence
gactcagcaagaataggatggatgg

SEQ ID NO: 62603 - DNA, 25 bp, Probe Sequence
cctaaatctttggaaacatctgctt

SEQ ID NO: 62604 - DNA, 25 bp, Probe Sequence
gaccctaaatctttggaaacatctg

SEQ ID NO: 62605 - DNA, 25 bp, Probe Sequence
tgaccctaaatctttggaaacatct

SEQ ID NO: 62606 - DNA, 25 bp, Probe Sequence
gtgaccctaaatctttggaaacatc

SEQ ID NO: 62607 - DNA, 25 bp, Probe Sequence
tacagtgaccctaaatctttggaaa

SEQ ID NO: 62608 - DNA, 25 bp, Probe Sequence
agtgaccctaaatctttggaaacat

SEQ ID NO: 62609 - DNA, 25 bp, Probe Sequence
tctgaagatgatgagactggtgact

SEQ ID NO: 62610 - DNA, 25 bp, Probe Sequence
ctgaagatgatgagactggtgactc

SEQ ID NO: 62611 - DNA, 25 bp, Probe Sequence
ctctgaagatgatgagactggtgac

SEQ ID NO: 62612 - DNA, 25 bp, Probe Sequence
cagtgaccctaaatctttggaaaca

SEQ ID NO: 62613 - DNA, 25 bp, Probe Sequence
acagtgaccctaaatctttggaaac

SEQ ID NO: 62614 - DNA, 25 bp, Probe Sequence
ccctaaatctttggaaacatctgct

SEQ ID NO: 62615 - DNA, 25 bp, Probe Sequence
aagcactgttaccaatttagcatat

SEQ ID NO: 62616 - DNA, 25 bp, Probe Sequence
acccaaagagtaaatcaacatctgt

SEQ ID NO: 62617 - DNA, 25 bp, Probe Sequence
accctaaatctttggaaacatctgc

SEQ ID NO: 62618 - DNA, 25 bp, Probe Sequence
tacccaaagagtaaatcaacatctg

SEQ ID NO: 62619 - DNA, 25 bp, Probe Sequence
gtacagtgaccctaaatctttggaa

SEQ ID NO: 62620 - DNA, 25 bp, Probe Sequence
taagcactgttaccaatttagcata

SEQ ID NO: 62621 - DNA, 25 bp, Probe Sequence
ctaaatctttggaaacatctgcttt

SEQ ID NO: 62622 - DNA, 25 bp, Probe Sequence
cccaaagagtaaatcaacatctgta

SEQ ID NO: 62623 - DNA, 25 bp, Probe Sequence
gagactggtgactcagcaagaatag

SEQ ID NO: 62624 - DNA, 25 bp, Probe Sequence
cacacaagaacaaacgctaactaat

SEQ ID NO: 62625 - DNA, 25 bp, Probe Sequence
ctcactgtactctagtcctgacttg

SEQ ID NO: 62626 - DNA, 25 bp, Probe Sequence
tctcactgtactctagtcctgactt

SEQ ID NO: 62627 - DNA, 25 bp, Probe Sequence
ttcacagacatttccatatacctca

SEQ ID NO: 62628 - DNA, 25 bp, Probe Sequence
tcacagacatttccatatacctcat

SEQ ID NO: 62629 - DNA, 25 bp, Probe Sequence
acacaagaacaaacgctaactaata

SEQ ID NO: 62630 - DNA, 25 bp, Probe Sequence
ctctcactgtactctagtcctgact

SEQ ID NO: 62631 - DNA, 25 bp, Probe Sequence
ttctgtgaattgttgtttctgtgtg

SEQ ID NO: 62632 - DNA, 25 bp, Probe Sequence
ggttctttcacagacatttccatat

SEQ ID NO: 62633 - DNA, 25 bp, Probe Sequence
tttcacagacatttccatatacctc

SEQ ID NO: 62634 - DNA, 25 bp, Probe Sequence
ctttcacagacatttccatatacct

SEQ ID NO: 62635 - DNA, 25 bp, Probe Sequence
tgaattgttgtttctgtgtgttgtc

SEQ ID NO: 62636 - DNA, 25 bp, Probe Sequence
ctgtgaattgttgtttctgtgtgtt

SEQ ID NO: 62637 - DNA, 25 bp, Probe Sequence
gtgaattgttgtttctgtgtgttgt

SEQ ID NO: 62638 - DNA, 25 bp, Probe Sequence
tgtgaattgttgtttctgtgtgttg

SEQ ID NO: 62639 - DNA, 25 bp, Probe Sequence
ttgtccagcgtattcattcactcac

SEQ ID NO: 62640 - DNA, 25 bp, Probe Sequence
gttgtccagcgtattcattcactca

SEQ ID NO: 62641 - DNA, 25 bp, Probe Sequence
tgttgtccagcgtattcattcactc

SEQ ID NO: 62642 - DNA, 25 bp, Probe Sequence
tctttcacagacatttccatatacc

SEQ ID NO: 62643 - DNA, 25 bp, Probe Sequence
gaattgttgtttctgtgtgttgtcc

SEQ ID NO: 62644 - DNA, 25 bp, Probe Sequence
tctgtgaattgttgtttctgtgtgt

SEQ ID NO: 62645 - DNA, 25 bp, Probe Sequence
cagcgtattcattcactcactcgtt

SEQ ID NO: 62646 - DNA, 25 bp, Probe Sequence
gtccagcgtattcattcactcactc

SEQ ID NO: 62647 - DNA, 25 bp, Probe Sequence
ccacacaagaacaaacgctaactaa

SEQ ID NO: 62648 - DNA, 25 bp, Probe Sequence
ccctatttaaaccactctgtctccc

SEQ ID NO: 62649 - DNA, 25 bp, Probe Sequence
tcccctatttaaaccactctgtctc

SEQ ID NO: 62650 - DNA, 25 bp, Probe Sequence
ctcccctatttaaaccactctgtct

SEQ ID NO: 62651 - DNA, 25 bp, Probe Sequence
gaacttcccctcctcccctatttaa

SEQ ID NO: 62652 - DNA, 25 bp, Probe Sequence
ctcctcccctatttaaaccactctg

SEQ ID NO: 62653 - DNA, 25 bp, Probe Sequence
cctatttaaaccactctgtctcccc

SEQ ID NO: 62654 - DNA, 25 bp, Probe Sequence
cccctatttaaaccactctgtctcc

SEQ ID NO: 62655 - DNA, 25 bp, Probe Sequence
cctcccctatttaaaccactctgtc

SEQ ID NO: 62656 - DNA, 25 bp, Probe Sequence
aacttcccctcctcccctatttaaa

SEQ ID NO: 62657 - DNA, 25 bp, Probe Sequence
tcctcccctatttaaaccactctgt

SEQ ID NO: 62658 - DNA, 25 bp, Probe Sequence
cctcctcccctatttaaaccactct

SEQ ID NO: 62659 - DNA, 25 bp, Probe Sequence
acttcccctcctcccctatttaaac

SEQ ID NO: 62660 - DNA, 25 bp, Probe Sequence
ccctcctcccctatttaaaccactc

SEQ ID NO: 62661 - DNA, 25 bp, Probe Sequence
cttcccctcctcccctatttaaacc

SEQ ID NO: 62662 - DNA, 25 bp, Probe Sequence
cgaacttcccctcctcccctattta

SEQ ID NO: 62663 - DNA, 25 bp, Probe Sequence
ttcccctcctcccctatttaaacca

SEQ ID NO: 62664 - DNA, 25 bp, Probe Sequence
cccctcctcccctatttaaaccact

SEQ ID NO: 62665 - DNA, 25 bp, Probe Sequence
tcccctcctcccctatttaaaccac

SEQ ID NO: 62666 - DNA, 25 bp, Probe Sequence
agcacactctaacttacaggattat

SEQ ID NO: 62667 - DNA, 25 bp, Probe Sequence
gcacactctaacttacaggattatc

SEQ ID NO: 62668 - DNA, 25 bp, Probe Sequence
aagcacactctaacttacaggatta

SEQ ID NO: 62669 - DNA, 25 bp, Probe Sequence
gttagcacagaggacttattcaacc

SEQ ID NO: 62670 - DNA, 25 bp, Probe Sequence
atgttagcacagaggacttattcaa

SEQ ID NO: 62671 - DNA, 25 bp, Probe Sequence
aatgttagcacagaggacttattca

SEQ ID NO: 62672 - DNA, 25 bp, Probe Sequence
tgttagcacagaggacttattcaac

SEQ ID NO: 62673 - DNA, 25 bp, Probe Sequence
tggaataagcacactctaacttaca

SEQ ID NO: 62674 - DNA, 25 bp, Probe Sequence
cacactctaacttacaggattatca

SEQ ID NO: 62675 - DNA, 25 bp, Probe Sequence
taagcacactctaacttacaggatt

SEQ ID NO: 62676 - DNA, 25 bp, Probe Sequence
aataagcacactctaacttacagga

SEQ ID NO: 62677 - DNA, 25 bp, Probe Sequence
ataagcacactctaacttacaggat

SEQ ID NO: 62678 - DNA, 25 bp, Probe Sequence
gaataagcacactctaacttacagg

SEQ ID NO: 62679 - DNA, 25 bp, Probe Sequence
ggaataagcacactctaacttacag

SEQ ID NO: 62680 - DNA, 25 bp, Probe Sequence
ccttaatgttagcacagaggactta

SEQ ID NO: 62681 - DNA, 25 bp, Probe Sequence
ataccttaatgttagcacagaggac

SEQ ID NO: 62682 - DNA, 25 bp, Probe Sequence
cataccttaatgttagcacagagga

SEQ ID NO: 62683 - DNA, 25 bp, Probe Sequence
gtggaataagcacactctaacttac

SEQ ID NO: 62684 - DNA, 25 bp, Probe Sequence
taccttaatgttagcacagaggact

SEQ ID NO: 62685 - DNA, 25 bp, Probe Sequence
actggatataatctgttcctggttg

SEQ ID NO: 62686 - DNA, 25 bp, Probe Sequence
cactggatataatctgttcctggtt

SEQ ID NO: 62687 - DNA, 25 bp, Probe Sequence
taatgttagcacagaggacttattc

SEQ ID NO: 62688 - DNA, 25 bp, Probe Sequence
cttaatgttagcacagaggacttat

SEQ ID NO: 62689 - DNA, 25 bp, Probe Sequence
agacactggatataatctgttcctg

SEQ ID NO: 62690 - DNA, 25 bp, Probe Sequence
tatatcattggagcaagtgttggat

SEQ ID NO: 62691 - DNA, 25 bp, Probe Sequence
atatggatggatcacttgtaaggac

SEQ ID NO: 62692 - DNA, 25 bp, Probe Sequence
tggaatatggatggatcacttgtaa

SEQ ID NO: 62693 - DNA, 25 bp, Probe Sequence
tggatcttgtatggaatatggatgg

SEQ ID NO: 62694 - DNA, 25 bp, Probe Sequence
tgttggatcttgtatggaatatgga

SEQ ID NO: 62695 - DNA, 25 bp, Probe Sequence
gtgttggatcttgtatggaatatgg

SEQ ID NO: 62696 - DNA, 25 bp, Probe Sequence
ggatcttgtatggaatatggatgga

SEQ ID NO: 62697 - DNA, 25 bp, Probe Sequence
atggaatatggatggatcacttgta

SEQ ID NO: 62698 - DNA, 25 bp, Probe Sequence
tatggaatatggatggatcacttgt

SEQ ID NO: 62699 - DNA, 25 bp, Probe Sequence
tgtatggaatatggatggatcactt

SEQ ID NO: 62700 - DNA, 25 bp, Probe Sequence
ttgtatggaatatggatggatcact

SEQ ID NO: 62701 - DNA, 25 bp, Probe Sequence
aatatggatggatcacttgtaagga

SEQ ID NO: 62702 - DNA, 25 bp, Probe Sequence
ttctactgttctctaactgtggagt

SEQ ID NO: 62703 - DNA, 25 bp, Probe Sequence
gtatggaatatggatggatcacttg

SEQ ID NO: 62704 - DNA, 25 bp, Probe Sequence
cttgtatggaatatggatggatcac

SEQ ID NO: 62705 - DNA, 25 bp, Probe Sequence
tactgttctctaactgtggagtgaa

SEQ ID NO: 62706 - DNA, 25 bp, Probe Sequence
gaatatggatggatcacttgtaagg

SEQ ID NO: 62707 - DNA, 25 bp, Probe Sequence
ggaatatggatggatcacttgtaag

SEQ ID NO: 62708 - DNA, 25 bp, Probe Sequence
tcttgtatggaatatggatggatca

SEQ ID NO: 62709 - DNA, 25 bp, Probe Sequence
ctgttctctaactgtggagtgaatg

SEQ ID NO: 62710 - DNA, 25 bp, Probe Sequence
atatatcattggagcaagtgttgga

SEQ ID NO: 62711 - DNA, 25 bp, Probe Sequence
ctactgttctctaactgtggagtga

SEQ ID NO: 62712 - DNA, 25 bp, Probe Sequence
tctactgttctctaactgtggagtg

SEQ ID NO: 62713 - DNA, 25 bp, Probe Sequence
ttcttcacagtaactcagttcaagt

SEQ ID NO: 62714 - DNA, 25 bp, Probe Sequence
agttgctaacatcatcttccttatt

SEQ ID NO: 62715 - DNA, 25 bp, Probe Sequence
aagttgctaacatcatcttccttat

SEQ ID NO: 62716 - DNA, 25 bp, Probe Sequence
gagagttcctgacagcatagcatac

SEQ ID NO: 62717 - DNA, 25 bp, Probe Sequence
cttccagaatacaaactactcccag

SEQ ID NO: 62718 - DNA, 25 bp, Probe Sequence
caaagttgctaacatcatcttcctt

SEQ ID NO: 62719 - DNA, 25 bp, Probe Sequence
ctcaaagttgctaacatcatcttcc

SEQ ID NO: 62720 - DNA, 25 bp, Probe Sequence
tcaaagttgctaacatcatcttcct

SEQ ID NO: 62721 - DNA, 25 bp, Probe Sequence
gtcttccagaatacaaactactccc

SEQ ID NO: 62722 - DNA, 25 bp, Probe Sequence
tcttccagaatacaaactactccca

SEQ ID NO: 62723 - DNA, 25 bp, Probe Sequence
agtcttccagaatacaaactactcc

SEQ ID NO: 62724 - DNA, 25 bp, Probe Sequence
actcaaagttgctaacatcatcttc

SEQ ID NO: 62725 - DNA, 25 bp, Probe Sequence
ttaacaccatatatttccctcccag

SEQ ID NO: 62726 - DNA, 25 bp, Probe Sequence
atttatcacaggactttaacaccat

SEQ ID NO: 62727 - DNA, 25 bp, Probe Sequence
tttaacaccatatatttccctccca

SEQ ID NO: 62728 - DNA, 25 bp, Probe Sequence
taacaccatatatttccctcccagt

SEQ ID NO: 62729 - DNA, 25 bp, Probe Sequence
ttccagaatacaaactactcccagt

SEQ ID NO: 62730 - DNA, 25 bp, Probe Sequence
agagttcctgacagcatagcatact

SEQ ID NO: 62731 - DNA, 25 bp, Probe Sequence
aaagttgctaacatcatcttcctta

SEQ ID NO: 62732 - DNA, 25 bp, Probe Sequence
ctttaacaccatatatttccctccc

SEQ ID NO: 62733 - DNA, 25 bp, Probe Sequence
acaccatatatttccctcccagttt

SEQ ID NO: 62734 - DNA, 25 bp, Probe Sequence
tttatcacaggactttaacaccata

SEQ ID NO: 62735 - DNA, 25 bp, Probe Sequence
tatttatcacaggactttaacacca

SEQ ID NO: 62736 - DNA, 25 bp, Probe Sequence
gcaaacaaattggtgatacttctaa

SEQ ID NO: 62737 - DNA, 25 bp, Probe Sequence
aagtcttccagaatacaaactactc

SEQ ID NO: 62738 - DNA, 25 bp, Probe Sequence
taggattaaggaagactctgaggaa

SEQ ID NO: 62739 - DNA, 25 bp, Probe Sequence
ataggattaaggaagactctgagga

SEQ ID NO: 62740 - DNA, 25 bp, Probe Sequence
cataggattaaggaagactctgagg

SEQ ID NO: 62741 - DNA, 25 bp, Probe Sequence
ccataggattaaggaagactctgag

SEQ ID NO: 62742 - DNA, 25 bp, Probe Sequence
cattacagagtatcaccttgagaca

SEQ ID NO: 62743 - DNA, 25 bp, Probe Sequence
ctactgcctgattcattcaacatac

SEQ ID NO: 62744 - DNA, 25 bp, Probe Sequence
tctactgcctgattcattcaacata

SEQ ID NO: 62745 - DNA, 25 bp, Probe Sequence
tacagagtatcaccttgagacagaa

SEQ ID NO: 62746 - DNA, 25 bp, Probe Sequence
ttacagagtatcaccttgagacaga

SEQ ID NO: 62747 - DNA, 25 bp, Probe Sequence
attacagagtatcaccttgagacag

SEQ ID NO: 62748 - DNA, 25 bp, Probe Sequence
tactgcctgattcattcaacatacc

SEQ ID NO: 62749 - DNA, 25 bp, Probe Sequence
gcattacagagtatcaccttgagac

SEQ ID NO: 62750 - DNA, 25 bp, Probe Sequence
agagtatcaccttgagacagaacaa

SEQ ID NO: 62751 - DNA, 25 bp, Probe Sequence
gtctactgcctgattcattcaacat

SEQ ID NO: 62752 - DNA, 25 bp, Probe Sequence
cagagtatcaccttgagacagaaca

SEQ ID NO: 62753 - DNA, 25 bp, Probe Sequence
acagagtatcaccttgagacagaac

SEQ ID NO: 62754 - DNA, 25 bp, Probe Sequence
ctgtctactgcctgattcattcaac

SEQ ID NO: 62755 - DNA, 25 bp, Probe Sequence
ggcattacagagtatcaccttgaga

SEQ ID NO: 62756 - DNA, 25 bp, Probe Sequence
tccataggattaaggaagactctga

SEQ ID NO: 62757 - DNA, 25 bp, Probe Sequence
gcttcttgttccataggattaagga

SEQ ID NO: 62758 - DNA, 25 bp, Probe Sequence
ctcctatatcctgtagtctatctga

SEQ ID NO: 62759 - DNA, 25 bp, Probe Sequence
tctcctatatcctgtagtctatctg

SEQ ID NO: 62760 - DNA, 25 bp, Probe Sequence
ctcctgtctactgcctgattcattc

SEQ ID NO: 62761 - DNA, 25 bp, Probe Sequence
ctgcctgattcattcaacataccag

SEQ ID NO: 62762 - DNA, 25 bp, Probe Sequence
ttaataatgatggaaggaagactgg

SEQ ID NO: 62763 - DNA, 25 bp, Probe Sequence
taataatgatggaaggaagactggg

SEQ ID NO: 62764 - DNA, 25 bp, Probe Sequence
ataatgatggaaggaagactgggtt

SEQ ID NO: 62765 - DNA, 25 bp, Probe Sequence
aataatgatggaaggaagactgggt

SEQ ID NO: 62766 - DNA, 25 bp, Probe Sequence
taatgatggaaggaagactgggttg

SEQ ID NO: 62767 - DNA, 25 bp, Probe Sequence
tttatgtagagtttgagctgaagcc

SEQ ID NO: 62768 - DNA, 25 bp, Probe Sequence
attaataatgatggaaggaagactg

SEQ ID NO: 62769 - DNA, 25 bp, Probe Sequence
ttgttaaacatgaaagtgcatcctt

SEQ ID NO: 62770 - DNA, 25 bp, Probe Sequence
tttgttaaacatgaaagtgcatcct

SEQ ID NO: 62771 - DNA, 25 bp, Probe Sequence
ttatgtagagtttgagctgaagccc

SEQ ID NO: 62772 - DNA, 25 bp, Probe Sequence
gctgaagccccgtatatttaattta

SEQ ID NO: 62773 - DNA, 25 bp, Probe Sequence
tgttaaacatgaaagtgcatccttt

SEQ ID NO: 62774 - DNA, 25 bp, Probe Sequence
ttttatgtagagtttgagctgaagc

SEQ ID NO: 62775 - DNA, 25 bp, Probe Sequence
agctgaagccccgtatatttaattt

SEQ ID NO: 62776 - DNA, 25 bp, Probe Sequence
gagctgaagccccgtatatttaatt

SEQ ID NO: 62777 - DNA, 25 bp, Probe Sequence
tgagctgaagccccgtatatttaat

SEQ ID NO: 62778 - DNA, 25 bp, Probe Sequence
ctgaagccccgtatatttaatttat

SEQ ID NO: 62779 - DNA, 25 bp, Probe Sequence
ttgagctgaagccccgtatatttaa

SEQ ID NO: 62780 - DNA, 25 bp, Probe Sequence
tttgagctgaagccccgtatattta

SEQ ID NO: 62781 - DNA, 25 bp, Probe Sequence
ttttgttaaacatgaaagtgcatcc

SEQ ID NO: 62782 - DNA, 25 bp, Probe Sequence
tgaagccccgtatatttaatttatt

SEQ ID NO: 62783 - DNA, 25 bp, Probe Sequence
attttatgtagagtttgagctgaag

SEQ ID NO: 62784 - DNA, 25 bp, Probe Sequence
gggccttggtatttatatttaagaa

SEQ ID NO: 62785 - DNA, 25 bp, Probe Sequence
aatgatggaaggaagactgggttgc

SEQ ID NO: 62786 - DNA, 25 bp, Probe Sequence
tccatacgagtatatcagaacacac

SEQ ID NO: 62787 - DNA, 25 bp, Probe Sequence
ccatacgagtatatcagaacacacc

SEQ ID NO: 62788 - DNA, 25 bp, Probe Sequence
ttataccacataccacacatagcca

SEQ ID NO: 62789 - DNA, 25 bp, Probe Sequence
gtatgtatgctctgttgttcctgtc

SEQ ID NO: 62790 - DNA, 25 bp, Probe Sequence
ttccatacgagtatatcagaacaca

SEQ ID NO: 62791 - DNA, 25 bp, Probe Sequence
tataccacataccacacatagccac

SEQ ID NO: 62792 - DNA, 25 bp, Probe Sequence
cttccaaggtatgtatgctctgttg

SEQ ID NO: 62793 - DNA, 25 bp, Probe Sequence
caaggtatgtatgctctgttgttcc

SEQ ID NO: 62794 - DNA, 25 bp, Probe Sequence
ccaaggtatgtatgctctgttgttc

SEQ ID NO: 62795 - DNA, 25 bp, Probe Sequence
gattcatcaagtacacaggctatgg

SEQ ID NO: 62796 - DNA, 25 bp, Probe Sequence
tatgtatgctctgttgttcctgtcc

SEQ ID NO: 62797 - DNA, 25 bp, Probe Sequence
tccaaggtatgtatgctctgttgtt

SEQ ID NO: 62798 - DNA, 25 bp, Probe Sequence
ttccaaggtatgtatgctctgttgt

SEQ ID NO: 62799 - DNA, 25 bp, Probe Sequence
cgattcatcaagtacacaggctatg

SEQ ID NO: 62800 - DNA, 25 bp, Probe Sequence
ggtatgtatgctctgttgttcctgt

SEQ ID NO: 62801 - DNA, 25 bp, Probe Sequence
acagacacagatgagtacaaggaag

SEQ ID NO: 62802 - DNA, 25 bp, Probe Sequence
cctcgtgtgaccatagattgagatt

SEQ ID NO: 62803 - DNA, 25 bp, Probe Sequence
cacagacacagatgagtacaaggaa

SEQ ID NO: 62804 - DNA, 25 bp, Probe Sequence
atgaggacacagacacagatgagta

SEQ ID NO: 62805 - DNA, 25 bp, Probe Sequence
ctcttagacattctccttggtcctc

SEQ ID NO: 62806 - DNA, 25 bp, Probe Sequence
aaggtatgtatgctctgttgttcct

SEQ ID NO: 62807 - DNA, 25 bp, Probe Sequence
tttataccacataccacacatagcc

SEQ ID NO: 62808 - DNA, 25 bp, Probe Sequence
tcgtgtgaccatagattgagattta

SEQ ID NO: 62809 - DNA, 25 bp, Probe Sequence
tgagatttataccacataccacaca

SEQ ID NO: 62810 - DNA, 25 bp, Probe Sequence
agcaatgcgtaataacaagttaagc

SEQ ID NO: 62811 - DNA, 25 bp, Probe Sequence
agagcaatgcgtaataacaagttaa

SEQ ID NO: 62812 - DNA, 25 bp, Probe Sequence
aagagcaatgcgtaataacaagtta

SEQ ID NO: 62813 - DNA, 25 bp, Probe Sequence
taagagcaatgcgtaataacaagtt

SEQ ID NO: 62814 - DNA, 25 bp, Probe Sequence
ttaagagcaatgcgtaataacaagt

SEQ ID NO: 62815 - DNA, 25 bp, Probe Sequence
gagcaatgcgtaataacaagttaag

SEQ ID NO: 62816 - DNA, 25 bp, Probe Sequence
gctgatatacgatgataataactgc

SEQ ID NO: 62817 - DNA, 25 bp, Probe Sequence
caatgcgtaataacaagttaagctg

SEQ ID NO: 62818 - DNA, 25 bp, Probe Sequence
tatcatggatcaagagctggaatag

SEQ ID NO: 62819 - DNA, 25 bp, Probe Sequence
ctatcatggatcaagagctggaata

SEQ ID NO: 62820 - DNA, 25 bp, Probe Sequence
aatgcgtaataacaagttaagctga

SEQ ID NO: 62821 - DNA, 25 bp, Probe Sequence
gcaatgcgtaataacaagttaagct

SEQ ID NO: 62822 - DNA, 25 bp, Probe Sequence
atgcgtaataacaagttaagctgat

SEQ ID NO: 62823 - DNA, 25 bp, Probe Sequence
tgcgtaataacaagttaagctgata

SEQ ID NO: 62824 - DNA, 25 bp, Probe Sequence
aacaagttaagctgatatacgatga

SEQ ID NO: 62825 - DNA, 25 bp, Probe Sequence
atttcgtttggttagtcagcattct

SEQ ID NO: 62826 - DNA, 25 bp, Probe Sequence
catttcgtttggttagtcagcattc

SEQ ID NO: 62827 - DNA, 25 bp, Probe Sequence
cagaatttcccttggtgaatgtaaa

SEQ ID NO: 62828 - DNA, 25 bp, Probe Sequence
tgttgtcacctttatagaagcaatg

SEQ ID NO: 62829 - DNA, 25 bp, Probe Sequence
cctatcatggatcaagagctggaat

SEQ ID NO: 62830 - DNA, 25 bp, Probe Sequence
ttcgtttggttagtcagcattcttt

SEQ ID NO: 62831 - DNA, 25 bp, Probe Sequence
tttcgtttggttagtcagcattctt

SEQ ID NO: 62832 - DNA, 25 bp, Probe Sequence
acaagttaagctgatatacgatgat

SEQ ID NO: 62833 - DNA, 25 bp, Probe Sequence
tttggttagtcagcattctttgaac

SEQ ID NO: 62834 - DNA, 25 bp, Probe Sequence
tgacttcagtgtgtgtattgtgtaa

SEQ ID NO: 62835 - DNA, 25 bp, Probe Sequence
gtgacttcagtgtgtgtattgtgta

SEQ ID NO: 62836 - DNA, 25 bp, Probe Sequence
agaacatacactgtgaactcaatct

SEQ ID NO: 62837 - DNA, 25 bp, Probe Sequence
gaacatacactgtgaactcaatctc

SEQ ID NO: 62838 - DNA, 25 bp, Probe Sequence
aacatacactgtgaactcaatctcc

SEQ ID NO: 62839 - DNA, 25 bp, Probe Sequence
cagaacatacactgtgaactcaatc

SEQ ID NO: 62840 - DNA, 25 bp, Probe Sequence
ccagaacatacactgtgaactcaat

SEQ ID NO: 62841 - DNA, 25 bp, Probe Sequence
catacactgtgaactcaatctccag

SEQ ID NO: 62842 - DNA, 25 bp, Probe Sequence
acatacactgtgaactcaatctcca

SEQ ID NO: 62843 - DNA, 25 bp, Probe Sequence
cagtgtgtgtattgtgtaaatgagt

SEQ ID NO: 62844 - DNA, 25 bp, Probe Sequence
atacactgtgaactcaatctccagg

SEQ ID NO: 62845 - DNA, 25 bp, Probe Sequence
gacttcagtgtgtgtattgtgtaaa

SEQ ID NO: 62846 - DNA, 25 bp, Probe Sequence
aggtgacttcagtgtgtgtattgtg

SEQ ID NO: 62847 - DNA, 25 bp, Probe Sequence
caggtgacttcagtgtgtgtattgt

SEQ ID NO: 62848 - DNA, 25 bp, Probe Sequence
cttcagtgtgtgtattgtgtaaatg

SEQ ID NO: 62849 - DNA, 25 bp, Probe Sequence
acttcagtgtgtgtattgtgtaaat

SEQ ID NO: 62850 - DNA, 25 bp, Probe Sequence
ggtgacttcagtgtgtgtattgtgt

SEQ ID NO: 62851 - DNA, 25 bp, Probe Sequence
tcagtgtgtgtattgtgtaaatgag

SEQ ID NO: 62852 - DNA, 25 bp, Probe Sequence
agtgtgtgtattgtgtaaatgagta

SEQ ID NO: 62853 - DNA, 25 bp, Probe Sequence
ttcagtgtgtgtattgtgtaaatga

SEQ ID NO: 62854 - DNA, 25 bp, Probe Sequence
ccaggtgacttcagtgtgtgtattg

SEQ ID NO: 62855 - DNA, 25 bp, Probe Sequence
gtgtgtgtattgtgtaaatgagtaa

SEQ ID NO: 62856 - DNA, 25 bp, Probe Sequence
tgtgtgtattgtgtaaatgagtaaa

SEQ ID NO: 62857 - DNA, 25 bp, Probe Sequence
cccagaacatacactgtgaactcaa

SEQ ID NO: 62858 - DNA, 25 bp, Probe Sequence
tttgtgcttccctttacctaaactg

SEQ ID NO: 62859 - DNA, 25 bp, Probe Sequence
ctttcccacttggctcttattcttc

SEQ ID NO: 62860 - DNA, 25 bp, Probe Sequence
ttgtgcttccctttacctaaactgt

SEQ ID NO: 62861 - DNA, 25 bp, Probe Sequence
tgtgcttccctttacctaaactgtc

SEQ ID NO: 62862 - DNA, 25 bp, Probe Sequence
ccacttggctcttattcttccacaa

SEQ ID NO: 62863 - DNA, 25 bp, Probe Sequence
tttcccacttggctcttattcttcc

SEQ ID NO: 62864 - DNA, 25 bp, Probe Sequence
cttccctttacctaaactgtcctgc

SEQ ID NO: 62865 - DNA, 25 bp, Probe Sequence
gcttccctttacctaaactgtcctg

SEQ ID NO: 62866 - DNA, 25 bp, Probe Sequence
gtgcttccctttacctaaactgtcc

SEQ ID NO: 62867 - DNA, 25 bp, Probe Sequence
tgcttccctttacctaaactgtcct

SEQ ID NO: 62868 - DNA, 25 bp, Probe Sequence
aacttttgtgcttccctttacctaa

SEQ ID NO: 62869 - DNA, 25 bp, Probe Sequence
cttttgtgcttccctttacctaaac

SEQ ID NO: 62870 - DNA, 25 bp, Probe Sequence
gctttcccacttggctcttattctt

SEQ ID NO: 62871 - DNA, 25 bp, Probe Sequence
ttttgtgcttccctttacctaaact

SEQ ID NO: 62872 - DNA, 25 bp, Probe Sequence
acttttgtgcttccctttacctaaa

SEQ ID NO: 62873 - DNA, 25 bp, Probe Sequence
cacttggctcttattcttccacaag

SEQ ID NO: 62874 - DNA, 25 bp, Probe Sequence
acttggctcttattcttccacaaga

SEQ ID NO: 62875 - DNA, 25 bp, Probe Sequence
cttcaacttttgtgcttccctttac

SEQ ID NO: 62876 - DNA, 25 bp, Probe Sequence
tcttcaacttttgtgcttcccttta

SEQ ID NO: 62877 - DNA, 25 bp, Probe Sequence
agggctgttcatctacttcaggaat

SEQ ID NO: 62878 - DNA, 25 bp, Probe Sequence
caacttttgtgcttccctttaccta

SEQ ID NO: 62879 - DNA, 25 bp, Probe Sequence
atcttcaacttttgtgcttcccttt

SEQ ID NO: 62880 - DNA, 25 bp, Probe Sequence
ctttgtcaggaccaggttgttactg

SEQ ID NO: 62881 - DNA, 25 bp, Probe Sequence
ttcaacttttgtgcttccctttacc

SEQ ID NO: 62882 - DNA, 25 bp, Probe Sequence
ttaacctggataagtgctatgtgat

SEQ ID NO: 62883 - DNA, 25 bp, Probe Sequence
acttattaacatcaaggctggaacc

SEQ ID NO: 62884 - DNA, 25 bp, Probe Sequence
tacttattaacatcaaggctggaac

SEQ ID NO: 62885 - DNA, 25 bp, Probe Sequence
taacctggataagtgctatgtgatc

SEQ ID NO: 62886 - DNA, 25 bp, Probe Sequence
catggttattactgatcgcattgaa

SEQ ID NO: 62887 - DNA, 25 bp, Probe Sequence
cttaacctggataagtgctatgtga

SEQ ID NO: 62888 - DNA, 25 bp, Probe Sequence
tcttaacctggataagtgctatgtg

SEQ ID NO: 62889 - DNA, 25 bp, Probe Sequence
ttacttattaacatcaaggctggaa

SEQ ID NO: 62890 - DNA, 25 bp, Probe Sequence
acatggttattactgatcgcattga

SEQ ID NO: 62891 - DNA, 25 bp, Probe Sequence
cacatggttattactgatcgcattg

SEQ ID NO: 62892 - DNA, 25 bp, Probe Sequence
atcttaacctggataagtgctatgt

SEQ ID NO: 62893 - DNA, 25 bp, Probe Sequence
atgagcacatggttattactgatcg

SEQ ID NO: 62894 - DNA, 25 bp, Probe Sequence
attaacatcaaggctggaacctatt

SEQ ID NO: 62895 - DNA, 25 bp, Probe Sequence
ttattaacatcaaggctggaaccta

SEQ ID NO: 62896 - DNA, 25 bp, Probe Sequence
tattaacatcaaggctggaacctat

SEQ ID NO: 62897 - DNA, 25 bp, Probe Sequence
cttattaacatcaaggctggaacct

SEQ ID NO: 62898 - DNA, 25 bp, Probe Sequence
gttacttattaacatcaaggctgga

SEQ ID NO: 62899 - DNA, 25 bp, Probe Sequence
agttacttattaacatcaaggctgg

SEQ ID NO: 62900 - DNA, 25 bp, Probe Sequence
tggagttacttattaacatcaaggc

SEQ ID NO: 62901 - DNA, 25 bp, Probe Sequence
gatcttaacctggataagtgctatg

SEQ ID NO: 62902 - DNA, 25 bp, Probe Sequence
gatagtgatcctgccaacattgttc

SEQ ID NO: 62903 - DNA, 25 bp, Probe Sequence
ggagttacttattaacatcaaggct

SEQ ID NO: 62904 - DNA, 25 bp, Probe Sequence
ttatttgtagttgttagttgccctg

SEQ ID NO: 62905 - DNA, 25 bp, Probe Sequence
gcacatggttattactgatcgcatt

SEQ ID NO: 62906 - DNA, 25 bp, Probe Sequence
gcatatcttctcagcaataactcca

SEQ ID NO: 62907 - DNA, 25 bp, Probe Sequence
catatcttctcagcaataactccat

SEQ ID NO: 62908 - DNA, 25 bp, Probe Sequence
gttctctgtatcgtgatctatcctc

SEQ ID NO: 62909 - DNA, 25 bp, Probe Sequence
ctgttctctgtatcgtgatctatcc

SEQ ID NO: 62910 - DNA, 25 bp, Probe Sequence
tgttctctgtatcgtgatctatcct

SEQ ID NO: 62911 - DNA, 25 bp, Probe Sequence
gctgttctctgtatcgtgatctatc

SEQ ID NO: 62912 - DNA, 25 bp, Probe Sequence
tgctgttctctgtatcgtgatctat

SEQ ID NO: 62913 - DNA, 25 bp, Probe Sequence
ttgctgttctctgtatcgtgatcta

SEQ ID NO: 62914 - DNA, 25 bp, Probe Sequence
tgatctatcctcaacaacaacagaa

SEQ ID NO: 62915 - DNA, 25 bp, Probe Sequence
ctctgtatcgtgatctatcctcaac

SEQ ID NO: 62916 - DNA, 25 bp, Probe Sequence
tctctgtatcgtgatctatcctcaa

SEQ ID NO: 62917 - DNA, 25 bp, Probe Sequence
ttctctgtatcgtgatctatcctca

SEQ ID NO: 62918 - DNA, 25 bp, Probe Sequence
gtatcgtgatctatcctcaacaaca

SEQ ID NO: 62919 - DNA, 25 bp, Probe Sequence
tatcgtgatctatcctcaacaacaa

SEQ ID NO: 62920 - DNA, 25 bp, Probe Sequence
gtgatctatcctcaacaacaacaga

SEQ ID NO: 62921 - DNA, 25 bp, Probe Sequence
aacagtgagaggttgaaggtcataa

SEQ ID NO: 62922 - DNA, 25 bp, Probe Sequence
ctgcttctgagacttcaatctacag

SEQ ID NO: 62923 - DNA, 25 bp, Probe Sequence
atcgtgatctatcctcaacaacaac

SEQ ID NO: 62924 - DNA, 25 bp, Probe Sequence
ctgtatcgtgatctatcctcaacaa

SEQ ID NO: 62925 - DNA, 25 bp, Probe Sequence
tgtatcgtgatctatcctcaacaac

SEQ ID NO: 62926 - DNA, 25 bp, Probe Sequence
atatcttctcagcaataactccatg

SEQ ID NO: 62927 - DNA, 25 bp, Probe Sequence
tctgtatcgtgatctatcctcaaca

SEQ ID NO: 62928 - DNA, 25 bp, Probe Sequence
attgctgttctctgtatcgtgatct

SEQ ID NO: 62929 - DNA, 25 bp, Probe Sequence
cattgctgttctctgtatcgtgatc

SEQ ID NO: 62930 - DNA, 25 bp, Probe Sequence
ggtagaggtcatcatcaatacagag

SEQ ID NO: 62931 - DNA, 25 bp, Probe Sequence
tagaggtcatcatcaatacagagtg

SEQ ID NO: 62932 - DNA, 25 bp, Probe Sequence
tggtagaggtcatcatcaatacaga

SEQ ID NO: 62933 - DNA, 25 bp, Probe Sequence
gtagaggtcatcatcaatacagagt

SEQ ID NO: 62934 - DNA, 25 bp, Probe Sequence
agaggtcatcatcaatacagagtgg

SEQ ID NO: 62935 - DNA, 25 bp, Probe Sequence
ctggtagaggtcatcatcaatacag

SEQ ID NO: 62936 - DNA, 25 bp, Probe Sequence
cctggtagaggtcatcatcaataca

SEQ ID NO: 62937 - DNA, 25 bp, Probe Sequence
gggtgcctaataaatacatttctgc

SEQ ID NO: 62938 - DNA, 25 bp, Probe Sequence
ggtgcctaataaatacatttctgct

SEQ ID NO: 62939 - DNA, 25 bp, Probe Sequence
gaggtcatcatcaatacagagtggc

SEQ ID NO: 62940 - DNA, 25 bp, Probe Sequence
ggtgtggatcgtcatgtatacttac

SEQ ID NO: 62941 - DNA, 25 bp, Probe Sequence
tggtgtggatcgtcatgtatactta

SEQ ID NO: 62942 - DNA, 25 bp, Probe Sequence
gtcatcatcaatacagagtggctga

SEQ ID NO: 62943 - DNA, 25 bp, Probe Sequence
aggtcatcatcaatacagagtggct

SEQ ID NO: 62944 - DNA, 25 bp, Probe Sequence
gaggaacaagggtgcctaataaata

SEQ ID NO: 62945 - DNA, 25 bp, Probe Sequence
gtgcctaataaatacatttctgctt

SEQ ID NO: 62946 - DNA, 25 bp, Probe Sequence
aggaacaagggtgcctaataaatac

SEQ ID NO: 62947 - DNA, 25 bp, Probe Sequence
catcatcaatacagagtggctgatc

SEQ ID NO: 62948 - DNA, 25 bp, Probe Sequence
ggaacaagggtgcctaataaataca

SEQ ID NO: 62949 - DNA, 25 bp, Probe Sequence
gaacaagggtgcctaataaatacat

SEQ ID NO: 62950 - DNA, 25 bp, Probe Sequence
tcatcatcaatacagagtggctgat

SEQ ID NO: 62951 - DNA, 25 bp, Probe Sequence
agggtgcctaataaatacatttctg

SEQ ID NO: 62952 - DNA, 25 bp, Probe Sequence
gtggtgtggatcgtcatgtatactt

SEQ ID NO: 62953 - DNA, 25 bp, Probe Sequence
ggtcatcatcaatacagagtggctg

SEQ ID NO: 62954 - DNA, 25 bp, Probe Sequence
gccaagaggatgagaacaagataat

SEQ ID NO: 62955 - DNA, 25 bp, Probe Sequence
agccaagaggatgagaacaagataa

SEQ ID NO: 62956 - DNA, 25 bp, Probe Sequence
aggatgagaacaagataattggtgg

SEQ ID NO: 62957 - DNA, 25 bp, Probe Sequence
gaggatgagaacaagataattggtg

SEQ ID NO: 62958 - DNA, 25 bp, Probe Sequence
agaggatgagaacaagataattggt

SEQ ID NO: 62959 - DNA, 25 bp, Probe Sequence
ccaagaggatgagaacaagataatt

SEQ ID NO: 62960 - DNA, 25 bp, Probe Sequence
gagccaagaggatgagaacaagata

SEQ ID NO: 62961 - DNA, 25 bp, Probe Sequence
aagaggatgagaacaagataattgg

SEQ ID NO: 62962 - DNA, 25 bp, Probe Sequence
ggatgagaacaagataattggtggc

SEQ ID NO: 62963 - DNA, 25 bp, Probe Sequence
caagaggatgagaacaagataattg

SEQ ID NO: 62964 - DNA, 25 bp, Probe Sequence
agagccaagaggatgagaacaagat

SEQ ID NO: 62965 - DNA, 25 bp, Probe Sequence
ctgtgtcaccatcactactcaagac

SEQ ID NO: 62966 - DNA, 25 bp, Probe Sequence
caagtacagaagctggattgaggaa

SEQ ID NO: 62967 - DNA, 25 bp, Probe Sequence
cagagccaagaggatgagaacaaga

SEQ ID NO: 62968 - DNA, 25 bp, Probe Sequence
tacctctctgctgtgtcttcatgtc

SEQ ID NO: 62969 - DNA, 25 bp, Probe Sequence
ctacctctctgctgtgtcttcatgt

SEQ ID NO: 62970 - DNA, 25 bp, Probe Sequence
acagagccaagaggatgagaacaag

SEQ ID NO: 62971 - DNA, 25 bp, Probe Sequence
gatgagaacaagataattggtggcc

SEQ ID NO: 62972 - DNA, 25 bp, Probe Sequence
tatagccatgacacagagccaagag

SEQ ID NO: 62973 - DNA, 25 bp, Probe Sequence
cacagagccaagaggatgagaacaa

SEQ ID NO: 62974 - DNA, 25 bp, Probe Sequence
tgtgtcaccatcactactcaagacc

SEQ ID NO: 62975 - DNA, 25 bp, Probe Sequence
aagtacagaagctggattgaggaaa

SEQ ID NO: 62976 - DNA, 25 bp, Probe Sequence
ctatagccatgacacagagccaaga

SEQ ID NO: 62977 - DNA, 25 bp, Probe Sequence
ttgctgtgtcaccatcactactcaa

SEQ ID NO: 62978 - DNA, 25 bp, Probe Sequence
gctatggagtttctgtagtattcac

SEQ ID NO: 62979 - DNA, 25 bp, Probe Sequence
tatgatcttgactcactgcaacatc

SEQ ID NO: 62980 - DNA, 25 bp, Probe Sequence
tttatccatcaagtctgtacccaat

SEQ ID NO: 62981 - DNA, 25 bp, Probe Sequence
gtatgatcttgactcactgcaacat

SEQ ID NO: 62982 - DNA, 25 bp, Probe Sequence
ttatccatcaagtctgtacccaatg

SEQ ID NO: 62983 - DNA, 25 bp, Probe Sequence
tgtacccaatgtgtagtctttgttt

SEQ ID NO: 62984 - DNA, 25 bp, Probe Sequence
agtctgtacccaatgtgtagtcttt

SEQ ID NO: 62985 - DNA, 25 bp, Probe Sequence
catcaagtctgtacccaatgtgtag

SEQ ID NO: 62986 - DNA, 25 bp, Probe Sequence
atcaagtctgtacccaatgtgtagt

SEQ ID NO: 62987 - DNA, 25 bp, Probe Sequence
ctgtacccaatgtgtagtctttgtt

SEQ ID NO: 62988 - DNA, 25 bp, Probe Sequence
tatccatcaagtctgtacccaatgt

SEQ ID NO: 62989 - DNA, 25 bp, Probe Sequence
aagtctgtacccaatgtgtagtctt

SEQ ID NO: 62990 - DNA, 25 bp, Probe Sequence
ctggagtggagtggtatgatcttga

SEQ ID NO: 62991 - DNA, 25 bp, Probe Sequence
gtctgtacccaatgtgtagtctttg

SEQ ID NO: 62992 - DNA, 25 bp, Probe Sequence
caagtctgtacccaatgtgtagtct

SEQ ID NO: 62993 - DNA, 25 bp, Probe Sequence
atgatcttgactcactgcaacatct

SEQ ID NO: 62994 - DNA, 25 bp, Probe Sequence
tctgtacccaatgtgtagtctttgt

SEQ ID NO: 62995 - DNA, 25 bp, Probe Sequence
tcaagtctgtacccaatgtgtagtc

SEQ ID NO: 62996 - DNA, 25 bp, Probe Sequence
agctatggagtttctgtagtattca

SEQ ID NO: 62997 - DNA, 25 bp, Probe Sequence
tggagtggagtggtatgatcttgac

SEQ ID NO: 62998 - DNA, 25 bp, Probe Sequence
ggagtggagtggtatgatcttgact

SEQ ID NO: 62999 - DNA, 25 bp, Probe Sequence
ctatggagtttctgtagtattcact

SEQ ID NO: 63000 - DNA, 25 bp, Probe Sequence
ccatcaagtctgtacccaatgtgta

SEQ ID NO: 63001 - DNA, 25 bp, Probe Sequence
ggtatgatcttgactcactgcaaca

SEQ ID NO: 63002 - DNA, 25 bp, Probe Sequence
gtgattgcttacaggaggaagataa

SEQ ID NO: 63003 - DNA, 25 bp, Probe Sequence
tgattgcttacaggaggaagataag

SEQ ID NO: 63004 - DNA, 25 bp, Probe Sequence
tgtgattgcttacaggaggaagata

SEQ ID NO: 63005 - DNA, 25 bp, Probe Sequence
acaggaggaagataagctactaatt

SEQ ID NO: 63006 - DNA, 25 bp, Probe Sequence
atctggatatgaaataagtgccctg

SEQ ID NO: 63007 - DNA, 25 bp, Probe Sequence
aggaggaagataagctactaattga

SEQ ID NO: 63008 - DNA, 25 bp, Probe Sequence
caggaggaagataagctactaattg

SEQ ID NO: 63009 - DNA, 25 bp, Probe Sequence
attgttgccagtgactgatgattaa

SEQ ID NO: 63010 - DNA, 25 bp, Probe Sequence
catctggatatgaaataagtgccct

SEQ ID NO: 63011 - DNA, 25 bp, Probe Sequence
tgttgccagtgactgatgattaatt

SEQ ID NO: 63012 - DNA, 25 bp, Probe Sequence
ttgttgccagtgactgatgattaat

SEQ ID NO: 63013 - DNA, 25 bp, Probe Sequence
acatctggatatgaaataagtgccc

SEQ ID NO: 63014 - DNA, 25 bp, Probe Sequence
ttacaggaggaagataagctactaa

SEQ ID NO: 63015 - DNA, 25 bp, Probe Sequence
gatctgttatctagctgagttcatt

SEQ ID NO: 63016 - DNA, 25 bp, Probe Sequence
gattgttgccagtgactgatgatta

SEQ ID NO: 63017 - DNA, 25 bp, Probe Sequence
tacaggaggaagataagctactaat

SEQ ID NO: 63018 - DNA, 25 bp, Probe Sequence
taatgattgttgccagtgactgatg

SEQ ID NO: 63019 - DNA, 25 bp, Probe Sequence
ggaggaagataagctactaattgaa

SEQ ID NO: 63020 - DNA, 25 bp, Probe Sequence
gcagtccttccttacactaatttga

SEQ ID NO: 63021 - DNA, 25 bp, Probe Sequence
ctgagttcatttcatctctcccttt

SEQ ID NO: 63022 - DNA, 25 bp, Probe Sequence
gtccttccttacactaatttgaact

SEQ ID NO: 63023 - DNA, 25 bp, Probe Sequence
tacatctggatatgaaataagtgcc

SEQ ID NO: 63024 - DNA, 25 bp, Probe Sequence
cttacaggaggaagataagctacta

SEQ ID NO: 63025 - DNA, 25 bp, Probe Sequence
ccttccttacactaatttgaactct

SEQ ID NO: 63026 - DNA, 25 bp, Probe Sequence
tgtctgatataaactttctctgggt

SEQ ID NO: 63027 - DNA, 25 bp, Probe Sequence
ctgtctgatataaactttctctggg

SEQ ID NO: 63028 - DNA, 25 bp, Probe Sequence
cctgtctgatataaactttctctgg

SEQ ID NO: 63029 - DNA, 25 bp, Probe Sequence
aattcagtatccagaccaaatgttg

SEQ ID NO: 63030 - DNA, 25 bp, Probe Sequence
tatttatggtggcacatttaatggc

SEQ ID NO: 63031 - DNA, 25 bp, Probe Sequence
ctaattcagtatccagaccaaatgt

SEQ ID NO: 63032 - DNA, 25 bp, Probe Sequence
tgtgttctggaataagagaatacct

SEQ ID NO: 63033 - DNA, 25 bp, Probe Sequence
ctgtgttctggaataagagaatacc

SEQ ID NO: 63034 - DNA, 25 bp, Probe Sequence
acctgtctgatataaactttctctg

SEQ ID NO: 63035 - DNA, 25 bp, Probe Sequence
taattcagtatccagaccaaatgtt

SEQ ID NO: 63036 - DNA, 25 bp, Probe Sequence
ctgatataaactttctctgggttga

SEQ ID NO: 63037 - DNA, 25 bp, Probe Sequence
tctgatataaactttctctgggttg

SEQ ID NO: 63038 - DNA, 25 bp, Probe Sequence
gtctgatataaactttctctgggtt

SEQ ID NO: 63039 - DNA, 25 bp, Probe Sequence
actaattcagtatccagaccaaatg

SEQ ID NO: 63040 - DNA, 25 bp, Probe Sequence
gttctggaataagagaatacctagc

SEQ ID NO: 63041 - DNA, 25 bp, Probe Sequence
atttatggtggcacatttaatggct

SEQ ID NO: 63042 - DNA, 25 bp, Probe Sequence
ttatggtggcacatttaatggcttt

SEQ ID NO: 63043 - DNA, 25 bp, Probe Sequence
tttatggtggcacatttaatggctt

SEQ ID NO: 63044 - DNA, 25 bp, Probe Sequence
tctgtgttctggaataagagaatac

SEQ ID NO: 63045 - DNA, 25 bp, Probe Sequence
cctacctgtctgatataaactttct

SEQ ID NO: 63046 - DNA, 25 bp, Probe Sequence
tcctacctgtctgatataaactttc

SEQ ID NO: 63047 - DNA, 25 bp, Probe Sequence
ttatttatggtggcacatttaatgg

SEQ ID NO: 63048 - DNA, 25 bp, Probe Sequence
tgatataaactttctctgggttgat

SEQ ID NO: 63049 - DNA, 25 bp, Probe Sequence
gtgttctggaataagagaataccta

SEQ ID NO: 63050 - DNA, 25 bp, Probe Sequence
aactcagtctcctacattagcattc

SEQ ID NO: 63051 - DNA, 25 bp, Probe Sequence
ctcagtctcctacattagcattcta

SEQ ID NO: 63052 - DNA, 25 bp, Probe Sequence
actcagtctcctacattagcattct

SEQ ID NO: 63053 - DNA, 25 bp, Probe Sequence
agaatcatggaacttgctagaactg

SEQ ID NO: 63054 - DNA, 25 bp, Probe Sequence
cagaatcatggaacttgctagaact

SEQ ID NO: 63055 - DNA, 25 bp, Probe Sequence
tgtaagcacaatgaagacaggaatt

SEQ ID NO: 63056 - DNA, 25 bp, Probe Sequence
gaatcatggaacttgctagaactgt

SEQ ID NO: 63057 - DNA, 25 bp, Probe Sequence
ggagaattatcacaacctaatgaca

SEQ ID NO: 63058 - DNA, 25 bp, Probe Sequence
tggagaattatcacaacctaatgac

SEQ ID NO: 63059 - DNA, 25 bp, Probe Sequence
tctggagaattatcacaacctaatg

SEQ ID NO: 63060 - DNA, 25 bp, Probe Sequence
aatcatggaacttgctagaactgtg

SEQ ID NO: 63061 - DNA, 25 bp, Probe Sequence
ccattaattctcaacgactgctcta

SEQ ID NO: 63062 - DNA, 25 bp, Probe Sequence
ctggagaattatcacaacctaatga

SEQ ID NO: 63063 - DNA, 25 bp, Probe Sequence
tcagtctcctacattagcattctaa

SEQ ID NO: 63064 - DNA, 25 bp, Probe Sequence
cattaattctcaacgactgctctat

SEQ ID NO: 63065 - DNA, 25 bp, Probe Sequence
gtgtaagcacaatgaagacaggaat

SEQ ID NO: 63066 - DNA, 25 bp, Probe Sequence
attaattctcaacgactgctctatt

SEQ ID NO: 63067 - DNA, 25 bp, Probe Sequence
ggaacatagtaagggctcagtaaat

SEQ ID NO: 63068 - DNA, 25 bp, Probe Sequence
atgtcaccattaattctcaacgact

SEQ ID NO: 63069 - DNA, 25 bp, Probe Sequence
catgtcaccattaattctcaacgac

SEQ ID NO: 63070 - DNA, 25 bp, Probe Sequence
ttctggagaattatcacaacctaat

SEQ ID NO: 63071 - DNA, 25 bp, Probe Sequence
aaactcagtctcctacattagcatt

SEQ ID NO: 63072 - DNA, 25 bp, Probe Sequence
tgatttgaaaggaggaggtttgaaa

SEQ ID NO: 63073 - DNA, 25 bp, Probe Sequence
tgttgtacggtaatagttatcacct

SEQ ID NO: 63074 - DNA, 25 bp, Probe Sequence
aataggctcatctacctctacctct

SEQ ID NO: 63075 - DNA, 25 bp, Probe Sequence
accctgcccacatatcttatttatt

SEQ ID NO: 63076 - DNA, 25 bp, Probe Sequence
aaccctgcccacatatcttatttat

SEQ ID NO: 63077 - DNA, 25 bp, Probe Sequence
gtaaccctgcccacatatcttattt

SEQ ID NO: 63078 - DNA, 25 bp, Probe Sequence
cctgcccacatatcttatttattcc

SEQ ID NO: 63079 - DNA, 25 bp, Probe Sequence
ccctgcccacatatcttatttattc

SEQ ID NO: 63080 - DNA, 25 bp, Probe Sequence
taaccctgcccacatatcttattta

SEQ ID NO: 63081 - DNA, 25 bp, Probe Sequence
ataggctcatctacctctacctctg

SEQ ID NO: 63082 - DNA, 25 bp, Probe Sequence
gcccacatatcttatttattcctcc

SEQ ID NO: 63083 - DNA, 25 bp, Probe Sequence
tgcccacatatcttatttattcctc

SEQ ID NO: 63084 - DNA, 25 bp, Probe Sequence
ctgcccacatatcttatttattcct

SEQ ID NO: 63085 - DNA, 25 bp, Probe Sequence
cccacatatcttatttattcctcca

SEQ ID NO: 63086 - DNA, 25 bp, Probe Sequence
cgtaaataggctcatctacctctac

SEQ ID NO: 63087 - DNA, 25 bp, Probe Sequence
taaataggctcatctacctctacct

SEQ ID NO: 63088 - DNA, 25 bp, Probe Sequence
gtaaataggctcatctacctctacc

SEQ ID NO: 63089 - DNA, 25 bp, Probe Sequence
aaataggctcatctacctctacctc

SEQ ID NO: 63090 - DNA, 25 bp, Probe Sequence
gtatttgtaaccctgcccacatatc

SEQ ID NO: 63091 - DNA, 25 bp, Probe Sequence
ccgtaaataggctcatctacctcta

SEQ ID NO: 63092 - DNA, 25 bp, Probe Sequence
tgtaaccctgcccacatatcttatt

SEQ ID NO: 63093 - DNA, 25 bp, Probe Sequence
ttgtaaccctgcccacatatcttat

SEQ ID NO: 63094 - DNA, 25 bp, Probe Sequence
tatttgtaaccctgcccacatatct

SEQ ID NO: 63095 - DNA, 25 bp, Probe Sequence
tttgtaaccctgcccacatatctta

SEQ ID NO: 63096 - DNA, 25 bp, Probe Sequence
tttataggtatttgtaaccctgccc

SEQ ID NO: 63097 - DNA, 25 bp, Probe Sequence
ttataggtatttgtaaccctgccca

SEQ ID NO: 63098 - DNA, 25 bp, Probe Sequence
cttagcatctactctgtataacgca

SEQ ID NO: 63099 - DNA, 25 bp, Probe Sequence
ttagcatctactctgtataacgcat

SEQ ID NO: 63100 - DNA, 25 bp, Probe Sequence
gcttagcatctactctgtataacgc

SEQ ID NO: 63101 - DNA, 25 bp, Probe Sequence
tagcatctactctgtataacgcatg

SEQ ID NO: 63102 - DNA, 25 bp, Probe Sequence
catctactctgtataacgcatgaga

SEQ ID NO: 63103 - DNA, 25 bp, Probe Sequence
agcatctactctgtataacgcatga

SEQ ID NO: 63104 - DNA, 25 bp, Probe Sequence
gcatctactctgtataacgcatgag

SEQ ID NO: 63105 - DNA, 25 bp, Probe Sequence
aattgataagtcacttggctctcgg

SEQ ID NO: 63106 - DNA, 25 bp, Probe Sequence
aaattgataagtcacttggctctcg

SEQ ID NO: 63107 - DNA, 25 bp, Probe Sequence
ttagtgaccctcggagcaaattatc

SEQ ID NO: 63108 - DNA, 25 bp, Probe Sequence
cttagtgaccctcggagcaaattat

SEQ ID NO: 63109 - DNA, 25 bp, Probe Sequence
atctactctgtataacgcatgagag

SEQ ID NO: 63110 - DNA, 25 bp, Probe Sequence
tgcttagcatctactctgtataacg

SEQ ID NO: 63111 - DNA, 25 bp, Probe Sequence
tctactctgtataacgcatgagagg

SEQ ID NO: 63112 - DNA, 25 bp, Probe Sequence
tatcttagtgaccctcggagcaaat

SEQ ID NO: 63113 - DNA, 25 bp, Probe Sequence
tcttagtgaccctcggagcaaatta

SEQ ID NO: 63114 - DNA, 25 bp, Probe Sequence
cttgtgtataaagacgggagtcctg

SEQ ID NO: 63115 - DNA, 25 bp, Probe Sequence
cttttctggtgggaggactatattg

SEQ ID NO: 63116 - DNA, 25 bp, Probe Sequence
tcttttctggtgggaggactatatt

SEQ ID NO: 63117 - DNA, 25 bp, Probe Sequence
ttcttttctggtgggaggactatat

SEQ ID NO: 63118 - DNA, 25 bp, Probe Sequence
tatttaatatctaagcaggggaggg

SEQ ID NO: 63119 - DNA, 25 bp, Probe Sequence
atttaatatctaagcaggggagggg

SEQ ID NO: 63120 - DNA, 25 bp, Probe Sequence
gttcttttctggtgggaggactata

SEQ ID NO: 63121 - DNA, 25 bp, Probe Sequence
atcttagtgaccctcggagcaaatt

SEQ ID NO: 63122 - DNA, 25 bp, Probe Sequence
tatgacaccacattcttcctaacag

SEQ ID NO: 63123 - DNA, 25 bp, Probe Sequence
gtatgacaccacattcttcctaaca

SEQ ID NO: 63124 - DNA, 25 bp, Probe Sequence
cagacatcatctacatcttcacctt

SEQ ID NO: 63125 - DNA, 25 bp, Probe Sequence
acacagacatcatctacatcttcac

SEQ ID NO: 63126 - DNA, 25 bp, Probe Sequence
acagacatcatctacatcttcacct

SEQ ID NO: 63127 - DNA, 25 bp, Probe Sequence
cacagacatcatctacatcttcacc

SEQ ID NO: 63128 - DNA, 25 bp, Probe Sequence
tacacagacatcatctacatcttca

SEQ ID NO: 63129 - DNA, 25 bp, Probe Sequence
ctgtatgacaccacattcttcctaa

SEQ ID NO: 63130 - DNA, 25 bp, Probe Sequence
tgtatgacaccacattcttcctaac

SEQ ID NO: 63131 - DNA, 25 bp, Probe Sequence
ctactgtatgacaccacattcttcc

SEQ ID NO: 63132 - DNA, 25 bp, Probe Sequence
cctactgtatgacaccacattcttc

SEQ ID NO: 63133 - DNA, 25 bp, Probe Sequence
ttacacagacatcatctacatcttc

SEQ ID NO: 63134 - DNA, 25 bp, Probe Sequence
actgtatgacaccacattcttccta

SEQ ID NO: 63135 - DNA, 25 bp, Probe Sequence
tactgtatgacaccacattcttcct

SEQ ID NO: 63136 - DNA, 25 bp, Probe Sequence
acctactgtatgacaccacattctt

SEQ ID NO: 63137 - DNA, 25 bp, Probe Sequence
aatattaagtgccttgagctggaat

SEQ ID NO: 63138 - DNA, 25 bp, Probe Sequence
ctactgtggtactgaagacttctgg

SEQ ID NO: 63139 - DNA, 25 bp, Probe Sequence
cctactgtggtactgaagacttctg

SEQ ID NO: 63140 - DNA, 25 bp, Probe Sequence
cacctactgtatgacaccacattct

SEQ ID NO: 63141 - DNA, 25 bp, Probe Sequence
atattaagtgccttgagctggaatg

SEQ ID NO: 63142 - DNA, 25 bp, Probe Sequence
cattatcctgtattcctttggcttg

SEQ ID NO: 63143 - DNA, 25 bp, Probe Sequence
gagtgaactcttgcttcctgtattc

SEQ ID NO: 63144 - DNA, 25 bp, Probe Sequence
agggaatatgaaaggtagaagtgac

SEQ ID NO: 63145 - DNA, 25 bp, Probe Sequence
gacatcatctacatcttcacctttg

SEQ ID NO: 63146 - DNA, 25 bp, Probe Sequence
atgttccttatgtgtgattgagagc

SEQ ID NO: 63147 - DNA, 25 bp, Probe Sequence
tatgttccttatgtgtgattgagag

SEQ ID NO: 63148 - DNA, 25 bp, Probe Sequence
ttatgtgtgattgagagccattcag

SEQ ID NO: 63149 - DNA, 25 bp, Probe Sequence
cttatgtgtgattgagagccattca

SEQ ID NO: 63150 - DNA, 25 bp, Probe Sequence
ccttatgtgtgattgagagccattc

SEQ ID NO: 63151 - DNA, 25 bp, Probe Sequence
tccttatgtgtgattgagagccatt

SEQ ID NO: 63152 - DNA, 25 bp, Probe Sequence
ttccttatgtgtgattgagagccat

SEQ ID NO: 63153 - DNA, 25 bp, Probe Sequence
atatgttccttatgtgtgattgaga

SEQ ID NO: 63154 - DNA, 25 bp, Probe Sequence
tatgtgtgattgagagccattcaga

SEQ ID NO: 63155 - DNA, 25 bp, Probe Sequence
gttccttatgtgtgattgagagcca

SEQ ID NO: 63156 - DNA, 25 bp, Probe Sequence
tgttccttatgtgtgattgagagcc

SEQ ID NO: 63157 - DNA, 25 bp, Probe Sequence
atgtgtgattgagagccattcagaa

SEQ ID NO: 63158 - DNA, 25 bp, Probe Sequence
tgtgtgattgagagccattcagaaa

SEQ ID NO: 63159 - DNA, 25 bp, Probe Sequence
catatgttccttatgtgtgattgag

SEQ ID NO: 63160 - DNA, 25 bp, Probe Sequence
atagtaaacacccttttgaaaccat

SEQ ID NO: 63161 - DNA, 25 bp, Probe Sequence
attgagagccattcagaaaagactt

SEQ ID NO: 63162 - DNA, 25 bp, Probe Sequence
gattgagagccattcagaaaagact

SEQ ID NO: 63163 - DNA, 25 bp, Probe Sequence
taaacacccttttgaaaccatgaaa

SEQ ID NO: 63164 - DNA, 25 bp, Probe Sequence
gtaaacacccttttgaaaccatgaa

SEQ ID NO: 63165 - DNA, 25 bp, Probe Sequence
tagtaaacacccttttgaaaccatg

SEQ ID NO: 63166 - DNA, 25 bp, Probe Sequence
ttgagagccattcagaaaagacttc

SEQ ID NO: 63167 - DNA, 25 bp, Probe Sequence
tgattgagagccattcagaaaagac

SEQ ID NO: 63168 - DNA, 25 bp, Probe Sequence
gtgattgagagccattcagaaaaga

SEQ ID NO: 63169 - DNA, 25 bp, Probe Sequence
agtaaacacccttttgaaaccatga

SEQ ID NO: 63170 - DNA, 25 bp, Probe Sequence
ttaataacaatgacatctaccaggt

SEQ ID NO: 63171 - DNA, 25 bp, Probe Sequence
taataacaatgacatctaccaggtc

SEQ ID NO: 63172 - DNA, 25 bp, Probe Sequence
gttaataacaatgacatctaccagg

SEQ ID NO: 63173 - DNA, 25 bp, Probe Sequence
cagccctgtattcttattcttcaga

SEQ ID NO: 63174 - DNA, 25 bp, Probe Sequence
agccctgtattcttattcttcagat

SEQ ID NO: 63175 - DNA, 25 bp, Probe Sequence
cccagccctgtattcttattcttca

SEQ ID NO: 63176 - DNA, 25 bp, Probe Sequence
acccagccctgtattcttattcttc

SEQ ID NO: 63177 - DNA, 25 bp, Probe Sequence
ccagccctgtattcttattcttcag

SEQ ID NO: 63178 - DNA, 25 bp, Probe Sequence
cacccagccctgtattcttattctt

SEQ ID NO: 63179 - DNA, 25 bp, Probe Sequence
gccctgtattcttattcttcagata

SEQ ID NO: 63180 - DNA, 25 bp, Probe Sequence
cttcctatacaagggaggcatctac

SEQ ID NO: 63181 - DNA, 25 bp, Probe Sequence
tcttcctatacaagggaggcatcta

SEQ ID NO: 63182 - DNA, 25 bp, Probe Sequence
ttcctatacaagggaggcatctaca

SEQ ID NO: 63183 - DNA, 25 bp, Probe Sequence
cttcttcctatacaagggaggcatc

SEQ ID NO: 63184 - DNA, 25 bp, Probe Sequence
ttcttcctatacaagggaggcatct

SEQ ID NO: 63185 - DNA, 25 bp, Probe Sequence
tcctatacaagggaggcatctacag

SEQ ID NO: 63186 - DNA, 25 bp, Probe Sequence
acttcttcctatacaagggaggcat

SEQ ID NO: 63187 - DNA, 25 bp, Probe Sequence
catgaggacttcttcctatacaagg

SEQ ID NO: 63188 - DNA, 25 bp, Probe Sequence
ataacaatgacatctaccaggtcac

SEQ ID NO: 63189 - DNA, 25 bp, Probe Sequence
aataacaatgacatctaccaggtca

SEQ ID NO: 63190 - DNA, 25 bp, Probe Sequence
gcatgaggacttcttcctatacaag

SEQ ID NO: 63191 - DNA, 25 bp, Probe Sequence
taacaatgacatctaccaggtcact

SEQ ID NO: 63192 - DNA, 25 bp, Probe Sequence
ccaacagctatgttaataacaatga

SEQ ID NO: 63193 - DNA, 25 bp, Probe Sequence
cagatggaaggacgctcaaatactg

SEQ ID NO: 63194 - DNA, 25 bp, Probe Sequence
gatggatatagagaatcagaggcac

SEQ ID NO: 63195 - DNA, 25 bp, Probe Sequence
gtaacaccaacacttaacttcagaa

SEQ ID NO: 63196 - DNA, 25 bp, Probe Sequence
gatatagagaatcagaggcaccttg

SEQ ID NO: 63197 - DNA, 25 bp, Probe Sequence
atatagagaatcagaggcaccttgt

SEQ ID NO: 63198 - DNA, 25 bp, Probe Sequence
atggatatagagaatcagaggcacc

SEQ ID NO: 63199 - DNA, 25 bp, Probe Sequence
tatagagaatcagaggcaccttgtt

SEQ ID NO: 63200 - DNA, 25 bp, Probe Sequence
ggatatagagaatcagaggcacctt

SEQ ID NO: 63201 - DNA, 25 bp, Probe Sequence
caacataatgagatactgtgcttcc

SEQ ID NO: 63202 - DNA, 25 bp, Probe Sequence
tgtaacaccaacacttaacttcaga

SEQ ID NO: 63203 - DNA, 25 bp, Probe Sequence
caggaaccttcagatagcagtagag

SEQ ID NO: 63204 - DNA, 25 bp, Probe Sequence
tggatatagagaatcagaggcacct

SEQ ID NO: 63205 - DNA, 25 bp, Probe Sequence
gtcaggaaccttcagatagcagtag

SEQ ID NO: 63206 - DNA, 25 bp, Probe Sequence
ataggcaacataatgagatactgtg

SEQ ID NO: 63207 - DNA, 25 bp, Probe Sequence
tcaggaaccttcagatagcagtaga

SEQ ID NO: 63208 - DNA, 25 bp, Probe Sequence
caatccacagaactctctctccttc

SEQ ID NO: 63209 - DNA, 25 bp, Probe Sequence
gttgtgtggatctgttcctagtata

SEQ ID NO: 63210 - DNA, 25 bp, Probe Sequence
ttgtgtggatctgttcctagtatag

SEQ ID NO: 63211 - DNA, 25 bp, Probe Sequence
gggtcctttccattcctatttagag

SEQ ID NO: 63212 - DNA, 25 bp, Probe Sequence
atctggcactttactcatttccttt

SEQ ID NO: 63213 - DNA, 25 bp, Probe Sequence
aatctggcactttactcatttcctt

SEQ ID NO: 63214 - DNA, 25 bp, Probe Sequence
tgtcaggaaccttcagatagcagta

SEQ ID NO: 63215 - DNA, 25 bp, Probe Sequence
attccaaacacttaacacattcagc

SEQ ID NO: 63216 - DNA, 25 bp, Probe Sequence
gatgctttcagatgacctacttaca

SEQ ID NO: 63217 - DNA, 25 bp, Probe Sequence
tgttgtgtggatctgttcctagtat

SEQ ID NO: 63218 - DNA, 25 bp, Probe Sequence
attgaggagatatgccagatgctta

SEQ ID NO: 63219 - DNA, 25 bp, Probe Sequence
ttgaggagatatgccagatgcttaa

SEQ ID NO: 63220 - DNA, 25 bp, Probe Sequence
aattgaggagatatgccagatgctt

SEQ ID NO: 63221 - DNA, 25 bp, Probe Sequence
ctatgagagctacaagaagaaggac

SEQ ID NO: 63222 - DNA, 25 bp, Probe Sequence
atgagagctacaagaagaaggacta

SEQ ID NO: 63223 - DNA, 25 bp, Probe Sequence
tatgagagctacaagaagaaggact

SEQ ID NO: 63224 - DNA, 25 bp, Probe Sequence
ttgctgtcagattaattccatgatc

SEQ ID NO: 63225 - DNA, 25 bp, Probe Sequence
gagagctacaagaagaaggactaca

SEQ ID NO: 63226 - DNA, 25 bp, Probe Sequence
tgagagctacaagaagaaggactac

SEQ ID NO: 63227 - DNA, 25 bp, Probe Sequence
attgctgtcagattaattccatgat

SEQ ID NO: 63228 - DNA, 25 bp, Probe Sequence
agagctacaagaagaaggactacac

SEQ ID NO: 63229 - DNA, 25 bp, Probe Sequence
aattgctgtcagattaattccatga

SEQ ID NO: 63230 - DNA, 25 bp, Probe Sequence
ggactacttaatcaacgggatgtat

SEQ ID NO: 63231 - DNA, 25 bp, Probe Sequence
gatatgccagatgcttaaacacatt

SEQ ID NO: 63232 - DNA, 25 bp, Probe Sequence
actacttaatcaacgggatgtatgc

SEQ ID NO: 63233 - DNA, 25 bp, Probe Sequence
atatgccagatgcttaaacacattt

SEQ ID NO: 63234 - DNA, 25 bp, Probe Sequence
agatatgccagatgcttaaacacat

SEQ ID NO: 63235 - DNA, 25 bp, Probe Sequence
gactacttaatcaacgggatgtatg

SEQ ID NO: 63236 - DNA, 25 bp, Probe Sequence
tggactacttaatcaacgggatgta

SEQ ID NO: 63237 - DNA, 25 bp, Probe Sequence
gagatatgccagatgcttaaacaca

SEQ ID NO: 63238 - DNA, 25 bp, Probe Sequence
gaggagatatgccagatgcttaaac

SEQ ID NO: 63239 - DNA, 25 bp, Probe Sequence
caaaccaagtgcttccaaattcttt

SEQ ID NO: 63240 - DNA, 25 bp, Probe Sequence
tatgccagatgcttaaacacattta

SEQ ID NO: 63241 - DNA, 25 bp, Probe Sequence
tgaggagatatgccagatgcttaaa

SEQ ID NO: 63242 - DNA, 25 bp, Probe Sequence
ttcgcctgagatataagttgtactg

SEQ ID NO: 63243 - DNA, 25 bp, Probe Sequence
cctgagatataagttgtactgcgta

SEQ ID NO: 63244 - DNA, 25 bp, Probe Sequence
gagatataagttgtactgcgtatgc

SEQ ID NO: 63245 - DNA, 25 bp, Probe Sequence
atgagcaggaagattctgagacatt

SEQ ID NO: 63246 - DNA, 25 bp, Probe Sequence
aatgagcaggaagattctgagacat

SEQ ID NO: 63247 - DNA, 25 bp, Probe Sequence
tgagatataagttgtactgcgtatg

SEQ ID NO: 63248 - DNA, 25 bp, Probe Sequence
ctgagatataagttgtactgcgtat

SEQ ID NO: 63249 - DNA, 25 bp, Probe Sequence
gacatttcgcctgagatataagttg

SEQ ID NO: 63250 - DNA, 25 bp, Probe Sequence
agacatttcgcctgagatataagtt

SEQ ID NO: 63251 - DNA, 25 bp, Probe Sequence
gagacatttcgcctgagatataagt

SEQ ID NO: 63252 - DNA, 25 bp, Probe Sequence
tgagacatttcgcctgagatataag

SEQ ID NO: 63253 - DNA, 25 bp, Probe Sequence
ctgagacatttcgcctgagatataa

SEQ ID NO: 63254 - DNA, 25 bp, Probe Sequence
tcgcctgagatataagttgtactgc

SEQ ID NO: 63255 - DNA, 25 bp, Probe Sequence
catttcgcctgagatataagttgta

SEQ ID NO: 63256 - DNA, 25 bp, Probe Sequence
tctgagacatttcgcctgagatata

SEQ ID NO: 63257 - DNA, 25 bp, Probe Sequence
gcctgagatataagttgtactgcgt

SEQ ID NO: 63258 - DNA, 25 bp, Probe Sequence
caatgagcaggaagattctgagaca

SEQ ID NO: 63259 - DNA, 25 bp, Probe Sequence
acatttcgcctgagatataagttgt

SEQ ID NO: 63260 - DNA, 25 bp, Probe Sequence
ttctgagacatttcgcctgagatat

SEQ ID NO: 63261 - DNA, 25 bp, Probe Sequence
attctgagacatttcgcctgagata

SEQ ID NO: 63262 - DNA, 25 bp, Probe Sequence
gacagagaggaaggaaggattggaa

SEQ ID NO: 63263 - DNA, 25 bp, Probe Sequence
atttcgcctgagatataagttgtac

SEQ ID NO: 63264 - DNA, 25 bp, Probe Sequence
tttcgcctgagatataagttgtact

SEQ ID NO: 63265 - DNA, 25 bp, Probe Sequence
ttctgtccaatgagcaggaagattc

SEQ ID NO: 63266 - DNA, 25 bp, Probe Sequence
tatggaacttcttactaacctgctg

SEQ ID NO: 63267 - DNA, 25 bp, Probe Sequence
ttatggaacttcttactaacctgct

SEQ ID NO: 63268 - DNA, 25 bp, Probe Sequence
gaacttcttactaacctgctgtcaa

SEQ ID NO: 63269 - DNA, 25 bp, Probe Sequence
atgttacagcagaagaagagcaata

SEQ ID NO: 63270 - DNA, 25 bp, Probe Sequence
atagatgttacagcagaagaagagc

SEQ ID NO: 63271 - DNA, 25 bp, Probe Sequence
aacttatatgaagcctgccttactt

SEQ ID NO: 63272 - DNA, 25 bp, Probe Sequence
atgaacttatatgaagcctgcctta

SEQ ID NO: 63273 - DNA, 25 bp, Probe Sequence
tatgaacttatatgaagcctgcctt

SEQ ID NO: 63274 - DNA, 25 bp, Probe Sequence
ctatgaacttatatgaagcctgcct

SEQ ID NO: 63275 - DNA, 25 bp, Probe Sequence
gaacttatatgaagcctgccttact

SEQ ID NO: 63276 - DNA, 25 bp, Probe Sequence
tgaacttatatgaagcctgccttac

SEQ ID NO: 63277 - DNA, 25 bp, Probe Sequence
aataccaagacctgcttctcattat

SEQ ID NO: 63278 - DNA, 25 bp, Probe Sequence
ataccaagacctgcttctcattatg

SEQ ID NO: 63279 - DNA, 25 bp, Probe Sequence
cctgcttctcattatggaacttctt

SEQ ID NO: 63280 - DNA, 25 bp, Probe Sequence
caataccaagacctgcttctcatta

SEQ ID NO: 63281 - DNA, 25 bp, Probe Sequence
attaggaatgacatcaatgagttcg

SEQ ID NO: 63282 - DNA, 25 bp, Probe Sequence
tgttacagcagaagaagagcaatac

SEQ ID NO: 63283 - DNA, 25 bp, Probe Sequence
ttaggaatgacatcaatgagttcgg

SEQ ID NO: 63284 - DNA, 25 bp, Probe Sequence
tgcttctcattatggaacttcttac

SEQ ID NO: 63285 - DNA, 25 bp, Probe Sequence
attatggaacttcttactaacctgc

SEQ ID NO: 63286 - DNA, 25 bp, Probe Sequence
acattgatgaaggctctagtcttag

SEQ ID NO: 63287 - DNA, 25 bp, Probe Sequence
attgatgaaggctctagtcttagga

SEQ ID NO: 63288 - DNA, 25 bp, Probe Sequence
cattgatgaaggctctagtcttagg

SEQ ID NO: 63289 - DNA, 25 bp, Probe Sequence
taattcaatgtgagaactggtggaa

SEQ ID NO: 63290 - DNA, 25 bp, Probe Sequence
gccattaaatggaaacctgaaggcc

SEQ ID NO: 63291 - DNA, 25 bp, Probe Sequence
ggccattaaatggaaacctgaaggc

SEQ ID NO: 63292 - DNA, 25 bp, Probe Sequence
gattgcctctggaactattcttcta

SEQ ID NO: 63293 - DNA, 25 bp, Probe Sequence
aatgattgcctctggaactattctt

SEQ ID NO: 63294 - DNA, 25 bp, Probe Sequence
atgattgcctctggaactattcttc

SEQ ID NO: 63295 - DNA, 25 bp, Probe Sequence
attgcctctggaactattcttctag

SEQ ID NO: 63296 - DNA, 25 bp, Probe Sequence
tgattgcctctggaactattcttct

SEQ ID NO: 63297 - DNA, 25 bp, Probe Sequence
tagactatcccacatcagaatcact

SEQ ID NO: 63298 - DNA, 25 bp, Probe Sequence
tctaaatgattgcctctggaactat

SEQ ID NO: 63299 - DNA, 25 bp, Probe Sequence
atctaaatgattgcctctggaacta

SEQ ID NO: 63300 - DNA, 25 bp, Probe Sequence
aaatgattgcctctggaactattct

SEQ ID NO: 63301 - DNA, 25 bp, Probe Sequence
ctaaatgattgcctctggaactatt

SEQ ID NO: 63302 - DNA, 25 bp, Probe Sequence
ctagactatcccacatcagaatcac

SEQ ID NO: 63303 - DNA, 25 bp, Probe Sequence
taaatgattgcctctggaactattc

SEQ ID NO: 63304 - DNA, 25 bp, Probe Sequence
gatctaaatgattgcctctggaact

SEQ ID NO: 63305 - DNA, 25 bp, Probe Sequence
ggatctaaatgattgcctctggaac

SEQ ID NO: 63306 - DNA, 25 bp, Probe Sequence
ttgcctctggaactattcttctaga

SEQ ID NO: 63307 - DNA, 25 bp, Probe Sequence
gcctctggaactattcttctagact

SEQ ID NO: 63308 - DNA, 25 bp, Probe Sequence
ttaggatctaaatgattgcctctgg

SEQ ID NO: 63309 - DNA, 25 bp, Probe Sequence
tgcctctggaactattcttctagac

SEQ ID NO: 63310 - DNA, 25 bp, Probe Sequence
agactatcccacatcagaatcactg

SEQ ID NO: 63311 - DNA, 25 bp, Probe Sequence
cttattcatcccactctggacaata

SEQ ID NO: 63312 - DNA, 25 bp, Probe Sequence
gatacttattcatcccactctggac

SEQ ID NO: 63313 - DNA, 25 bp, Probe Sequence
agatacttattcatcccactctgga

SEQ ID NO: 63314 - DNA, 25 bp, Probe Sequence
tattcatcccactctggacaataaa

SEQ ID NO: 63315 - DNA, 25 bp, Probe Sequence
taggatctaaatgattgcctctgga

SEQ ID NO: 63316 - DNA, 25 bp, Probe Sequence
gatgtatgctatgtgtctcaggatt

SEQ ID NO: 63317 - DNA, 25 bp, Probe Sequence
tgaagatatggtggtaacaagagaa

SEQ ID NO: 63318 - DNA, 25 bp, Probe Sequence
aatccttccgaattatgctgtatca

SEQ ID NO: 63319 - DNA, 25 bp, Probe Sequence
aagatatggtggtaacaagagaaga

SEQ ID NO: 63320 - DNA, 25 bp, Probe Sequence
agaagatgtatgctatgtgtctcag

SEQ ID NO: 63321 - DNA, 25 bp, Probe Sequence
agatatggtggtaacaagagaagat

SEQ ID NO: 63322 - DNA, 25 bp, Probe Sequence
gaagatatggtggtaacaagagaag

SEQ ID NO: 63323 - DNA, 25 bp, Probe Sequence
ccttccgaattatgctgtatcattg

SEQ ID NO: 63324 - DNA, 25 bp, Probe Sequence
tccttccgaattatgctgtatcatt

SEQ ID NO: 63325 - DNA, 25 bp, Probe Sequence
atccttccgaattatgctgtatcat

SEQ ID NO: 63326 - DNA, 25 bp, Probe Sequence
tccgaattatgctgtatcattgttg

SEQ ID NO: 63327 - DNA, 25 bp, Probe Sequence
aagaagatgtatgctatgtgtctca

SEQ ID NO: 63328 - DNA, 25 bp, Probe Sequence
cttccgaattatgctgtatcattgt

SEQ ID NO: 63329 - DNA, 25 bp, Probe Sequence
gaagatgtatgctatgtgtctcagg

SEQ ID NO: 63330 - DNA, 25 bp, Probe Sequence
ttgaagatatggtggtaacaagaga

SEQ ID NO: 63331 - DNA, 25 bp, Probe Sequence
agatgtatgctatgtgtctcaggat

SEQ ID NO: 63332 - DNA, 25 bp, Probe Sequence
ttccgaattatgctgtatcattgtt

SEQ ID NO: 63333 - DNA, 25 bp, Probe Sequence
aagatgtatgctatgtgtctcagga

SEQ ID NO: 63334 - DNA, 25 bp, Probe Sequence
ccgaattatgctgtatcattgttga

SEQ ID NO: 63335 - DNA, 25 bp, Probe Sequence
gatatggtggtaacaagagaagatt

SEQ ID NO: 63336 - DNA, 25 bp, Probe Sequence
taatccttccgaattatgctgtatc

SEQ ID NO: 63337 - DNA, 25 bp, Probe Sequence
cgatgtcttactccaacagattatg

SEQ ID NO: 63338 - DNA, 25 bp, Probe Sequence
gctagactaccataacaatgcttat

SEQ ID NO: 63339 - DNA, 25 bp, Probe Sequence
atccttctgatataggcattcaaga

SEQ ID NO: 63340 - DNA, 25 bp, Probe Sequence
gggtgtgtccaagaagaaataagtc

SEQ ID NO: 63341 - DNA, 25 bp, Probe Sequence
ttcttgaacagacagaaggatgtaa

SEQ ID NO: 63342 - DNA, 25 bp, Probe Sequence
tcttgaacagacagaaggatgtaaa

SEQ ID NO: 63343 - DNA, 25 bp, Probe Sequence
cttgaacagacagaaggatgtaaag

SEQ ID NO: 63344 - DNA, 25 bp, Probe Sequence
gttcttgaacagacagaaggatgta

SEQ ID NO: 63345 - DNA, 25 bp, Probe Sequence
cgaagatatgctcatgtggtgttga

SEQ ID NO: 63346 - DNA, 25 bp, Probe Sequence
ctggttcttgaacagacagaaggat

SEQ ID NO: 63347 - DNA, 25 bp, Probe Sequence
agactggttcttgaacagacagaag

SEQ ID NO: 63348 - DNA, 25 bp, Probe Sequence
gtgggtgtgtccaagaagaaataag

SEQ ID NO: 63349 - DNA, 25 bp, Probe Sequence
ggttcttgaacagacagaaggatgt

SEQ ID NO: 63350 - DNA, 25 bp, Probe Sequence
tggttcttgaacagacagaaggatg

SEQ ID NO: 63351 - DNA, 25 bp, Probe Sequence
cagactggttcttgaacagacagaa

SEQ ID NO: 63352 - DNA, 25 bp, Probe Sequence
tgggtgtgtccaagaagaaataagt

SEQ ID NO: 63353 - DNA, 25 bp, Probe Sequence
ccgaagatatgctcatgtggtgttg

SEQ ID NO: 63354 - DNA, 25 bp, Probe Sequence
gaagatatgctcatgtggtgttgag

SEQ ID NO: 63355 - DNA, 25 bp, Probe Sequence
gactggttcttgaacagacagaagg

SEQ ID NO: 63356 - DNA, 25 bp, Probe Sequence
actggttcttgaacagacagaagga

SEQ ID NO: 63357 - DNA, 25 bp, Probe Sequence
gacctggagcgactgaagaagattc

SEQ ID NO: 63358 - DNA, 25 bp, Probe Sequence
gaaggatgtaaaggatggaaaatac

SEQ ID NO: 63359 - DNA, 25 bp, Probe Sequence
cgtgggtgtgtccaagaagaaataa

SEQ ID NO: 63360 - DNA, 25 bp, Probe Sequence
tgatcaccattatgcagaatccacg

SEQ ID NO: 63361 - DNA, 25 bp, Probe Sequence
gatatgctcatgtggtgttgaggaa

SEQ ID NO: 63362 - DNA, 25 bp, Probe Sequence
aagatatgctcatgtggtgttgagg

SEQ ID NO: 63363 - DNA, 25 bp, Probe Sequence
gatcaccattatgcagaatccacgc

SEQ ID NO: 63364 - DNA, 25 bp, Probe Sequence
cataacaaatacgaagccaagaagt

SEQ ID NO: 63365 - DNA, 25 bp, Probe Sequence
acataacaaatacgaagccaagaag

SEQ ID NO: 63366 - DNA, 25 bp, Probe Sequence
caacataacaaatacgaagccaaga

SEQ ID NO: 63367 - DNA, 25 bp, Probe Sequence
aacaacataacaaatacgaagccaa

SEQ ID NO: 63368 - DNA, 25 bp, Probe Sequence
aaacaacataacaaatacgaagcca

SEQ ID NO: 63369 - DNA, 25 bp, Probe Sequence
acaacataacaaatacgaagccaag

SEQ ID NO: 63370 - DNA, 25 bp, Probe Sequence
aacataacaaatacgaagccaagaa

SEQ ID NO: 63371 - DNA, 25 bp, Probe Sequence
gaaacaacataacaaatacgaagcc

SEQ ID NO: 63372 - DNA, 25 bp, Probe Sequence
tgaaacaacataacaaatacgaagc

SEQ ID NO: 63373 - DNA, 25 bp, Probe Sequence
ataacaaatacgaagccaagaagta

SEQ ID NO: 63374 - DNA, 25 bp, Probe Sequence
cagaaggatgtctcagatgaggatg

SEQ ID NO: 63375 - DNA, 25 bp, Probe Sequence
gaaggatgtctcagatgaggatgtg

SEQ ID NO: 63376 - DNA, 25 bp, Probe Sequence
agaaggatgtctcagatgaggatgt

SEQ ID NO: 63377 - DNA, 25 bp, Probe Sequence
acagaaggatgtctcagatgaggat

SEQ ID NO: 63378 - DNA, 25 bp, Probe Sequence
aacaaatacgaagccaagaagtatg

SEQ ID NO: 63379 - DNA, 25 bp, Probe Sequence
gcatgaaacaacataacaaatacga

SEQ ID NO: 63380 - DNA, 25 bp, Probe Sequence
caacagaaggatgtctcagatgagg

SEQ ID NO: 63381 - DNA, 25 bp, Probe Sequence
aacagaaggatgtctcagatgagga

SEQ ID NO: 63382 - DNA, 25 bp, Probe Sequence
agattgggaagagctagagaagttt

SEQ ID NO: 63383 - DNA, 25 bp, Probe Sequence
aagattgggaagagctagagaagtt

SEQ ID NO: 63384 - DNA, 25 bp, Probe Sequence
taacaaatacgaagccaagaagtat

SEQ ID NO: 63385 - DNA, 25 bp, Probe Sequence
gatttggaagattgggaagagctag

SEQ ID NO: 63386 - DNA, 25 bp, Probe Sequence
atttggaagattgggaagagctaga

SEQ ID NO: 63387 - DNA, 25 bp, Probe Sequence
agatttggaagattgggaagagcta

SEQ ID NO: 63388 - DNA, 25 bp, Probe Sequence
aatgagttgagtaatgtggagttcc

SEQ ID NO: 63389 - DNA, 25 bp, Probe Sequence
caatgagttgagtaatgtggagttc

SEQ ID NO: 63390 - DNA, 25 bp, Probe Sequence
acaatgagttgagtaatgtggagtt

SEQ ID NO: 63391 - DNA, 25 bp, Probe Sequence
gacaatgagttgagtaatgtggagt

SEQ ID NO: 63392 - DNA, 25 bp, Probe Sequence
ggacaatgagttgagtaatgtggag

SEQ ID NO: 63393 - DNA, 25 bp, Probe Sequence
aggacaatgagttgagtaatgtgga

SEQ ID NO: 63394 - DNA, 25 bp, Probe Sequence
caggacaatgagttgagtaatgtgg

SEQ ID NO: 63395 - DNA, 25 bp, Probe Sequence
ccaggacaatgagttgagtaatgtg

SEQ ID NO: 63396 - DNA, 25 bp, Probe Sequence
cccagataacaccctacaagaaact

SEQ ID NO: 63397 - DNA, 25 bp, Probe Sequence
ccagaataaacaactgctcaacaaa

SEQ ID NO: 63398 - DNA, 25 bp, Probe Sequence
atgagttgagtaatgtggagttcca

SEQ ID NO: 63399 - DNA, 25 bp, Probe Sequence
cagataacaccctacaagaaactgg

SEQ ID NO: 63400 - DNA, 25 bp, Probe Sequence
ccagataacaccctacaagaaactg

SEQ ID NO: 63401 - DNA, 25 bp, Probe Sequence
cccaggacaatgagttgagtaatgt

SEQ ID NO: 63402 - DNA, 25 bp, Probe Sequence
gccagaataaacaactgctcaacaa

SEQ ID NO: 63403 - DNA, 25 bp, Probe Sequence
gatattcagaggtaggcagccaaag

SEQ ID NO: 63404 - DNA, 25 bp, Probe Sequence
gcccaggacaatgagttgagtaatg

SEQ ID NO: 63405 - DNA, 25 bp, Probe Sequence
cagaataaacaactgctcaacaaaa

SEQ ID NO: 63406 - DNA, 25 bp, Probe Sequence
gataacaccctacaagaaactggga

SEQ ID NO: 63407 - DNA, 25 bp, Probe Sequence
agataacaccctacaagaaactggg

SEQ ID NO: 63408 - DNA, 25 bp, Probe Sequence
ataacaccctacaagaaactgggac

SEQ ID NO: 63409 - DNA, 25 bp, Probe Sequence
ccccagataacaccctacaagaaac

SEQ ID NO: 63410 - DNA, 25 bp, Probe Sequence
aggatattcagaggtaggcagccaa

SEQ ID NO: 63411 - DNA, 25 bp, Probe Sequence
atattcagaggtaggcagccaaagg

SEQ ID NO: 63412 - DNA, 25 bp, Probe Sequence
cctaatggaagatgatgacgatagt

SEQ ID NO: 63413 - DNA, 25 bp, Probe Sequence
aatggaagatgatgacgatagtgac

SEQ ID NO: 63414 - DNA, 25 bp, Probe Sequence
taatggaagatgatgacgatagtga

SEQ ID NO: 63415 - DNA, 25 bp, Probe Sequence
ctaatggaagatgatgacgatagtg

SEQ ID NO: 63416 - DNA, 25 bp, Probe Sequence
atggaagatgatgacgatagtgact

SEQ ID NO: 63417 - DNA, 25 bp, Probe Sequence
tggaagatgatgacgatagtgacta

SEQ ID NO: 63418 - DNA, 25 bp, Probe Sequence
aatcaacaagatcagtctacaggtc

SEQ ID NO: 63419 - DNA, 25 bp, Probe Sequence
taatcaacaagatcagtctacaggt

SEQ ID NO: 63420 - DNA, 25 bp, Probe Sequence
atcaacaagatcagtctacaggtca

SEQ ID NO: 63421 - DNA, 25 bp, Probe Sequence
tcctaatggaagatgatgacgatag

SEQ ID NO: 63422 - DNA, 25 bp, Probe Sequence
ttaatcaacaagatcagtctacagg

SEQ ID NO: 63423 - DNA, 25 bp, Probe Sequence
aagatgatgacgatagtgactatgg

SEQ ID NO: 63424 - DNA, 25 bp, Probe Sequence
atcactggattgactgcttcatctt

SEQ ID NO: 63425 - DNA, 25 bp, Probe Sequence
ttaatcactggattgactgcttcat

SEQ ID NO: 63426 - DNA, 25 bp, Probe Sequence
ggaagatgatgacgatagtgactat

SEQ ID NO: 63427 - DNA, 25 bp, Probe Sequence
aacaagatcagtctacaggtcacag

SEQ ID NO: 63428 - DNA, 25 bp, Probe Sequence
tcaacaagatcagtctacaggtcac

SEQ ID NO: 63429 - DNA, 25 bp, Probe Sequence
taatcactggattgactgcttcatc

SEQ ID NO: 63430 - DNA, 25 bp, Probe Sequence
ttatttgagggtatgggctttcttt

SEQ ID NO: 63431 - DNA, 25 bp, Probe Sequence
cttatttgagggtatgggctttctt

SEQ ID NO: 63432 - DNA, 25 bp, Probe Sequence
aggcaggtaggagataaagatgaat

SEQ ID NO: 63433 - DNA, 25 bp, Probe Sequence
caacaagatcagtctacaggtcaca

SEQ ID NO: 63434 - DNA, 25 bp, Probe Sequence
gaagatgatgacgatagtgactatg

SEQ ID NO: 63435 - DNA, 25 bp, Probe Sequence
ggcaggtaggagataaagatgaatt

SEQ ID NO: 63436 - DNA, 25 bp, Probe Sequence
cattcatctccatggcactctctgg

SEQ ID NO: 63437 - DNA, 25 bp, Probe Sequence
taccattcatctccatggcactctc

SEQ ID NO: 63438 - DNA, 25 bp, Probe Sequence
ctaccattcatctccatggcactct

SEQ ID NO: 63439 - DNA, 25 bp, Probe Sequence
cctctgctcattccacaaaaccaga

SEQ ID NO: 63440 - DNA, 25 bp, Probe Sequence
cctaccattcatctccatggcactc

SEQ ID NO: 63441 - DNA, 25 bp, Probe Sequence
ccattcatctccatggcactctctg

SEQ ID NO: 63442 - DNA, 25 bp, Probe Sequence
cgtattgttgtattcctccagtgtt

SEQ ID NO: 63443 - DNA, 25 bp, Probe Sequence
attgttgtattcctccagtgttaag

SEQ ID NO: 63444 - DNA, 25 bp, Probe Sequence
ttgttgtattcctccagtgttaagc

SEQ ID NO: 63445 - DNA, 25 bp, Probe Sequence
gtattgttgtattcctccagtgtta

SEQ ID NO: 63446 - DNA, 25 bp, Probe Sequence
tattgttgtattcctccagtgttaa

SEQ ID NO: 63447 - DNA, 25 bp, Probe Sequence
gttgtattcctccagtgttaagcta

SEQ ID NO: 63448 - DNA, 25 bp, Probe Sequence
ttgtattcctccagtgttaagctat

SEQ ID NO: 63449 - DNA, 25 bp, Probe Sequence
ttctgaagagctggtataggaagtt

SEQ ID NO: 63450 - DNA, 25 bp, Probe Sequence
tgtattcctccagtgttaagctata

SEQ ID NO: 63451 - DNA, 25 bp, Probe Sequence
ccaggttccttatccttctgatgaa

SEQ ID NO: 63452 - DNA, 25 bp, Probe Sequence
aagaacgtattgttgtattcctcca

SEQ ID NO: 63453 - DNA, 25 bp, Probe Sequence
agaacgtattgttgtattcctccag

SEQ ID NO: 63454 - DNA, 25 bp, Probe Sequence
ttatagccagggtcctactaactac

SEQ ID NO: 63455 - DNA, 25 bp, Probe Sequence
gaacgtattgttgtattcctccagt

SEQ ID NO: 63456 - DNA, 25 bp, Probe Sequence
tgttgtattcctccagtgttaagct

SEQ ID NO: 63457 - DNA, 25 bp, Probe Sequence
gttgtggacctccttctctaacttg

SEQ ID NO: 63458 - DNA, 25 bp, Probe Sequence
aacgtattgttgtattcctccagtg

SEQ ID NO: 63459 - DNA, 25 bp, Probe Sequence
tatagccagggtcctactaactact

SEQ ID NO: 63460 - DNA, 25 bp, Probe Sequence
ttctcagcatcaaataccttgtaac

SEQ ID NO: 63461 - DNA, 25 bp, Probe Sequence
gtattcctccagtgttaagctatag

SEQ ID NO: 63462 - DNA, 25 bp, Probe Sequence
aatgtgctttgtgaactctgcttta

SEQ ID NO: 63463 - DNA, 25 bp, Probe Sequence
tctctgctccttaaatatcatctct

SEQ ID NO: 63464 - DNA, 25 bp, Probe Sequence
atgtgctttgtgaactctgctttaa

SEQ ID NO: 63465 - DNA, 25 bp, Probe Sequence
tctcagcatcaaataccttgtaacg

SEQ ID NO: 63466 - DNA, 25 bp, Probe Sequence
ttatatcaggaacttgagcatctgc

SEQ ID NO: 63467 - DNA, 25 bp, Probe Sequence
catagtgcttacattgtattaggtg

SEQ ID NO: 63468 - DNA, 25 bp, Probe Sequence
agtgcttacattgtattaggtgtta

SEQ ID NO: 63469 - DNA, 25 bp, Probe Sequence
tagtgcttacattgtattaggtgtt

SEQ ID NO: 63470 - DNA, 25 bp, Probe Sequence
atagtgcttacattgtattaggtgt

SEQ ID NO: 63471 - DNA, 25 bp, Probe Sequence
acatagtgcttacattgtattaggt

SEQ ID NO: 63472 - DNA, 25 bp, Probe Sequence
aagtgtagatcattgtattcagaga

SEQ ID NO: 63473 - DNA, 25 bp, Probe Sequence
tgaccagactgaatttcctcataaa

SEQ ID NO: 63474 - DNA, 25 bp, Probe Sequence
accagactgaatttcctcataaaga

SEQ ID NO: 63475 - DNA, 25 bp, Probe Sequence
gtgaccagactgaatttcctcataa

SEQ ID NO: 63476 - DNA, 25 bp, Probe Sequence
gaccagactgaatttcctcataaag

SEQ ID NO: 63477 - DNA, 25 bp, Probe Sequence
tgacaatgtgaccagactgaatttc

SEQ ID NO: 63478 - DNA, 25 bp, Probe Sequence
agtgtagatcattgtattcagagat

SEQ ID NO: 63479 - DNA, 25 bp, Probe Sequence
gaagtgtagatcattgtattcagag

SEQ ID NO: 63480 - DNA, 25 bp, Probe Sequence
ccagactgaatttcctcataaagaa

SEQ ID NO: 63481 - DNA, 25 bp, Probe Sequence
caatgtgaccagactgaatttcctc

SEQ ID NO: 63482 - DNA, 25 bp, Probe Sequence
tgtgaccagactgaatttcctcata

SEQ ID NO: 63483 - DNA, 25 bp, Probe Sequence
gtgcttacattgtattaggtgttat

SEQ ID NO: 63484 - DNA, 25 bp, Probe Sequence
gacaatgtgaccagactgaatttcc

SEQ ID NO: 63485 - DNA, 25 bp, Probe Sequence
tatatcaggaacttgagcatctgca

SEQ ID NO: 63486 - DNA, 25 bp, Probe Sequence
tttatatcaggaacttgagcatctg

SEQ ID NO: 63487 - DNA, 25 bp, Probe Sequence
acaatgtgaccagactgaatttcct

SEQ ID NO: 63488 - DNA, 25 bp, Probe Sequence
atgtgaccagactgaatttcctcat

SEQ ID NO: 63489 - DNA, 25 bp, Probe Sequence
ctgacaatgtgaccagactgaattt

SEQ ID NO: 63490 - DNA, 25 bp, Probe Sequence
tggtagtagattcatgttcaaggaa

SEQ ID NO: 63491 - DNA, 25 bp, Probe Sequence
ttggtagtagattcatgttcaagga

SEQ ID NO: 63492 - DNA, 25 bp, Probe Sequence
gttggtagtagattcatgttcaagg

SEQ ID NO: 63493 - DNA, 25 bp, Probe Sequence
tgagttggtagtagattcatgttca

SEQ ID NO: 63494 - DNA, 25 bp, Probe Sequence
tctgagttggtagtagattcatgtt

SEQ ID NO: 63495 - DNA, 25 bp, Probe Sequence
ttctgagttggtagtagattcatgt

SEQ ID NO: 63496 - DNA, 25 bp, Probe Sequence
ctgagttggtagtagattcatgttc

SEQ ID NO: 63497 - DNA, 25 bp, Probe Sequence
agttggtagtagattcatgttcaag

SEQ ID NO: 63498 - DNA, 25 bp, Probe Sequence
gagttggtagtagattcatgttcaa

SEQ ID NO: 63499 - DNA, 25 bp, Probe Sequence
catactttcctgctgacatatctga

SEQ ID NO: 63500 - DNA, 25 bp, Probe Sequence
ttatgctgaaagtagaacacaagtc

SEQ ID NO: 63501 - DNA, 25 bp, Probe Sequence
ttcatgcagttgccaatattcataa

SEQ ID NO: 63502 - DNA, 25 bp, Probe Sequence
atactttcctgctgacatatctgat

SEQ ID NO: 63503 - DNA, 25 bp, Probe Sequence
tcatgcagttgccaatattcataac

SEQ ID NO: 63504 - DNA, 25 bp, Probe Sequence
agtagaacacaagtcacatttcaga

SEQ ID NO: 63505 - DNA, 25 bp, Probe Sequence
aagtagaacacaagtcacatttcag

SEQ ID NO: 63506 - DNA, 25 bp, Probe Sequence
tttatgctgaaagtagaacacaagt

SEQ ID NO: 63507 - DNA, 25 bp, Probe Sequence
tagaacacaagtcacatttcagatg

SEQ ID NO: 63508 - DNA, 25 bp, Probe Sequence
gtagaacacaagtcacatttcagat

SEQ ID NO: 63509 - DNA, 25 bp, Probe Sequence
aaagtagaacacaagtcacatttca

SEQ ID NO: 63510 - DNA, 25 bp, Probe Sequence
ctcatactttcctgctgacatatct

SEQ ID NO: 63511 - DNA, 25 bp, Probe Sequence
tcatactttcctgctgacatatctg

SEQ ID NO: 63512 - DNA, 25 bp, Probe Sequence
tatgctgaaagtagaacacaagtca

SEQ ID NO: 63513 - DNA, 25 bp, Probe Sequence
ctgaaagtagaacacaagtcacatt

SEQ ID NO: 63514 - DNA, 25 bp, Probe Sequence
aataaaggcatggaagaacagagtg

SEQ ID NO: 63515 - DNA, 25 bp, Probe Sequence
caataaaggcatggaagaacagagt

SEQ ID NO: 63516 - DNA, 25 bp, Probe Sequence
ataaaggcatggaagaacagagtga

SEQ ID NO: 63517 - DNA, 25 bp, Probe Sequence
taaaggcatggaagaacagagtgac

SEQ ID NO: 63518 - DNA, 25 bp, Probe Sequence
ccaataaaggcatggaagaacagag

SEQ ID NO: 63519 - DNA, 25 bp, Probe Sequence
aaggcatggaagaacagagtgacaa

SEQ ID NO: 63520 - DNA, 25 bp, Probe Sequence
caccaataaaggcatggaagaacag

SEQ ID NO: 63521 - DNA, 25 bp, Probe Sequence
accaataaaggcatggaagaacaga

SEQ ID NO: 63522 - DNA, 25 bp, Probe Sequence
tcaccaataaaggcatggaagaaca

SEQ ID NO: 63523 - DNA, 25 bp, Probe Sequence
aggcatggaagaacagagtgacaaa

SEQ ID NO: 63524 - DNA, 25 bp, Probe Sequence
aaaggcatggaagaacagagtgaca

SEQ ID NO: 63525 - DNA, 25 bp, Probe Sequence
gtattggttggaagagaatctgagt

SEQ ID NO: 63526 - DNA, 25 bp, Probe Sequence
ggtattggttggaagagaatctgag

SEQ ID NO: 63527 - DNA, 25 bp, Probe Sequence
tattggttggaagagaatctgagta

SEQ ID NO: 63528 - DNA, 25 bp, Probe Sequence
aggtattggttggaagagaatctga

SEQ ID NO: 63529 - DNA, 25 bp, Probe Sequence
attggttggaagagaatctgagtac

SEQ ID NO: 63530 - DNA, 25 bp, Probe Sequence
ttggttggaagagaatctgagtaca

SEQ ID NO: 63531 - DNA, 25 bp, Probe Sequence
caggtattggttggaagagaatctg

SEQ ID NO: 63532 - DNA, 25 bp, Probe Sequence
tggttggaagagaatctgagtacaa

SEQ ID NO: 63533 - DNA, 25 bp, Probe Sequence
tgtattacaacgaagtgaggtcatg

SEQ ID NO: 63534 - DNA, 25 bp, Probe Sequence
tattacaacgaagtgaggtcatgct

SEQ ID NO: 63535 - DNA, 25 bp, Probe Sequence
gtattacaacgaagtgaggtcatgc

SEQ ID NO: 63536 - DNA, 25 bp, Probe Sequence
gcaggtattggttggaagagaatct

SEQ ID NO: 63537 - DNA, 25 bp, Probe Sequence
ttacaacgaagtgaggtcatgctta

SEQ ID NO: 63538 - DNA, 25 bp, Probe Sequence
agaggtatgaattaatgctacacat

SEQ ID NO: 63539 - DNA, 25 bp, Probe Sequence
attacaacgaagtgaggtcatgctt

SEQ ID NO: 63540 - DNA, 25 bp, Probe Sequence
tacacacatttattcagatactccc

SEQ ID NO: 63541 - DNA, 25 bp, Probe Sequence
ttggaagagaatctgagtacaaaca

SEQ ID NO: 63542 - DNA, 25 bp, Probe Sequence
gttggaagagaatctgagtacaaac

SEQ ID NO: 63543 - DNA, 25 bp, Probe Sequence
ggttggaagagaatctgagtacaaa

SEQ ID NO: 63544 - DNA, 25 bp, Probe Sequence
tacaacgaagtgaggtcatgcttac

SEQ ID NO: 63545 - DNA, 25 bp, Probe Sequence
tagaggtatgaattaatgctacaca

SEQ ID NO: 63546 - DNA, 25 bp, Probe Sequence
gaagaagccacattccaaatctcag

SEQ ID NO: 63547 - DNA, 25 bp, Probe Sequence
gaagagaatctgagtacaaacaggt

SEQ ID NO: 63548 - DNA, 25 bp, Probe Sequence
tggaagagaatctgagtacaaacag

SEQ ID NO: 63549 - DNA, 25 bp, Probe Sequence
aattaaaccagttaagtctcccagg

SEQ ID NO: 63550 - DNA, 25 bp, Probe Sequence
caattaaaccagttaagtctcccag

SEQ ID NO: 63551 - DNA, 25 bp, Probe Sequence
aagcaattaaaccagttaagtctcc

SEQ ID NO: 63552 - DNA, 25 bp, Probe Sequence
taaaccagttaagtctcccaggaaa

SEQ ID NO: 63553 - DNA, 25 bp, Probe Sequence
agcaattaaaccagttaagtctccc

SEQ ID NO: 63554 - DNA, 25 bp, Probe Sequence
ggctaagcaattaaaccagttaagt

SEQ ID NO: 63555 - DNA, 25 bp, Probe Sequence
attaaaccagttaagtctcccagga

SEQ ID NO: 63556 - DNA, 25 bp, Probe Sequence
gcaattaaaccagttaagtctccca

SEQ ID NO: 63557 - DNA, 25 bp, Probe Sequence
gggctaagcaattaaaccagttaag

SEQ ID NO: 63558 - DNA, 25 bp, Probe Sequence
agggctaagcaattaaaccagttaa

SEQ ID NO: 63559 - DNA, 25 bp, Probe Sequence
cagggctaagcaattaaaccagtta

SEQ ID NO: 63560 - DNA, 25 bp, Probe Sequence
ttaaaccagttaagtctcccaggaa

SEQ ID NO: 63561 - DNA, 25 bp, Probe Sequence
gctaagcaattaaaccagttaagtc

SEQ ID NO: 63562 - DNA, 25 bp, Probe Sequence
taagcaattaaaccagttaagtctc

SEQ ID NO: 63563 - DNA, 25 bp, Probe Sequence
ctaagcaattaaaccagttaagtct

SEQ ID NO: 63564 - DNA, 25 bp, Probe Sequence
caccaagactaatctcagccaaacc

SEQ ID NO: 63565 - DNA, 25 bp, Probe Sequence
ccagggctaagcaattaaaccagtt

SEQ ID NO: 63566 - DNA, 25 bp, Probe Sequence
accaagactaatctcagccaaacct

SEQ ID NO: 63567 - DNA, 25 bp, Probe Sequence
ccaagactaatctcagccaaacctg

SEQ ID NO: 63568 - DNA, 25 bp, Probe Sequence
aaaccagttaagtctcccaggaaaa

SEQ ID NO: 63569 - DNA, 25 bp, Probe Sequence
gacttgagtctcaccctacagatga

SEQ ID NO: 63570 - DNA, 25 bp, Probe Sequence
caccagggctaagcaattaaaccag

SEQ ID NO: 63571 - DNA, 25 bp, Probe Sequence
caagactaatctcagccaaacctgc

SEQ ID NO: 63572 - DNA, 25 bp, Probe Sequence
accagggctaagcaattaaaccagt

SEQ ID NO: 63573 - DNA, 25 bp, Probe Sequence
tgaccaccatatatagttgtgtacg

SEQ ID NO: 63574 - DNA, 25 bp, Probe Sequence
agatgaccaccatatatagttgtgt

SEQ ID NO: 63575 - DNA, 25 bp, Probe Sequence
ggaagatgaagtagaaacaggaagt

SEQ ID NO: 63576 - DNA, 25 bp, Probe Sequence
agacaagggaagatgaagtagaaac

SEQ ID NO: 63577 - DNA, 25 bp, Probe Sequence
gagacaagggaagatgaagtagaaa

SEQ ID NO: 63578 - DNA, 25 bp, Probe Sequence
aaagagacaagggaagatgaagtag

SEQ ID NO: 63579 - DNA, 25 bp, Probe Sequence
caaagagacaagggaagatgaagta

SEQ ID NO: 63580 - DNA, 25 bp, Probe Sequence
acaagggaagatgaagtagaaacag

SEQ ID NO: 63581 - DNA, 25 bp, Probe Sequence
gacaagggaagatgaagtagaaaca

SEQ ID NO: 63582 - DNA, 25 bp, Probe Sequence
agagacaagggaagatgaagtagaa

SEQ ID NO: 63583 - DNA, 25 bp, Probe Sequence
aagagacaagggaagatgaagtaga

SEQ ID NO: 63584 - DNA, 25 bp, Probe Sequence
gggaagatgaagtagaaacaggaag

SEQ ID NO: 63585 - DNA, 25 bp, Probe Sequence
gaagatgaagtagaaacaggaagtc

SEQ ID NO: 63586 - DNA, 25 bp, Probe Sequence
caagggaagatgaagtagaaacagg

SEQ ID NO: 63587 - DNA, 25 bp, Probe Sequence
agggaagatgaagtagaaacaggaa

SEQ ID NO: 63588 - DNA, 25 bp, Probe Sequence
aagggaagatgaagtagaaacagga

SEQ ID NO: 63589 - DNA, 25 bp, Probe Sequence
gagttcaagagcaacctgaccaata

SEQ ID NO: 63590 - DNA, 25 bp, Probe Sequence
atagttgtgtacgtgttattccaag

SEQ ID NO: 63591 - DNA, 25 bp, Probe Sequence
aagatgaccaccatatatagttgtg

SEQ ID NO: 63592 - DNA, 25 bp, Probe Sequence
aagatgaagtagaaacaggaagtca

SEQ ID NO: 63593 - DNA, 25 bp, Probe Sequence
ctgagagaggagaatagcttgaacc

SEQ ID NO: 63594 - DNA, 25 bp, Probe Sequence
agttcaagagcaacctgaccaatac

SEQ ID NO: 63595 - DNA, 25 bp, Probe Sequence
tagttgtgtacgtgttattccaagc

SEQ ID NO: 63596 - DNA, 25 bp, Probe Sequence
atgaccaccatatatagttgtgtac

SEQ ID NO: 63597 - DNA, 25 bp, Probe Sequence
cgcataactataatcccagctactt

SEQ ID NO: 63598 - DNA, 25 bp, Probe Sequence
gcataactataatcccagctacttg

SEQ ID NO: 63599 - DNA, 25 bp, Probe Sequence
ccgcataactataatcccagctact

SEQ ID NO: 63600 - DNA, 25 bp, Probe Sequence
gtgaaaccccatctctactaagaat

SEQ ID NO: 63601 - DNA, 25 bp, Probe Sequence
cataactataatcccagctacttgg

SEQ ID NO: 63602 - DNA, 25 bp, Probe Sequence
aaaagcaaaactccatctcaaagag

SEQ ID NO: 63603 - DNA, 25 bp, Probe Sequence
accccatctctactaagaatacaaa

SEQ ID NO: 63604 - DNA, 25 bp, Probe Sequence
aaccccatctctactaagaatacaa

SEQ ID NO: 63605 - DNA, 25 bp, Probe Sequence
aaaccccatctctactaagaataca

SEQ ID NO: 63606 - DNA, 25 bp, Probe Sequence
tgaaaccccatctctactaagaata

SEQ ID NO: 63607 - DNA, 25 bp, Probe Sequence
gaaaccccatctctactaagaatac

SEQ ID NO: 63608 - DNA, 25 bp, Probe Sequence
gccgcataactataatcccagctac

SEQ ID NO: 63609 - DNA, 25 bp, Probe Sequence
ccccatctctactaagaatacaaaa

SEQ ID NO: 63610 - DNA, 25 bp, Probe Sequence
catggtgccgcataactataatccc

SEQ ID NO: 63611 - DNA, 25 bp, Probe Sequence
tgccgcataactataatcccagcta

SEQ ID NO: 63612 - DNA, 25 bp, Probe Sequence
ggtgaaaccccatctctactaagaa

SEQ ID NO: 63613 - DNA, 25 bp, Probe Sequence
gcatggtgccgcataactataatcc

SEQ ID NO: 63614 - DNA, 25 bp, Probe Sequence
tggtgaaaccccatctctactaaga

SEQ ID NO: 63615 - DNA, 25 bp, Probe Sequence
atggtgccgcataactataatccca

SEQ ID NO: 63616 - DNA, 25 bp, Probe Sequence
tggtgccgcataactataatcccag

SEQ ID NO: 63617 - DNA, 25 bp, Probe Sequence
gcaaaactccatctcaaagagaaaa

SEQ ID NO: 63618 - DNA, 25 bp, Probe Sequence
gtgccgcataactataatcccagct

SEQ ID NO: 63619 - DNA, 25 bp, Probe Sequence
agcaaaactccatctcaaagagaaa

SEQ ID NO: 63620 - DNA, 25 bp, Probe Sequence
aagcaaaactccatctcaaagagaa

SEQ ID NO: 63621 - DNA, 25 bp, Probe Sequence
gaacatactcttccaccagaatctc

SEQ ID NO: 63622 - DNA, 25 bp, Probe Sequence
tgaacatactcttccaccagaatct

SEQ ID NO: 63623 - DNA, 25 bp, Probe Sequence
tactcttccaccagaatctcctcta

SEQ ID NO: 63624 - DNA, 25 bp, Probe Sequence
aacatactcttccaccagaatctcc

SEQ ID NO: 63625 - DNA, 25 bp, Probe Sequence
atatgtaagtggaactcagaaggca

SEQ ID NO: 63626 - DNA, 25 bp, Probe Sequence
tatgtaagtggaactcagaaggcaa

SEQ ID NO: 63627 - DNA, 25 bp, Probe Sequence
atactcttccaccagaatctcctct

SEQ ID NO: 63628 - DNA, 25 bp, Probe Sequence
catactcttccaccagaatctcctc

SEQ ID NO: 63629 - DNA, 25 bp, Probe Sequence
ctgaacatactcttccaccagaatc

SEQ ID NO: 63630 - DNA, 25 bp, Probe Sequence
acatactcttccaccagaatctcct

SEQ ID NO: 63631 - DNA, 25 bp, Probe Sequence
taagtggaactcagaaggcaacatt

SEQ ID NO: 63632 - DNA, 25 bp, Probe Sequence
cctgaacatactcttccaccagaat

SEQ ID NO: 63633 - DNA, 25 bp, Probe Sequence
cttccaccagaatctcctctacaga

SEQ ID NO: 63634 - DNA, 25 bp, Probe Sequence
tcttccaccagaatctcctctacag

SEQ ID NO: 63635 - DNA, 25 bp, Probe Sequence
ctcttccaccagaatctcctctaca

SEQ ID NO: 63636 - DNA, 25 bp, Probe Sequence
actcttccaccagaatctcctctac

SEQ ID NO: 63637 - DNA, 25 bp, Probe Sequence
gtggctgaatctactttctcctatg

SEQ ID NO: 63638 - DNA, 25 bp, Probe Sequence
caacattccctgaacatactcttcc

SEQ ID NO: 63639 - DNA, 25 bp, Probe Sequence
agtggctgaatctactttctcctat

SEQ ID NO: 63640 - DNA, 25 bp, Probe Sequence
gtaagtggaactcagaaggcaacat

SEQ ID NO: 63641 - DNA, 25 bp, Probe Sequence
atgtaagtggaactcagaaggcaac

SEQ ID NO: 63642 - DNA, 25 bp, Probe Sequence
tggctgaatctactttctcctatgg

SEQ ID NO: 63643 - DNA, 25 bp, Probe Sequence
aacattccctgaacatactcttcca

SEQ ID NO: 63644 - DNA, 25 bp, Probe Sequence
agcatatgtaagtggaactcagaag

SEQ ID NO: 63645 - DNA, 25 bp, Probe Sequence
atattcttaactggactgtctcgtt

SEQ ID NO: 63646 - DNA, 25 bp, Probe Sequence
tatattcttaactggactgtctcgt

SEQ ID NO: 63647 - DNA, 25 bp, Probe Sequence
gtatattcttaactggactgtctcg

SEQ ID NO: 63648 - DNA, 25 bp, Probe Sequence
tgacattattgtaactaccgtgtga

SEQ ID NO: 63649 - DNA, 25 bp, Probe Sequence
gtagttatcactcttaggtcagaca

SEQ ID NO: 63650 - DNA, 25 bp, Probe Sequence
ctgacattattgtaactaccgtgtg

SEQ ID NO: 63651 - DNA, 25 bp, Probe Sequence
tctgacattattgtaactaccgtgt

SEQ ID NO: 63652 - DNA, 25 bp, Probe Sequence
tagttatcactcttaggtcagacag

SEQ ID NO: 63653 - DNA, 25 bp, Probe Sequence
agtagttatcactcttaggtcagac

SEQ ID NO: 63654 - DNA, 25 bp, Probe Sequence
gacattattgtaactaccgtgtgat

SEQ ID NO: 63655 - DNA, 25 bp, Probe Sequence
agttatcactcttaggtcagacagc

SEQ ID NO: 63656 - DNA, 25 bp, Probe Sequence
atctgacattattgtaactaccgtg

SEQ ID NO: 63657 - DNA, 25 bp, Probe Sequence
cttaggtcagacagccatcagaatt

SEQ ID NO: 63658 - DNA, 25 bp, Probe Sequence
acattattgtaactaccgtgtgatc

SEQ ID NO: 63659 - DNA, 25 bp, Probe Sequence
tgtatattcttaactggactgtctc

SEQ ID NO: 63660 - DNA, 25 bp, Probe Sequence
gttatcactcttaggtcagacagcc

SEQ ID NO: 63661 - DNA, 25 bp, Probe Sequence
tacacacataaagacaccactcaaa

SEQ ID NO: 63662 - DNA, 25 bp, Probe Sequence
ttacacacataaagacaccactcaa

SEQ ID NO: 63663 - DNA, 25 bp, Probe Sequence
catttctggtttggtttgttctcta

SEQ ID NO: 63664 - DNA, 25 bp, Probe Sequence
ttacccttgtgtgtttagatgtgta

SEQ ID NO: 63665 - DNA, 25 bp, Probe Sequence
tatcactcttaggtcagacagccat

SEQ ID NO: 63666 - DNA, 25 bp, Probe Sequence
tacccttgtgtgtttagatgtgtat

SEQ ID NO: 63667 - DNA, 25 bp, Probe Sequence
aaacattaacattcagacacactcc

SEQ ID NO: 63668 - DNA, 25 bp, Probe Sequence
ccttgtgtgtttagatgtgtatgaa

SEQ ID NO: 63669 - DNA, 25 bp, Probe Sequence
attgagtcagatgctaacgagatac

SEQ ID NO: 63670 - DNA, 25 bp, Probe Sequence
aattgagtcagatgctaacgagata

SEQ ID NO: 63671 - DNA, 25 bp, Probe Sequence
taattgagtcagatgctaacgagat

SEQ ID NO: 63672 - DNA, 25 bp, Probe Sequence
ataattgagtcagatgctaacgaga

SEQ ID NO: 63673 - DNA, 25 bp, Probe Sequence
gtgctcatcttcagacttaatacag

SEQ ID NO: 63674 - DNA, 25 bp, Probe Sequence
aataattgagtcagatgctaacgag

SEQ ID NO: 63675 - DNA, 25 bp, Probe Sequence
ctcatcttcagacttaatacagcaa

SEQ ID NO: 63676 - DNA, 25 bp, Probe Sequence
atgtgctcatcttcagacttaatac

SEQ ID NO: 63677 - DNA, 25 bp, Probe Sequence
gatgaacctggaacttctgtgaatt

SEQ ID NO: 63678 - DNA, 25 bp, Probe Sequence
agttgtctgttaggtccattctgtt

SEQ ID NO: 63679 - DNA, 25 bp, Probe Sequence
ttgagtcagatgctaacgagatact

SEQ ID NO: 63680 - DNA, 25 bp, Probe Sequence
tgtgctcatcttcagacttaataca

SEQ ID NO: 63681 - DNA, 25 bp, Probe Sequence
gctgttcttctacatcacattgtta

SEQ ID NO: 63682 - DNA, 25 bp, Probe Sequence
tcatcttcagacttaatacagcaat

SEQ ID NO: 63683 - DNA, 25 bp, Probe Sequence
tgatgaacctggaacttctgtgaat

SEQ ID NO: 63684 - DNA, 25 bp, Probe Sequence
atgatgaacctggaacttctgtgaa

SEQ ID NO: 63685 - DNA, 25 bp, Probe Sequence
ttagtcatgtcgattagctgttctt

SEQ ID NO: 63686 - DNA, 25 bp, Probe Sequence
tcatgtcgattagctgttcttctac

SEQ ID NO: 63687 - DNA, 25 bp, Probe Sequence
gtcatgtcgattagctgttcttcta

SEQ ID NO: 63688 - DNA, 25 bp, Probe Sequence
tagtcatgtcgattagctgttcttc

SEQ ID NO: 63689 - DNA, 25 bp, Probe Sequence
ttcagttgtctgttaggtccattct

SEQ ID NO: 63690 - DNA, 25 bp, Probe Sequence
tgttcttctacatcacattgttact

SEQ ID NO: 63691 - DNA, 25 bp, Probe Sequence
tgagtcagatgctaacgagatactg

SEQ ID NO: 63692 - DNA, 25 bp, Probe Sequence
ctgttcttctacatcacattgttac

SEQ ID NO: 63693 - DNA, 25 bp, Probe Sequence
tcagtaaatcagatgtacaccgaaa

SEQ ID NO: 63694 - DNA, 25 bp, Probe Sequence
attcagtaaatcagatgtacaccga

SEQ ID NO: 63695 - DNA, 25 bp, Probe Sequence
ttcagtaaatcagatgtacaccgaa

SEQ ID NO: 63696 - DNA, 25 bp, Probe Sequence
aattcagtaaatcagatgtacaccg

SEQ ID NO: 63697 - DNA, 25 bp, Probe Sequence
cccactaacatcccagactttaaaa

SEQ ID NO: 63698 - DNA, 25 bp, Probe Sequence
ccactaacatcccagactttaaaat

SEQ ID NO: 63699 - DNA, 25 bp, Probe Sequence
ccatcttcttgctgtgagaggtctc

SEQ ID NO: 63700 - DNA, 25 bp, Probe Sequence
ttccccactaacatcccagacttta

SEQ ID NO: 63701 - DNA, 25 bp, Probe Sequence
tccccactaacatcccagactttaa

SEQ ID NO: 63702 - DNA, 25 bp, Probe Sequence
aacatcccagactttaaaattcagt

SEQ ID NO: 63703 - DNA, 25 bp, Probe Sequence
ccccactaacatcccagactttaaa

SEQ ID NO: 63704 - DNA, 25 bp, Probe Sequence
acatcccagactttaaaattcagta

SEQ ID NO: 63705 - DNA, 25 bp, Probe Sequence
aaattcagtaaatcagatgtacacc

SEQ ID NO: 63706 - DNA, 25 bp, Probe Sequence
cactaacatcccagactttaaaatt

SEQ ID NO: 63707 - DNA, 25 bp, Probe Sequence
caccatcttcttgctgtgagaggtc

SEQ ID NO: 63708 - DNA, 25 bp, Probe Sequence
taacatcccagactttaaaattcag

SEQ ID NO: 63709 - DNA, 25 bp, Probe Sequence
ctaacatcccagactttaaaattca

SEQ ID NO: 63710 - DNA, 25 bp, Probe Sequence
actaacatcccagactttaaaattc

SEQ ID NO: 63711 - DNA, 25 bp, Probe Sequence
ttctgaagaagaggaagggcgagta

SEQ ID NO: 63712 - DNA, 25 bp, Probe Sequence
catcccagactttaaaattcagtaa

SEQ ID NO: 63713 - DNA, 25 bp, Probe Sequence
cttccccactaacatcccagacttt

SEQ ID NO: 63714 - DNA, 25 bp, Probe Sequence
tctgaagaagaggaagggcgagtag

SEQ ID NO: 63715 - DNA, 25 bp, Probe Sequence
cagtaaatcagatgtacaccgaaaa

SEQ ID NO: 63716 - DNA, 25 bp, Probe Sequence
caaaggcttctgaagaagaggaagg

SEQ ID NO: 63717 - DNA, 25 bp, Probe Sequence
ggctattggtagaagaactgaagaa

SEQ ID NO: 63718 - DNA, 25 bp, Probe Sequence
gtaatcaagaactatccgaacaagg

SEQ ID NO: 63719 - DNA, 25 bp, Probe Sequence
agtaatcaagaactatccgaacaag

SEQ ID NO: 63720 - DNA, 25 bp, Probe Sequence
aagtaatcaagaactatccgaacaa

SEQ ID NO: 63721 - DNA, 25 bp, Probe Sequence
tcctgaatcaagacttactaggcag

SEQ ID NO: 63722 - DNA, 25 bp, Probe Sequence
ctcctgaatcaagacttactaggca

SEQ ID NO: 63723 - DNA, 25 bp, Probe Sequence
taatcaagaactatccgaacaaggg

SEQ ID NO: 63724 - DNA, 25 bp, Probe Sequence
ataaatgtcaaaggtgtttcaagcc

SEQ ID NO: 63725 - DNA, 25 bp, Probe Sequence
ttgagagcgaaagtgagataaatgt

SEQ ID NO: 63726 - DNA, 25 bp, Probe Sequence
gataaatgtcaaaggtgtttcaagc

SEQ ID NO: 63727 - DNA, 25 bp, Probe Sequence
tgagagcgaaagtgagataaatgtc

SEQ ID NO: 63728 - DNA, 25 bp, Probe Sequence
cttgagagcgaaagtgagataaatg

SEQ ID NO: 63729 - DNA, 25 bp, Probe Sequence
cctgaatcaagacttactaggcagt

SEQ ID NO: 63730 - DNA, 25 bp, Probe Sequence
gctattggtagaagaactgaagaaa

SEQ ID NO: 63731 - DNA, 25 bp, Probe Sequence
cagctcctgaatcaagacttactag

SEQ ID NO: 63732 - DNA, 25 bp, Probe Sequence
caacaacttgggatagagaaagaag

SEQ ID NO: 63733 - DNA, 25 bp, Probe Sequence
aacaacttgggatagagaaagaagc

SEQ ID NO: 63734 - DNA, 25 bp, Probe Sequence
agcgaaagtgagataaatgtcaaag

SEQ ID NO: 63735 - DNA, 25 bp, Probe Sequence
gagcgaaagtgagataaatgtcaaa

SEQ ID NO: 63736 - DNA, 25 bp, Probe Sequence
aacagtattggttgcagaagaagag

SEQ ID NO: 63737 - DNA, 25 bp, Probe Sequence
taaatgtcaaaggtgtttcaagcca

SEQ ID NO: 63738 - DNA, 25 bp, Probe Sequence
cgaaagtgagataaatgtcaaaggt

SEQ ID NO: 63739 - DNA, 25 bp, Probe Sequence
agagcgaaagtgagataaatgtcaa

SEQ ID NO: 63740 - DNA, 25 bp, Probe Sequence
gcgaaagtgagataaatgtcaaagg

SEQ ID NO: 63741 - DNA, 25 bp, Probe Sequence
aagaactcattcataggaaggtgtt

SEQ ID NO: 63742 - DNA, 25 bp, Probe Sequence
aagatgccttaatccattccttgag

SEQ ID NO: 63743 - DNA, 25 bp, Probe Sequence
cagacgattgttcttagacctccta

SEQ ID NO: 63744 - DNA, 25 bp, Probe Sequence
agacgattgttcttagacctcctaa

SEQ ID NO: 63745 - DNA, 25 bp, Probe Sequence
agtatataggtgctggatgtatgta

SEQ ID NO: 63746 - DNA, 25 bp, Probe Sequence
cagtatataggtgctggatgtatgt

SEQ ID NO: 63747 - DNA, 25 bp, Probe Sequence
acagaccttagttgaaatgatagca

SEQ ID NO: 63748 - DNA, 25 bp, Probe Sequence
agaccttagttgaaatgatagcaga

SEQ ID NO: 63749 - DNA, 25 bp, Probe Sequence
cagaccttagttgaaatgatagcag

SEQ ID NO: 63750 - DNA, 25 bp, Probe Sequence
gacagaccttagttgaaatgatagc

SEQ ID NO: 63751 - DNA, 25 bp, Probe Sequence
tgtcagacgattgttcttagacctc

SEQ ID NO: 63752 - DNA, 25 bp, Probe Sequence
ctgtcagacgattgttcttagacct

SEQ ID NO: 63753 - DNA, 25 bp, Probe Sequence
tcagacgattgttcttagacctcct

SEQ ID NO: 63754 - DNA, 25 bp, Probe Sequence
gtatataggtgctggatgtatgtaa

SEQ ID NO: 63755 - DNA, 25 bp, Probe Sequence
gagttgcacattaatcagattagcc

SEQ ID NO: 63756 - DNA, 25 bp, Probe Sequence
actcattcataggaaggtgtttcat

SEQ ID NO: 63757 - DNA, 25 bp, Probe Sequence
aaagaactcattcataggaaggtgt

SEQ ID NO: 63758 - DNA, 25 bp, Probe Sequence
aattggagaagatttatgtcagcac

SEQ ID NO: 63759 - DNA, 25 bp, Probe Sequence
agttgcacattaatcagattagcct

SEQ ID NO: 63760 - DNA, 25 bp, Probe Sequence
aagatccagcctcatacctacatca

SEQ ID NO: 63761 - DNA, 25 bp, Probe Sequence
gaccttagttgaaatgatagcagaa

SEQ ID NO: 63762 - DNA, 25 bp, Probe Sequence
ggacagaccttagttgaaatgatag

SEQ ID NO: 63763 - DNA, 25 bp, Probe Sequence
aaagatgccttaatccattccttga

SEQ ID NO: 63764 - DNA, 25 bp, Probe Sequence
aactcattcataggaaggtgtttca

SEQ ID NO: 63765 - DNA, 25 bp, Probe Sequence
tggtgttagtgttgtaatcaggtta

SEQ ID NO: 63766 - DNA, 25 bp, Probe Sequence
ggaacacaagtaacacctcagatag

SEQ ID NO: 63767 - DNA, 25 bp, Probe Sequence
ggtgttagtgttgtaatcaggttaa

SEQ ID NO: 63768 - DNA, 25 bp, Probe Sequence
gaacacaagtaacacctcagatagc

SEQ ID NO: 63769 - DNA, 25 bp, Probe Sequence
agtgatactggtgttagtgttgtaa

SEQ ID NO: 63770 - DNA, 25 bp, Probe Sequence
gtgatactggtgttagtgttgtaat

SEQ ID NO: 63771 - DNA, 25 bp, Probe Sequence
gatactggtgttagtgttgtaatca

SEQ ID NO: 63772 - DNA, 25 bp, Probe Sequence
tgatactggtgttagtgttgtaatc

SEQ ID NO: 63773 - DNA, 25 bp, Probe Sequence
tactggtgttagtgttgtaatcagg

SEQ ID NO: 63774 - DNA, 25 bp, Probe Sequence
ggtacataatccagcacagataagc

SEQ ID NO: 63775 - DNA, 25 bp, Probe Sequence
atagacttcttgttctgatgtcacg

SEQ ID NO: 63776 - DNA, 25 bp, Probe Sequence
ctggtgttagtgttgtaatcaggtt

SEQ ID NO: 63777 - DNA, 25 bp, Probe Sequence
cacaagtaacacctcagatagccat

SEQ ID NO: 63778 - DNA, 25 bp, Probe Sequence
tactggaggttctgttctcaatgtt

SEQ ID NO: 63779 - DNA, 25 bp, Probe Sequence
attaagagtgaagatgaagctggat

SEQ ID NO: 63780 - DNA, 25 bp, Probe Sequence
ggacttatagacttcttgttctgat

SEQ ID NO: 63781 - DNA, 25 bp, Probe Sequence
atactggtgttagtgttgtaatcag

SEQ ID NO: 63782 - DNA, 25 bp, Probe Sequence
ttaagagtgaagatgaagctggatg

SEQ ID NO: 63783 - DNA, 25 bp, Probe Sequence
aacacaagtaacacctcagatagcc

SEQ ID NO: 63784 - DNA, 25 bp, Probe Sequence
aggaacacaagtaacacctcagata

SEQ ID NO: 63785 - DNA, 25 bp, Probe Sequence
gtattaagagtgaagatgaagctgg

SEQ ID NO: 63786 - DNA, 25 bp, Probe Sequence
ggtattaagagtgaagatgaagctg

SEQ ID NO: 63787 - DNA, 25 bp, Probe Sequence
tattaagagtgaagatgaagctgga

SEQ ID NO: 63788 - DNA, 25 bp, Probe Sequence
ctactggaggttctgttctcaatgt

SEQ ID NO: 63789 - DNA, 25 bp, Probe Sequence
cgacctgtccttcaatgttgataat

SEQ ID NO: 63790 - DNA, 25 bp, Probe Sequence
gacctgtccttcaatgttgataata

SEQ ID NO: 63791 - DNA, 25 bp, Probe Sequence
acctgtccttcaatgttgataataa

SEQ ID NO: 63792 - DNA, 25 bp, Probe Sequence
aatgtcattgaaagccttattacgc

SEQ ID NO: 63793 - DNA, 25 bp, Probe Sequence
tcgacctgtccttcaatgttgataa

SEQ ID NO: 63794 - DNA, 25 bp, Probe Sequence
gagttgtctgccattcaatgtttac

SEQ ID NO: 63795 - DNA, 25 bp, Probe Sequence
tgttgataataaatgtctcagccaa

SEQ ID NO: 63796 - DNA, 25 bp, Probe Sequence
aaatgtcattgaaagccttattacg

SEQ ID NO: 63797 - DNA, 25 bp, Probe Sequence
atgttgataataaatgtctcagcca

SEQ ID NO: 63798 - DNA, 25 bp, Probe Sequence
caaatcagtcggttgaaattcagag

SEQ ID NO: 63799 - DNA, 25 bp, Probe Sequence
ctcgacctgtccttcaatgttgata

SEQ ID NO: 63800 - DNA, 25 bp, Probe Sequence
gttgtctgccattcaatgtttacat

SEQ ID NO: 63801 - DNA, 25 bp, Probe Sequence
ggagttgtctgccattcaatgttta

SEQ ID NO: 63802 - DNA, 25 bp, Probe Sequence
agttgtctgccattcaatgtttaca

SEQ ID NO: 63803 - DNA, 25 bp, Probe Sequence
aaatcagtcggttgaaattcagagg

SEQ ID NO: 63804 - DNA, 25 bp, Probe Sequence
gttgataataaatgtctcagccaaa

SEQ ID NO: 63805 - DNA, 25 bp, Probe Sequence
tcagatcctttcaataaacaagact

SEQ ID NO: 63806 - DNA, 25 bp, Probe Sequence
aatgttgataataaatgtctcagcc

SEQ ID NO: 63807 - DNA, 25 bp, Probe Sequence
ttgaaattcagaggagtcagaatga

SEQ ID NO: 63808 - DNA, 25 bp, Probe Sequence
gttgaaattcagaggagtcagaatg

SEQ ID NO: 63809 - DNA, 25 bp, Probe Sequence
tgtattaaatgtcattgaaagcctt

SEQ ID NO: 63810 - DNA, 25 bp, Probe Sequence
ggttgaaattcagaggagtcagaat

SEQ ID NO: 63811 - DNA, 25 bp, Probe Sequence
aatcagtcggttgaaattcagagga

SEQ ID NO: 63812 - DNA, 25 bp, Probe Sequence
cagatcctttcaataaacaagactt

SEQ ID NO: 63813 - DNA, 25 bp, Probe Sequence
cttcttgtggtctggactgaacttc

SEQ ID NO: 63814 - DNA, 25 bp, Probe Sequence
gcttcatgtgaaaggtgattcttag

SEQ ID NO: 63815 - DNA, 25 bp, Probe Sequence
cttcatgtgaaaggtgattcttaga

SEQ ID NO: 63816 - DNA, 25 bp, Probe Sequence
cagaggctatgatgagcagtagtac

SEQ ID NO: 63817 - DNA, 25 bp, Probe Sequence
gtacagaggctatgatgagcagtag

SEQ ID NO: 63818 - DNA, 25 bp, Probe Sequence
ggcttcatgtgaaaggtgattctta

SEQ ID NO: 63819 - DNA, 25 bp, Probe Sequence
aattcatgcttcttgtggtctggac

SEQ ID NO: 63820 - DNA, 25 bp, Probe Sequence
acagaggctatgatgagcagtagta

SEQ ID NO: 63821 - DNA, 25 bp, Probe Sequence
tacagaggctatgatgagcagtagt

SEQ ID NO: 63822 - DNA, 25 bp, Probe Sequence
caaggaagtgcattagtagaagcca

SEQ ID NO: 63823 - DNA, 25 bp, Probe Sequence
ttcatgtgaaaggtgattcttagaa

SEQ ID NO: 63824 - DNA, 25 bp, Probe Sequence
attcttagaatcctgagctgtggtg

SEQ ID NO: 63825 - DNA, 25 bp, Probe Sequence
caattcatgcttcttgtggtctgga

SEQ ID NO: 63826 - DNA, 25 bp, Probe Sequence
tttggcttcatgtgaaaggtgattc

SEQ ID NO: 63827 - DNA, 25 bp, Probe Sequence
ggtcagaaagggatgagtgaagaag

SEQ ID NO: 63828 - DNA, 25 bp, Probe Sequence
ctgtattccacgaggcattgagaaa

SEQ ID NO: 63829 - DNA, 25 bp, Probe Sequence
agaggctatgatgagcagtagtacc

SEQ ID NO: 63830 - DNA, 25 bp, Probe Sequence
caggttgttgtgaagagcaaggaag

SEQ ID NO: 63831 - DNA, 25 bp, Probe Sequence
aaggaagtgcattagtagaagccac

SEQ ID NO: 63832 - DNA, 25 bp, Probe Sequence
gagcaaggaagtgcattagtagaag

SEQ ID NO: 63833 - DNA, 25 bp, Probe Sequence
gaagagcaaggaagtgcattagtag

SEQ ID NO: 63834 - DNA, 25 bp, Probe Sequence
aggtcagaaagggatgagtgaagaa

SEQ ID NO: 63835 - DNA, 25 bp, Probe Sequence
atcaggtcagaaagggatgagtgaa

SEQ ID NO: 63836 - DNA, 25 bp, Probe Sequence
aatcaggtcagaaagggatgagtga

SEQ ID NO: 63837 - DNA, 25 bp, Probe Sequence
tgaatatgattggaatggaggaaca

SEQ ID NO: 63838 - DNA, 25 bp, Probe Sequence
gaatatgattggaatggaggaacac

SEQ ID NO: 63839 - DNA, 25 bp, Probe Sequence
caatatccatacatctccttctccg

SEQ ID NO: 63840 - DNA, 25 bp, Probe Sequence
gcaatatccatacatctccttctcc

SEQ ID NO: 63841 - DNA, 25 bp, Probe Sequence
aatatgattggaatggaggaacacc

SEQ ID NO: 63842 - DNA, 25 bp, Probe Sequence
atgaatatgattggaatggaggaac

SEQ ID NO: 63843 - DNA, 25 bp, Probe Sequence
ctgcttgattgtggagttgatgtaa

SEQ ID NO: 63844 - DNA, 25 bp, Probe Sequence
gttatcaatcacacggatgaagaag

SEQ ID NO: 63845 - DNA, 25 bp, Probe Sequence
tcatcttcactcgtgtattaagtca

SEQ ID NO: 63846 - DNA, 25 bp, Probe Sequence
agtcatcttcactcgtgtattaagt

SEQ ID NO: 63847 - DNA, 25 bp, Probe Sequence
ttatcaatcacacggatgaagaagg

SEQ ID NO: 63848 - DNA, 25 bp, Probe Sequence
gtcatcttcactcgtgtattaagtc

SEQ ID NO: 63849 - DNA, 25 bp, Probe Sequence
aatgaatatgattggaatggaggaa

SEQ ID NO: 63850 - DNA, 25 bp, Probe Sequence
cctagtcatcttcactcgtgtatta

SEQ ID NO: 63851 - DNA, 25 bp, Probe Sequence
atgttatcaatcacacggatgaaga

SEQ ID NO: 63852 - DNA, 25 bp, Probe Sequence
aatgttatcaatcacacggatgaag

SEQ ID NO: 63853 - DNA, 25 bp, Probe Sequence
tgttatcaatcacacggatgaagaa

SEQ ID NO: 63854 - DNA, 25 bp, Probe Sequence
gatgctctatctggctactcgtatc

SEQ ID NO: 63855 - DNA, 25 bp, Probe Sequence
cttcactcgtgtattaagtcattca

SEQ ID NO: 63856 - DNA, 25 bp, Probe Sequence
tcttcactcgtgtattaagtcattc

SEQ ID NO: 63857 - DNA, 25 bp, Probe Sequence
catcttcactcgtgtattaagtcat

SEQ ID NO: 63858 - DNA, 25 bp, Probe Sequence
tatcaaggagtagacacagtcatca

SEQ ID NO: 63859 - DNA, 25 bp, Probe Sequence
tatcaatcacacggatgaagaagga

SEQ ID NO: 63860 - DNA, 25 bp, Probe Sequence
aattcaagtaaggcatgtctacacc

SEQ ID NO: 63861 - DNA, 25 bp, Probe Sequence
ggcttccattatgagatgaacacat

SEQ ID NO: 63862 - DNA, 25 bp, Probe Sequence
gcttccattatgagatgaacacata

SEQ ID NO: 63863 - DNA, 25 bp, Probe Sequence
cattggcttccattatgagatgaac

SEQ ID NO: 63864 - DNA, 25 bp, Probe Sequence
atgacattggcttccattatgagat

SEQ ID NO: 63865 - DNA, 25 bp, Probe Sequence
attggcttccattatgagatgaaca

SEQ ID NO: 63866 - DNA, 25 bp, Probe Sequence
acattggcttccattatgagatgaa

SEQ ID NO: 63867 - DNA, 25 bp, Probe Sequence
gacattggcttccattatgagatga

SEQ ID NO: 63868 - DNA, 25 bp, Probe Sequence
tgacattggcttccattatgagatg

SEQ ID NO: 63869 - DNA, 25 bp, Probe Sequence
ttggcttccattatgagatgaacac

SEQ ID NO: 63870 - DNA, 25 bp, Probe Sequence
atatctttgatgaagggaagtggag

SEQ ID NO: 63871 - DNA, 25 bp, Probe Sequence
gatgaacacatacaaagtagaacgc

SEQ ID NO: 63872 - DNA, 25 bp, Probe Sequence
tccattatgagatgaacacatacaa

SEQ ID NO: 63873 - DNA, 25 bp, Probe Sequence
ttccattatgagatgaacacataca

SEQ ID NO: 63874 - DNA, 25 bp, Probe Sequence
atgaacacatacaaagtagaacgct

SEQ ID NO: 63875 - DNA, 25 bp, Probe Sequence
agatgaacacatacaaagtagaacg

SEQ ID NO: 63876 - DNA, 25 bp, Probe Sequence
tgaacacatacaaagtagaacgctt

SEQ ID NO: 63877 - DNA, 25 bp, Probe Sequence
catgacattggcttccattatgaga

SEQ ID NO: 63878 - DNA, 25 bp, Probe Sequence
cttccattatgagatgaacacatac

SEQ ID NO: 63879 - DNA, 25 bp, Probe Sequence
tggcttccattatgagatgaacaca

SEQ ID NO: 63880 - DNA, 25 bp, Probe Sequence
aaggcattaactttgtgatggtcaa

SEQ ID NO: 63881 - DNA, 25 bp, Probe Sequence
aaccatgacattggcttccattatg

SEQ ID NO: 63882 - DNA, 25 bp, Probe Sequence
cattaactttgtgatggtcaacagc

SEQ ID NO: 63883 - DNA, 25 bp, Probe Sequence
gcattaactttgtgatggtcaacag

SEQ ID NO: 63884 - DNA, 25 bp, Probe Sequence
ccatgacattggcttccattatgag

SEQ ID NO: 63885 - DNA, 25 bp, Probe Sequence
ggattagagccactacatagaatag

SEQ ID NO: 63886 - DNA, 25 bp, Probe Sequence
gagccactacatagaatagtctctt

SEQ ID NO: 63887 - DNA, 25 bp, Probe Sequence
gctttgttgcttctctatctgtatt

SEQ ID NO: 63888 - DNA, 25 bp, Probe Sequence
gttgtctgtcatccatttaagtgtt

SEQ ID NO: 63889 - DNA, 25 bp, Probe Sequence
gtgttgtctgtcatccatttaagtg

SEQ ID NO: 63890 - DNA, 25 bp, Probe Sequence
agtgttgtctgtcatccatttaagt

SEQ ID NO: 63891 - DNA, 25 bp, Probe Sequence
ttgtctgtcatccatttaagtgttc

SEQ ID NO: 63892 - DNA, 25 bp, Probe Sequence
tgttgtctgtcatccatttaagtgt

SEQ ID NO: 63893 - DNA, 25 bp, Probe Sequence
ggctttgttgcttctctatctgtat

SEQ ID NO: 63894 - DNA, 25 bp, Probe Sequence
gggattagagccactacatagaata

SEQ ID NO: 63895 - DNA, 25 bp, Probe Sequence
gaaggtaaatgtgactgggacttaa

SEQ ID NO: 63896 - DNA, 25 bp, Probe Sequence
tagagccactacatagaatagtctc

SEQ ID NO: 63897 - DNA, 25 bp, Probe Sequence
tgtctgtcatccatttaagtgttcc

SEQ ID NO: 63898 - DNA, 25 bp, Probe Sequence
aaggtaaatgtgactgggacttaac

SEQ ID NO: 63899 - DNA, 25 bp, Probe Sequence
agaaggtaaatgtgactgggactta

SEQ ID NO: 63900 - DNA, 25 bp, Probe Sequence
gccactacatagaatagtctcttac

SEQ ID NO: 63901 - DNA, 25 bp, Probe Sequence
gtctgtcatccatttaagtgttccc

SEQ ID NO: 63902 - DNA, 25 bp, Probe Sequence
agccactacatagaatagtctctta

SEQ ID NO: 63903 - DNA, 25 bp, Probe Sequence
ttagagccactacatagaatagtct

SEQ ID NO: 63904 - DNA, 25 bp, Probe Sequence
actgatgctagtccttgttgtattt

SEQ ID NO: 63905 - DNA, 25 bp, Probe Sequence
ggaagtttatcttggatacccttga

SEQ ID NO: 63906 - DNA, 25 bp, Probe Sequence
tctgtcatccatttaagtgttccca

SEQ ID NO: 63907 - DNA, 25 bp, Probe Sequence
tggctttgttgcttctctatctgta

SEQ ID NO: 63908 - DNA, 25 bp, Probe Sequence
tgtaagacagaaggtaaatgtgact

SEQ ID NO: 63909 - DNA, 25 bp, Probe Sequence
ccagtggcttattaattccgatact

SEQ ID NO: 63910 - DNA, 25 bp, Probe Sequence
cagtggcttattaattccgatacta

SEQ ID NO: 63911 - DNA, 25 bp, Probe Sequence
agtggcttattaattccgatactag

SEQ ID NO: 63912 - DNA, 25 bp, Probe Sequence
ggaggcatcagttgctatatattaa

SEQ ID NO: 63913 - DNA, 25 bp, Probe Sequence
gtggcttattaattccgatactagt

SEQ ID NO: 63914 - DNA, 25 bp, Probe Sequence
gtcgttaccagagatttacccatcg

SEQ ID NO: 63915 - DNA, 25 bp, Probe Sequence
tggcttattaattccgatactagtt

SEQ ID NO: 63916 - DNA, 25 bp, Probe Sequence
aaagggtcgttaccagagatttacc

SEQ ID NO: 63917 - DNA, 25 bp, Probe Sequence
gggaggcatcagttgctatatatta

SEQ ID NO: 63918 - DNA, 25 bp, Probe Sequence
taattccgatactagtttgctttgc

SEQ ID NO: 63919 - DNA, 25 bp, Probe Sequence
aattccgatactagtttgctttgct

SEQ ID NO: 63920 - DNA, 25 bp, Probe Sequence
ggtcgttaccagagatttacccatc

SEQ ID NO: 63921 - DNA, 25 bp, Probe Sequence
tgggaggcatcagttgctatatatt

SEQ ID NO: 63922 - DNA, 25 bp, Probe Sequence
tcgttaccagagatttacccatcgg

SEQ ID NO: 63923 - DNA, 25 bp, Probe Sequence
ctgggaggcatcagttgctatatat

SEQ ID NO: 63924 - DNA, 25 bp, Probe Sequence
attccgatactagtttgctttgctg

SEQ ID NO: 63925 - DNA, 25 bp, Probe Sequence
gatactagtttgctttgctgaccaa

SEQ ID NO: 63926 - DNA, 25 bp, Probe Sequence
ttaaaagggtcgttaccagagattt

SEQ ID NO: 63927 - DNA, 25 bp, Probe Sequence
taaaagggtcgttaccagagattta

SEQ ID NO: 63928 - DNA, 25 bp, Probe Sequence
ttaattccgatactagtttgctttg

SEQ ID NO: 63929 - DNA, 25 bp, Probe Sequence
aaaagggtcgttaccagagatttac

SEQ ID NO: 63930 - DNA, 25 bp, Probe Sequence
ttccgatactagtttgctttgctga

SEQ ID NO: 63931 - DNA, 25 bp, Probe Sequence
tttgctacttttgctgttttatttt

SEQ ID NO: 63932 - DNA, 25 bp, Probe Sequence
ttttgctacttttgctgttttattt

SEQ ID NO: 63933 - DNA, 25 bp, Probe Sequence
taacacagcaatacagtcctcttga

SEQ ID NO: 63934 - DNA, 25 bp, Probe Sequence
gtaacacagcaatacagtcctcttg

SEQ ID NO: 63935 - DNA, 25 bp, Probe Sequence
tacctctcgtaacacagcaatacag

SEQ ID NO: 63936 - DNA, 25 bp, Probe Sequence
gtacctctcgtaacacagcaataca

SEQ ID NO: 63937 - DNA, 25 bp, Probe Sequence
cgtaacacagcaatacagtcctctt

SEQ ID NO: 63938 - DNA, 25 bp, Probe Sequence
ctaaattccagccatcaaatccaat

SEQ ID NO: 63939 - DNA, 25 bp, Probe Sequence
tctaaattccagccatcaaatccaa

SEQ ID NO: 63940 - DNA, 25 bp, Probe Sequence
ttcttaccacactggcatatcagat

SEQ ID NO: 63941 - DNA, 25 bp, Probe Sequence
aacacagcaatacagtcctcttgag

SEQ ID NO: 63942 - DNA, 25 bp, Probe Sequence
ttaccacactggcatatcagatgaa

SEQ ID NO: 63943 - DNA, 25 bp, Probe Sequence
ctctaaattccagccatcaaatcca

SEQ ID NO: 63944 - DNA, 25 bp, Probe Sequence
ctcgtaacacagcaatacagtcctc

SEQ ID NO: 63945 - DNA, 25 bp, Probe Sequence
ctctcgtaacacagcaatacagtcc

SEQ ID NO: 63946 - DNA, 25 bp, Probe Sequence
cctctcgtaacacagcaatacagtc

SEQ ID NO: 63947 - DNA, 25 bp, Probe Sequence
tgtacctctcgtaacacagcaatac

SEQ ID NO: 63948 - DNA, 25 bp, Probe Sequence
cttaccacactggcatatcagatga

SEQ ID NO: 63949 - DNA, 25 bp, Probe Sequence
tcttaccacactggcatatcagatg

SEQ ID NO: 63950 - DNA, 25 bp, Probe Sequence
cttcttaccacactggcatatcaga

SEQ ID NO: 63951 - DNA, 25 bp, Probe Sequence
tcgtaacacagcaatacagtcctct

SEQ ID NO: 63952 - DNA, 25 bp, Probe Sequence
tctcgtaacacagcaatacagtcct

SEQ ID NO: 63953 - DNA, 25 bp, Probe Sequence
aaattccagccatcaaatccaattc

SEQ ID NO: 63954 - DNA, 25 bp, Probe Sequence
taaattccagccatcaaatccaatt

SEQ ID NO: 63955 - DNA, 25 bp, Probe Sequence
tgaactccaaccagaatccaaattg

SEQ ID NO: 63956 - DNA, 25 bp, Probe Sequence
caacaaagtgggactctgtcttaaa

SEQ ID NO: 63957 - DNA, 25 bp, Probe Sequence
acaggtttcatattccagaaggttg

SEQ ID NO: 63958 - DNA, 25 bp, Probe Sequence
cacaggtttcatattccagaaggtt

SEQ ID NO: 63959 - DNA, 25 bp, Probe Sequence
atactgggtacatcaaagttgactg

SEQ ID NO: 63960 - DNA, 25 bp, Probe Sequence
catactgggtacatcaaagttgact

SEQ ID NO: 63961 - DNA, 25 bp, Probe Sequence
aaaccatactgggtacatcaaagtt

SEQ ID NO: 63962 - DNA, 25 bp, Probe Sequence
aaccatactgggtacatcaaagttg

SEQ ID NO: 63963 - DNA, 25 bp, Probe Sequence
caaaccatactgggtacatcaaagt

SEQ ID NO: 63964 - DNA, 25 bp, Probe Sequence
tactgggtacatcaaagttgactgg

SEQ ID NO: 63965 - DNA, 25 bp, Probe Sequence
caggtttcatattccagaaggttgg

SEQ ID NO: 63966 - DNA, 25 bp, Probe Sequence
ccatactgggtacatcaaagttgac

SEQ ID NO: 63967 - DNA, 25 bp, Probe Sequence
gcacaggtttcatattccagaaggt

SEQ ID NO: 63968 - DNA, 25 bp, Probe Sequence
accatactgggtacatcaaagttga

SEQ ID NO: 63969 - DNA, 25 bp, Probe Sequence
gcaaaccatactgggtacatcaaag

SEQ ID NO: 63970 - DNA, 25 bp, Probe Sequence
ctgttcattggaggtgtcactggat

SEQ ID NO: 63971 - DNA, 25 bp, Probe Sequence
agtcaaggaaactttgagggaaatt

SEQ ID NO: 63972 - DNA, 25 bp, Probe Sequence
cagtcaaggaaactttgagggaaat

SEQ ID NO: 63973 - DNA, 25 bp, Probe Sequence
tgttcattggaggtgtcactggatg

SEQ ID NO: 63974 - DNA, 25 bp, Probe Sequence
ctggaccttcagcagaaaagtatag

SEQ ID NO: 63975 - DNA, 25 bp, Probe Sequence
gtcaaggaaactttgagggaaattt

SEQ ID NO: 63976 - DNA, 25 bp, Probe Sequence
tgcacaggtttcatattccagaagg

SEQ ID NO: 63977 - DNA, 25 bp, Probe Sequence
tggaccttcagcagaaaagtatagc

SEQ ID NO: 63978 - DNA, 25 bp, Probe Sequence
aggaaactttgagggaaattttgag

SEQ ID NO: 63979 - DNA, 25 bp, Probe Sequence
aaggaaactttgagggaaattttga

SEQ ID NO: 63980 - DNA, 25 bp, Probe Sequence
gaccttcagcagaaaagtatagcgt

SEQ ID NO: 63981 - DNA, 25 bp, Probe Sequence
accttattgatgaaagaaaccgtct

SEQ ID NO: 63982 - DNA, 25 bp, Probe Sequence
ggaccttattgatgaaagaaaccgt

SEQ ID NO: 63983 - DNA, 25 bp, Probe Sequence
gaccttattgatgaaagaaaccgtc

SEQ ID NO: 63984 - DNA, 25 bp, Probe Sequence
gggaccttattgatgaaagaaaccg

SEQ ID NO: 63985 - DNA, 25 bp, Probe Sequence
gcagaagctatgaaagggaataaag

SEQ ID NO: 63986 - DNA, 25 bp, Probe Sequence
ggcagaagctatgaaagggaataaa

SEQ ID NO: 63987 - DNA, 25 bp, Probe Sequence
cagaagctatgaaagggaataaaga

SEQ ID NO: 63988 - DNA, 25 bp, Probe Sequence
gaagctatgaaagggaataaagaga

SEQ ID NO: 63989 - DNA, 25 bp, Probe Sequence
agaagctatgaaagggaataaagag

SEQ ID NO: 63990 - DNA, 25 bp, Probe Sequence
ccttattgatgaaagaaaccgtctt

SEQ ID NO: 63991 - DNA, 25 bp, Probe Sequence
agctatgaaagggaataaagagaaa

SEQ ID NO: 63992 - DNA, 25 bp, Probe Sequence
aagctatgaaagggaataaagagaa

SEQ ID NO: 63993 - DNA, 25 bp, Probe Sequence
tggggaccttattgatgaaagaaac

SEQ ID NO: 63994 - DNA, 25 bp, Probe Sequence
gtggggaccttattgatgaaagaaa

SEQ ID NO: 63995 - DNA, 25 bp, Probe Sequence
ccatgattatcgcagaacgacagaa

SEQ ID NO: 63996 - DNA, 25 bp, Probe Sequence
cattagtgctctctctgcctggatc

SEQ ID NO: 63997 - DNA, 25 bp, Probe Sequence
ggggaccttattgatgaaagaaacc

SEQ ID NO: 63998 - DNA, 25 bp, Probe Sequence
cggcagaagctatgaaagggaataa

SEQ ID NO: 63999 - DNA, 25 bp, Probe Sequence
agtggggaccttattgatgaaagaa

SEQ ID NO: 64000 - DNA, 25 bp, Probe Sequence
catgattatcgcagaacgacagaaa

SEQ ID NO: 64001 - DNA, 25 bp, Probe Sequence
cagtggggaccttattgatgaaaga

SEQ ID NO: 64002 - DNA, 25 bp, Probe Sequence
gctatgaaagggaataaagagaaaa

SEQ ID NO: 64003 - DNA, 25 bp, Probe Sequence
gaaagggaataaagagaaaagaagt

SEQ ID NO: 64004 - DNA, 25 bp, Probe Sequence
tgaaagggaataaagagaaaagaag

SEQ ID NO: 64005 - DNA, 25 bp, Probe Sequence
ctcaacttctatggtatggactacg

SEQ ID NO: 64006 - DNA, 25 bp, Probe Sequence
gctcaacttctatggtatggactac

SEQ ID NO: 64007 - DNA, 25 bp, Probe Sequence
ggctcaacttctatggtatggacta

SEQ ID NO: 64008 - DNA, 25 bp, Probe Sequence
tcaacttctatggtatggactacgc

SEQ ID NO: 64009 - DNA, 25 bp, Probe Sequence
ggactacttctacgacctgctctag

SEQ ID NO: 64010 - DNA, 25 bp, Probe Sequence
tggactacttctacgacctgctcta

SEQ ID NO: 64011 - DNA, 25 bp, Probe Sequence
gactacttctacgacctgctctagg

SEQ ID NO: 64012 - DNA, 25 bp, Probe Sequence
ctcagagcacttcttcgagtacaag

SEQ ID NO: 64013 - DNA, 25 bp, Probe Sequence
ctcatgacctacgactactctacag

SEQ ID NO: 64014 - DNA, 25 bp, Probe Sequence
gagtgagtgagcaggtgtgaaatac

SEQ ID NO: 64015 - DNA, 25 bp, Probe Sequence
catgacctacgactactctacagcg

SEQ ID NO: 64016 - DNA, 25 bp, Probe Sequence
gggctcaacttctatggtatggact

SEQ ID NO: 64017 - DNA, 25 bp, Probe Sequence
cctcatgacctacgactactctaca

SEQ ID NO: 64018 - DNA, 25 bp, Probe Sequence
ctggactacttctacgacctgctct

SEQ ID NO: 64019 - DNA, 25 bp, Probe Sequence
gtgagtgagcaggtgtgaaatacag

SEQ ID NO: 64020 - DNA, 25 bp, Probe Sequence
tcatgacctacgactactctacagc

SEQ ID NO: 64021 - DNA, 25 bp, Probe Sequence
tcagagcacttcttcgagtacaaga

SEQ ID NO: 64022 - DNA, 25 bp, Probe Sequence
cctcagagcacttcttcgagtacaa

SEQ ID NO: 64023 - DNA, 25 bp, Probe Sequence
ggagtgagtgagcaggtgtgaaata

SEQ ID NO: 64024 - DNA, 25 bp, Probe Sequence
agtgagtgagcaggtgtgaaataca

SEQ ID NO: 64025 - DNA, 25 bp, Probe Sequence
caggtacatccagacactgaaggac

SEQ ID NO: 64026 - DNA, 25 bp, Probe Sequence
caacttctatggtatggactacgcg

SEQ ID NO: 64027 - DNA, 25 bp, Probe Sequence
gtacatccagacactgaaggaccac

SEQ ID NO: 64028 - DNA, 25 bp, Probe Sequence
gcctcatgacctacgactactctac

SEQ ID NO: 64029 - DNA, 25 bp, Probe Sequence
gaggttaatctaggaatgactcgtt

SEQ ID NO: 64030 - DNA, 25 bp, Probe Sequence
aattcctgacgagataagcagttat

SEQ ID NO: 64031 - DNA, 25 bp, Probe Sequence
attcctgacgagataagcagttatg

SEQ ID NO: 64032 - DNA, 25 bp, Probe Sequence
ggaggttaatctaggaatgactcgt

SEQ ID NO: 64033 - DNA, 25 bp, Probe Sequence
ctgacgagataagcagttatgtgac

SEQ ID NO: 64034 - DNA, 25 bp, Probe Sequence
gacgagataagcagttatgtgacct

SEQ ID NO: 64035 - DNA, 25 bp, Probe Sequence
ttcctgacgagataagcagttatgt

SEQ ID NO: 64036 - DNA, 25 bp, Probe Sequence
tgacgagataagcagttatgtgacc

SEQ ID NO: 64037 - DNA, 25 bp, Probe Sequence
cgagataagcagttatgtgacctca

SEQ ID NO: 64038 - DNA, 25 bp, Probe Sequence
acgagataagcagttatgtgacctc

SEQ ID NO: 64039 - DNA, 25 bp, Probe Sequence
caccctttctacttccaagacttat

SEQ ID NO: 64040 - DNA, 25 bp, Probe Sequence
cctgacgagataagcagttatgtga

SEQ ID NO: 64041 - DNA, 25 bp, Probe Sequence
tcctgacgagataagcagttatgtg

SEQ ID NO: 64042 - DNA, 25 bp, Probe Sequence
gagataagcagttatgtgacctcac

SEQ ID NO: 64043 - DNA, 25 bp, Probe Sequence
ccaaataatatgtttccttccctca

SEQ ID NO: 64044 - DNA, 25 bp, Probe Sequence
accctttctacttccaagacttatt

SEQ ID NO: 64045 - DNA, 25 bp, Probe Sequence
aggttaatctaggaatgactcgttt

SEQ ID NO: 64046 - DNA, 25 bp, Probe Sequence
aatctaggaatgactcgtttaaggc

SEQ ID NO: 64047 - DNA, 25 bp, Probe Sequence
tccaaataatatgtttccttccctc

SEQ ID NO: 64048 - DNA, 25 bp, Probe Sequence
ttccaaataatatgtttccttccct

SEQ ID NO: 64049 - DNA, 25 bp, Probe Sequence
ccctttctacttccaagacttattt

SEQ ID NO: 64050 - DNA, 25 bp, Probe Sequence
ccaccctttctacttccaagactta

SEQ ID NO: 64051 - DNA, 25 bp, Probe Sequence
aaattcctgacgagataagcagtta

SEQ ID NO: 64052 - DNA, 25 bp, Probe Sequence
catgatttctttgtagcatttggtg

SEQ ID NO: 64053 - DNA, 25 bp, Probe Sequence
tttctttgtgagaaggtacagagat

SEQ ID NO: 64054 - DNA, 25 bp, Probe Sequence
gaaaatacacacaattccccaatga

SEQ ID NO: 64055 - DNA, 25 bp, Probe Sequence
aatacacacaattccccaatgaaaa

SEQ ID NO: 64056 - DNA, 25 bp, Probe Sequence
aaatacacacaattccccaatgaaa

SEQ ID NO: 64057 - DNA, 25 bp, Probe Sequence
aaaatacacacaattccccaatgaa

SEQ ID NO: 64058 - DNA, 25 bp, Probe Sequence
cctgacttttctttgtgagaaggta

SEQ ID NO: 64059 - DNA, 25 bp, Probe Sequence
ttttctttgtgagaaggtacagaga

SEQ ID NO: 64060 - DNA, 25 bp, Probe Sequence
acttttctttgtgagaaggtacaga

SEQ ID NO: 64061 - DNA, 25 bp, Probe Sequence
gacttttctttgtgagaaggtacag

SEQ ID NO: 64062 - DNA, 25 bp, Probe Sequence
tgacttttctttgtgagaaggtaca

SEQ ID NO: 64063 - DNA, 25 bp, Probe Sequence
ctgacttttctttgtgagaaggtac

SEQ ID NO: 64064 - DNA, 25 bp, Probe Sequence
cttttctttgtgagaaggtacagag

SEQ ID NO: 64065 - DNA, 25 bp, Probe Sequence
ccctgacttttctttgtgagaaggt

SEQ ID NO: 64066 - DNA, 25 bp, Probe Sequence
gccctgacttttctttgtgagaagg

SEQ ID NO: 64067 - DNA, 25 bp, Probe Sequence
ggccctgacttttctttgtgagaag

SEQ ID NO: 64068 - DNA, 25 bp, Probe Sequence
taaattctctggatgagcaagaagg

SEQ ID NO: 64069 - DNA, 25 bp, Probe Sequence
ttaaattctctggatgagcaagaag

SEQ ID NO: 64070 - DNA, 25 bp, Probe Sequence
gatgagcaagaaggggttaaaagtg

SEQ ID NO: 64071 - DNA, 25 bp, Probe Sequence
tttaaattctctggatgagcaagaa

SEQ ID NO: 64072 - DNA, 25 bp, Probe Sequence
aaattctctggatgagcaagaaggg

SEQ ID NO: 64073 - DNA, 25 bp, Probe Sequence
agcaagaaggggttaaaagtggaat

SEQ ID NO: 64074 - DNA, 25 bp, Probe Sequence
ggatgagcaagaaggggttaaaagt

SEQ ID NO: 64075 - DNA, 25 bp, Probe Sequence
tggatgagcaagaaggggttaaaag

SEQ ID NO: 64076 - DNA, 25 bp, Probe Sequence
ctggatgagcaagaaggggttaaaa

SEQ ID NO: 64077 - DNA, 25 bp, Probe Sequence
atttaaattctctggatgagcaaga

SEQ ID NO: 64078 - DNA, 25 bp, Probe Sequence
gagcaagaaggggttaaaagtggaa

SEQ ID NO: 64079 - DNA, 25 bp, Probe Sequence
atgagcaagaaggggttaaaagtgg

SEQ ID NO: 64080 - DNA, 25 bp, Probe Sequence
gttccttacactttgcttcaggctc

SEQ ID NO: 64081 - DNA, 25 bp, Probe Sequence
tctggatgagcaagaaggggttaaa

SEQ ID NO: 64082 - DNA, 25 bp, Probe Sequence
cttacactttgcttcaggctccagt

SEQ ID NO: 64083 - DNA, 25 bp, Probe Sequence
tgagcaagaaggggttaaaagtgga

SEQ ID NO: 64084 - DNA, 25 bp, Probe Sequence
ctctggatgagcaagaaggggttaa

SEQ ID NO: 64085 - DNA, 25 bp, Probe Sequence
ttccttacactttgcttcaggctcc

SEQ ID NO: 64086 - DNA, 25 bp, Probe Sequence
gaggaataaacgtatttgtggttta

SEQ ID NO: 64087 - DNA, 25 bp, Probe Sequence
aggaataaacgtatttgtggtttaa

SEQ ID NO: 64088 - DNA, 25 bp, Probe Sequence
tctctggatgagcaagaaggggtta

SEQ ID NO: 64089 - DNA, 25 bp, Probe Sequence
ggaataaacgtatttgtggtttaaa

SEQ ID NO: 64090 - DNA, 25 bp, Probe Sequence
aattctctggatgagcaagaagggg

SEQ ID NO: 64091 - DNA, 25 bp, Probe Sequence
atctccacgtttgatccgttttcag

SEQ ID NO: 64092 - DNA, 25 bp, Probe Sequence
gaactaagcaatatgtcctcctgtc

SEQ ID NO: 64093 - DNA, 25 bp, Probe Sequence
agaggaggaattggttcacttaact

SEQ ID NO: 64094 - DNA, 25 bp, Probe Sequence
cagaggaggaattggttcacttaac

SEQ ID NO: 64095 - DNA, 25 bp, Probe Sequence
gaggaggaattggttcacttaactc

SEQ ID NO: 64096 - DNA, 25 bp, Probe Sequence
aactaagcaatatgtcctcctgtcc

SEQ ID NO: 64097 - DNA, 25 bp, Probe Sequence
taagcaatatgtcctcctgtccatc

SEQ ID NO: 64098 - DNA, 25 bp, Probe Sequence
ctaagcaatatgtcctcctgtccat

SEQ ID NO: 64099 - DNA, 25 bp, Probe Sequence
catgaacacagtggtcagtacatat

SEQ ID NO: 64100 - DNA, 25 bp, Probe Sequence
aacatagtgatcttcatgcgaactt

SEQ ID NO: 64101 - DNA, 25 bp, Probe Sequence
cgaactaagcaatatgtcctcctgt

SEQ ID NO: 64102 - DNA, 25 bp, Probe Sequence
atagtgatcttcatgcgaacttcag

SEQ ID NO: 64103 - DNA, 25 bp, Probe Sequence
catagtgatcttcatgcgaacttca

SEQ ID NO: 64104 - DNA, 25 bp, Probe Sequence
acatagtgatcttcatgcgaacttc

SEQ ID NO: 64105 - DNA, 25 bp, Probe Sequence
aacagacctagtcaggatatgaatt

SEQ ID NO: 64106 - DNA, 25 bp, Probe Sequence
caacatagtgatcttcatgcgaact

SEQ ID NO: 64107 - DNA, 25 bp, Probe Sequence
ttaacaactgctattggttcttcca

SEQ ID NO: 64108 - DNA, 25 bp, Probe Sequence
tcagcgaactaagcaatatgtcctc

SEQ ID NO: 64109 - DNA, 25 bp, Probe Sequence
ctcagcgaactaagcaatatgtcct

SEQ ID NO: 64110 - DNA, 25 bp, Probe Sequence
acatgaacacagtggtcagtacata

SEQ ID NO: 64111 - DNA, 25 bp, Probe Sequence
tacatgaacacagtggtcagtacat

SEQ ID NO: 64112 - DNA, 25 bp, Probe Sequence
acaacatagtgatcttcatgcgaac

SEQ ID NO: 64113 - DNA, 25 bp, Probe Sequence
aatcaggaactccaacttctacacg

SEQ ID NO: 64114 - DNA, 25 bp, Probe Sequence
tcacatttaataagcaagactccct

SEQ ID NO: 64115 - DNA, 25 bp, Probe Sequence
attccaacagagcaagtaaatgagt

SEQ ID NO: 64116 - DNA, 25 bp, Probe Sequence
caactatggtgctcaggtgattatc

SEQ ID NO: 64117 - DNA, 25 bp, Probe Sequence
aactatggtgctcaggtgattatcc

SEQ ID NO: 64118 - DNA, 25 bp, Probe Sequence
ttatccttcgctcgtttatccaata

SEQ ID NO: 64119 - DNA, 25 bp, Probe Sequence
attatccttcgctcgtttatccaat

SEQ ID NO: 64120 - DNA, 25 bp, Probe Sequence
tatggtgctcaggtgattatccttc

SEQ ID NO: 64121 - DNA, 25 bp, Probe Sequence
ctatggtgctcaggtgattatcctt

SEQ ID NO: 64122 - DNA, 25 bp, Probe Sequence
tatccttcgctcgtttatccaataa

SEQ ID NO: 64123 - DNA, 25 bp, Probe Sequence
gattatccttcgctcgtttatccaa

SEQ ID NO: 64124 - DNA, 25 bp, Probe Sequence
aaagaccagaacaaacagaaggaag

SEQ ID NO: 64125 - DNA, 25 bp, Probe Sequence
caaagaccagaacaaacagaaggaa

SEQ ID NO: 64126 - DNA, 25 bp, Probe Sequence
gtgattatccttcgctcgtttatcc

SEQ ID NO: 64127 - DNA, 25 bp, Probe Sequence
ggtgattatccttcgctcgtttatc

SEQ ID NO: 64128 - DNA, 25 bp, Probe Sequence
aatgggaaattacatattgctgtgc

SEQ ID NO: 64129 - DNA, 25 bp, Probe Sequence
tgattatccttcgctcgtttatcca

SEQ ID NO: 64130 - DNA, 25 bp, Probe Sequence
ccgttctttggagcattgttctaaa

SEQ ID NO: 64131 - DNA, 25 bp, Probe Sequence
gaaattacatattgctgtgccaagg

SEQ ID NO: 64132 - DNA, 25 bp, Probe Sequence
ggaaattacatattgctgtgccaag

SEQ ID NO: 64133 - DNA, 25 bp, Probe Sequence
actatggtgctcaggtgattatcct

SEQ ID NO: 64134 - DNA, 25 bp, Probe Sequence
aaatgggaaattacatattgctgtg

SEQ ID NO: 64135 - DNA, 25 bp, Probe Sequence
atgggaaattacatattgctgtgcc

SEQ ID NO: 64136 - DNA, 25 bp, Probe Sequence
aaattacatattgctgtgccaaggg

SEQ ID NO: 64137 - DNA, 25 bp, Probe Sequence
gggaaattacatattgctgtgccaa

SEQ ID NO: 64138 - DNA, 25 bp, Probe Sequence
accgttctttggagcattgttctaa

SEQ ID NO: 64139 - DNA, 25 bp, Probe Sequence
aggtgattatccttcgctcgtttat

SEQ ID NO: 64140 - DNA, 25 bp, Probe Sequence
tattctgtcggtattacttctgtgg

SEQ ID NO: 64141 - DNA, 25 bp, Probe Sequence
attctgtcggtattacttctgtgga

SEQ ID NO: 64142 - DNA, 25 bp, Probe Sequence
gtcggtattacttctgtggaacttc

SEQ ID NO: 64143 - DNA, 25 bp, Probe Sequence
ttattctgtcggtattacttctgtg

SEQ ID NO: 64144 - DNA, 25 bp, Probe Sequence
ttctgtcggtattacttctgtggaa

SEQ ID NO: 64145 - DNA, 25 bp, Probe Sequence
agtattgattgactctgctattggc

SEQ ID NO: 64146 - DNA, 25 bp, Probe Sequence
tgtcggtattacttctgtggaactt

SEQ ID NO: 64147 - DNA, 25 bp, Probe Sequence
tgttactaacctcagtgtattgtgc

SEQ ID NO: 64148 - DNA, 25 bp, Probe Sequence
cttatggtgtatatctgctgcgatc

SEQ ID NO: 64149 - DNA, 25 bp, Probe Sequence
attctgaccacaacaggacattatt

SEQ ID NO: 64150 - DNA, 25 bp, Probe Sequence
ttgttactaacctcagtgtattgtg

SEQ ID NO: 64151 - DNA, 25 bp, Probe Sequence
cagtattgattgactctgctattgg

SEQ ID NO: 64152 - DNA, 25 bp, Probe Sequence
gattctgaccacaacaggacattat

SEQ ID NO: 64153 - DNA, 25 bp, Probe Sequence
ctgtcggtattacttctgtggaact

SEQ ID NO: 64154 - DNA, 25 bp, Probe Sequence
tctgtcggtattacttctgtggaac

SEQ ID NO: 64155 - DNA, 25 bp, Probe Sequence
ttctgaccacaacaggacattattc

SEQ ID NO: 64156 - DNA, 25 bp, Probe Sequence
tcagtattgattgactctgctattg

SEQ ID NO: 64157 - DNA, 25 bp, Probe Sequence
tcggtattacttctgtggaacttcg

SEQ ID NO: 64158 - DNA, 25 bp, Probe Sequence
gtatatctgctgcgatcctactgtt

SEQ ID NO: 64159 - DNA, 25 bp, Probe Sequence
tgattctgaccacaacaggacatta

SEQ ID NO: 64160 - DNA, 25 bp, Probe Sequence
tggcaagacaaagaaacaatgaata

SEQ ID NO: 64161 - DNA, 25 bp, Probe Sequence
ttcttagtttctgctctttcattgg

SEQ ID NO: 64162 - DNA, 25 bp, Probe Sequence
ttatggtgtatatctgctgcgatcc

SEQ ID NO: 64163 - DNA, 25 bp, Probe Sequence
ctttctccgatgtctaactctttgt

SEQ ID NO: 64164 - DNA, 25 bp, Probe Sequence
aaattgtaggagcaggatggaaata

SEQ ID NO: 64165 - DNA, 25 bp, Probe Sequence
taaattgtaggagcaggatggaaat

SEQ ID NO: 64166 - DNA, 25 bp, Probe Sequence
gtttctaaattgtaggagcaggatg

SEQ ID NO: 64167 - DNA, 25 bp, Probe Sequence
ctaaattgtaggagcaggatggaaa

SEQ ID NO: 64168 - DNA, 25 bp, Probe Sequence
tttctaaattgtaggagcaggatgg

SEQ ID NO: 64169 - DNA, 25 bp, Probe Sequence
ggtttctaaattgtaggagcaggat

SEQ ID NO: 64170 - DNA, 25 bp, Probe Sequence
aattgtaggagcaggatggaaatac

SEQ ID NO: 64171 - DNA, 25 bp, Probe Sequence
aaggtttctaaattgtaggagcagg

SEQ ID NO: 64172 - DNA, 25 bp, Probe Sequence
gtaggagcaggatggaaatactttg

SEQ ID NO: 64173 - DNA, 25 bp, Probe Sequence
attgtaggagcaggatggaaatact

SEQ ID NO: 64174 - DNA, 25 bp, Probe Sequence
gaaggtttctaaattgtaggagcag

SEQ ID NO: 64175 - DNA, 25 bp, Probe Sequence
tgtaggagcaggatggaaatacttt

SEQ ID NO: 64176 - DNA, 25 bp, Probe Sequence
ttgtaggagcaggatggaaatactt

SEQ ID NO: 64177 - DNA, 25 bp, Probe Sequence
tctaaattgtaggagcaggatggaa

SEQ ID NO: 64178 - DNA, 25 bp, Probe Sequence
ttctaaattgtaggagcaggatgga

SEQ ID NO: 64179 - DNA, 25 bp, Probe Sequence
aggtttctaaattgtaggagcagga

SEQ ID NO: 64180 - DNA, 25 bp, Probe Sequence
agaaggtttctaaattgtaggagca

SEQ ID NO: 64181 - DNA, 25 bp, Probe Sequence
acaaggtatagacaaggctgagcag

SEQ ID NO: 64182 - DNA, 25 bp, Probe Sequence
aagaaggtttctaaattgtaggagc

SEQ ID NO: 64183 - DNA, 25 bp, Probe Sequence
cacaaggtatagacaaggctgagca

SEQ ID NO: 64184 - DNA, 25 bp, Probe Sequence
caaggtatagacaaggctgagcagg

SEQ ID NO: 64185 - DNA, 25 bp, Probe Sequence
gtacagcttgataacccttaataaa

SEQ ID NO: 64186 - DNA, 25 bp, Probe Sequence
cgtgtacagcttgataacccttaat

SEQ ID NO: 64187 - DNA, 25 bp, Probe Sequence
gtgtacagcttgataacccttaata

SEQ ID NO: 64188 - DNA, 25 bp, Probe Sequence
tgaaccttcagaacattgatccttg

SEQ ID NO: 64189 - DNA, 25 bp, Probe Sequence
agcagtcactctcagaatcttgatt

SEQ ID NO: 64190 - DNA, 25 bp, Probe Sequence
gagcagtcactctcagaatcttgat

SEQ ID NO: 64191 - DNA, 25 bp, Probe Sequence
atgatgtgaagaataaatgcccaat

SEQ ID NO: 64192 - DNA, 25 bp, Probe Sequence
ccaagagaaacagagaaagaccatt

SEQ ID NO: 64193 - DNA, 25 bp, Probe Sequence
tgatgtgaagaataaatgcccaatt

SEQ ID NO: 64194 - DNA, 25 bp, Probe Sequence
caagagaaacagagaaagaccattc

SEQ ID NO: 64195 - DNA, 25 bp, Probe Sequence
taaatgcccaattcttactgttcag

SEQ ID NO: 64196 - DNA, 25 bp, Probe Sequence
aagagaaacagagaaagaccattcc

SEQ ID NO: 64197 - DNA, 25 bp, Probe Sequence
gaaccttcagaacattgatccttgc

SEQ ID NO: 64198 - DNA, 25 bp, Probe Sequence
ataaatgcccaattcttactgttca

SEQ ID NO: 64199 - DNA, 25 bp, Probe Sequence
ctgtatgtaggaaagtgttctgtgg

SEQ ID NO: 64200 - DNA, 25 bp, Probe Sequence
ttgtgtctctttcaagtgccttaat

SEQ ID NO: 64201 - DNA, 25 bp, Probe Sequence
actgtatgtaggaaagtgttctgtg

SEQ ID NO: 64202 - DNA, 25 bp, Probe Sequence
tgtgtctctttcaagtgccttaatc

SEQ ID NO: 64203 - DNA, 25 bp, Probe Sequence
ctagccaagagaaacagagaaagac

SEQ ID NO: 64204 - DNA, 25 bp, Probe Sequence
attcttactgttcaggtttgatgtg

SEQ ID NO: 64205 - DNA, 25 bp, Probe Sequence
ccaattcttactgttcaggtttgat

SEQ ID NO: 64206 - DNA, 25 bp, Probe Sequence
ttactgttcaggtttgatgtggaat

SEQ ID NO: 64207 - DNA, 25 bp, Probe Sequence
tactgtatgtaggaaagtgttctgt

SEQ ID NO: 64208 - DNA, 25 bp, Probe Sequence
actagccaagagaaacagagaaaga

SEQ ID NO: 64209 - DNA, 25 bp, Probe Sequence
cactagccaagagaaacagagaaag

SEQ ID NO: 64210 - DNA, 25 bp, Probe Sequence
tactgttcaggtttgatgtggaatc

SEQ ID NO: 64211 - DNA, 25 bp, Probe Sequence
aaatgcccaattcttactgttcagg

SEQ ID NO: 64212 - DNA, 25 bp, Probe Sequence
ggcaaatacagacaatagaccaaag

SEQ ID NO: 64213 - DNA, 25 bp, Probe Sequence
gcaaatacagacaatagaccaaagt

SEQ ID NO: 64214 - DNA, 25 bp, Probe Sequence
gtacattcttctggttcctcagtga

SEQ ID NO: 64215 - DNA, 25 bp, Probe Sequence
tacattcttctggttcctcagtgag

SEQ ID NO: 64216 - DNA, 25 bp, Probe Sequence
cggcaaatacagacaatagaccaaa

SEQ ID NO: 64217 - DNA, 25 bp, Probe Sequence
agcgtccaagaagttgaataaagag

SEQ ID NO: 64218 - DNA, 25 bp, Probe Sequence
atctaactcatgcctgtccagtcta

SEQ ID NO: 64219 - DNA, 25 bp, Probe Sequence
cagcgtccaagaagttgaataaaga

SEQ ID NO: 64220 - DNA, 25 bp, Probe Sequence
aatacagacaatagaccaaagtccc

SEQ ID NO: 64221 - DNA, 25 bp, Probe Sequence
atacagacaatagaccaaagtccct

SEQ ID NO: 64222 - DNA, 25 bp, Probe Sequence
gagaatctaactcatgcctgtccag

SEQ ID NO: 64223 - DNA, 25 bp, Probe Sequence
aaatacagacaatagaccaaagtcc

SEQ ID NO: 64224 - DNA, 25 bp, Probe Sequence
gaatctaactcatgcctgtccagtc

SEQ ID NO: 64225 - DNA, 25 bp, Probe Sequence
gcgtccaagaagttgaataaagagg

SEQ ID NO: 64226 - DNA, 25 bp, Probe Sequence
cagagaatctaactcatgcctgtcc

SEQ ID NO: 64227 - DNA, 25 bp, Probe Sequence
ccagagaatctaactcatgcctgtc

SEQ ID NO: 64228 - DNA, 25 bp, Probe Sequence
tccaagaagttgaataaagaggagc

SEQ ID NO: 64229 - DNA, 25 bp, Probe Sequence
gtccaagaagttgaataaagaggag

SEQ ID NO: 64230 - DNA, 25 bp, Probe Sequence
cgtccaagaagttgaataaagagga

SEQ ID NO: 64231 - DNA, 25 bp, Probe Sequence
agagaatctaactcatgcctgtcca

SEQ ID NO: 64232 - DNA, 25 bp, Probe Sequence
tacagacaatagaccaaagtccctg

SEQ ID NO: 64233 - DNA, 25 bp, Probe Sequence
ccagcgtccaagaagttgaataaag

SEQ ID NO: 64234 - DNA, 25 bp, Probe Sequence
aatctaactcatgcctgtccagtct

SEQ ID NO: 64235 - DNA, 25 bp, Probe Sequence
agaatctaactcatgcctgtccagt

SEQ ID NO: 64236 - DNA, 25 bp, Probe Sequence
acctgaatcctgaatcttagactct

SEQ ID NO: 64237 - DNA, 25 bp, Probe Sequence
cctgaatcctgaatcttagactctt

SEQ ID NO: 64238 - DNA, 25 bp, Probe Sequence
tacctgaatcctgaatcttagactc

SEQ ID NO: 64239 - DNA, 25 bp, Probe Sequence
gtacctgaatcctgaatcttagact

SEQ ID NO: 64240 - DNA, 25 bp, Probe Sequence
agtacctgaatcctgaatcttagac

SEQ ID NO: 64241 - DNA, 25 bp, Probe Sequence
ccagtacctgaatcctgaatcttag

SEQ ID NO: 64242 - DNA, 25 bp, Probe Sequence
cagtacctgaatcctgaatcttaga

SEQ ID NO: 64243 - DNA, 25 bp, Probe Sequence
ctgaatcctgaatcttagactctta

SEQ ID NO: 64244 - DNA, 25 bp, Probe Sequence
ccaacatctcactgcaattctatca

SEQ ID NO: 64245 - DNA, 25 bp, Probe Sequence
gctggctaatacatatatacctaca

SEQ ID NO: 64246 - DNA, 25 bp, Probe Sequence
atgtaactgagcttggaagaggatc

SEQ ID NO: 64247 - DNA, 25 bp, Probe Sequence
ttcctaatgctcagaacatggatga

SEQ ID NO: 64248 - DNA, 25 bp, Probe Sequence
caacatctcactgcaattctatcag

SEQ ID NO: 64249 - DNA, 25 bp, Probe Sequence
catgtaactgagcttggaagaggat

SEQ ID NO: 64250 - DNA, 25 bp, Probe Sequence
tgaatcctgaatcttagactcttat

SEQ ID NO: 64251 - DNA, 25 bp, Probe Sequence
gaactcagccaatagccatgtaact

SEQ ID NO: 64252 - DNA, 25 bp, Probe Sequence
atgtggtaaggaactcagccaatag

SEQ ID NO: 64253 - DNA, 25 bp, Probe Sequence
ggatgagatgataaatgtttgttgt

SEQ ID NO: 64254 - DNA, 25 bp, Probe Sequence
tggatgagatgataaatgtttgttg

SEQ ID NO: 64255 - DNA, 25 bp, Probe Sequence
gccaacatctcactgcaattctatc

SEQ ID NO: 64256 - DNA, 25 bp, Probe Sequence
tgagatgataaatgtttgttgtgtt

SEQ ID NO: 64257 - DNA, 25 bp, Probe Sequence
atgagatgataaatgtttgttgtgt

SEQ ID NO: 64258 - DNA, 25 bp, Probe Sequence
ataaatgtttgttgtgttaagctgc

SEQ ID NO: 64259 - DNA, 25 bp, Probe Sequence
agctggctaatacatatatacctac

SEQ ID NO: 64260 - DNA, 25 bp, Probe Sequence
taccaataagaatgagcctgaatgt

SEQ ID NO: 64261 - DNA, 25 bp, Probe Sequence
aataagaatgagcctgaatgttggt

SEQ ID NO: 64262 - DNA, 25 bp, Probe Sequence
accaataagaatgagcctgaatgtt

SEQ ID NO: 64263 - DNA, 25 bp, Probe Sequence
ataccaataagaatgagcctgaatg

SEQ ID NO: 64264 - DNA, 25 bp, Probe Sequence
ataagaatgagcctgaatgttggtg

SEQ ID NO: 64265 - DNA, 25 bp, Probe Sequence
caataagaatgagcctgaatgttgg

SEQ ID NO: 64266 - DNA, 25 bp, Probe Sequence
ccaataagaatgagcctgaatgttg

SEQ ID NO: 64267 - DNA, 25 bp, Probe Sequence
attcctccattcctgatgacttcaa

SEQ ID NO: 64268 - DNA, 25 bp, Probe Sequence
tataccaataagaatgagcctgaat

SEQ ID NO: 64269 - DNA, 25 bp, Probe Sequence
ttataccaataagaatgagcctgaa

SEQ ID NO: 64270 - DNA, 25 bp, Probe Sequence
ctccattcctgatgacttcaagaat

SEQ ID NO: 64271 - DNA, 25 bp, Probe Sequence
cctccattcctgatgacttcaagaa

SEQ ID NO: 64272 - DNA, 25 bp, Probe Sequence
ttcctccattcctgatgacttcaag

SEQ ID NO: 64273 - DNA, 25 bp, Probe Sequence
cattcctccattcctgatgacttca

SEQ ID NO: 64274 - DNA, 25 bp, Probe Sequence
aattgaaatgctgtctactgaaagg

SEQ ID NO: 64275 - DNA, 25 bp, Probe Sequence
tctgaattgaaatgctgtctactga

SEQ ID NO: 64276 - DNA, 25 bp, Probe Sequence
ctctgaattgaaatgctgtctactg

SEQ ID NO: 64277 - DNA, 25 bp, Probe Sequence
tctctgaattgaaatgctgtctact

SEQ ID NO: 64278 - DNA, 25 bp, Probe Sequence
gtctctgaattgaaatgctgtctac

SEQ ID NO: 64279 - DNA, 25 bp, Probe Sequence
ctgaattgaaatgctgtctactgaa

SEQ ID NO: 64280 - DNA, 25 bp, Probe Sequence
taagaatgagcctgaatgttggtgg

SEQ ID NO: 64281 - DNA, 25 bp, Probe Sequence
cagaaggattggcttgttagtttaa

SEQ ID NO: 64282 - DNA, 25 bp, Probe Sequence
tgaattgaaatgctgtctactgaaa

SEQ ID NO: 64283 - DNA, 25 bp, Probe Sequence
ggtctctgaattgaaatgctgtcta

SEQ ID NO: 64284 - DNA, 25 bp, Probe Sequence
catggtctttctcctttatggcctc

SEQ ID NO: 64285 - DNA, 25 bp, Probe Sequence
aaggcatggtctttctcctttatgg

SEQ ID NO: 64286 - DNA, 25 bp, Probe Sequence
atggtctttctcctttatggcctcc

SEQ ID NO: 64287 - DNA, 25 bp, Probe Sequence
aggcatggtctttctcctttatggc

SEQ ID NO: 64288 - DNA, 25 bp, Probe Sequence
taaagttccattttgtggtcctgca

SEQ ID NO: 64289 - DNA, 25 bp, Probe Sequence
gcatggtctttctcctttatggcct

SEQ ID NO: 64290 - DNA, 25 bp, Probe Sequence
aaagttccattttgtggtcctgcaa

SEQ ID NO: 64291 - DNA, 25 bp, Probe Sequence
aagttccattttgtggtcctgcaaa

SEQ ID NO: 64292 - DNA, 25 bp, Probe Sequence
caactccaaggactgggtatggatc

SEQ ID NO: 64293 - DNA, 25 bp, Probe Sequence
ctcctttatggcctccccacttttc

SEQ ID NO: 64294 - DNA, 25 bp, Probe Sequence
agttccattttgtggtcctgcaaaa

SEQ ID NO: 64295 - DNA, 25 bp, Probe Sequence
caagattgtcctgaagaagtggtac

SEQ ID NO: 64296 - DNA, 25 bp, Probe Sequence
aagattgtcctgaagaagtggtaca

SEQ ID NO: 64297 - DNA, 25 bp, Probe Sequence
acaagattgtcctgaagaagtggta

SEQ ID NO: 64298 - DNA, 25 bp, Probe Sequence
ttggaacaagattgtcctgaagaag

SEQ ID NO: 64299 - DNA, 25 bp, Probe Sequence
gaacaagattgtcctgaagaagtgg

SEQ ID NO: 64300 - DNA, 25 bp, Probe Sequence
gttggaacaagattgtcctgaagaa

SEQ ID NO: 64301 - DNA, 25 bp, Probe Sequence
ggaacaagattgtcctgaagaagtg

SEQ ID NO: 64302 - DNA, 25 bp, Probe Sequence
aacaagattgtcctgaagaagtggt

SEQ ID NO: 64303 - DNA, 25 bp, Probe Sequence
agattgtcctgaagaagtggtacac

SEQ ID NO: 64304 - DNA, 25 bp, Probe Sequence
tggaacaagattgtcctgaagaagt

SEQ ID NO: 64305 - DNA, 25 bp, Probe Sequence
ttaaatgcaacacggatgataccat

SEQ ID NO: 64306 - DNA, 25 bp, Probe Sequence
gattgtcctgaagaagtggtacacg

SEQ ID NO: 64307 - DNA, 25 bp, Probe Sequence
cgttggaacaagattgtcctgaaga

SEQ ID NO: 64308 - DNA, 25 bp, Probe Sequence
tgtcctgaagaagtggtacacgatt

SEQ ID NO: 64309 - DNA, 25 bp, Probe Sequence
ttgtcctgaagaagtggtacacgat

SEQ ID NO: 64310 - DNA, 25 bp, Probe Sequence
attgtcctgaagaagtggtacacga

SEQ ID NO: 64311 - DNA, 25 bp, Probe Sequence
gttaaatgcaacacggatgatacca

SEQ ID NO: 64312 - DNA, 25 bp, Probe Sequence
gtcctgaagaagtggtacacgattt

SEQ ID NO: 64313 - DNA, 25 bp, Probe Sequence
ccgttggaacaagattgtcctgaag

SEQ ID NO: 64314 - DNA, 25 bp, Probe Sequence
accttaataaagacttagatgttga

SEQ ID NO: 64315 - DNA, 25 bp, Probe Sequence
taaatgcaacacggatgataccatc

SEQ ID NO: 64316 - DNA, 25 bp, Probe Sequence
tcctgaagaagtggtacacgatttt

SEQ ID NO: 64317 - DNA, 25 bp, Probe Sequence
cgttaaatgcaacacggatgatacc

SEQ ID NO: 64318 - DNA, 25 bp, Probe Sequence
gcgttaaatgcaacacggatgatac

SEQ ID NO: 64319 - DNA, 25 bp, Probe Sequence
aggaagaggaagaagaagaagagat

SEQ ID NO: 64320 - DNA, 25 bp, Probe Sequence
gaagaggaagaagaagaagagatgg

SEQ ID NO: 64321 - DNA, 25 bp, Probe Sequence
ggaagaggaagaagaagaagagatg

SEQ ID NO: 64322 - DNA, 25 bp, Probe Sequence
ctgtgctaagattaagaagaccaac

SEQ ID NO: 64323 - DNA, 25 bp, Probe Sequence
cctgtgctaagattaagaagaccaa

SEQ ID NO: 64324 - DNA, 25 bp, Probe Sequence
ctcctgtgctaagattaagaagacc

SEQ ID NO: 64325 - DNA, 25 bp, Probe Sequence
tctcctgtgctaagattaagaagac

SEQ ID NO: 64326 - DNA, 25 bp, Probe Sequence
ctctcctgtgctaagattaagaaga

SEQ ID NO: 64327 - DNA, 25 bp, Probe Sequence
cctctcctgtgctaagattaagaag

SEQ ID NO: 64328 - DNA, 25 bp, Probe Sequence
tgtgctaagattaagaagaccaacg

SEQ ID NO: 64329 - DNA, 25 bp, Probe Sequence
tcctgtgctaagattaagaagacca

SEQ ID NO: 64330 - DNA, 25 bp, Probe Sequence
acctctcctgtgctaagattaagaa

SEQ ID NO: 64331 - DNA, 25 bp, Probe Sequence
gaagaagaagaagagatggcaacag

SEQ ID NO: 64332 - DNA, 25 bp, Probe Sequence
gaagaggaggaagaggaagaagaag

SEQ ID NO: 64333 - DNA, 25 bp, Probe Sequence
aagaggaagaagaagaagagatggc

SEQ ID NO: 64334 - DNA, 25 bp, Probe Sequence
agaggaggaagaggaagaagaagaa

SEQ ID NO: 64335 - DNA, 25 bp, Probe Sequence
aagaggaggaagaggaagaagaaga

SEQ ID NO: 64336 - DNA, 25 bp, Probe Sequence
aagaagaagaagagatggcaacagt

SEQ ID NO: 64337 - DNA, 25 bp, Probe Sequence
gaggaagaagaagaagagatggcaa

SEQ ID NO: 64338 - DNA, 25 bp, Probe Sequence
atggtagaatcaggtgatgactcat

SEQ ID NO: 64339 - DNA, 25 bp, Probe Sequence
aggaagaagaagaagagatggcaac

SEQ ID NO: 64340 - DNA, 25 bp, Probe Sequence
acataatctctgtctcttggacctg

SEQ ID NO: 64341 - DNA, 25 bp, Probe Sequence
cacataatctctgtctcttggacct

SEQ ID NO: 64342 - DNA, 25 bp, Probe Sequence
aagaagagcaagaagcggaagttaa

SEQ ID NO: 64343 - DNA, 25 bp, Probe Sequence
ccgtgtgtaaatctttcccaataaa

SEQ ID NO: 64344 - DNA, 25 bp, Probe Sequence
accgtgtgtaaatctttcccaataa

SEQ ID NO: 64345 - DNA, 25 bp, Probe Sequence
aggttaataaagcactgacttgtta

SEQ ID NO: 64346 - DNA, 25 bp, Probe Sequence
ccttaacatctgcattggacaactc

SEQ ID NO: 64347 - DNA, 25 bp, Probe Sequence
caggttaataaagcactgacttgtt

SEQ ID NO: 64348 - DNA, 25 bp, Probe Sequence
gaccttaacatctgcattggacaac

SEQ ID NO: 64349 - DNA, 25 bp, Probe Sequence
ccaggttaataaagcactgacttgt

SEQ ID NO: 64350 - DNA, 25 bp, Probe Sequence
ccacacctagactcagtaaggaagt

SEQ ID NO: 64351 - DNA, 25 bp, Probe Sequence
ggttaataaagcactgacttgttaa

SEQ ID NO: 64352 - DNA, 25 bp, Probe Sequence
accttaacatctgcattggacaact

SEQ ID NO: 64353 - DNA, 25 bp, Probe Sequence
caccgtgtgtaaatctttcccaata

SEQ ID NO: 64354 - DNA, 25 bp, Probe Sequence
cttaacatctgcattggacaactcc

SEQ ID NO: 64355 - DNA, 25 bp, Probe Sequence
gccaggttaataaagcactgacttg

SEQ ID NO: 64356 - DNA, 25 bp, Probe Sequence
ggaccttaacatctgcattggacaa

SEQ ID NO: 64357 - DNA, 25 bp, Probe Sequence
ttggaccttaacatctgcattggac

SEQ ID NO: 64358 - DNA, 25 bp, Probe Sequence
cgtgtgtaaatctttcccaataaag

SEQ ID NO: 64359 - DNA, 25 bp, Probe Sequence
gttggaccttaacatctgcattgga

SEQ ID NO: 64360 - DNA, 25 bp, Probe Sequence
taaatctttcccaataaagtgttgc

SEQ ID NO: 64361 - DNA, 25 bp, Probe Sequence
tcaccgtgtgtaaatctttcccaat

SEQ ID NO: 64362 - DNA, 25 bp, Probe Sequence
cccaataaagtgttgcacaaagaaa

SEQ ID NO: 64363 - DNA, 25 bp, Probe Sequence
tttcccaataaagtgttgcacaaag

SEQ ID NO: 64364 - DNA, 25 bp, Probe Sequence
cacacctagactcagtaaggaagtc

SEQ ID NO: 64365 - DNA, 25 bp, Probe Sequence
tcccaataaagtgttgcacaaagaa

SEQ ID NO: 64366 - DNA, 25 bp, Probe Sequence
ttcccaataaagtgttgcacaaaga

SEQ ID NO: 64367 - DNA, 25 bp, Probe Sequence
aaacggtgtcatatttagtcagagg

SEQ ID NO: 64368 - DNA, 25 bp, Probe Sequence
tggagatttctacttcttcaaaggg

SEQ ID NO: 64369 - DNA, 25 bp, Probe Sequence
atggagatttctacttcttcaaagg

SEQ ID NO: 64370 - DNA, 25 bp, Probe Sequence
tacagttcctttcaagaggtaacag

SEQ ID NO: 64371 - DNA, 25 bp, Probe Sequence
tgaatgatggagatttctacttctt

SEQ ID NO: 64372 - DNA, 25 bp, Probe Sequence
ttgaatgatggagatttctacttct

SEQ ID NO: 64373 - DNA, 25 bp, Probe Sequence
tgatggagatttctacttcttcaaa

SEQ ID NO: 64374 - DNA, 25 bp, Probe Sequence
gtacagttcctttcaagaggtaaca

SEQ ID NO: 64375 - DNA, 25 bp, Probe Sequence
gtttcttcggctaaaggtacagttc

SEQ ID NO: 64376 - DNA, 25 bp, Probe Sequence
ccctaaatactgccactcttccttc

SEQ ID NO: 64377 - DNA, 25 bp, Probe Sequence
aacggtgtcatatttagtcagaggc

SEQ ID NO: 64378 - DNA, 25 bp, Probe Sequence
ggtacagttcctttcaagaggtaac

SEQ ID NO: 64379 - DNA, 25 bp, Probe Sequence
aggtacagttcctttcaagaggtaa

SEQ ID NO: 64380 - DNA, 25 bp, Probe Sequence
tttgtttcttcggctaaaggtacag

SEQ ID NO: 64381 - DNA, 25 bp, Probe Sequence
gtctgcctttgttccttgaagaatg

SEQ ID NO: 64382 - DNA, 25 bp, Probe Sequence
gatggagatttctacttcttcaaag

SEQ ID NO: 64383 - DNA, 25 bp, Probe Sequence
atgatggagatttctacttcttcaa

SEQ ID NO: 64384 - DNA, 25 bp, Probe Sequence
aatgatggagatttctacttcttca

SEQ ID NO: 64385 - DNA, 25 bp, Probe Sequence
cctaaatactgccactcttccttcg

SEQ ID NO: 64386 - DNA, 25 bp, Probe Sequence
gaatgatggagatttctacttcttc

SEQ ID NO: 64387 - DNA, 25 bp, Probe Sequence
taaatactgccactcttccttcgat

SEQ ID NO: 64388 - DNA, 25 bp, Probe Sequence
tgtctgcctttgttccttgaagaat

SEQ ID NO: 64389 - DNA, 25 bp, Probe Sequence
gcagtgtcattgaatgatggagatt

SEQ ID NO: 64390 - DNA, 25 bp, Probe Sequence
tttcttcggctaaaggtacagttcc

SEQ ID NO: 64391 - DNA, 25 bp, Probe Sequence
aagaaagtttattgatgggtggttg

SEQ ID NO: 64392 - DNA, 25 bp, Probe Sequence
aaagaaagtttattgatgggtggtt

SEQ ID NO: 64393 - DNA, 25 bp, Probe Sequence
agaaagtttattgatgggtggttgc

SEQ ID NO: 64394 - DNA, 25 bp, Probe Sequence
aaaagaaagtttattgatgggtggt

SEQ ID NO: 64395 - DNA, 25 bp, Probe Sequence
gaaagtttattgatgggtggttgca

SEQ ID NO: 64396 - DNA, 25 bp, Probe Sequence
aaccattgttttctgttaggactca

SEQ ID NO: 64397 - DNA, 25 bp, Probe Sequence
attgttttctgttaggactcagttg

SEQ ID NO: 64398 - DNA, 25 bp, Probe Sequence
cattgttttctgttaggactcagtt

SEQ ID NO: 64399 - DNA, 25 bp, Probe Sequence
ccattgttttctgttaggactcagt

SEQ ID NO: 64400 - DNA, 25 bp, Probe Sequence
accattgttttctgttaggactcag

SEQ ID NO: 64401 - DNA, 25 bp, Probe Sequence
ttgttttctgttaggactcagttgc

SEQ ID NO: 64402 - DNA, 25 bp, Probe Sequence
ttaggactcagttgcaagaacagaa

SEQ ID NO: 64403 - DNA, 25 bp, Probe Sequence
gaatggattagccacatcgaggagt

SEQ ID NO: 64404 - DNA, 25 bp, Probe Sequence
aaaccattgttttctgttaggactc

SEQ ID NO: 64405 - DNA, 25 bp, Probe Sequence
gaaaccattgttttctgttaggact

SEQ ID NO: 64406 - DNA, 25 bp, Probe Sequence
gttaggactcagttgcaagaacaga

SEQ ID NO: 64407 - DNA, 25 bp, Probe Sequence
cgaaaccattgttttctgttaggac

SEQ ID NO: 64408 - DNA, 25 bp, Probe Sequence
gtaacaaacgccaccttacactctg

SEQ ID NO: 64409 - DNA, 25 bp, Probe Sequence
cagcgaaaccattgttttctgttag

SEQ ID NO: 64410 - DNA, 25 bp, Probe Sequence
acactgtgtccttatggcttcactg

SEQ ID NO: 64411 - DNA, 25 bp, Probe Sequence
aatggattagccacatcgaggagtg

SEQ ID NO: 64412 - DNA, 25 bp, Probe Sequence
tcagcgaaaccattgttttctgtta

SEQ ID NO: 64413 - DNA, 25 bp, Probe Sequence
tctgttaggactcagttgcaagaac

SEQ ID NO: 64414 - DNA, 25 bp, Probe Sequence
gtcttggtaacaaacgccaccttac

SEQ ID NO: 64415 - DNA, 25 bp, Probe Sequence
aataataataggctggtcacggtgg

SEQ ID NO: 64416 - DNA, 25 bp, Probe Sequence
aaataataataggctggtcacggtg

SEQ ID NO: 64417 - DNA, 25 bp, Probe Sequence
aaaataataataggctggtcacggt

SEQ ID NO: 64418 - DNA, 25 bp, Probe Sequence
gaaaataataataggctggtcacgg

SEQ ID NO: 64419 - DNA, 25 bp, Probe Sequence
ttctggatatggagtatgttttgct

SEQ ID NO: 64420 - DNA, 25 bp, Probe Sequence
tttctggatatggagtatgttttgc

SEQ ID NO: 64421 - DNA, 25 bp, Probe Sequence
tctggatatggagtatgttttgcta

SEQ ID NO: 64422 - DNA, 25 bp, Probe Sequence
ataataataggctggtcacggtggc

SEQ ID NO: 64423 - DNA, 25 bp, Probe Sequence
ggatatggagtatgttttgctatgt

SEQ ID NO: 64424 - DNA, 25 bp, Probe Sequence
tggatatggagtatgttttgctatg

SEQ ID NO: 64425 - DNA, 25 bp, Probe Sequence
ctggatatggagtatgttttgctat

SEQ ID NO: 64426 - DNA, 25 bp, Probe Sequence
tgaaaataataataggctggtcacg

SEQ ID NO: 64427 - DNA, 25 bp, Probe Sequence
taaataaatagcaaagctgggtgtg

SEQ ID NO: 64428 - DNA, 25 bp, Probe Sequence
tgtaataatgggaagcatatgtcat

SEQ ID NO: 64429 - DNA, 25 bp, Probe Sequence
atgtaataatgggaagcatatgtca

SEQ ID NO: 64430 - DNA, 25 bp, Probe Sequence
ttaaataaatagcaaagctgggtgt

SEQ ID NO: 64431 - DNA, 25 bp, Probe Sequence
tgttttgctatgtaataatgggaag

SEQ ID NO: 64432 - DNA, 25 bp, Probe Sequence
tttaaataaatagcaaagctgggtg

SEQ ID NO: 64433 - DNA, 25 bp, Probe Sequence
aaataaatagcaaagctgggtgtgg

SEQ ID NO: 64434 - DNA, 25 bp, Probe Sequence
ttttctggatatggagtatgttttg

SEQ ID NO: 64435 - DNA, 25 bp, Probe Sequence
gagaatgcagagatgtgttgggttt

SEQ ID NO: 64436 - DNA, 25 bp, Probe Sequence
gtcttgaaaataataataggctggt

SEQ ID NO: 64437 - DNA, 25 bp, Probe Sequence
tgtcttgaaaataataataggctgg

SEQ ID NO: 64438 - DNA, 25 bp, Probe Sequence
gatgacaagagtgaaactccatctc

SEQ ID NO: 64439 - DNA, 25 bp, Probe Sequence
ctgaagagcgaatatcctgacttat

SEQ ID NO: 64440 - DNA, 25 bp, Probe Sequence
tgaagagcgaatatcctgacttatt

SEQ ID NO: 64441 - DNA, 25 bp, Probe Sequence
tgctctctaacggttgattctcatt

SEQ ID NO: 64442 - DNA, 25 bp, Probe Sequence
attgaccattgtaggtaatcaggaa

SEQ ID NO: 64443 - DNA, 25 bp, Probe Sequence
aattgaccattgtaggtaatcagga

SEQ ID NO: 64444 - DNA, 25 bp, Probe Sequence
ctgctctctaacggttgattctcat

SEQ ID NO: 64445 - DNA, 25 bp, Probe Sequence
aatatcctgacttattcgagtggtt

SEQ ID NO: 64446 - DNA, 25 bp, Probe Sequence
taaattattcagaaggatgtcccgt

SEQ ID NO: 64447 - DNA, 25 bp, Probe Sequence
ctctaacggttgattctcatttgtc

SEQ ID NO: 64448 - DNA, 25 bp, Probe Sequence
tctctaacggttgattctcatttgt

SEQ ID NO: 64449 - DNA, 25 bp, Probe Sequence
ctctctaacggttgattctcatttg

SEQ ID NO: 64450 - DNA, 25 bp, Probe Sequence
aaattattcagaaggatgtcccgtg

SEQ ID NO: 64451 - DNA, 25 bp, Probe Sequence
ttaaattattcagaaggatgtcccg

SEQ ID NO: 64452 - DNA, 25 bp, Probe Sequence
ggttgattctcatttgtcccttaaa

SEQ ID NO: 64453 - DNA, 25 bp, Probe Sequence
tctaacggttgattctcatttgtcc

SEQ ID NO: 64454 - DNA, 25 bp, Probe Sequence
gctctctaacggttgattctcattt

SEQ ID NO: 64455 - DNA, 25 bp, Probe Sequence
gattctcatttgtcccttaaacagc

SEQ ID NO: 64456 - DNA, 25 bp, Probe Sequence
cggttgattctcatttgtcccttaa

SEQ ID NO: 64457 - DNA, 25 bp, Probe Sequence
tgattctcatttgtcccttaaacag

SEQ ID NO: 64458 - DNA, 25 bp, Probe Sequence
gttgattctcatttgtcccttaaac

SEQ ID NO: 64459 - DNA, 25 bp, Probe Sequence
ttgattctcatttgtcccttaaaca

SEQ ID NO: 64460 - DNA, 25 bp, Probe Sequence
ctaacggttgattctcatttgtccc

SEQ ID NO: 64461 - DNA, 25 bp, Probe Sequence
ttgaccattgtaggtaatcaggaaa

SEQ ID NO: 64462 - DNA, 25 bp, Probe Sequence
acggttgattctcatttgtccctta

SEQ ID NO: 64463 - DNA, 25 bp, Probe Sequence
agtatgttgtaaccaggatgtctta

SEQ ID NO: 64464 - DNA, 25 bp, Probe Sequence
aagtatgttgtaaccaggatgtctt

SEQ ID NO: 64465 - DNA, 25 bp, Probe Sequence
ttatcttatggcttggcagaatctt

SEQ ID NO: 64466 - DNA, 25 bp, Probe Sequence
cttatcttatggcttggcagaatct

SEQ ID NO: 64467 - DNA, 25 bp, Probe Sequence
acttatcttatggcttggcagaatc

SEQ ID NO: 64468 - DNA, 25 bp, Probe Sequence
cacttatcttatggcttggcagaat

SEQ ID NO: 64469 - DNA, 25 bp, Probe Sequence
gtatgttgtaaccaggatgtcttaa

SEQ ID NO: 64470 - DNA, 25 bp, Probe Sequence
cttcacacttatcttatggcttggc

SEQ ID NO: 64471 - DNA, 25 bp, Probe Sequence
gcttcacacttatcttatggcttgg

SEQ ID NO: 64472 - DNA, 25 bp, Probe Sequence
ggcttcacacttatcttatggcttg

SEQ ID NO: 64473 - DNA, 25 bp, Probe Sequence
ttcacacttatcttatggcttggca

SEQ ID NO: 64474 - DNA, 25 bp, Probe Sequence
acacttatcttatggcttggcagaa

SEQ ID NO: 64475 - DNA, 25 bp, Probe Sequence
tcacacttatcttatggcttggcag

SEQ ID NO: 64476 - DNA, 25 bp, Probe Sequence
tactgggcttcacacttatcttatg

SEQ ID NO: 64477 - DNA, 25 bp, Probe Sequence
gcctgtgctataaatgagtttcttc

SEQ ID NO: 64478 - DNA, 25 bp, Probe Sequence
catatactgggcttcacacttatct

SEQ ID NO: 64479 - DNA, 25 bp, Probe Sequence
acatatactgggcttcacacttatc

SEQ ID NO: 64480 - DNA, 25 bp, Probe Sequence
gacatatactgggcttcacacttat

SEQ ID NO: 64481 - DNA, 25 bp, Probe Sequence
aaagtatgttgtaaccaggatgtct

SEQ ID NO: 64482 - DNA, 25 bp, Probe Sequence
atactgggcttcacacttatcttat

SEQ ID NO: 64483 - DNA, 25 bp, Probe Sequence
tgcctgtgctataaatgagtttctt

SEQ ID NO: 64484 - DNA, 25 bp, Probe Sequence
atatactgggcttcacacttatctt

SEQ ID NO: 64485 - DNA, 25 bp, Probe Sequence
acgctgtatacctagatgatgacta

SEQ ID NO: 64486 - DNA, 25 bp, Probe Sequence
tgttgtaaccaggatgtcttaaatg

SEQ ID NO: 64487 - DNA, 25 bp, Probe Sequence
atggaaatgcgaagtagttgctata

SEQ ID NO: 64488 - DNA, 25 bp, Probe Sequence
aatggaaatgcgaagtagttgctat

SEQ ID NO: 64489 - DNA, 25 bp, Probe Sequence
gctgttatgtaaatgattggtttgt

SEQ ID NO: 64490 - DNA, 25 bp, Probe Sequence
tgctgttatgtaaatgattggtttg

SEQ ID NO: 64491 - DNA, 25 bp, Probe Sequence
tttccgtttcattctaaaggtagtt

SEQ ID NO: 64492 - DNA, 25 bp, Probe Sequence
gaattgggaactgggatataagtca

SEQ ID NO: 64493 - DNA, 25 bp, Probe Sequence
agaattgggaactgggatataagtc

SEQ ID NO: 64494 - DNA, 25 bp, Probe Sequence
caagaattgggaactgggatataag

SEQ ID NO: 64495 - DNA, 25 bp, Probe Sequence
gcaagaattgggaactgggatataa

SEQ ID NO: 64496 - DNA, 25 bp, Probe Sequence
aattgggaactgggatataagtcat

SEQ ID NO: 64497 - DNA, 25 bp, Probe Sequence
aagaattgggaactgggatataagt

SEQ ID NO: 64498 - DNA, 25 bp, Probe Sequence
ttgggaactgggatataagtcataa

SEQ ID NO: 64499 - DNA, 25 bp, Probe Sequence
aagcatctgtcaaataggaaacatc

SEQ ID NO: 64500 - DNA, 25 bp, Probe Sequence
gcatctgtcaaataggaaacatcac

SEQ ID NO: 64501 - DNA, 25 bp, Probe Sequence
agcatctgtcaaataggaaacatca

SEQ ID NO: 64502 - DNA, 25 bp, Probe Sequence
tgggaactgggatataagtcataat

SEQ ID NO: 64503 - DNA, 25 bp, Probe Sequence
attgggaactgggatataagtcata

SEQ ID NO: 64504 - DNA, 25 bp, Probe Sequence
catctgtcaaataggaaacatcaca

SEQ ID NO: 64505 - DNA, 25 bp, Probe Sequence
aaagcatctgtcaaataggaaacat

SEQ ID NO: 64506 - DNA, 25 bp, Probe Sequence
agcaagaattgggaactgggatata

SEQ ID NO: 64507 - DNA, 25 bp, Probe Sequence
tagcaagaattgggaactgggatat

SEQ ID NO: 64508 - DNA, 25 bp, Probe Sequence
atagcaagaattgggaactgggata

SEQ ID NO: 64509 - DNA, 25 bp, Probe Sequence
tatagcaagaattgggaactgggat

SEQ ID NO: 64510 - DNA, 25 bp, Probe Sequence
ttccgtttcattctaaaggtagtta

SEQ ID NO: 64511 - DNA, 25 bp, Probe Sequence
ctacttataggagcatcttcaaggc

SEQ ID NO: 64512 - DNA, 25 bp, Probe Sequence
actacttataggagcatcttcaagg

SEQ ID NO: 64513 - DNA, 25 bp, Probe Sequence
accacagactacttataggagcatc

SEQ ID NO: 64514 - DNA, 25 bp, Probe Sequence
gaccacagactacttataggagcat

SEQ ID NO: 64515 - DNA, 25 bp, Probe Sequence
ccagaccacagactacttataggag

SEQ ID NO: 64516 - DNA, 25 bp, Probe Sequence
cacagactacttataggagcatctt

SEQ ID NO: 64517 - DNA, 25 bp, Probe Sequence
cagactacttataggagcatcttca

SEQ ID NO: 64518 - DNA, 25 bp, Probe Sequence
acagactacttataggagcatcttc

SEQ ID NO: 64519 - DNA, 25 bp, Probe Sequence
ccacagactacttataggagcatct

SEQ ID NO: 64520 - DNA, 25 bp, Probe Sequence
cagaccacagactacttataggagc

SEQ ID NO: 64521 - DNA, 25 bp, Probe Sequence
agactacttataggagcatcttcaa

SEQ ID NO: 64522 - DNA, 25 bp, Probe Sequence
gactacttataggagcatcttcaag

SEQ ID NO: 64523 - DNA, 25 bp, Probe Sequence
agaccacagactacttataggagca

SEQ ID NO: 64524 - DNA, 25 bp, Probe Sequence
tacttataggagcatcttcaaggcg

SEQ ID NO: 64525 - DNA, 25 bp, Probe Sequence
gccagaccacagactacttatagga

SEQ ID NO: 64526 - DNA, 25 bp, Probe Sequence
taccttcagcttactcaactggatt

SEQ ID NO: 64527 - DNA, 25 bp, Probe Sequence
ctaccttcagcttactcaactggat

SEQ ID NO: 64528 - DNA, 25 bp, Probe Sequence
ttataggagcatcttcaaggcggtc

SEQ ID NO: 64529 - DNA, 25 bp, Probe Sequence
cttataggagcatcttcaaggcggt

SEQ ID NO: 64530 - DNA, 25 bp, Probe Sequence
acttataggagcatcttcaaggcgg

SEQ ID NO: 64531 - DNA, 25 bp, Probe Sequence
cttcagcttactcaactggatttcc

SEQ ID NO: 64532 - DNA, 25 bp, Probe Sequence
ccttcagcttactcaactggatttc

SEQ ID NO: 64533 - DNA, 25 bp, Probe Sequence
cttactcaactggatttcctcctgg

SEQ ID NO: 64534 - DNA, 25 bp, Probe Sequence
ttcagcttactcaactggatttcct

SEQ ID NO: 64535 - DNA, 25 bp, Probe Sequence
cagaaattgagttccagcctctctc

SEQ ID NO: 64536 - DNA, 25 bp, Probe Sequence
agaaattgagttccagcctctctcg

SEQ ID NO: 64537 - DNA, 25 bp, Probe Sequence
aaattgagttccagcctctctcgaa

SEQ ID NO: 64538 - DNA, 25 bp, Probe Sequence
gcagaaattgagttccagcctctct

SEQ ID NO: 64539 - DNA, 25 bp, Probe Sequence
gaaattgagttccagcctctctcga

SEQ ID NO: 64540 - DNA, 25 bp, Probe Sequence
aattgagttccagcctctctcgaac

SEQ ID NO: 64541 - DNA, 25 bp, Probe Sequence
tgcagaaattgagttccagcctctc

SEQ ID NO: 64542 - DNA, 25 bp, Probe Sequence
atgtcatgctaaggtatgtgttaca

SEQ ID NO: 64543 - DNA, 25 bp, Probe Sequence
tatgtcatgctaaggtatgtgttac

SEQ ID NO: 64544 - DNA, 25 bp, Probe Sequence
ttatgtcatgctaaggtatgtgtta

SEQ ID NO: 64545 - DNA, 25 bp, Probe Sequence
aatgagaaatcaccttcgttgaatc

SEQ ID NO: 64546 - DNA, 25 bp, Probe Sequence
atgagaaatcaccttcgttgaatct

SEQ ID NO: 64547 - DNA, 25 bp, Probe Sequence
aaatgagaaatcaccttcgttgaat

SEQ ID NO: 64548 - DNA, 25 bp, Probe Sequence
tgagaaatcaccttcgttgaatctt

SEQ ID NO: 64549 - DNA, 25 bp, Probe Sequence
gagaaatcaccttcgttgaatctta

SEQ ID NO: 64550 - DNA, 25 bp, Probe Sequence
gggctttcatacaaatagactgttc

SEQ ID NO: 64551 - DNA, 25 bp, Probe Sequence
ggctttcatacaaatagactgttca

SEQ ID NO: 64552 - DNA, 25 bp, Probe Sequence
agaaatcaccttcgttgaatcttaa

SEQ ID NO: 64553 - DNA, 25 bp, Probe Sequence
agactgatacataatttggaaaggt

SEQ ID NO: 64554 - DNA, 25 bp, Probe Sequence
tcaccttcgttgaatcttaaatagt

SEQ ID NO: 64555 - DNA, 25 bp, Probe Sequence
tgtcatgctaaggtatgtgttacat

SEQ ID NO: 64556 - DNA, 25 bp, Probe Sequence
gaaatcaccttcgttgaatcttaaa

SEQ ID NO: 64557 - DNA, 25 bp, Probe Sequence
tttatgtcatgctaaggtatgtgtt

SEQ ID NO: 64558 - DNA, 25 bp, Probe Sequence
caccttcgttgaatcttaaatagtt

SEQ ID NO: 64559 - DNA, 25 bp, Probe Sequence
gcagaaagattccaaaggagaatat

SEQ ID NO: 64560 - DNA, 25 bp, Probe Sequence
gactgatacataatttggaaaggtt

SEQ ID NO: 64561 - DNA, 25 bp, Probe Sequence
taaatgtgcagaaagattccaaagg

SEQ ID NO: 64562 - DNA, 25 bp, Probe Sequence
aaatcaccttcgttgaatcttaaat

SEQ ID NO: 64563 - DNA, 25 bp, Probe Sequence
gacatgatgcaaatagactgataca

SEQ ID NO: 64564 - DNA, 25 bp, Probe Sequence
tgacatgatgcaaatagactgatac

SEQ ID NO: 64565 - DNA, 25 bp, Probe Sequence
actgatacataatttggaaaggttc

SEQ ID NO: 64566 - DNA, 25 bp, Probe Sequence
acagcattctaaactattcacccat

SEQ ID NO: 64567 - DNA, 25 bp, Probe Sequence
cagcacagcattctaaactattcac

SEQ ID NO: 64568 - DNA, 25 bp, Probe Sequence
cacagcattctaaactattcaccca

SEQ ID NO: 64569 - DNA, 25 bp, Probe Sequence
agcacagcattctaaactattcacc

SEQ ID NO: 64570 - DNA, 25 bp, Probe Sequence
ccagcacagcattctaaactattca

SEQ ID NO: 64571 - DNA, 25 bp, Probe Sequence
cagcattctaaactattcacccatg

SEQ ID NO: 64572 - DNA, 25 bp, Probe Sequence
gcacagcattctaaactattcaccc

SEQ ID NO: 64573 - DNA, 25 bp, Probe Sequence
aatctaatatatccttctgttgccc

SEQ ID NO: 64574 - DNA, 25 bp, Probe Sequence
gccagcacagcattctaaactattc

SEQ ID NO: 64575 - DNA, 25 bp, Probe Sequence
aaatctaatatatccttctgttgcc

SEQ ID NO: 64576 - DNA, 25 bp, Probe Sequence
atctaatatatccttctgttgcccc

SEQ ID NO: 64577 - DNA, 25 bp, Probe Sequence
ctaatatatccttctgttgcccctg

SEQ ID NO: 64578 - DNA, 25 bp, Probe Sequence
tctaatatatccttctgttgcccct

SEQ ID NO: 64579 - DNA, 25 bp, Probe Sequence
cttctcaccttctgcaaccagtatg

SEQ ID NO: 64580 - DNA, 25 bp, Probe Sequence
cccacagattcctagcaatgaaaat

SEQ ID NO: 64581 - DNA, 25 bp, Probe Sequence
taatatatccttctgttgcccctgg

SEQ ID NO: 64582 - DNA, 25 bp, Probe Sequence
ccacatcccttggttttgtatttta

SEQ ID NO: 64583 - DNA, 25 bp, Probe Sequence
ccacagattcctagcaatgaaaatc

SEQ ID NO: 64584 - DNA, 25 bp, Probe Sequence
cacatcccttggttttgtattttat

SEQ ID NO: 64585 - DNA, 25 bp, Probe Sequence
acatcccttggttttgtattttatt

SEQ ID NO: 64586 - DNA, 25 bp, Probe Sequence
ccccacagattcctagcaatgaaaa

SEQ ID NO: 64587 - DNA, 25 bp, Probe Sequence
catcccttggttttgtattttattt

SEQ ID NO: 64588 - DNA, 25 bp, Probe Sequence
gccacatcccttggttttgtatttt

SEQ ID NO: 64589 - DNA, 25 bp, Probe Sequence
ttctcaccttctgcaaccagtatgg

SEQ ID NO: 64590 - DNA, 25 bp, Probe Sequence
actactgttactggttatagaggtc

SEQ ID NO: 64591 - DNA, 25 bp, Probe Sequence
ctactgttactggttatagaggtct

SEQ ID NO: 64592 - DNA, 25 bp, Probe Sequence
ggattatctacagtgagcagactta

SEQ ID NO: 64593 - DNA, 25 bp, Probe Sequence
tggattatctacagtgagcagactt

SEQ ID NO: 64594 - DNA, 25 bp, Probe Sequence
aactactgttactggttatagaggt

SEQ ID NO: 64595 - DNA, 25 bp, Probe Sequence
tactgttactggttatagaggtctt

SEQ ID NO: 64596 - DNA, 25 bp, Probe Sequence
caactactgttactggttatagagg

SEQ ID NO: 64597 - DNA, 25 bp, Probe Sequence
ctggattatctacagtgagcagact

SEQ ID NO: 64598 - DNA, 25 bp, Probe Sequence
gattatctacagtgagcagacttaa

SEQ ID NO: 64599 - DNA, 25 bp, Probe Sequence
ttcaaggaattagctcagagattgg

SEQ ID NO: 64600 - DNA, 25 bp, Probe Sequence
tgttactggttatagaggtctttgg

SEQ ID NO: 64601 - DNA, 25 bp, Probe Sequence
ggtgacctggattatctacagtgag

SEQ ID NO: 64602 - DNA, 25 bp, Probe Sequence
gttactggttatagaggtctttgga

SEQ ID NO: 64603 - DNA, 25 bp, Probe Sequence
gccactaactggactaatatgtatc

SEQ ID NO: 64604 - DNA, 25 bp, Probe Sequence
cctggattatctacagtgagcagac

SEQ ID NO: 64605 - DNA, 25 bp, Probe Sequence
gacctggattatctacagtgagcag

SEQ ID NO: 64606 - DNA, 25 bp, Probe Sequence
gtgggtcttggcataagtagattaa

SEQ ID NO: 64607 - DNA, 25 bp, Probe Sequence
actgttactggttatagaggtcttt

SEQ ID NO: 64608 - DNA, 25 bp, Probe Sequence
cagaagtttatgtgtccaaatgatg

SEQ ID NO: 64609 - DNA, 25 bp, Probe Sequence
gtgagcagacttaaatggaacagaa

SEQ ID NO: 64610 - DNA, 25 bp, Probe Sequence
ctgttactggttatagaggtctttg

SEQ ID NO: 64611 - DNA, 25 bp, Probe Sequence
tgagcagacttaaatggaacagaag

SEQ ID NO: 64612 - DNA, 25 bp, Probe Sequence
agtgggtcttggcataagtagatta

SEQ ID NO: 64613 - DNA, 25 bp, Probe Sequence
gtgacctggattatctacagtgagc

SEQ ID NO: 64614 - DNA, 25 bp, Probe Sequence
tctgaggacattccaagacagtata

SEQ ID NO: 64615 - DNA, 25 bp, Probe Sequence
ttctgaggacattccaagacagtat

SEQ ID NO: 64616 - DNA, 25 bp, Probe Sequence
cttctgaggacattccaagacagta

SEQ ID NO: 64617 - DNA, 25 bp, Probe Sequence
tctccttggaaatccgtctagttaa

SEQ ID NO: 64618 - DNA, 25 bp, Probe Sequence
gtctccttggaaatccgtctagtta

SEQ ID NO: 64619 - DNA, 25 bp, Probe Sequence
ttaacatttcaagggcaataccgtg

SEQ ID NO: 64620 - DNA, 25 bp, Probe Sequence
cattccaagacagtatacagtcctg

SEQ ID NO: 64621 - DNA, 25 bp, Probe Sequence
gacattccaagacagtatacagtcc

SEQ ID NO: 64622 - DNA, 25 bp, Probe Sequence
acattccaagacagtatacagtcct

SEQ ID NO: 64623 - DNA, 25 bp, Probe Sequence
cttcagcggctttaggacaaattaa

SEQ ID NO: 64624 - DNA, 25 bp, Probe Sequence
ttcagcggctttaggacaaattaaa

SEQ ID NO: 64625 - DNA, 25 bp, Probe Sequence
gaggacattccaagacagtatacag

SEQ ID NO: 64626 - DNA, 25 bp, Probe Sequence
ctgaggacattccaagacagtatac

SEQ ID NO: 64627 - DNA, 25 bp, Probe Sequence
ggacattccaagacagtatacagtc

SEQ ID NO: 64628 - DNA, 25 bp, Probe Sequence
aggacattccaagacagtatacagt

SEQ ID NO: 64629 - DNA, 25 bp, Probe Sequence
tgaggacattccaagacagtataca

SEQ ID NO: 64630 - DNA, 25 bp, Probe Sequence
aaagagttgagtgatagagctaacc

SEQ ID NO: 64631 - DNA, 25 bp, Probe Sequence
gttgagtgatagagctaacccttat

SEQ ID NO: 64632 - DNA, 25 bp, Probe Sequence
agttgagtgatagagctaaccctta

SEQ ID NO: 64633 - DNA, 25 bp, Probe Sequence
ttccatttgaaagaaaggactctgg

SEQ ID NO: 64634 - DNA, 25 bp, Probe Sequence
agtgatagagctaacccttatctgt

SEQ ID NO: 64635 - DNA, 25 bp, Probe Sequence
gagtgatagagctaacccttatctg

SEQ ID NO: 64636 - DNA, 25 bp, Probe Sequence
tgagtgatagagctaacccttatct

SEQ ID NO: 64637 - DNA, 25 bp, Probe Sequence
ttgagtgatagagctaacccttatc

SEQ ID NO: 64638 - DNA, 25 bp, Probe Sequence
ctctgatgaagactggtatctgttc

SEQ ID NO: 64639 - DNA, 25 bp, Probe Sequence
atctctgatgaagactggtatctgt

SEQ ID NO: 64640 - DNA, 25 bp, Probe Sequence
ctgatgaagactggtatctgttctg

SEQ ID NO: 64641 - DNA, 25 bp, Probe Sequence
tctgatgaagactggtatctgttct

SEQ ID NO: 64642 - DNA, 25 bp, Probe Sequence
tctctgatgaagactggtatctgtt

SEQ ID NO: 64643 - DNA, 25 bp, Probe Sequence
acaagaaggtctattggtattgagc

SEQ ID NO: 64644 - DNA, 25 bp, Probe Sequence
gatgaagactggtatctgttctgtg

SEQ ID NO: 64645 - DNA, 25 bp, Probe Sequence
tgatgaagactggtatctgttctgt

SEQ ID NO: 64646 - DNA, 25 bp, Probe Sequence
caagaaggtctattggtattgagcc

SEQ ID NO: 64647 - DNA, 25 bp, Probe Sequence
atgaagactggtatctgttctgtgg

SEQ ID NO: 64648 - DNA, 25 bp, Probe Sequence
ctgaacacacattaccgctacattg

SEQ ID NO: 64649 - DNA, 25 bp, Probe Sequence
aagaaggtctattggtattgagcct

SEQ ID NO: 64650 - DNA, 25 bp, Probe Sequence
tacaagaaggtctattggtattgag

SEQ ID NO: 64651 - DNA, 25 bp, Probe Sequence
agaaggtctattggtattgagcctg

SEQ ID NO: 64652 - DNA, 25 bp, Probe Sequence
cggaaatacaagaaggtctattggt

SEQ ID NO: 64653 - DNA, 25 bp, Probe Sequence
cagtggaagatgctttagaaagaac

SEQ ID NO: 64654 - DNA, 25 bp, Probe Sequence
tcagtggaagatgctttagaaagaa

SEQ ID NO: 64655 - DNA, 25 bp, Probe Sequence
atcagtggaagatgctttagaaaga

SEQ ID NO: 64656 - DNA, 25 bp, Probe Sequence
gatgctttagaaagaacctatgtgc

SEQ ID NO: 64657 - DNA, 25 bp, Probe Sequence
tggaagatgctttagaaagaaccta

SEQ ID NO: 64658 - DNA, 25 bp, Probe Sequence
tttagaaagaacctatgtgccctgt

SEQ ID NO: 64659 - DNA, 25 bp, Probe Sequence
gtggaagatgctttagaaagaacct

SEQ ID NO: 64660 - DNA, 25 bp, Probe Sequence
agtggaagatgctttagaaagaacc

SEQ ID NO: 64661 - DNA, 25 bp, Probe Sequence
gaattatccctaaacccgaatttcc

SEQ ID NO: 64662 - DNA, 25 bp, Probe Sequence
aggttactctggaagaagtcaactc

SEQ ID NO: 64663 - DNA, 25 bp, Probe Sequence
caagaggaagatgaggacgaagaag

SEQ ID NO: 64664 - DNA, 25 bp, Probe Sequence
aagaggaagatgaggacgaagaaga

SEQ ID NO: 64665 - DNA, 25 bp, Probe Sequence
caggttactctggaagaagtcaact

SEQ ID NO: 64666 - DNA, 25 bp, Probe Sequence
agaggaagatgaggacgaagaagag

SEQ ID NO: 64667 - DNA, 25 bp, Probe Sequence
caactcccaaatagccctagaatac

SEQ ID NO: 64668 - DNA, 25 bp, Probe Sequence
tcaactcccaaatagccctagaata

SEQ ID NO: 64669 - DNA, 25 bp, Probe Sequence
gtgcaagatggatggagaagtaatg

SEQ ID NO: 64670 - DNA, 25 bp, Probe Sequence
gaaactcacggaagacagaaagaag

SEQ ID NO: 64671 - DNA, 25 bp, Probe Sequence
tgtgcaagatggatggagaagtaat

SEQ ID NO: 64672 - DNA, 25 bp, Probe Sequence
ggttactctggaagaagtcaactcc

SEQ ID NO: 64673 - DNA, 25 bp, Probe Sequence
agaaactcacggaagacagaaagaa

SEQ ID NO: 64674 - DNA, 25 bp, Probe Sequence
aactcccaaatagccctagaatacg

SEQ ID NO: 64675 - DNA, 25 bp, Probe Sequence
gtcaactcccaaatagccctagaat

SEQ ID NO: 64676 - DNA, 25 bp, Probe Sequence
gaggaagatgaggacgaagaagagg

SEQ ID NO: 64677 - DNA, 25 bp, Probe Sequence
gtgtgcaagatggatggagaagtaa

SEQ ID NO: 64678 - DNA, 25 bp, Probe Sequence
ctggaagaagtcaactcccaaatag

SEQ ID NO: 64679 - DNA, 25 bp, Probe Sequence
gaagtcaactcccaaatagccctag

SEQ ID NO: 64680 - DNA, 25 bp, Probe Sequence
tctggaagaagtcaactcccaaata

SEQ ID NO: 64681 - DNA, 25 bp, Probe Sequence
gagaaactcacggaagacagaaaga

SEQ ID NO: 64682 - DNA, 25 bp, Probe Sequence
agagaaactcacggaagacagaaag

SEQ ID NO: 64683 - DNA, 25 bp, Probe Sequence
gagagaaactcacggaagacagaaa

SEQ ID NO: 64684 - DNA, 25 bp, Probe Sequence
agaagtcaactcccaaatagcccta

SEQ ID NO: 64685 - DNA, 25 bp, Probe Sequence
agtcaactcccaaatagccctagaa

SEQ ID NO: 64686 - DNA, 25 bp, Probe Sequence
gtaactcttgaaggagacttgttct

SEQ ID NO: 64687 - DNA, 25 bp, Probe Sequence
agtaactcttgaaggagacttgttc

SEQ ID NO: 64688 - DNA, 25 bp, Probe Sequence
aatcattcctctctgtagatgctag

SEQ ID NO: 64689 - DNA, 25 bp, Probe Sequence
ctgtacttgtactatggaaggaagg

SEQ ID NO: 64690 - DNA, 25 bp, Probe Sequence
tgtacttgtactatggaaggaagga

SEQ ID NO: 64691 - DNA, 25 bp, Probe Sequence
gtgacctgtacttgtactatggaag

SEQ ID NO: 64692 - DNA, 25 bp, Probe Sequence
tgtgacctgtacttgtactatggaa

SEQ ID NO: 64693 - DNA, 25 bp, Probe Sequence
ttgtgacctgtacttgtactatgga

SEQ ID NO: 64694 - DNA, 25 bp, Probe Sequence
gttgtgacctgtacttgtactatgg

SEQ ID NO: 64695 - DNA, 25 bp, Probe Sequence
gtacttgtactatggaaggaaggat

SEQ ID NO: 64696 - DNA, 25 bp, Probe Sequence
aactcttgaaggagacttgttctag

SEQ ID NO: 64697 - DNA, 25 bp, Probe Sequence
taactcttgaaggagacttgttcta

SEQ ID NO: 64698 - DNA, 25 bp, Probe Sequence
agttgtgacctgtacttgtactatg

SEQ ID NO: 64699 - DNA, 25 bp, Probe Sequence
acttgtactatggaaggaaggatat

SEQ ID NO: 64700 - DNA, 25 bp, Probe Sequence
atcattcctctctgtagatgctagg

SEQ ID NO: 64701 - DNA, 25 bp, Probe Sequence
cctgtacttgtactatggaaggaag

SEQ ID NO: 64702 - DNA, 25 bp, Probe Sequence
acctgtacttgtactatggaaggaa

SEQ ID NO: 64703 - DNA, 25 bp, Probe Sequence
gacctgtacttgtactatggaagga

SEQ ID NO: 64704 - DNA, 25 bp, Probe Sequence
tacttgtactatggaaggaaggata

SEQ ID NO: 64705 - DNA, 25 bp, Probe Sequence
actcttgaaggagacttgttctagc

SEQ ID NO: 64706 - DNA, 25 bp, Probe Sequence
tgacctgtacttgtactatggaagg

SEQ ID NO: 64707 - DNA, 25 bp, Probe Sequence
gaaggaaggatatcaacgtgtgtat

SEQ ID NO: 64708 - DNA, 25 bp, Probe Sequence
tactatggaaggaaggatatcaacg

SEQ ID NO: 64709 - DNA, 25 bp, Probe Sequence
aaggaaggatatcaacgtgtgtata

SEQ ID NO: 64710 - DNA, 25 bp, Probe Sequence
cattcaggtgttacttgtggataag

SEQ ID NO: 64711 - DNA, 25 bp, Probe Sequence
attcaggtgttacttgtggataagc

SEQ ID NO: 64712 - DNA, 25 bp, Probe Sequence
ttcaggtgttacttgtggataagca

SEQ ID NO: 64713 - DNA, 25 bp, Probe Sequence
aggaggagaacaataacctaccatc

SEQ ID NO: 64714 - DNA, 25 bp, Probe Sequence
ccattcaggtgttacttgtggataa

SEQ ID NO: 64715 - DNA, 25 bp, Probe Sequence
gagggaatggcaaataagaatgttt

SEQ ID NO: 64716 - DNA, 25 bp, Probe Sequence
agaacaataacctaccatccgcaag

SEQ ID NO: 64717 - DNA, 25 bp, Probe Sequence
gagaacaataacctaccatccgcaa

SEQ ID NO: 64718 - DNA, 25 bp, Probe Sequence
cactgctttgaattataggaggaga

SEQ ID NO: 64719 - DNA, 25 bp, Probe Sequence
aacactgctttgaattataggagga

SEQ ID NO: 64720 - DNA, 25 bp, Probe Sequence
tgagggaatggcaaataagaatgtt

SEQ ID NO: 64721 - DNA, 25 bp, Probe Sequence
tgctttgaattataggaggagaaca

SEQ ID NO: 64722 - DNA, 25 bp, Probe Sequence
acactgctttgaattataggaggag

SEQ ID NO: 64723 - DNA, 25 bp, Probe Sequence
gttcaacttgccattcaggtgttac

SEQ ID NO: 64724 - DNA, 25 bp, Probe Sequence
actgctttgaattataggaggagaa

SEQ ID NO: 64725 - DNA, 25 bp, Probe Sequence
gatgtttatttctctcgctccttta

SEQ ID NO: 64726 - DNA, 25 bp, Probe Sequence
atgctaatttgatggaagttacagg

SEQ ID NO: 64727 - DNA, 25 bp, Probe Sequence
aaacactgctttgaattataggagg

SEQ ID NO: 64728 - DNA, 25 bp, Probe Sequence
atgtttatttctctcgctcctttag

SEQ ID NO: 64729 - DNA, 25 bp, Probe Sequence
caacttgccattcaggtgttacttg

SEQ ID NO: 64730 - DNA, 25 bp, Probe Sequence
ctgctttgaattataggaggagaac

SEQ ID NO: 64731 - DNA, 25 bp, Probe Sequence
tgtttatttctctcgctcctttaga

SEQ ID NO: 64732 - DNA, 25 bp, Probe Sequence
agatgtttatttctctcgctccttt

SEQ ID NO: 64733 - DNA, 25 bp, Probe Sequence
tcaacttgccattcaggtgttactt

SEQ ID NO: 64734 - DNA, 25 bp, Probe Sequence
attatccagcatatagaatgagagg

SEQ ID NO: 64735 - DNA, 25 bp, Probe Sequence
ttatccagcatatagaatgagaggg

SEQ ID NO: 64736 - DNA, 25 bp, Probe Sequence
gcctcaaggtctctgtaaatgaaat

SEQ ID NO: 64737 - DNA, 25 bp, Probe Sequence
cctcaaggtctctgtaaatgaaata

SEQ ID NO: 64738 - DNA, 25 bp, Probe Sequence
tatccagcatatagaatgagaggga

SEQ ID NO: 64739 - DNA, 25 bp, Probe Sequence
atccagcatatagaatgagagggag

SEQ ID NO: 64740 - DNA, 25 bp, Probe Sequence
ctggaagatggtgacaatccttacc

SEQ ID NO: 64741 - DNA, 25 bp, Probe Sequence
tgcctcaaggtctctgtaaatgaaa

SEQ ID NO: 64742 - DNA, 25 bp, Probe Sequence
ttgcctcaaggtctctgtaaatgaa

SEQ ID NO: 64743 - DNA, 25 bp, Probe Sequence
tttgcctcaaggtctctgtaaatga

SEQ ID NO: 64744 - DNA, 25 bp, Probe Sequence
ggtctctgtaaatgaaataaactgt

SEQ ID NO: 64745 - DNA, 25 bp, Probe Sequence
tgtactactcgcagtgataggtttg

SEQ ID NO: 64746 - DNA, 25 bp, Probe Sequence
tttaaagggaactgtactactcgca

SEQ ID NO: 64747 - DNA, 25 bp, Probe Sequence
aattatccagcatatagaatgagag

SEQ ID NO: 64748 - DNA, 25 bp, Probe Sequence
cagaacacagctcggaattatcttt

SEQ ID NO: 64749 - DNA, 25 bp, Probe Sequence
gctggaagatggtgacaatccttac

SEQ ID NO: 64750 - DNA, 25 bp, Probe Sequence
aggtctctgtaaatgaaataaactg

SEQ ID NO: 64751 - DNA, 25 bp, Probe Sequence
gatcgtctatggtccagtggcttaa

SEQ ID NO: 64752 - DNA, 25 bp, Probe Sequence
ctgtactactcgcagtgataggttt

SEQ ID NO: 64753 - DNA, 25 bp, Probe Sequence
ttaaagggaactgtactactcgcag

SEQ ID NO: 64754 - DNA, 25 bp, Probe Sequence
atcgtctatggtccagtggcttaac

SEQ ID NO: 64755 - DNA, 25 bp, Probe Sequence
gcagaacacagctcggaattatctt

SEQ ID NO: 64756 - DNA, 25 bp, Probe Sequence
aagatggtgacaatccttacccttc

SEQ ID NO: 64757 - DNA, 25 bp, Probe Sequence
gaagatggtgacaatccttaccctt

SEQ ID NO: 64758 - DNA, 25 bp, Probe Sequence
ctctctctctctctctctctctcac

SEQ ID NO: 64759 - DNA, 25 bp, Probe Sequence
tctctctctctctctctctctctca

SEQ ID NO: 64760 - DNA, 25 bp, Probe Sequence
ttaggtggtaggactatggttgata

SEQ ID NO: 64761 - DNA, 25 bp, Probe Sequence
taggtggtaggactatggttgatat

SEQ ID NO: 64762 - DNA, 25 bp, Probe Sequence
aggtggtaggactatggttgatatt

SEQ ID NO: 64763 - DNA, 25 bp, Probe Sequence
ccttctcttctcttatcttctgtct

SEQ ID NO: 64764 - DNA, 25 bp, Probe Sequence
ggaagaattgaagagaaccacagaa

SEQ ID NO: 64765 - DNA, 25 bp, Probe Sequence
ggtcagagaagcaatagtcactaag

SEQ ID NO: 64766 - DNA, 25 bp, Probe Sequence
tctcttatcttctgtctgttctctt

SEQ ID NO: 64767 - DNA, 25 bp, Probe Sequence
ttctcttatcttctgtctgttctct

SEQ ID NO: 64768 - DNA, 25 bp, Probe Sequence
tcttctcttatcttctgtctgttct

SEQ ID NO: 64769 - DNA, 25 bp, Probe Sequence
tctcttctcttatcttctgtctgtt

SEQ ID NO: 64770 - DNA, 25 bp, Probe Sequence
ttctcttctcttatcttctgtctgt

SEQ ID NO: 64771 - DNA, 25 bp, Probe Sequence
cttctcttatcttctgtctgttctc

SEQ ID NO: 64772 - DNA, 25 bp, Probe Sequence
ctcttctcttatcttctgtctgttc

SEQ ID NO: 64773 - DNA, 25 bp, Probe Sequence
gtcagagaagcaatagtcactaagc

SEQ ID NO: 64774 - DNA, 25 bp, Probe Sequence
cttctcttctcttatcttctgtctg

SEQ ID NO: 64775 - DNA, 25 bp, Probe Sequence
gtggtacagatatgacatggaagat

SEQ ID NO: 64776 - DNA, 25 bp, Probe Sequence
gagtggtacagatatgacatggaag

SEQ ID NO: 64777 - DNA, 25 bp, Probe Sequence
tggtacagatatgacatggaagatc

SEQ ID NO: 64778 - DNA, 25 bp, Probe Sequence
agtggtacagatatgacatggaaga

SEQ ID NO: 64779 - DNA, 25 bp, Probe Sequence
tgagtggtacagatatgacatggaa

SEQ ID NO: 64780 - DNA, 25 bp, Probe Sequence
aacatgaattggtgatctacagtac

SEQ ID NO: 64781 - DNA, 25 bp, Probe Sequence
cgtctctctctctctctctctctct

SEQ ID NO: 64782 - DNA, 25 bp, Probe Sequence
ctcaatctgaaggagcagtatctgt

SEQ ID NO: 64783 - DNA, 25 bp, Probe Sequence
tcaatctgaaggagcagtatctgtg

SEQ ID NO: 64784 - DNA, 25 bp, Probe Sequence
aacctcaatctgaaggagcagtatc

SEQ ID NO: 64785 - DNA, 25 bp, Probe Sequence
aatctgaaggagcagtatctgtgtg

SEQ ID NO: 64786 - DNA, 25 bp, Probe Sequence
caatctgaaggagcagtatctgtgt

SEQ ID NO: 64787 - DNA, 25 bp, Probe Sequence
caacctcaatctgaaggagcagtat

SEQ ID NO: 64788 - DNA, 25 bp, Probe Sequence
cctcaatctgaaggagcagtatctg

SEQ ID NO: 64789 - DNA, 25 bp, Probe Sequence
acctcaatctgaaggagcagtatct

SEQ ID NO: 64790 - DNA, 25 bp, Probe Sequence
acaacctcaatctgaaggagcagta

SEQ ID NO: 64791 - DNA, 25 bp, Probe Sequence
atctgaaggagcagtatctgtgtgg

SEQ ID NO: 64792 - DNA, 25 bp, Probe Sequence
ggacttgaactctactgtaactgtt

SEQ ID NO: 64793 - DNA, 25 bp, Probe Sequence
ctctcggacttgaactctactgtaa

SEQ ID NO: 64794 - DNA, 25 bp, Probe Sequence
ctcggacttgaactctactgtaact

SEQ ID NO: 64795 - DNA, 25 bp, Probe Sequence
tctcggacttgaactctactgtaac

SEQ ID NO: 64796 - DNA, 25 bp, Probe Sequence
tcggacttgaactctactgtaactg

SEQ ID NO: 64797 - DNA, 25 bp, Probe Sequence
cggacttgaactctactgtaactgt

SEQ ID NO: 64798 - DNA, 25 bp, Probe Sequence
gacttgaactctactgtaactgttt

SEQ ID NO: 64799 - DNA, 25 bp, Probe Sequence
gctctcggacttgaactctactgta

SEQ ID NO: 64800 - DNA, 25 bp, Probe Sequence
ttgtcctcagtgaccatacattcct

SEQ ID NO: 64801 - DNA, 25 bp, Probe Sequence
cagatactgtcttgagcagatcgaa

SEQ ID NO: 64802 - DNA, 25 bp, Probe Sequence
tgtcctcagtgaccatacattcctg

SEQ ID NO: 64803 - DNA, 25 bp, Probe Sequence
gatactgtcttgagcagatcgaaat

SEQ ID NO: 64804 - DNA, 25 bp, Probe Sequence
atacattcctgctctcggacttgaa

SEQ ID NO: 64805 - DNA, 25 bp, Probe Sequence
tttgtcctcagtgaccatacattcc

SEQ ID NO: 64806 - DNA, 25 bp, Probe Sequence
atactgtcttgagcagatcgaaatg

SEQ ID NO: 64807 - DNA, 25 bp, Probe Sequence
ctgctctcggacttgaactctactg

SEQ ID NO: 64808 - DNA, 25 bp, Probe Sequence
tcagtgaccatacattcctgctctc

SEQ ID NO: 64809 - DNA, 25 bp, Probe Sequence
ctcagtgaccatacattcctgctct

SEQ ID NO: 64810 - DNA, 25 bp, Probe Sequence
agatactgtcttgagcagatcgaaa

SEQ ID NO: 64811 - DNA, 25 bp, Probe Sequence
aatgcagatactgtcttgagcagat

SEQ ID NO: 64812 - DNA, 25 bp, Probe Sequence
cgtgtgtgattttcctgttttatat

SEQ ID NO: 64813 - DNA, 25 bp, Probe Sequence
ttgtccaagttcattgccctgttac

SEQ ID NO: 64814 - DNA, 25 bp, Probe Sequence
cgttgttgctcactgaatctgttgg

SEQ ID NO: 64815 - DNA, 25 bp, Probe Sequence
tgtaactgttttcttgaaatgaagc

SEQ ID NO: 64816 - DNA, 25 bp, Probe Sequence
gcttcattaaactgacacttctcaa

SEQ ID NO: 64817 - DNA, 25 bp, Probe Sequence
ggcttcattaaactgacacttctca

SEQ ID NO: 64818 - DNA, 25 bp, Probe Sequence
tggcttcattaaactgacacttctc

SEQ ID NO: 64819 - DNA, 25 bp, Probe Sequence
ctggcttcattaaactgacacttct

SEQ ID NO: 64820 - DNA, 25 bp, Probe Sequence
cttcattaaactgacacttctcaaa

SEQ ID NO: 64821 - DNA, 25 bp, Probe Sequence
gataagctggcttcattaaactgac

SEQ ID NO: 64822 - DNA, 25 bp, Probe Sequence
ctgataagctggcttcattaaactg

SEQ ID NO: 64823 - DNA, 25 bp, Probe Sequence
tgataagctggcttcattaaactga

SEQ ID NO: 64824 - DNA, 25 bp, Probe Sequence
ataagctggcttcattaaactgaca

SEQ ID NO: 64825 - DNA, 25 bp, Probe Sequence
gctggcttcattaaactgacacttc

SEQ ID NO: 64826 - DNA, 25 bp, Probe Sequence
taagctggcttcattaaactgacac

SEQ ID NO: 64827 - DNA, 25 bp, Probe Sequence
gcacatcaacgagctgactatgaag

SEQ ID NO: 64828 - DNA, 25 bp, Probe Sequence
caatgagatcctcaagcacatcaac

SEQ ID NO: 64829 - DNA, 25 bp, Probe Sequence
cctgctgataagctggcttcattaa

SEQ ID NO: 64830 - DNA, 25 bp, Probe Sequence
agctggcttcattaaactgacactt

SEQ ID NO: 64831 - DNA, 25 bp, Probe Sequence
aagctggcttcattaaactgacact

SEQ ID NO: 64832 - DNA, 25 bp, Probe Sequence
gctgataagctggcttcattaaact

SEQ ID NO: 64833 - DNA, 25 bp, Probe Sequence
ctgctgataagctggcttcattaaa

SEQ ID NO: 64834 - DNA, 25 bp, Probe Sequence
tgctgataagctggcttcattaaac

SEQ ID NO: 64835 - DNA, 25 bp, Probe Sequence
tgctcatctggttcaagagggaatt

SEQ ID NO: 64836 - DNA, 25 bp, Probe Sequence
ccaatgagatcctcaagcacatcaa

SEQ ID NO: 64837 - DNA, 25 bp, Probe Sequence
ttcattaaactgacacttctcaaaa

SEQ ID NO: 64838 - DNA, 25 bp, Probe Sequence
ctgctcatctggttcaagagggaat

SEQ ID NO: 64839 - DNA, 25 bp, Probe Sequence
ctccaatgagatcctcaagcacatc

SEQ ID NO: 64840 - DNA, 25 bp, Probe Sequence
attatcaccacaagttcttcagaca

SEQ ID NO: 64841 - DNA, 25 bp, Probe Sequence
cattatcaccacaagttcttcagac

SEQ ID NO: 64842 - DNA, 25 bp, Probe Sequence
tcattatcaccacaagttcttcaga

SEQ ID NO: 64843 - DNA, 25 bp, Probe Sequence
ttatcaccacaagttcttcagacag

SEQ ID NO: 64844 - DNA, 25 bp, Probe Sequence
atcattatcaccacaagttcttcag

SEQ ID NO: 64845 - DNA, 25 bp, Probe Sequence
ctctggctctacgacacacttaata

SEQ ID NO: 64846 - DNA, 25 bp, Probe Sequence
gatcattatcaccacaagttcttca

SEQ ID NO: 64847 - DNA, 25 bp, Probe Sequence
ggagatcattatcaccacaagttct

SEQ ID NO: 64848 - DNA, 25 bp, Probe Sequence
ctggctctacgacacacttaatact

SEQ ID NO: 64849 - DNA, 25 bp, Probe Sequence
tctggctctacgacacacttaatac

SEQ ID NO: 64850 - DNA, 25 bp, Probe Sequence
ctgtctcatcctgtgacttagaatg

SEQ ID NO: 64851 - DNA, 25 bp, Probe Sequence
tggctctacgacacacttaatactg

SEQ ID NO: 64852 - DNA, 25 bp, Probe Sequence
ctcatcctgtgacttagaatgccta

SEQ ID NO: 64853 - DNA, 25 bp, Probe Sequence
agatcattatcaccacaagttcttc

SEQ ID NO: 64854 - DNA, 25 bp, Probe Sequence
gagatcattatcaccacaagttctt

SEQ ID NO: 64855 - DNA, 25 bp, Probe Sequence
cggagatcattatcaccacaagttc

SEQ ID NO: 64856 - DNA, 25 bp, Probe Sequence
tatcaccacaagttcttcagacagg

SEQ ID NO: 64857 - DNA, 25 bp, Probe Sequence
catcctgtgacttagaatgcctaac

SEQ ID NO: 64858 - DNA, 25 bp, Probe Sequence
tcatcctgtgacttagaatgcctaa

SEQ ID NO: 64859 - DNA, 25 bp, Probe Sequence
atcctgtgacttagaatgcctaaca

SEQ ID NO: 64860 - DNA, 25 bp, Probe Sequence
cctgtctcatcctgtgacttagaat

SEQ ID NO: 64861 - DNA, 25 bp, Probe Sequence
acggagatcattatcaccacaagtt

SEQ ID NO: 64862 - DNA, 25 bp, Probe Sequence
attagaagacacttgtcagactcag

SEQ ID NO: 64863 - DNA, 25 bp, Probe Sequence
gattagaagacacttgtcagactca

SEQ ID NO: 64864 - DNA, 25 bp, Probe Sequence
aagcattcattcattagtaagcagc

SEQ ID NO: 64865 - DNA, 25 bp, Probe Sequence
aatggttgtgattaggatggttagg

SEQ ID NO: 64866 - DNA, 25 bp, Probe Sequence
gcattcattcattagtaagcagcaa

SEQ ID NO: 64867 - DNA, 25 bp, Probe Sequence
cgagtcagtaagcattcattcatta

SEQ ID NO: 64868 - DNA, 25 bp, Probe Sequence
acgagtcagtaagcattcattcatt

SEQ ID NO: 64869 - DNA, 25 bp, Probe Sequence
ttcattagtaagcagcaatcttcca

SEQ ID NO: 64870 - DNA, 25 bp, Probe Sequence
attcattagtaagcagcaatcttcc

SEQ ID NO: 64871 - DNA, 25 bp, Probe Sequence
agcattcattcattagtaagcagca

SEQ ID NO: 64872 - DNA, 25 bp, Probe Sequence
attagtaagcagcaatcttccagaa

SEQ ID NO: 64873 - DNA, 25 bp, Probe Sequence
atggttgtgattaggatggttagga

SEQ ID NO: 64874 - DNA, 25 bp, Probe Sequence
ttcattcattagtaagcagcaatct

SEQ ID NO: 64875 - DNA, 25 bp, Probe Sequence
tcattagtaagcagcaatcttccag

SEQ ID NO: 64876 - DNA, 25 bp, Probe Sequence
cattagtaagcagcaatcttccaga

SEQ ID NO: 64877 - DNA, 25 bp, Probe Sequence
tcattcattagtaagcagcaatctt

SEQ ID NO: 64878 - DNA, 25 bp, Probe Sequence
gacgagtcagtaagcattcattcat

SEQ ID NO: 64879 - DNA, 25 bp, Probe Sequence
aattgcttaggatgatctcagacag

SEQ ID NO: 64880 - DNA, 25 bp, Probe Sequence
cattcattagtaagcagcaatcttc

SEQ ID NO: 64881 - DNA, 25 bp, Probe Sequence
tggttgtgattaggatggttaggag

SEQ ID NO: 64882 - DNA, 25 bp, Probe Sequence
cattcattcattagtaagcagcaat

SEQ ID NO: 64883 - DNA, 25 bp, Probe Sequence
agtcagtaagcattcattcattagt

SEQ ID NO: 64884 - DNA, 25 bp, Probe Sequence
gagacgagtcagtaagcattcattc

SEQ ID NO: 64885 - DNA, 25 bp, Probe Sequence
ttgtgattaggatggttaggagcat

SEQ ID NO: 64886 - DNA, 25 bp, Probe Sequence
attcattcattagtaagcagcaatc

SEQ ID NO: 64887 - DNA, 25 bp, Probe Sequence
agagacgagtcagtaagcattcatt

SEQ ID NO: 64888 - DNA, 25 bp, Probe Sequence
ctggttattgactctgacttggacg

SEQ ID NO: 64889 - DNA, 25 bp, Probe Sequence
caataaaggtggcatacgaaggaaa

SEQ ID NO: 64890 - DNA, 25 bp, Probe Sequence
gctggttattgactctgacttggac

SEQ ID NO: 64891 - DNA, 25 bp, Probe Sequence
acaataaaggtggcatacgaaggaa

SEQ ID NO: 64892 - DNA, 25 bp, Probe Sequence
aaacacaataaaggtggcatacgaa

SEQ ID NO: 64893 - DNA, 25 bp, Probe Sequence
aacacaataaaggtggcatacgaag

SEQ ID NO: 64894 - DNA, 25 bp, Probe Sequence
gaaacacaataaaggtggcatacga

SEQ ID NO: 64895 - DNA, 25 bp, Probe Sequence
agctggttattgactctgacttgga

SEQ ID NO: 64896 - DNA, 25 bp, Probe Sequence
gggaaacacaataaaggtggcatac

SEQ ID NO: 64897 - DNA, 25 bp, Probe Sequence
ccagcacctcaatgaatgtgtactc

SEQ ID NO: 64898 - DNA, 25 bp, Probe Sequence
ctccagcacctcaatgaatgtgtac

SEQ ID NO: 64899 - DNA, 25 bp, Probe Sequence
aataaaggtggcatacgaaggaaaa

SEQ ID NO: 64900 - DNA, 25 bp, Probe Sequence
ggaaacacaataaaggtggcatacg

SEQ ID NO: 64901 - DNA, 25 bp, Probe Sequence
acctcaatgaatgtgtactcgctga

SEQ ID NO: 64902 - DNA, 25 bp, Probe Sequence
tggttattgactctgacttggacgt

SEQ ID NO: 64903 - DNA, 25 bp, Probe Sequence
ctacagacacagaaggaggtggaag

SEQ ID NO: 64904 - DNA, 25 bp, Probe Sequence
cacctcaatgaatgtgtactcgctg

SEQ ID NO: 64905 - DNA, 25 bp, Probe Sequence
cagcacctcaatgaatgtgtactcg

SEQ ID NO: 64906 - DNA, 25 bp, Probe Sequence
tccagcacctcaatgaatgtgtact

SEQ ID NO: 64907 - DNA, 25 bp, Probe Sequence
cacaataaaggtggcatacgaagga

SEQ ID NO: 64908 - DNA, 25 bp, Probe Sequence
acacaataaaggtggcatacgaagg

SEQ ID NO: 64909 - DNA, 25 bp, Probe Sequence
caggagttggggaaacacaataaag

SEQ ID NO: 64910 - DNA, 25 bp, Probe Sequence
tacagacacagaaggaggtggaagt

SEQ ID NO: 64911 - DNA, 25 bp, Probe Sequence
gactgaggtgctacagacacagaag

SEQ ID NO: 64912 - DNA, 25 bp, Probe Sequence
gttatgtctatcgtggttgtgaatc

SEQ ID NO: 64913 - DNA, 25 bp, Probe Sequence
gatgttctgccaatctatgcttatg

SEQ ID NO: 64914 - DNA, 25 bp, Probe Sequence
ttatgtctatcgtggttgtgaatcc

SEQ ID NO: 64915 - DNA, 25 bp, Probe Sequence
tgatgttctgccaatctatgcttat

SEQ ID NO: 64916 - DNA, 25 bp, Probe Sequence
atgatgttctgccaatctatgctta

SEQ ID NO: 64917 - DNA, 25 bp, Probe Sequence
ggttatgtctatcgtggttgtgaat

SEQ ID NO: 64918 - DNA, 25 bp, Probe Sequence
ctcctacaagcagcaagaatacatt

SEQ ID NO: 64919 - DNA, 25 bp, Probe Sequence
gatgatgttctgccaatctatgctt

SEQ ID NO: 64920 - DNA, 25 bp, Probe Sequence
aggttatgtctatcgtggttgtgaa

SEQ ID NO: 64921 - DNA, 25 bp, Probe Sequence
tcctacaagcagcaagaatacattg

SEQ ID NO: 64922 - DNA, 25 bp, Probe Sequence
tctcctacaagcagcaagaatacat

SEQ ID NO: 64923 - DNA, 25 bp, Probe Sequence
gaggttatgtctatcgtggttgtga

SEQ ID NO: 64924 - DNA, 25 bp, Probe Sequence
agtcactggaggttatgtctatcgt

SEQ ID NO: 64925 - DNA, 25 bp, Probe Sequence
ctggaggttatgtctatcgtggttg

SEQ ID NO: 64926 - DNA, 25 bp, Probe Sequence
gggaaatcttgctgtctactgaata

SEQ ID NO: 64927 - DNA, 25 bp, Probe Sequence
atgttctgccaatctatgcttatgg

SEQ ID NO: 64928 - DNA, 25 bp, Probe Sequence
cactgctgaataaagaccttagaag

SEQ ID NO: 64929 - DNA, 25 bp, Probe Sequence
ggaggttatgtctatcgtggttgtg

SEQ ID NO: 64930 - DNA, 25 bp, Probe Sequence
ggatgatgttctgccaatctatgct

SEQ ID NO: 64931 - DNA, 25 bp, Probe Sequence
tcagtcactggaggttatgtctatc

SEQ ID NO: 64932 - DNA, 25 bp, Probe Sequence
ggaaatcttgctgtctactgaataa

SEQ ID NO: 64933 - DNA, 25 bp, Probe Sequence
aaacaagaaatggaagaagcaggat

SEQ ID NO: 64934 - DNA, 25 bp, Probe Sequence
actggaggttatgtctatcgtggtt

SEQ ID NO: 64935 - DNA, 25 bp, Probe Sequence
gcctgtatatctttggagacttcat

SEQ ID NO: 64936 - DNA, 25 bp, Probe Sequence
tacataactgtgtctatcagcaagc

SEQ ID NO: 64937 - DNA, 25 bp, Probe Sequence
ggattacataactgtgtctatcagc

SEQ ID NO: 64938 - DNA, 25 bp, Probe Sequence
ttacataactgtgtctatcagcaag

SEQ ID NO: 64939 - DNA, 25 bp, Probe Sequence
gattacataactgtgtctatcagca

SEQ ID NO: 64940 - DNA, 25 bp, Probe Sequence
attacataactgtgtctatcagcaa

SEQ ID NO: 64941 - DNA, 25 bp, Probe Sequence
cataactacataaacagcagaggtg

SEQ ID NO: 64942 - DNA, 25 bp, Probe Sequence
ccctaaagaatcggatactcaatca

SEQ ID NO: 64943 - DNA, 25 bp, Probe Sequence
tcttgacatgctgcataactacata

SEQ ID NO: 64944 - DNA, 25 bp, Probe Sequence
cttgacatgctgcataactacataa

SEQ ID NO: 64945 - DNA, 25 bp, Probe Sequence
gctcaaattatccctaaagaatcgg

SEQ ID NO: 64946 - DNA, 25 bp, Probe Sequence
cgctcaaattatccctaaagaatcg

SEQ ID NO: 64947 - DNA, 25 bp, Probe Sequence
gcataactacataaacagcagaggt

SEQ ID NO: 64948 - DNA, 25 bp, Probe Sequence
tgtggtttcattcgctcaaattatc

SEQ ID NO: 64949 - DNA, 25 bp, Probe Sequence
gtttcattcgctcaaattatcccta

SEQ ID NO: 64950 - DNA, 25 bp, Probe Sequence
ttcttgacatgctgcataactacat

SEQ ID NO: 64951 - DNA, 25 bp, Probe Sequence
cctaaagaatcggatactcaatcac

SEQ ID NO: 64952 - DNA, 25 bp, Probe Sequence
cattcgctcaaattatccctaaaga

SEQ ID NO: 64953 - DNA, 25 bp, Probe Sequence
tcattcgctcaaattatccctaaag

SEQ ID NO: 64954 - DNA, 25 bp, Probe Sequence
agagagaaattgagtagaaagacca

SEQ ID NO: 64955 - DNA, 25 bp, Probe Sequence
tcgctcaaattatccctaaagaatc

SEQ ID NO: 64956 - DNA, 25 bp, Probe Sequence
gtggtttcattcgctcaaattatcc

SEQ ID NO: 64957 - DNA, 25 bp, Probe Sequence
cagagagaaattgagtagaaagacc

SEQ ID NO: 64958 - DNA, 25 bp, Probe Sequence
agaatcggatactcaatcactttgg

SEQ ID NO: 64959 - DNA, 25 bp, Probe Sequence
ttgtggtttcattcgctcaaattat

SEQ ID NO: 64960 - DNA, 25 bp, Probe Sequence
cacttaaccataccagcaacctatt

SEQ ID NO: 64961 - DNA, 25 bp, Probe Sequence
gttctctggatggatacatactgat

SEQ ID NO: 64962 - DNA, 25 bp, Probe Sequence
ttctctggatggatacatactgatt

SEQ ID NO: 64963 - DNA, 25 bp, Probe Sequence
tcagtcttaattccacataatccac

SEQ ID NO: 64964 - DNA, 25 bp, Probe Sequence
tgttctctggatggatacatactga

SEQ ID NO: 64965 - DNA, 25 bp, Probe Sequence
cagtcttaattccacataatccact

SEQ ID NO: 64966 - DNA, 25 bp, Probe Sequence
cttaattccacataatccacttagc

SEQ ID NO: 64967 - DNA, 25 bp, Probe Sequence
ccacttaaccataccagcaacctat

SEQ ID NO: 64968 - DNA, 25 bp, Probe Sequence
atcagtcttaattccacataatcca

SEQ ID NO: 64969 - DNA, 25 bp, Probe Sequence
catcagtcttaattccacataatcc

SEQ ID NO: 64970 - DNA, 25 bp, Probe Sequence
ccatcagtcttaattccacataatc

SEQ ID NO: 64971 - DNA, 25 bp, Probe Sequence
agtcttaattccacataatccactt

SEQ ID NO: 64972 - DNA, 25 bp, Probe Sequence
ctatttctgtctcgttctcctgtta

SEQ ID NO: 64973 - DNA, 25 bp, Probe Sequence
tcaggtcgtaactttctttatgtgt

SEQ ID NO: 64974 - DNA, 25 bp, Probe Sequence
aatctttcctgttactttcacctca

SEQ ID NO: 64975 - DNA, 25 bp, Probe Sequence
ctcaggtcgtaactttctttatgtg

SEQ ID NO: 64976 - DNA, 25 bp, Probe Sequence
ttaaccataccagcaacctatttct

SEQ ID NO: 64977 - DNA, 25 bp, Probe Sequence
acttaaccataccagcaacctattt

SEQ ID NO: 64978 - DNA, 25 bp, Probe Sequence
atttctgtctcgttctcctgttaaa

SEQ ID NO: 64979 - DNA, 25 bp, Probe Sequence
cttaaccataccagcaacctatttc

SEQ ID NO: 64980 - DNA, 25 bp, Probe Sequence
actaatcaaatgttctctggatgga

SEQ ID NO: 64981 - DNA, 25 bp, Probe Sequence
cactaatcaaatgttctctggatgg

SEQ ID NO: 64982 - DNA, 25 bp, Probe Sequence
tatttctgtctcgttctcctgttaa

SEQ ID NO: 64983 - DNA, 25 bp, Probe Sequence
aaatctttcctgttactttcacctc

SEQ ID NO: 64984 - DNA, 25 bp, Probe Sequence
gtgaacagatagagaggtggaggag

SEQ ID NO: 64985 - DNA, 25 bp, Probe Sequence
agtgaacagatagagaggtggagga

SEQ ID NO: 64986 - DNA, 25 bp, Probe Sequence
cagtgaacagatagagaggtggagg

SEQ ID NO: 64987 - DNA, 25 bp, Probe Sequence
gttgtcccagtgaacagatagagag

SEQ ID NO: 64988 - DNA, 25 bp, Probe Sequence
gaacagatagagaggtggaggaggt

SEQ ID NO: 64989 - DNA, 25 bp, Probe Sequence
tgaacagatagagaggtggaggagg

SEQ ID NO: 64990 - DNA, 25 bp, Probe Sequence
ccagtgaacagatagagaggtggag

SEQ ID NO: 64991 - DNA, 25 bp, Probe Sequence
aacagatagagaggtggaggaggtg

SEQ ID NO: 64992 - DNA, 25 bp, Probe Sequence
ttgtcccagtgaacagatagagagg

SEQ ID NO: 64993 - DNA, 25 bp, Probe Sequence
gtcccagtgaacagatagagaggtg

SEQ ID NO: 64994 - DNA, 25 bp, Probe Sequence
gatagagaggtggaggaggtgacag

SEQ ID NO: 64995 - DNA, 25 bp, Probe Sequence
cagatagagaggtggaggaggtgac

SEQ ID NO: 64996 - DNA, 25 bp, Probe Sequence
gaacttctcttggtggaaggtgatg

SEQ ID NO: 64997 - DNA, 25 bp, Probe Sequence
agaacttctcttggtggaaggtgat

SEQ ID NO: 64998 - DNA, 25 bp, Probe Sequence
tgtcccagtgaacagatagagaggt

SEQ ID NO: 64999 - DNA, 25 bp, Probe Sequence
cacgttgctgagtaaagaggtgtta

SEQ ID NO: 65000 - DNA, 25 bp, Probe Sequence
acgttgctgagtaaagaggtgttac

SEQ ID NO: 65001 - DNA, 25 bp, Probe Sequence
tgttgtcccagtgaacagatagaga

SEQ ID NO: 65002 - DNA, 25 bp, Probe Sequence
ctttaaccaagcgaggagtccaaag

SEQ ID NO: 65003 - DNA, 25 bp, Probe Sequence
gagcattcctctagattgcacaagg

SEQ ID NO: 65004 - DNA, 25 bp, Probe Sequence
ggagcattcctctagattgcacaag

SEQ ID NO: 65005 - DNA, 25 bp, Probe Sequence
aacttctcttggtggaaggtgatgg

SEQ ID NO: 65006 - DNA, 25 bp, Probe Sequence
cattcctctagattgcacaagggac

SEQ ID NO: 65007 - DNA, 25 bp, Probe Sequence
cttctcttggtggaaggtgatggag

SEQ ID NO: 65008 - DNA, 25 bp, Probe Sequence
aatacaactctggcacctataacaa

SEQ ID NO: 65009 - DNA, 25 bp, Probe Sequence
tctggcacctataacaatcaataca

SEQ ID NO: 65010 - DNA, 25 bp, Probe Sequence
aactctggcacctataacaatcaat

SEQ ID NO: 65011 - DNA, 25 bp, Probe Sequence
tacaactctggcacctataacaatc

SEQ ID NO: 65012 - DNA, 25 bp, Probe Sequence
atacaactctggcacctataacaat

SEQ ID NO: 65013 - DNA, 25 bp, Probe Sequence
actctggcacctataacaatcaata

SEQ ID NO: 65014 - DNA, 25 bp, Probe Sequence
ctctggcacctataacaatcaatac

SEQ ID NO: 65015 - DNA, 25 bp, Probe Sequence
caactctggcacctataacaatcaa

SEQ ID NO: 65016 - DNA, 25 bp, Probe Sequence
ctggcacctataacaatcaatacat

SEQ ID NO: 65017 - DNA, 25 bp, Probe Sequence
ttatggagaagcaagataagtggac

SEQ ID NO: 65018 - DNA, 25 bp, Probe Sequence
tatctacctagcatctcagtacaca

SEQ ID NO: 65019 - DNA, 25 bp, Probe Sequence
atctacctagcatctcagtacacat

SEQ ID NO: 65020 - DNA, 25 bp, Probe Sequence
gagatgacggactagaagactgtaa

SEQ ID NO: 65021 - DNA, 25 bp, Probe Sequence
acattcttagcagtggattgatatt

SEQ ID NO: 65022 - DNA, 25 bp, Probe Sequence
ctagcatctcagtacacatcctatg

SEQ ID NO: 65023 - DNA, 25 bp, Probe Sequence
tatggagaagcaagataagtggacc

SEQ ID NO: 65024 - DNA, 25 bp, Probe Sequence
cctagcatctcagtacacatcctat

SEQ ID NO: 65025 - DNA, 25 bp, Probe Sequence
ggcacctataacaatcaatacatgg

SEQ ID NO: 65026 - DNA, 25 bp, Probe Sequence
aatatgatggcagatagtggcaaga

SEQ ID NO: 65027 - DNA, 25 bp, Probe Sequence
caatatgatggcagatagtggcaag

SEQ ID NO: 65028 - DNA, 25 bp, Probe Sequence
ctcagtacacatcctatgccataag

SEQ ID NO: 65029 - DNA, 25 bp, Probe Sequence
tctacctagcatctcagtacacatc

SEQ ID NO: 65030 - DNA, 25 bp, Probe Sequence
atctcagtacacatcctatgccata

SEQ ID NO: 65031 - DNA, 25 bp, Probe Sequence
acaactctggcacctataacaatca

SEQ ID NO: 65032 - DNA, 25 bp, Probe Sequence
ggctaatgtgaggataatcttacag

SEQ ID NO: 65033 - DNA, 25 bp, Probe Sequence
gctaatgtgaggataatcttacaga

SEQ ID NO: 65034 - DNA, 25 bp, Probe Sequence
agtagttgcatagtcacacatcatt

SEQ ID NO: 65035 - DNA, 25 bp, Probe Sequence
ccatagaaggagtagttgcatagtc

SEQ ID NO: 65036 - DNA, 25 bp, Probe Sequence
atagaaggagtagttgcatagtcac

SEQ ID NO: 65037 - DNA, 25 bp, Probe Sequence
catagaaggagtagttgcatagtca

SEQ ID NO: 65038 - DNA, 25 bp, Probe Sequence
aggaaactgtaactgctatgtcttt

SEQ ID NO: 65039 - DNA, 25 bp, Probe Sequence
acaaagaaatgacaaagaaggcaat

SEQ ID NO: 65040 - DNA, 25 bp, Probe Sequence
tgggctaatgtgaggataatcttac

SEQ ID NO: 65041 - DNA, 25 bp, Probe Sequence
gtgggctaatgtgaggataatctta

SEQ ID NO: 65042 - DNA, 25 bp, Probe Sequence
tacaaagaaatgacaaagaaggcaa

SEQ ID NO: 65043 - DNA, 25 bp, Probe Sequence
ttacaaagaaatgacaaagaaggca

SEQ ID NO: 65044 - DNA, 25 bp, Probe Sequence
taggctaagaaacaggttatcagtg

SEQ ID NO: 65045 - DNA, 25 bp, Probe Sequence
gagtagttgcatagtcacacatcat

SEQ ID NO: 65046 - DNA, 25 bp, Probe Sequence
tagaaggagtagttgcatagtcaca

SEQ ID NO: 65047 - DNA, 25 bp, Probe Sequence
actgtaactgctatgtctttaggaa

SEQ ID NO: 65048 - DNA, 25 bp, Probe Sequence
aactgtaactgctatgtctttagga

SEQ ID NO: 65049 - DNA, 25 bp, Probe Sequence
gatatttcctacctaagcatctccc

SEQ ID NO: 65050 - DNA, 25 bp, Probe Sequence
actcatctgaatcaacattaaagcc

SEQ ID NO: 65051 - DNA, 25 bp, Probe Sequence
tgatatttcctacctaagcatctcc

SEQ ID NO: 65052 - DNA, 25 bp, Probe Sequence
caattaaattcagtatgggtggagc

SEQ ID NO: 65053 - DNA, 25 bp, Probe Sequence
ctcatctgaatcaacattaaagcct

SEQ ID NO: 65054 - DNA, 25 bp, Probe Sequence
ataggctaagaaacaggttatcagt

SEQ ID NO: 65055 - DNA, 25 bp, Probe Sequence
aattaaattcagtatgggtggagca

SEQ ID NO: 65056 - DNA, 25 bp, Probe Sequence
gagaactgcttcaatgtggtatctt

SEQ ID NO: 65057 - DNA, 25 bp, Probe Sequence
agcagaacagacttatgagttgatg

SEQ ID NO: 65058 - DNA, 25 bp, Probe Sequence
cagcagaacagacttatgagttgat

SEQ ID NO: 65059 - DNA, 25 bp, Probe Sequence
aggaacttctgagtaattggtatca

SEQ ID NO: 65060 - DNA, 25 bp, Probe Sequence
cctggagtctctcttgaagattatg

SEQ ID NO: 65061 - DNA, 25 bp, Probe Sequence
acctggagtctctcttgaagattat

SEQ ID NO: 65062 - DNA, 25 bp, Probe Sequence
gagtctctcttgaagattatgctgg

SEQ ID NO: 65063 - DNA, 25 bp, Probe Sequence
ggagtctctcttgaagattatgctg

SEQ ID NO: 65064 - DNA, 25 bp, Probe Sequence
ctggagtctctcttgaagattatgc

SEQ ID NO: 65065 - DNA, 25 bp, Probe Sequence
ctgagaactgcttcaatgtggtatc

SEQ ID NO: 65066 - DNA, 25 bp, Probe Sequence
tcagcagaacagacttatgagttga

SEQ ID NO: 65067 - DNA, 25 bp, Probe Sequence
tggagtctctcttgaagattatgct

SEQ ID NO: 65068 - DNA, 25 bp, Probe Sequence
ggaacttctgagtaattggtatcat

SEQ ID NO: 65069 - DNA, 25 bp, Probe Sequence
aaggaacttctgagtaattggtatc

SEQ ID NO: 65070 - DNA, 25 bp, Probe Sequence
cacctggagtctctcttgaagatta

SEQ ID NO: 65071 - DNA, 25 bp, Probe Sequence
tgagaactgcttcaatgtggtatct

SEQ ID NO: 65072 - DNA, 25 bp, Probe Sequence
caattataagagaaggctcactgga

SEQ ID NO: 65073 - DNA, 25 bp, Probe Sequence
cagaacagacttatgagttgatgcg

SEQ ID NO: 65074 - DNA, 25 bp, Probe Sequence
attataagagaaggctcactggaag

SEQ ID NO: 65075 - DNA, 25 bp, Probe Sequence
aattataagagaaggctcactggaa

SEQ ID NO: 65076 - DNA, 25 bp, Probe Sequence
gatgatgacatagagaccaccaagg

SEQ ID NO: 65077 - DNA, 25 bp, Probe Sequence
ggatgatgacatagagaccaccaag

SEQ ID NO: 65078 - DNA, 25 bp, Probe Sequence
catccatcaagtaatcaaagagtgc

SEQ ID NO: 65079 - DNA, 25 bp, Probe Sequence
aggatgatgacatagagaccaccaa

SEQ ID NO: 65080 - DNA, 25 bp, Probe Sequence
ttgtgagtgagagaatgctagatag

SEQ ID NO: 65081 - DNA, 25 bp, Probe Sequence
tgtgagtgagagaatgctagatagg

SEQ ID NO: 65082 - DNA, 25 bp, Probe Sequence
gcttcatactcggttaatggaacat

SEQ ID NO: 65083 - DNA, 25 bp, Probe Sequence
ttgcttcatactcggttaatggaac

SEQ ID NO: 65084 - DNA, 25 bp, Probe Sequence
cttcatactcggttaatggaacata

SEQ ID NO: 65085 - DNA, 25 bp, Probe Sequence
aaggattatcacacctgtagcaatt

SEQ ID NO: 65086 - DNA, 25 bp, Probe Sequence
ttcatactcggttaatggaacataa

SEQ ID NO: 65087 - DNA, 25 bp, Probe Sequence
tgcttcatactcggttaatggaaca

SEQ ID NO: 65088 - DNA, 25 bp, Probe Sequence
atagagcagcacgtagaatagtaac

SEQ ID NO: 65089 - DNA, 25 bp, Probe Sequence
agcagcacgtagaatagtaacttaa

SEQ ID NO: 65090 - DNA, 25 bp, Probe Sequence
gagcagcacgtagaatagtaactta

SEQ ID NO: 65091 - DNA, 25 bp, Probe Sequence
atcttggactgtttatgacctactg

SEQ ID NO: 65092 - DNA, 25 bp, Probe Sequence
tgaaatcttggactgtttatgacct

SEQ ID NO: 65093 - DNA, 25 bp, Probe Sequence
ctgaaatcttggactgtttatgacc

SEQ ID NO: 65094 - DNA, 25 bp, Probe Sequence
cctgaaatcttggactgtttatgac

SEQ ID NO: 65095 - DNA, 25 bp, Probe Sequence
aatagagcagcacgtagaatagtaa

SEQ ID NO: 65096 - DNA, 25 bp, Probe Sequence
aatcttggactgtttatgacctact

SEQ ID NO: 65097 - DNA, 25 bp, Probe Sequence
gtttatgacctactggctcctttaa

SEQ ID NO: 65098 - DNA, 25 bp, Probe Sequence
tagagcagcacgtagaatagtaact

SEQ ID NO: 65099 - DNA, 25 bp, Probe Sequence
atagggtggctttgttctttgttta

SEQ ID NO: 65100 - DNA, 25 bp, Probe Sequence
gattatcacacctgtagcaatttcc

SEQ ID NO: 65101 - DNA, 25 bp, Probe Sequence
ggattatcacacctgtagcaatttc

SEQ ID NO: 65102 - DNA, 25 bp, Probe Sequence
gaatagttggttcctgaaatcttgg

SEQ ID NO: 65103 - DNA, 25 bp, Probe Sequence
attatcacacctgtagcaatttcca

SEQ ID NO: 65104 - DNA, 25 bp, Probe Sequence
taagggattgtaaatacaccgatgg

SEQ ID NO: 65105 - DNA, 25 bp, Probe Sequence
ctaagggattgtaaatacaccgatg

SEQ ID NO: 65106 - DNA, 25 bp, Probe Sequence
gctaagggattgtaaatacaccgat

SEQ ID NO: 65107 - DNA, 25 bp, Probe Sequence
aatccacactctgtatctggctact

SEQ ID NO: 65108 - DNA, 25 bp, Probe Sequence
caatccacactctgtatctggctac

SEQ ID NO: 65109 - DNA, 25 bp, Probe Sequence
tccacactctgtatctagctaatct

SEQ ID NO: 65110 - DNA, 25 bp, Probe Sequence
gtccacactctgtatctagctaatc

SEQ ID NO: 65111 - DNA, 25 bp, Probe Sequence
tgtccacactctgtatctagctaat

SEQ ID NO: 65112 - DNA, 25 bp, Probe Sequence
ttcagatggaagtgagaggtgacag

SEQ ID NO: 65113 - DNA, 25 bp, Probe Sequence
gcacaagacaacagaatccatcagg

SEQ ID NO: 65114 - DNA, 25 bp, Probe Sequence
atccacactctgtatctggctactc

SEQ ID NO: 65115 - DNA, 25 bp, Probe Sequence
ctttgtgtccacactctgtatctag

SEQ ID NO: 65116 - DNA, 25 bp, Probe Sequence
ccacactctgtatctagctaatcta

SEQ ID NO: 65117 - DNA, 25 bp, Probe Sequence
ggatgtggagaacctttgtgtctag

SEQ ID NO: 65118 - DNA, 25 bp, Probe Sequence
ttgtgtccacactctgtatctagct

SEQ ID NO: 65119 - DNA, 25 bp, Probe Sequence
gtgtccacactctgtatctagctaa

SEQ ID NO: 65120 - DNA, 25 bp, Probe Sequence
cacactctgtatctggctactctgg

SEQ ID NO: 65121 - DNA, 25 bp, Probe Sequence
agctaagggattgtaaatacaccga

SEQ ID NO: 65122 - DNA, 25 bp, Probe Sequence
ccaatccacactctgtatctggcta

SEQ ID NO: 65123 - DNA, 25 bp, Probe Sequence
aagggattgtaaatacaccgatggg

SEQ ID NO: 65124 - DNA, 25 bp, Probe Sequence
aatgcaccaatccacactctgtatc

SEQ ID NO: 65125 - DNA, 25 bp, Probe Sequence
gaatgcaccaatccacactctgtat

SEQ ID NO: 65126 - DNA, 25 bp, Probe Sequence
gctattgtcacagagaaaagaagag

SEQ ID NO: 65127 - DNA, 25 bp, Probe Sequence
cctttgtgtccacactctgtatcta

SEQ ID NO: 65128 - DNA, 25 bp, Probe Sequence
cctgtatgatcctagtagcaataag

SEQ ID NO: 65129 - DNA, 25 bp, Probe Sequence
agagactgacttgctgagacttagt

SEQ ID NO: 65130 - DNA, 25 bp, Probe Sequence
cagagactgacttgctgagacttag

SEQ ID NO: 65131 - DNA, 25 bp, Probe Sequence
ctgtatgatcctagtagcaataaga

SEQ ID NO: 65132 - DNA, 25 bp, Probe Sequence
accctgtatgatcctagtagcaata

SEQ ID NO: 65133 - DNA, 25 bp, Probe Sequence
ccctgtatgatcctagtagcaataa

SEQ ID NO: 65134 - DNA, 25 bp, Probe Sequence
aacacccaagtagaatacatgatcc

SEQ ID NO: 65135 - DNA, 25 bp, Probe Sequence
gaccctgtatgatcctagtagcaat

SEQ ID NO: 65136 - DNA, 25 bp, Probe Sequence
ctgtgaccctgtatgatcctagtag

SEQ ID NO: 65137 - DNA, 25 bp, Probe Sequence
gagaagtgctccatttactgagaag

SEQ ID NO: 65138 - DNA, 25 bp, Probe Sequence
tctgtgaccctgtatgatcctagta

SEQ ID NO: 65139 - DNA, 25 bp, Probe Sequence
tttggacttatctggtgcctttctt

SEQ ID NO: 65140 - DNA, 25 bp, Probe Sequence
gtaacacccaagtagaatacatgat

SEQ ID NO: 65141 - DNA, 25 bp, Probe Sequence
tgtatgatcctagtagcaataagat

SEQ ID NO: 65142 - DNA, 25 bp, Probe Sequence
caggtaacacccaagtagaatacat

SEQ ID NO: 65143 - DNA, 25 bp, Probe Sequence
atttactgagaagcacaggtaacac

SEQ ID NO: 65144 - DNA, 25 bp, Probe Sequence
catttactgagaagcacaggtaaca

SEQ ID NO: 65145 - DNA, 25 bp, Probe Sequence
gaaccagcttctactttgacataaa

SEQ ID NO: 65146 - DNA, 25 bp, Probe Sequence
ggaaccagcttctactttgacataa

SEQ ID NO: 65147 - DNA, 25 bp, Probe Sequence
taacacccaagtagaatacatgatc

SEQ ID NO: 65148 - DNA, 25 bp, Probe Sequence
ttggacttatctggtgcctttcttc

SEQ ID NO: 65149 - DNA, 25 bp, Probe Sequence
tgaccctgtatgatcctagtagcaa

SEQ ID NO: 65150 - DNA, 25 bp, Probe Sequence
cacaggtaacacccaagtagaatac

SEQ ID NO: 65151 - DNA, 25 bp, Probe Sequence
acacccaagtagaatacatgatccg

SEQ ID NO: 65152 - DNA, 25 bp, Probe Sequence
ttctacagttatggagtggatgaca

SEQ ID NO: 65153 - DNA, 25 bp, Probe Sequence
atacagagaagagcgagagattcat

SEQ ID NO: 65154 - DNA, 25 bp, Probe Sequence
tctacagttatggagtggatgacag

SEQ ID NO: 65155 - DNA, 25 bp, Probe Sequence
ccacttccaaggcaattcatagtat

SEQ ID NO: 65156 - DNA, 25 bp, Probe Sequence
cacatacagagaagagcgagagatt

SEQ ID NO: 65157 - DNA, 25 bp, Probe Sequence
catacagagaagagcgagagattca

SEQ ID NO: 65158 - DNA, 25 bp, Probe Sequence
acatacagagaagagcgagagattc

SEQ ID NO: 65159 - DNA, 25 bp, Probe Sequence
cacttccaaggcaattcatagtata

SEQ ID NO: 65160 - DNA, 25 bp, Probe Sequence
acctatactatgtaaccagagaaga

SEQ ID NO: 65161 - DNA, 25 bp, Probe Sequence
accacttccaaggcaattcatagta

SEQ ID NO: 65162 - DNA, 25 bp, Probe Sequence
cctatactatgtaaccagagaagac

SEQ ID NO: 65163 - DNA, 25 bp, Probe Sequence
agattcatgccaccgcttactataa

SEQ ID NO: 65164 - DNA, 25 bp, Probe Sequence
tacagagaagagcgagagattcatg

SEQ ID NO: 65165 - DNA, 25 bp, Probe Sequence
taagaagctacaagagaccattgag

SEQ ID NO: 65166 - DNA, 25 bp, Probe Sequence
acttccaaggcaattcatagtatat

SEQ ID NO: 65167 - DNA, 25 bp, Probe Sequence
ttaagaagctacaagagaccattga

SEQ ID NO: 65168 - DNA, 25 bp, Probe Sequence
ctacagttatggagtggatgacagc

SEQ ID NO: 65169 - DNA, 25 bp, Probe Sequence
tttctacagttatggagtggatgac

SEQ ID NO: 65170 - DNA, 25 bp, Probe Sequence
ctttctacagttatggagtggatga

SEQ ID NO: 65171 - DNA, 25 bp, Probe Sequence
tttaagaatgctatacaactgctgc

SEQ ID NO: 65172 - DNA, 25 bp, Probe Sequence
atctacaggaaagtttatgaccagc

SEQ ID NO: 65173 - DNA, 25 bp, Probe Sequence
aacctatactatgtaaccagagaag

SEQ ID NO: 65174 - DNA, 25 bp, Probe Sequence
gagattcatgccaccgcttactata

SEQ ID NO: 65175 - DNA, 25 bp, Probe Sequence
gagatgctttctacagttatggagt

SEQ ID NO: 65176 - DNA, 25 bp, Probe Sequence
gttcctgtgatagtcctgttgttat

SEQ ID NO: 65177 - DNA, 25 bp, Probe Sequence
ttcctgtgatagtcctgttgttatt

SEQ ID NO: 65178 - DNA, 25 bp, Probe Sequence
cctgtgatagtcctgttgttattac

SEQ ID NO: 65179 - DNA, 25 bp, Probe Sequence
tcctgtgatagtcctgttgttatta

SEQ ID NO: 65180 - DNA, 25 bp, Probe Sequence
tgttcctgtgatagtcctgttgtta

SEQ ID NO: 65181 - DNA, 25 bp, Probe Sequence
cattgttcctgtgatagtcctgttg

SEQ ID NO: 65182 - DNA, 25 bp, Probe Sequence
aactactctgtgctaattgttctgc

SEQ ID NO: 65183 - DNA, 25 bp, Probe Sequence
cttcattgttcctgtgatagtcctg

SEQ ID NO: 65184 - DNA, 25 bp, Probe Sequence
attgttcctgtgatagtcctgttgt

SEQ ID NO: 65185 - DNA, 25 bp, Probe Sequence
ttgttcctgtgatagtcctgttgtt

SEQ ID NO: 65186 - DNA, 25 bp, Probe Sequence
ctctgcttcattgttcctgtgatag

SEQ ID NO: 65187 - DNA, 25 bp, Probe Sequence
tcattgttcctgtgatagtcctgtt

SEQ ID NO: 65188 - DNA, 25 bp, Probe Sequence
ttcattgttcctgtgatagtcctgt

SEQ ID NO: 65189 - DNA, 25 bp, Probe Sequence
ctgcttcattgttcctgtgatagtc

SEQ ID NO: 65190 - DNA, 25 bp, Probe Sequence
tctctgcttcattgttcctgtgata

SEQ ID NO: 65191 - DNA, 25 bp, Probe Sequence
cttctgcttctctgcttcattgttc

SEQ ID NO: 65192 - DNA, 25 bp, Probe Sequence
tctgcttcattgttcctgtgatagt

SEQ ID NO: 65193 - DNA, 25 bp, Probe Sequence
ctgtgatagtcctgttgttattaca

SEQ ID NO: 65194 - DNA, 25 bp, Probe Sequence
attgtctcctccatcttccgaacta

SEQ ID NO: 65195 - DNA, 25 bp, Probe Sequence
ccatcctgacaaacaagacatttag

SEQ ID NO: 65196 - DNA, 25 bp, Probe Sequence
tccatcctgacaaacaagacattta

SEQ ID NO: 65197 - DNA, 25 bp, Probe Sequence
ttctctgcttcattgttcctgtgat

SEQ ID NO: 65198 - DNA, 25 bp, Probe Sequence
gcttcattgttcctgtgatagtcct

SEQ ID NO: 65199 - DNA, 25 bp, Probe Sequence
ctactctgtgctaattgttctgcca

SEQ ID NO: 65200 - DNA, 25 bp, Probe Sequence
attacttccttgtggtctattgtga

SEQ ID NO: 65201 - DNA, 25 bp, Probe Sequence
cacaatggagtatagcaggtatcag

SEQ ID NO: 65202 - DNA, 25 bp, Probe Sequence
tacacaatggagtatagcaggtatc

SEQ ID NO: 65203 - DNA, 25 bp, Probe Sequence
gttgactgactctaattgaatctgc

SEQ ID NO: 65204 - DNA, 25 bp, Probe Sequence
ttccttgtggtctattgtgaagtaa

SEQ ID NO: 65205 - DNA, 25 bp, Probe Sequence
ttacttccttgtggtctattgtgaa

SEQ ID NO: 65206 - DNA, 25 bp, Probe Sequence
acacaatggagtatagcaggtatca

SEQ ID NO: 65207 - DNA, 25 bp, Probe Sequence
ttgactgactctaattgaatctgcg

SEQ ID NO: 65208 - DNA, 25 bp, Probe Sequence
ggttattccactgaacttaggtcat

SEQ ID NO: 65209 - DNA, 25 bp, Probe Sequence
tattacttccttgtggtctattgtg

SEQ ID NO: 65210 - DNA, 25 bp, Probe Sequence
gtattacttccttgtggtctattgt

SEQ ID NO: 65211 - DNA, 25 bp, Probe Sequence
acaatggagtatagcaggtatcagc

SEQ ID NO: 65212 - DNA, 25 bp, Probe Sequence
gactgactctaattgaatctgcgtg

SEQ ID NO: 65213 - DNA, 25 bp, Probe Sequence
agagtggattccgtatgttcttcat

SEQ ID NO: 65214 - DNA, 25 bp, Probe Sequence
agttgactgactctaattgaatctg

SEQ ID NO: 65215 - DNA, 25 bp, Probe Sequence
tgactgactctaattgaatctgcgt

SEQ ID NO: 65216 - DNA, 25 bp, Probe Sequence
gttgaagagtggattccgtatgttc

SEQ ID NO: 65217 - DNA, 25 bp, Probe Sequence
ccgtatgttcttcatagagagtgtt

SEQ ID NO: 65218 - DNA, 25 bp, Probe Sequence
ttccgtatgttcttcatagagagtg

SEQ ID NO: 65219 - DNA, 25 bp, Probe Sequence
gaatacacaatggagtatagcaggt

SEQ ID NO: 65220 - DNA, 25 bp, Probe Sequence
agaatacacaatggagtatagcagg

SEQ ID NO: 65221 - DNA, 25 bp, Probe Sequence
ggagaatacacaatggagtatagca

SEQ ID NO: 65222 - DNA, 25 bp, Probe Sequence
ttgaagagtggattccgtatgttct

SEQ ID NO: 65223 - DNA, 25 bp, Probe Sequence
ttctgttgaagagtggattccgtat

SEQ ID NO: 65224 - DNA, 25 bp, Probe Sequence
aagaatcaggagaattagtagatgc

SEQ ID NO: 65225 - DNA, 25 bp, Probe Sequence
caggagaattagtagatgcagagtt

SEQ ID NO: 65226 - DNA, 25 bp, Probe Sequence
tcaggagaattagtagatgcagagt

SEQ ID NO: 65227 - DNA, 25 bp, Probe Sequence
atgtaacttaggtgttggtataact

SEQ ID NO: 65228 - DNA, 25 bp, Probe Sequence
atcaggagaattagtagatgcagag

SEQ ID NO: 65229 - DNA, 25 bp, Probe Sequence
aatcaggagaattagtagatgcaga

SEQ ID NO: 65230 - DNA, 25 bp, Probe Sequence
agaatcaggagaattagtagatgca

SEQ ID NO: 65231 - DNA, 25 bp, Probe Sequence
gatgtaacttaggtgttggtataac

SEQ ID NO: 65232 - DNA, 25 bp, Probe Sequence
gaatcaggagaattagtagatgcag

SEQ ID NO: 65233 - DNA, 25 bp, Probe Sequence
agatgtaacttaggtgttggtataa

SEQ ID NO: 65234 - DNA, 25 bp, Probe Sequence
aggagaattagtagatgcagagtta

SEQ ID NO: 65235 - DNA, 25 bp, Probe Sequence
tgtaacttaggtgttggtataacta

SEQ ID NO: 65236 - DNA, 25 bp, Probe Sequence
atagatgtaacttaggtgttggtat

SEQ ID NO: 65237 - DNA, 25 bp, Probe Sequence
atatagatgtaacttaggtgttggt

SEQ ID NO: 65238 - DNA, 25 bp, Probe Sequence
gcttcttgaaggttaaattgggtaa

SEQ ID NO: 65239 - DNA, 25 bp, Probe Sequence
tatgcttcttgaaggttaaattggg

SEQ ID NO: 65240 - DNA, 25 bp, Probe Sequence
tgcttcttgaaggttaaattgggta

SEQ ID NO: 65241 - DNA, 25 bp, Probe Sequence
ttgagatcagaagtttgagaccatc

SEQ ID NO: 65242 - DNA, 25 bp, Probe Sequence
cttgagatcagaagtttgagaccat

SEQ ID NO: 65243 - DNA, 25 bp, Probe Sequence
atgcttcttgaaggttaaattgggt

SEQ ID NO: 65244 - DNA, 25 bp, Probe Sequence
gaagaatcaggagaattagtagatg

SEQ ID NO: 65245 - DNA, 25 bp, Probe Sequence
ggagaattagtagatgcagagttat

SEQ ID NO: 65246 - DNA, 25 bp, Probe Sequence
tgaagaatcaggagaattagtagat

SEQ ID NO: 65247 - DNA, 25 bp, Probe Sequence
tagatgtaacttaggtgttggtata

SEQ ID NO: 65248 - DNA, 25 bp, Probe Sequence
accacctagttgatagttaatctca

SEQ ID NO: 65249 - DNA, 25 bp, Probe Sequence
acctagttgatagttaatctcatgc

SEQ ID NO: 65250 - DNA, 25 bp, Probe Sequence
ccacctagttgatagttaatctcat

SEQ ID NO: 65251 - DNA, 25 bp, Probe Sequence
gcctttaccacctagttgatagtta

SEQ ID NO: 65252 - DNA, 25 bp, Probe Sequence
taccacctagttgatagttaatctc

SEQ ID NO: 65253 - DNA, 25 bp, Probe Sequence
agttgatagttaatctcatgcagtt

SEQ ID NO: 65254 - DNA, 25 bp, Probe Sequence
cctagttgatagttaatctcatgca

SEQ ID NO: 65255 - DNA, 25 bp, Probe Sequence
ttaccacctagttgatagttaatct

SEQ ID NO: 65256 - DNA, 25 bp, Probe Sequence
gatcttcccacaatacttgcctaag

SEQ ID NO: 65257 - DNA, 25 bp, Probe Sequence
atggtgaaaccctgtctttactaaa

SEQ ID NO: 65258 - DNA, 25 bp, Probe Sequence
tgatcttcccacaatacttgcctaa

SEQ ID NO: 65259 - DNA, 25 bp, Probe Sequence
cctttaccacctagttgatagttaa

SEQ ID NO: 65260 - DNA, 25 bp, Probe Sequence
cgcctttaccacctagttgatagtt

SEQ ID NO: 65261 - DNA, 25 bp, Probe Sequence
tagttgatagttaatctcatgcagt

SEQ ID NO: 65262 - DNA, 25 bp, Probe Sequence
ctcgcctttaccacctagttgatag

SEQ ID NO: 65263 - DNA, 25 bp, Probe Sequence
cacctagttgatagttaatctcatg

SEQ ID NO: 65264 - DNA, 25 bp, Probe Sequence
atcttcccacaatacttgcctaagg

SEQ ID NO: 65265 - DNA, 25 bp, Probe Sequence
ccagaaggatagtgatcatgtctag

SEQ ID NO: 65266 - DNA, 25 bp, Probe Sequence
cagaaggatagtgatcatgtctagt

SEQ ID NO: 65267 - DNA, 25 bp, Probe Sequence
catggtgaaaccctgtctttactaa

SEQ ID NO: 65268 - DNA, 25 bp, Probe Sequence
gtctagtaaatttgtgatcttccca

SEQ ID NO: 65269 - DNA, 25 bp, Probe Sequence
tgtctagtaaatttgtgatcttccc

SEQ ID NO: 65270 - DNA, 25 bp, Probe Sequence
ctagttgatagttaatctcatgcag

SEQ ID NO: 65271 - DNA, 25 bp, Probe Sequence
tcgcctttaccacctagttgatagt

SEQ ID NO: 65272 - DNA, 25 bp, Probe Sequence
ctctctaaagaactgaccagccacc

SEQ ID NO: 65273 - DNA, 25 bp, Probe Sequence
cctctctaaagaactgaccagccac

SEQ ID NO: 65274 - DNA, 25 bp, Probe Sequence
actggagcagttcaacatgatggag

SEQ ID NO: 65275 - DNA, 25 bp, Probe Sequence
ctggagtaataacaatgagagacgg

SEQ ID NO: 65276 - DNA, 25 bp, Probe Sequence
cctggagtaataacaatgagagacg

SEQ ID NO: 65277 - DNA, 25 bp, Probe Sequence
gaagagatggatagtcaagatgctg

SEQ ID NO: 65278 - DNA, 25 bp, Probe Sequence
ttcttctattcaggcttcaatggac

SEQ ID NO: 65279 - DNA, 25 bp, Probe Sequence
ctgaagatagactggaattgtgtgt

SEQ ID NO: 65280 - DNA, 25 bp, Probe Sequence
aagatgctgagatgactaacacaac

SEQ ID NO: 65281 - DNA, 25 bp, Probe Sequence
caagatgctgagatgactaacacaa

SEQ ID NO: 65282 - DNA, 25 bp, Probe Sequence
tcctggagtaataacaatgagagac

SEQ ID NO: 65283 - DNA, 25 bp, Probe Sequence
tgaagatagactggaattgtgtgtg

SEQ ID NO: 65284 - DNA, 25 bp, Probe Sequence
gagtaataacaatgagagacggcag

SEQ ID NO: 65285 - DNA, 25 bp, Probe Sequence
tctgaagatagactggaattgtgtg

SEQ ID NO: 65286 - DNA, 25 bp, Probe Sequence
ttctgaagatagactggaattgtgt

SEQ ID NO: 65287 - DNA, 25 bp, Probe Sequence
cttctattcaggcttcaatggacag

SEQ ID NO: 65288 - DNA, 25 bp, Probe Sequence
gatagactggaattgtgtgtggatg

SEQ ID NO: 65289 - DNA, 25 bp, Probe Sequence
agatagactggaattgtgtgtggat

SEQ ID NO: 65290 - DNA, 25 bp, Probe Sequence
gaagatagactggaattgtgtgtgg

SEQ ID NO: 65291 - DNA, 25 bp, Probe Sequence
gagaagaagatccgaatcacaacta

SEQ ID NO: 65292 - DNA, 25 bp, Probe Sequence
agaagaagatccgaatcacaactaa

SEQ ID NO: 65293 - DNA, 25 bp, Probe Sequence
gatgctgagatgactaacacaactg

SEQ ID NO: 65294 - DNA, 25 bp, Probe Sequence
agatgctgagatgactaacacaact

SEQ ID NO: 65295 - DNA, 25 bp, Probe Sequence
gatggatagtcaagatgctgagatg

SEQ ID NO: 65296 - DNA, 25 bp, Probe Sequence
agatggatagtcaagatgctgagat

SEQ ID NO: 65297 - DNA, 25 bp, Probe Sequence
tcttctattcaggcttcaatggaca

SEQ ID NO: 65298 - DNA, 25 bp, Probe Sequence
aagagatggatagtcaagatgctga

SEQ ID NO: 65299 - DNA, 25 bp, Probe Sequence
cctatcaacaataaccacacttcct

SEQ ID NO: 65300 - DNA, 25 bp, Probe Sequence
tcctatcaacaataaccacacttcc

SEQ ID NO: 65301 - DNA, 25 bp, Probe Sequence
ccgtcttccaagttaccaatcatat

SEQ ID NO: 65302 - DNA, 25 bp, Probe Sequence
tattccgtcttccaagttaccaatc

SEQ ID NO: 65303 - DNA, 25 bp, Probe Sequence
gtattccgtcttccaagttaccaat

SEQ ID NO: 65304 - DNA, 25 bp, Probe Sequence
ctatcaacaataaccacacttcctt

SEQ ID NO: 65305 - DNA, 25 bp, Probe Sequence
ttcctatcaacaataaccacacttc

SEQ ID NO: 65306 - DNA, 25 bp, Probe Sequence
aagtgtattccgtcttccaagttac

SEQ ID NO: 65307 - DNA, 25 bp, Probe Sequence
caagtgtattccgtcttccaagtta

SEQ ID NO: 65308 - DNA, 25 bp, Probe Sequence
cgtcttccaagttaccaatcatata

SEQ ID NO: 65309 - DNA, 25 bp, Probe Sequence
tccgtcttccaagttaccaatcata

SEQ ID NO: 65310 - DNA, 25 bp, Probe Sequence
attcctatcaacaataaccacactt

SEQ ID NO: 65311 - DNA, 25 bp, Probe Sequence
aattcctatcaacaataaccacact

SEQ ID NO: 65312 - DNA, 25 bp, Probe Sequence
tgtattccgtcttccaagttaccaa

SEQ ID NO: 65313 - DNA, 25 bp, Probe Sequence
cagaatccttgctcctgaatatctt

SEQ ID NO: 65314 - DNA, 25 bp, Probe Sequence
ttccgtcttccaagttaccaatcat

SEQ ID NO: 65315 - DNA, 25 bp, Probe Sequence
attccgtcttccaagttaccaatca

SEQ ID NO: 65316 - DNA, 25 bp, Probe Sequence
agtgtattccgtcttccaagttacc

SEQ ID NO: 65317 - DNA, 25 bp, Probe Sequence
tcaagtgtattccgtcttccaagtt

SEQ ID NO: 65318 - DNA, 25 bp, Probe Sequence
tctcaagtgtattccgtcttccaag

SEQ ID NO: 65319 - DNA, 25 bp, Probe Sequence
ctctcaagtgtattccgtcttccaa

SEQ ID NO: 65320 - DNA, 25 bp, Probe Sequence
gtgtattccgtcttccaagttacca

SEQ ID NO: 65321 - DNA, 25 bp, Probe Sequence
ctctctcaagtgtattccgtcttcc

SEQ ID NO: 65322 - DNA, 25 bp, Probe Sequence
cctctctcaagtgtattccgtcttc

SEQ ID NO: 65323 - DNA, 25 bp, Probe Sequence
gaatcagatcctaagccatagacag

SEQ ID NO: 65324 - DNA, 25 bp, Probe Sequence
tgttcttcttagtaccatccatgaa

SEQ ID NO: 65325 - DNA, 25 bp, Probe Sequence
ttcatgttcttcttagtaccatcca

SEQ ID NO: 65326 - DNA, 25 bp, Probe Sequence
atgttcttcttagtaccatccatga

SEQ ID NO: 65327 - DNA, 25 bp, Probe Sequence
tcatgttcttcttagtaccatccat

SEQ ID NO: 65328 - DNA, 25 bp, Probe Sequence
tcttagtaccatccatgaacttcag

SEQ ID NO: 65329 - DNA, 25 bp, Probe Sequence
ttcttagtaccatccatgaacttca

SEQ ID NO: 65330 - DNA, 25 bp, Probe Sequence
gatcggagaattaatctgctagtga

SEQ ID NO: 65331 - DNA, 25 bp, Probe Sequence
cggagaattaatctgctagtgaaga

SEQ ID NO: 65332 - DNA, 25 bp, Probe Sequence
tcggagaattaatctgctagtgaag

SEQ ID NO: 65333 - DNA, 25 bp, Probe Sequence
gttgaagataagctggaattgagac

SEQ ID NO: 65334 - DNA, 25 bp, Probe Sequence
tgatcggagaattaatctgctagtg

SEQ ID NO: 65335 - DNA, 25 bp, Probe Sequence
gtgatcggagaattaatctgctagt

SEQ ID NO: 65336 - DNA, 25 bp, Probe Sequence
tgttgaagataagctggaattgaga

SEQ ID NO: 65337 - DNA, 25 bp, Probe Sequence
gtgttgaagataagctggaattgag

SEQ ID NO: 65338 - DNA, 25 bp, Probe Sequence
aagtgttgaagataagctggaattg

SEQ ID NO: 65339 - DNA, 25 bp, Probe Sequence
atcggagaattaatctgctagtgaa

SEQ ID NO: 65340 - DNA, 25 bp, Probe Sequence
tcttcttagtaccatccatgaactt

SEQ ID NO: 65341 - DNA, 25 bp, Probe Sequence
ttcttcttagtaccatccatgaact

SEQ ID NO: 65342 - DNA, 25 bp, Probe Sequence
agtgttgaagataagctggaattga

SEQ ID NO: 65343 - DNA, 25 bp, Probe Sequence
cttcttagtaccatccatgaacttc

SEQ ID NO: 65344 - DNA, 25 bp, Probe Sequence
ggtgatcggagaattaatctgctag

SEQ ID NO: 65345 - DNA, 25 bp, Probe Sequence
cttagtaccatccatgaacttcagc

SEQ ID NO: 65346 - DNA, 25 bp, Probe Sequence
aggtgatcggagaattaatctgcta

SEQ ID NO: 65347 - DNA, 25 bp, Probe Sequence
atgtgaactgtaactgacaagatga

SEQ ID NO: 65348 - DNA, 25 bp, Probe Sequence
tgtgaactgtaactgacaagatgaa

SEQ ID NO: 65349 - DNA, 25 bp, Probe Sequence
gtgaactgtaactgacaagatgaat

SEQ ID NO: 65350 - DNA, 25 bp, Probe Sequence
aacatgccttatgataacaccgatt

SEQ ID NO: 65351 - DNA, 25 bp, Probe Sequence
tatgtgaactgtaactgacaagatg

SEQ ID NO: 65352 - DNA, 25 bp, Probe Sequence
tgaactgtaactgacaagatgaatt

SEQ ID NO: 65353 - DNA, 25 bp, Probe Sequence
gttcaacatgccttatgataacacc

SEQ ID NO: 65354 - DNA, 25 bp, Probe Sequence
agactgttcaacatgccttatgata

SEQ ID NO: 65355 - DNA, 25 bp, Probe Sequence
caacatgccttatgataacaccgat

SEQ ID NO: 65356 - DNA, 25 bp, Probe Sequence
actgttcaacatgccttatgataac

SEQ ID NO: 65357 - DNA, 25 bp, Probe Sequence
gactgttcaacatgccttatgataa

SEQ ID NO: 65358 - DNA, 25 bp, Probe Sequence
aagactgttcaacatgccttatgat

SEQ ID NO: 65359 - DNA, 25 bp, Probe Sequence
atatgtgaactgtaactgacaagat

SEQ ID NO: 65360 - DNA, 25 bp, Probe Sequence
ttcaacatgccttatgataacaccg

SEQ ID NO: 65361 - DNA, 25 bp, Probe Sequence
aatacgactgtcatcttcccatttc

SEQ ID NO: 65362 - DNA, 25 bp, Probe Sequence
tatatgtgaactgtaactgacaaga

SEQ ID NO: 65363 - DNA, 25 bp, Probe Sequence
tgtaactgacaagatgaattactca

SEQ ID NO: 65364 - DNA, 25 bp, Probe Sequence
actgtaactgacaagatgaattact

SEQ ID NO: 65365 - DNA, 25 bp, Probe Sequence
tcaacatgccttatgataacaccga

SEQ ID NO: 65366 - DNA, 25 bp, Probe Sequence
atagttatgtttcactgatgctgag

SEQ ID NO: 65367 - DNA, 25 bp, Probe Sequence
gaactgtaactgacaagatgaatta

SEQ ID NO: 65368 - DNA, 25 bp, Probe Sequence
atgccttatgataacaccgatttgt

SEQ ID NO: 65369 - DNA, 25 bp, Probe Sequence
atacgactgtcatcttcccatttca

SEQ ID NO: 65370 - DNA, 25 bp, Probe Sequence
ccgatttgtgtctattattggtgac

SEQ ID NO: 65371 - DNA, 25 bp, Probe Sequence
gacttgaagaactgaccaatatccg

SEQ ID NO: 65372 - DNA, 25 bp, Probe Sequence
ggacttgaagaactgaccaatatcc

SEQ ID NO: 65373 - DNA, 25 bp, Probe Sequence
ttgaagaactgaccaatatccgcaa

SEQ ID NO: 65374 - DNA, 25 bp, Probe Sequence
ttattcgctcacaataatacacagc

SEQ ID NO: 65375 - DNA, 25 bp, Probe Sequence
ctgttagcgtctctctgtttattcg

SEQ ID NO: 65376 - DNA, 25 bp, Probe Sequence
tggagagactgaagaaggacttgag

SEQ ID NO: 65377 - DNA, 25 bp, Probe Sequence
gggacttgaagaactgaccaatatc

SEQ ID NO: 65378 - DNA, 25 bp, Probe Sequence
tgaagaactgaccaatatccgcaac

SEQ ID NO: 65379 - DNA, 25 bp, Probe Sequence
tctctctgtttattcgctcacaata

SEQ ID NO: 65380 - DNA, 25 bp, Probe Sequence
cttgaagaactgaccaatatccgca

SEQ ID NO: 65381 - DNA, 25 bp, Probe Sequence
acttgaagaactgaccaatatccgc

SEQ ID NO: 65382 - DNA, 25 bp, Probe Sequence
agaatgtaaacagcagcagatgaac

SEQ ID NO: 65383 - DNA, 25 bp, Probe Sequence
cagaatgtaaacagcagcagatgaa

SEQ ID NO: 65384 - DNA, 25 bp, Probe Sequence
tattcgctcacaataatacacagcc

SEQ ID NO: 65385 - DNA, 25 bp, Probe Sequence
gtggagagactgaagaaggacttga

SEQ ID NO: 65386 - DNA, 25 bp, Probe Sequence
gtctctctgtttattcgctcacaat

SEQ ID NO: 65387 - DNA, 25 bp, Probe Sequence
gaaacttctataccctggtcacctc

SEQ ID NO: 65388 - DNA, 25 bp, Probe Sequence
atcaccctcattgttctgtcatctg

SEQ ID NO: 65389 - DNA, 25 bp, Probe Sequence
catcaccctcattgttctgtcatct

SEQ ID NO: 65390 - DNA, 25 bp, Probe Sequence
atgtaaacagcagcagatgaacaaa

SEQ ID NO: 65391 - DNA, 25 bp, Probe Sequence
aatgtaaacagcagcagatgaacaa

SEQ ID NO: 65392 - DNA, 25 bp, Probe Sequence
ggagagactgaagaaggacttgagg

SEQ ID NO: 65393 - DNA, 25 bp, Probe Sequence
gaatgtaaacagcagcagatgaaca

SEQ ID NO: 65394 - DNA, 25 bp, Probe Sequence
ccaccagagaagacagaagatgagg

SEQ ID NO: 65395 - DNA, 25 bp, Probe Sequence
tggattatgagaaactgaagaagga

SEQ ID NO: 65396 - DNA, 25 bp, Probe Sequence
ttggattatgagaaactgaagaagg

SEQ ID NO: 65397 - DNA, 25 bp, Probe Sequence
gaaattgaaggatgtcccattactg

SEQ ID NO: 65398 - DNA, 25 bp, Probe Sequence
tgaaattgaaggatgtcccattact

SEQ ID NO: 65399 - DNA, 25 bp, Probe Sequence
gtgaaattgaaggatgtcccattac

SEQ ID NO: 65400 - DNA, 25 bp, Probe Sequence
tgagaaactgaagaaggatttgatt

SEQ ID NO: 65401 - DNA, 25 bp, Probe Sequence
tccttggattatgagaaactgaaga

SEQ ID NO: 65402 - DNA, 25 bp, Probe Sequence
ccttggattatgagaaactgaagaa

SEQ ID NO: 65403 - DNA, 25 bp, Probe Sequence
atgagaaactgaagaaggatttgat

SEQ ID NO: 65404 - DNA, 25 bp, Probe Sequence
ggattatgagaaactgaagaaggat

SEQ ID NO: 65405 - DNA, 25 bp, Probe Sequence
cctccttggattatgagaaactgaa

SEQ ID NO: 65406 - DNA, 25 bp, Probe Sequence
cgtgaaattgaaggatgtcccatta

SEQ ID NO: 65407 - DNA, 25 bp, Probe Sequence
ctccttggattatgagaaactgaag

SEQ ID NO: 65408 - DNA, 25 bp, Probe Sequence
aaattgaaggatgtcccattactgc

SEQ ID NO: 65409 - DNA, 25 bp, Probe Sequence
tatgagaaactgaagaaggatttga

SEQ ID NO: 65410 - DNA, 25 bp, Probe Sequence
gagaaactgaagaaggatttgattt

SEQ ID NO: 65411 - DNA, 25 bp, Probe Sequence
cttggattatgagaaactgaagaag

SEQ ID NO: 65412 - DNA, 25 bp, Probe Sequence
ccctccttggattatgagaaactga

SEQ ID NO: 65413 - DNA, 25 bp, Probe Sequence
cattactgccctccttggattatga

SEQ ID NO: 65414 - DNA, 25 bp, Probe Sequence
attactgccctccttggattatgag

SEQ ID NO: 65415 - DNA, 25 bp, Probe Sequence
ttatgagaaactgaagaaggatttg

SEQ ID NO: 65416 - DNA, 25 bp, Probe Sequence
gattatgagaaactgaagaaggatt

SEQ ID NO: 65417 - DNA, 25 bp, Probe Sequence
tactgccctccttggattatgagaa

SEQ ID NO: 65418 - DNA, 25 bp, Probe Sequence
ttactgccctccttggattatgaga

SEQ ID NO: 65419 - DNA, 25 bp, Probe Sequence
agttgatgtggtgtgagtgatatac

SEQ ID NO: 65420 - DNA, 25 bp, Probe Sequence
gatgtggtgtgagtgatatacttct

SEQ ID NO: 65421 - DNA, 25 bp, Probe Sequence
tgatgtggtgtgagtgatatacttc

SEQ ID NO: 65422 - DNA, 25 bp, Probe Sequence
ttgatgtggtgtgagtgatatactt

SEQ ID NO: 65423 - DNA, 25 bp, Probe Sequence
gttgatgtggtgtgagtgatatact

SEQ ID NO: 65424 - DNA, 25 bp, Probe Sequence
tggtgtgagtgatatacttctatgt

SEQ ID NO: 65425 - DNA, 25 bp, Probe Sequence
tgtggtgtgagtgatatacttctat

SEQ ID NO: 65426 - DNA, 25 bp, Probe Sequence
atgtggtgtgagtgatatacttcta

SEQ ID NO: 65427 - DNA, 25 bp, Probe Sequence
gtggtgtgagtgatatacttctatg

SEQ ID NO: 65428 - DNA, 25 bp, Probe Sequence
ggtgtgagtgatatacttctatgtt

SEQ ID NO: 65429 - DNA, 25 bp, Probe Sequence
tgaaagtactgaaatcccaccttat

SEQ ID NO: 65430 - DNA, 25 bp, Probe Sequence
gtgtgagtgatatacttctatgttt

SEQ ID NO: 65431 - DNA, 25 bp, Probe Sequence
gtgaaagtactgaaatcccacctta

SEQ ID NO: 65432 - DNA, 25 bp, Probe Sequence
tgtgagtgatatacttctatgtttt

SEQ ID NO: 65433 - DNA, 25 bp, Probe Sequence
tgagttacagaaggcataagtagtt

SEQ ID NO: 65434 - DNA, 25 bp, Probe Sequence
ttgagttacagaaggcataagtagt

SEQ ID NO: 65435 - DNA, 25 bp, Probe Sequence
actgaagtaatgtcctatgttgagc

SEQ ID NO: 65436 - DNA, 25 bp, Probe Sequence
tctaaccagtcctatgaatgtatcc

SEQ ID NO: 65437 - DNA, 25 bp, Probe Sequence
gcttgagttacagaaggcataagta

SEQ ID NO: 65438 - DNA, 25 bp, Probe Sequence
cttgagttacagaaggcataagtag

SEQ ID NO: 65439 - DNA, 25 bp, Probe Sequence
gagaagagtgcttgagttacagaag

SEQ ID NO: 65440 - DNA, 25 bp, Probe Sequence
agagaagagtgcttgagttacagaa

SEQ ID NO: 65441 - DNA, 25 bp, Probe Sequence
aagagaagagtgcttgagttacaga

SEQ ID NO: 65442 - DNA, 25 bp, Probe Sequence
actatctaaccagtcctatgaatgt

SEQ ID NO: 65443 - DNA, 25 bp, Probe Sequence
agactgaagtaatgtcctatgttga

SEQ ID NO: 65444 - DNA, 25 bp, Probe Sequence
gactgaagtaatgtcctatgttgag

SEQ ID NO: 65445 - DNA, 25 bp, Probe Sequence
agaagagtgcttgagttacagaagg

SEQ ID NO: 65446 - DNA, 25 bp, Probe Sequence
aatgtcctatgttgagctggttatt

SEQ ID NO: 65447 - DNA, 25 bp, Probe Sequence
gtaatgtcctatgttgagctggtta

SEQ ID NO: 65448 - DNA, 25 bp, Probe Sequence
ctgaagtaatgtcctatgttgagct

SEQ ID NO: 65449 - DNA, 25 bp, Probe Sequence
taatgtcctatgttgagctggttat

SEQ ID NO: 65450 - DNA, 25 bp, Probe Sequence
tgaagtaatgtcctatgttgagctg

SEQ ID NO: 65451 - DNA, 25 bp, Probe Sequence
aagactgaagtaatgtcctatgttg

SEQ ID NO: 65452 - DNA, 25 bp, Probe Sequence
atctaaccagtcctatgaatgtatc

SEQ ID NO: 65453 - DNA, 25 bp, Probe Sequence
gaagtaatgtcctatgttgagctgg

SEQ ID NO: 65454 - DNA, 25 bp, Probe Sequence
accagtcctatgaatgtatccctaa

SEQ ID NO: 65455 - DNA, 25 bp, Probe Sequence
aaccagtcctatgaatgtatcccta

SEQ ID NO: 65456 - DNA, 25 bp, Probe Sequence
taaccagtcctatgaatgtatccct

SEQ ID NO: 65457 - DNA, 25 bp, Probe Sequence
caccttcaactgtctgtcttagaat

SEQ ID NO: 65458 - DNA, 25 bp, Probe Sequence
accttcaactgtctgtcttagaatt

SEQ ID NO: 65459 - DNA, 25 bp, Probe Sequence
tcaccttcaactgtctgtcttagaa

SEQ ID NO: 65460 - DNA, 25 bp, Probe Sequence
ctcaccttcaactgtctgtcttaga

SEQ ID NO: 65461 - DNA, 25 bp, Probe Sequence
cctcaccttcaactgtctgtcttag

SEQ ID NO: 65462 - DNA, 25 bp, Probe Sequence
ccacctctctacctaagttccttcc

SEQ ID NO: 65463 - DNA, 25 bp, Probe Sequence
tttcacttcccacctctctacctaa

SEQ ID NO: 65464 - DNA, 25 bp, Probe Sequence
cttcaactgtctgtcttagaattcc

SEQ ID NO: 65465 - DNA, 25 bp, Probe Sequence
ccttcaactgtctgtcttagaattc

SEQ ID NO: 65466 - DNA, 25 bp, Probe Sequence
ctttcacttcccacctctctaccta

SEQ ID NO: 65467 - DNA, 25 bp, Probe Sequence
tatgctttcacttcccacctctcta

SEQ ID NO: 65468 - DNA, 25 bp, Probe Sequence
ttcacttcccacctctctacctaag

SEQ ID NO: 65469 - DNA, 25 bp, Probe Sequence
gcctcaccttcaactgtctgtctta

SEQ ID NO: 65470 - DNA, 25 bp, Probe Sequence
cctctctacctaagttccttcccag

SEQ ID NO: 65471 - DNA, 25 bp, Probe Sequence
cacctctctacctaagttccttccc

SEQ ID NO: 65472 - DNA, 25 bp, Probe Sequence
cccacctctctacctaagttccttc

SEQ ID NO: 65473 - DNA, 25 bp, Probe Sequence
cttcccacctctctacctaagttcc

SEQ ID NO: 65474 - DNA, 25 bp, Probe Sequence
ttcaactgtctgtcttagaattccc

SEQ ID NO: 65475 - DNA, 25 bp, Probe Sequence
ttcccacctctctacctaagttcct

SEQ ID NO: 65476 - DNA, 25 bp, Probe Sequence
ctatgctttcacttcccacctctct

SEQ ID NO: 65477 - DNA, 25 bp, Probe Sequence
ctctctacctaagttccttcccagc

SEQ ID NO: 65478 - DNA, 25 bp, Probe Sequence
acctctctacctaagttccttccca

SEQ ID NO: 65479 - DNA, 25 bp, Probe Sequence
tcccacctctctacctaagttcctt

SEQ ID NO: 65480 - DNA, 25 bp, Probe Sequence
agtgtccttcctctgtcctctcatc

SEQ ID NO: 65481 - DNA, 25 bp, Probe Sequence
tcgttatcgttattgtactgtcact

SEQ ID NO: 65482 - DNA, 25 bp, Probe Sequence
aatgccttcgttatcgttattgtac

SEQ ID NO: 65483 - DNA, 25 bp, Probe Sequence
ccttcgttatcgttattgtactgtc

SEQ ID NO: 65484 - DNA, 25 bp, Probe Sequence
atgccttcgttatcgttattgtact

SEQ ID NO: 65485 - DNA, 25 bp, Probe Sequence
ggtcaatgccttcgttatcgttatt

SEQ ID NO: 65486 - DNA, 25 bp, Probe Sequence
cgttatcgttattgtactgtcactt

SEQ ID NO: 65487 - DNA, 25 bp, Probe Sequence
ttcgttatcgttattgtactgtcac

SEQ ID NO: 65488 - DNA, 25 bp, Probe Sequence
cttcgttatcgttattgtactgtca

SEQ ID NO: 65489 - DNA, 25 bp, Probe Sequence
gccttcgttatcgttattgtactgt

SEQ ID NO: 65490 - DNA, 25 bp, Probe Sequence
tgccttcgttatcgttattgtactg

SEQ ID NO: 65491 - DNA, 25 bp, Probe Sequence
atcatgtcagccttcagaagagaat

SEQ ID NO: 65492 - DNA, 25 bp, Probe Sequence
ccagtatcccagtcatttcttcaaa

SEQ ID NO: 65493 - DNA, 25 bp, Probe Sequence
acctcaagtgaccaaatgctattaa

SEQ ID NO: 65494 - DNA, 25 bp, Probe Sequence
gacaagagcaagaaggacatcagtt

SEQ ID NO: 65495 - DNA, 25 bp, Probe Sequence
atagtgtccagccttgtatatttct

SEQ ID NO: 65496 - DNA, 25 bp, Probe Sequence
tttgtttactgaaagagagaaaggg

SEQ ID NO: 65497 - DNA, 25 bp, Probe Sequence
gatagtgtccagccttgtatatttc

SEQ ID NO: 65498 - DNA, 25 bp, Probe Sequence
caatgccttcgttatcgttattgta

SEQ ID NO: 65499 - DNA, 25 bp, Probe Sequence
tcatgtcagccttcagaagagaatc

SEQ ID NO: 65500 - DNA, 25 bp, Probe Sequence
gatcatgtcagccttcagaagagaa

SEQ ID NO: 65501 - DNA, 25 bp, Probe Sequence
ttatctggatctctgtggttccttc

SEQ ID NO: 65502 - DNA, 25 bp, Probe Sequence
tgaggtagtagtcaaggatcaggag

SEQ ID NO: 65503 - DNA, 25 bp, Probe Sequence
gtcaatgccttcgttatcgttattg

SEQ ID NO: 65504 - DNA, 25 bp, Probe Sequence
tccagtatcccagtcatttcttcaa

SEQ ID NO: 65505 - DNA, 25 bp, Probe Sequence
cagatcaagtccagatgccaagatc

SEQ ID NO: 65506 - DNA, 25 bp, Probe Sequence
atcaagtccagatgccaagatcctg

SEQ ID NO: 65507 - DNA, 25 bp, Probe Sequence
aatagcaaccataactgccactgtg

SEQ ID NO: 65508 - DNA, 25 bp, Probe Sequence
caatagcaaccataactgccactgt

SEQ ID NO: 65509 - DNA, 25 bp, Probe Sequence
gatcaagtccagatgccaagatcct

SEQ ID NO: 65510 - DNA, 25 bp, Probe Sequence
agatcaagtccagatgccaagatcc

SEQ ID NO: 65511 - DNA, 25 bp, Probe Sequence
gcaatagcaaccataactgccactg

SEQ ID NO: 65512 - DNA, 25 bp, Probe Sequence
gcagatcaagtccagatgccaagat

SEQ ID NO: 65513 - DNA, 25 bp, Probe Sequence
aagcagatcaagtccagatgccaag

SEQ ID NO: 65514 - DNA, 25 bp, Probe Sequence
tgcaatagcaaccataactgccact

SEQ ID NO: 65515 - DNA, 25 bp, Probe Sequence
gggtttgcaatagcaaccataactg

SEQ ID NO: 65516 - DNA, 25 bp, Probe Sequence
ttgcaatagcaaccataactgccac

SEQ ID NO: 65517 - DNA, 25 bp, Probe Sequence
gtttgcaatagcaaccataactgcc

SEQ ID NO: 65518 - DNA, 25 bp, Probe Sequence
ggtttgcaatagcaaccataactgc

SEQ ID NO: 65519 - DNA, 25 bp, Probe Sequence
tttgcaatagcaaccataactgcca

SEQ ID NO: 65520 - DNA, 25 bp, Probe Sequence
ggggtttgcaatagcaaccataact

SEQ ID NO: 65521 - DNA, 25 bp, Probe Sequence
cggggtttgcaatagcaaccataac

SEQ ID NO: 65522 - DNA, 25 bp, Probe Sequence
ctctggcttatagtctcttcattct

SEQ ID NO: 65523 - DNA, 25 bp, Probe Sequence
tctctggcttatagtctcttcattc

SEQ ID NO: 65524 - DNA, 25 bp, Probe Sequence
ctctctggcttatagtctcttcatt

SEQ ID NO: 65525 - DNA, 25 bp, Probe Sequence
cctctctggcttatagtctcttcat

SEQ ID NO: 65526 - DNA, 25 bp, Probe Sequence
aacctctctggcttatagtctcttc

SEQ ID NO: 65527 - DNA, 25 bp, Probe Sequence
cactggagacaagcaatctgaataa

SEQ ID NO: 65528 - DNA, 25 bp, Probe Sequence
ctcttcattctattagacaagcacg

SEQ ID NO: 65529 - DNA, 25 bp, Probe Sequence
tctggcttatagtctcttcattcta

SEQ ID NO: 65530 - DNA, 25 bp, Probe Sequence
tgtatctgtaaccacaatcacacat

SEQ ID NO: 65531 - DNA, 25 bp, Probe Sequence
atgtatctgtaaccacaatcacaca

SEQ ID NO: 65532 - DNA, 25 bp, Probe Sequence
acctctctggcttatagtctcttca

SEQ ID NO: 65533 - DNA, 25 bp, Probe Sequence
ctatgtgactcatgcttctggataa

SEQ ID NO: 65534 - DNA, 25 bp, Probe Sequence
atgtactatgtgactcatgcttctg

SEQ ID NO: 65535 - DNA, 25 bp, Probe Sequence
tctcttcattctattagacaagcac

SEQ ID NO: 65536 - DNA, 25 bp, Probe Sequence
tatgtactatgtgactcatgcttct

SEQ ID NO: 65537 - DNA, 25 bp, Probe Sequence
gccaggagaatgaagtagaagtgaa

SEQ ID NO: 65538 - DNA, 25 bp, Probe Sequence
actatgtgactcatgcttctggata

SEQ ID NO: 65539 - DNA, 25 bp, Probe Sequence
tactatgtgactcatgcttctggat

SEQ ID NO: 65540 - DNA, 25 bp, Probe Sequence
gtatctgtaaccacaatcacacata

SEQ ID NO: 65541 - DNA, 25 bp, Probe Sequence
tatgtatctgtaaccacaatcacac

SEQ ID NO: 65542 - DNA, 25 bp, Probe Sequence
atctgtaaccacaatcacacatatt

SEQ ID NO: 65543 - DNA, 25 bp, Probe Sequence
ttatgtactatgtgactcatgcttc

SEQ ID NO: 65544 - DNA, 25 bp, Probe Sequence
gtactatgtgactcatgcttctgga

SEQ ID NO: 65545 - DNA, 25 bp, Probe Sequence
tctgtaaccacaatcacacatatta

SEQ ID NO: 65546 - DNA, 25 bp, Probe Sequence
atactggaacctgtaacagaattaa

SEQ ID NO: 65547 - DNA, 25 bp, Probe Sequence
aatactggaacctgtaacagaatta

SEQ ID NO: 65548 - DNA, 25 bp, Probe Sequence
ctggaacctgtaacagaattaaagg

SEQ ID NO: 65549 - DNA, 25 bp, Probe Sequence
caaatactggaacctgtaacagaat

SEQ ID NO: 65550 - DNA, 25 bp, Probe Sequence
gaattaaaggtgaatgttctgagaa

SEQ ID NO: 65551 - DNA, 25 bp, Probe Sequence
actggaacctgtaacagaattaaag

SEQ ID NO: 65552 - DNA, 25 bp, Probe Sequence
gcaaatactggaacctgtaacagaa

SEQ ID NO: 65553 - DNA, 25 bp, Probe Sequence
aaatactggaacctgtaacagaatt

SEQ ID NO: 65554 - DNA, 25 bp, Probe Sequence
aattaaaggtgaatgttctgagaaa

SEQ ID NO: 65555 - DNA, 25 bp, Probe Sequence
cctgtaacagaattaaaggtgaatg

SEQ ID NO: 65556 - DNA, 25 bp, Probe Sequence
tactggaacctgtaacagaattaaa

SEQ ID NO: 65557 - DNA, 25 bp, Probe Sequence
agaattaaaggtgaatgttctgaga

SEQ ID NO: 65558 - DNA, 25 bp, Probe Sequence
ctgtaacagaattaaaggtgaatgt

SEQ ID NO: 65559 - DNA, 25 bp, Probe Sequence
cgcaaatactggaacctgtaacaga

SEQ ID NO: 65560 - DNA, 25 bp, Probe Sequence
attaaaggtgaatgttctgagaaaa

SEQ ID NO: 65561 - DNA, 25 bp, Probe Sequence
tccaagctatactgtgcaggacatg

SEQ ID NO: 65562 - DNA, 25 bp, Probe Sequence
tgtaacagaattaaaggtgaatgtt

SEQ ID NO: 65563 - DNA, 25 bp, Probe Sequence
cagaggtccaagctatactgtgcag

SEQ ID NO: 65564 - DNA, 25 bp, Probe Sequence
ggaacctgtaacagaattaaaggtg

SEQ ID NO: 65565 - DNA, 25 bp, Probe Sequence
tggaacctgtaacagaattaaaggt

SEQ ID NO: 65566 - DNA, 25 bp, Probe Sequence
gtaacagaattaaaggtgaatgttc

SEQ ID NO: 65567 - DNA, 25 bp, Probe Sequence
gaacctgtaacagaattaaaggtga

SEQ ID NO: 65568 - DNA, 25 bp, Probe Sequence
taacagaattaaaggtgaatgttct

SEQ ID NO: 65569 - DNA, 25 bp, Probe Sequence
aacctgtaacagaattaaaggtgaa

SEQ ID NO: 65570 - DNA, 25 bp, Probe Sequence
attcttctcctgttggttattctga

SEQ ID NO: 65571 - DNA, 25 bp, Probe Sequence
cattcttctcctgttggttattctg

SEQ ID NO: 65572 - DNA, 25 bp, Probe Sequence
ttcttctcctgttggttattctgag

SEQ ID NO: 65573 - DNA, 25 bp, Probe Sequence
cttctcctgttggttattctgagtc

SEQ ID NO: 65574 - DNA, 25 bp, Probe Sequence
ttctcctgttggttattctgagtct

SEQ ID NO: 65575 - DNA, 25 bp, Probe Sequence
tcttctcctgttggttattctgagt

SEQ ID NO: 65576 - DNA, 25 bp, Probe Sequence
tcctgttggttattctgagtctgac

SEQ ID NO: 65577 - DNA, 25 bp, Probe Sequence
ctgttggttattctgagtctgacac

SEQ ID NO: 65578 - DNA, 25 bp, Probe Sequence
ctcctgttggttattctgagtctga

SEQ ID NO: 65579 - DNA, 25 bp, Probe Sequence
tctcctgttggttattctgagtctg

SEQ ID NO: 65580 - DNA, 25 bp, Probe Sequence
gttggttattctgagtctgacacag

SEQ ID NO: 65581 - DNA, 25 bp, Probe Sequence
tgttggttattctgagtctgacaca

SEQ ID NO: 65582 - DNA, 25 bp, Probe Sequence
ctgttggagaactgagaatgaggtt

SEQ ID NO: 65583 - DNA, 25 bp, Probe Sequence
ccattcttctcctgttggttattct

SEQ ID NO: 65584 - DNA, 25 bp, Probe Sequence
gcctttggatttcatagtttctctg

SEQ ID NO: 65585 - DNA, 25 bp, Probe Sequence
ctgcctttggatttcatagtttctc

SEQ ID NO: 65586 - DNA, 25 bp, Probe Sequence
tgcctttggatttcatagtttctct

SEQ ID NO: 65587 - DNA, 25 bp, Probe Sequence
ttatttctctgtagccctatgatgg

SEQ ID NO: 65588 - DNA, 25 bp, Probe Sequence
gccatttatttctctgtagccctat

SEQ ID NO: 65589 - DNA, 25 bp, Probe Sequence
cctgttggttattctgagtctgaca

SEQ ID NO: 65590 - DNA, 25 bp, Probe Sequence
tttcatagtttctctgtcagtagca

SEQ ID NO: 65591 - DNA, 25 bp, Probe Sequence
tggatttcatagtttctctgtcagt

SEQ ID NO: 65592 - DNA, 25 bp, Probe Sequence
cctttggatttcatagtttctctgt

SEQ ID NO: 65593 - DNA, 25 bp, Probe Sequence
ttcatagtttctctgtcagtagcat

SEQ ID NO: 65594 - DNA, 25 bp, Probe Sequence
gagaggattaggtacttaggagcaa

SEQ ID NO: 65595 - DNA, 25 bp, Probe Sequence
aaggagaggattaggtacttaggag

SEQ ID NO: 65596 - DNA, 25 bp, Probe Sequence
tcaattctgtatgaacacctggaag

SEQ ID NO: 65597 - DNA, 25 bp, Probe Sequence
ttatagcctgtattcacaattctgc

SEQ ID NO: 65598 - DNA, 25 bp, Probe Sequence
tatagcctgtattcacaattctgcg

SEQ ID NO: 65599 - DNA, 25 bp, Probe Sequence
cagaacacagaggaataatcacctg

SEQ ID NO: 65600 - DNA, 25 bp, Probe Sequence
aggagaggattaggtacttaggagc

SEQ ID NO: 65601 - DNA, 25 bp, Probe Sequence
taaggagaggattaggtacttagga

SEQ ID NO: 65602 - DNA, 25 bp, Probe Sequence
gtaaggagaggattaggtacttagg

SEQ ID NO: 65603 - DNA, 25 bp, Probe Sequence
aagatgcagaacacagaggaataat

SEQ ID NO: 65604 - DNA, 25 bp, Probe Sequence
ggagaggattaggtacttaggagca

SEQ ID NO: 65605 - DNA, 25 bp, Probe Sequence
ctaagggattctaaaggtgttgtca

SEQ ID NO: 65606 - DNA, 25 bp, Probe Sequence
catttcaggatttggtctctctcta

SEQ ID NO: 65607 - DNA, 25 bp, Probe Sequence
caattctgtatgaacacctggaagc

SEQ ID NO: 65608 - DNA, 25 bp, Probe Sequence
tgctttattcatcctccatctcaaa

SEQ ID NO: 65609 - DNA, 25 bp, Probe Sequence
ggagtaaggagaggattaggtactt

SEQ ID NO: 65610 - DNA, 25 bp, Probe Sequence
tcttgctttattcatcctccatctc

SEQ ID NO: 65611 - DNA, 25 bp, Probe Sequence
cttgctttattcatcctccatctca

SEQ ID NO: 65612 - DNA, 25 bp, Probe Sequence
gtcttgctttattcatcctccatct

SEQ ID NO: 65613 - DNA, 25 bp, Probe Sequence
agtcttgctttattcatcctccatc

SEQ ID NO: 65614 - DNA, 25 bp, Probe Sequence
agatgcagaacacagaggaataatc

SEQ ID NO: 65615 - DNA, 25 bp, Probe Sequence
cagtcttgctttattcatcctccat

SEQ ID NO: 65616 - DNA, 25 bp, Probe Sequence
attgtaagatatgtataatgctggc

SEQ ID NO: 65617 - DNA, 25 bp, Probe Sequence
caagatgcagaacacagaggaataa

SEQ ID NO: 65618 - DNA, 25 bp, Probe Sequence
gcttagtgctttattacctgagttt

SEQ ID NO: 65619 - DNA, 25 bp, Probe Sequence
ccttagaagaaagagactgtagcaa

SEQ ID NO: 65620 - DNA, 25 bp, Probe Sequence
cccttagaagaaagagactgtagca

SEQ ID NO: 65621 - DNA, 25 bp, Probe Sequence
cttagaagaaagagactgtagcaat

SEQ ID NO: 65622 - DNA, 25 bp, Probe Sequence
tagaagaaagagactgtagcaatac

SEQ ID NO: 65623 - DNA, 25 bp, Probe Sequence
ttagaagaaagagactgtagcaata

SEQ ID NO: 65624 - DNA, 25 bp, Probe Sequence
agaagaaagagactgtagcaataca

SEQ ID NO: 65625 - DNA, 25 bp, Probe Sequence
gaagaaagagactgtagcaatacaa

SEQ ID NO: 65626 - DNA, 25 bp, Probe Sequence
aagaaagagactgtagcaatacaaa

SEQ ID NO: 65627 - DNA, 25 bp, Probe Sequence
taccaataaaaccactgtccagaaa

SEQ ID NO: 65628 - DNA, 25 bp, Probe Sequence
ttaccaataaaaccactgtccagaa

SEQ ID NO: 65629 - DNA, 25 bp, Probe Sequence
ttccccttagaagaaagagactgta

SEQ ID NO: 65630 - DNA, 25 bp, Probe Sequence
tccccttagaagaaagagactgtag

SEQ ID NO: 65631 - DNA, 25 bp, Probe Sequence
tctttaccaataaaaccactgtcca

SEQ ID NO: 65632 - DNA, 25 bp, Probe Sequence
accaataaaaccactgtccagaaaa

SEQ ID NO: 65633 - DNA, 25 bp, Probe Sequence
gccaatatgtcttatatctttacca

SEQ ID NO: 65634 - DNA, 25 bp, Probe Sequence
ctttaccaataaaaccactgtccag

SEQ ID NO: 65635 - DNA, 25 bp, Probe Sequence
tttaccaataaaaccactgtccaga

SEQ ID NO: 65636 - DNA, 25 bp, Probe Sequence
atctttaccaataaaaccactgtcc

SEQ ID NO: 65637 - DNA, 25 bp, Probe Sequence
agcttagtgctttattacctgagtt

SEQ ID NO: 65638 - DNA, 25 bp, Probe Sequence
agccaatatgtcttatatctttacc

SEQ ID NO: 65639 - DNA, 25 bp, Probe Sequence
ccccttagaagaaagagactgtagc

SEQ ID NO: 65640 - DNA, 25 bp, Probe Sequence
cttagtgctttattacctgagtttt

SEQ ID NO: 65641 - DNA, 25 bp, Probe Sequence
tatctttaccaataaaaccactgtc

SEQ ID NO: 65642 - DNA, 25 bp, Probe Sequence
gcttagtgctttattacctgagttt

SEQ ID NO: 65643 - DNA, 25 bp, Probe Sequence
ccttagaagaaagagactgtagcaa

SEQ ID NO: 65644 - DNA, 25 bp, Probe Sequence
cccttagaagaaagagactgtagca

SEQ ID NO: 65645 - DNA, 25 bp, Probe Sequence
cttagaagaaagagactgtagcaat

SEQ ID NO: 65646 - DNA, 25 bp, Probe Sequence
tagaagaaagagactgtagcaatac

SEQ ID NO: 65647 - DNA, 25 bp, Probe Sequence
ttagaagaaagagactgtagcaata

SEQ ID NO: 65648 - DNA, 25 bp, Probe Sequence
agaagaaagagactgtagcaataca

SEQ ID NO: 65649 - DNA, 25 bp, Probe Sequence
gaagaaagagactgtagcaatacaa

SEQ ID NO: 65650 - DNA, 25 bp, Probe Sequence
aagaaagagactgtagcaatacaaa

SEQ ID NO: 65651 - DNA, 25 bp, Probe Sequence
taccaataaaaccactgtccagaaa

SEQ ID NO: 65652 - DNA, 25 bp, Probe Sequence
ttaccaataaaaccactgtccagaa

SEQ ID NO: 65653 - DNA, 25 bp, Probe Sequence
ttccccttagaagaaagagactgta

SEQ ID NO: 65654 - DNA, 25 bp, Probe Sequence
tccccttagaagaaagagactgtag

SEQ ID NO: 65655 - DNA, 25 bp, Probe Sequence
tctttaccaataaaaccactgtcca

SEQ ID NO: 65656 - DNA, 25 bp, Probe Sequence
accaataaaaccactgtccagaaaa

SEQ ID NO: 65657 - DNA, 25 bp, Probe Sequence
gccaatatgtcttatatctttacca

SEQ ID NO: 65658 - DNA, 25 bp, Probe Sequence
ctttaccaataaaaccactgtccag

SEQ ID NO: 65659 - DNA, 25 bp, Probe Sequence
tttaccaataaaaccactgtccaga

SEQ ID NO: 65660 - DNA, 25 bp, Probe Sequence
atctttaccaataaaaccactgtcc

SEQ ID NO: 65661 - DNA, 25 bp, Probe Sequence
agcttagtgctttattacctgagtt

SEQ ID NO: 65662 - DNA, 25 bp, Probe Sequence
agccaatatgtcttatatctttacc

SEQ ID NO: 65663 - DNA, 25 bp, Probe Sequence
ccccttagaagaaagagactgtagc

SEQ ID NO: 65664 - DNA, 25 bp, Probe Sequence
cttagtgctttattacctgagtttt

SEQ ID NO: 65665 - DNA, 25 bp, Probe Sequence
tatctttaccaataaaaccactgtc

SEQ ID NO: 65666 - DNA, 25 bp, Probe Sequence
gatgccttgtaatctactgtccagc

SEQ ID NO: 65667 - DNA, 25 bp, Probe Sequence
agatgccttgtaatctactgtccag

SEQ ID NO: 65668 - DNA, 25 bp, Probe Sequence
gagatgccttgtaatctactgtcca

SEQ ID NO: 65669 - DNA, 25 bp, Probe Sequence
gatcggagatgccttgtaatctact

SEQ ID NO: 65670 - DNA, 25 bp, Probe Sequence
atcggagatgccttgtaatctactg

SEQ ID NO: 65671 - DNA, 25 bp, Probe Sequence
tgatcggagatgccttgtaatctac

SEQ ID NO: 65672 - DNA, 25 bp, Probe Sequence
gtgatcggagatgccttgtaatcta

SEQ ID NO: 65673 - DNA, 25 bp, Probe Sequence
ggagatgccttgtaatctactgtcc

SEQ ID NO: 65674 - DNA, 25 bp, Probe Sequence
cggagatgccttgtaatctactgtc

SEQ ID NO: 65675 - DNA, 25 bp, Probe Sequence
tcggagatgccttgtaatctactgt

SEQ ID NO: 65676 - DNA, 25 bp, Probe Sequence
atgccttgtaatctactgtccagct

SEQ ID NO: 65677 - DNA, 25 bp, Probe Sequence
gaaaagatgaaatggggaaaatggt

SEQ ID NO: 65678 - DNA, 25 bp, Probe Sequence
tggaaaagatgaaatggggaaaatg

SEQ ID NO: 65679 - DNA, 25 bp, Probe Sequence
ctggaaaagatgaaatggggaaaat

SEQ ID NO: 65680 - DNA, 25 bp, Probe Sequence
aaaagatgaaatggggaaaatggtg

SEQ ID NO: 65681 - DNA, 25 bp, Probe Sequence
aaatggggaaaatggtgtcagtaat

SEQ ID NO: 65682 - DNA, 25 bp, Probe Sequence
ggaaaagatgaaatggggaaaatgg

SEQ ID NO: 65683 - DNA, 25 bp, Probe Sequence
aatggggaaaatggtgtcagtaatt

SEQ ID NO: 65684 - DNA, 25 bp, Probe Sequence
aaagatgaaatggggaaaatggtgt

SEQ ID NO: 65685 - DNA, 25 bp, Probe Sequence
gaaatggggaaaatggtgtcagtaa

SEQ ID NO: 65686 - DNA, 25 bp, Probe Sequence
aagatgaaatggggaaaatggtgtc

SEQ ID NO: 65687 - DNA, 25 bp, Probe Sequence
taacgtgatcggagatgccttgtaa

SEQ ID NO: 65688 - DNA, 25 bp, Probe Sequence
ttaacgtgatcggagatgccttgta

SEQ ID NO: 65689 - DNA, 25 bp, Probe Sequence
ggggaaaatggtgtcagtaattaac

SEQ ID NO: 65690 - DNA, 25 bp, Probe Sequence
attctctctgaacacacattgctat

SEQ ID NO: 65691 - DNA, 25 bp, Probe Sequence
ttctctctgaacacacattgctatt

SEQ ID NO: 65692 - DNA, 25 bp, Probe Sequence
tctctctgaacacacattgctattc

SEQ ID NO: 65693 - DNA, 25 bp, Probe Sequence
cattctctctgaacacacattgcta

SEQ ID NO: 65694 - DNA, 25 bp, Probe Sequence
tgtcttgtaccttgagttgagtatt

SEQ ID NO: 65695 - DNA, 25 bp, Probe Sequence
aatgtcttgtaccttgagttgagta

SEQ ID NO: 65696 - DNA, 25 bp, Probe Sequence
atgtcttgtaccttgagttgagtat

SEQ ID NO: 65697 - DNA, 25 bp, Probe Sequence
ctctctgaacacacattgctattcc

SEQ ID NO: 65698 - DNA, 25 bp, Probe Sequence
catggaagttatgaagatgctgttc

SEQ ID NO: 65699 - DNA, 25 bp, Probe Sequence
ccttaatgattgatctgatgttcct

SEQ ID NO: 65700 - DNA, 25 bp, Probe Sequence
caatgtcttgtaccttgagttgagt

SEQ ID NO: 65701 - DNA, 25 bp, Probe Sequence
accttgagttgagtattacacatta

SEQ ID NO: 65702 - DNA, 25 bp, Probe Sequence
taccttgagttgagtattacacatt

SEQ ID NO: 65703 - DNA, 25 bp, Probe Sequence
gtaccttgagttgagtattacacat

SEQ ID NO: 65704 - DNA, 25 bp, Probe Sequence
tcttgtaccttgagttgagtattac

SEQ ID NO: 65705 - DNA, 25 bp, Probe Sequence
gtcttgtaccttgagttgagtatta

SEQ ID NO: 65706 - DNA, 25 bp, Probe Sequence
acatggaagttatgaagatgctgtt

SEQ ID NO: 65707 - DNA, 25 bp, Probe Sequence
aacatggaagttatgaagatgctgt

SEQ ID NO: 65708 - DNA, 25 bp, Probe Sequence
tcattctctctgaacacacattgct

SEQ ID NO: 65709 - DNA, 25 bp, Probe Sequence
gcaatgtcttgtaccttgagttgag

SEQ ID NO: 65710 - DNA, 25 bp, Probe Sequence
tgtaccttgagttgagtattacaca

SEQ ID NO: 65711 - DNA, 25 bp, Probe Sequence
tgaggttgttcaaagtttaagcaat

SEQ ID NO: 65712 - DNA, 25 bp, Probe Sequence
aatgcaatgtcttgtaccttgagtt

SEQ ID NO: 65713 - DNA, 25 bp, Probe Sequence
gcccttaatgattgatctgatgttc

SEQ ID NO: 65714 - DNA, 25 bp, Probe Sequence
ggttctgttctgatgagtagtatgt

SEQ ID NO: 65715 - DNA, 25 bp, Probe Sequence
cggactgttattaggactctgtatg

SEQ ID NO: 65716 - DNA, 25 bp, Probe Sequence
aggttctgttctgatgagtagtatg

SEQ ID NO: 65717 - DNA, 25 bp, Probe Sequence
ggactgttattaggactctgtatga

SEQ ID NO: 65718 - DNA, 25 bp, Probe Sequence
gttctgttctgatgagtagtatgtc

SEQ ID NO: 65719 - DNA, 25 bp, Probe Sequence
ttctgttctgatgagtagtatgtca

SEQ ID NO: 65720 - DNA, 25 bp, Probe Sequence
caggttctgttctgatgagtagtat

SEQ ID NO: 65721 - DNA, 25 bp, Probe Sequence
ccaggttctgttctgatgagtagta

SEQ ID NO: 65722 - DNA, 25 bp, Probe Sequence
ggatcaggacttgccataactactt

SEQ ID NO: 65723 - DNA, 25 bp, Probe Sequence
gactgttattaggactctgtatgat

SEQ ID NO: 65724 - DNA, 25 bp, Probe Sequence
ctatctatgtggatcaggacttgcc

SEQ ID NO: 65725 - DNA, 25 bp, Probe Sequence
gctgaaagtaaagaaggaacaaaca

SEQ ID NO: 65726 - DNA, 25 bp, Probe Sequence
taggactctgtatgatatttgtggc

SEQ ID NO: 65727 - DNA, 25 bp, Probe Sequence
agctatctatgtggatcaggacttg

SEQ ID NO: 65728 - DNA, 25 bp, Probe Sequence
cagctatctatgtggatcaggactt

SEQ ID NO: 65729 - DNA, 25 bp, Probe Sequence
ttcagctatctatgtggatcaggac

SEQ ID NO: 65730 - DNA, 25 bp, Probe Sequence
atcaggacttgccataactacttta

SEQ ID NO: 65731 - DNA, 25 bp, Probe Sequence
aagaagatgtttcagaagaagaagc

SEQ ID NO: 65732 - DNA, 25 bp, Probe Sequence
tactttattgaagaccttggattgc

SEQ ID NO: 65733 - DNA, 25 bp, Probe Sequence
tcaggacttgccataactactttat

SEQ ID NO: 65734 - DNA, 25 bp, Probe Sequence
gtccaggttctgttctgatgagtag

SEQ ID NO: 65735 - DNA, 25 bp, Probe Sequence
aggactctgtatgatatttgtggca

SEQ ID NO: 65736 - DNA, 25 bp, Probe Sequence
tttgtttggtttgaagtgaactgtg

SEQ ID NO: 65737 - DNA, 25 bp, Probe Sequence
aagactttccacagaatgccataag

SEQ ID NO: 65738 - DNA, 25 bp, Probe Sequence
gttacaatgcttatgcttggtacaa

SEQ ID NO: 65739 - DNA, 25 bp, Probe Sequence
ttgttacaatgcttatgcttggtac

SEQ ID NO: 65740 - DNA, 25 bp, Probe Sequence
agacataatggatgctcaattagtt

SEQ ID NO: 65741 - DNA, 25 bp, Probe Sequence
aagacataatggatgctcaattagt

SEQ ID NO: 65742 - DNA, 25 bp, Probe Sequence
tgttacaatgcttatgcttggtaca

SEQ ID NO: 65743 - DNA, 25 bp, Probe Sequence
cactacagttctcagatttacacct

SEQ ID NO: 65744 - DNA, 25 bp, Probe Sequence
tcactacagttctcagatttacacc

SEQ ID NO: 65745 - DNA, 25 bp, Probe Sequence
gggatacaaatcactacagttctca

SEQ ID NO: 65746 - DNA, 25 bp, Probe Sequence
agggatacaaatcactacagttctc

SEQ ID NO: 65747 - DNA, 25 bp, Probe Sequence
actacagttctcagatttacacctt

SEQ ID NO: 65748 - DNA, 25 bp, Probe Sequence
gctcgttcccaatgtatcttaatga

SEQ ID NO: 65749 - DNA, 25 bp, Probe Sequence
ctgctcgttcccaatgtatcttaat

SEQ ID NO: 65750 - DNA, 25 bp, Probe Sequence
ggatacaaatcactacagttctcag

SEQ ID NO: 65751 - DNA, 25 bp, Probe Sequence
tgctcgttcccaatgtatcttaatg

SEQ ID NO: 65752 - DNA, 25 bp, Probe Sequence
ctcgttcccaatgtatcttaatgaa

SEQ ID NO: 65753 - DNA, 25 bp, Probe Sequence
tagggatacaaatcactacagttct

SEQ ID NO: 65754 - DNA, 25 bp, Probe Sequence
ctacagttctcagatttacaccttt

SEQ ID NO: 65755 - DNA, 25 bp, Probe Sequence
tcgttcccaatgtatcttaatgaaa

SEQ ID NO: 65756 - DNA, 25 bp, Probe Sequence
atcactacagttctcagatttacac

SEQ ID NO: 65757 - DNA, 25 bp, Probe Sequence
cagcactccataaattctattacct

SEQ ID NO: 65758 - DNA, 25 bp, Probe Sequence
tcagcactccataaattctattacc

SEQ ID NO: 65759 - DNA, 25 bp, Probe Sequence
gatacaaatcactacagttctcaga

SEQ ID NO: 65760 - DNA, 25 bp, Probe Sequence
tttgttacaatgcttatgcttggta

SEQ ID NO: 65761 - DNA, 25 bp, Probe Sequence
taaatactgtctgtgagaaaccagc

SEQ ID NO: 65762 - DNA, 25 bp, Probe Sequence
tggtccaaggaggttctgttattaa

SEQ ID NO: 65763 - DNA, 25 bp, Probe Sequence
tagagactcaatgacagaagagagg

SEQ ID NO: 65764 - DNA, 25 bp, Probe Sequence
tcactagagactcaatgacagaaga

SEQ ID NO: 65765 - DNA, 25 bp, Probe Sequence
ctagagactcaatgacagaagagag

SEQ ID NO: 65766 - DNA, 25 bp, Probe Sequence
actagagactcaatgacagaagaga

SEQ ID NO: 65767 - DNA, 25 bp, Probe Sequence
cactagagactcaatgacagaagag

SEQ ID NO: 65768 - DNA, 25 bp, Probe Sequence
ctcactagagactcaatgacagaag

SEQ ID NO: 65769 - DNA, 25 bp, Probe Sequence
ctggtccaaggaggttctgttatta

SEQ ID NO: 65770 - DNA, 25 bp, Probe Sequence
ctggagatgaagagactgctagaag

SEQ ID NO: 65771 - DNA, 25 bp, Probe Sequence
aacaagaaggttggagttggtctag

SEQ ID NO: 65772 - DNA, 25 bp, Probe Sequence
ccaaggaggttctgttattaaagtg

SEQ ID NO: 65773 - DNA, 25 bp, Probe Sequence
ggtccaaggaggttctgttattaaa

SEQ ID NO: 65774 - DNA, 25 bp, Probe Sequence
tccaaggaggttctgttattaaagt

SEQ ID NO: 65775 - DNA, 25 bp, Probe Sequence
gtccaaggaggttctgttattaaag

SEQ ID NO: 65776 - DNA, 25 bp, Probe Sequence
caaggaggttctgttattaaagtga

SEQ ID NO: 65777 - DNA, 25 bp, Probe Sequence
actggtccaaggaggttctgttatt

SEQ ID NO: 65778 - DNA, 25 bp, Probe Sequence
aaggaggttctgttattaaagtgat

SEQ ID NO: 65779 - DNA, 25 bp, Probe Sequence
aactggtccaaggaggttctgttat

SEQ ID NO: 65780 - DNA, 25 bp, Probe Sequence
tttcagagtcctctttctcactaga

SEQ ID NO: 65781 - DNA, 25 bp, Probe Sequence
atttcagagtcctctttctcactag

SEQ ID NO: 65782 - DNA, 25 bp, Probe Sequence
gatttcagagtcctctttctcacta

SEQ ID NO: 65783 - DNA, 25 bp, Probe Sequence
aaacaagaaggttggagttggtcta

SEQ ID NO: 65784 - DNA, 25 bp, Probe Sequence
tgatttcagagtcctctttctcact

SEQ ID NO: 65785 - DNA, 25 bp, Probe Sequence
gctggagatgaagagactgctagaa

SEQ ID NO: 65786 - DNA, 25 bp, Probe Sequence
agattagagaggactacacatcagg

SEQ ID NO: 65787 - DNA, 25 bp, Probe Sequence
aagattagagaggactacacatcag

SEQ ID NO: 65788 - DNA, 25 bp, Probe Sequence
actacctgttactattatctgtgct

SEQ ID NO: 65789 - DNA, 25 bp, Probe Sequence
agttctcctatcttctccattctag

SEQ ID NO: 65790 - DNA, 25 bp, Probe Sequence
cgagttctcctatcttctccattct

SEQ ID NO: 65791 - DNA, 25 bp, Probe Sequence
ctacctgttactattatctgtgctt

SEQ ID NO: 65792 - DNA, 25 bp, Probe Sequence
gagttctcctatcttctccattcta

SEQ ID NO: 65793 - DNA, 25 bp, Probe Sequence
gattattcttccagtagttgaacac

SEQ ID NO: 65794 - DNA, 25 bp, Probe Sequence
attattcttccagtagttgaacact

SEQ ID NO: 65795 - DNA, 25 bp, Probe Sequence
ctagacttcagaacatgctggataa

SEQ ID NO: 65796 - DNA, 25 bp, Probe Sequence
tactacctgttactattatctgtgc

SEQ ID NO: 65797 - DNA, 25 bp, Probe Sequence
ccactcaatgacatcatgttagtct

SEQ ID NO: 65798 - DNA, 25 bp, Probe Sequence
cactcaatgacatcatgttagtctt

SEQ ID NO: 65799 - DNA, 25 bp, Probe Sequence
cacaaagattagagaggactacaca

SEQ ID NO: 65800 - DNA, 25 bp, Probe Sequence
gcaacaaacataccctttatctctg

SEQ ID NO: 65801 - DNA, 25 bp, Probe Sequence
agggcttgatttattgtttgttgat

SEQ ID NO: 65802 - DNA, 25 bp, Probe Sequence
cagggcttgatttattgtttgttga

SEQ ID NO: 65803 - DNA, 25 bp, Probe Sequence
tcacaaagattagagaggactacac

SEQ ID NO: 65804 - DNA, 25 bp, Probe Sequence
ggattattcttccagtagttgaaca

SEQ ID NO: 65805 - DNA, 25 bp, Probe Sequence
gggcttgatttattgtttgttgatt

SEQ ID NO: 65806 - DNA, 25 bp, Probe Sequence
acaaagattagagaggactacacat

SEQ ID NO: 65807 - DNA, 25 bp, Probe Sequence
tcgagttctcctatcttctccattc

SEQ ID NO: 65808 - DNA, 25 bp, Probe Sequence
tgatagttgactttggatacaaggt

SEQ ID NO: 65809 - DNA, 25 bp, Probe Sequence
aaagattagagaggactacacatca

SEQ ID NO: 65810 - DNA, 25 bp, Probe Sequence
gttatcattggtcgttgagttatgg

SEQ ID NO: 65811 - DNA, 25 bp, Probe Sequence
ggttatcattggtcgttgagttatg

SEQ ID NO: 65812 - DNA, 25 bp, Probe Sequence
aggttatcattggtcgttgagttat

SEQ ID NO: 65813 - DNA, 25 bp, Probe Sequence
aaggttatcattggtcgttgagtta

SEQ ID NO: 65814 - DNA, 25 bp, Probe Sequence
acatagattctcctccgtcagtaac

SEQ ID NO: 65815 - DNA, 25 bp, Probe Sequence
cacatagattctcctccgtcagtaa

SEQ ID NO: 65816 - DNA, 25 bp, Probe Sequence
catagattctcctccgtcagtaacc

SEQ ID NO: 65817 - DNA, 25 bp, Probe Sequence
tcacatagattctcctccgtcagta

SEQ ID NO: 65818 - DNA, 25 bp, Probe Sequence
atcacatagattctcctccgtcagt

SEQ ID NO: 65819 - DNA, 25 bp, Probe Sequence
ttaccgacataatacatggagccaa

SEQ ID NO: 65820 - DNA, 25 bp, Probe Sequence
tcagtaaccgtgcgattatacaaat

SEQ ID NO: 65821 - DNA, 25 bp, Probe Sequence
cagtaaccgtgcgattatacaaatt

SEQ ID NO: 65822 - DNA, 25 bp, Probe Sequence
gatttaattctacccagtggcaaag

SEQ ID NO: 65823 - DNA, 25 bp, Probe Sequence
aatcacatagattctcctccgtcag

SEQ ID NO: 65824 - DNA, 25 bp, Probe Sequence
ttcctgtcagatttaattctaccca

SEQ ID NO: 65825 - DNA, 25 bp, Probe Sequence
tgtcagatttaattctacccagtgg

SEQ ID NO: 65826 - DNA, 25 bp, Probe Sequence
gtcagtaaccgtgcgattatacaaa

SEQ ID NO: 65827 - DNA, 25 bp, Probe Sequence
gcacatggactgaatcacatagatt

SEQ ID NO: 65828 - DNA, 25 bp, Probe Sequence
atttaattctacccagtggcaaaga

SEQ ID NO: 65829 - DNA, 25 bp, Probe Sequence
agatttaattctacccagtggcaaa

SEQ ID NO: 65830 - DNA, 25 bp, Probe Sequence
agtaaccgtgcgattatacaaatta

SEQ ID NO: 65831 - DNA, 25 bp, Probe Sequence
cgtcagtaaccgtgcgattatacaa

SEQ ID NO: 65832 - DNA, 25 bp, Probe Sequence
atagattctcctccgtcagtaaccg

SEQ ID NO: 65833 - DNA, 25 bp, Probe Sequence
ttatcattggtcgttgagttatggg

SEQ ID NO: 65834 - DNA, 25 bp, Probe Sequence
cactcctgagataacaatccaatcc

SEQ ID NO: 65835 - DNA, 25 bp, Probe Sequence
ccactcctgagataacaatccaatc

SEQ ID NO: 65836 - DNA, 25 bp, Probe Sequence
tctcgcttcagaacttaattcatct

SEQ ID NO: 65837 - DNA, 25 bp, Probe Sequence
aagacaccactcctgagataacaat

SEQ ID NO: 65838 - DNA, 25 bp, Probe Sequence
accactcctgagataacaatccaat

SEQ ID NO: 65839 - DNA, 25 bp, Probe Sequence
ctcgcttcagaacttaattcatcta

SEQ ID NO: 65840 - DNA, 25 bp, Probe Sequence
agacaccactcctgagataacaatc

SEQ ID NO: 65841 - DNA, 25 bp, Probe Sequence
tcgcttcagaacttaattcatctaa

SEQ ID NO: 65842 - DNA, 25 bp, Probe Sequence
caccactcctgagataacaatccaa

SEQ ID NO: 65843 - DNA, 25 bp, Probe Sequence
gacaccactcctgagataacaatcc

SEQ ID NO: 65844 - DNA, 25 bp, Probe Sequence
attcatctaatccctcctgtttgtc

SEQ ID NO: 65845 - DNA, 25 bp, Probe Sequence
cgcttcagaacttaattcatctaat

SEQ ID NO: 65846 - DNA, 25 bp, Probe Sequence
ataaagacaccactcctgagataac

SEQ ID NO: 65847 - DNA, 25 bp, Probe Sequence
aattcatctaatccctcctgtttgt

SEQ ID NO: 65848 - DNA, 25 bp, Probe Sequence
ttcatctaatccctcctgtttgtct

SEQ ID NO: 65849 - DNA, 25 bp, Probe Sequence
taaagacaccactcctgagataaca

SEQ ID NO: 65850 - DNA, 25 bp, Probe Sequence
tcctgagataacaatccaatcccat

SEQ ID NO: 65851 - DNA, 25 bp, Probe Sequence
acttaattcatctaatccctcctgt

SEQ ID NO: 65852 - DNA, 25 bp, Probe Sequence
tcatctaatccctcctgtttgtctc

SEQ ID NO: 65853 - DNA, 25 bp, Probe Sequence
ttctcgcttcagaacttaattcatc

SEQ ID NO: 65854 - DNA, 25 bp, Probe Sequence
acaccactcctgagataacaatcca

SEQ ID NO: 65855 - DNA, 25 bp, Probe Sequence
catctaatccctcctgtttgtctca

SEQ ID NO: 65856 - DNA, 25 bp, Probe Sequence
atctaatccctcctgtttgtctcaa

SEQ ID NO: 65857 - DNA, 25 bp, Probe Sequence
aaagacaccactcctgagataacaa

SEQ ID NO: 65858 - DNA, 25 bp, Probe Sequence
gaccaccaagatgtaatgatgattc

SEQ ID NO: 65859 - DNA, 25 bp, Probe Sequence
tgaccaccaagatgtaatgatgatt

SEQ ID NO: 65860 - DNA, 25 bp, Probe Sequence
accaccaagatgtaatgatgattct

SEQ ID NO: 65861 - DNA, 25 bp, Probe Sequence
ttgaccaccaagatgtaatgatgat

SEQ ID NO: 65862 - DNA, 25 bp, Probe Sequence
ccaccaagatgtaatgatgattcta

SEQ ID NO: 65863 - DNA, 25 bp, Probe Sequence
ttgatttgaccaccaagatgtaatg

SEQ ID NO: 65864 - DNA, 25 bp, Probe Sequence
tttgaccaccaagatgtaatgatga

SEQ ID NO: 65865 - DNA, 25 bp, Probe Sequence
atttgaccaccaagatgtaatgatg

SEQ ID NO: 65866 - DNA, 25 bp, Probe Sequence
tgatttgaccaccaagatgtaatga

SEQ ID NO: 65867 - DNA, 25 bp, Probe Sequence
gatttgaccaccaagatgtaatgat

SEQ ID NO: 65868 - DNA, 25 bp, Probe Sequence
gattgattgttcatcttccctctct

SEQ ID NO: 65869 - DNA, 25 bp, Probe Sequence
attgattgttcatcttccctctctg

SEQ ID NO: 65870 - DNA, 25 bp, Probe Sequence
aactcactcacaaacaacataaatg

SEQ ID NO: 65871 - DNA, 25 bp, Probe Sequence
tttgatttgaccaccaagatgtaat

SEQ ID NO: 65872 - DNA, 25 bp, Probe Sequence
caccaagatgtaatgatgattctat

SEQ ID NO: 65873 - DNA, 25 bp, Probe Sequence
aaactcactcacaaacaacataaat

SEQ ID NO: 65874 - DNA, 25 bp, Probe Sequence
cgattgattgttcatcttccctctc

SEQ ID NO: 65875 - DNA, 25 bp, Probe Sequence
ccatgcgattgattgttcatcttcc

SEQ ID NO: 65876 - DNA, 25 bp, Probe Sequence
actcactcacaaacaacataaatgt

SEQ ID NO: 65877 - DNA, 25 bp, Probe Sequence
ttgattgttcatcttccctctctgg

SEQ ID NO: 65878 - DNA, 25 bp, Probe Sequence
gccatgcgattgattgttcatcttc

SEQ ID NO: 65879 - DNA, 25 bp, Probe Sequence
accaagatgtaatgatgattctatt

SEQ ID NO: 65880 - DNA, 25 bp, Probe Sequence
caaatctgggagatgaggaaagaaa

SEQ ID NO: 65881 - DNA, 25 bp, Probe Sequence
atgcgattgattgttcatcttccct

SEQ ID NO: 65882 - DNA, 25 bp, Probe Sequence
agtaactggtggtaggaatcttaga

SEQ ID NO: 65883 - DNA, 25 bp, Probe Sequence
gtaactggtggtaggaatcttagaa

SEQ ID NO: 65884 - DNA, 25 bp, Probe Sequence
taagagaatgctgatgccataactt

SEQ ID NO: 65885 - DNA, 25 bp, Probe Sequence
ggctcattctcagtatctcattaac

SEQ ID NO: 65886 - DNA, 25 bp, Probe Sequence
aggctcattctcagtatctcattaa

SEQ ID NO: 65887 - DNA, 25 bp, Probe Sequence
aagtaactggtggtaggaatcttag

SEQ ID NO: 65888 - DNA, 25 bp, Probe Sequence
gagtaagagaatgctgatgccataa

SEQ ID NO: 65889 - DNA, 25 bp, Probe Sequence
ttctgttgctgtgaatacttctctc

SEQ ID NO: 65890 - DNA, 25 bp, Probe Sequence
cttctgttgctgtgaatacttctct

SEQ ID NO: 65891 - DNA, 25 bp, Probe Sequence
gtaagagaatgctgatgccataact

SEQ ID NO: 65892 - DNA, 25 bp, Probe Sequence
agtaagagaatgctgatgccataac

SEQ ID NO: 65893 - DNA, 25 bp, Probe Sequence
gaggctcattctcagtatctcatta

SEQ ID NO: 65894 - DNA, 25 bp, Probe Sequence
tgagtaagagaatgctgatgccata

SEQ ID NO: 65895 - DNA, 25 bp, Probe Sequence
ttagaggcttgctatacttggtctg

SEQ ID NO: 65896 - DNA, 25 bp, Probe Sequence
tctgttgctgtgaatacttctctca

SEQ ID NO: 65897 - DNA, 25 bp, Probe Sequence
taactcatgctgtccttgtgattaa

SEQ ID NO: 65898 - DNA, 25 bp, Probe Sequence
gcttctgttgctgtgaatacttctc

SEQ ID NO: 65899 - DNA, 25 bp, Probe Sequence
ctaactcatgctgtccttgtgatta

SEQ ID NO: 65900 - DNA, 25 bp, Probe Sequence
gctcattctcagtatctcattaact

SEQ ID NO: 65901 - DNA, 25 bp, Probe Sequence
gaactgttggatgtcttccttagaa

SEQ ID NO: 65902 - DNA, 25 bp, Probe Sequence
atgaactgttggatgtcttccttag

SEQ ID NO: 65903 - DNA, 25 bp, Probe Sequence
ctgttgctgtgaatacttctctcag

SEQ ID NO: 65904 - DNA, 25 bp, Probe Sequence
gttgctgtgaatacttctctcagtg

SEQ ID NO: 65905 - DNA, 25 bp, Probe Sequence
cgaggctcattctcagtatctcatt

SEQ ID NO: 65906 - DNA, 25 bp, Probe Sequence
acacatcaatggcaataacttcttc

SEQ ID NO: 65907 - DNA, 25 bp, Probe Sequence
cacacatcaatggcaataacttctt

SEQ ID NO: 65908 - DNA, 25 bp, Probe Sequence
cacatcaatggcaataacttcttcc

SEQ ID NO: 65909 - DNA, 25 bp, Probe Sequence
gacacacatcaatggcaataacttc

SEQ ID NO: 65910 - DNA, 25 bp, Probe Sequence
atgaacctcctgtaacttctatctg

SEQ ID NO: 65911 - DNA, 25 bp, Probe Sequence
tgaacctcctgtaacttctatctgt

SEQ ID NO: 65912 - DNA, 25 bp, Probe Sequence
aacctcctgtaacttctatctgttc

SEQ ID NO: 65913 - DNA, 25 bp, Probe Sequence
gaacctcctgtaacttctatctgtt

SEQ ID NO: 65914 - DNA, 25 bp, Probe Sequence
acctcctgtaacttctatctgttct

SEQ ID NO: 65915 - DNA, 25 bp, Probe Sequence
gatgaacctcctgtaacttctatct

SEQ ID NO: 65916 - DNA, 25 bp, Probe Sequence
cctcctgtaacttctatctgttctt

SEQ ID NO: 65917 - DNA, 25 bp, Probe Sequence
acacacatcaatggcaataacttct

SEQ ID NO: 65918 - DNA, 25 bp, Probe Sequence
agatgaacctcctgtaacttctatc

SEQ ID NO: 65919 - DNA, 25 bp, Probe Sequence
tgagatgaacctcctgtaacttcta

SEQ ID NO: 65920 - DNA, 25 bp, Probe Sequence
gagatgaacctcctgtaacttctat

SEQ ID NO: 65921 - DNA, 25 bp, Probe Sequence
tgacacacatcaatggcaataactt

SEQ ID NO: 65922 - DNA, 25 bp, Probe Sequence
ttgtgagatgaacctcctgtaactt

SEQ ID NO: 65923 - DNA, 25 bp, Probe Sequence
gtgagatgaacctcctgtaacttct

SEQ ID NO: 65924 - DNA, 25 bp, Probe Sequence
tgtgagatgaacctcctgtaacttc

SEQ ID NO: 65925 - DNA, 25 bp, Probe Sequence
atcaatggcaataacttcttccaac

SEQ ID NO: 65926 - DNA, 25 bp, Probe Sequence
catcaatggcaataacttcttccaa

SEQ ID NO: 65927 - DNA, 25 bp, Probe Sequence
caatggcaataacttcttccaactc

SEQ ID NO: 65928 - DNA, 25 bp, Probe Sequence
ctggacgtgtgtatatagctgtatt

SEQ ID NO: 65929 - DNA, 25 bp, Probe Sequence
gttgtgagatgaacctcctgtaact

SEQ ID NO: 65930 - DNA, 25 bp, Probe Sequence
aacctgtgattattctcgcatgata

SEQ ID NO: 65931 - DNA, 25 bp, Probe Sequence
tattctcgcatgataaggatggtac

SEQ ID NO: 65932 - DNA, 25 bp, Probe Sequence
attattctcgcatgataaggatggt

SEQ ID NO: 65933 - DNA, 25 bp, Probe Sequence
tgtgattattctcgcatgataagga

SEQ ID NO: 65934 - DNA, 25 bp, Probe Sequence
acctgtgattattctcgcatgataa

SEQ ID NO: 65935 - DNA, 25 bp, Probe Sequence
ctgtgattattctcgcatgataagg

SEQ ID NO: 65936 - DNA, 25 bp, Probe Sequence
cctgtgattattctcgcatgataag

SEQ ID NO: 65937 - DNA, 25 bp, Probe Sequence
gattattctcgcatgataaggatgg

SEQ ID NO: 65938 - DNA, 25 bp, Probe Sequence
ttattctcgcatgataaggatggta

SEQ ID NO: 65939 - DNA, 25 bp, Probe Sequence
gaacctgtgattattctcgcatgat

SEQ ID NO: 65940 - DNA, 25 bp, Probe Sequence
tgattattctcgcatgataaggatg

SEQ ID NO: 65941 - DNA, 25 bp, Probe Sequence
gtgattattctcgcatgataaggat

SEQ ID NO: 65942 - DNA, 25 bp, Probe Sequence
atatggtgaattactactgttgaca

SEQ ID NO: 65943 - DNA, 25 bp, Probe Sequence
attctcgcatgataaggatggtact

SEQ ID NO: 65944 - DNA, 25 bp, Probe Sequence
ttctcgcatgataaggatggtactt

SEQ ID NO: 65945 - DNA, 25 bp, Probe Sequence
aggagggtagggaagttatgaatta

SEQ ID NO: 65946 - DNA, 25 bp, Probe Sequence
ggagggtagggaagttatgaattac

SEQ ID NO: 65947 - DNA, 25 bp, Probe Sequence
tctcgcatgataaggatggtacttg

SEQ ID NO: 65948 - DNA, 25 bp, Probe Sequence
gaatagcagcaaatctacaagagac

SEQ ID NO: 65949 - DNA, 25 bp, Probe Sequence
aaggagggtagggaagttatgaatt

SEQ ID NO: 65950 - DNA, 25 bp, Probe Sequence
gaaggagggtagggaagttatgaat

SEQ ID NO: 65951 - DNA, 25 bp, Probe Sequence
ggaatagcagcaaatctacaagaga

SEQ ID NO: 65952 - DNA, 25 bp, Probe Sequence
aatagcagcaaatctacaagagacc

SEQ ID NO: 65953 - DNA, 25 bp, Probe Sequence
tggaatagcagcaaatctacaagag

SEQ ID NO: 65954 - DNA, 25 bp, Probe Sequence
atcattcgatatgctaaccgttctc

SEQ ID NO: 65955 - DNA, 25 bp, Probe Sequence
gatcattcgatatgctaaccgttct

SEQ ID NO: 65956 - DNA, 25 bp, Probe Sequence
gggatgaaactcttaaatgctttgt

SEQ ID NO: 65957 - DNA, 25 bp, Probe Sequence
actttcttcactgtccctattccta

SEQ ID NO: 65958 - DNA, 25 bp, Probe Sequence
ttgaaagataacacagagggaaagg

SEQ ID NO: 65959 - DNA, 25 bp, Probe Sequence
tttgaaagataacacagagggaaag

SEQ ID NO: 65960 - DNA, 25 bp, Probe Sequence
ctttcttcactgtccctattcctag

SEQ ID NO: 65961 - DNA, 25 bp, Probe Sequence
cattcgatatgctaaccgttctcag

SEQ ID NO: 65962 - DNA, 25 bp, Probe Sequence
tttcttcactgtccctattcctaga

SEQ ID NO: 65963 - DNA, 25 bp, Probe Sequence
tcattcgatatgctaaccgttctca

SEQ ID NO: 65964 - DNA, 25 bp, Probe Sequence
tacactttcttcactgtccctattc

SEQ ID NO: 65965 - DNA, 25 bp, Probe Sequence
aaagataacacagagggaaagggag

SEQ ID NO: 65966 - DNA, 25 bp, Probe Sequence
gaaagataacacagagggaaaggga

SEQ ID NO: 65967 - DNA, 25 bp, Probe Sequence
cactttcttcactgtccctattcct

SEQ ID NO: 65968 - DNA, 25 bp, Probe Sequence
tgaaagataacacagagggaaaggg

SEQ ID NO: 65969 - DNA, 25 bp, Probe Sequence
ggatgaaactcttaaatgctttgta

SEQ ID NO: 65970 - DNA, 25 bp, Probe Sequence
gtacactttcttcactgtccctatt

SEQ ID NO: 65971 - DNA, 25 bp, Probe Sequence
tttcttggagggtacactttcttca

SEQ ID NO: 65972 - DNA, 25 bp, Probe Sequence
ttcttcactgtccctattcctagac

SEQ ID NO: 65973 - DNA, 25 bp, Probe Sequence
aagataacacagagggaaagggaga

SEQ ID NO: 65974 - DNA, 25 bp, Probe Sequence
ttcttggagggtacactttcttcac

SEQ ID NO: 65975 - DNA, 25 bp, Probe Sequence
ggtacactttcttcactgtccctat

SEQ ID NO: 65976 - DNA, 25 bp, Probe Sequence
tactgatcattcgatatgctaaccg

SEQ ID NO: 65977 - DNA, 25 bp, Probe Sequence
acactttcttcactgtccctattcc

SEQ ID NO: 65978 - DNA, 25 bp, Probe Sequence
ctgagagtgaagagaatgacgatta

SEQ ID NO: 65979 - DNA, 25 bp, Probe Sequence
tgagagtgaagagaatgacgattac

SEQ ID NO: 65980 - DNA, 25 bp, Probe Sequence
gagagtgaagagaatgacgattact

SEQ ID NO: 65981 - DNA, 25 bp, Probe Sequence
agtgaagagaatgacgattactact

SEQ ID NO: 65982 - DNA, 25 bp, Probe Sequence
gagtgaagagaatgacgattactac

SEQ ID NO: 65983 - DNA, 25 bp, Probe Sequence
agagtgaagagaatgacgattacta

SEQ ID NO: 65984 - DNA, 25 bp, Probe Sequence
aagagaatgacgattactactaggt

SEQ ID NO: 65985 - DNA, 25 bp, Probe Sequence
gtgaagagaatgacgattactacta

SEQ ID NO: 65986 - DNA, 25 bp, Probe Sequence
gaatgacgattactactaggtccag

SEQ ID NO: 65987 - DNA, 25 bp, Probe Sequence
aatgacgattactactaggtccaga

SEQ ID NO: 65988 - DNA, 25 bp, Probe Sequence
agaatgacgattactactaggtcca

SEQ ID NO: 65989 - DNA, 25 bp, Probe Sequence
gagaatgacgattactactaggtcc

SEQ ID NO: 65990 - DNA, 25 bp, Probe Sequence
gaagagaatgacgattactactagg

SEQ ID NO: 65991 - DNA, 25 bp, Probe Sequence
atgacgattactactaggtccagag

SEQ ID NO: 65992 - DNA, 25 bp, Probe Sequence
agagaatgacgattactactaggtc

SEQ ID NO: 65993 - DNA, 25 bp, Probe Sequence
gctgagagtgaagagaatgacgatt

SEQ ID NO: 65994 - DNA, 25 bp, Probe Sequence
aaggtagcagtgtggtaggatagag

SEQ ID NO: 65995 - DNA, 25 bp, Probe Sequence
tgaagagaatgacgattactactag

SEQ ID NO: 65996 - DNA, 25 bp, Probe Sequence
tcttataccactctgtattggacaa

SEQ ID NO: 65997 - DNA, 25 bp, Probe Sequence
tagcagtgtggtaggatagagacaa

SEQ ID NO: 65998 - DNA, 25 bp, Probe Sequence
atcttataccactctgtattggaca

SEQ ID NO: 65999 - DNA, 25 bp, Probe Sequence
caaggtagcagtgtggtaggataga

SEQ ID NO: 66000 - DNA, 25 bp, Probe Sequence
cttagttcagtgcagagagataggt

SEQ ID NO: 66001 - DNA, 25 bp, Probe Sequence
gacttagttcagtgcagagagatag

SEQ ID NO: 66002 - DNA, 25 bp, Probe Sequence
acaccttcagcagtaaacaagataa

SEQ ID NO: 66003 - DNA, 25 bp, Probe Sequence
caccttcagcagtaaacaagataaa

SEQ ID NO: 66004 - DNA, 25 bp, Probe Sequence
gacaccttcagcagtaaacaagata

SEQ ID NO: 66005 - DNA, 25 bp, Probe Sequence
atccagtgagtttgtgttcaataac

SEQ ID NO: 66006 - DNA, 25 bp, Probe Sequence
agtgagtttgtgttcaataacccaa

SEQ ID NO: 66007 - DNA, 25 bp, Probe Sequence
aattatccagtgagtttgtgttcaa

SEQ ID NO: 66008 - DNA, 25 bp, Probe Sequence
aaattatccagtgagtttgtgttca

SEQ ID NO: 66009 - DNA, 25 bp, Probe Sequence
attatccagtgagtttgtgttcaat

SEQ ID NO: 66010 - DNA, 25 bp, Probe Sequence
tccagtgagtttgtgttcaataacc

SEQ ID NO: 66011 - DNA, 25 bp, Probe Sequence
cagtgagtttgtgttcaataaccca

SEQ ID NO: 66012 - DNA, 25 bp, Probe Sequence
tatccagtgagtttgtgttcaataa

SEQ ID NO: 66013 - DNA, 25 bp, Probe Sequence
ttatccagtgagtttgtgttcaata

SEQ ID NO: 66014 - DNA, 25 bp, Probe Sequence
ccagtgagtttgtgttcaataaccc

SEQ ID NO: 66015 - DNA, 25 bp, Probe Sequence
tgacaccttcagcagtaaacaagat

SEQ ID NO: 66016 - DNA, 25 bp, Probe Sequence
gtgagtttgtgttcaataacccaaa

SEQ ID NO: 66017 - DNA, 25 bp, Probe Sequence
caaattatccagtgagtttgtgttc

SEQ ID NO: 66018 - DNA, 25 bp, Probe Sequence
accttcagcagtaaacaagataaaa

SEQ ID NO: 66019 - DNA, 25 bp, Probe Sequence
aataacccaaacatcaaagggactt

SEQ ID NO: 66020 - DNA, 25 bp, Probe Sequence
ttcaataacccaaacatcaaaggga

SEQ ID NO: 66021 - DNA, 25 bp, Probe Sequence
gttcaataacccaaacatcaaaggg

SEQ ID NO: 66022 - DNA, 25 bp, Probe Sequence
gctgtaatggcctttcttatactct

SEQ ID NO: 66023 - DNA, 25 bp, Probe Sequence
ccttcagcagtaaacaagataaaac

SEQ ID NO: 66024 - DNA, 25 bp, Probe Sequence
gaagacaaattatccagtgagtttg

SEQ ID NO: 66025 - DNA, 25 bp, Probe Sequence
ataacccaaacatcaaagggacttg

SEQ ID NO: 66026 - DNA, 25 bp, Probe Sequence
ttcagaagaggattgtccaatgtgt

SEQ ID NO: 66027 - DNA, 25 bp, Probe Sequence
cactgaaagccatgaagaaatgttc

SEQ ID NO: 66028 - DNA, 25 bp, Probe Sequence
tcagaagaggattgtccaatgtgtg

SEQ ID NO: 66029 - DNA, 25 bp, Probe Sequence
agacactgaaagccatgaagaaatg

SEQ ID NO: 66030 - DNA, 25 bp, Probe Sequence
ctttcagaagaggattgtccaatgt

SEQ ID NO: 66031 - DNA, 25 bp, Probe Sequence
tttcagaagaggattgtccaatgtg

SEQ ID NO: 66032 - DNA, 25 bp, Probe Sequence
acactgaaagccatgaagaaatgtt

SEQ ID NO: 66033 - DNA, 25 bp, Probe Sequence
cagacactgaaagccatgaagaaat

SEQ ID NO: 66034 - DNA, 25 bp, Probe Sequence
gacactgaaagccatgaagaaatgt

SEQ ID NO: 66035 - DNA, 25 bp, Probe Sequence
gagttcaggagagaggagtgttctg

SEQ ID NO: 66036 - DNA, 25 bp, Probe Sequence
gctttcagaagaggattgtccaatg

SEQ ID NO: 66037 - DNA, 25 bp, Probe Sequence
caataaaactgaagaccaagaccaa

SEQ ID NO: 66038 - DNA, 25 bp, Probe Sequence
ccgatttactttgcactaaggacaa

SEQ ID NO: 66039 - DNA, 25 bp, Probe Sequence
taaaactgaagaccaagaccaatgt

SEQ ID NO: 66040 - DNA, 25 bp, Probe Sequence
ataaaactgaagaccaagaccaatg

SEQ ID NO: 66041 - DNA, 25 bp, Probe Sequence
ctgaagaccaagaccaatgtctatg

SEQ ID NO: 66042 - DNA, 25 bp, Probe Sequence
gaccaagaccaatgtctatgtgatc

SEQ ID NO: 66043 - DNA, 25 bp, Probe Sequence
ctgaaagccatgaagaaatgttctg

SEQ ID NO: 66044 - DNA, 25 bp, Probe Sequence
aataaaactgaagaccaagaccaat

SEQ ID NO: 66045 - DNA, 25 bp, Probe Sequence
gttcaggagagaggagtgttctgtc

SEQ ID NO: 66046 - DNA, 25 bp, Probe Sequence
agaccaagaccaatgtctatgtgat

SEQ ID NO: 66047 - DNA, 25 bp, Probe Sequence
gaagaccaagaccaatgtctatgtg

SEQ ID NO: 66048 - DNA, 25 bp, Probe Sequence
actgaagaccaagaccaatgtctat

SEQ ID NO: 66049 - DNA, 25 bp, Probe Sequence
gaaagccatgaagaaatgttctgtg

SEQ ID NO: 66050 - DNA, 25 bp, Probe Sequence
gcatacattcctactccaatctact

SEQ ID NO: 66051 - DNA, 25 bp, Probe Sequence
tggctgtgttaatagtggtaatctt

SEQ ID NO: 66052 - DNA, 25 bp, Probe Sequence
ctggctgtgttaatagtggtaatct

SEQ ID NO: 66053 - DNA, 25 bp, Probe Sequence
cgtgtggttattgtcaagacttatc

SEQ ID NO: 66054 - DNA, 25 bp, Probe Sequence
taacctctacagacacaatcctcaa

SEQ ID NO: 66055 - DNA, 25 bp, Probe Sequence
ttaacctctacagacacaatcctca

SEQ ID NO: 66056 - DNA, 25 bp, Probe Sequence
ccgtgtggttattgtcaagacttat

SEQ ID NO: 66057 - DNA, 25 bp, Probe Sequence
tatcatagtaacactcaggtccgta

SEQ ID NO: 66058 - DNA, 25 bp, Probe Sequence
ggctgtgttaatagtggtaatctta

SEQ ID NO: 66059 - DNA, 25 bp, Probe Sequence
gtgtggttattgtcaagacttatct

SEQ ID NO: 66060 - DNA, 25 bp, Probe Sequence
gctggctgtgttaatagtggtaatc

SEQ ID NO: 66061 - DNA, 25 bp, Probe Sequence
atagtaacactcaggtccgtagaag

SEQ ID NO: 66062 - DNA, 25 bp, Probe Sequence
atcatagtaacactcaggtccgtag

SEQ ID NO: 66063 - DNA, 25 bp, Probe Sequence
gtggttattgtcaagacttatctca

SEQ ID NO: 66064 - DNA, 25 bp, Probe Sequence
tgtggttattgtcaagacttatctc

SEQ ID NO: 66065 - DNA, 25 bp, Probe Sequence
catagtaacactcaggtccgtagaa

SEQ ID NO: 66066 - DNA, 25 bp, Probe Sequence
ctatcatagtaacactcaggtccgt

SEQ ID NO: 66067 - DNA, 25 bp, Probe Sequence
ttcatagtcaccttcatcacagcat

SEQ ID NO: 66068 - DNA, 25 bp, Probe Sequence
tccgtgtggttattgtcaagactta

SEQ ID NO: 66069 - DNA, 25 bp, Probe Sequence
tgtgttaatagtggtaatcttagca

SEQ ID NO: 66070 - DNA, 25 bp, Probe Sequence
catacattcctactccaatctactt

SEQ ID NO: 66071 - DNA, 25 bp, Probe Sequence
gtaacactcaggtccgtagaagatg

SEQ ID NO: 66072 - DNA, 25 bp, Probe Sequence
gtggatcagatggaattacatactt

SEQ ID NO: 66073 - DNA, 25 bp, Probe Sequence
tgtggatcagatggaattacatact

SEQ ID NO: 66074 - DNA, 25 bp, Probe Sequence
gactgagaagagaagaatggagaag

SEQ ID NO: 66075 - DNA, 25 bp, Probe Sequence
aagttggagttcgtatgttgatgac

SEQ ID NO: 66076 - DNA, 25 bp, Probe Sequence
ggactgagaagagaagaatggagaa

SEQ ID NO: 66077 - DNA, 25 bp, Probe Sequence
actgagaagagaagaatggagaagc

SEQ ID NO: 66078 - DNA, 25 bp, Probe Sequence
ctggactgagaagagaagaatggag

SEQ ID NO: 66079 - DNA, 25 bp, Probe Sequence
ctcatcttagaccacagactgactt

SEQ ID NO: 66080 - DNA, 25 bp, Probe Sequence
tggactgagaagagaagaatggaga

SEQ ID NO: 66081 - DNA, 25 bp, Probe Sequence
gcttattgagaccatcatagagatc

SEQ ID NO: 66082 - DNA, 25 bp, Probe Sequence
cttattgagaccatcatagagatcg

SEQ ID NO: 66083 - DNA, 25 bp, Probe Sequence
tgtaacatgagcttattgagaccat

SEQ ID NO: 66084 - DNA, 25 bp, Probe Sequence
atgtaacatgagcttattgagacca

SEQ ID NO: 66085 - DNA, 25 bp, Probe Sequence
gtaacatgagcttattgagaccatc

SEQ ID NO: 66086 - DNA, 25 bp, Probe Sequence
ctgagaagagaagaatggagaagcc

SEQ ID NO: 66087 - DNA, 25 bp, Probe Sequence
tctggactgagaagagaagaatgga

SEQ ID NO: 66088 - DNA, 25 bp, Probe Sequence
tgagcttattgagaccatcatagag

SEQ ID NO: 66089 - DNA, 25 bp, Probe Sequence
taacatgagcttattgagaccatca

SEQ ID NO: 66090 - DNA, 25 bp, Probe Sequence
gagcttattgagaccatcatagaga

SEQ ID NO: 66091 - DNA, 25 bp, Probe Sequence
tttgttggtgttatgggaatgagat

SEQ ID NO: 66092 - DNA, 25 bp, Probe Sequence
agttggagttcgtatgttgatgaca

SEQ ID NO: 66093 - DNA, 25 bp, Probe Sequence
aaagttggagttcgtatgttgatga

SEQ ID NO: 66094 - DNA, 25 bp, Probe Sequence
agaccacagactgactttgaaatta

SEQ ID NO: 66095 - DNA, 25 bp, Probe Sequence
tagaccacagactgactttgaaatt

SEQ ID NO: 66096 - DNA, 25 bp, Probe Sequence
ttagaccacagactgactttgaaat

SEQ ID NO: 66097 - DNA, 25 bp, Probe Sequence
ctgattagcagaagtcatgttccag

SEQ ID NO: 66098 - DNA, 25 bp, Probe Sequence
agatgatgaagaggaagacagaatg

SEQ ID NO: 66099 - DNA, 25 bp, Probe Sequence
gaagatgatgaagaggaagacagaa

SEQ ID NO: 66100 - DNA, 25 bp, Probe Sequence
atgaagatgatgaagaggaagacag

SEQ ID NO: 66101 - DNA, 25 bp, Probe Sequence
gatgaagatgatgaagaggaagaca

SEQ ID NO: 66102 - DNA, 25 bp, Probe Sequence
tgatgaagatgatgaagaggaagac

SEQ ID NO: 66103 - DNA, 25 bp, Probe Sequence
ggaggatgaagatgatgaagatgat

SEQ ID NO: 66104 - DNA, 25 bp, Probe Sequence
gaggaggatgaagatgatgaagatg

SEQ ID NO: 66105 - DNA, 25 bp, Probe Sequence
agaggaggatgaagatgatgaagat

SEQ ID NO: 66106 - DNA, 25 bp, Probe Sequence
gaagaggaggatgaagatgatgaag

SEQ ID NO: 66107 - DNA, 25 bp, Probe Sequence
aagatgatgaagaggaagacagaat

SEQ ID NO: 66108 - DNA, 25 bp, Probe Sequence
gttaatgatgtcaaggaagaggaga

SEQ ID NO: 66109 - DNA, 25 bp, Probe Sequence
atgatgaagatgatgaagaggaaga

SEQ ID NO: 66110 - DNA, 25 bp, Probe Sequence
agatgatgaagatgatgaagaggaa

SEQ ID NO: 66111 - DNA, 25 bp, Probe Sequence
aagatgatgaagatgatgaagagga

SEQ ID NO: 66112 - DNA, 25 bp, Probe Sequence
aggatgaagatgatgaagatgatga

SEQ ID NO: 66113 - DNA, 25 bp, Probe Sequence
aagaggaggatgaagatgatgaaga

SEQ ID NO: 66114 - DNA, 25 bp, Probe Sequence
taatgatgtcaaggaagaggagaag

SEQ ID NO: 66115 - DNA, 25 bp, Probe Sequence
tgttaatgatgtcaaggaagaggag

SEQ ID NO: 66116 - DNA, 25 bp, Probe Sequence
cagtgttaatgatgtcaaggaagag

SEQ ID NO: 66117 - DNA, 25 bp, Probe Sequence
aggaggatgaagatgatgaagatga

SEQ ID NO: 66118 - DNA, 25 bp, Probe Sequence
gtgttaatgatgtcaaggaagagga

SEQ ID NO: 66119 - DNA, 25 bp, Probe Sequence
agtgttaatgatgtcaaggaagagg

SEQ ID NO: 66120 - DNA, 25 bp, Probe Sequence
gatgatgaagaggaagacagaatgg

SEQ ID NO: 66121 - DNA, 25 bp, Probe Sequence
tgaagatgatgaagaggaagacaga

SEQ ID NO: 66122 - DNA, 25 bp, Probe Sequence
tttctattccacaaaaccgccattg

SEQ ID NO: 66123 - DNA, 25 bp, Probe Sequence
agagacgctcctcacttcctagatg

SEQ ID NO: 66124 - DNA, 25 bp, Probe Sequence
cagagacgctcctcacttcctagat

SEQ ID NO: 66125 - DNA, 25 bp, Probe Sequence
ttttctattccacaaaaccgccatt

SEQ ID NO: 66126 - DNA, 25 bp, Probe Sequence
cagagacactcctcactttccagac

SEQ ID NO: 66127 - DNA, 25 bp, Probe Sequence
gagacactcctcactttccagactg

SEQ ID NO: 66128 - DNA, 25 bp, Probe Sequence
cttttctattccacaaaaccgccat

SEQ ID NO: 66129 - DNA, 25 bp, Probe Sequence
agagacactcctcactttccagact

SEQ ID NO: 66130 - DNA, 25 bp, Probe Sequence
gttctcaatgagctgttgggtacac

SEQ ID NO: 66131 - DNA, 25 bp, Probe Sequence
ttctcaatgagctgttgggtacacc

SEQ ID NO: 66132 - DNA, 25 bp, Probe Sequence
ccttttctattccacaaaaccgcca

SEQ ID NO: 66133 - DNA, 25 bp, Probe Sequence
cgttctcaatgagctgttgggtaca

SEQ ID NO: 66134 - DNA, 25 bp, Probe Sequence
ctcaatgagctgttgggtacacctc

SEQ ID NO: 66135 - DNA, 25 bp, Probe Sequence
cccttttctattccacaaaaccgcc

SEQ ID NO: 66136 - DNA, 25 bp, Probe Sequence
ccccttttctattccacaaaaccgc

SEQ ID NO: 66137 - DNA, 25 bp, Probe Sequence
tattccacaaaaccgccattgtcat

SEQ ID NO: 66138 - DNA, 25 bp, Probe Sequence
ttctattccacaaaaccgccattgt

SEQ ID NO: 66139 - DNA, 25 bp, Probe Sequence
tctattccacaaaaccgccattgtc

SEQ ID NO: 66140 - DNA, 25 bp, Probe Sequence
ctattccacaaaaccgccattgtca

SEQ ID NO: 66141 - DNA, 25 bp, Probe Sequence
attgtcatcatggcccgttctcaat

SEQ ID NO: 66142 - DNA, 25 bp, Probe Sequence
attccacaaaaccgccattgtcatc

SEQ ID NO: 66143 - DNA, 25 bp, Probe Sequence
atcattaccattacaggaacacagg

SEQ ID NO: 66144 - DNA, 25 bp, Probe Sequence
ggttatggaagtgactaatgctgaa

SEQ ID NO: 66145 - DNA, 25 bp, Probe Sequence
ttggttatggaagtgactaatgctg

SEQ ID NO: 66146 - DNA, 25 bp, Probe Sequence
cattaccattacaggaacacaggac

SEQ ID NO: 66147 - DNA, 25 bp, Probe Sequence
cttggttatggaagtgactaatgct

SEQ ID NO: 66148 - DNA, 25 bp, Probe Sequence
tcattaccattacaggaacacagga

SEQ ID NO: 66149 - DNA, 25 bp, Probe Sequence
ctgttgtatgttggattatgtagga

SEQ ID NO: 66150 - DNA, 25 bp, Probe Sequence
tctgttgtatgttggattatgtagg

SEQ ID NO: 66151 - DNA, 25 bp, Probe Sequence
atcggatcattaccattacaggaac

SEQ ID NO: 66152 - DNA, 25 bp, Probe Sequence
gatcattaccattacaggaacacag

SEQ ID NO: 66153 - DNA, 25 bp, Probe Sequence
ggatcattaccattacaggaacaca

SEQ ID NO: 66154 - DNA, 25 bp, Probe Sequence
gatcggatcattaccattacaggaa

SEQ ID NO: 66155 - DNA, 25 bp, Probe Sequence
aagatcggatcattaccattacagg

SEQ ID NO: 66156 - DNA, 25 bp, Probe Sequence
ttctctgttgtatgttggattatgt

SEQ ID NO: 66157 - DNA, 25 bp, Probe Sequence
attacaggaacacaggaccagatac

SEQ ID NO: 66158 - DNA, 25 bp, Probe Sequence
cattacaggaacacaggaccagata

SEQ ID NO: 66159 - DNA, 25 bp, Probe Sequence
tggttatggaagtgactaatgctga

SEQ ID NO: 66160 - DNA, 25 bp, Probe Sequence
agatcggatcattaccattacagga

SEQ ID NO: 66161 - DNA, 25 bp, Probe Sequence
gaagatcggatcattaccattacag

SEQ ID NO: 66162 - DNA, 25 bp, Probe Sequence
ctacaagttgagtaatggtatgagt

SEQ ID NO: 66163 - DNA, 25 bp, Probe Sequence
tgttgtatgttggattatgtaggaa

SEQ ID NO: 66164 - DNA, 25 bp, Probe Sequence
cggatcattaccattacaggaacac

SEQ ID NO: 66165 - DNA, 25 bp, Probe Sequence
tcggatcattaccattacaggaaca

SEQ ID NO: 66166 - DNA, 25 bp, Probe Sequence
attaccattacaggaacacaggacc

SEQ ID NO: 66167 - DNA, 25 bp, Probe Sequence
cattcctaacctaaccttagagtcc

SEQ ID NO: 66168 - DNA, 25 bp, Probe Sequence
cctgtcattcctaacctaaccttag

SEQ ID NO: 66169 - DNA, 25 bp, Probe Sequence
gtcattcctaacctaaccttagagt

SEQ ID NO: 66170 - DNA, 25 bp, Probe Sequence
tgtcattcctaacctaaccttagag

SEQ ID NO: 66171 - DNA, 25 bp, Probe Sequence
ctgtcattcctaacctaaccttaga

SEQ ID NO: 66172 - DNA, 25 bp, Probe Sequence
tcattcctaacctaaccttagagtc

SEQ ID NO: 66173 - DNA, 25 bp, Probe Sequence
aacattccttacccattagtctcag

SEQ ID NO: 66174 - DNA, 25 bp, Probe Sequence
caacattccttacccattagtctca

SEQ ID NO: 66175 - DNA, 25 bp, Probe Sequence
acattccttacccattagtctcaga

SEQ ID NO: 66176 - DNA, 25 bp, Probe Sequence
cattccttacccattagtctcagaa

SEQ ID NO: 66177 - DNA, 25 bp, Probe Sequence
ctcctccctccttctctaaatgtag

SEQ ID NO: 66178 - DNA, 25 bp, Probe Sequence
ccctgtcattcctaacctaacctta

SEQ ID NO: 66179 - DNA, 25 bp, Probe Sequence
ccttacccattagtctcagaaattg

SEQ ID NO: 66180 - DNA, 25 bp, Probe Sequence
tccttacccattagtctcagaaatt

SEQ ID NO: 66181 - DNA, 25 bp, Probe Sequence
acccattagtctcagaaattgtctt

SEQ ID NO: 66182 - DNA, 25 bp, Probe Sequence
ttccttacccattagtctcagaaat

SEQ ID NO: 66183 - DNA, 25 bp, Probe Sequence
attccttacccattagtctcagaaa

SEQ ID NO: 66184 - DNA, 25 bp, Probe Sequence
accctagaggcaattaaatgatgtc

SEQ ID NO: 66185 - DNA, 25 bp, Probe Sequence
gaccctagaggcaattaaatgatgt

SEQ ID NO: 66186 - DNA, 25 bp, Probe Sequence
gcaacattccttacccattagtctc

SEQ ID NO: 66187 - DNA, 25 bp, Probe Sequence
ctccctccttctctaaatgtagtcc

SEQ ID NO: 66188 - DNA, 25 bp, Probe Sequence
cctccctccttctctaaatgtagtc

SEQ ID NO: 66189 - DNA, 25 bp, Probe Sequence
tctcctccctccttctctaaatgta

SEQ ID NO: 66190 - DNA, 25 bp, Probe Sequence
ggcaattaaatgatgtcctgttcaa

SEQ ID NO: 66191 - DNA, 25 bp, Probe Sequence
ttggctaattgattgtcattggctt

SEQ ID NO: 66192 - DNA, 25 bp, Probe Sequence
tcctcttaagtattcctgtctccaa

SEQ ID NO: 66193 - DNA, 25 bp, Probe Sequence
atcctcttaagtattcctgtctcca

SEQ ID NO: 66194 - DNA, 25 bp, Probe Sequence
ccaatcctcttaagtattcctgtct

SEQ ID NO: 66195 - DNA, 25 bp, Probe Sequence
ttgccaatcctcttaagtattcctg

SEQ ID NO: 66196 - DNA, 25 bp, Probe Sequence
aatcctcttaagtattcctgtctcc

SEQ ID NO: 66197 - DNA, 25 bp, Probe Sequence
gccaatcctcttaagtattcctgtc

SEQ ID NO: 66198 - DNA, 25 bp, Probe Sequence
tgccaatcctcttaagtattcctgt

SEQ ID NO: 66199 - DNA, 25 bp, Probe Sequence
caatcctcttaagtattcctgtctc

SEQ ID NO: 66200 - DNA, 25 bp, Probe Sequence
tggctaattgattgtcattggcttt

SEQ ID NO: 66201 - DNA, 25 bp, Probe Sequence
tttggctaattgattgtcattggct

SEQ ID NO: 66202 - DNA, 25 bp, Probe Sequence
ccacttcgaccttctcaactacttc

SEQ ID NO: 66203 - DNA, 25 bp, Probe Sequence
gaccttctcaactacttcgccattg

SEQ ID NO: 66204 - DNA, 25 bp, Probe Sequence
tccataaagtttagaaatcgttcaa

SEQ ID NO: 66205 - DNA, 25 bp, Probe Sequence
ttccataaagtttagaaatcgttca

SEQ ID NO: 66206 - DNA, 25 bp, Probe Sequence
tttgccaatcctcttaagtattcct

SEQ ID NO: 66207 - DNA, 25 bp, Probe Sequence
gtttgccaatcctcttaagtattcc

SEQ ID NO: 66208 - DNA, 25 bp, Probe Sequence
ggtttgccaatcctcttaagtattc

SEQ ID NO: 66209 - DNA, 25 bp, Probe Sequence
cctcttaagtattcctgtctccaaa

SEQ ID NO: 66210 - DNA, 25 bp, Probe Sequence
gaggagaactgagactctgccttac

SEQ ID NO: 66211 - DNA, 25 bp, Probe Sequence
cggtttgccaatcctcttaagtatt

SEQ ID NO: 66212 - DNA, 25 bp, Probe Sequence
ctcttaagtattcctgtctccaaag

SEQ ID NO: 66213 - DNA, 25 bp, Probe Sequence
gagaactgagactctgccttaccac

SEQ ID NO: 66214 - DNA, 25 bp, Probe Sequence
ccataaagtttagaaatcgttcaaa

SEQ ID NO: 66215 - DNA, 25 bp, Probe Sequence
agaagagcacaagaaccagactatc

SEQ ID NO: 66216 - DNA, 25 bp, Probe Sequence
cagaagagcacaagaaccagactat

SEQ ID NO: 66217 - DNA, 25 bp, Probe Sequence
gaagagcacaagaaccagactatcg

SEQ ID NO: 66218 - DNA, 25 bp, Probe Sequence
aagagcacaagaaccagactatcga

SEQ ID NO: 66219 - DNA, 25 bp, Probe Sequence
tgagtatcttccccaccctattaaa

SEQ ID NO: 66220 - DNA, 25 bp, Probe Sequence
ttgagtatcttccccaccctattaa

SEQ ID NO: 66221 - DNA, 25 bp, Probe Sequence
ttccccaccctattaaattacatcc

SEQ ID NO: 66222 - DNA, 25 bp, Probe Sequence
cttgagtatcttccccaccctatta

SEQ ID NO: 66223 - DNA, 25 bp, Probe Sequence
gcagaagagcacaagaaccagacta

SEQ ID NO: 66224 - DNA, 25 bp, Probe Sequence
gagtatcttccccaccctattaaat

SEQ ID NO: 66225 - DNA, 25 bp, Probe Sequence
cctattaaattacatccggtgcaaa

SEQ ID NO: 66226 - DNA, 25 bp, Probe Sequence
tcttccccaccctattaaattacat

SEQ ID NO: 66227 - DNA, 25 bp, Probe Sequence
atcttccccaccctattaaattaca

SEQ ID NO: 66228 - DNA, 25 bp, Probe Sequence
cttccccaccctattaaattacatc

SEQ ID NO: 66229 - DNA, 25 bp, Probe Sequence
agtatcttccccaccctattaaatt

SEQ ID NO: 66230 - DNA, 25 bp, Probe Sequence
agagcacaagaaccagactatcgag

SEQ ID NO: 66231 - DNA, 25 bp, Probe Sequence
ccctattaaattacatccggtgcaa

SEQ ID NO: 66232 - DNA, 25 bp, Probe Sequence
tccccaccctattaaattacatccg

SEQ ID NO: 66233 - DNA, 25 bp, Probe Sequence
tcttgagtatcttccccaccctatt

SEQ ID NO: 66234 - DNA, 25 bp, Probe Sequence
ctcttgagtatcttccccaccctat

SEQ ID NO: 66235 - DNA, 25 bp, Probe Sequence
tatcttccccaccctattaaattac

SEQ ID NO: 66236 - DNA, 25 bp, Probe Sequence
gtatcttccccaccctattaaatta

SEQ ID NO: 66237 - DNA, 25 bp, Probe Sequence
accctattaaattacatccggtgca

SEQ ID NO: 66238 - DNA, 25 bp, Probe Sequence
cccaccctattaaattacatccggt

SEQ ID NO: 66239 - DNA, 25 bp, Probe Sequence
ctttgtgaataccctatctgactcc

SEQ ID NO: 66240 - DNA, 25 bp, Probe Sequence
cctttgtgaataccctatctgactc

SEQ ID NO: 66241 - DNA, 25 bp, Probe Sequence
ttgtgaataccctatctgactcctt

SEQ ID NO: 66242 - DNA, 25 bp, Probe Sequence
tttgtgaataccctatctgactcct

SEQ ID NO: 66243 - DNA, 25 bp, Probe Sequence
tcctttgtgaataccctatctgact

SEQ ID NO: 66244 - DNA, 25 bp, Probe Sequence
gccagtgaaggtttgaagagtataa

SEQ ID NO: 66245 - DNA, 25 bp, Probe Sequence
cattatcttgctgcatgtattctgg

SEQ ID NO: 66246 - DNA, 25 bp, Probe Sequence
ggtcattatcttgctgcatgtattc

SEQ ID NO: 66247 - DNA, 25 bp, Probe Sequence
tcattatcttgctgcatgtattctg

SEQ ID NO: 66248 - DNA, 25 bp, Probe Sequence
gtcattatcttgctgcatgtattct

SEQ ID NO: 66249 - DNA, 25 bp, Probe Sequence
ctcctcaattcttcctttattcagc

SEQ ID NO: 66250 - DNA, 25 bp, Probe Sequence
ttcctttgtgaataccctatctgac

SEQ ID NO: 66251 - DNA, 25 bp, Probe Sequence
ctacatctttagaggaagcacaact

SEQ ID NO: 66252 - DNA, 25 bp, Probe Sequence
gactacatctttagaggaagcacaa

SEQ ID NO: 66253 - DNA, 25 bp, Probe Sequence
tggtcattatcttgctgcatgtatt

SEQ ID NO: 66254 - DNA, 25 bp, Probe Sequence
tacatctttagaggaagcacaactg

SEQ ID NO: 66255 - DNA, 25 bp, Probe Sequence
actacatctttagaggaagcacaac

SEQ ID NO: 66256 - DNA, 25 bp, Probe Sequence
tttcctttgtgaataccctatctga

SEQ ID NO: 66257 - DNA, 25 bp, Probe Sequence
tttgaagagtataaacccaggtgag

SEQ ID NO: 66258 - DNA, 25 bp, Probe Sequence
tgtgaataccctatctgactccttg

SEQ ID NO: 66259 - DNA, 25 bp, Probe Sequence
cagactacatctttagaggaagcac

SEQ ID NO: 66260 - DNA, 25 bp, Probe Sequence
ccagtgaaggtttgaagagtataaa

SEQ ID NO: 66261 - DNA, 25 bp, Probe Sequence
ctggtcattatcttgctgcatgtat

SEQ ID NO: 66262 - DNA, 25 bp, Probe Sequence
ttgaagagtataaacccaggtgaga

SEQ ID NO: 66263 - DNA, 25 bp, Probe Sequence
atatccaagaactgtatgacaccac

SEQ ID NO: 66264 - DNA, 25 bp, Probe Sequence
tatccaagaactgtatgacaccacc

SEQ ID NO: 66265 - DNA, 25 bp, Probe Sequence
aggtgatatccaagaactgtatgac

SEQ ID NO: 66266 - DNA, 25 bp, Probe Sequence
aaggtgatatccaagaactgtatga

SEQ ID NO: 66267 - DNA, 25 bp, Probe Sequence
caaggtgatatccaagaactgtatg

SEQ ID NO: 66268 - DNA, 25 bp, Probe Sequence
actggaatggaagacataaaccttg

SEQ ID NO: 66269 - DNA, 25 bp, Probe Sequence
cactggaatggaagacataaacctt

SEQ ID NO: 66270 - DNA, 25 bp, Probe Sequence
tctatttggacgatgatgtaattgt

SEQ ID NO: 66271 - DNA, 25 bp, Probe Sequence
gaatggaagacataaaccttgggac

SEQ ID NO: 66272 - DNA, 25 bp, Probe Sequence
ctggaatggaagacataaaccttgg

SEQ ID NO: 66273 - DNA, 25 bp, Probe Sequence
gatatccaagaactgtatgacacca

SEQ ID NO: 66274 - DNA, 25 bp, Probe Sequence
tgatatccaagaactgtatgacacc

SEQ ID NO: 66275 - DNA, 25 bp, Probe Sequence
ggtgatatccaagaactgtatgaca

SEQ ID NO: 66276 - DNA, 25 bp, Probe Sequence
gtacaaggtgatatccaagaactgt

SEQ ID NO: 66277 - DNA, 25 bp, Probe Sequence
acaaggtgatatccaagaactgtat

SEQ ID NO: 66278 - DNA, 25 bp, Probe Sequence
atggaagacataaaccttgggactt

SEQ ID NO: 66279 - DNA, 25 bp, Probe Sequence
aatggaagacataaaccttgggact

SEQ ID NO: 66280 - DNA, 25 bp, Probe Sequence
gtgatatccaagaactgtatgacac

SEQ ID NO: 66281 - DNA, 25 bp, Probe Sequence
ttccctagtgttcacaacgacttat

SEQ ID NO: 66282 - DNA, 25 bp, Probe Sequence
gcagggatatttaaactcaatcacc

SEQ ID NO: 66283 - DNA, 25 bp, Probe Sequence
tagtgttcacaacgacttatgggaa

SEQ ID NO: 66284 - DNA, 25 bp, Probe Sequence
ggaatggaagacataaaccttggga

SEQ ID NO: 66285 - DNA, 25 bp, Probe Sequence
gaatccagatgccagatattcggag

SEQ ID NO: 66286 - DNA, 25 bp, Probe Sequence
atccaagaactgtatgacaccacct

SEQ ID NO: 66287 - DNA, 25 bp, Probe Sequence
tttctttctctctctctacagtgac

SEQ ID NO: 66288 - DNA, 25 bp, Probe Sequence
ttctttctctctctctacagtgact

SEQ ID NO: 66289 - DNA, 25 bp, Probe Sequence
ggctcctatttctttctctctctct

SEQ ID NO: 66290 - DNA, 25 bp, Probe Sequence
gctcctatttctttctctctctcta

SEQ ID NO: 66291 - DNA, 25 bp, Probe Sequence
atttctttctctctctctacagtga

SEQ ID NO: 66292 - DNA, 25 bp, Probe Sequence
gggctcctatttctttctctctctc

SEQ ID NO: 66293 - DNA, 25 bp, Probe Sequence
tcctatttctttctctctctctaca

SEQ ID NO: 66294 - DNA, 25 bp, Probe Sequence
cctatttctttctctctctctacag

SEQ ID NO: 66295 - DNA, 25 bp, Probe Sequence
ctcctatttctttctctctctctac

SEQ ID NO: 66296 - DNA, 25 bp, Probe Sequence
tttctgggtcgtctatgtgtcatat

SEQ ID NO: 66297 - DNA, 25 bp, Probe Sequence
tttacccattcgttatctgtggaaa

SEQ ID NO: 66298 - DNA, 25 bp, Probe Sequence
tatttctttctctctctctacagtg

SEQ ID NO: 66299 - DNA, 25 bp, Probe Sequence
gtccatcgaggtgtttcataagttt

SEQ ID NO: 66300 - DNA, 25 bp, Probe Sequence
tttgtccatcgaggtgtttcataag

SEQ ID NO: 66301 - DNA, 25 bp, Probe Sequence
ctttgtccatcgaggtgtttcataa

SEQ ID NO: 66302 - DNA, 25 bp, Probe Sequence
tctttctctctctctacagtgactg

SEQ ID NO: 66303 - DNA, 25 bp, Probe Sequence
ctatttctttctctctctctacagt

SEQ ID NO: 66304 - DNA, 25 bp, Probe Sequence
ctttctctctctctacagtgactgg

SEQ ID NO: 66305 - DNA, 25 bp, Probe Sequence
ttgttttacccattcgttatctgtg

SEQ ID NO: 66306 - DNA, 25 bp, Probe Sequence
gttgttttacccattcgttatctgt

SEQ ID NO: 66307 - DNA, 25 bp, Probe Sequence
tgttgttttacccattcgttatctg

SEQ ID NO: 66308 - DNA, 25 bp, Probe Sequence
tgtccatcgaggtgtttcataagtt

SEQ ID NO: 66309 - DNA, 25 bp, Probe Sequence
ttgtccatcgaggtgtttcataagt

SEQ ID NO: 66310 - DNA, 25 bp, Probe Sequence
ttgttgttttacccattcgttatct

SEQ ID NO: 66311 - DNA, 25 bp, Probe Sequence
gaataagacttacaacagcaacctc

SEQ ID NO: 66312 - DNA, 25 bp, Probe Sequence
tgaataagacttacaacagcaacct

SEQ ID NO: 66313 - DNA, 25 bp, Probe Sequence
gtgaataagacttacaacagcaacc

SEQ ID NO: 66314 - DNA, 25 bp, Probe Sequence
cggaattgctattggagatggatat

SEQ ID NO: 66315 - DNA, 25 bp, Probe Sequence
cgtgaataagacttacaacagcaac

SEQ ID NO: 66316 - DNA, 25 bp, Probe Sequence
ttgctattggagatggatattctga

SEQ ID NO: 66317 - DNA, 25 bp, Probe Sequence
aataagacttacaacagcaacctct

SEQ ID NO: 66318 - DNA, 25 bp, Probe Sequence
tgctattggagatggatattctgat

SEQ ID NO: 66319 - DNA, 25 bp, Probe Sequence
aactactagatggcgacttaacaag

SEQ ID NO: 66320 - DNA, 25 bp, Probe Sequence
ggaattgctattggagatggatatt

SEQ ID NO: 66321 - DNA, 25 bp, Probe Sequence
gatacagtacagtcagttaagccat

SEQ ID NO: 66322 - DNA, 25 bp, Probe Sequence
aagatacagtacagtcagttaagcc

SEQ ID NO: 66323 - DNA, 25 bp, Probe Sequence
cgagaagatacagtacagtcagtta

SEQ ID NO: 66324 - DNA, 25 bp, Probe Sequence
atagaacacatcaggaagcagaact

SEQ ID NO: 66325 - DNA, 25 bp, Probe Sequence
catagaacacatcaggaagcagaac

SEQ ID NO: 66326 - DNA, 25 bp, Probe Sequence
ccgtgaataagacttacaacagcaa

SEQ ID NO: 66327 - DNA, 25 bp, Probe Sequence
acggaattgctattggagatggata

SEQ ID NO: 66328 - DNA, 25 bp, Probe Sequence
gacttacaacagcaacctcttcttc

SEQ ID NO: 66329 - DNA, 25 bp, Probe Sequence
agatacagtacagtcagttaagcca

SEQ ID NO: 66330 - DNA, 25 bp, Probe Sequence
atacagtacagtcagttaagccatg

SEQ ID NO: 66331 - DNA, 25 bp, Probe Sequence
gaagatacagtacagtcagttaagc

SEQ ID NO: 66332 - DNA, 25 bp, Probe Sequence
attgctattggagatggatattctg

SEQ ID NO: 66333 - DNA, 25 bp, Probe Sequence
acttacaacagcaacctcttcttct

SEQ ID NO: 66334 - DNA, 25 bp, Probe Sequence
ctgaacggaattgctattggagatg

SEQ ID NO: 66335 - DNA, 25 bp, Probe Sequence
ggtaacagaggagaataagaaggag

SEQ ID NO: 66336 - DNA, 25 bp, Probe Sequence
tggtaacagaggagaataagaagga

SEQ ID NO: 66337 - DNA, 25 bp, Probe Sequence
ttggtaacagaggagaataagaagg

SEQ ID NO: 66338 - DNA, 25 bp, Probe Sequence
atacctgttcctcttctcattctct

SEQ ID NO: 66339 - DNA, 25 bp, Probe Sequence
catacctgttcctcttctcattctc

SEQ ID NO: 66340 - DNA, 25 bp, Probe Sequence
ggcaagtcagtcagatatacagata

SEQ ID NO: 66341 - DNA, 25 bp, Probe Sequence
gtaacagaggagaataagaaggagt

SEQ ID NO: 66342 - DNA, 25 bp, Probe Sequence
acagatatggagagtgaagattacc

SEQ ID NO: 66343 - DNA, 25 bp, Probe Sequence
ctaatgattcaatgcgagacaagat

SEQ ID NO: 66344 - DNA, 25 bp, Probe Sequence
cagaggagaataagaaggagtatgt

SEQ ID NO: 66345 - DNA, 25 bp, Probe Sequence
acagaggagaataagaaggagtatg

SEQ ID NO: 66346 - DNA, 25 bp, Probe Sequence
tacctgttcctcttctcattctctc

SEQ ID NO: 66347 - DNA, 25 bp, Probe Sequence
taatgattcaatgcgagacaagatt

SEQ ID NO: 66348 - DNA, 25 bp, Probe Sequence
caacatcttggtaacagaggagaat

SEQ ID NO: 66349 - DNA, 25 bp, Probe Sequence
acatcttggtaacagaggagaataa

SEQ ID NO: 66350 - DNA, 25 bp, Probe Sequence
aacatcttggtaacagaggagaata

SEQ ID NO: 66351 - DNA, 25 bp, Probe Sequence
aatccaacactgaataccacaagta

SEQ ID NO: 66352 - DNA, 25 bp, Probe Sequence
aacagaggagaataagaaggagtat

SEQ ID NO: 66353 - DNA, 25 bp, Probe Sequence
cttggtaacagaggagaataagaag

SEQ ID NO: 66354 - DNA, 25 bp, Probe Sequence
catcttggtaacagaggagaataag

SEQ ID NO: 66355 - DNA, 25 bp, Probe Sequence
gctaatgattcaatgcgagacaaga

SEQ ID NO: 66356 - DNA, 25 bp, Probe Sequence
gaaggcttctatgagatcattccaa

SEQ ID NO: 66357 - DNA, 25 bp, Probe Sequence
tcacctacaccatcaatccatcttc

SEQ ID NO: 66358 - DNA, 25 bp, Probe Sequence
gtaccagtccaactctattcagatc

SEQ ID NO: 66359 - DNA, 25 bp, Probe Sequence
aatgatgataatgtgccatgatgtt

SEQ ID NO: 66360 - DNA, 25 bp, Probe Sequence
ctgaggaatgtatttggctttgatt

SEQ ID NO: 66361 - DNA, 25 bp, Probe Sequence
agacacgttagttataatcaccttg

SEQ ID NO: 66362 - DNA, 25 bp, Probe Sequence
ttggctttgattacacactaagttt

SEQ ID NO: 66363 - DNA, 25 bp, Probe Sequence
tttggctttgattacacactaagtt

SEQ ID NO: 66364 - DNA, 25 bp, Probe Sequence
tgaggaatgtatttggctttgatta

SEQ ID NO: 66365 - DNA, 25 bp, Probe Sequence
atttggctttgattacacactaagt

SEQ ID NO: 66366 - DNA, 25 bp, Probe Sequence
gaggaatgtatttggctttgattac

SEQ ID NO: 66367 - DNA, 25 bp, Probe Sequence
ttgtcaaatgatgataatgtgccat

SEQ ID NO: 66368 - DNA, 25 bp, Probe Sequence
gttgtcaaatgatgataatgtgcca

SEQ ID NO: 66369 - DNA, 25 bp, Probe Sequence
tgttgtcaaatgatgataatgtgcc

SEQ ID NO: 66370 - DNA, 25 bp, Probe Sequence
tgacagtttcaaagcaggtaaattg

SEQ ID NO: 66371 - DNA, 25 bp, Probe Sequence
cctgaggaatgtatttggctttgat

SEQ ID NO: 66372 - DNA, 25 bp, Probe Sequence
ctgttgtcaaatgatgataatgtgc

SEQ ID NO: 66373 - DNA, 25 bp, Probe Sequence
tgtagacacgttagttataatcacc

SEQ ID NO: 66374 - DNA, 25 bp, Probe Sequence
tgagtaggaaaggactttgatttgt

SEQ ID NO: 66375 - DNA, 25 bp, Probe Sequence
gacagtttcaaagcaggtaaattgt

SEQ ID NO: 66376 - DNA, 25 bp, Probe Sequence
gagtaggaaaggactttgatttgtg

SEQ ID NO: 66377 - DNA, 25 bp, Probe Sequence
gacacgttagttataatcaccttgt

SEQ ID NO: 66378 - DNA, 25 bp, Probe Sequence
gtagacacgttagttataatcacct

SEQ ID NO: 66379 - DNA, 25 bp, Probe Sequence
acagtttcaaagcaggtaaattgta

SEQ ID NO: 66380 - DNA, 25 bp, Probe Sequence
attgtttgacccagtatgtcttgta

SEQ ID NO: 66381 - DNA, 25 bp, Probe Sequence
ttgagtaggaaaggactttgatttg

SEQ ID NO: 66382 - DNA, 25 bp, Probe Sequence
cagtttcaaagcaggtaaattgtaa

SEQ ID NO: 66383 - DNA, 25 bp, Probe Sequence
tgataccgaagaattgttgaggatt

SEQ ID NO: 66384 - DNA, 25 bp, Probe Sequence
gtgataccgaagaattgttgaggat

SEQ ID NO: 66385 - DNA, 25 bp, Probe Sequence
tagtctcatagtagtagtgttgctt

SEQ ID NO: 66386 - DNA, 25 bp, Probe Sequence
atagtctcatagtagtagtgttgct

SEQ ID NO: 66387 - DNA, 25 bp, Probe Sequence
agaaggaagtgtgatgactgatgat

SEQ ID NO: 66388 - DNA, 25 bp, Probe Sequence
aagtgtgatgactgatgatcttgaa

SEQ ID NO: 66389 - DNA, 25 bp, Probe Sequence
ttagtgttagcagttgacaattagg

SEQ ID NO: 66390 - DNA, 25 bp, Probe Sequence
gaagtgtgatgactgatgatcttga

SEQ ID NO: 66391 - DNA, 25 bp, Probe Sequence
tagtgttagcagttgacaattaggc

SEQ ID NO: 66392 - DNA, 25 bp, Probe Sequence
ttagtatgctccgtagagacagttc

SEQ ID NO: 66393 - DNA, 25 bp, Probe Sequence
gagagaaggaagtgtgatgactgat

SEQ ID NO: 66394 - DNA, 25 bp, Probe Sequence
gaaggaagtgtgatgactgatgatc

SEQ ID NO: 66395 - DNA, 25 bp, Probe Sequence
ggaagtgtgatgactgatgatcttg

SEQ ID NO: 66396 - DNA, 25 bp, Probe Sequence
aggaagtgtgatgactgatgatctt

SEQ ID NO: 66397 - DNA, 25 bp, Probe Sequence
aaggaagtgtgatgactgatgatct

SEQ ID NO: 66398 - DNA, 25 bp, Probe Sequence
gagaaggaagtgtgatgactgatga

SEQ ID NO: 66399 - DNA, 25 bp, Probe Sequence
agagaaggaagtgtgatgactgatg

SEQ ID NO: 66400 - DNA, 25 bp, Probe Sequence
ttgagagaaggaagtgtgatgactg

SEQ ID NO: 66401 - DNA, 25 bp, Probe Sequence
aattctgccacttgatcgtattcac

SEQ ID NO: 66402 - DNA, 25 bp, Probe Sequence
caattctgccacttgatcgtattca

SEQ ID NO: 66403 - DNA, 25 bp, Probe Sequence
aatctgtattctcgaagcaattctg

SEQ ID NO: 66404 - DNA, 25 bp, Probe Sequence
tatgctaaacggtggaatgtatagg

SEQ ID NO: 66405 - DNA, 25 bp, Probe Sequence
tcttatgctaaacggtggaatgtat

SEQ ID NO: 66406 - DNA, 25 bp, Probe Sequence
agcatttctttcctaatctcactca

SEQ ID NO: 66407 - DNA, 25 bp, Probe Sequence
atgactgtgaattacgacttctctt

SEQ ID NO: 66408 - DNA, 25 bp, Probe Sequence
aatgactgtgaattacgacttctct

SEQ ID NO: 66409 - DNA, 25 bp, Probe Sequence
tgactgtgaattacgacttctcttg

SEQ ID NO: 66410 - DNA, 25 bp, Probe Sequence
ttcattacctcctacttgccattca

SEQ ID NO: 66411 - DNA, 25 bp, Probe Sequence
gactgtgaattacgacttctcttgc

SEQ ID NO: 66412 - DNA, 25 bp, Probe Sequence
tcattacctcctacttgccattcac

SEQ ID NO: 66413 - DNA, 25 bp, Probe Sequence
atttcattacctcctacttgccatt

SEQ ID NO: 66414 - DNA, 25 bp, Probe Sequence
tccagatttcattacctcctacttg

SEQ ID NO: 66415 - DNA, 25 bp, Probe Sequence
gtcatttccagatttcattacctcc

SEQ ID NO: 66416 - DNA, 25 bp, Probe Sequence
tcatttccagatttcattacctcct

SEQ ID NO: 66417 - DNA, 25 bp, Probe Sequence
gatttcattacctcctacttgccat

SEQ ID NO: 66418 - DNA, 25 bp, Probe Sequence
tttcattacctcctacttgccattc

SEQ ID NO: 66419 - DNA, 25 bp, Probe Sequence
ttccagatttcattacctcctactt

SEQ ID NO: 66420 - DNA, 25 bp, Probe Sequence
tttccagatttcattacctcctact

SEQ ID NO: 66421 - DNA, 25 bp, Probe Sequence
tgtcatttccagatttcattacctc

SEQ ID NO: 66422 - DNA, 25 bp, Probe Sequence
tagcaaatgactgtgaattacgact

SEQ ID NO: 66423 - DNA, 25 bp, Probe Sequence
ctttctgtagcaaatgactgtgaat

SEQ ID NO: 66424 - DNA, 25 bp, Probe Sequence
gtagcaaatgactgtgaattacgac

SEQ ID NO: 66425 - DNA, 25 bp, Probe Sequence
ctgtagcaaatgactgtgaattacg

SEQ ID NO: 66426 - DNA, 25 bp, Probe Sequence
tctgtagcaaatgactgtgaattac

SEQ ID NO: 66427 - DNA, 25 bp, Probe Sequence
tctgaagaggagggagtattagatt

SEQ ID NO: 66428 - DNA, 25 bp, Probe Sequence
ttctgaagaggagggagtattagat

SEQ ID NO: 66429 - DNA, 25 bp, Probe Sequence
tgtagcaaatgactgtgaattacga

SEQ ID NO: 66430 - DNA, 25 bp, Probe Sequence
cagatttcattacctcctacttgcc

SEQ ID NO: 66431 - DNA, 25 bp, Probe Sequence
gtattacattaccattgccactgat

SEQ ID NO: 66432 - DNA, 25 bp, Probe Sequence
tattacattaccattgccactgatt

SEQ ID NO: 66433 - DNA, 25 bp, Probe Sequence
tgtattacattaccattgccactga

SEQ ID NO: 66434 - DNA, 25 bp, Probe Sequence
aatgtaataaagtcagagtggtggt

SEQ ID NO: 66435 - DNA, 25 bp, Probe Sequence
attacattaccattgccactgattt

SEQ ID NO: 66436 - DNA, 25 bp, Probe Sequence
tgtaataaagtcagagtggtggtat

SEQ ID NO: 66437 - DNA, 25 bp, Probe Sequence
atgtaataaagtcagagtggtggta

SEQ ID NO: 66438 - DNA, 25 bp, Probe Sequence
gtaataaagtcagagtggtggtatg

SEQ ID NO: 66439 - DNA, 25 bp, Probe Sequence
aaatgtaataaagtcagagtggtgg

SEQ ID NO: 66440 - DNA, 25 bp, Probe Sequence
tttctgctggtggataaacattaaa

SEQ ID NO: 66441 - DNA, 25 bp, Probe Sequence
ataaagtcagagtggtggtatgaaa

SEQ ID NO: 66442 - DNA, 25 bp, Probe Sequence
aataaagtcagagtggtggtatgaa

SEQ ID NO: 66443 - DNA, 25 bp, Probe Sequence
tttctgctggtggatttacatatta

SEQ ID NO: 66444 - DNA, 25 bp, Probe Sequence
taataaagtcagagtggtggtatga

SEQ ID NO: 66445 - DNA, 25 bp, Probe Sequence
ttctgctggtggatttacatattaa

SEQ ID NO: 66446 - DNA, 25 bp, Probe Sequence
agtaaatgtagggttaagcatggac

SEQ ID NO: 66447 - DNA, 25 bp, Probe Sequence
tagtaaatgtagggttaagcatgga

SEQ ID NO: 66448 - DNA, 25 bp, Probe Sequence
gtagtaaatgtagggttaagcatgg

SEQ ID NO: 66449 - DNA, 25 bp, Probe Sequence
tctgctggtggatttacatattaaa

SEQ ID NO: 66450 - DNA, 25 bp, Probe Sequence
tgtagtaaatgtagggttaagcatg

SEQ ID NO: 66451 - DNA, 25 bp, Probe Sequence
catgtagtaaatgtagggttaagca

SEQ ID NO: 66452 - DNA, 25 bp, Probe Sequence
atgtagtaaatgtagggttaagcat

SEQ ID NO: 66453 - DNA, 25 bp, Probe Sequence
taaatgtagggttaagcatggacag

SEQ ID NO: 66454 - DNA, 25 bp, Probe Sequence
tcatgtagtaaatgtagggttaagc

SEQ ID NO: 66455 - DNA, 25 bp, Probe Sequence
cgtagaatatgtgctgtctgtgaga

SEQ ID NO: 66456 - DNA, 25 bp, Probe Sequence
ctagagctgtgacgtagaatatgtg

SEQ ID NO: 66457 - DNA, 25 bp, Probe Sequence
cctagagctgtgacgtagaatatgt

SEQ ID NO: 66458 - DNA, 25 bp, Probe Sequence
tagagctgtgacgtagaatatgtgc

SEQ ID NO: 66459 - DNA, 25 bp, Probe Sequence
tgtgacttgtaaactgtctagtgtt

SEQ ID NO: 66460 - DNA, 25 bp, Probe Sequence
gtgtgacttgtaaactgtctagtgt

SEQ ID NO: 66461 - DNA, 25 bp, Probe Sequence
tcaccatgtgtctatctgaaggttg

SEQ ID NO: 66462 - DNA, 25 bp, Probe Sequence
gtcaccatgtgtctatctgaaggtt

SEQ ID NO: 66463 - DNA, 25 bp, Probe Sequence
caggtgtgacttgtaaactgtctag

SEQ ID NO: 66464 - DNA, 25 bp, Probe Sequence
aagtcacagctcaaggaaagataaa

SEQ ID NO: 66465 - DNA, 25 bp, Probe Sequence
aatttgtaacaactctgagcacatg

SEQ ID NO: 66466 - DNA, 25 bp, Probe Sequence
ctatcagcttaatttggcagagaaa

SEQ ID NO: 66467 - DNA, 25 bp, Probe Sequence
agtcacagctcaaggaaagataaag

SEQ ID NO: 66468 - DNA, 25 bp, Probe Sequence
gaagtcacagctcaaggaaagataa

SEQ ID NO: 66469 - DNA, 25 bp, Probe Sequence
aatctctatcagcttaatttggcag

SEQ ID NO: 66470 - DNA, 25 bp, Probe Sequence
cttctccttcccacagacatcttac

SEQ ID NO: 66471 - DNA, 25 bp, Probe Sequence
acgtagaatatgtgctgtctgtgag

SEQ ID NO: 66472 - DNA, 25 bp, Probe Sequence
ggtgtgacttgtaaactgtctagtg

SEQ ID NO: 66473 - DNA, 25 bp, Probe Sequence
aggtgtgacttgtaaactgtctagt

SEQ ID NO: 66474 - DNA, 25 bp, Probe Sequence
tctatcagcttaatttggcagagaa

SEQ ID NO: 66475 - DNA, 25 bp, Probe Sequence
atctctatcagcttaatttggcaga

SEQ ID NO: 66476 - DNA, 25 bp, Probe Sequence
ttgtccactttacctttatggtgag

SEQ ID NO: 66477 - DNA, 25 bp, Probe Sequence
caatctctatcagcttaatttggca

SEQ ID NO: 66478 - DNA, 25 bp, Probe Sequence
gttgtccactttacctttatggtga

SEQ ID NO: 66479 - DNA, 25 bp, Probe Sequence
gatggaagtctatgacctgaacatt

SEQ ID NO: 66480 - DNA, 25 bp, Probe Sequence
atggaagtctatgacctgaacattg

SEQ ID NO: 66481 - DNA, 25 bp, Probe Sequence
agatggaagtctatgacctgaacat

SEQ ID NO: 66482 - DNA, 25 bp, Probe Sequence
gagatggaagtctatgacctgaaca

SEQ ID NO: 66483 - DNA, 25 bp, Probe Sequence
tatgacctgaacattggcggaatta

SEQ ID NO: 66484 - DNA, 25 bp, Probe Sequence
ggctacttcatcaacaataaacagg

SEQ ID NO: 66485 - DNA, 25 bp, Probe Sequence
gtggctacttcatcaacaataaaca

SEQ ID NO: 66486 - DNA, 25 bp, Probe Sequence
tggctacttcatcaacaataaacag

SEQ ID NO: 66487 - DNA, 25 bp, Probe Sequence
gacctgaacattggcggaattattg

SEQ ID NO: 66488 - DNA, 25 bp, Probe Sequence
caacaataaacaggatggagaaagt

SEQ ID NO: 66489 - DNA, 25 bp, Probe Sequence
gctacttcatcaacaataaacagga

SEQ ID NO: 66490 - DNA, 25 bp, Probe Sequence
cgtggctacttcatcaacaataaac

SEQ ID NO: 66491 - DNA, 25 bp, Probe Sequence
tcaacaataaacaggatggagaaag

SEQ ID NO: 66492 - DNA, 25 bp, Probe Sequence
ggagatggaagtctatgacctgaac

SEQ ID NO: 66493 - DNA, 25 bp, Probe Sequence
cgcaattcttctttccacttaaact

SEQ ID NO: 66494 - DNA, 25 bp, Probe Sequence
tcgcaattcttctttccacttaaac

SEQ ID NO: 66495 - DNA, 25 bp, Probe Sequence
ttcgcaattcttctttccacttaaa

SEQ ID NO: 66496 - DNA, 25 bp, Probe Sequence
tttcgcaattcttctttccacttaa

SEQ ID NO: 66497 - DNA, 25 bp, Probe Sequence
atttcgcaattcttctttccactta

SEQ ID NO: 66498 - DNA, 25 bp, Probe Sequence
gatttcgcaattcttctttccactt

SEQ ID NO: 66499 - DNA, 25 bp, Probe Sequence
aacaggatggagaaagttacaagaa

SEQ ID NO: 66500 - DNA, 25 bp, Probe Sequence
aaacaggatggagaaagttacaaga

SEQ ID NO: 66501 - DNA, 25 bp, Probe Sequence
tggaagtctatgacctgaacattgg

SEQ ID NO: 66502 - DNA, 25 bp, Probe Sequence
attgatgagattgtgatcgagttaa

SEQ ID NO: 66503 - DNA, 25 bp, Probe Sequence
gaagtacatcattgaactcaaccac

SEQ ID NO: 66504 - DNA, 25 bp, Probe Sequence
agtacatcattgaactcaaccacat

SEQ ID NO: 66505 - DNA, 25 bp, Probe Sequence
aagtacatcattgaactcaaccaca

SEQ ID NO: 66506 - DNA, 25 bp, Probe Sequence
gtacatcattgaactcaaccacatg

SEQ ID NO: 66507 - DNA, 25 bp, Probe Sequence
ggaagtacatcattgaactcaacca

SEQ ID NO: 66508 - DNA, 25 bp, Probe Sequence
ggacggatctagctcctgtatatat

SEQ ID NO: 66509 - DNA, 25 bp, Probe Sequence
tacatcattgaactcaaccacatga

SEQ ID NO: 66510 - DNA, 25 bp, Probe Sequence
gggaagtacatcattgaactcaacc

SEQ ID NO: 66511 - DNA, 25 bp, Probe Sequence
gacggatctagctcctgtatatata

SEQ ID NO: 66512 - DNA, 25 bp, Probe Sequence
tatagttatggcctgtgttctgctc

SEQ ID NO: 66513 - DNA, 25 bp, Probe Sequence
ctatagttatggcctgtgttctgct

SEQ ID NO: 66514 - DNA, 25 bp, Probe Sequence
cactttgggctggaaatatgaacag

SEQ ID NO: 66515 - DNA, 25 bp, Probe Sequence
ataaaacaatggagtggagacaaaa

SEQ ID NO: 66516 - DNA, 25 bp, Probe Sequence
aataaaacaatggagtggagacaaa

SEQ ID NO: 66517 - DNA, 25 bp, Probe Sequence
acggatctagctcctgtatatatat

SEQ ID NO: 66518 - DNA, 25 bp, Probe Sequence
taataaaacaatggagtggagacaa

SEQ ID NO: 66519 - DNA, 25 bp, Probe Sequence
cctatagttatggcctgtgttctgc

SEQ ID NO: 66520 - DNA, 25 bp, Probe Sequence
aaagaggggaagtacatcattgaac

SEQ ID NO: 66521 - DNA, 25 bp, Probe Sequence
ataataaaacaatggagtggagaca

SEQ ID NO: 66522 - DNA, 25 bp, Probe Sequence
actttgggctggaaatatgaacagg

SEQ ID NO: 66523 - DNA, 25 bp, Probe Sequence
tacaaagaggggaagtacatcattg

SEQ ID NO: 66524 - DNA, 25 bp, Probe Sequence
acataataaaacaatggagtggaga

SEQ ID NO: 66525 - DNA, 25 bp, Probe Sequence
caaagaggggaagtacatcattgaa

SEQ ID NO: 66526 - DNA, 25 bp, Probe Sequence
cataataaaacaatggagtggagac

SEQ ID NO: 66527 - DNA, 25 bp, Probe Sequence
tcactctgttccttatattctcagc

SEQ ID NO: 66528 - DNA, 25 bp, Probe Sequence
ctctgttccttatattctcagcctc

SEQ ID NO: 66529 - DNA, 25 bp, Probe Sequence
ctgttccttatattctcagcctctg

SEQ ID NO: 66530 - DNA, 25 bp, Probe Sequence
tctgttccttatattctcagcctct

SEQ ID NO: 66531 - DNA, 25 bp, Probe Sequence
actctgttccttatattctcagcct

SEQ ID NO: 66532 - DNA, 25 bp, Probe Sequence
cactctgttccttatattctcagcc

SEQ ID NO: 66533 - DNA, 25 bp, Probe Sequence
tcttctgttagctctggactcttaa

SEQ ID NO: 66534 - DNA, 25 bp, Probe Sequence
ctcttctgttagctctggactctta

SEQ ID NO: 66535 - DNA, 25 bp, Probe Sequence
ttactcttctgttagctctggactc

SEQ ID NO: 66536 - DNA, 25 bp, Probe Sequence
gtagcctttcactctgttccttata

SEQ ID NO: 66537 - DNA, 25 bp, Probe Sequence
ttagctctggactcttaacacttaa

SEQ ID NO: 66538 - DNA, 25 bp, Probe Sequence
agcctttcactctgttccttatatt

SEQ ID NO: 66539 - DNA, 25 bp, Probe Sequence
gcctttcactctgttccttatattc

SEQ ID NO: 66540 - DNA, 25 bp, Probe Sequence
tagcctttcactctgttccttatat

SEQ ID NO: 66541 - DNA, 25 bp, Probe Sequence
ttcactctgttccttatattctcag

SEQ ID NO: 66542 - DNA, 25 bp, Probe Sequence
ttactcttctgaaattgctaggacc

SEQ ID NO: 66543 - DNA, 25 bp, Probe Sequence
tactcttctgttagctctggactct

SEQ ID NO: 66544 - DNA, 25 bp, Probe Sequence
gttactcttctgaaattgctaggac

SEQ ID NO: 66545 - DNA, 25 bp, Probe Sequence
agttactcttctgaaattgctagga

SEQ ID NO: 66546 - DNA, 25 bp, Probe Sequence
tgtagcctttcactctgttccttat

SEQ ID NO: 66547 - DNA, 25 bp, Probe Sequence
ctcttctgaaattgctaggaccatt

SEQ ID NO: 66548 - DNA, 25 bp, Probe Sequence
tcttctgaaattgctaggaccattg

SEQ ID NO: 66549 - DNA, 25 bp, Probe Sequence
tactcttctgaaattgctaggacca

SEQ ID NO: 66550 - DNA, 25 bp, Probe Sequence
gttagctctggactcttaacactta

SEQ ID NO: 66551 - DNA, 25 bp, Probe Sequence
ttccatagaatcacagaacaatcct

SEQ ID NO: 66552 - DNA, 25 bp, Probe Sequence
ccatagaatcacagaacaatcctga

SEQ ID NO: 66553 - DNA, 25 bp, Probe Sequence
tccatagaatcacagaacaatcctg

SEQ ID NO: 66554 - DNA, 25 bp, Probe Sequence
tagaatcacagaacaatcctgaacc

SEQ ID NO: 66555 - DNA, 25 bp, Probe Sequence
atagaatcacagaacaatcctgaac

SEQ ID NO: 66556 - DNA, 25 bp, Probe Sequence
catagaatcacagaacaatcctgaa

SEQ ID NO: 66557 - DNA, 25 bp, Probe Sequence
gaatcacagaacaatcctgaaccag

SEQ ID NO: 66558 - DNA, 25 bp, Probe Sequence
aatcactaacacatatagggcttcc

SEQ ID NO: 66559 - DNA, 25 bp, Probe Sequence
attccatagaatcacagaacaatcc

SEQ ID NO: 66560 - DNA, 25 bp, Probe Sequence
agaaggctgaaatcactaacacata

SEQ ID NO: 66561 - DNA, 25 bp, Probe Sequence
tttcagaactcaaagggcatttaga

SEQ ID NO: 66562 - DNA, 25 bp, Probe Sequence
tgaaatcactaacacatatagggct

SEQ ID NO: 66563 - DNA, 25 bp, Probe Sequence
aagaaggctgaaatcactaacacat

SEQ ID NO: 66564 - DNA, 25 bp, Probe Sequence
agaatcacagaacaatcctgaacca

SEQ ID NO: 66565 - DNA, 25 bp, Probe Sequence
ctgaaatcactaacacatatagggc

SEQ ID NO: 66566 - DNA, 25 bp, Probe Sequence
gctgaaatcactaacacatataggg

SEQ ID NO: 66567 - DNA, 25 bp, Probe Sequence
ggctgaaatcactaacacatatagg

SEQ ID NO: 66568 - DNA, 25 bp, Probe Sequence
tagaggaagaaggctgaaatcacta

SEQ ID NO: 66569 - DNA, 25 bp, Probe Sequence
tttagaggaagaaggctgaaatcac

SEQ ID NO: 66570 - DNA, 25 bp, Probe Sequence
gaaggctgaaatcactaacacatat

SEQ ID NO: 66571 - DNA, 25 bp, Probe Sequence
gaagaaggctgaaatcactaacaca

SEQ ID NO: 66572 - DNA, 25 bp, Probe Sequence
aaatcactaacacatatagggcttc

SEQ ID NO: 66573 - DNA, 25 bp, Probe Sequence
gaaatcactaacacatatagggctt

SEQ ID NO: 66574 - DNA, 25 bp, Probe Sequence
gaggaagaaggctgaaatcactaac

SEQ ID NO: 66575 - DNA, 25 bp, Probe Sequence
tcccacactgctaattactatgaaa

SEQ ID NO: 66576 - DNA, 25 bp, Probe Sequence
gttcccacactgctaattactatga

SEQ ID NO: 66577 - DNA, 25 bp, Probe Sequence
cccacactgctaattactatgaaag

SEQ ID NO: 66578 - DNA, 25 bp, Probe Sequence
ttcccacactgctaattactatgaa

SEQ ID NO: 66579 - DNA, 25 bp, Probe Sequence
agttcccacactgctaattactatg

SEQ ID NO: 66580 - DNA, 25 bp, Probe Sequence
ctaattactatgaaagctgctctgg

SEQ ID NO: 66581 - DNA, 25 bp, Probe Sequence
taattactatgaaagctgctctggc

SEQ ID NO: 66582 - DNA, 25 bp, Probe Sequence
ctttggaggttaaggctaggttagg

SEQ ID NO: 66583 - DNA, 25 bp, Probe Sequence
ccacactgctaattactatgaaagc

SEQ ID NO: 66584 - DNA, 25 bp, Probe Sequence
gctaattactatgaaagctgctctg

SEQ ID NO: 66585 - DNA, 25 bp, Probe Sequence
tgctaattactatgaaagctgctct

SEQ ID NO: 66586 - DNA, 25 bp, Probe Sequence
ctgctaattactatgaaagctgctc

SEQ ID NO: 66587 - DNA, 25 bp, Probe Sequence
actgctaattactatgaaagctgct

SEQ ID NO: 66588 - DNA, 25 bp, Probe Sequence
cactgctaattactatgaaagctgc

SEQ ID NO: 66589 - DNA, 25 bp, Probe Sequence
acactgctaattactatgaaagctg

SEQ ID NO: 66590 - DNA, 25 bp, Probe Sequence
cacactgctaattactatgaaagct

SEQ ID NO: 66591 - DNA, 25 bp, Probe Sequence
tttggaggttaaggctaggttaggc

SEQ ID NO: 66592 - DNA, 25 bp, Probe Sequence
cagttcccacactgctaattactat

SEQ ID NO: 66593 - DNA, 25 bp, Probe Sequence
aattactatgaaagctgctctggcc

SEQ ID NO: 66594 - DNA, 25 bp, Probe Sequence
tcagttcccacactgctaattacta

SEQ ID NO: 66595 - DNA, 25 bp, Probe Sequence
ctcagttcccacactgctaattact

SEQ ID NO: 66596 - DNA, 25 bp, Probe Sequence
attactatgaaagctgctctggcct

SEQ ID NO: 66597 - DNA, 25 bp, Probe Sequence
ttactatgaaagctgctctggcctc

SEQ ID NO: 66598 - DNA, 25 bp, Probe Sequence
cctcagttcccacactgctaattac

SEQ ID NO: 66599 - DNA, 25 bp, Probe Sequence
ccctcagttcccacactgctaatta

SEQ ID NO: 66600 - DNA, 25 bp, Probe Sequence
aagaggatcattgaacgagacagaa

SEQ ID NO: 66601 - DNA, 25 bp, Probe Sequence
caaaggctcaatggattatgtttct

SEQ ID NO: 66602 - DNA, 25 bp, Probe Sequence
caagaggatcattgaacgagacaga

SEQ ID NO: 66603 - DNA, 25 bp, Probe Sequence
atgtttacagagccagcaaatgata

SEQ ID NO: 66604 - DNA, 25 bp, Probe Sequence
gcaaatgataccagtggaagtaaag

SEQ ID NO: 66605 - DNA, 25 bp, Probe Sequence
agcaaatgataccagtggaagtaaa

SEQ ID NO: 66606 - DNA, 25 bp, Probe Sequence
aaaggctcaatggattatgtttcta

SEQ ID NO: 66607 - DNA, 25 bp, Probe Sequence
tgataccagtggaagtaaagagaat

SEQ ID NO: 66608 - DNA, 25 bp, Probe Sequence
atgataccagtggaagtaaagagaa

SEQ ID NO: 66609 - DNA, 25 bp, Probe Sequence
aatgataccagtggaagtaaagaga

SEQ ID NO: 66610 - DNA, 25 bp, Probe Sequence
cagcaaatgataccagtggaagtaa

SEQ ID NO: 66611 - DNA, 25 bp, Probe Sequence
aggctcaatggattatgtttctatt

SEQ ID NO: 66612 - DNA, 25 bp, Probe Sequence
aaggctcaatggattatgtttctat

SEQ ID NO: 66613 - DNA, 25 bp, Probe Sequence
agaaatcagacgacagatagggaag

SEQ ID NO: 66614 - DNA, 25 bp, Probe Sequence
caaatgataccagtggaagtaaaga

SEQ ID NO: 66615 - DNA, 25 bp, Probe Sequence
tgtttacagagccagcaaatgatac

SEQ ID NO: 66616 - DNA, 25 bp, Probe Sequence
ccagaattgacaccaaagatgttaa

SEQ ID NO: 66617 - DNA, 25 bp, Probe Sequence
cagaaatcagacgacagatagggaa

SEQ ID NO: 66618 - DNA, 25 bp, Probe Sequence
aaatgataccagtggaagtaaagag

SEQ ID NO: 66619 - DNA, 25 bp, Probe Sequence
gataccagtggaagtaaagagaatt

SEQ ID NO: 66620 - DNA, 25 bp, Probe Sequence
gaggatcattgaacgagacagaaag

SEQ ID NO: 66621 - DNA, 25 bp, Probe Sequence
cccagaattgacaccaaagatgtta

SEQ ID NO: 66622 - DNA, 25 bp, Probe Sequence
gtttacagagccagcaaatgatacc

SEQ ID NO: 66623 - DNA, 25 bp, Probe Sequence
gtttaacacattctttctaagcagt

SEQ ID NO: 66624 - DNA, 25 bp, Probe Sequence
gccattatatctgtgatgcctatga

SEQ ID NO: 66625 - DNA, 25 bp, Probe Sequence
ttaatagcaaggaggtagaggagac

SEQ ID NO: 66626 - DNA, 25 bp, Probe Sequence
cttaatagcaaggaggtagaggaga

SEQ ID NO: 66627 - DNA, 25 bp, Probe Sequence
ccattatatctgtgatgcctatgac

SEQ ID NO: 66628 - DNA, 25 bp, Probe Sequence
atctggttcacttacgatgatatgc

SEQ ID NO: 66629 - DNA, 25 bp, Probe Sequence
gacggtatgagaatctgtgaacaag

SEQ ID NO: 66630 - DNA, 25 bp, Probe Sequence
ctcattagtgttgtcagccatcttg

SEQ ID NO: 66631 - DNA, 25 bp, Probe Sequence
cattatatctgtgatgcctatgact

SEQ ID NO: 66632 - DNA, 25 bp, Probe Sequence
tgacggtatgagaatctgtgaacaa

SEQ ID NO: 66633 - DNA, 25 bp, Probe Sequence
gatctggttcacttacgatgatatg

SEQ ID NO: 66634 - DNA, 25 bp, Probe Sequence
tgtgacggtatgagaatctgtgaac

SEQ ID NO: 66635 - DNA, 25 bp, Probe Sequence
gtgtgacggtatgagaatctgtgaa

SEQ ID NO: 66636 - DNA, 25 bp, Probe Sequence
attatatctgtgatgcctatgactt

SEQ ID NO: 66637 - DNA, 25 bp, Probe Sequence
aatctacagaagtctaacaggaatt

SEQ ID NO: 66638 - DNA, 25 bp, Probe Sequence
gtgacggtatgagaatctgtgaaca

SEQ ID NO: 66639 - DNA, 25 bp, Probe Sequence
caaagaacctcctaagacctacaaa

SEQ ID NO: 66640 - DNA, 25 bp, Probe Sequence
atgcctatgactttgagaaacagat

SEQ ID NO: 66641 - DNA, 25 bp, Probe Sequence
tatctgtgatgcctatgactttgag

SEQ ID NO: 66642 - DNA, 25 bp, Probe Sequence
atatctgtgatgcctatgactttga

SEQ ID NO: 66643 - DNA, 25 bp, Probe Sequence
gatgcctatgactttgagaaacaga

SEQ ID NO: 66644 - DNA, 25 bp, Probe Sequence
tgatgcctatgactttgagaaacag

SEQ ID NO: 66645 - DNA, 25 bp, Probe Sequence
ctgtgatgcctatgactttgagaaa

SEQ ID NO: 66646 - DNA, 25 bp, Probe Sequence
acaaagaacctcctaagacctacaa

SEQ ID NO: 66647 - DNA, 25 bp, Probe Sequence
gggttccaataagaatccaagaaac

SEQ ID NO: 66648 - DNA, 25 bp, Probe Sequence
ctacaaggacgagtatgagaagttc

SEQ ID NO: 66649 - DNA, 25 bp, Probe Sequence
cctaagaagaatggattgtacctga

SEQ ID NO: 66650 - DNA, 25 bp, Probe Sequence
taagaagaatggattgtacctgagc

SEQ ID NO: 66651 - DNA, 25 bp, Probe Sequence
ttgcctaagaagaatggattgtacc

SEQ ID NO: 66652 - DNA, 25 bp, Probe Sequence
tacaaggacgagtatgagaagttca

SEQ ID NO: 66653 - DNA, 25 bp, Probe Sequence
caaggacgagtatgagaagttcaag

SEQ ID NO: 66654 - DNA, 25 bp, Probe Sequence
gcctaagaagaatggattgtacctg

SEQ ID NO: 66655 - DNA, 25 bp, Probe Sequence
catcatcctcatcctcatctccttc

SEQ ID NO: 66656 - DNA, 25 bp, Probe Sequence
ctaagaagaatggattgtacctgag

SEQ ID NO: 66657 - DNA, 25 bp, Probe Sequence
tgcctaagaagaatggattgtacct

SEQ ID NO: 66658 - DNA, 25 bp, Probe Sequence
acaaggacgagtatgagaagttcaa

SEQ ID NO: 66659 - DNA, 25 bp, Probe Sequence
atcatcctcatcctcatctccttca

SEQ ID NO: 66660 - DNA, 25 bp, Probe Sequence
atcctcatcctcatctccttcactt

SEQ ID NO: 66661 - DNA, 25 bp, Probe Sequence
cctacaaggacgagtatgagaagtt

SEQ ID NO: 66662 - DNA, 25 bp, Probe Sequence
gtatgagaagttcaagctctacctc

SEQ ID NO: 66663 - DNA, 25 bp, Probe Sequence
gagtatgagaagttcaagctctacc

SEQ ID NO: 66664 - DNA, 25 bp, Probe Sequence
agtatgagaagttcaagctctacct

SEQ ID NO: 66665 - DNA, 25 bp, Probe Sequence
gcctatttgcctaagaagaatggat

SEQ ID NO: 66666 - DNA, 25 bp, Probe Sequence
cgagtatgagaagttcaagctctac

SEQ ID NO: 66667 - DNA, 25 bp, Probe Sequence
aagaagaatggattgtacctgagcc

SEQ ID NO: 66668 - DNA, 25 bp, Probe Sequence
aaggacgagtatgagaagttcaagc

SEQ ID NO: 66669 - DNA, 25 bp, Probe Sequence
acgagtatgagaagttcaagctcta

SEQ ID NO: 66670 - DNA, 25 bp, Probe Sequence
cctatttgcctaagaagaatggatt

SEQ ID NO: 66671 - DNA, 25 bp, Probe Sequence
catcctcatcctcatctccttcact

SEQ ID NO: 66672 - DNA, 25 bp, Probe Sequence
gtgatgacagcaacctctacctaac

SEQ ID NO: 66673 - DNA, 25 bp, Probe Sequence
tgatgacagcaacctctacctaact

SEQ ID NO: 66674 - DNA, 25 bp, Probe Sequence
agtgatgacagcaacctctacctaa

SEQ ID NO: 66675 - DNA, 25 bp, Probe Sequence
gatgacagcaacctctacctaactg

SEQ ID NO: 66676 - DNA, 25 bp, Probe Sequence
ctacctaactgccagcaagaagaag

SEQ ID NO: 66677 - DNA, 25 bp, Probe Sequence
cagtgatgacagcaacctctaccta

SEQ ID NO: 66678 - DNA, 25 bp, Probe Sequence
caacagtgatgacagcaacctctac

SEQ ID NO: 66679 - DNA, 25 bp, Probe Sequence
tctacctaactgccagcaagaagaa

SEQ ID NO: 66680 - DNA, 25 bp, Probe Sequence
tcaacagtgatgacagcaacctcta

SEQ ID NO: 66681 - DNA, 25 bp, Probe Sequence
ctctacctaactgccagcaagaaga

SEQ ID NO: 66682 - DNA, 25 bp, Probe Sequence
aacagtgatgacagcaacctctacc

SEQ ID NO: 66683 - DNA, 25 bp, Probe Sequence
tcactggtgagaatgtccgagaatt

SEQ ID NO: 66684 - DNA, 25 bp, Probe Sequence
cctctacctaactgccagcaagaag

SEQ ID NO: 66685 - DNA, 25 bp, Probe Sequence
tacctaactgccagcaagaagaagc

SEQ ID NO: 66686 - DNA, 25 bp, Probe Sequence
caacctctacctaactgccagcaag

SEQ ID NO: 66687 - DNA, 25 bp, Probe Sequence
atcaacagtgatgacagcaacctct

SEQ ID NO: 66688 - DNA, 25 bp, Probe Sequence
cactggtgagaatgtccgagaattc

SEQ ID NO: 66689 - DNA, 25 bp, Probe Sequence
atgacagcaacctctacctaactgc

SEQ ID NO: 66690 - DNA, 25 bp, Probe Sequence
gtactgggcagtctcatctctcact

SEQ ID NO: 66691 - DNA, 25 bp, Probe Sequence
ctcactggtgagaatgtccgagaat

SEQ ID NO: 66692 - DNA, 25 bp, Probe Sequence
gagtactgggcagtctcatctctca

SEQ ID NO: 66693 - DNA, 25 bp, Probe Sequence
agtactgggcagtctcatctctcac

SEQ ID NO: 66694 - DNA, 25 bp, Probe Sequence
tactgggcagtctcatctctcactg

SEQ ID NO: 66695 - DNA, 25 bp, Probe Sequence
tgagtactgggcagtctcatctctc

SEQ ID NO: 66696 - DNA, 25 bp, Probe Sequence
ctgagtactgggcagtctcatctct

SEQ ID NO: 66697 - DNA, 25 bp, Probe Sequence
gtctccatataactacacggttcat

SEQ ID NO: 66698 - DNA, 25 bp, Probe Sequence
gctcctctatatgacagaatggttc

SEQ ID NO: 66699 - DNA, 25 bp, Probe Sequence
ctcctctatatgacagaatggttca

SEQ ID NO: 66700 - DNA, 25 bp, Probe Sequence
ggtctccatataactacacggttca

SEQ ID NO: 66701 - DNA, 25 bp, Probe Sequence
tctccatataactacacggttcatg

SEQ ID NO: 66702 - DNA, 25 bp, Probe Sequence
cgctcctctatatgacagaatggtt

SEQ ID NO: 66703 - DNA, 25 bp, Probe Sequence
gagagtgaggacacctacttgtaac

SEQ ID NO: 66704 - DNA, 25 bp, Probe Sequence
agagagtgaggacacctacttgtaa

SEQ ID NO: 66705 - DNA, 25 bp, Probe Sequence
aagagagtgaggacacctacttgta

SEQ ID NO: 66706 - DNA, 25 bp, Probe Sequence
attctgcctgagcctccttatttat

SEQ ID NO: 66707 - DNA, 25 bp, Probe Sequence
tctgcctgagcctccttatttattt

SEQ ID NO: 66708 - DNA, 25 bp, Probe Sequence
ttctgcctgagcctccttatttatt

SEQ ID NO: 66709 - DNA, 25 bp, Probe Sequence
ctatatgacagaatggttcatgtgc

SEQ ID NO: 66710 - DNA, 25 bp, Probe Sequence
tcctctatatgacagaatggttcat

SEQ ID NO: 66711 - DNA, 25 bp, Probe Sequence
gattctgcctgagcctccttattta

SEQ ID NO: 66712 - DNA, 25 bp, Probe Sequence
ccgctcctctatatgacagaatggt

SEQ ID NO: 66713 - DNA, 25 bp, Probe Sequence
cctctatatgacagaatggttcatg

SEQ ID NO: 66714 - DNA, 25 bp, Probe Sequence
gggtctccatataactacacggttc

SEQ ID NO: 66715 - DNA, 25 bp, Probe Sequence
tatatgacagaatggttcatgtgcg

SEQ ID NO: 66716 - DNA, 25 bp, Probe Sequence
agagtgaggacacctacttgtaacc

SEQ ID NO: 66717 - DNA, 25 bp, Probe Sequence
tctatatgacagaatggttcatgtg

SEQ ID NO: 66718 - DNA, 25 bp, Probe Sequence
acagaaataaacagccttgtataga

SEQ ID NO: 66719 - DNA, 25 bp, Probe Sequence
ctctatatgacagaatggttcatgt

SEQ ID NO: 66720 - DNA, 25 bp, Probe Sequence
ctccatataactacacggttcatga

SEQ ID NO: 66721 - DNA, 25 bp, Probe Sequence
atacaatgagtcagatgaagtggtt

SEQ ID NO: 66722 - DNA, 25 bp, Probe Sequence
catacaatgagtcagatgaagtggt

SEQ ID NO: 66723 - DNA, 25 bp, Probe Sequence
tacaatgagtcagatgaagtggttg

SEQ ID NO: 66724 - DNA, 25 bp, Probe Sequence
aatgagtcagatgaagtggttgttg

SEQ ID NO: 66725 - DNA, 25 bp, Probe Sequence
caatgagtcagatgaagtggttgtt

SEQ ID NO: 66726 - DNA, 25 bp, Probe Sequence
atgaagtggttgttgacatggaatt

SEQ ID NO: 66727 - DNA, 25 bp, Probe Sequence
atgagtcagatgaagtggttgttga

SEQ ID NO: 66728 - DNA, 25 bp, Probe Sequence
ttattcacactcttctctgagcctg

SEQ ID NO: 66729 - DNA, 25 bp, Probe Sequence
gatgaagtggttgttgacatggaat

SEQ ID NO: 66730 - DNA, 25 bp, Probe Sequence
caactgtgtgtgactctaataaacg

SEQ ID NO: 66731 - DNA, 25 bp, Probe Sequence
tacgcttgctggtctaagtcttaac

SEQ ID NO: 66732 - DNA, 25 bp, Probe Sequence
gtacgcttgctggtctaagtcttaa

SEQ ID NO: 66733 - DNA, 25 bp, Probe Sequence
tattcacactcttctctgagcctga

SEQ ID NO: 66734 - DNA, 25 bp, Probe Sequence
atatgagcatcaaagcctatgtcag

SEQ ID NO: 66735 - DNA, 25 bp, Probe Sequence
tctttattcacactcttctctgagc

SEQ ID NO: 66736 - DNA, 25 bp, Probe Sequence
agatgaagtggttgttgacatggaa

SEQ ID NO: 66737 - DNA, 25 bp, Probe Sequence
tcaactgtgtgtgactctaataaac

SEQ ID NO: 66738 - DNA, 25 bp, Probe Sequence
gttgttgacatggaatttgctaaga

SEQ ID NO: 66739 - DNA, 25 bp, Probe Sequence
ttgttgacatggaatttgctaagaa

SEQ ID NO: 66740 - DNA, 25 bp, Probe Sequence
tcatacaatgagtcagatgaagtgg

SEQ ID NO: 66741 - DNA, 25 bp, Probe Sequence
tgtcatacaatgagtcagatgaagt

SEQ ID NO: 66742 - DNA, 25 bp, Probe Sequence
agtgtcatacaatgagtcagatgaa

SEQ ID NO: 66743 - DNA, 25 bp, Probe Sequence
ttcagtgtcatacaatgagtcagat

SEQ ID NO: 66744 - DNA, 25 bp, Probe Sequence
cagtgtcatacaatgagtcagatga

SEQ ID NO: 66745 - DNA, 25 bp, Probe Sequence
ctaccaacccaaaaccatcaagaat

SEQ ID NO: 66746 - DNA, 25 bp, Probe Sequence
taccaacccaaaaccatcaagaatg

SEQ ID NO: 66747 - DNA, 25 bp, Probe Sequence
aacccaaaaccatcaagaatgacat

SEQ ID NO: 66748 - DNA, 25 bp, Probe Sequence
caacccaaaaccatcaagaatgaca

SEQ ID NO: 66749 - DNA, 25 bp, Probe Sequence
caaaaccatcaagaatgacatgctg

SEQ ID NO: 66750 - DNA, 25 bp, Probe Sequence
aaaaccatcaagaatgacatgctgt

SEQ ID NO: 66751 - DNA, 25 bp, Probe Sequence
acccaaaaccatcaagaatgacatg

SEQ ID NO: 66752 - DNA, 25 bp, Probe Sequence
ccaacccaaaaccatcaagaatgac

SEQ ID NO: 66753 - DNA, 25 bp, Probe Sequence
ccaaaaccatcaagaatgacatgct

SEQ ID NO: 66754 - DNA, 25 bp, Probe Sequence
accaacccaaaaccatcaagaatga

SEQ ID NO: 66755 - DNA, 25 bp, Probe Sequence
gctaccaacccaaaaccatcaagaa

SEQ ID NO: 66756 - DNA, 25 bp, Probe Sequence
agtgcccttcaccaattacatcctc

SEQ ID NO: 66757 - DNA, 25 bp, Probe Sequence
cccaaaaccatcaagaatgacatgc

SEQ ID NO: 66758 - DNA, 25 bp, Probe Sequence
cagtgcccttcaccaattacatcct

SEQ ID NO: 66759 - DNA, 25 bp, Probe Sequence
accagtgcccttcaccaattacatc

SEQ ID NO: 66760 - DNA, 25 bp, Probe Sequence
tgatctttgagacgggcatgaactg

SEQ ID NO: 66761 - DNA, 25 bp, Probe Sequence
gtgatctttgagacgggcatgaact

SEQ ID NO: 66762 - DNA, 25 bp, Probe Sequence
ttggctaccaacccaaaaccatcaa

SEQ ID NO: 66763 - DNA, 25 bp, Probe Sequence
tgacaagcatacacaactacttatt

SEQ ID NO: 66764 - DNA, 25 bp, Probe Sequence
agtgacaagcatacacaactactta

SEQ ID NO: 66765 - DNA, 25 bp, Probe Sequence
ttatcagagtatcgccatgaagttc

SEQ ID NO: 66766 - DNA, 25 bp, Probe Sequence
gtgacaagcatacacaactacttat

SEQ ID NO: 66767 - DNA, 25 bp, Probe Sequence
gagtgacaagcatacacaactactt

SEQ ID NO: 66768 - DNA, 25 bp, Probe Sequence
aagagtgacaagcatacacaactac

SEQ ID NO: 66769 - DNA, 25 bp, Probe Sequence
caagagtgacaagcatacacaacta

SEQ ID NO: 66770 - DNA, 25 bp, Probe Sequence
agagtgacaagcatacacaactact

SEQ ID NO: 66771 - DNA, 25 bp, Probe Sequence
tatattatgccgctttcaatccaac

SEQ ID NO: 66772 - DNA, 25 bp, Probe Sequence
ttatattatgccgctttcaatccaa

SEQ ID NO: 66773 - DNA, 25 bp, Probe Sequence
tttatattatgccgctttcaatcca

SEQ ID NO: 66774 - DNA, 25 bp, Probe Sequence
cagagttcagcaatatgatagggaa

SEQ ID NO: 66775 - DNA, 25 bp, Probe Sequence
tttccagtgttcagtaaatagcagc

SEQ ID NO: 66776 - DNA, 25 bp, Probe Sequence
tatcagagtatcgccatgaagttcg

SEQ ID NO: 66777 - DNA, 25 bp, Probe Sequence
gacaagcatacacaactacttatta

SEQ ID NO: 66778 - DNA, 25 bp, Probe Sequence
ctttgttgatctgagccttctatga

SEQ ID NO: 66779 - DNA, 25 bp, Probe Sequence
tgatctgagccttctatgaaagttt

SEQ ID NO: 66780 - DNA, 25 bp, Probe Sequence
ttgatctgagccttctatgaaagtt

SEQ ID NO: 66781 - DNA, 25 bp, Probe Sequence
ttgttgatctgagccttctatgaaa

SEQ ID NO: 66782 - DNA, 25 bp, Probe Sequence
tttgttgatctgagccttctatgaa

SEQ ID NO: 66783 - DNA, 25 bp, Probe Sequence
gttgatctgagccttctatgaaagt

SEQ ID NO: 66784 - DNA, 25 bp, Probe Sequence
tgttgatctgagccttctatgaaag

SEQ ID NO: 66785 - DNA, 25 bp, Probe Sequence
atttccagtgttcagtaaatagcag

SEQ ID NO: 66786 - DNA, 25 bp, Probe Sequence
caagcaagtttatcagagtatcgcc

SEQ ID NO: 66787 - DNA, 25 bp, Probe Sequence
ttggcattatactggctctatcttg

SEQ ID NO: 66788 - DNA, 25 bp, Probe Sequence
ttaccaagcagttccaagtgaagta

SEQ ID NO: 66789 - DNA, 25 bp, Probe Sequence
attatactggctctatcttgcacaa

SEQ ID NO: 66790 - DNA, 25 bp, Probe Sequence
cattatactggctctatcttgcaca

SEQ ID NO: 66791 - DNA, 25 bp, Probe Sequence
tttggcattatactggctctatctt

SEQ ID NO: 66792 - DNA, 25 bp, Probe Sequence
gaacctaaagaagaaactgaaagca

SEQ ID NO: 66793 - DNA, 25 bp, Probe Sequence
atttggcattatactggctctatct

SEQ ID NO: 66794 - DNA, 25 bp, Probe Sequence
agaacctaaagaagaaactgaaagc

SEQ ID NO: 66795 - DNA, 25 bp, Probe Sequence
aacctaaagaagaaactgaaagcaa

SEQ ID NO: 66796 - DNA, 25 bp, Probe Sequence
gaaaccacaatcaggaaacgataag

SEQ ID NO: 66797 - DNA, 25 bp, Probe Sequence
acaatcaggaaacgataagccatta

SEQ ID NO: 66798 - DNA, 25 bp, Probe Sequence
ttatactggctctatcttgcacaag

SEQ ID NO: 66799 - DNA, 25 bp, Probe Sequence
acctaaagaagaaactgaaagcaat

SEQ ID NO: 66800 - DNA, 25 bp, Probe Sequence
aggttacgggttaataatggataca

SEQ ID NO: 66801 - DNA, 25 bp, Probe Sequence
ctggaagatttggaattgggtattt

SEQ ID NO: 66802 - DNA, 25 bp, Probe Sequence
cggtggcttctgattctacatattt

SEQ ID NO: 66803 - DNA, 25 bp, Probe Sequence
ctaaagaagaaactgaaagcaatcg

SEQ ID NO: 66804 - DNA, 25 bp, Probe Sequence
caggttacgggttaataatggatac

SEQ ID NO: 66805 - DNA, 25 bp, Probe Sequence
ttaaagattcacggaaagcaagttg

SEQ ID NO: 66806 - DNA, 25 bp, Probe Sequence
gaaagcaagttgatgaccagaaatc

SEQ ID NO: 66807 - DNA, 25 bp, Probe Sequence
caatcaggaaacgataagccattat

SEQ ID NO: 66808 - DNA, 25 bp, Probe Sequence
cctaaagaagaaactgaaagcaatc

SEQ ID NO: 66809 - DNA, 25 bp, Probe Sequence
aatttggcattatactggctctatc

SEQ ID NO: 66810 - DNA, 25 bp, Probe Sequence
aatatgaaaccacaatcaggaaacg

SEQ ID NO: 66811 - DNA, 25 bp, Probe Sequence
aagttatggcttcttgttggatgaa

SEQ ID NO: 66812 - DNA, 25 bp, Probe Sequence
caggagaatcacttgaatccagaag

SEQ ID NO: 66813 - DNA, 25 bp, Probe Sequence
ggaattaacaatgtaaccatctgaa

SEQ ID NO: 66814 - DNA, 25 bp, Probe Sequence
atgatgaaaccctgtctctactaaa

SEQ ID NO: 66815 - DNA, 25 bp, Probe Sequence
caatgtaaccatctgaaagcaactt

SEQ ID NO: 66816 - DNA, 25 bp, Probe Sequence
taaagttatggcttcttgttggatg

SEQ ID NO: 66817 - DNA, 25 bp, Probe Sequence
tggaattaacaatgtaaccatctga

SEQ ID NO: 66818 - DNA, 25 bp, Probe Sequence
agttatggcttcttgttggatgaaa

SEQ ID NO: 66819 - DNA, 25 bp, Probe Sequence
aaagttatggcttcttgttggatga

SEQ ID NO: 66820 - DNA, 25 bp, Probe Sequence
aacaatgtaaccatctgaaagcaac

SEQ ID NO: 66821 - DNA, 25 bp, Probe Sequence
aatggtaggtaacaattaaatggca

SEQ ID NO: 66822 - DNA, 25 bp, Probe Sequence
aggagaatcacttgaatccagaagg

SEQ ID NO: 66823 - DNA, 25 bp, Probe Sequence
taacaatgtaaccatctgaaagcaa

SEQ ID NO: 66824 - DNA, 25 bp, Probe Sequence
ttaacaatgtaaccatctgaaagca

SEQ ID NO: 66825 - DNA, 25 bp, Probe Sequence
aataaagttatggcttcttgttgga

SEQ ID NO: 66826 - DNA, 25 bp, Probe Sequence
ataaagttatggcttcttgttggat

SEQ ID NO: 66827 - DNA, 25 bp, Probe Sequence
acaatgtaaccatctgaaagcaact

SEQ ID NO: 66828 - DNA, 25 bp, Probe Sequence
tggtaggtaacaattaaatggcatt

SEQ ID NO: 66829 - DNA, 25 bp, Probe Sequence
atggtaggtaacaattaaatggcat

SEQ ID NO: 66830 - DNA, 25 bp, Probe Sequence
catgatgaaaccctgtctctactaa

SEQ ID NO: 66831 - DNA, 25 bp, Probe Sequence
aaataaagttatggcttcttgttgg

SEQ ID NO: 66832 - DNA, 25 bp, Probe Sequence
gccctgaagaacagtaatgatattg

SEQ ID NO: 66833 - DNA, 25 bp, Probe Sequence
gagccctgaagaacagtaatgatat

SEQ ID NO: 66834 - DNA, 25 bp, Probe Sequence
agccctgaagaacagtaatgatatt

SEQ ID NO: 66835 - DNA, 25 bp, Probe Sequence
attacctggagacaagagttgagta

SEQ ID NO: 66836 - DNA, 25 bp, Probe Sequence
aattacctggagacaagagttgagt

SEQ ID NO: 66837 - DNA, 25 bp, Probe Sequence
acaactgagatgaggattcactgta

SEQ ID NO: 66838 - DNA, 25 bp, Probe Sequence
aactgagatgaggattcactgtact

SEQ ID NO: 66839 - DNA, 25 bp, Probe Sequence
caactgagatgaggattcactgtac

SEQ ID NO: 66840 - DNA, 25 bp, Probe Sequence
ttacctggagacaagagttgagtac

SEQ ID NO: 66841 - DNA, 25 bp, Probe Sequence
ctgacaactgagatgaggattcact

SEQ ID NO: 66842 - DNA, 25 bp, Probe Sequence
actgagatgaggattcactgtactc

SEQ ID NO: 66843 - DNA, 25 bp, Probe Sequence
tgacaactgagatgaggattcactg

SEQ ID NO: 66844 - DNA, 25 bp, Probe Sequence
cctttcagtttctcagttgtttcag

SEQ ID NO: 66845 - DNA, 25 bp, Probe Sequence
cacctttcagtttctcagttgtttc

SEQ ID NO: 66846 - DNA, 25 bp, Probe Sequence
gacaactgagatgaggattcactgt

SEQ ID NO: 66847 - DNA, 25 bp, Probe Sequence
acctttcagtttctcagttgtttca

SEQ ID NO: 66848 - DNA, 25 bp, Probe Sequence
ctcaaggaactggatgaagagactg

SEQ ID NO: 66849 - DNA, 25 bp, Probe Sequence
ctttcagtttctcagttgtttcaga

SEQ ID NO: 66850 - DNA, 25 bp, Probe Sequence
ctttctccacctttcagtttctcag

SEQ ID NO: 66851 - DNA, 25 bp, Probe Sequence
aaattacctggagacaagagttgag

SEQ ID NO: 66852 - DNA, 25 bp, Probe Sequence
gaaattacctggagacaagagttga

SEQ ID NO: 66853 - DNA, 25 bp, Probe Sequence
tggaaattacctggagacaagagtt

SEQ ID NO: 66854 - DNA, 25 bp, Probe Sequence
ccacctttcagtttctcagttgttt

SEQ ID NO: 66855 - DNA, 25 bp, Probe Sequence
ggaaattacctggagacaagagttg

SEQ ID NO: 66856 - DNA, 25 bp, Probe Sequence
ttctccacctttcagtttctcagtt

SEQ ID NO: 66857 - DNA, 25 bp, Probe Sequence
tttctccacctttcagtttctcagt

SEQ ID NO: 66858 - DNA, 25 bp, Probe Sequence
ctggaaattacctggagacaagagt

SEQ ID NO: 66859 - DNA, 25 bp, Probe Sequence
tacagacctattctcaggagttctc

SEQ ID NO: 66860 - DNA, 25 bp, Probe Sequence
ctacagacctattctcaggagttct

SEQ ID NO: 66861 - DNA, 25 bp, Probe Sequence
cctacagacctattctcaggagttc

SEQ ID NO: 66862 - DNA, 25 bp, Probe Sequence
tctctgttgattccaagtttcctat

SEQ ID NO: 66863 - DNA, 25 bp, Probe Sequence
gtctctgttgattccaagtttccta

SEQ ID NO: 66864 - DNA, 25 bp, Probe Sequence
ctctgttgattccaagtttcctata

SEQ ID NO: 66865 - DNA, 25 bp, Probe Sequence
ctgtgtcttcctcaccttcgttatc

SEQ ID NO: 66866 - DNA, 25 bp, Probe Sequence
gtgtcttcctcaccttcgttatcac

SEQ ID NO: 66867 - DNA, 25 bp, Probe Sequence
ttccaagtttcctatagaagacacc

SEQ ID NO: 66868 - DNA, 25 bp, Probe Sequence
agctttcctacagacctattctcag

SEQ ID NO: 66869 - DNA, 25 bp, Probe Sequence
tgtgtcttcctcaccttcgttatca

SEQ ID NO: 66870 - DNA, 25 bp, Probe Sequence
gctttcctacagacctattctcagg

SEQ ID NO: 66871 - DNA, 25 bp, Probe Sequence
acagacctattctcaggagttctcc

SEQ ID NO: 66872 - DNA, 25 bp, Probe Sequence
tccaagtttcctatagaagacaccc

SEQ ID NO: 66873 - DNA, 25 bp, Probe Sequence
gagctttcctacagacctattctca

SEQ ID NO: 66874 - DNA, 25 bp, Probe Sequence
ttcgagctttcctacagacctattc

SEQ ID NO: 66875 - DNA, 25 bp, Probe Sequence
cgtctctgttgattccaagtttcct

SEQ ID NO: 66876 - DNA, 25 bp, Probe Sequence
attccaagtttcctatagaagacac

SEQ ID NO: 66877 - DNA, 25 bp, Probe Sequence
gttcgagctttcctacagacctatt

SEQ ID NO: 66878 - DNA, 25 bp, Probe Sequence
ctgttgattccaagtttcctataga

SEQ ID NO: 66879 - DNA, 25 bp, Probe Sequence
tctgttgattccaagtttcctatag

SEQ ID NO: 66880 - DNA, 25 bp, Probe Sequence
gattccaagtttcctatagaagaca

SEQ ID NO: 66881 - DNA, 25 bp, Probe Sequence
tgattccaagtttcctatagaagac

SEQ ID NO: 66882 - DNA, 25 bp, Probe Sequence
ccaactatgcagacacactcatcag

SEQ ID NO: 66883 - DNA, 25 bp, Probe Sequence
tattgtaacttaggaggtgaacgac

SEQ ID NO: 66884 - DNA, 25 bp, Probe Sequence
cttcaacattgccttcattccttaa

SEQ ID NO: 66885 - DNA, 25 bp, Probe Sequence
ttattgtaacttaggaggtgaacga

SEQ ID NO: 66886 - DNA, 25 bp, Probe Sequence
gcttcaacattgccttcattcctta

SEQ ID NO: 66887 - DNA, 25 bp, Probe Sequence
cattgcttcaacattgccttcattc

SEQ ID NO: 66888 - DNA, 25 bp, Probe Sequence
acattgcttcaacattgccttcatt

SEQ ID NO: 66889 - DNA, 25 bp, Probe Sequence
tagcaaacacaggtctaatctcttt

SEQ ID NO: 66890 - DNA, 25 bp, Probe Sequence
cgttattgggtttggatatttgagg

SEQ ID NO: 66891 - DNA, 25 bp, Probe Sequence
gttattgggtttggatatttgaggc

SEQ ID NO: 66892 - DNA, 25 bp, Probe Sequence
ttcaacattgccttcattccttaaa

SEQ ID NO: 66893 - DNA, 25 bp, Probe Sequence
ttattgggtttggatatttgaggca

SEQ ID NO: 66894 - DNA, 25 bp, Probe Sequence
aagacattgcttcaacattgccttc

SEQ ID NO: 66895 - DNA, 25 bp, Probe Sequence
ctgtcaagacattgcttcaacattg

SEQ ID NO: 66896 - DNA, 25 bp, Probe Sequence
tttggtttgaaatgaacagattggt

SEQ ID NO: 66897 - DNA, 25 bp, Probe Sequence
tttattgtaacttaggaggtgaacg

SEQ ID NO: 66898 - DNA, 25 bp, Probe Sequence
attgcttcaacattgccttcattcc

SEQ ID NO: 66899 - DNA, 25 bp, Probe Sequence
gacattgcttcaacattgccttcat

SEQ ID NO: 66900 - DNA, 25 bp, Probe Sequence
tggtttgaaatgaacagattggtaa

SEQ ID NO: 66901 - DNA, 25 bp, Probe Sequence
ttggtttgaaatgaacagattggta

SEQ ID NO: 66902 - DNA, 25 bp, Probe Sequence
ggtttgaaatgaacagattggtaac

SEQ ID NO: 66903 - DNA, 25 bp, Probe Sequence
tttgaaatgaacagattggtaacct

SEQ ID NO: 66904 - DNA, 25 bp, Probe Sequence
tattgggtttggatatttgaggcaa

SEQ ID NO: 66905 - DNA, 25 bp, Probe Sequence
caagacattgcttcaacattgcctt

SEQ ID NO: 66906 - DNA, 25 bp, Probe Sequence
gtttgaaatgaacagattggtaacc

SEQ ID NO: 66907 - DNA, 25 bp, Probe Sequence
aattgattaggatgcttggtaggtt

SEQ ID NO: 66908 - DNA, 25 bp, Probe Sequence
taattgattaggatgcttggtaggt

SEQ ID NO: 66909 - DNA, 25 bp, Probe Sequence
ataattgattaggatgcttggtagg

SEQ ID NO: 66910 - DNA, 25 bp, Probe Sequence
attgattaggatgcttggtaggttt

SEQ ID NO: 66911 - DNA, 25 bp, Probe Sequence
aaagttgattaggaccacagatttg

SEQ ID NO: 66912 - DNA, 25 bp, Probe Sequence
cacagatttggtttagaaagggtaa

SEQ ID NO: 66913 - DNA, 25 bp, Probe Sequence
aatattcattgcacagtggattgtt

SEQ ID NO: 66914 - DNA, 25 bp, Probe Sequence
acagatttggtttagaaagggtaat

SEQ ID NO: 66915 - DNA, 25 bp, Probe Sequence
ttagtgccacaaggaatttaacttt

SEQ ID NO: 66916 - DNA, 25 bp, Probe Sequence
caaggtttagacagtccatgaaatc

SEQ ID NO: 66917 - DNA, 25 bp, Probe Sequence
ctacaaggtttagacagtccatgaa

SEQ ID NO: 66918 - DNA, 25 bp, Probe Sequence
acaaggtttagacagtccatgaaat

SEQ ID NO: 66919 - DNA, 25 bp, Probe Sequence
tacaaggtttagacagtccatgaaa

SEQ ID NO: 66920 - DNA, 25 bp, Probe Sequence
aatactacaaggtttagacagtcca

SEQ ID NO: 66921 - DNA, 25 bp, Probe Sequence
atactacaaggtttagacagtccat

SEQ ID NO: 66922 - DNA, 25 bp, Probe Sequence
accatcctgaaagtccagaattaaa

SEQ ID NO: 66923 - DNA, 25 bp, Probe Sequence
tttaccatcctgaaagtccagaatt

SEQ ID NO: 66924 - DNA, 25 bp, Probe Sequence
atttaccatcctgaaagtccagaat

SEQ ID NO: 66925 - DNA, 25 bp, Probe Sequence
aatttaccatcctgaaagtccagaa

SEQ ID NO: 66926 - DNA, 25 bp, Probe Sequence
aaactgaactaggaattgttagcgg

SEQ ID NO: 66927 - DNA, 25 bp, Probe Sequence
aataatttaccatcctgaaagtcca

SEQ ID NO: 66928 - DNA, 25 bp, Probe Sequence
cgacctgtttaataatttaccatcc

SEQ ID NO: 66929 - DNA, 25 bp, Probe Sequence
taccatcctgaaagtccagaattaa

SEQ ID NO: 66930 - DNA, 25 bp, Probe Sequence
ttaccatcctgaaagtccagaatta

SEQ ID NO: 66931 - DNA, 25 bp, Probe Sequence
tattcagagagcacttggattatgg

SEQ ID NO: 66932 - DNA, 25 bp, Probe Sequence
atcaggtaagcatacatagtagagg

SEQ ID NO: 66933 - DNA, 25 bp, Probe Sequence
ttacagaagaaccagtggaagaatt

SEQ ID NO: 66934 - DNA, 25 bp, Probe Sequence
taattccttacagaagaaccagtgg

SEQ ID NO: 66935 - DNA, 25 bp, Probe Sequence
ttcagagagcacttggattatggat

SEQ ID NO: 66936 - DNA, 25 bp, Probe Sequence
attcagagagcacttggattatgga

SEQ ID NO: 66937 - DNA, 25 bp, Probe Sequence
cttacagaagaaccagtggaagaat

SEQ ID NO: 66938 - DNA, 25 bp, Probe Sequence
tagttattgtgagactgctgtgtaa

SEQ ID NO: 66939 - DNA, 25 bp, Probe Sequence
atattcagagagcacttggattatg

SEQ ID NO: 66940 - DNA, 25 bp, Probe Sequence
gcagatcaggtaagcatacatagta

SEQ ID NO: 66941 - DNA, 25 bp, Probe Sequence
agttattgtgagactgctgtgtaag

SEQ ID NO: 66942 - DNA, 25 bp, Probe Sequence
agcacttggattatggatctgaata

SEQ ID NO: 66943 - DNA, 25 bp, Probe Sequence
ttaattccttacagaagaaccagtg

SEQ ID NO: 66944 - DNA, 25 bp, Probe Sequence
gcacttggattatggatctgaatag

SEQ ID NO: 66945 - DNA, 25 bp, Probe Sequence
gagcacttggattatggatctgaat

SEQ ID NO: 66946 - DNA, 25 bp, Probe Sequence
ctagttattgtgagactgctgtgta

SEQ ID NO: 66947 - DNA, 25 bp, Probe Sequence
ttgtaatattcagagagcacttgga

SEQ ID NO: 66948 - DNA, 25 bp, Probe Sequence
tgtaatattcagagagcacttggat

SEQ ID NO: 66949 - DNA, 25 bp, Probe Sequence
aggcagatcaggtaagcatacatag

SEQ ID NO: 66950 - DNA, 25 bp, Probe Sequence
gaggcagatcaggtaagcatacata

SEQ ID NO: 66951 - DNA, 25 bp, Probe Sequence
agagcacttggattatggatctgaa

SEQ ID NO: 66952 - DNA, 25 bp, Probe Sequence
agatcaggtaagcatacatagtaga

SEQ ID NO: 66953 - DNA, 25 bp, Probe Sequence
cagatcaggtaagcatacatagtag

SEQ ID NO: 66954 - DNA, 25 bp, Probe Sequence
ggcagatcaggtaagcatacatagt

SEQ ID NO: 66955 - DNA, 25 bp, Probe Sequence
atctgtgggatatctcatcagcctc

SEQ ID NO: 66956 - DNA, 25 bp, Probe Sequence
tgtgggatatctcatcagcctcgat

SEQ ID NO: 66957 - DNA, 25 bp, Probe Sequence
gtgggatatctcatcagcctcgatg

SEQ ID NO: 66958 - DNA, 25 bp, Probe Sequence
cacattctagccaacttgagggaag

SEQ ID NO: 66959 - DNA, 25 bp, Probe Sequence
acattctagccaacttgagggaagg

SEQ ID NO: 66960 - DNA, 25 bp, Probe Sequence
ccacattctagccaacttgagggaa

SEQ ID NO: 66961 - DNA, 25 bp, Probe Sequence
cattctagccaacttgagggaaggg

SEQ ID NO: 66962 - DNA, 25 bp, Probe Sequence
attcctatacaccaacaacagacaa

SEQ ID NO: 66963 - DNA, 25 bp, Probe Sequence
aatcacaagcattcctatacaccaa

SEQ ID NO: 66964 - DNA, 25 bp, Probe Sequence
ttcctatacaccaacaacagacaag

SEQ ID NO: 66965 - DNA, 25 bp, Probe Sequence
cattcctatacaccaacaacagaca

SEQ ID NO: 66966 - DNA, 25 bp, Probe Sequence
atgctattgccattaccataccatt

SEQ ID NO: 66967 - DNA, 25 bp, Probe Sequence
atcacaagcattcctatacaccaac

SEQ ID NO: 66968 - DNA, 25 bp, Probe Sequence
aagcattcctatacaccaacaacag

SEQ ID NO: 66969 - DNA, 25 bp, Probe Sequence
tgctattgccattaccataccattg

SEQ ID NO: 66970 - DNA, 25 bp, Probe Sequence
ctatacaccaacaacagacaagcaa

SEQ ID NO: 66971 - DNA, 25 bp, Probe Sequence
caagcattcctatacaccaacaaca

SEQ ID NO: 66972 - DNA, 25 bp, Probe Sequence
acaagcattcctatacaccaacaac

SEQ ID NO: 66973 - DNA, 25 bp, Probe Sequence
cacaagcattcctatacaccaacaa

SEQ ID NO: 66974 - DNA, 25 bp, Probe Sequence
tcatggacaggaagaatcaatatca

SEQ ID NO: 66975 - DNA, 25 bp, Probe Sequence
gcattcctatacaccaacaacagac

SEQ ID NO: 66976 - DNA, 25 bp, Probe Sequence
agcattcctatacaccaacaacaga

SEQ ID NO: 66977 - DNA, 25 bp, Probe Sequence
gctcatggacaggaagaatcaatat

SEQ ID NO: 66978 - DNA, 25 bp, Probe Sequence
ctcatggacaggaagaatcaatatc

SEQ ID NO: 66979 - DNA, 25 bp, Probe Sequence
tcacaagcattcctatacaccaaca

SEQ ID NO: 66980 - DNA, 25 bp, Probe Sequence
atggacaggaagaatcaatatcatg

SEQ ID NO: 66981 - DNA, 25 bp, Probe Sequence
catggacaggaagaatcaatatcat

SEQ ID NO: 66982 - DNA, 25 bp, Probe Sequence
tgctcatggacaggaagaatcaata

SEQ ID NO: 66983 - DNA, 25 bp, Probe Sequence
tcctatacaccaacaacagacaagc

SEQ ID NO: 66984 - DNA, 25 bp, Probe Sequence
aaataagagaggacacaaacaaacg

SEQ ID NO: 66985 - DNA, 25 bp, Probe Sequence
caaggaaataagagaggacacaaac

SEQ ID NO: 66986 - DNA, 25 bp, Probe Sequence
tataagtgtgaagaatgcgagaaga

SEQ ID NO: 66987 - DNA, 25 bp, Probe Sequence
ctataagtgtgaagaatgcgagaag

SEQ ID NO: 66988 - DNA, 25 bp, Probe Sequence
cctataagtgtgaagaatgcgagaa

SEQ ID NO: 66989 - DNA, 25 bp, Probe Sequence
ataagtgtgaagaatgcgagaagag

SEQ ID NO: 66990 - DNA, 25 bp, Probe Sequence
ctcagatgtcaataagaatggttcc

SEQ ID NO: 66991 - DNA, 25 bp, Probe Sequence
tcagatgtcaataagaatggttcca

SEQ ID NO: 66992 - DNA, 25 bp, Probe Sequence
tctcagatgtcaataagaatggttc

SEQ ID NO: 66993 - DNA, 25 bp, Probe Sequence
gtgttccaaccttgttctatgtcag

SEQ ID NO: 66994 - DNA, 25 bp, Probe Sequence
cagatgtcaataagaatggttccat

SEQ ID NO: 66995 - DNA, 25 bp, Probe Sequence
atctcagatgtcaataagaatggtt

SEQ ID NO: 66996 - DNA, 25 bp, Probe Sequence
tcaataagaatggttccatagaagg

SEQ ID NO: 66997 - DNA, 25 bp, Probe Sequence
ggaaagaccctataagtgtgaagaa

SEQ ID NO: 66998 - DNA, 25 bp, Probe Sequence
tcacacctaaatcgtcatcaaagta

SEQ ID NO: 66999 - DNA, 25 bp, Probe Sequence
attcacacctaaatcgtcatcaaag

SEQ ID NO: 67000 - DNA, 25 bp, Probe Sequence
ataaatgtggtaactgtgggaagag

SEQ ID NO: 67001 - DNA, 25 bp, Probe Sequence
aagaccctataagtgtgaagaatgc

SEQ ID NO: 67002 - DNA, 25 bp, Probe Sequence
tataaatgtggtaactgtgggaaga

SEQ ID NO: 67003 - DNA, 25 bp, Probe Sequence
ttcacacctaaatcgtcatcaaagt

SEQ ID NO: 67004 - DNA, 25 bp, Probe Sequence
tgtcaataagaatggttccatagaa

SEQ ID NO: 67005 - DNA, 25 bp, Probe Sequence
aattcacacctaaatcgtcatcaaa

SEQ ID NO: 67006 - DNA, 25 bp, Probe Sequence
tagacatcagagactacataaaggg

SEQ ID NO: 67007 - DNA, 25 bp, Probe Sequence
taagtgtgaagaatgcgagaagagc

SEQ ID NO: 67008 - DNA, 25 bp, Probe Sequence
gctgaggtaggagaatcacttgaac

SEQ ID NO: 67009 - DNA, 25 bp, Probe Sequence
atgtcaataagaatggttccataga

SEQ ID NO: 67010 - DNA, 25 bp, Probe Sequence
ctacttagtgaatgtctgtgctagg

SEQ ID NO: 67011 - DNA, 25 bp, Probe Sequence
cactatggtcctccttatactctgc

SEQ ID NO: 67012 - DNA, 25 bp, Probe Sequence
actacttagtgaatgtctgtgctag

SEQ ID NO: 67013 - DNA, 25 bp, Probe Sequence
aactacttagtgaatgtctgtgcta

SEQ ID NO: 67014 - DNA, 25 bp, Probe Sequence
tacttagtgaatgtctgtgctaggc

SEQ ID NO: 67015 - DNA, 25 bp, Probe Sequence
ccactatggtcctccttatactctg

SEQ ID NO: 67016 - DNA, 25 bp, Probe Sequence
ctatggtcctccttatactctgcac

SEQ ID NO: 67017 - DNA, 25 bp, Probe Sequence
caattctgataggctgacctctctg

SEQ ID NO: 67018 - DNA, 25 bp, Probe Sequence
aaactacttagtgaatgtctgtgct

SEQ ID NO: 67019 - DNA, 25 bp, Probe Sequence
actatggtcctccttatactctgca

SEQ ID NO: 67020 - DNA, 25 bp, Probe Sequence
gggaaggaaggaaagagaagagaag

SEQ ID NO: 67021 - DNA, 25 bp, Probe Sequence
gaagggaaggaaggaaagagaagag

SEQ ID NO: 67022 - DNA, 25 bp, Probe Sequence
agggaaggaaggaaagagaagagaa

SEQ ID NO: 67023 - DNA, 25 bp, Probe Sequence
aagggaaggaaggaaagagaagaga

SEQ ID NO: 67024 - DNA, 25 bp, Probe Sequence
agaagggaaggaaggaaagagaaga

SEQ ID NO: 67025 - DNA, 25 bp, Probe Sequence
cagaagggaaggaaggaaagagaag

SEQ ID NO: 67026 - DNA, 25 bp, Probe Sequence
ggaaggaaggaaagagaagagaagc

SEQ ID NO: 67027 - DNA, 25 bp, Probe Sequence
ccaattctgataggctgacctctct

SEQ ID NO: 67028 - DNA, 25 bp, Probe Sequence
gaaggaaggaaagagaagagaagct

SEQ ID NO: 67029 - DNA, 25 bp, Probe Sequence
aaggaaggaaagagaagagaagctg

SEQ ID NO: 67030 - DNA, 25 bp, Probe Sequence
cccactatggtcctccttatactct

SEQ ID NO: 67031 - DNA, 25 bp, Probe Sequence
tcccactatggtcctccttatactc

SEQ ID NO: 67032 - DNA, 25 bp, Probe Sequence
ctcccactatggtcctccttatact

SEQ ID NO: 67033 - DNA, 25 bp, Probe Sequence
aattctgataggctgacctctctgc

SEQ ID NO: 67034 - DNA, 25 bp, Probe Sequence
agaatagctctgagattaggcaatg

SEQ ID NO: 67035 - DNA, 25 bp, Probe Sequence
gaatagctctgagattaggcaatgg

SEQ ID NO: 67036 - DNA, 25 bp, Probe Sequence
aagaatagctctgagattaggcaat

SEQ ID NO: 67037 - DNA, 25 bp, Probe Sequence
atagctctgagattaggcaatggaa

SEQ ID NO: 67038 - DNA, 25 bp, Probe Sequence
aatagctctgagattaggcaatgga

SEQ ID NO: 67039 - DNA, 25 bp, Probe Sequence
ttgaatacagagggaagtttatgct

SEQ ID NO: 67040 - DNA, 25 bp, Probe Sequence
gagattaggcaatggaaatgacaaa

SEQ ID NO: 67041 - DNA, 25 bp, Probe Sequence
tgagattaggcaatggaaatgacaa

SEQ ID NO: 67042 - DNA, 25 bp, Probe Sequence
gcacttatcattgaatacagaggga

SEQ ID NO: 67043 - DNA, 25 bp, Probe Sequence
attgaatacagagggaagtttatgc

SEQ ID NO: 67044 - DNA, 25 bp, Probe Sequence
tctgagattaggcaatggaaatgac

SEQ ID NO: 67045 - DNA, 25 bp, Probe Sequence
gggaactgaaattactattgccttt

SEQ ID NO: 67046 - DNA, 25 bp, Probe Sequence
aaagggaactgaaattactattgcc

SEQ ID NO: 67047 - DNA, 25 bp, Probe Sequence
ctctgagattaggcaatggaaatga

SEQ ID NO: 67048 - DNA, 25 bp, Probe Sequence
ctgagattaggcaatggaaatgaca

SEQ ID NO: 67049 - DNA, 25 bp, Probe Sequence
atgcacttatcattgaatacagagg

SEQ ID NO: 67050 - DNA, 25 bp, Probe Sequence
cgatttgaataccaacaatttgctc

SEQ ID NO: 67051 - DNA, 25 bp, Probe Sequence
ggaactgaaattactattgcctttg

SEQ ID NO: 67052 - DNA, 25 bp, Probe Sequence
ccgatttgaataccaacaatttgct

SEQ ID NO: 67053 - DNA, 25 bp, Probe Sequence
tccgatttgaataccaacaatttgc

SEQ ID NO: 67054 - DNA, 25 bp, Probe Sequence
cacttatcattgaatacagagggaa

SEQ ID NO: 67055 - DNA, 25 bp, Probe Sequence
tttgaataccaacaatttgctcttc

SEQ ID NO: 67056 - DNA, 25 bp, Probe Sequence
caaagggaactgaaattactattgc

SEQ ID NO: 67057 - DNA, 25 bp, Probe Sequence
atccgatttgaataccaacaatttg

SEQ ID NO: 67058 - DNA, 25 bp, Probe Sequence
gaagatcacttgagatcaggagttc

SEQ ID NO: 67059 - DNA, 25 bp, Probe Sequence
ggaagatcacttgagatcaggagtt

SEQ ID NO: 67060 - DNA, 25 bp, Probe Sequence
aagatcacttgagatcaggagttcg

SEQ ID NO: 67061 - DNA, 25 bp, Probe Sequence
caggaagatcacttgagatcaggag

SEQ ID NO: 67062 - DNA, 25 bp, Probe Sequence
aggaagatcacttgagatcaggagt

SEQ ID NO: 67063 - DNA, 25 bp, Probe Sequence
catgcctataatcccagctactcag

SEQ ID NO: 67064 - DNA, 25 bp, Probe Sequence
aaataaataaataggccaggcacag

SEQ ID NO: 67065 - DNA, 25 bp, Probe Sequence
aataaataaataggccaggcacagt

SEQ ID NO: 67066 - DNA, 25 bp, Probe Sequence
ataaataaataggccaggcacagtg

SEQ ID NO: 67067 - DNA, 25 bp, Probe Sequence
aaaatacaaaagttagccaggcatg

SEQ ID NO: 67068 - DNA, 25 bp, Probe Sequence
cttgagatcaggagttcgagaccag

SEQ ID NO: 67069 - DNA, 25 bp, Probe Sequence
aggtgaaaccccatctctactaaaa

SEQ ID NO: 67070 - DNA, 25 bp, Probe Sequence
gcaggaagatcacttgagatcagga

SEQ ID NO: 67071 - DNA, 25 bp, Probe Sequence
aggcaggaagatcacttgagatcag

SEQ ID NO: 67072 - DNA, 25 bp, Probe Sequence
gaggcaggaagatcacttgagatca

SEQ ID NO: 67073 - DNA, 25 bp, Probe Sequence
ttgagatcaggagttcgagaccagt

SEQ ID NO: 67074 - DNA, 25 bp, Probe Sequence
atgcctataatcccagctactcagg

SEQ ID NO: 67075 - DNA, 25 bp, Probe Sequence
caggtgaaaccccatctctactaaa

SEQ ID NO: 67076 - DNA, 25 bp, Probe Sequence
gtggatcacttgaggtcaggagttg

SEQ ID NO: 67077 - DNA, 25 bp, Probe Sequence
gagatcaggagttcgagaccagtct

SEQ ID NO: 67078 - DNA, 25 bp, Probe Sequence
ctgacgcataagacttgcttgaacc

SEQ ID NO: 67079 - DNA, 25 bp, Probe Sequence
tgagatcaggagttcgagaccagtc

SEQ ID NO: 67080 - DNA, 25 bp, Probe Sequence
aaatacaaaagttagccaggcatgg

SEQ ID NO: 67081 - DNA, 25 bp, Probe Sequence
acaggtgaaaccccatctctactaa

SEQ ID NO: 67082 - DNA, 25 bp, Probe Sequence
gccacttatacttctgattgattcc

SEQ ID NO: 67083 - DNA, 25 bp, Probe Sequence
tgccacttatacttctgattgattc

SEQ ID NO: 67084 - DNA, 25 bp, Probe Sequence
ggcattaaggcaatatggtgttatg

SEQ ID NO: 67085 - DNA, 25 bp, Probe Sequence
ttgccacttatacttctgattgatt

SEQ ID NO: 67086 - DNA, 25 bp, Probe Sequence
ccacttatacttctgattgattcct

SEQ ID NO: 67087 - DNA, 25 bp, Probe Sequence
tgtcctccaatgtcaataacaacaa

SEQ ID NO: 67088 - DNA, 25 bp, Probe Sequence
aatctcatcacttcctgtctggttc

SEQ ID NO: 67089 - DNA, 25 bp, Probe Sequence
ccaaccatacagtgctaatcttgtt

SEQ ID NO: 67090 - DNA, 25 bp, Probe Sequence
gacttgtcctccaatgtcaataaca

SEQ ID NO: 67091 - DNA, 25 bp, Probe Sequence
ataatcgtgtccaccattctcacta

SEQ ID NO: 67092 - DNA, 25 bp, Probe Sequence
caatcaatggctgtcttgctcaatt

SEQ ID NO: 67093 - DNA, 25 bp, Probe Sequence
atctcatcacttcctgtctggttct

SEQ ID NO: 67094 - DNA, 25 bp, Probe Sequence
acaataatcgtgtccaccattctca

SEQ ID NO: 67095 - DNA, 25 bp, Probe Sequence
acttctgattgattcctttgtgtag

SEQ ID NO: 67096 - DNA, 25 bp, Probe Sequence
aataatcgtgtccaccattctcact

SEQ ID NO: 67097 - DNA, 25 bp, Probe Sequence
caataatcgtgtccaccattctcac

SEQ ID NO: 67098 - DNA, 25 bp, Probe Sequence
tttaacttgtccctcatctctgttt

SEQ ID NO: 67099 - DNA, 25 bp, Probe Sequence
taatcgtgtccaccattctcactac

SEQ ID NO: 67100 - DNA, 25 bp, Probe Sequence
tttgccacttatacttctgattgat

SEQ ID NO: 67101 - DNA, 25 bp, Probe Sequence
atttgccacttatacttctgattga

SEQ ID NO: 67102 - DNA, 25 bp, Probe Sequence
atacttctgattgattcctttgtgt

SEQ ID NO: 67103 - DNA, 25 bp, Probe Sequence
cttctgattgattcctttgtgtaga

SEQ ID NO: 67104 - DNA, 25 bp, Probe Sequence
gggcattaaggcaatatggtgttat

SEQ ID NO: 67105 - DNA, 25 bp, Probe Sequence
aaatctcatcacttcctgtctggtt

SEQ ID NO: 67106 - DNA, 25 bp, Probe Sequence
agttgctcattatggactgctacaa

SEQ ID NO: 67107 - DNA, 25 bp, Probe Sequence
aagttgctcattatggactgctaca

SEQ ID NO: 67108 - DNA, 25 bp, Probe Sequence
gttgctcattatggactgctacaaa

SEQ ID NO: 67109 - DNA, 25 bp, Probe Sequence
ttgctcattatggactgctacaaaa

SEQ ID NO: 67110 - DNA, 25 bp, Probe Sequence
acctacctccagagcaaggagaatt

SEQ ID NO: 67111 - DNA, 25 bp, Probe Sequence
cctacctccagagcaaggagaattc

SEQ ID NO: 67112 - DNA, 25 bp, Probe Sequence
gacctacctccagagcaaggagaat

SEQ ID NO: 67113 - DNA, 25 bp, Probe Sequence
tatcaggtatcatcaacaggttctc

SEQ ID NO: 67114 - DNA, 25 bp, Probe Sequence
caggtatcatcaacaggttctcaat

SEQ ID NO: 67115 - DNA, 25 bp, Probe Sequence
aggtatcatcaacaggttctcaatt

SEQ ID NO: 67116 - DNA, 25 bp, Probe Sequence
ttatcaggtatcatcaacaggttct

SEQ ID NO: 67117 - DNA, 25 bp, Probe Sequence
atcaggtatcatcaacaggttctca

SEQ ID NO: 67118 - DNA, 25 bp, Probe Sequence
tcaggtatcatcaacaggttctcaa

SEQ ID NO: 67119 - DNA, 25 bp, Probe Sequence
ggtatcatcaacaggttctcaatta

SEQ ID NO: 67120 - DNA, 25 bp, Probe Sequence
aggctttatcaggtatcatcaacag

SEQ ID NO: 67121 - DNA, 25 bp, Probe Sequence
aaggctttatcaggtatcatcaaca

SEQ ID NO: 67122 - DNA, 25 bp, Probe Sequence
gctttatcaggtatcatcaacaggt

SEQ ID NO: 67123 - DNA, 25 bp, Probe Sequence
cttattagatgctgcatgtactgtg

SEQ ID NO: 67124 - DNA, 25 bp, Probe Sequence
tcttattagatgctgcatgtactgt

SEQ ID NO: 67125 - DNA, 25 bp, Probe Sequence
actcttattagatgctgcatgtact

SEQ ID NO: 67126 - DNA, 25 bp, Probe Sequence
cgaggaagacgatttaatgtttcat

SEQ ID NO: 67127 - DNA, 25 bp, Probe Sequence
ctcttattagatgctgcatgtactg

SEQ ID NO: 67128 - DNA, 25 bp, Probe Sequence
gtatcatcaacaggttctcaattaa

SEQ ID NO: 67129 - DNA, 25 bp, Probe Sequence
ggctttatcaggtatcatcaacagg

SEQ ID NO: 67130 - DNA, 25 bp, Probe Sequence
aatggaaactcttattagatgctgc

SEQ ID NO: 67131 - DNA, 25 bp, Probe Sequence
aactcttattagatgctgcatgtac

SEQ ID NO: 67132 - DNA, 25 bp, Probe Sequence
cagaagacttgaaatgccattgata

SEQ ID NO: 67133 - DNA, 25 bp, Probe Sequence
ggaaaggctttatcaggtatcatca

SEQ ID NO: 67134 - DNA, 25 bp, Probe Sequence
agaagacttgaaatgccattgatag

SEQ ID NO: 67135 - DNA, 25 bp, Probe Sequence
tttatcaggtatcatcaacaggttc

SEQ ID NO: 67136 - DNA, 25 bp, Probe Sequence
ctttatcaggtatcatcaacaggtt

SEQ ID NO: 67137 - DNA, 25 bp, Probe Sequence
acagaagaagacatcaataagcaga

SEQ ID NO: 67138 - DNA, 25 bp, Probe Sequence
caacagaagaagacatcaataagca

SEQ ID NO: 67139 - DNA, 25 bp, Probe Sequence
tcaacagaagaagacatcaataagc

SEQ ID NO: 67140 - DNA, 25 bp, Probe Sequence
aacagaagaagacatcaataagcag

SEQ ID NO: 67141 - DNA, 25 bp, Probe Sequence
ccactcaacagaagaagacatcaat

SEQ ID NO: 67142 - DNA, 25 bp, Probe Sequence
cactcaacagaagaagacatcaata

SEQ ID NO: 67143 - DNA, 25 bp, Probe Sequence
cagaagaagacatcaataagcagat

SEQ ID NO: 67144 - DNA, 25 bp, Probe Sequence
ttctgatgctcattctgatacaact

SEQ ID NO: 67145 - DNA, 25 bp, Probe Sequence
tctgatgctcattctgatacaacta

SEQ ID NO: 67146 - DNA, 25 bp, Probe Sequence
agttgtgtggaagttcaggagataa

SEQ ID NO: 67147 - DNA, 25 bp, Probe Sequence
aagttgtgtggaagttcaggagata

SEQ ID NO: 67148 - DNA, 25 bp, Probe Sequence
actcaacagaagaagacatcaataa

SEQ ID NO: 67149 - DNA, 25 bp, Probe Sequence
ctgatgctcattctgatacaactat

SEQ ID NO: 67150 - DNA, 25 bp, Probe Sequence
tattatcaggttcacgccaacagta

SEQ ID NO: 67151 - DNA, 25 bp, Probe Sequence
tatctggttattatcaggttcacgc

SEQ ID NO: 67152 - DNA, 25 bp, Probe Sequence
ctcaacagaagaagacatcaataag

SEQ ID NO: 67153 - DNA, 25 bp, Probe Sequence
tgatgctcattctgatacaactatt

SEQ ID NO: 67154 - DNA, 25 bp, Probe Sequence
gttattatcaggttcacgccaacag

SEQ ID NO: 67155 - DNA, 25 bp, Probe Sequence
agaagaagacatcaataagcagata

SEQ ID NO: 67156 - DNA, 25 bp, Probe Sequence
atatctggttattatcaggttcacg

SEQ ID NO: 67157 - DNA, 25 bp, Probe Sequence
ttattatcaggttcacgccaacagt

SEQ ID NO: 67158 - DNA, 25 bp, Probe Sequence
gttattatgtgtaagatgagttgct

SEQ ID NO: 67159 - DNA, 25 bp, Probe Sequence
agttattatgtgtaagatgagttgc

SEQ ID NO: 67160 - DNA, 25 bp, Probe Sequence
ataagcagataaatgacaaagagcg

SEQ ID NO: 67161 - DNA, 25 bp, Probe Sequence
gatgctaagtagtgaccagagagag

SEQ ID NO: 67162 - DNA, 25 bp, Probe Sequence
gagatgctaagtagtgaccagagag

SEQ ID NO: 67163 - DNA, 25 bp, Probe Sequence
atgctaagtagtgaccagagagaga

SEQ ID NO: 67164 - DNA, 25 bp, Probe Sequence
agatgctaagtagtgaccagagaga

SEQ ID NO: 67165 - DNA, 25 bp, Probe Sequence
atgactgaaggatcaagactagaac

SEQ ID NO: 67166 - DNA, 25 bp, Probe Sequence
cgtgaaggcatctaatctactggat

SEQ ID NO: 67167 - DNA, 25 bp, Probe Sequence
aatgactgaaggatcaagactagaa

SEQ ID NO: 67168 - DNA, 25 bp, Probe Sequence
agtctcctactgttatgttctccag

SEQ ID NO: 67169 - DNA, 25 bp, Probe Sequence
ctaagtagtgaccagagagagactg

SEQ ID NO: 67170 - DNA, 25 bp, Probe Sequence
actgaaggatcaagactagaaccaa

SEQ ID NO: 67171 - DNA, 25 bp, Probe Sequence
aaggagatgctaagtagtgaccaga

SEQ ID NO: 67172 - DNA, 25 bp, Probe Sequence
caaggagatgctaagtagtgaccag

SEQ ID NO: 67173 - DNA, 25 bp, Probe Sequence
caggcagtaataactcactaccttg

SEQ ID NO: 67174 - DNA, 25 bp, Probe Sequence
tcaggcagtaataactcactacctt

SEQ ID NO: 67175 - DNA, 25 bp, Probe Sequence
gcagtaataactcactaccttgtgg

SEQ ID NO: 67176 - DNA, 25 bp, Probe Sequence
ggcagtaataactcactaccttgtg

SEQ ID NO: 67177 - DNA, 25 bp, Probe Sequence
aggcagtaataactcactaccttgt

SEQ ID NO: 67178 - DNA, 25 bp, Probe Sequence
gactgaaggatcaagactagaacca

SEQ ID NO: 67179 - DNA, 25 bp, Probe Sequence
tgactgaaggatcaagactagaacc

SEQ ID NO: 67180 - DNA, 25 bp, Probe Sequence
ctcaggcagtaataactcactacct

SEQ ID NO: 67181 - DNA, 25 bp, Probe Sequence
taagtagtgaccagagagagactgt

SEQ ID NO: 67182 - DNA, 25 bp, Probe Sequence
gaaggcatctaatctactggattgt

SEQ ID NO: 67183 - DNA, 25 bp, Probe Sequence
tgaaggcatctaatctactggattg

SEQ ID NO: 67184 - DNA, 25 bp, Probe Sequence
gtgaaggcatctaatctactggatt

SEQ ID NO: 67185 - DNA, 25 bp, Probe Sequence
tgcctgaattgagaattttgatttt

SEQ ID NO: 67186 - DNA, 25 bp, Probe Sequence
ttctaattaaaggctttgcaacacc

SEQ ID NO: 67187 - DNA, 25 bp, Probe Sequence
ctaattaaaggctttgcaacaccaa

SEQ ID NO: 67188 - DNA, 25 bp, Probe Sequence
tctaattaaaggctttgcaacacca

SEQ ID NO: 67189 - DNA, 25 bp, Probe Sequence
taattaaaggctttgcaacaccaaa

SEQ ID NO: 67190 - DNA, 25 bp, Probe Sequence
aattaaaggctttgcaacaccaaaa

SEQ ID NO: 67191 - DNA, 25 bp, Probe Sequence
gagcactggtacacttcctacatcg

SEQ ID NO: 67192 - DNA, 25 bp, Probe Sequence
ggagcactggtacacttcctacatc

SEQ ID NO: 67193 - DNA, 25 bp, Probe Sequence
gtacacttcctacatcgacctgctg

SEQ ID NO: 67194 - DNA, 25 bp, Probe Sequence
ctggtacacttcctacatcgacctg

SEQ ID NO: 67195 - DNA, 25 bp, Probe Sequence
gcactggtacacttcctacatcgac

SEQ ID NO: 67196 - DNA, 25 bp, Probe Sequence
cactggtacacttcctacatcgacc

SEQ ID NO: 67197 - DNA, 25 bp, Probe Sequence
agcactggtacacttcctacatcga

SEQ ID NO: 67198 - DNA, 25 bp, Probe Sequence
actggtacacttcctacatcgacct

SEQ ID NO: 67199 - DNA, 25 bp, Probe Sequence
aggagcactggtacacttcctacat

SEQ ID NO: 67200 - DNA, 25 bp, Probe Sequence
ggatgagggaagaagaaagagtaat

SEQ ID NO: 67201 - DNA, 25 bp, Probe Sequence
aggatgagggaagaagaaagagtaa

SEQ ID NO: 67202 - DNA, 25 bp, Probe Sequence
gaggatgagggaagaagaaagagta

SEQ ID NO: 67203 - DNA, 25 bp, Probe Sequence
tagatgaagaggactactggtttct

SEQ ID NO: 67204 - DNA, 25 bp, Probe Sequence
ttaccactcaaatcccaaaccattc

SEQ ID NO: 67205 - DNA, 25 bp, Probe Sequence
cttaccactcaaatcccaaaccatt

SEQ ID NO: 67206 - DNA, 25 bp, Probe Sequence
atgaggatgagggaagaagaaagag

SEQ ID NO: 67207 - DNA, 25 bp, Probe Sequence
ctagatgaagaggactactggtttc

SEQ ID NO: 67208 - DNA, 25 bp, Probe Sequence
tttcctagagtcaaccaaagatcag

SEQ ID NO: 67209 - DNA, 25 bp, Probe Sequence
agtccctggtatgatgagtttctag

SEQ ID NO: 67210 - DNA, 25 bp, Probe Sequence
gatgagggaagaagaaagagtaatt

SEQ ID NO: 67211 - DNA, 25 bp, Probe Sequence
agatgaagaggactactggtttctc

SEQ ID NO: 67212 - DNA, 25 bp, Probe Sequence
aaggactcagtgcataagatgactt

SEQ ID NO: 67213 - DNA, 25 bp, Probe Sequence
ttctagatgaagaggactactggtt

SEQ ID NO: 67214 - DNA, 25 bp, Probe Sequence
aaggactttgggttaggaaggaatc

SEQ ID NO: 67215 - DNA, 25 bp, Probe Sequence
gaaggactttgggttaggaaggaat

SEQ ID NO: 67216 - DNA, 25 bp, Probe Sequence
taccactcaaatcccaaaccattca

SEQ ID NO: 67217 - DNA, 25 bp, Probe Sequence
ctagagtcaaccaaagatcagcatg

SEQ ID NO: 67218 - DNA, 25 bp, Probe Sequence
ggactttgggttaggaaggaatcat

SEQ ID NO: 67219 - DNA, 25 bp, Probe Sequence
gtaggaaggactttgggttaggaag

SEQ ID NO: 67220 - DNA, 25 bp, Probe Sequence
gactttgggttaggaaggaatcatg

SEQ ID NO: 67221 - DNA, 25 bp, Probe Sequence
cagtccctggtatgatgagtttcta

SEQ ID NO: 67222 - DNA, 25 bp, Probe Sequence
ctctacctgaatgagcagattggtc

SEQ ID NO: 67223 - DNA, 25 bp, Probe Sequence
tgaggatgagggaagaagaaagagt

SEQ ID NO: 67224 - DNA, 25 bp, Probe Sequence
aaggtctaagaagagccacaagaag

SEQ ID NO: 67225 - DNA, 25 bp, Probe Sequence
ggtctaagaagagccacaagaagag

SEQ ID NO: 67226 - DNA, 25 bp, Probe Sequence
atgaggatatctgtatgtggaagga

SEQ ID NO: 67227 - DNA, 25 bp, Probe Sequence
tgaggatatctgtatgtggaaggat

SEQ ID NO: 67228 - DNA, 25 bp, Probe Sequence
aggtctaagaagagccacaagaaga

SEQ ID NO: 67229 - DNA, 25 bp, Probe Sequence
gaggatatctgtatgtggaaggatt

SEQ ID NO: 67230 - DNA, 25 bp, Probe Sequence
tatgaggatatctgtatgtggaagg

SEQ ID NO: 67231 - DNA, 25 bp, Probe Sequence
gacccaactaaccttgactgtattc

SEQ ID NO: 67232 - DNA, 25 bp, Probe Sequence
gtctaagaagagccacaagaagagc

SEQ ID NO: 67233 - DNA, 25 bp, Probe Sequence
gagagtataaaggatctggaggttg

SEQ ID NO: 67234 - DNA, 25 bp, Probe Sequence
tgagagtataaaggatctggaggtt

SEQ ID NO: 67235 - DNA, 25 bp, Probe Sequence
atgagagtataaaggatctggaggt

SEQ ID NO: 67236 - DNA, 25 bp, Probe Sequence
aggatatctgtatgtggaaggatta

SEQ ID NO: 67237 - DNA, 25 bp, Probe Sequence
tgacccaactaaccttgactgtatt

SEQ ID NO: 67238 - DNA, 25 bp, Probe Sequence
ttgacccaactaaccttgactgtat

SEQ ID NO: 67239 - DNA, 25 bp, Probe Sequence
atatctgtatgtggaaggattaaga

SEQ ID NO: 67240 - DNA, 25 bp, Probe Sequence
agagtataaaggatctggaggttgg

SEQ ID NO: 67241 - DNA, 25 bp, Probe Sequence
acccaactaaccttgactgtattca

SEQ ID NO: 67242 - DNA, 25 bp, Probe Sequence
aaaggtctaagaagagccacaagaa

SEQ ID NO: 67243 - DNA, 25 bp, Probe Sequence
tttgacccaactaaccttgactgta

SEQ ID NO: 67244 - DNA, 25 bp, Probe Sequence
aaagtctcccgaaaggtctaagaag

SEQ ID NO: 67245 - DNA, 25 bp, Probe Sequence
tatgagagtataaaggatctggagg

SEQ ID NO: 67246 - DNA, 25 bp, Probe Sequence
gaaaggtctaagaagagccacaaga

SEQ ID NO: 67247 - DNA, 25 bp, Probe Sequence
caaagtctcccgaaaggtctaagaa

SEQ ID NO: 67248 - DNA, 25 bp, Probe Sequence
tgccaatcactaatgctgttactaa

SEQ ID NO: 67249 - DNA, 25 bp, Probe Sequence
ttgccaatcactaatgctgttacta

SEQ ID NO: 67250 - DNA, 25 bp, Probe Sequence
aagatattaacctggtgtgtgtcaa

SEQ ID NO: 67251 - DNA, 25 bp, Probe Sequence
gccaatcactaatgctgttactaac

SEQ ID NO: 67252 - DNA, 25 bp, Probe Sequence
ccaatcactaatgctgttactaact

SEQ ID NO: 67253 - DNA, 25 bp, Probe Sequence
gttgccaatcactaatgctgttact

SEQ ID NO: 67254 - DNA, 25 bp, Probe Sequence
agttgccaatcactaatgctgttac

SEQ ID NO: 67255 - DNA, 25 bp, Probe Sequence
cagttgccaatcactaatgctgtta

SEQ ID NO: 67256 - DNA, 25 bp, Probe Sequence
gctgtttcccaatgtcaagttatta

SEQ ID NO: 67257 - DNA, 25 bp, Probe Sequence
tgtttcccaatgtcaagttattagg

SEQ ID NO: 67258 - DNA, 25 bp, Probe Sequence
cgtattgggaattatcatctggcta

SEQ ID NO: 67259 - DNA, 25 bp, Probe Sequence
caatcactaatgctgttactaactt

SEQ ID NO: 67260 - DNA, 25 bp, Probe Sequence
agatattaacctggtgtgtgtcaaa

SEQ ID NO: 67261 - DNA, 25 bp, Probe Sequence
aaagatattaacctggtgtgtgtca

SEQ ID NO: 67262 - DNA, 25 bp, Probe Sequence
gattgtcagtgtcctttgctctatc

SEQ ID NO: 67263 - DNA, 25 bp, Probe Sequence
tcaagttattagggtagactccagg

SEQ ID NO: 67264 - DNA, 25 bp, Probe Sequence
attgtcagtgtcctttgctctatct

SEQ ID NO: 67265 - DNA, 25 bp, Probe Sequence
gtattgggaattatcatctggctaa

SEQ ID NO: 67266 - DNA, 25 bp, Probe Sequence
ctgtttcccaatgtcaagttattag

SEQ ID NO: 67267 - DNA, 25 bp, Probe Sequence
gacttctagcacggttgaacatctt

SEQ ID NO: 67268 - DNA, 25 bp, Probe Sequence
caagttattagggtagactccagga

SEQ ID NO: 67269 - DNA, 25 bp, Probe Sequence
taaagatattaacctggtgtgtgtc

SEQ ID NO: 67270 - DNA, 25 bp, Probe Sequence
ttgtcagtgtcctttgctctatctt

SEQ ID NO: 67271 - DNA, 25 bp, Probe Sequence
attgggaattatcatctggctaaat

SEQ ID NO: 67272 - DNA, 25 bp, Probe Sequence
tggttgtaatccttgttcagttctt

SEQ ID NO: 67273 - DNA, 25 bp, Probe Sequence
ggattattggaagtcagtcacagaa

SEQ ID NO: 67274 - DNA, 25 bp, Probe Sequence
atgtggttgtaatccttgttcagtt

SEQ ID NO: 67275 - DNA, 25 bp, Probe Sequence
aatgtggttgtaatccttgttcagt

SEQ ID NO: 67276 - DNA, 25 bp, Probe Sequence
gaatgtggttgtaatccttgttcag

SEQ ID NO: 67277 - DNA, 25 bp, Probe Sequence
ggttgtaatccttgttcagttctta

SEQ ID NO: 67278 - DNA, 25 bp, Probe Sequence
gtggttgtaatccttgttcagttct

SEQ ID NO: 67279 - DNA, 25 bp, Probe Sequence
gattattggaagtcagtcacagaat

SEQ ID NO: 67280 - DNA, 25 bp, Probe Sequence
tctcaggagtagattgttagtgttg

SEQ ID NO: 67281 - DNA, 25 bp, Probe Sequence
tgtggttgtaatccttgttcagttc

SEQ ID NO: 67282 - DNA, 25 bp, Probe Sequence
caggagtagattgttagtgttgact

SEQ ID NO: 67283 - DNA, 25 bp, Probe Sequence
tcaggagtagattgttagtgttgac

SEQ ID NO: 67284 - DNA, 25 bp, Probe Sequence
ctcaggagtagattgttagtgttga

SEQ ID NO: 67285 - DNA, 25 bp, Probe Sequence
ttctcaggagtagattgttagtgtt

SEQ ID NO: 67286 - DNA, 25 bp, Probe Sequence
aggagtagattgttagtgttgactt

SEQ ID NO: 67287 - DNA, 25 bp, Probe Sequence
attattggaagtcagtcacagaatt

SEQ ID NO: 67288 - DNA, 25 bp, Probe Sequence
aactcttggtggtcacatattgtat

SEQ ID NO: 67289 - DNA, 25 bp, Probe Sequence
actcttggtggtcacatattgtata

SEQ ID NO: 67290 - DNA, 25 bp, Probe Sequence
ggagaagttagtctgtgctaagata

SEQ ID NO: 67291 - DNA, 25 bp, Probe Sequence
ttcattgttgtctctcatgcttctt

SEQ ID NO: 67292 - DNA, 25 bp, Probe Sequence
agaagttagtctgtgctaagatagt

SEQ ID NO: 67293 - DNA, 25 bp, Probe Sequence
tcattgttgtctctcatgcttcttg

SEQ ID NO: 67294 - DNA, 25 bp, Probe Sequence
tattggaatgtggttgtaatccttg

SEQ ID NO: 67295 - DNA, 25 bp, Probe Sequence
attggaatgtggttgtaatccttgt

SEQ ID NO: 67296 - DNA, 25 bp, Probe Sequence
gttacctcagcagaagactagaatt

SEQ ID NO: 67297 - DNA, 25 bp, Probe Sequence
acctcagcagaagactagaattaga

SEQ ID NO: 67298 - DNA, 25 bp, Probe Sequence
tattgtcaacttgttctcttccatt

SEQ ID NO: 67299 - DNA, 25 bp, Probe Sequence
ttattgtcaacttgttctcttccat

SEQ ID NO: 67300 - DNA, 25 bp, Probe Sequence
attattgtcaacttgttctcttcca

SEQ ID NO: 67301 - DNA, 25 bp, Probe Sequence
tacctcagcagaagactagaattag

SEQ ID NO: 67302 - DNA, 25 bp, Probe Sequence
tcagcagaagactagaattagagaa

SEQ ID NO: 67303 - DNA, 25 bp, Probe Sequence
ttacctcagcagaagactagaatta

SEQ ID NO: 67304 - DNA, 25 bp, Probe Sequence
cctcagcagaagactagaattagag

SEQ ID NO: 67305 - DNA, 25 bp, Probe Sequence
agttacctcagcagaagactagaat

SEQ ID NO: 67306 - DNA, 25 bp, Probe Sequence
ctcagcagaagactagaattagaga

SEQ ID NO: 67307 - DNA, 25 bp, Probe Sequence
tagtaagtgtcaagtacagatgctc

SEQ ID NO: 67308 - DNA, 25 bp, Probe Sequence
tctagtaagtgtcaagtacagatgc

SEQ ID NO: 67309 - DNA, 25 bp, Probe Sequence
ctagtaagtgtcaagtacagatgct

SEQ ID NO: 67310 - DNA, 25 bp, Probe Sequence
gagttacctcagcagaagactagaa

SEQ ID NO: 67311 - DNA, 25 bp, Probe Sequence
aattattgtcaacttgttctcttcc

SEQ ID NO: 67312 - DNA, 25 bp, Probe Sequence
gtaagtgtcaagtacagatgctctt

SEQ ID NO: 67313 - DNA, 25 bp, Probe Sequence
tgtactcagaacacttagaattgcc

SEQ ID NO: 67314 - DNA, 25 bp, Probe Sequence
atgtactcagaacacttagaattgc

SEQ ID NO: 67315 - DNA, 25 bp, Probe Sequence
agtaagtgtcaagtacagatgctct

SEQ ID NO: 67316 - DNA, 25 bp, Probe Sequence
tcttctagtaagtgtcaagtacaga

SEQ ID NO: 67317 - DNA, 25 bp, Probe Sequence
caaggaccataaggtacatcagtta

SEQ ID NO: 67318 - DNA, 25 bp, Probe Sequence
ggaccataaggtacatcagttatct

SEQ ID NO: 67319 - DNA, 25 bp, Probe Sequence
aggaccataaggtacatcagttatc

SEQ ID NO: 67320 - DNA, 25 bp, Probe Sequence
ggctaagaagagggatgaggatgac

SEQ ID NO: 67321 - DNA, 25 bp, Probe Sequence
ctaagaagagggatgaggatgacgt

SEQ ID NO: 67322 - DNA, 25 bp, Probe Sequence
gctaagaagagggatgaggatgacg

SEQ ID NO: 67323 - DNA, 25 bp, Probe Sequence
taagaagagggatgaggatgacgtg

SEQ ID NO: 67324 - DNA, 25 bp, Probe Sequence
gggctaagaagagggatgaggatga

SEQ ID NO: 67325 - DNA, 25 bp, Probe Sequence
ctgggctaagaagagggatgaggat

SEQ ID NO: 67326 - DNA, 25 bp, Probe Sequence
tgggctaagaagagggatgaggatg

SEQ ID NO: 67327 - DNA, 25 bp, Probe Sequence
ggcctcccaactatgaataaagctt

SEQ ID NO: 67328 - DNA, 25 bp, Probe Sequence
gggcctcccaactatgaataaagct

SEQ ID NO: 67329 - DNA, 25 bp, Probe Sequence
cggggcctcccaactatgaataaag

SEQ ID NO: 67330 - DNA, 25 bp, Probe Sequence
ctggaactgaaggataatctggcaa

SEQ ID NO: 67331 - DNA, 25 bp, Probe Sequence
gaactgaaggataatctggcaaatg

SEQ ID NO: 67332 - DNA, 25 bp, Probe Sequence
aactgaaggataatctggcaaatga

SEQ ID NO: 67333 - DNA, 25 bp, Probe Sequence
ttacgaaagtctaacatcaggcatt

SEQ ID NO: 67334 - DNA, 25 bp, Probe Sequence
tctgtatctttgctcaactgctaat

SEQ ID NO: 67335 - DNA, 25 bp, Probe Sequence
ctttgctcaactgctaatttctctt

SEQ ID NO: 67336 - DNA, 25 bp, Probe Sequence
atctttgctcaactgctaatttctc

SEQ ID NO: 67337 - DNA, 25 bp, Probe Sequence
actgaaggataatctggcaaatgag

SEQ ID NO: 67338 - DNA, 25 bp, Probe Sequence
ggcttcaaactttaattcctttcct

SEQ ID NO: 67339 - DNA, 25 bp, Probe Sequence
tggcttcaaactttaattcctttcc

SEQ ID NO: 67340 - DNA, 25 bp, Probe Sequence
ctgtatctttgctcaactgctaatt

SEQ ID NO: 67341 - DNA, 25 bp, Probe Sequence
tctttgctcaactgctaatttctct

SEQ ID NO: 67342 - DNA, 25 bp, Probe Sequence
tctggcttcaaactttaattccttt

SEQ ID NO: 67343 - DNA, 25 bp, Probe Sequence
ttctggcttcaaactttaattcctt

SEQ ID NO: 67344 - DNA, 25 bp, Probe Sequence
tacgaaagtctaacatcaggcattg

SEQ ID NO: 67345 - DNA, 25 bp, Probe Sequence
ggaactgaaggataatctggcaaat

SEQ ID NO: 67346 - DNA, 25 bp, Probe Sequence
tgtatctttgctcaactgctaattt

SEQ ID NO: 67347 - DNA, 25 bp, Probe Sequence
cattctggcttcaaactttaattcc

SEQ ID NO: 67348 - DNA, 25 bp, Probe Sequence
attctggcttcaaactttaattcct

SEQ ID NO: 67349 - DNA, 25 bp, Probe Sequence
gtctgtatctttgctcaactgctaa

SEQ ID NO: 67350 - DNA, 25 bp, Probe Sequence
ctgaaggataatctggcaaatgaga

SEQ ID NO: 67351 - DNA, 25 bp, Probe Sequence
ctggcttcaaactttaattcctttc

SEQ ID NO: 67352 - DNA, 25 bp, Probe Sequence
cttacgaaagtctaacatcaggcat

SEQ ID NO: 67353 - DNA, 25 bp, Probe Sequence
aactgctaatttctcttggctgtag

SEQ ID NO: 67354 - DNA, 25 bp, Probe Sequence
ttcacacaaggtatgagcagattca

SEQ ID NO: 67355 - DNA, 25 bp, Probe Sequence
ctacttggaatttggagatagcatc

SEQ ID NO: 67356 - DNA, 25 bp, Probe Sequence
tttgctacttggaatttggagatag

SEQ ID NO: 67357 - DNA, 25 bp, Probe Sequence
tcacacaaggtatgagcagattcac

SEQ ID NO: 67358 - DNA, 25 bp, Probe Sequence
tggtatctttcacacaaggtatgag

SEQ ID NO: 67359 - DNA, 25 bp, Probe Sequence
tatctttcacacaaggtatgagcag

SEQ ID NO: 67360 - DNA, 25 bp, Probe Sequence
gactcaataaaccctcactgacttt

SEQ ID NO: 67361 - DNA, 25 bp, Probe Sequence
gtatctttcacacaaggtatgagca

SEQ ID NO: 67362 - DNA, 25 bp, Probe Sequence
tttcacacaaggtatgagcagattc

SEQ ID NO: 67363 - DNA, 25 bp, Probe Sequence
ctttcacacaaggtatgagcagatt

SEQ ID NO: 67364 - DNA, 25 bp, Probe Sequence
ggtatctttcacacaaggtatgagc

SEQ ID NO: 67365 - DNA, 25 bp, Probe Sequence
gcttccgtatccatgattatttgta

SEQ ID NO: 67366 - DNA, 25 bp, Probe Sequence
cattccagccataagtgactctgag

SEQ ID NO: 67367 - DNA, 25 bp, Probe Sequence
tatttgtactttcaagtgctgagtc

SEQ ID NO: 67368 - DNA, 25 bp, Probe Sequence
ggcttccgtatccatgattatttgt

SEQ ID NO: 67369 - DNA, 25 bp, Probe Sequence
gtggtatctttcacacaaggtatga

SEQ ID NO: 67370 - DNA, 25 bp, Probe Sequence
ttatttgtactttcaagtgctgagt

SEQ ID NO: 67371 - DNA, 25 bp, Probe Sequence
tctttcacacaaggtatgagcagat

SEQ ID NO: 67372 - DNA, 25 bp, Probe Sequence
atctttcacacaaggtatgagcaga

SEQ ID NO: 67373 - DNA, 25 bp, Probe Sequence
atttgtactttcaagtgctgagtcc

SEQ ID NO: 67374 - DNA, 25 bp, Probe Sequence
ggtggtatctttcacacaaggtatg

SEQ ID NO: 67375 - DNA, 25 bp, Probe Sequence
gacattcgatacatcttcacagcca

SEQ ID NO: 67376 - DNA, 25 bp, Probe Sequence
actttggtggtatctttcacacaag

SEQ ID NO: 67377 - DNA, 25 bp, Probe Sequence
gactttggtggtatctttcacacaa

SEQ ID NO: 67378 - DNA, 25 bp, Probe Sequence
cctaaggagtgagaaacccatttat

SEQ ID NO: 67379 - DNA, 25 bp, Probe Sequence
ctgggtgactgagactctaactaaa

SEQ ID NO: 67380 - DNA, 25 bp, Probe Sequence
aaggagtgagaaacccatttatact

SEQ ID NO: 67381 - DNA, 25 bp, Probe Sequence
ccctaaggagtgagaaacccattta

SEQ ID NO: 67382 - DNA, 25 bp, Probe Sequence
taaggagtgagaaacccatttatac

SEQ ID NO: 67383 - DNA, 25 bp, Probe Sequence
ctgtgttcatgggatgtattgtttc

SEQ ID NO: 67384 - DNA, 25 bp, Probe Sequence
ctgagatcacaccactgtattccag

SEQ ID NO: 67385 - DNA, 25 bp, Probe Sequence
aacccatttatactctactctcagt

SEQ ID NO: 67386 - DNA, 25 bp, Probe Sequence
ctaaggagtgagaaacccatttata

SEQ ID NO: 67387 - DNA, 25 bp, Probe Sequence
aaacccatttatactctactctcag

SEQ ID NO: 67388 - DNA, 25 bp, Probe Sequence
gaaacccatttatactctactctca

SEQ ID NO: 67389 - DNA, 25 bp, Probe Sequence
tattgtttccactcgtgtccctaag

SEQ ID NO: 67390 - DNA, 25 bp, Probe Sequence
cctgtgttcatgggatgtattgttt

SEQ ID NO: 67391 - DNA, 25 bp, Probe Sequence
gtattgtttccactcgtgtccctaa

SEQ ID NO: 67392 - DNA, 25 bp, Probe Sequence
gtgagaaacccatttatactctact

SEQ ID NO: 67393 - DNA, 25 bp, Probe Sequence
agtgagaaacccatttatactctac

SEQ ID NO: 67394 - DNA, 25 bp, Probe Sequence
attcacctgtgttcatgggatgtat

SEQ ID NO: 67395 - DNA, 25 bp, Probe Sequence
cctgggtgactgagactctaactaa

SEQ ID NO: 67396 - DNA, 25 bp, Probe Sequence
aaacctgggaaataggaggcttaaa

SEQ ID NO: 67397 - DNA, 25 bp, Probe Sequence
ttcacctgtgttcatgggatgtatt

SEQ ID NO: 67398 - DNA, 25 bp, Probe Sequence
agaaacccatttatactctactctc

SEQ ID NO: 67399 - DNA, 25 bp, Probe Sequence
tgagaaacccatttatactctactc

SEQ ID NO: 67400 - DNA, 25 bp, Probe Sequence
gagctgagatcacaccactgtattc

SEQ ID NO: 67401 - DNA, 25 bp, Probe Sequence
ttcatgggatgtattgtttccactc

SEQ ID NO: 67402 - DNA, 25 bp, Probe Sequence
gtgaggacatccagctagattacaa

SEQ ID NO: 67403 - DNA, 25 bp, Probe Sequence
gagtgaggacatccagctagattac

SEQ ID NO: 67404 - DNA, 25 bp, Probe Sequence
agtgaggacatccagctagattaca

SEQ ID NO: 67405 - DNA, 25 bp, Probe Sequence
tgaggacatccagctagattacaaa

SEQ ID NO: 67406 - DNA, 25 bp, Probe Sequence
ggagtgaggacatccagctagatta

SEQ ID NO: 67407 - DNA, 25 bp, Probe Sequence
caagtacatcgacctagacaaaggg

SEQ ID NO: 67408 - DNA, 25 bp, Probe Sequence
ccaagtacatcgacctagacaaagg

SEQ ID NO: 67409 - DNA, 25 bp, Probe Sequence
gaggacatccagctagattacaaaa

SEQ ID NO: 67410 - DNA, 25 bp, Probe Sequence
gtacatcgacctagacaaagggttc

SEQ ID NO: 67411 - DNA, 25 bp, Probe Sequence
agtacatcgacctagacaaagggtt

SEQ ID NO: 67412 - DNA, 25 bp, Probe Sequence
aagtacatcgacctagacaaagggt

SEQ ID NO: 67413 - DNA, 25 bp, Probe Sequence
aggagtgaggacatccagctagatt

SEQ ID NO: 67414 - DNA, 25 bp, Probe Sequence
tacatcgacctagacaaagggttcc

SEQ ID NO: 67415 - DNA, 25 bp, Probe Sequence
caggagtgaggacatccagctagat

SEQ ID NO: 67416 - DNA, 25 bp, Probe Sequence
ggaaggagaactgcaaatagggagg

SEQ ID NO: 67417 - DNA, 25 bp, Probe Sequence
cggaaggagaactgcaaatagggag

SEQ ID NO: 67418 - DNA, 25 bp, Probe Sequence
caaaatcccactgatgcccatcatg

SEQ ID NO: 67419 - DNA, 25 bp, Probe Sequence
ggttgttgttggatttactttgcta

SEQ ID NO: 67420 - DNA, 25 bp, Probe Sequence
tttgggttgttgttggatttacttt

SEQ ID NO: 67421 - DNA, 25 bp, Probe Sequence
atttgggttgttgttggatttactt

SEQ ID NO: 67422 - DNA, 25 bp, Probe Sequence
ttgggttgttgttggatttactttg

SEQ ID NO: 67423 - DNA, 25 bp, Probe Sequence
aatttgggttgttgttggatttact

SEQ ID NO: 67424 - DNA, 25 bp, Probe Sequence
tgttaatttgggttgttgttggatt

SEQ ID NO: 67425 - DNA, 25 bp, Probe Sequence
tactgttaatttgggttgttgttgg

SEQ ID NO: 67426 - DNA, 25 bp, Probe Sequence
aattcctgctaagtgtggcttctag

SEQ ID NO: 67427 - DNA, 25 bp, Probe Sequence
ctgttaatttgggttgttgttggat

SEQ ID NO: 67428 - DNA, 25 bp, Probe Sequence
gttaatttgggttgttgttggattt

SEQ ID NO: 67429 - DNA, 25 bp, Probe Sequence
ttgttgttggatttactttgctaga

SEQ ID NO: 67430 - DNA, 25 bp, Probe Sequence
gttgttgttggatttactttgctag

SEQ ID NO: 67431 - DNA, 25 bp, Probe Sequence
tgttgttggatttactttgctagat

SEQ ID NO: 67432 - DNA, 25 bp, Probe Sequence
actgttaatttgggttgttgttgga

SEQ ID NO: 67433 - DNA, 25 bp, Probe Sequence
atactgttaatttgggttgttgttg

SEQ ID NO: 67434 - DNA, 25 bp, Probe Sequence
taatttgggttgttgttggatttac

SEQ ID NO: 67435 - DNA, 25 bp, Probe Sequence
gttgttggatttactttgctagatt

SEQ ID NO: 67436 - DNA, 25 bp, Probe Sequence
ttaatttgggttgttgttggattta

SEQ ID NO: 67437 - DNA, 25 bp, Probe Sequence
aatactgttaatttgggttgttgtt

SEQ ID NO: 67438 - DNA, 25 bp, Probe Sequence
gggttgttgttggatttactttgct

SEQ ID NO: 67439 - DNA, 25 bp, Probe Sequence
ctcaggatgctcttgtttattctgg

SEQ ID NO: 67440 - DNA, 25 bp, Probe Sequence
cctcaggatgctcttgtttattctg

SEQ ID NO: 67441 - DNA, 25 bp, Probe Sequence
gaaggagaagacaataaagtcgctc

SEQ ID NO: 67442 - DNA, 25 bp, Probe Sequence
tgggttgttgttggatttactttgc

SEQ ID NO: 67443 - DNA, 25 bp, Probe Sequence
atgaaggactattatagcagcagac

SEQ ID NO: 67444 - DNA, 25 bp, Probe Sequence
tgatgaaggactattatagcagcag

SEQ ID NO: 67445 - DNA, 25 bp, Probe Sequence
gatgaaggactattatagcagcaga

SEQ ID NO: 67446 - DNA, 25 bp, Probe Sequence
attgaattagaagaactgaacctgc

SEQ ID NO: 67447 - DNA, 25 bp, Probe Sequence
aagtctgtgtcctaatgaagattcc

SEQ ID NO: 67448 - DNA, 25 bp, Probe Sequence
gcttggtgattgaattagaagaact

SEQ ID NO: 67449 - DNA, 25 bp, Probe Sequence
cgcttggtgattgaattagaagaac

SEQ ID NO: 67450 - DNA, 25 bp, Probe Sequence
ttgaattagaagaactgaacctgcc

SEQ ID NO: 67451 - DNA, 25 bp, Probe Sequence
acgcttggtgattgaattagaagaa

SEQ ID NO: 67452 - DNA, 25 bp, Probe Sequence
agtctgtgtcctaatgaagattcca

SEQ ID NO: 67453 - DNA, 25 bp, Probe Sequence
ttctaagtctgtgtcctaatgaaga

SEQ ID NO: 67454 - DNA, 25 bp, Probe Sequence
ttaggaagaaccacagtgagaagaa

SEQ ID NO: 67455 - DNA, 25 bp, Probe Sequence
agaagttgaggagaatgatggacat

SEQ ID NO: 67456 - DNA, 25 bp, Probe Sequence
tctaagtctgtgtcctaatgaagat

SEQ ID NO: 67457 - DNA, 25 bp, Probe Sequence
tggtgattgaattagaagaactgaa

SEQ ID NO: 67458 - DNA, 25 bp, Probe Sequence
ttggtgattgaattagaagaactga

SEQ ID NO: 67459 - DNA, 25 bp, Probe Sequence
cagacgcttggtgattgaattagaa

SEQ ID NO: 67460 - DNA, 25 bp, Probe Sequence
gacgcttggtgattgaattagaaga

SEQ ID NO: 67461 - DNA, 25 bp, Probe Sequence
agacgcttggtgattgaattagaag

SEQ ID NO: 67462 - DNA, 25 bp, Probe Sequence
gtgattgaattagaagaactgaacc

SEQ ID NO: 67463 - DNA, 25 bp, Probe Sequence
ggtgattgaattagaagaactgaac

SEQ ID NO: 67464 - DNA, 25 bp, Probe Sequence
ctgatgaaggactattatagcagca

SEQ ID NO: 67465 - DNA, 25 bp, Probe Sequence
tgattgaattagaagaactgaacct

SEQ ID NO: 67466 - DNA, 25 bp, Probe Sequence
ctgtgtcctaatgaagattccagtt

SEQ ID NO: 67467 - DNA, 25 bp, Probe Sequence
aaggaggcaatgaatactatgatgt

SEQ ID NO: 67468 - DNA, 25 bp, Probe Sequence
gcaatgaatactatgatgtgtagcc

SEQ ID NO: 67469 - DNA, 25 bp, Probe Sequence
ggcaatgaatactatgatgtgtagc

SEQ ID NO: 67470 - DNA, 25 bp, Probe Sequence
aggaggcaatgaatactatgatgtg

SEQ ID NO: 67471 - DNA, 25 bp, Probe Sequence
caaggaggcaatgaatactatgatg

SEQ ID NO: 67472 - DNA, 25 bp, Probe Sequence
tgaatactatgatgtgtagccgatg

SEQ ID NO: 67473 - DNA, 25 bp, Probe Sequence
aatgaatactatgatgtgtagccga

SEQ ID NO: 67474 - DNA, 25 bp, Probe Sequence
caatgaatactatgatgtgtagccg

SEQ ID NO: 67475 - DNA, 25 bp, Probe Sequence
atgaatactatgatgtgtagccgat

SEQ ID NO: 67476 - DNA, 25 bp, Probe Sequence
ggaggcaatgaatactatgatgtgt

SEQ ID NO: 67477 - DNA, 25 bp, Probe Sequence
ctctccttcttcttggtcacatata

SEQ ID NO: 67478 - DNA, 25 bp, Probe Sequence
tctctccttcttcttggtcacatat

SEQ ID NO: 67479 - DNA, 25 bp, Probe Sequence
ttctctccttcttcttggtcacata

SEQ ID NO: 67480 - DNA, 25 bp, Probe Sequence
gaatactatgatgtgtagccgatgc

SEQ ID NO: 67481 - DNA, 25 bp, Probe Sequence
aggcaatgaatactatgatgtgtag

SEQ ID NO: 67482 - DNA, 25 bp, Probe Sequence
gaggcaatgaatactatgatgtgta

SEQ ID NO: 67483 - DNA, 25 bp, Probe Sequence
tcaaggaggcaatgaatactatgat

SEQ ID NO: 67484 - DNA, 25 bp, Probe Sequence
ctcaaggaggcaatgaatactatga

SEQ ID NO: 67485 - DNA, 25 bp, Probe Sequence
tctccttcttcttggtcacatatat

SEQ ID NO: 67486 - DNA, 25 bp, Probe Sequence
cagatactgtgctgagtgtaatagg

SEQ ID NO: 67487 - DNA, 25 bp, Probe Sequence
ccagatactgtgctgagtgtaatag

SEQ ID NO: 67488 - DNA, 25 bp, Probe Sequence
cttatccacagactccaggcatatc

SEQ ID NO: 67489 - DNA, 25 bp, Probe Sequence
gatactgtgctgagtgtaataggct

SEQ ID NO: 67490 - DNA, 25 bp, Probe Sequence
agatactgtgctgagtgtaataggc

SEQ ID NO: 67491 - DNA, 25 bp, Probe Sequence
ggattatcatctcagttaagacacg

SEQ ID NO: 67492 - DNA, 25 bp, Probe Sequence
atgcctggaacatcaactacaagaa

SEQ ID NO: 67493 - DNA, 25 bp, Probe Sequence
acgtgtatattaaggaactgatgca

SEQ ID NO: 67494 - DNA, 25 bp, Probe Sequence
tattccactacatgagcatcaccat

SEQ ID NO: 67495 - DNA, 25 bp, Probe Sequence
tacaagaaatgggagaatgaagagg

SEQ ID NO: 67496 - DNA, 25 bp, Probe Sequence
actacaagaaatgggagaatgaaga

SEQ ID NO: 67497 - DNA, 25 bp, Probe Sequence
ctacaagaaatgggagaatgaagag

SEQ ID NO: 67498 - DNA, 25 bp, Probe Sequence
caactacaagaaatgggagaatgaa

SEQ ID NO: 67499 - DNA, 25 bp, Probe Sequence
acatcaactacaagaaatgggagaa

SEQ ID NO: 67500 - DNA, 25 bp, Probe Sequence
aacatcaactacaagaaatgggaga

SEQ ID NO: 67501 - DNA, 25 bp, Probe Sequence
gaacatcaactacaagaaatgggag

SEQ ID NO: 67502 - DNA, 25 bp, Probe Sequence
ctggaacatcaactacaagaaatgg

SEQ ID NO: 67503 - DNA, 25 bp, Probe Sequence
cctggaacatcaactacaagaaatg

SEQ ID NO: 67504 - DNA, 25 bp, Probe Sequence
tatcatctcagttaagacacgttca

SEQ ID NO: 67505 - DNA, 25 bp, Probe Sequence
aactacaagaaatgggagaatgaag

SEQ ID NO: 67506 - DNA, 25 bp, Probe Sequence
atcaactacaagaaatgggagaatg

SEQ ID NO: 67507 - DNA, 25 bp, Probe Sequence
atcatctcagttaagacacgttcag

SEQ ID NO: 67508 - DNA, 25 bp, Probe Sequence
caagaaatgggagaatgaagaggag

SEQ ID NO: 67509 - DNA, 25 bp, Probe Sequence
tcatcaatgggattatcatctcagt

SEQ ID NO: 67510 - DNA, 25 bp, Probe Sequence
atctcagttaagacacgttcagaac

SEQ ID NO: 67511 - DNA, 25 bp, Probe Sequence
catctcagttaagacacgttcagaa

SEQ ID NO: 67512 - DNA, 25 bp, Probe Sequence
cgacaagaataactatgctgccatg

SEQ ID NO: 67513 - DNA, 25 bp, Probe Sequence
aagacttaacaaactattgcgacag

SEQ ID NO: 67514 - DNA, 25 bp, Probe Sequence
catcaactacaagaaatgggagaat

SEQ ID NO: 67515 - DNA, 25 bp, Probe Sequence
aaatttgaagcctgagtgtgtgtac

SEQ ID NO: 67516 - DNA, 25 bp, Probe Sequence
aatttgaagcctgagtgtgtgtacg

SEQ ID NO: 67517 - DNA, 25 bp, Probe Sequence
tgtcgatatcccagctttcaacaaa

SEQ ID NO: 67518 - DNA, 25 bp, Probe Sequence
aagtgtcgatatcccagctttcaac

SEQ ID NO: 67519 - DNA, 25 bp, Probe Sequence
cgatatcccagctttcaacaaaatt

SEQ ID NO: 67520 - DNA, 25 bp, Probe Sequence
aaaatttgaagcctgagtgtgtgta

SEQ ID NO: 67521 - DNA, 25 bp, Probe Sequence
tcgatatcccagctttcaacaaaat

SEQ ID NO: 67522 - DNA, 25 bp, Probe Sequence
atatcccagctttcaacaaaatttg

SEQ ID NO: 67523 - DNA, 25 bp, Probe Sequence
gatatcccagctttcaacaaaattt

SEQ ID NO: 67524 - DNA, 25 bp, Probe Sequence
atttgaagcctgagtgtgtgtacga

SEQ ID NO: 67525 - DNA, 25 bp, Probe Sequence
aaagtgtcgatatcccagctttcaa

SEQ ID NO: 67526 - DNA, 25 bp, Probe Sequence
gtgtcgatatcccagctttcaacaa

SEQ ID NO: 67527 - DNA, 25 bp, Probe Sequence
gaagctacagattcagtgtctggtg

SEQ ID NO: 67528 - DNA, 25 bp, Probe Sequence
gtcgatatcccagctttcaacaaaa

SEQ ID NO: 67529 - DNA, 25 bp, Probe Sequence
gacaaacttggtggaggaggagatc

SEQ ID NO: 67530 - DNA, 25 bp, Probe Sequence
caacaaaatttgaagcctgagtgtg

SEQ ID NO: 67531 - DNA, 25 bp, Probe Sequence
aacaaaatttgaagcctgagtgtgt

SEQ ID NO: 67532 - DNA, 25 bp, Probe Sequence
caaagtgtcgatatcccagctttca

SEQ ID NO: 67533 - DNA, 25 bp, Probe Sequence
caaaatttgaagcctgagtgtgtgt

SEQ ID NO: 67534 - DNA, 25 bp, Probe Sequence
tttgaagcctgagtgtgtgtacgag

SEQ ID NO: 67535 - DNA, 25 bp, Probe Sequence
ctacagattcagtgtctggtggagg

SEQ ID NO: 67536 - DNA, 25 bp, Probe Sequence
acaaaatttgaagcctgagtgtgtg

SEQ ID NO: 67537 - DNA, 25 bp, Probe Sequence
tatcccagctttcaacaaaatttga

SEQ ID NO: 67538 - DNA, 25 bp, Probe Sequence
ggaagctacagattcagtgtctggt

SEQ ID NO: 67539 - DNA, 25 bp, Probe Sequence
gtaccatccttccagatacaagtag

SEQ ID NO: 67540 - DNA, 25 bp, Probe Sequence
cacctaaggaatactacacagcatg

SEQ ID NO: 67541 - DNA, 25 bp, Probe Sequence
taccatccttccagatacaagtagg

SEQ ID NO: 67542 - DNA, 25 bp, Probe Sequence
gcacctaaggaatactacacagcat

SEQ ID NO: 67543 - DNA, 25 bp, Probe Sequence
agaatgtaagttgctcagttatact

SEQ ID NO: 67544 - DNA, 25 bp, Probe Sequence
acctaaggaatactacacagcatgt

SEQ ID NO: 67545 - DNA, 25 bp, Probe Sequence
attgcacctaaggaatactacacag

SEQ ID NO: 67546 - DNA, 25 bp, Probe Sequence
atattagggcaatgagactgaaact

SEQ ID NO: 67547 - DNA, 25 bp, Probe Sequence
attagggcaatgagactgaaactac

SEQ ID NO: 67548 - DNA, 25 bp, Probe Sequence
aaagcagcataagagtagtcacaaa

SEQ ID NO: 67549 - DNA, 25 bp, Probe Sequence
tattagggcaatgagactgaaacta

SEQ ID NO: 67550 - DNA, 25 bp, Probe Sequence
ggaccattacaaattaaccaaccaa

SEQ ID NO: 67551 - DNA, 25 bp, Probe Sequence
catattagggcaatgagactgaaac

SEQ ID NO: 67552 - DNA, 25 bp, Probe Sequence
attccatattagggcaatgagactg

SEQ ID NO: 67553 - DNA, 25 bp, Probe Sequence
gaaagcagcataagagtagtcacaa

SEQ ID NO: 67554 - DNA, 25 bp, Probe Sequence
caaccctatcttcaaccacactatg

SEQ ID NO: 67555 - DNA, 25 bp, Probe Sequence
ccatattagggcaatgagactgaaa

SEQ ID NO: 67556 - DNA, 25 bp, Probe Sequence
aattccatattagggcaatgagact

SEQ ID NO: 67557 - DNA, 25 bp, Probe Sequence
tattgcacctaaggaatactacaca

SEQ ID NO: 67558 - DNA, 25 bp, Probe Sequence
gaatgccttgatctaccactgctaa

SEQ ID NO: 67559 - DNA, 25 bp, Probe Sequence
aagcagcataagagtagtcacaaac

SEQ ID NO: 67560 - DNA, 25 bp, Probe Sequence
aatgtaccatccttccagatacaag

SEQ ID NO: 67561 - DNA, 25 bp, Probe Sequence
caatacttggattgaagcaacactg

SEQ ID NO: 67562 - DNA, 25 bp, Probe Sequence
gcagcataagagtagtcacaaacat

SEQ ID NO: 67563 - DNA, 25 bp, Probe Sequence
cgctattatgattccttccttcctt

SEQ ID NO: 67564 - DNA, 25 bp, Probe Sequence
aacgctattatgattccttccttcc

SEQ ID NO: 67565 - DNA, 25 bp, Probe Sequence
acgctattatgattccttccttcct

SEQ ID NO: 67566 - DNA, 25 bp, Probe Sequence
gatctacacacactcatctgactga

SEQ ID NO: 67567 - DNA, 25 bp, Probe Sequence
taacgctattatgattccttccttc

SEQ ID NO: 67568 - DNA, 25 bp, Probe Sequence
tgatctacacacactcatctgactg

SEQ ID NO: 67569 - DNA, 25 bp, Probe Sequence
atctatgaggcattgatctacacac

SEQ ID NO: 67570 - DNA, 25 bp, Probe Sequence
catctatgaggcattgatctacaca

SEQ ID NO: 67571 - DNA, 25 bp, Probe Sequence
ttaacgctattatgattccttcctt

SEQ ID NO: 67572 - DNA, 25 bp, Probe Sequence
tcatctatgaggcattgatctacac

SEQ ID NO: 67573 - DNA, 25 bp, Probe Sequence
gccttattaacgctattatgattcc

SEQ ID NO: 67574 - DNA, 25 bp, Probe Sequence
attgatctacacacactcatctgac

SEQ ID NO: 67575 - DNA, 25 bp, Probe Sequence
cattgatctacacacactcatctga

SEQ ID NO: 67576 - DNA, 25 bp, Probe Sequence
attaacgctattatgattccttcct

SEQ ID NO: 67577 - DNA, 25 bp, Probe Sequence
ttcatctatgaggcattgatctaca

SEQ ID NO: 67578 - DNA, 25 bp, Probe Sequence
ctatgaggcattgatctacacacac

SEQ ID NO: 67579 - DNA, 25 bp, Probe Sequence
tctatgaggcattgatctacacaca

SEQ ID NO: 67580 - DNA, 25 bp, Probe Sequence
tatgaggcattgatctacacacact

SEQ ID NO: 67581 - DNA, 25 bp, Probe Sequence
cttcatctatgaggcattgatctac

SEQ ID NO: 67582 - DNA, 25 bp, Probe Sequence
ttgatctacacacactcatctgact

SEQ ID NO: 67583 - DNA, 25 bp, Probe Sequence
ccttcatctatgaggcattgatcta

SEQ ID NO: 67584 - DNA, 25 bp, Probe Sequence
ttggtcttgaagatacttatgatcc

SEQ ID NO: 67585 - DNA, 25 bp, Probe Sequence
gcattgatctacacacactcatctg

SEQ ID NO: 67586 - DNA, 25 bp, Probe Sequence
ttatgattccttccttcctttgacc

SEQ ID NO: 67587 - DNA, 25 bp, Probe Sequence
atctcctaatgccttacactacttg

SEQ ID NO: 67588 - DNA, 25 bp, Probe Sequence
catcacctattggcttaacagagat

SEQ ID NO: 67589 - DNA, 25 bp, Probe Sequence
gtatctcctaatgccttacactact

SEQ ID NO: 67590 - DNA, 25 bp, Probe Sequence
atgacatcacctattggcttaacag

SEQ ID NO: 67591 - DNA, 25 bp, Probe Sequence
gacatcacctattggcttaacagag

SEQ ID NO: 67592 - DNA, 25 bp, Probe Sequence
tcctaatgccttacactacttggtt

SEQ ID NO: 67593 - DNA, 25 bp, Probe Sequence
tctcctaatgccttacactacttgg

SEQ ID NO: 67594 - DNA, 25 bp, Probe Sequence
tatctcctaatgccttacactactt

SEQ ID NO: 67595 - DNA, 25 bp, Probe Sequence
acatcacctattggcttaacagaga

SEQ ID NO: 67596 - DNA, 25 bp, Probe Sequence
atcacctattggcttaacagagatc

SEQ ID NO: 67597 - DNA, 25 bp, Probe Sequence
ctcctaatgccttacactacttggt

SEQ ID NO: 67598 - DNA, 25 bp, Probe Sequence
tgacatcacctattggcttaacaga

SEQ ID NO: 67599 - DNA, 25 bp, Probe Sequence
agatgacatcacctattggcttaac

SEQ ID NO: 67600 - DNA, 25 bp, Probe Sequence
aagatgacatcacctattggcttaa

SEQ ID NO: 67601 - DNA, 25 bp, Probe Sequence
aagcacctgttccaactaagactaa

SEQ ID NO: 67602 - DNA, 25 bp, Probe Sequence
gcgattctcttcatgtatctcctaa

SEQ ID NO: 67603 - DNA, 25 bp, Probe Sequence
atagcgattctcttcatgtatctcc

SEQ ID NO: 67604 - DNA, 25 bp, Probe Sequence
gaagatgacatcacctattggctta

SEQ ID NO: 67605 - DNA, 25 bp, Probe Sequence
gatgacatcacctattggcttaaca

SEQ ID NO: 67606 - DNA, 25 bp, Probe Sequence
agcgattctcttcatgtatctccta

SEQ ID NO: 67607 - DNA, 25 bp, Probe Sequence
tagcgattctcttcatgtatctcct

SEQ ID NO: 67608 - DNA, 25 bp, Probe Sequence
ctcttcatgtatctcctaatgcctt

SEQ ID NO: 67609 - DNA, 25 bp, Probe Sequence
ttctcttcatgtatctcctaatgcc

SEQ ID NO: 67610 - DNA, 25 bp, Probe Sequence
tacgatgactactaaccatgacttg

SEQ ID NO: 67611 - DNA, 25 bp, Probe Sequence
gtagaagaccaaagaagagatgagc

SEQ ID NO: 67612 - DNA, 25 bp, Probe Sequence
ctaccttcagcactatgggattcta

SEQ ID NO: 67613 - DNA, 25 bp, Probe Sequence
taccttcagcactatgggattctag

SEQ ID NO: 67614 - DNA, 25 bp, Probe Sequence
agccgcctgtatgtttcaataaatt

SEQ ID NO: 67615 - DNA, 25 bp, Probe Sequence
agacacctctaccttcagcactatg

SEQ ID NO: 67616 - DNA, 25 bp, Probe Sequence
cagacacctctaccttcagcactat

SEQ ID NO: 67617 - DNA, 25 bp, Probe Sequence
ctctaccttcagcactatgggattc

SEQ ID NO: 67618 - DNA, 25 bp, Probe Sequence
tctaccttcagcactatgggattct

SEQ ID NO: 67619 - DNA, 25 bp, Probe Sequence
gaagaccaaagaagagatgagctag

SEQ ID NO: 67620 - DNA, 25 bp, Probe Sequence
catggaatgatttctctgctaacag

SEQ ID NO: 67621 - DNA, 25 bp, Probe Sequence
agaagaccaaagaagagatgagcta

SEQ ID NO: 67622 - DNA, 25 bp, Probe Sequence
tagaagaccaaagaagagatgagct

SEQ ID NO: 67623 - DNA, 25 bp, Probe Sequence
ggtagaagaccaaagaagagatgag

SEQ ID NO: 67624 - DNA, 25 bp, Probe Sequence
atgtaacacatcaatcatggaatga

SEQ ID NO: 67625 - DNA, 25 bp, Probe Sequence
gccgcctgtatgtttcaataaattt

SEQ ID NO: 67626 - DNA, 25 bp, Probe Sequence
ccgcctgtatgtttcaataaatttg

SEQ ID NO: 67627 - DNA, 25 bp, Probe Sequence
aatgtaacacatcaatcatggaatg

SEQ ID NO: 67628 - DNA, 25 bp, Probe Sequence
cagccgcctgtatgtttcaataaat

SEQ ID NO: 67629 - DNA, 25 bp, Probe Sequence
gacacctctaccttcagcactatgg

SEQ ID NO: 67630 - DNA, 25 bp, Probe Sequence
aagaccaaagaagagatgagctagg

SEQ ID NO: 67631 - DNA, 25 bp, Probe Sequence
cgcctgtatgtttcaataaatttgt

SEQ ID NO: 67632 - DNA, 25 bp, Probe Sequence
caaagaagagatgagctaggaccat

SEQ ID NO: 67633 - DNA, 25 bp, Probe Sequence
taaattatacattcaaggtagtggc

SEQ ID NO: 67634 - DNA, 25 bp, Probe Sequence
cctctaccttcagcactatgggatt

SEQ ID NO: 67635 - DNA, 25 bp, Probe Sequence
atcgttcttagcctacattgtcatt

SEQ ID NO: 67636 - DNA, 25 bp, Probe Sequence
ttcatcgttcttagcctacattgtc

SEQ ID NO: 67637 - DNA, 25 bp, Probe Sequence
gccattcatatagtattgttagcca

SEQ ID NO: 67638 - DNA, 25 bp, Probe Sequence
tgccattcatatagtattgttagcc

SEQ ID NO: 67639 - DNA, 25 bp, Probe Sequence
catcgttcttagcctacattgtcat

SEQ ID NO: 67640 - DNA, 25 bp, Probe Sequence
attgatgtcactcttcataccaagt

SEQ ID NO: 67641 - DNA, 25 bp, Probe Sequence
cattgatgtcactcttcataccaag

SEQ ID NO: 67642 - DNA, 25 bp, Probe Sequence
agcataatgactgtgtgttctgaga

SEQ ID NO: 67643 - DNA, 25 bp, Probe Sequence
tcatcgttcttagcctacattgtca

SEQ ID NO: 67644 - DNA, 25 bp, Probe Sequence
gcataatgactgtgtgttctgagaa

SEQ ID NO: 67645 - DNA, 25 bp, Probe Sequence
ggtctgcttatgctagttcagtatt

SEQ ID NO: 67646 - DNA, 25 bp, Probe Sequence
acattgatgtcactcttcataccaa

SEQ ID NO: 67647 - DNA, 25 bp, Probe Sequence
agagtcctgttaatattgatgtcct

SEQ ID NO: 67648 - DNA, 25 bp, Probe Sequence
atcagcataatgactgtgtgttctg

SEQ ID NO: 67649 - DNA, 25 bp, Probe Sequence
catcagcataatgactgtgtgttct

SEQ ID NO: 67650 - DNA, 25 bp, Probe Sequence
aatccatcagcataatgactgtgtg

SEQ ID NO: 67651 - DNA, 25 bp, Probe Sequence
ctttcatcgttcttagcctacattg

SEQ ID NO: 67652 - DNA, 25 bp, Probe Sequence
cagcataatgactgtgtgttctgag

SEQ ID NO: 67653 - DNA, 25 bp, Probe Sequence
actttcatcgttcttagcctacatt

SEQ ID NO: 67654 - DNA, 25 bp, Probe Sequence
tataacctgactgaaccaaatccat

SEQ ID NO: 67655 - DNA, 25 bp, Probe Sequence
tatgcaagtgtgaattacgtggtat

SEQ ID NO: 67656 - DNA, 25 bp, Probe Sequence
atatgcaagtgtgaattacgtggta

SEQ ID NO: 67657 - DNA, 25 bp, Probe Sequence
ggtatggatggttgcttgtttatta

SEQ ID NO: 67658 - DNA, 25 bp, Probe Sequence
ataacctgactgaaccaaatccatc

SEQ ID NO: 67659 - DNA, 25 bp, Probe Sequence
tgccgtgttgccttatatgaatatg

SEQ ID NO: 67660 - DNA, 25 bp, Probe Sequence
gtgccgtgttgccttatatgaatat

SEQ ID NO: 67661 - DNA, 25 bp, Probe Sequence
cttccattaagtgttcaagcatgtc

SEQ ID NO: 67662 - DNA, 25 bp, Probe Sequence
gccaagtcatgtaattagtcatctg

SEQ ID NO: 67663 - DNA, 25 bp, Probe Sequence
agccaagtcatgtaattagtcatct

SEQ ID NO: 67664 - DNA, 25 bp, Probe Sequence
cagccaagtcatgtaattagtcatc

SEQ ID NO: 67665 - DNA, 25 bp, Probe Sequence
ttccattaagtgttcaagcatgtct

SEQ ID NO: 67666 - DNA, 25 bp, Probe Sequence
cttcaccttccattaagtgttcaag

SEQ ID NO: 67667 - DNA, 25 bp, Probe Sequence
tccattaagtgttcaagcatgtctg

SEQ ID NO: 67668 - DNA, 25 bp, Probe Sequence
gcagccaagtcatgtaattagtcat

SEQ ID NO: 67669 - DNA, 25 bp, Probe Sequence
gccgtgttgccttatatgaatatgc

SEQ ID NO: 67670 - DNA, 25 bp, Probe Sequence
tgtgccgtgttgccttatatgaata

SEQ ID NO: 67671 - DNA, 25 bp, Probe Sequence
ccttccattaagtgttcaagcatgt

SEQ ID NO: 67672 - DNA, 25 bp, Probe Sequence
accttccattaagtgttcaagcatg

SEQ ID NO: 67673 - DNA, 25 bp, Probe Sequence
agtcatgtaattagtcatctggaac

SEQ ID NO: 67674 - DNA, 25 bp, Probe Sequence
caagtcatgtaattagtcatctgga

SEQ ID NO: 67675 - DNA, 25 bp, Probe Sequence
gtggagaatacagacgagacctact

SEQ ID NO: 67676 - DNA, 25 bp, Probe Sequence
caccttccattaagtgttcaagcat

SEQ ID NO: 67677 - DNA, 25 bp, Probe Sequence
ttcaccttccattaagtgttcaagc

SEQ ID NO: 67678 - DNA, 25 bp, Probe Sequence
gtcatgtaattagtcatctggaaca

SEQ ID NO: 67679 - DNA, 25 bp, Probe Sequence
attaggagggagttagaaacagtct

SEQ ID NO: 67680 - DNA, 25 bp, Probe Sequence
aatgcagccaagtcatgtaattagt

SEQ ID NO: 67681 - DNA, 25 bp, Probe Sequence
taggagggagttagaaacagtcttt

SEQ ID NO: 67682 - DNA, 25 bp, Probe Sequence
ttaggagggagttagaaacagtctt

SEQ ID NO: 67683 - DNA, 25 bp, Probe Sequence
ctcatcatcatcatcttcatcatcc

SEQ ID NO: 67684 - DNA, 25 bp, Probe Sequence
aggaacgatattctcatcatcatca

SEQ ID NO: 67685 - DNA, 25 bp, Probe Sequence
ggaacgatattctcatcatcatcat

SEQ ID NO: 67686 - DNA, 25 bp, Probe Sequence
aaggaacgatattctcatcatcatc

SEQ ID NO: 67687 - DNA, 25 bp, Probe Sequence
agagtaatcttgactgaatggagaa

SEQ ID NO: 67688 - DNA, 25 bp, Probe Sequence
tctcatcatcatcatcttcatcatc

SEQ ID NO: 67689 - DNA, 25 bp, Probe Sequence
cagagtaatcttgactgaatggaga

SEQ ID NO: 67690 - DNA, 25 bp, Probe Sequence
ttctcatcatcatcatcttcatcat

SEQ ID NO: 67691 - DNA, 25 bp, Probe Sequence
attctcatcatcatcatcttcatca

SEQ ID NO: 67692 - DNA, 25 bp, Probe Sequence
acgatattctcatcatcatcatctt

SEQ ID NO: 67693 - DNA, 25 bp, Probe Sequence
aacgatattctcatcatcatcatct

SEQ ID NO: 67694 - DNA, 25 bp, Probe Sequence
gaacgatattctcatcatcatcatc

SEQ ID NO: 67695 - DNA, 25 bp, Probe Sequence
cgatattctcatcatcatcatcttc

SEQ ID NO: 67696 - DNA, 25 bp, Probe Sequence
atcatcatcatcttcatcatcccag

SEQ ID NO: 67697 - DNA, 25 bp, Probe Sequence
tcatcatcatcatcttcatcatccc

SEQ ID NO: 67698 - DNA, 25 bp, Probe Sequence
gaatgaatgtcacttgtgtaccgag

SEQ ID NO: 67699 - DNA, 25 bp, Probe Sequence
cagcatttacaagaagtatccagtg

SEQ ID NO: 67700 - DNA, 25 bp, Probe Sequence
ttgtggttctgactacatcacctat

SEQ ID NO: 67701 - DNA, 25 bp, Probe Sequence
catcatcatcatcttcatcatccca

SEQ ID NO: 67702 - DNA, 25 bp, Probe Sequence
tggacatagagagaaaggaacgata

SEQ ID NO: 67703 - DNA, 25 bp, Probe Sequence
ggacatagagagaaaggaacgatat

SEQ ID NO: 67704 - DNA, 25 bp, Probe Sequence
atggacatagagagaaaggaacgat

SEQ ID NO: 67705 - DNA, 25 bp, Probe Sequence
aatgaatgtcacttgtgtaccgaga

SEQ ID NO: 67706 - DNA, 25 bp, Probe Sequence
catttacaagaagtatccagtggtg

SEQ ID NO: 67707 - DNA, 25 bp, Probe Sequence
actctacaagtgaccattgccctag

SEQ ID NO: 67708 - DNA, 25 bp, Probe Sequence
tctacaagtgaccattgccctagag

SEQ ID NO: 67709 - DNA, 25 bp, Probe Sequence
ctctacaagtgaccattgccctaga

SEQ ID NO: 67710 - DNA, 25 bp, Probe Sequence
atgaggtccactaccacatcacaga

SEQ ID NO: 67711 - DNA, 25 bp, Probe Sequence
gatgaggtccactaccacatcacag

SEQ ID NO: 67712 - DNA, 25 bp, Probe Sequence
atctacatcttcctgggagaggcag

SEQ ID NO: 67713 - DNA, 25 bp, Probe Sequence
aaggagaccagggtaccatcaatat

SEQ ID NO: 67714 - DNA, 25 bp, Probe Sequence
gatctacatcttcctgggagaggca

SEQ ID NO: 67715 - DNA, 25 bp, Probe Sequence
aggagaccagggtaccatcaatatg

SEQ ID NO: 67716 - DNA, 25 bp, Probe Sequence
caaggagaccagggtaccatcaata

SEQ ID NO: 67717 - DNA, 25 bp, Probe Sequence
cactctacaagtgaccattgcccta

SEQ ID NO: 67718 - DNA, 25 bp, Probe Sequence
aagatctacatcttcctgggagagg

SEQ ID NO: 67719 - DNA, 25 bp, Probe Sequence
caatctgtactcatgtggggaccag

SEQ ID NO: 67720 - DNA, 25 bp, Probe Sequence
agatctacatcttcctgggagaggc

SEQ ID NO: 67721 - DNA, 25 bp, Probe Sequence
tcaaggagaccagggtaccatcaat

SEQ ID NO: 67722 - DNA, 25 bp, Probe Sequence
atctgtactcatgtggggaccagaa

SEQ ID NO: 67723 - DNA, 25 bp, Probe Sequence
aatctgtactcatgtggggaccaga

SEQ ID NO: 67724 - DNA, 25 bp, Probe Sequence
ggagaccagggtaccatcaatatgg

SEQ ID NO: 67725 - DNA, 25 bp, Probe Sequence
gagaccagggtaccatcaatatggc

SEQ ID NO: 67726 - DNA, 25 bp, Probe Sequence
ctctgtgcttatgtcatctctgtta

SEQ ID NO: 67727 - DNA, 25 bp, Probe Sequence
gcttatgtcatctctgttattgtcc

SEQ ID NO: 67728 - DNA, 25 bp, Probe Sequence
tctgtgcttatgtcatctctgttat

SEQ ID NO: 67729 - DNA, 25 bp, Probe Sequence
gtgcttatgtcatctctgttattgt

SEQ ID NO: 67730 - DNA, 25 bp, Probe Sequence
tgtgcttatgtcatctctgttattg

SEQ ID NO: 67731 - DNA, 25 bp, Probe Sequence
tgcttatgtcatctctgttattgtc

SEQ ID NO: 67732 - DNA, 25 bp, Probe Sequence
ctgtgcttatgtcatctctgttatt

SEQ ID NO: 67733 - DNA, 25 bp, Probe Sequence
ggcatctagcattaggtatatctcc

SEQ ID NO: 67734 - DNA, 25 bp, Probe Sequence
gtggcatctagcattaggtatatct

SEQ ID NO: 67735 - DNA, 25 bp, Probe Sequence
tggcatctagcattaggtatatctc

SEQ ID NO: 67736 - DNA, 25 bp, Probe Sequence
cgtggcatctagcattaggtatatc

SEQ ID NO: 67737 - DNA, 25 bp, Probe Sequence
tacctctctgtgcttatgtcatctc

SEQ ID NO: 67738 - DNA, 25 bp, Probe Sequence
tctctgtgcttatgtcatctctgtt

SEQ ID NO: 67739 - DNA, 25 bp, Probe Sequence
ccgttatggataagaagatcaagga

SEQ ID NO: 67740 - DNA, 25 bp, Probe Sequence
ctctctgtgcttatgtcatctctgt

SEQ ID NO: 67741 - DNA, 25 bp, Probe Sequence
ttgtacctctctgtgcttatgtcat

SEQ ID NO: 67742 - DNA, 25 bp, Probe Sequence
ctcagtgttccttagactccgttat

SEQ ID NO: 67743 - DNA, 25 bp, Probe Sequence
ctcttgcctccttctcatcctaatc

SEQ ID NO: 67744 - DNA, 25 bp, Probe Sequence
gtacctctctgtgcttatgtcatct

SEQ ID NO: 67745 - DNA, 25 bp, Probe Sequence
tcagtgttccttagactccgttatg

SEQ ID NO: 67746 - DNA, 25 bp, Probe Sequence
tgtacctctctgtgcttatgtcatc

SEQ ID NO: 67747 - DNA, 25 bp, Probe Sequence
atggataagaagatcaaggatgttc

SEQ ID NO: 67748 - DNA, 25 bp, Probe Sequence
tccttagactccgttatggataaga

SEQ ID NO: 67749 - DNA, 25 bp, Probe Sequence
cctctctgtgcttatgtcatctctg

SEQ ID NO: 67750 - DNA, 25 bp, Probe Sequence
aagagaagatactcgtattaagcct

SEQ ID NO: 67751 - DNA, 25 bp, Probe Sequence
agagaagatactcgtattaagccta

SEQ ID NO: 67752 - DNA, 25 bp, Probe Sequence
cactgatgaccaaagagaagatact

SEQ ID NO: 67753 - DNA, 25 bp, Probe Sequence
gcactgatgaccaaagagaagatac

SEQ ID NO: 67754 - DNA, 25 bp, Probe Sequence
agcactgatgaccaaagagaagata

SEQ ID NO: 67755 - DNA, 25 bp, Probe Sequence
gagaagatactcgtattaagcctat

SEQ ID NO: 67756 - DNA, 25 bp, Probe Sequence
agaagatactcgtattaagcctatt

SEQ ID NO: 67757 - DNA, 25 bp, Probe Sequence
gatgaccaaagagaagatactcgta

SEQ ID NO: 67758 - DNA, 25 bp, Probe Sequence
actgatgaccaaagagaagatactc

SEQ ID NO: 67759 - DNA, 25 bp, Probe Sequence
ctgatgaccaaagagaagatactcg

SEQ ID NO: 67760 - DNA, 25 bp, Probe Sequence
tgaccaaagagaagatactcgtatt

SEQ ID NO: 67761 - DNA, 25 bp, Probe Sequence
atgaccaaagagaagatactcgtat

SEQ ID NO: 67762 - DNA, 25 bp, Probe Sequence
tgatgaccaaagagaagatactcgt

SEQ ID NO: 67763 - DNA, 25 bp, Probe Sequence
aactgcaagtggtactgttacaatg

SEQ ID NO: 67764 - DNA, 25 bp, Probe Sequence
ctgcaagtggtactgttacaatgac

SEQ ID NO: 67765 - DNA, 25 bp, Probe Sequence
aaagagaagatactcgtattaagcc

SEQ ID NO: 67766 - DNA, 25 bp, Probe Sequence
actgcaagtggtactgttacaatga

SEQ ID NO: 67767 - DNA, 25 bp, Probe Sequence
aaactgtcaagtagtaaagagaact

SEQ ID NO: 67768 - DNA, 25 bp, Probe Sequence
gtagtaaagagaacttggatgccag

SEQ ID NO: 67769 - DNA, 25 bp, Probe Sequence
gaccaaagagaagatactcgtatta

SEQ ID NO: 67770 - DNA, 25 bp, Probe Sequence
cagcactgatgaccaaagagaagat

SEQ ID NO: 67771 - DNA, 25 bp, Probe Sequence
agtagtaaagagaacttggatgcca

SEQ ID NO: 67772 - DNA, 25 bp, Probe Sequence
tgcaagtggtactgttacaatgaca

SEQ ID NO: 67773 - DNA, 25 bp, Probe Sequence
caaagagaagatactcgtattaagc

SEQ ID NO: 67774 - DNA, 25 bp, Probe Sequence
cttccctgctctaatacactacctg

SEQ ID NO: 67775 - DNA, 25 bp, Probe Sequence
ctcccttccctgctctaatacacta

SEQ ID NO: 67776 - DNA, 25 bp, Probe Sequence
ccttccctgctctaatacactacct

SEQ ID NO: 67777 - DNA, 25 bp, Probe Sequence
tcccttccctgctctaatacactac

SEQ ID NO: 67778 - DNA, 25 bp, Probe Sequence
ttccctgctctaatacactacctgt

SEQ ID NO: 67779 - DNA, 25 bp, Probe Sequence
tccctgctctaatacactacctgta

SEQ ID NO: 67780 - DNA, 25 bp, Probe Sequence
ccctgctctaatacactacctgtac

SEQ ID NO: 67781 - DNA, 25 bp, Probe Sequence
agttagttttgcctagaatcctgtt

SEQ ID NO: 67782 - DNA, 25 bp, Probe Sequence
gaatcctgttttcttctgaatttgc

SEQ ID NO: 67783 - DNA, 25 bp, Probe Sequence
gttagttttgcctagaatcctgttt

SEQ ID NO: 67784 - DNA, 25 bp, Probe Sequence
cccttccctgctctaatacactacc

SEQ ID NO: 67785 - DNA, 25 bp, Probe Sequence
ggcaaccaaatcgaatctctcattt

SEQ ID NO: 67786 - DNA, 25 bp, Probe Sequence
tagttttgcctagaatcctgttttc

SEQ ID NO: 67787 - DNA, 25 bp, Probe Sequence
ttagttttgcctagaatcctgtttt

SEQ ID NO: 67788 - DNA, 25 bp, Probe Sequence
gaccagttagttttgcctagaatcc

SEQ ID NO: 67789 - DNA, 25 bp, Probe Sequence
ggaccagttagttttgcctagaatc

SEQ ID NO: 67790 - DNA, 25 bp, Probe Sequence
ctgctctaatacactacctgtacaa

SEQ ID NO: 67791 - DNA, 25 bp, Probe Sequence
accagttagttttgcctagaatcct

SEQ ID NO: 67792 - DNA, 25 bp, Probe Sequence
tggaccagttagttttgcctagaat

SEQ ID NO: 67793 - DNA, 25 bp, Probe Sequence
cctgctctaatacactacctgtaca

SEQ ID NO: 67794 - DNA, 25 bp, Probe Sequence
gactgccagccaactacatcattct

SEQ ID NO: 67795 - DNA, 25 bp, Probe Sequence
agactgccagccaactacatcattc

SEQ ID NO: 67796 - DNA, 25 bp, Probe Sequence
cagttagttttgcctagaatcctgt

SEQ ID NO: 67797 - DNA, 25 bp, Probe Sequence
ccagttagttttgcctagaatcctg

SEQ ID NO: 67798 - DNA, 25 bp, Probe Sequence
aactaccaagggaatttgtgaacta

SEQ ID NO: 67799 - DNA, 25 bp, Probe Sequence
taccaagggaatttgtgaactagaa

SEQ ID NO: 67800 - DNA, 25 bp, Probe Sequence
ctaccaagggaatttgtgaactaga

SEQ ID NO: 67801 - DNA, 25 bp, Probe Sequence
actaccaagggaatttgtgaactag

SEQ ID NO: 67802 - DNA, 25 bp, Probe Sequence
accaagggaatttgtgaactagaaa

SEQ ID NO: 67803 - DNA, 25 bp, Probe Sequence
tcttcaactaccaagggaatttgtg

SEQ ID NO: 67804 - DNA, 25 bp, Probe Sequence
gtcttcaactaccaagggaatttgt

SEQ ID NO: 67805 - DNA, 25 bp, Probe Sequence
tgtcttcaactaccaagggaatttg

SEQ ID NO: 67806 - DNA, 25 bp, Probe Sequence
cttcaactaccaagggaatttgtga

SEQ ID NO: 67807 - DNA, 25 bp, Probe Sequence
caactaccaagggaatttgtgaact

SEQ ID NO: 67808 - DNA, 25 bp, Probe Sequence
tcaactaccaagggaatttgtgaac

SEQ ID NO: 67809 - DNA, 25 bp, Probe Sequence
ccatttctatgaggtttcgcataag

SEQ ID NO: 67810 - DNA, 25 bp, Probe Sequence
catttctatgaggtttcgcataagc

SEQ ID NO: 67811 - DNA, 25 bp, Probe Sequence
cccatttctatgaggtttcgcataa

SEQ ID NO: 67812 - DNA, 25 bp, Probe Sequence
ttcgcataagctcttggagatgtac

SEQ ID NO: 67813 - DNA, 25 bp, Probe Sequence
atttctatgaggtttcgcataagct

SEQ ID NO: 67814 - DNA, 25 bp, Probe Sequence
ataagctcttggagatgtacaggaa

SEQ ID NO: 67815 - DNA, 25 bp, Probe Sequence
acccatttctatgaggtttcgcata

SEQ ID NO: 67816 - DNA, 25 bp, Probe Sequence
tttctatgaggtttcgcataagctc

SEQ ID NO: 67817 - DNA, 25 bp, Probe Sequence
taagctcttggagatgtacaggaag

SEQ ID NO: 67818 - DNA, 25 bp, Probe Sequence
cataagctcttggagatgtacagga

SEQ ID NO: 67819 - DNA, 25 bp, Probe Sequence
tttcgcataagctcttggagatgta

SEQ ID NO: 67820 - DNA, 25 bp, Probe Sequence
ctatgaggtttcgcataagctcttg

SEQ ID NO: 67821 - DNA, 25 bp, Probe Sequence
tctatgaggtttcgcataagctctt

SEQ ID NO: 67822 - DNA, 25 bp, Probe Sequence
gacacataaccttattcctggtctt

SEQ ID NO: 67823 - DNA, 25 bp, Probe Sequence
ggacacataaccttattcctggtct

SEQ ID NO: 67824 - DNA, 25 bp, Probe Sequence
tcctggtctttaatatttctcggtt

SEQ ID NO: 67825 - DNA, 25 bp, Probe Sequence
ttcctggtctttaatatttctcggt

SEQ ID NO: 67826 - DNA, 25 bp, Probe Sequence
acccataggacacataaccttattc

SEQ ID NO: 67827 - DNA, 25 bp, Probe Sequence
cctggtctttaatatttctcggttt

SEQ ID NO: 67828 - DNA, 25 bp, Probe Sequence
cccataggacacataaccttattcc

SEQ ID NO: 67829 - DNA, 25 bp, Probe Sequence
ttagtttcaagtaccttatgagggc

SEQ ID NO: 67830 - DNA, 25 bp, Probe Sequence
attcctggtctttaatatttctcgg

SEQ ID NO: 67831 - DNA, 25 bp, Probe Sequence
tacccataggacacataaccttatt

SEQ ID NO: 67832 - DNA, 25 bp, Probe Sequence
tgtacccataggacacataacctta

SEQ ID NO: 67833 - DNA, 25 bp, Probe Sequence
gaagaccatgttagtgctacattgt

SEQ ID NO: 67834 - DNA, 25 bp, Probe Sequence
acacataaccttattcctggtcttt

SEQ ID NO: 67835 - DNA, 25 bp, Probe Sequence
gtacccataggacacataaccttat

SEQ ID NO: 67836 - DNA, 25 bp, Probe Sequence
gttcggaagaccatgttagtgctac

SEQ ID NO: 67837 - DNA, 25 bp, Probe Sequence
aagaccatgttagtgctacattgtg

SEQ ID NO: 67838 - DNA, 25 bp, Probe Sequence
cagtgttcggaagaccatgttagtg

SEQ ID NO: 67839 - DNA, 25 bp, Probe Sequence
ggaagaccatgttagtgctacattg

SEQ ID NO: 67840 - DNA, 25 bp, Probe Sequence
tgttcggaagaccatgttagtgcta

SEQ ID NO: 67841 - DNA, 25 bp, Probe Sequence
cacataaccttattcctggtcttta

SEQ ID NO: 67842 - DNA, 25 bp, Probe Sequence
tttagtttcaagtaccttatgaggg

SEQ ID NO: 67843 - DNA, 25 bp, Probe Sequence
tgcacagtgagaaatgaacaagttt

SEQ ID NO: 67844 - DNA, 25 bp, Probe Sequence
tagtttcaagtaccttatgagggcg

SEQ ID NO: 67845 - DNA, 25 bp, Probe Sequence
ctagagtcatactcgttggatgtat

SEQ ID NO: 67846 - DNA, 25 bp, Probe Sequence
tatgtggaactgctataatgtgtca

SEQ ID NO: 67847 - DNA, 25 bp, Probe Sequence
ctgctgtgttatgatggtcttactt

SEQ ID NO: 67848 - DNA, 25 bp, Probe Sequence
atctgctgtgttatgatggtcttac

SEQ ID NO: 67849 - DNA, 25 bp, Probe Sequence
atgtggaactgctataatgtgtcat

SEQ ID NO: 67850 - DNA, 25 bp, Probe Sequence
gccttctcctcctctatgatgtatt

SEQ ID NO: 67851 - DNA, 25 bp, Probe Sequence
tctgctgtgttatgatggtcttact

SEQ ID NO: 67852 - DNA, 25 bp, Probe Sequence
ttatgtggaactgctataatgtgtc

SEQ ID NO: 67853 - DNA, 25 bp, Probe Sequence
ttgatgttcagactggttcttctta

SEQ ID NO: 67854 - DNA, 25 bp, Probe Sequence
tgatgttcagactggttcttcttac

SEQ ID NO: 67855 - DNA, 25 bp, Probe Sequence
ttcgtctacagttgcctatgctatt

SEQ ID NO: 67856 - DNA, 25 bp, Probe Sequence
attaggtggatactggagtggacta

SEQ ID NO: 67857 - DNA, 25 bp, Probe Sequence
gagatatgaaccagactctaggaga

SEQ ID NO: 67858 - DNA, 25 bp, Probe Sequence
gatgttcagactggttcttcttaca

SEQ ID NO: 67859 - DNA, 25 bp, Probe Sequence
tgaaccagactctaggagataacat

SEQ ID NO: 67860 - DNA, 25 bp, Probe Sequence
atgaaccagactctaggagataaca

SEQ ID NO: 67861 - DNA, 25 bp, Probe Sequence
tgttcagactggttcttcttacata

SEQ ID NO: 67862 - DNA, 25 bp, Probe Sequence
agatatgaaccagactctaggagat

SEQ ID NO: 67863 - DNA, 25 bp, Probe Sequence
gaaccagactctaggagataacatt

SEQ ID NO: 67864 - DNA, 25 bp, Probe Sequence
gttcagactggttcttcttacatat

SEQ ID NO: 67865 - DNA, 25 bp, Probe Sequence
accagactctaggagataacattac

SEQ ID NO: 67866 - DNA, 25 bp, Probe Sequence
gaatggtgagagtatcatggttgaa

SEQ ID NO: 67867 - DNA, 25 bp, Probe Sequence
aagaatggtgagagtatcatggttg

SEQ ID NO: 67868 - DNA, 25 bp, Probe Sequence
tcgtctacagttgcctatgctattg

SEQ ID NO: 67869 - DNA, 25 bp, Probe Sequence
aatggtgagagtatcatggttgaac

SEQ ID NO: 67870 - DNA, 25 bp, Probe Sequence
ggtttattctcaggagttgcttgta

SEQ ID NO: 67871 - DNA, 25 bp, Probe Sequence
tttggtttattctcaggagttgctt

SEQ ID NO: 67872 - DNA, 25 bp, Probe Sequence
gtttattctcaggagttgcttgtac

SEQ ID NO: 67873 - DNA, 25 bp, Probe Sequence
ttggtttattctcaggagttgcttg

SEQ ID NO: 67874 - DNA, 25 bp, Probe Sequence
gcagtgctttaacatacattcatct

SEQ ID NO: 67875 - DNA, 25 bp, Probe Sequence
agtgctttaacatacattcatctga

SEQ ID NO: 67876 - DNA, 25 bp, Probe Sequence
gtgctttaacatacattcatctgat

SEQ ID NO: 67877 - DNA, 25 bp, Probe Sequence
tggtttattctcaggagttgcttgt

SEQ ID NO: 67878 - DNA, 25 bp, Probe Sequence
cagtgctttaacatacattcatctg

SEQ ID NO: 67879 - DNA, 25 bp, Probe Sequence
tattctcaggagttgcttgtacatt

SEQ ID NO: 67880 - DNA, 25 bp, Probe Sequence
ttattctcaggagttgcttgtacat

SEQ ID NO: 67881 - DNA, 25 bp, Probe Sequence
tgcagtgctttaacatacattcatc

SEQ ID NO: 67882 - DNA, 25 bp, Probe Sequence
gtgcagtgctttaacatacattcat

SEQ ID NO: 67883 - DNA, 25 bp, Probe Sequence
attctcaggagttgcttgtacattc

SEQ ID NO: 67884 - DNA, 25 bp, Probe Sequence
tgctttaacatacattcatctgatc

SEQ ID NO: 67885 - DNA, 25 bp, Probe Sequence
gatagtggtgcagtgctttaacata

SEQ ID NO: 67886 - DNA, 25 bp, Probe Sequence
atagtggtgcagtgctttaacatac

SEQ ID NO: 67887 - DNA, 25 bp, Probe Sequence
tttcacttagcctttctggtttccc

SEQ ID NO: 67888 - DNA, 25 bp, Probe Sequence
gtagatagtggtgcagtgctttaac

SEQ ID NO: 67889 - DNA, 25 bp, Probe Sequence
ctcaggagttgcttgtacattcttg

SEQ ID NO: 67890 - DNA, 25 bp, Probe Sequence
tgaaaccccgtctctactaaaatac

SEQ ID NO: 67891 - DNA, 25 bp, Probe Sequence
gtgaaaccccgtctctactaaaata

SEQ ID NO: 67892 - DNA, 25 bp, Probe Sequence
tctcaggagttgcttgtacattctt

SEQ ID NO: 67893 - DNA, 25 bp, Probe Sequence
ttctcaggagttgcttgtacattct

SEQ ID NO: 67894 - DNA, 25 bp, Probe Sequence
aactatgaccaagaagatgaaggag

SEQ ID NO: 67895 - DNA, 25 bp, Probe Sequence
caactatgaccaagaagatgaagga

SEQ ID NO: 67896 - DNA, 25 bp, Probe Sequence
cgagtcagagatattacaggagagt

SEQ ID NO: 67897 - DNA, 25 bp, Probe Sequence
tcaatgaggtcactaacttagaagg

SEQ ID NO: 67898 - DNA, 25 bp, Probe Sequence
ccaactatgaccaagaagatgaagg

SEQ ID NO: 67899 - DNA, 25 bp, Probe Sequence
gagtcagagatattacaggagagtt

SEQ ID NO: 67900 - DNA, 25 bp, Probe Sequence
ccagactcttcttactacacaggta

SEQ ID NO: 67901 - DNA, 25 bp, Probe Sequence
taccagactcttcttactacacagg

SEQ ID NO: 67902 - DNA, 25 bp, Probe Sequence
actatgaccaagaagatgaaggagg

SEQ ID NO: 67903 - DNA, 25 bp, Probe Sequence
gatgaaggaggctctcttatcaatt

SEQ ID NO: 67904 - DNA, 25 bp, Probe Sequence
ttcttactacacaggtactaacagg

SEQ ID NO: 67905 - DNA, 25 bp, Probe Sequence
agatgaaggaggctctcttatcaat

SEQ ID NO: 67906 - DNA, 25 bp, Probe Sequence
agactcttcttactacacaggtact

SEQ ID NO: 67907 - DNA, 25 bp, Probe Sequence
cagactcttcttactacacaggtac

SEQ ID NO: 67908 - DNA, 25 bp, Probe Sequence
gtaccagactcttcttactacacag

SEQ ID NO: 67909 - DNA, 25 bp, Probe Sequence
cttactacacaggtactaacaggct

SEQ ID NO: 67910 - DNA, 25 bp, Probe Sequence
tcttactacacaggtactaacaggc

SEQ ID NO: 67911 - DNA, 25 bp, Probe Sequence
atcaatgaggtcactaacttagaag

SEQ ID NO: 67912 - DNA, 25 bp, Probe Sequence
gactcttcttactacacaggtacta

SEQ ID NO: 67913 - DNA, 25 bp, Probe Sequence
tcttcttactacacaggtactaaca

SEQ ID NO: 67914 - DNA, 25 bp, Probe Sequence
cttcttactacacaggtactaacag

SEQ ID NO: 67915 - DNA, 25 bp, Probe Sequence
ttggtggagtctgaggagagatatt

SEQ ID NO: 67916 - DNA, 25 bp, Probe Sequence
actcttcttactacacaggtactaa

SEQ ID NO: 67917 - DNA, 25 bp, Probe Sequence
tcgagtcagagatattacaggagag

SEQ ID NO: 67918 - DNA, 25 bp, Probe Sequence
aatacggaaaggatacactgctaat

SEQ ID NO: 67919 - DNA, 25 bp, Probe Sequence
gaatacggaaaggatacactgctaa

SEQ ID NO: 67920 - DNA, 25 bp, Probe Sequence
gtctaacaataaagcaaacaactcg

SEQ ID NO: 67921 - DNA, 25 bp, Probe Sequence
atacggaaaggatacactgctaata

SEQ ID NO: 67922 - DNA, 25 bp, Probe Sequence
caattcagaaatacccaggaggatt

SEQ ID NO: 67923 - DNA, 25 bp, Probe Sequence
tacggaaaggatacactgctaatat

SEQ ID NO: 67924 - DNA, 25 bp, Probe Sequence
aattcagaaatacccaggaggattc

SEQ ID NO: 67925 - DNA, 25 bp, Probe Sequence
ctttcaccctactaaattcaagagc

SEQ ID NO: 67926 - DNA, 25 bp, Probe Sequence
gatggtagggaatacggaaaggata

SEQ ID NO: 67927 - DNA, 25 bp, Probe Sequence
gtagggaatacggaaaggatacact

SEQ ID NO: 67928 - DNA, 25 bp, Probe Sequence
tagggaatacggaaaggatacactg

SEQ ID NO: 67929 - DNA, 25 bp, Probe Sequence
atggtagggaatacggaaaggatac

SEQ ID NO: 67930 - DNA, 25 bp, Probe Sequence
ctccaaacaagtacaatgatagtgc

SEQ ID NO: 67931 - DNA, 25 bp, Probe Sequence
acaattcagaaatacccaggaggat

SEQ ID NO: 67932 - DNA, 25 bp, Probe Sequence
tattaagaggctacttggtagtgtc

SEQ ID NO: 67933 - DNA, 25 bp, Probe Sequence
ctattaagaggctacttggtagtgt

SEQ ID NO: 67934 - DNA, 25 bp, Probe Sequence
catctccaccctgtcctgtatattt

SEQ ID NO: 67935 - DNA, 25 bp, Probe Sequence
attaagaggctacttggtagtgtca

SEQ ID NO: 67936 - DNA, 25 bp, Probe Sequence
tctattaagaggctacttggtagtg

SEQ ID NO: 67937 - DNA, 25 bp, Probe Sequence
actctttcaccctactaaattcaag

SEQ ID NO: 67938 - DNA, 25 bp, Probe Sequence
ggaatacggaaaggatacactgcta

SEQ ID NO: 67939 - DNA, 25 bp, Probe Sequence
tctccaaacaagtacaatgatagtg

SEQ ID NO: 67940 - DNA, 25 bp, Probe Sequence
ttctgttacttcccacccaactaaa

SEQ ID NO: 67941 - DNA, 25 bp, Probe Sequence
tttctgttacttcccacccaactaa

SEQ ID NO: 67942 - DNA, 25 bp, Probe Sequence
ctactacaaccaatgaagaagacct

SEQ ID NO: 67943 - DNA, 25 bp, Probe Sequence
tactacaaccaatgaagaagacctt

SEQ ID NO: 67944 - DNA, 25 bp, Probe Sequence
tctactacaaccaatgaagaagacc

SEQ ID NO: 67945 - DNA, 25 bp, Probe Sequence
acatctactacaaccaatgaagaag

SEQ ID NO: 67946 - DNA, 25 bp, Probe Sequence
atctactacaaccaatgaagaagac

SEQ ID NO: 67947 - DNA, 25 bp, Probe Sequence
catctactacaaccaatgaagaaga

SEQ ID NO: 67948 - DNA, 25 bp, Probe Sequence
gaagaccagaagatcagagaaggaa

SEQ ID NO: 67949 - DNA, 25 bp, Probe Sequence
ctcattatgcttgctgttgaacctt

SEQ ID NO: 67950 - DNA, 25 bp, Probe Sequence
tgtaatggtcattccagagactatg

SEQ ID NO: 67951 - DNA, 25 bp, Probe Sequence
ttgtaatggtcattccagagactat

SEQ ID NO: 67952 - DNA, 25 bp, Probe Sequence
ctcctcattatgcttgctgttgaac

SEQ ID NO: 67953 - DNA, 25 bp, Probe Sequence
tacatctactacaaccaatgaagaa

SEQ ID NO: 67954 - DNA, 25 bp, Probe Sequence
ttacatctactacaaccaatgaaga

SEQ ID NO: 67955 - DNA, 25 bp, Probe Sequence
atcaatcaagtcagataaaggcaac

SEQ ID NO: 67956 - DNA, 25 bp, Probe Sequence
catcaatcaagtcagataaaggcaa

SEQ ID NO: 67957 - DNA, 25 bp, Probe Sequence
tttagtcttcaaagtcttccacctg

SEQ ID NO: 67958 - DNA, 25 bp, Probe Sequence
tggcaaacctaaacagtcatattac

SEQ ID NO: 67959 - DNA, 25 bp, Probe Sequence
gtggcaaacctaaacagtcatatta

SEQ ID NO: 67960 - DNA, 25 bp, Probe Sequence
gagtgattctggttgcattcctatt

SEQ ID NO: 67961 - DNA, 25 bp, Probe Sequence
actacaaccaatgaagaagaccttt

SEQ ID NO: 67962 - DNA, 25 bp, Probe Sequence
agagaaggaaactttaatgctgtct

SEQ ID NO: 67963 - DNA, 25 bp, Probe Sequence
aaagcagtgtagtggtgtttagaag

SEQ ID NO: 67964 - DNA, 25 bp, Probe Sequence
aaagatttagcacggaagagtttgt

SEQ ID NO: 67965 - DNA, 25 bp, Probe Sequence
taaagcagtgtagtggtgtttagaa

SEQ ID NO: 67966 - DNA, 25 bp, Probe Sequence
agtgatattgcgaaggttagaagaa

SEQ ID NO: 67967 - DNA, 25 bp, Probe Sequence
gtagtgatattgcgaaggttagaag

SEQ ID NO: 67968 - DNA, 25 bp, Probe Sequence
tagtgatattgcgaaggttagaaga

SEQ ID NO: 67969 - DNA, 25 bp, Probe Sequence
cgtagtgatattgcgaaggttagaa

SEQ ID NO: 67970 - DNA, 25 bp, Probe Sequence
caggtgactaggttcaagagacatt

SEQ ID NO: 67971 - DNA, 25 bp, Probe Sequence
aacgcatggcataattacttggtag

SEQ ID NO: 67972 - DNA, 25 bp, Probe Sequence
gtgatattgcgaaggttagaagaaa

SEQ ID NO: 67973 - DNA, 25 bp, Probe Sequence
gatattgcgaaggttagaagaaacg

SEQ ID NO: 67974 - DNA, 25 bp, Probe Sequence
tgatattgcgaaggttagaagaaac

SEQ ID NO: 67975 - DNA, 25 bp, Probe Sequence
tcacactatcatagggagaatcaaa

SEQ ID NO: 67976 - DNA, 25 bp, Probe Sequence
cttcacactatcatagggagaatca

SEQ ID NO: 67977 - DNA, 25 bp, Probe Sequence
gtcttcacactatcatagggagaat

SEQ ID NO: 67978 - DNA, 25 bp, Probe Sequence
ttcacactatcatagggagaatcaa

SEQ ID NO: 67979 - DNA, 25 bp, Probe Sequence
tcttcacactatcatagggagaatc

SEQ ID NO: 67980 - DNA, 25 bp, Probe Sequence
tcacttagcctcagtttccttatct

SEQ ID NO: 67981 - DNA, 25 bp, Probe Sequence
gtcacttagcctcagtttccttatc

SEQ ID NO: 67982 - DNA, 25 bp, Probe Sequence
actaggttcaagagacatttgcttt

SEQ ID NO: 67983 - DNA, 25 bp, Probe Sequence
ctcgtagtgatattgcgaaggttag

SEQ ID NO: 67984 - DNA, 25 bp, Probe Sequence
tgtcttcacactatcatagggagaa

SEQ ID NO: 67985 - DNA, 25 bp, Probe Sequence
gactaggttcaagagacatttgctt

SEQ ID NO: 67986 - DNA, 25 bp, Probe Sequence
tagaagaaacgcatggcataattac

SEQ ID NO: 67987 - DNA, 25 bp, Probe Sequence
ctgtcttcacactatcatagggaga

SEQ ID NO: 67988 - DNA, 25 bp, Probe Sequence
tcgtagtgatattgcgaaggttaga

SEQ ID NO: 67989 - DNA, 25 bp, Probe Sequence
ttgtccctgtcttcacactatcata

SEQ ID NO: 67990 - DNA, 25 bp, Probe Sequence
ttctgactgtgaagtaaggagagac

SEQ ID NO: 67991 - DNA, 25 bp, Probe Sequence
cctgtccatcctgtttctcttattt

SEQ ID NO: 67992 - DNA, 25 bp, Probe Sequence
tatttattgaaactcaccattgccc

SEQ ID NO: 67993 - DNA, 25 bp, Probe Sequence
ttattgaaactcaccattgccctat

SEQ ID NO: 67994 - DNA, 25 bp, Probe Sequence
tttattgaaactcaccattgcccta

SEQ ID NO: 67995 - DNA, 25 bp, Probe Sequence
tattgaaactcaccattgccctatc

SEQ ID NO: 67996 - DNA, 25 bp, Probe Sequence
ctgtccatcctgtttctcttattta

SEQ ID NO: 67997 - DNA, 25 bp, Probe Sequence
tttctgactgtgaagtaaggagaga

SEQ ID NO: 67998 - DNA, 25 bp, Probe Sequence
atttattgaaactcaccattgccct

SEQ ID NO: 67999 - DNA, 25 bp, Probe Sequence
tctgactgtgaagtaaggagagacg

SEQ ID NO: 68000 - DNA, 25 bp, Probe Sequence
ttatttattgaaactcaccattgcc

SEQ ID NO: 68001 - DNA, 25 bp, Probe Sequence
tgtccatcctgtttctcttatttat

SEQ ID NO: 68002 - DNA, 25 bp, Probe Sequence
catccctcccattagtagctttatc

SEQ ID NO: 68003 - DNA, 25 bp, Probe Sequence
gcctgtccatcctgtttctcttatt

SEQ ID NO: 68004 - DNA, 25 bp, Probe Sequence
atccctcccattagtagctttatcc

SEQ ID NO: 68005 - DNA, 25 bp, Probe Sequence
ccatccctcccattagtagctttat

SEQ ID NO: 68006 - DNA, 25 bp, Probe Sequence
ctcctcttccagcaggtctataaag

SEQ ID NO: 68007 - DNA, 25 bp, Probe Sequence
ctaagtgagagcaacctggtcatct

SEQ ID NO: 68008 - DNA, 25 bp, Probe Sequence
ccctcccattagtagctttatccag

SEQ ID NO: 68009 - DNA, 25 bp, Probe Sequence
cttatttattgaaactcaccattgc

SEQ ID NO: 68010 - DNA, 25 bp, Probe Sequence
ccatcctgtttctcttatttattga

SEQ ID NO: 68011 - DNA, 25 bp, Probe Sequence
tccatcctgtttctcttatttattg

SEQ ID NO: 68012 - DNA, 25 bp, Probe Sequence
gtccatcctgtttctcttatttatt

SEQ ID NO: 68013 - DNA, 25 bp, Probe Sequence
tccctcccattagtagctttatcca

SEQ ID NO: 68014 - DNA, 25 bp, Probe Sequence
ctgacttattgattatggaacctgt

SEQ ID NO: 68015 - DNA, 25 bp, Probe Sequence
tgattatggaacctgtcaagtagtt

SEQ ID NO: 68016 - DNA, 25 bp, Probe Sequence
tctgacttattgattatggaacctg

SEQ ID NO: 68017 - DNA, 25 bp, Probe Sequence
ctctgacttattgattatggaacct

SEQ ID NO: 68018 - DNA, 25 bp, Probe Sequence
tctctgacttattgattatggaacc

SEQ ID NO: 68019 - DNA, 25 bp, Probe Sequence
gacttattgattatggaacctgtca

SEQ ID NO: 68020 - DNA, 25 bp, Probe Sequence
tgacttattgattatggaacctgtc

SEQ ID NO: 68021 - DNA, 25 bp, Probe Sequence
tgatctgaatctctgacttattgat

SEQ ID NO: 68022 - DNA, 25 bp, Probe Sequence
atgatctgaatctctgacttattga

SEQ ID NO: 68023 - DNA, 25 bp, Probe Sequence
tgatgatctgaatctctgacttatt

SEQ ID NO: 68024 - DNA, 25 bp, Probe Sequence
ttgatgatctgaatctctgacttat

SEQ ID NO: 68025 - DNA, 25 bp, Probe Sequence
gattatggaacctgtcaagtagttt

SEQ ID NO: 68026 - DNA, 25 bp, Probe Sequence
gatgatctgaatctctgacttattg

SEQ ID NO: 68027 - DNA, 25 bp, Probe Sequence
cccagtgaggataattaaacatgct

SEQ ID NO: 68028 - DNA, 25 bp, Probe Sequence
ttgattatggaacctgtcaagtagt

SEQ ID NO: 68029 - DNA, 25 bp, Probe Sequence
atctctgacttattgattatggaac

SEQ ID NO: 68030 - DNA, 25 bp, Probe Sequence
ccagtgaggataattaaacatgctc

SEQ ID NO: 68031 - DNA, 25 bp, Probe Sequence
attgattatggaacctgtcaagtag

SEQ ID NO: 68032 - DNA, 25 bp, Probe Sequence
ggataattaaacatgctcagcctga

SEQ ID NO: 68033 - DNA, 25 bp, Probe Sequence
ttcaactctcccagtgaggataatt

SEQ ID NO: 68034 - DNA, 25 bp, Probe Sequence
tttcaactctcccagtgaggataat

SEQ ID NO: 68035 - DNA, 25 bp, Probe Sequence
ttattgattatggaacctgtcaagt

SEQ ID NO: 68036 - DNA, 25 bp, Probe Sequence
acttattgattatggaacctgtcaa

SEQ ID NO: 68037 - DNA, 25 bp, Probe Sequence
ctctcccagtgaggataattaaaca

SEQ ID NO: 68038 - DNA, 25 bp, Probe Sequence
gcaggtaataagtggaagagaagaa

SEQ ID NO: 68039 - DNA, 25 bp, Probe Sequence
aagtaagaagcaagaagaagtggag

SEQ ID NO: 68040 - DNA, 25 bp, Probe Sequence
tcttgcctattaccataccagtgta

SEQ ID NO: 68041 - DNA, 25 bp, Probe Sequence
gttgactgttcttattccactggtt

SEQ ID NO: 68042 - DNA, 25 bp, Probe Sequence
ggtaataagtggaagagaagaatgt

SEQ ID NO: 68043 - DNA, 25 bp, Probe Sequence
ctcttgcctattaccataccagtgt

SEQ ID NO: 68044 - DNA, 25 bp, Probe Sequence
ggcaggtaataagtggaagagaaga

SEQ ID NO: 68045 - DNA, 25 bp, Probe Sequence
aggtaataagtggaagagaagaatg

SEQ ID NO: 68046 - DNA, 25 bp, Probe Sequence
caggtaataagtggaagagaagaat

SEQ ID NO: 68047 - DNA, 25 bp, Probe Sequence
tggcaggtaataagtggaagagaag

SEQ ID NO: 68048 - DNA, 25 bp, Probe Sequence
ggctctgacttataactgctgtatc

SEQ ID NO: 68049 - DNA, 25 bp, Probe Sequence
gtggcaggtaataagtggaagagaa

SEQ ID NO: 68050 - DNA, 25 bp, Probe Sequence
aggctctgacttataactgctgtat

SEQ ID NO: 68051 - DNA, 25 bp, Probe Sequence
cttgcctattaccataccagtgtat

SEQ ID NO: 68052 - DNA, 25 bp, Probe Sequence
ataccagtgtatgtattcttccacc

SEQ ID NO: 68053 - DNA, 25 bp, Probe Sequence
taccagtgtatgtattcttccacct

SEQ ID NO: 68054 - DNA, 25 bp, Probe Sequence
gctctgacttataactgctgtatca

SEQ ID NO: 68055 - DNA, 25 bp, Probe Sequence
ctaatatgataccacaggcagctag

SEQ ID NO: 68056 - DNA, 25 bp, Probe Sequence
aaggctctgacttataactgctgta

SEQ ID NO: 68057 - DNA, 25 bp, Probe Sequence
accagtgtatgtattcttccacctt

SEQ ID NO: 68058 - DNA, 25 bp, Probe Sequence
taagaagcaagaagaagtggagcag

SEQ ID NO: 68059 - DNA, 25 bp, Probe Sequence
agtaagaagcaagaagaagtggagc

SEQ ID NO: 68060 - DNA, 25 bp, Probe Sequence
attccattcatctaagagtcattga

SEQ ID NO: 68061 - DNA, 25 bp, Probe Sequence
ctcttcctacgttgactgttcttat

SEQ ID NO: 68062 - DNA, 25 bp, Probe Sequence
tgaagaacagaagacaggaagcatt

SEQ ID NO: 68063 - DNA, 25 bp, Probe Sequence
atgaagaacagaagacaggaagcat

SEQ ID NO: 68064 - DNA, 25 bp, Probe Sequence
tggactggaatgtttggagattatt

SEQ ID NO: 68065 - DNA, 25 bp, Probe Sequence
ttggactggaatgtttggagattat

SEQ ID NO: 68066 - DNA, 25 bp, Probe Sequence
attggactggaatgtttggagatta

SEQ ID NO: 68067 - DNA, 25 bp, Probe Sequence
ggactggaatgtttggagattatta

SEQ ID NO: 68068 - DNA, 25 bp, Probe Sequence
gaagaacagaagacaggaagcattt

SEQ ID NO: 68069 - DNA, 25 bp, Probe Sequence
gcatttcagagactccaaagaagaa

SEQ ID NO: 68070 - DNA, 25 bp, Probe Sequence
aagcatttcagagactccaaagaag

SEQ ID NO: 68071 - DNA, 25 bp, Probe Sequence
gaagcatttcagagactccaaagaa

SEQ ID NO: 68072 - DNA, 25 bp, Probe Sequence
aagaacagaagacaggaagcatttc

SEQ ID NO: 68073 - DNA, 25 bp, Probe Sequence
aagacaggaatgaaagtgttaggaa

SEQ ID NO: 68074 - DNA, 25 bp, Probe Sequence
catgaagaacagaagacaggaagca

SEQ ID NO: 68075 - DNA, 25 bp, Probe Sequence
agacaggaatgaaagtgttaggaac

SEQ ID NO: 68076 - DNA, 25 bp, Probe Sequence
tcaagacaggaatgaaagtgttagg

SEQ ID NO: 68077 - DNA, 25 bp, Probe Sequence
agcatttcagagactccaaagaaga

SEQ ID NO: 68078 - DNA, 25 bp, Probe Sequence
gaacagaagacaggaagcatttcag

SEQ ID NO: 68079 - DNA, 25 bp, Probe Sequence
aacagaagacaggaagcatttcaga

SEQ ID NO: 68080 - DNA, 25 bp, Probe Sequence
agaacagaagacaggaagcatttca

SEQ ID NO: 68081 - DNA, 25 bp, Probe Sequence
gaagacaggaagcatttcagagact

SEQ ID NO: 68082 - DNA, 25 bp, Probe Sequence
agaagacaggaagcatttcagagac

SEQ ID NO: 68083 - DNA, 25 bp, Probe Sequence
cagaagacaggaagcatttcagaga

SEQ ID NO: 68084 - DNA, 25 bp, Probe Sequence
aagacaggaagcatttcagagactc

SEQ ID NO: 68085 - DNA, 25 bp, Probe Sequence
ggcatgaagaacagaagacaggaag

SEQ ID NO: 68086 - DNA, 25 bp, Probe Sequence
gttcaagcatcttctcactaatgtt

SEQ ID NO: 68087 - DNA, 25 bp, Probe Sequence
ttcctgcttgaataagatacactct

SEQ ID NO: 68088 - DNA, 25 bp, Probe Sequence
agttcaagcatcttctcactaatgt

SEQ ID NO: 68089 - DNA, 25 bp, Probe Sequence
cagttcaagcatcttctcactaatg

SEQ ID NO: 68090 - DNA, 25 bp, Probe Sequence
tcagttcaagcatcttctcactaat

SEQ ID NO: 68091 - DNA, 25 bp, Probe Sequence
ttcagttcaagcatcttctcactaa

SEQ ID NO: 68092 - DNA, 25 bp, Probe Sequence
ttcttcagttcaagcatcttctcac

SEQ ID NO: 68093 - DNA, 25 bp, Probe Sequence
gttcttcagttcaagcatcttctca

SEQ ID NO: 68094 - DNA, 25 bp, Probe Sequence
tgttcttcagttcaagcatcttctc

SEQ ID NO: 68095 - DNA, 25 bp, Probe Sequence
ttgttcttcagttcaagcatcttct

SEQ ID NO: 68096 - DNA, 25 bp, Probe Sequence
cttcagttcaagcatcttctcacta

SEQ ID NO: 68097 - DNA, 25 bp, Probe Sequence
tcctgcttgaataagatacactcta

SEQ ID NO: 68098 - DNA, 25 bp, Probe Sequence
ttggacaacttgatgtaactgactt

SEQ ID NO: 68099 - DNA, 25 bp, Probe Sequence
cctgcttgaataagatacactctaa

SEQ ID NO: 68100 - DNA, 25 bp, Probe Sequence
tggatacattaactcacttaggaga

SEQ ID NO: 68101 - DNA, 25 bp, Probe Sequence
atgtcaagcaagccattaacaagat

SEQ ID NO: 68102 - DNA, 25 bp, Probe Sequence
tcttcagttcaagcatcttctcact

SEQ ID NO: 68103 - DNA, 25 bp, Probe Sequence
ttgaataagatacactctaatggca

SEQ ID NO: 68104 - DNA, 25 bp, Probe Sequence
tgaataagatacactctaatggcat

SEQ ID NO: 68105 - DNA, 25 bp, Probe Sequence
gagttggttctctcaatgatctatt

SEQ ID NO: 68106 - DNA, 25 bp, Probe Sequence
ttggatacattaactcacttaggag

SEQ ID NO: 68107 - DNA, 25 bp, Probe Sequence
attggaacaggaaatagaaggaact

SEQ ID NO: 68108 - DNA, 25 bp, Probe Sequence
ttggaacaggaaatagaaggaactc

SEQ ID NO: 68109 - DNA, 25 bp, Probe Sequence
cttgaataagatacactctaatggc

SEQ ID NO: 68110 - DNA, 25 bp, Probe Sequence
agggtaaagggagactatttcaaag

SEQ ID NO: 68111 - DNA, 25 bp, Probe Sequence
gagggtaaagggagactatttcaaa

SEQ ID NO: 68112 - DNA, 25 bp, Probe Sequence
tattgagggtagaagagattccaga

SEQ ID NO: 68113 - DNA, 25 bp, Probe Sequence
attgagggtagaagagattccagaa

SEQ ID NO: 68114 - DNA, 25 bp, Probe Sequence
ttattgagggtagaagagattccag

SEQ ID NO: 68115 - DNA, 25 bp, Probe Sequence
gggtaaagggagactatttcaaagc

SEQ ID NO: 68116 - DNA, 25 bp, Probe Sequence
ggagggtaaagggagactatttcaa

SEQ ID NO: 68117 - DNA, 25 bp, Probe Sequence
tttattgagggtagaagagattcca

SEQ ID NO: 68118 - DNA, 25 bp, Probe Sequence
ctgttatttgctagggagggtaaag

SEQ ID NO: 68119 - DNA, 25 bp, Probe Sequence
ttgagggtagaagagattccagaat

SEQ ID NO: 68120 - DNA, 25 bp, Probe Sequence
tagggagggtaaagggagactattt

SEQ ID NO: 68121 - DNA, 25 bp, Probe Sequence
ggtagaagagattccagaatcatca

SEQ ID NO: 68122 - DNA, 25 bp, Probe Sequence
atctgtgatgatggtgtcctttagg

SEQ ID NO: 68123 - DNA, 25 bp, Probe Sequence
ctagggagggtaaagggagactatt

SEQ ID NO: 68124 - DNA, 25 bp, Probe Sequence
tgttatttgctagggagggtaaagg

SEQ ID NO: 68125 - DNA, 25 bp, Probe Sequence
agactatttcaaagctactgttcct

SEQ ID NO: 68126 - DNA, 25 bp, Probe Sequence
aagggagactatttcaaagctactg

SEQ ID NO: 68127 - DNA, 25 bp, Probe Sequence
ctagtccagctttaagtttcggtaa

SEQ ID NO: 68128 - DNA, 25 bp, Probe Sequence
gggagactatttcaaagctactgtt

SEQ ID NO: 68129 - DNA, 25 bp, Probe Sequence
aaagggagactatttcaaagctact

SEQ ID NO: 68130 - DNA, 25 bp, Probe Sequence
ggtaaagggagactatttcaaagct

SEQ ID NO: 68131 - DNA, 25 bp, Probe Sequence
gagactatttcaaagctactgttcc

SEQ ID NO: 68132 - DNA, 25 bp, Probe Sequence
ggagactatttcaaagctactgttc

SEQ ID NO: 68133 - DNA, 25 bp, Probe Sequence
tgttcctagtccagctttaagtttc

SEQ ID NO: 68134 - DNA, 25 bp, Probe Sequence
ttgacttgatgcctcttggtatatc

SEQ ID NO: 68135 - DNA, 25 bp, Probe Sequence
catctacctgagttgacgctaatac

SEQ ID NO: 68136 - DNA, 25 bp, Probe Sequence
gaacattagatagtctgctgaggtt

SEQ ID NO: 68137 - DNA, 25 bp, Probe Sequence
attagatagtctgctgaggttgttg

SEQ ID NO: 68138 - DNA, 25 bp, Probe Sequence
cattagatagtctgctgaggttgtt

SEQ ID NO: 68139 - DNA, 25 bp, Probe Sequence
aacattagatagtctgctgaggttg

SEQ ID NO: 68140 - DNA, 25 bp, Probe Sequence
agaacattagatagtctgctgaggt

SEQ ID NO: 68141 - DNA, 25 bp, Probe Sequence
tagaacattagatagtctgctgagg

SEQ ID NO: 68142 - DNA, 25 bp, Probe Sequence
gctcttagaacattagatagtctgc

SEQ ID NO: 68143 - DNA, 25 bp, Probe Sequence
ttgaggaaggctcttagaacattag

SEQ ID NO: 68144 - DNA, 25 bp, Probe Sequence
atctacctgagttgacgctaatact

SEQ ID NO: 68145 - DNA, 25 bp, Probe Sequence
gaggaaggctcttagaacattagat

SEQ ID NO: 68146 - DNA, 25 bp, Probe Sequence
ctacctgagttgacgctaatacttg

SEQ ID NO: 68147 - DNA, 25 bp, Probe Sequence
tctacctgagttgacgctaatactt

SEQ ID NO: 68148 - DNA, 25 bp, Probe Sequence
tgaggaaggctcttagaacattaga

SEQ ID NO: 68149 - DNA, 25 bp, Probe Sequence
aggaaggctcttagaacattagata

SEQ ID NO: 68150 - DNA, 25 bp, Probe Sequence
ggctcttagaacattagatagtctg

SEQ ID NO: 68151 - DNA, 25 bp, Probe Sequence
ggaaggctcttagaacattagatag

SEQ ID NO: 68152 - DNA, 25 bp, Probe Sequence
tacctgagttgacgctaatacttgt

SEQ ID NO: 68153 - DNA, 25 bp, Probe Sequence
aggctcttagaacattagatagtct

SEQ ID NO: 68154 - DNA, 25 bp, Probe Sequence
gcatctacctgagttgacgctaata

SEQ ID NO: 68155 - DNA, 25 bp, Probe Sequence
acattagatagtctgctgaggttgt

SEQ ID NO: 68156 - DNA, 25 bp, Probe Sequence
ttagatagtctgctgaggttgttgg

SEQ ID NO: 68157 - DNA, 25 bp, Probe Sequence
ttagaacattagatagtctgctgag

SEQ ID NO: 68158 - DNA, 25 bp, Probe Sequence
gagatgatgagagaatgtggagatg

SEQ ID NO: 68159 - DNA, 25 bp, Probe Sequence
gatgatgagagaatgtggagatgtg

SEQ ID NO: 68160 - DNA, 25 bp, Probe Sequence
agatgatgagagaatgtggagatgt

SEQ ID NO: 68161 - DNA, 25 bp, Probe Sequence
ggagatgatgagagaatgtggagat

SEQ ID NO: 68162 - DNA, 25 bp, Probe Sequence
atgatgagagaatgtggagatgtgt

SEQ ID NO: 68163 - DNA, 25 bp, Probe Sequence
agtgaggagatgatgagagaatgtg

SEQ ID NO: 68164 - DNA, 25 bp, Probe Sequence
cagtgaggagatgatgagagaatgt

SEQ ID NO: 68165 - DNA, 25 bp, Probe Sequence
gaggagatgatgagagaatgtggag

SEQ ID NO: 68166 - DNA, 25 bp, Probe Sequence
tgatgagagaatgtggagatgtgtc

SEQ ID NO: 68167 - DNA, 25 bp, Probe Sequence
aggagatgatgagagaatgtggaga

SEQ ID NO: 68168 - DNA, 25 bp, Probe Sequence
atgagagaatgtggagatgtgtcaa

SEQ ID NO: 68169 - DNA, 25 bp, Probe Sequence
gtgaggagatgatgagagaatgtgg

SEQ ID NO: 68170 - DNA, 25 bp, Probe Sequence
tgaggagatgatgagagaatgtgga

SEQ ID NO: 68171 - DNA, 25 bp, Probe Sequence
gatgagagaatgtggagatgtgtca

SEQ ID NO: 68172 - DNA, 25 bp, Probe Sequence
tgagagaatgtggagatgtgtcaag

SEQ ID NO: 68173 - DNA, 25 bp, Probe Sequence
gcagtgaggagatgatgagagaatg

SEQ ID NO: 68174 - DNA, 25 bp, Probe Sequence
gagagaatgtggagatgtgtcaagg

SEQ ID NO: 68175 - DNA, 25 bp, Probe Sequence
agcagtgaggagatgatgagagaat

SEQ ID NO: 68176 - DNA, 25 bp, Probe Sequence
ccttccattctgatttctctgatga

SEQ ID NO: 68177 - DNA, 25 bp, Probe Sequence
tttgctttagatgtcagtctcgtta

SEQ ID NO: 68178 - DNA, 25 bp, Probe Sequence
ctttagatgtcagtctcgttaccag

SEQ ID NO: 68179 - DNA, 25 bp, Probe Sequence
ttgctttagatgtcagtctcgttac

SEQ ID NO: 68180 - DNA, 25 bp, Probe Sequence
atatcccatacctttaatgcctttg

SEQ ID NO: 68181 - DNA, 25 bp, Probe Sequence
tactttgctttagatgtcagtctcg

SEQ ID NO: 68182 - DNA, 25 bp, Probe Sequence
tcatatcagatactaacaaggcagc

SEQ ID NO: 68183 - DNA, 25 bp, Probe Sequence
tatgaggatgacactgtgatgaatg

SEQ ID NO: 68184 - DNA, 25 bp, Probe Sequence
gtatgaggatgacactgtgatgaat

SEQ ID NO: 68185 - DNA, 25 bp, Probe Sequence
atgacactgtgatgaatggattctt

SEQ ID NO: 68186 - DNA, 25 bp, Probe Sequence
gatgacactgtgatgaatggattct

SEQ ID NO: 68187 - DNA, 25 bp, Probe Sequence
ttcatatcagatactaacaaggcag

SEQ ID NO: 68188 - DNA, 25 bp, Probe Sequence
agtatgaggatgacactgtgatgaa

SEQ ID NO: 68189 - DNA, 25 bp, Probe Sequence
cttcatatcagatactaacaaggca

SEQ ID NO: 68190 - DNA, 25 bp, Probe Sequence
ggatgacactgtgatgaatggattc

SEQ ID NO: 68191 - DNA, 25 bp, Probe Sequence
aggatgacactgtgatgaatggatt

SEQ ID NO: 68192 - DNA, 25 bp, Probe Sequence
gagtatgaggatgacactgtgatga

SEQ ID NO: 68193 - DNA, 25 bp, Probe Sequence
tcttcatatcagatactaacaaggc

SEQ ID NO: 68194 - DNA, 25 bp, Probe Sequence
catatcagatactaacaaggcagct

SEQ ID NO: 68195 - DNA, 25 bp, Probe Sequence
gaggatgacactgtgatgaatggat

SEQ ID NO: 68196 - DNA, 25 bp, Probe Sequence
tatcagatactaacaaggcagcttc

SEQ ID NO: 68197 - DNA, 25 bp, Probe Sequence
atatcagatactaacaaggcagctt

SEQ ID NO: 68198 - DNA, 25 bp, Probe Sequence
atgaggatgacactgtgatgaatgg

SEQ ID NO: 68199 - DNA, 25 bp, Probe Sequence
tttctgcttctctactttacactcc

SEQ ID NO: 68200 - DNA, 25 bp, Probe Sequence
tgtttctctttctgcttctctactt

SEQ ID NO: 68201 - DNA, 25 bp, Probe Sequence
atgtttctctttctgcttctctact

SEQ ID NO: 68202 - DNA, 25 bp, Probe Sequence
tctttctgcttctctactttacact

SEQ ID NO: 68203 - DNA, 25 bp, Probe Sequence
tctatgtttctctttctgcttctct

SEQ ID NO: 68204 - DNA, 25 bp, Probe Sequence
ctttctgcttctctactttacactc

SEQ ID NO: 68205 - DNA, 25 bp, Probe Sequence
ctctttctgcttctctactttacac

SEQ ID NO: 68206 - DNA, 25 bp, Probe Sequence
tatgttgattgtactcatgctgttc

SEQ ID NO: 68207 - DNA, 25 bp, Probe Sequence
ttatgttgattgtactcatgctgtt

SEQ ID NO: 68208 - DNA, 25 bp, Probe Sequence
atgttgattgtactcatgctgttcc

SEQ ID NO: 68209 - DNA, 25 bp, Probe Sequence
atattgagaccatcctggctaacat

SEQ ID NO: 68210 - DNA, 25 bp, Probe Sequence
tttattacccaccactctgcttaaa

SEQ ID NO: 68211 - DNA, 25 bp, Probe Sequence
gatattgagaccatcctggctaaca

SEQ ID NO: 68212 - DNA, 25 bp, Probe Sequence
ttgattgtactcatgctgttccact

SEQ ID NO: 68213 - DNA, 25 bp, Probe Sequence
gttgattgtactcatgctgttccac

SEQ ID NO: 68214 - DNA, 25 bp, Probe Sequence
gatcacgaggtcaggatattgagac

SEQ ID NO: 68215 - DNA, 25 bp, Probe Sequence
tgttgattgtactcatgctgttcca

SEQ ID NO: 68216 - DNA, 25 bp, Probe Sequence
tgattgtactcatgctgttccactc

SEQ ID NO: 68217 - DNA, 25 bp, Probe Sequence
tattgagaccatcctggctaacatg

SEQ ID NO: 68218 - DNA, 25 bp, Probe Sequence
tttatgttgattgtactcatgctgt

SEQ ID NO: 68219 - DNA, 25 bp, Probe Sequence
ggatcacgaggtcaggatattgaga

SEQ ID NO: 68220 - DNA, 25 bp, Probe Sequence
gattgtactcatgctgttccactcc

SEQ ID NO: 68221 - DNA, 25 bp, Probe Sequence
tggatcacgaggtcaggatattgag

SEQ ID NO: 68222 - DNA, 25 bp, Probe Sequence
attgtactcatgctgttccactcct

SEQ ID NO: 68223 - DNA, 25 bp, Probe Sequence
ttgtactcatgctgttccactcctt

SEQ ID NO: 68224 - DNA, 25 bp, Probe Sequence
ttgactaacataatattgctgagaa

SEQ ID NO: 68225 - DNA, 25 bp, Probe Sequence
ttattacccaccactctgcttaaaa

SEQ ID NO: 68226 - DNA, 25 bp, Probe Sequence
ttttattacccaccactctgcttaa

SEQ ID NO: 68227 - DNA, 25 bp, Probe Sequence
tattacccaccactctgcttaaaag

SEQ ID NO: 68228 - DNA, 25 bp, Probe Sequence
gtggatcacgaggtcaggatattga

SEQ ID NO: 68229 - DNA, 25 bp, Probe Sequence
attgactaacataatattgctgaga

SEQ ID NO: 68230 - DNA, 25 bp, Probe Sequence
ctgtctgaagatagatcgccatcat

SEQ ID NO: 68231 - DNA, 25 bp, Probe Sequence
ctccttggctgtctgaagatagatc

SEQ ID NO: 68232 - DNA, 25 bp, Probe Sequence
tgatttatgattccctggattatgc

SEQ ID NO: 68233 - DNA, 25 bp, Probe Sequence
ctttggcatgatttatgattccctg

SEQ ID NO: 68234 - DNA, 25 bp, Probe Sequence
cctccttggctgtctgaagatagat

SEQ ID NO: 68235 - DNA, 25 bp, Probe Sequence
gcatgatttatgattccctggatta

SEQ ID NO: 68236 - DNA, 25 bp, Probe Sequence
ttcctccttggctgtctgaagatag

SEQ ID NO: 68237 - DNA, 25 bp, Probe Sequence
ggcatgatttatgattccctggatt

SEQ ID NO: 68238 - DNA, 25 bp, Probe Sequence
tttggcatgatttatgattccctgg

SEQ ID NO: 68239 - DNA, 25 bp, Probe Sequence
tatgattccctggattatgcaaaga

SEQ ID NO: 68240 - DNA, 25 bp, Probe Sequence
gctttggcatgatttatgattccct

SEQ ID NO: 68241 - DNA, 25 bp, Probe Sequence
tggcatgatttatgattccctggat

SEQ ID NO: 68242 - DNA, 25 bp, Probe Sequence
ttatgattccctggattatgcaaag

SEQ ID NO: 68243 - DNA, 25 bp, Probe Sequence
atgattccctggattatgcaaagaa

SEQ ID NO: 68244 - DNA, 25 bp, Probe Sequence
gatttatgattccctggattatgca

SEQ ID NO: 68245 - DNA, 25 bp, Probe Sequence
tccttggctgtctgaagatagatcg

SEQ ID NO: 68246 - DNA, 25 bp, Probe Sequence
tgattccctggattatgcaaagaaa

SEQ ID NO: 68247 - DNA, 25 bp, Probe Sequence
ttggcatgatttatgattccctgga

SEQ ID NO: 68248 - DNA, 25 bp, Probe Sequence
tttatgattccctggattatgcaaa

SEQ ID NO: 68249 - DNA, 25 bp, Probe Sequence
atttatgattccctggattatgcaa

SEQ ID NO: 68250 - DNA, 25 bp, Probe Sequence
agtaaaggtgctgcaatgatgttag

SEQ ID NO: 68251 - DNA, 25 bp, Probe Sequence
gagtaaaggtgctgcaatgatgtta

SEQ ID NO: 68252 - DNA, 25 bp, Probe Sequence
tttcctccttggctgtctgaagata

SEQ ID NO: 68253 - DNA, 25 bp, Probe Sequence
tcctccttggctgtctgaagataga

SEQ ID NO: 68254 - DNA, 25 bp, Probe Sequence
aagatagcagtgttctcctgacttc

SEQ ID NO: 68255 - DNA, 25 bp, Probe Sequence
tgaccatgtaactctgaccaatctg

SEQ ID NO: 68256 - DNA, 25 bp, Probe Sequence
gtgaccatgtaactctgaccaatct

SEQ ID NO: 68257 - DNA, 25 bp, Probe Sequence
gaccattctacctgtgttctttgac

SEQ ID NO: 68258 - DNA, 25 bp, Probe Sequence
attctacctgtgttctttgaccctc

SEQ ID NO: 68259 - DNA, 25 bp, Probe Sequence
cattctacctgtgttctttgaccct

SEQ ID NO: 68260 - DNA, 25 bp, Probe Sequence
ggaccattctacctgtgttctttga

SEQ ID NO: 68261 - DNA, 25 bp, Probe Sequence
aaagatagcagtgttctcctgactt

SEQ ID NO: 68262 - DNA, 25 bp, Probe Sequence
accattctacctgtgttctttgacc

SEQ ID NO: 68263 - DNA, 25 bp, Probe Sequence
gaaagatagcagtgttctcctgact

SEQ ID NO: 68264 - DNA, 25 bp, Probe Sequence
gaccatgtaactctgaccaatctgg

SEQ ID NO: 68265 - DNA, 25 bp, Probe Sequence
ccattctacctgtgttctttgaccc

SEQ ID NO: 68266 - DNA, 25 bp, Probe Sequence
gggaccattctacctgtgttctttg

SEQ ID NO: 68267 - DNA, 25 bp, Probe Sequence
ggtgaccatgtaactctgaccaatc

SEQ ID NO: 68268 - DNA, 25 bp, Probe Sequence
agatagcagtgttctcctgacttcg

SEQ ID NO: 68269 - DNA, 25 bp, Probe Sequence
atgtaactctgaccaatctgggaag

SEQ ID NO: 68270 - DNA, 25 bp, Probe Sequence
aataaaaggtgtgcccagtctaaaa

SEQ ID NO: 68271 - DNA, 25 bp, Probe Sequence
aaataaaaggtgtgcccagtctaaa

SEQ ID NO: 68272 - DNA, 25 bp, Probe Sequence
actggtaaacaactgctgtcagaaa

SEQ ID NO: 68273 - DNA, 25 bp, Probe Sequence
aggtgaccatgtaactctgaccaat

SEQ ID NO: 68274 - DNA, 25 bp, Probe Sequence
caaataaaaggtgtgcccagtctaa

SEQ ID NO: 68275 - DNA, 25 bp, Probe Sequence
ggaaagatagcagtgttctcctgac

SEQ ID NO: 68276 - DNA, 25 bp, Probe Sequence
ctggaaagatagcagtgttctcctg

SEQ ID NO: 68277 - DNA, 25 bp, Probe Sequence
catgtaactctgaccaatctgggaa

SEQ ID NO: 68278 - DNA, 25 bp, Probe Sequence
aagatcagcaacattgtcattaagg

SEQ ID NO: 68279 - DNA, 25 bp, Probe Sequence
agatcagcaacattgtcattaagga

SEQ ID NO: 68280 - DNA, 25 bp, Probe Sequence
gcaagatcagcaacattgtcattaa

SEQ ID NO: 68281 - DNA, 25 bp, Probe Sequence
caagatcagcaacattgtcattaag

SEQ ID NO: 68282 - DNA, 25 bp, Probe Sequence
gatcagcaacattgtcattaaggac

SEQ ID NO: 68283 - DNA, 25 bp, Probe Sequence
atcagcaacattgtcattaaggacg

SEQ ID NO: 68284 - DNA, 25 bp, Probe Sequence
ggcaagatcagcaacattgtcatta

SEQ ID NO: 68285 - DNA, 25 bp, Probe Sequence
cagcaacattgtcattaaggacgac

SEQ ID NO: 68286 - DNA, 25 bp, Probe Sequence
tcagcaacattgtcattaaggacga

SEQ ID NO: 68287 - DNA, 25 bp, Probe Sequence
ttatttccctgatgaccagaagttt

SEQ ID NO: 68288 - DNA, 25 bp, Probe Sequence
tttatttccctgatgaccagaagtt

SEQ ID NO: 68289 - DNA, 25 bp, Probe Sequence
ctttatttccctgatgaccagaagt

SEQ ID NO: 68290 - DNA, 25 bp, Probe Sequence
tatttccctgatgaccagaagtttg

SEQ ID NO: 68291 - DNA, 25 bp, Probe Sequence
cctttatttccctgatgaccagaag

SEQ ID NO: 68292 - DNA, 25 bp, Probe Sequence
tcctttatttccctgatgaccagaa

SEQ ID NO: 68293 - DNA, 25 bp, Probe Sequence
atgaccagaagtttgccatctacat

SEQ ID NO: 68294 - DNA, 25 bp, Probe Sequence
gtcactcctccacctcctttatttc

SEQ ID NO: 68295 - DNA, 25 bp, Probe Sequence
ctccacctcctttatttccctgatg

SEQ ID NO: 68296 - DNA, 25 bp, Probe Sequence
ctcctttatttccctgatgaccaga

SEQ ID NO: 68297 - DNA, 25 bp, Probe Sequence
cacctcctttatttccctgatgacc

SEQ ID NO: 68298 - DNA, 25 bp, Probe Sequence
ccacctcctttatttccctgatgac

SEQ ID NO: 68299 - DNA, 25 bp, Probe Sequence
tccacctcctttatttccctgatga

SEQ ID NO: 68300 - DNA, 25 bp, Probe Sequence
tgaccagaagtttgccatctacatc

SEQ ID NO: 68301 - DNA, 25 bp, Probe Sequence
acctcctttatttccctgatgacca

SEQ ID NO: 68302 - DNA, 25 bp, Probe Sequence
gtcatcactgaggaagagaagaatt

SEQ ID NO: 68303 - DNA, 25 bp, Probe Sequence
agtcatcactgaggaagagaagaat

SEQ ID NO: 68304 - DNA, 25 bp, Probe Sequence
gagtcatcactgaggaagagaagaa

SEQ ID NO: 68305 - DNA, 25 bp, Probe Sequence
cctggataatgctttactttctgtg

SEQ ID NO: 68306 - DNA, 25 bp, Probe Sequence
ctggataatgctttactttctgtgt

SEQ ID NO: 68307 - DNA, 25 bp, Probe Sequence
ccctggataatgctttactttctgt

SEQ ID NO: 68308 - DNA, 25 bp, Probe Sequence
gttgtttggttagtgactgatgtaa

SEQ ID NO: 68309 - DNA, 25 bp, Probe Sequence
tggataatgctttactttctgtgtt

SEQ ID NO: 68310 - DNA, 25 bp, Probe Sequence
ggttgtttggttagtgactgatgta

SEQ ID NO: 68311 - DNA, 25 bp, Probe Sequence
ggataatgctttactttctgtgttg

SEQ ID NO: 68312 - DNA, 25 bp, Probe Sequence
catcactgaggaagagaagaatttc

SEQ ID NO: 68313 - DNA, 25 bp, Probe Sequence
ttgtttggttagtgactgatgtaaa

SEQ ID NO: 68314 - DNA, 25 bp, Probe Sequence
ctgaggaagagaagaatttcaaagc

SEQ ID NO: 68315 - DNA, 25 bp, Probe Sequence
tcactgaggaagagaagaatttcaa

SEQ ID NO: 68316 - DNA, 25 bp, Probe Sequence
atcactgaggaagagaagaatttca

SEQ ID NO: 68317 - DNA, 25 bp, Probe Sequence
tcatcactgaggaagagaagaattt

SEQ ID NO: 68318 - DNA, 25 bp, Probe Sequence
ttggttgtttggttagtgactgatg

SEQ ID NO: 68319 - DNA, 25 bp, Probe Sequence
gttggttgtttggttagtgactgat

SEQ ID NO: 68320 - DNA, 25 bp, Probe Sequence
cactgaggaagagaagaatttcaaa

SEQ ID NO: 68321 - DNA, 25 bp, Probe Sequence
actgaggaagagaagaatttcaaag

SEQ ID NO: 68322 - DNA, 25 bp, Probe Sequence
gccctggataatgctttactttctg

SEQ ID NO: 68323 - DNA, 25 bp, Probe Sequence
tgaggaagagaagaatttcaaagcc

SEQ ID NO: 68324 - DNA, 25 bp, Probe Sequence
gataatgctttactttctgtgttga

SEQ ID NO: 68325 - DNA, 25 bp, Probe Sequence
taatgctttactttctgtgttgaag

SEQ ID NO: 68326 - DNA, 25 bp, Probe Sequence
ttgaaacaccacctctcacaattta

SEQ ID NO: 68327 - DNA, 25 bp, Probe Sequence
tgaaacaccacctctcacaatttag

SEQ ID NO: 68328 - DNA, 25 bp, Probe Sequence
tttgaaacaccacctctcacaattt

SEQ ID NO: 68329 - DNA, 25 bp, Probe Sequence
gaaacaccacctctcacaatttagg

SEQ ID NO: 68330 - DNA, 25 bp, Probe Sequence
cgagggctctttcttatacacactg

SEQ ID NO: 68331 - DNA, 25 bp, Probe Sequence
gacgagggctctttcttatacacac

SEQ ID NO: 68332 - DNA, 25 bp, Probe Sequence
tcacaatttaggcagaagctgatat

SEQ ID NO: 68333 - DNA, 25 bp, Probe Sequence
ctctttcttatacacactgcccgac

SEQ ID NO: 68334 - DNA, 25 bp, Probe Sequence
ctcacaatttaggcagaagctgata

SEQ ID NO: 68335 - DNA, 25 bp, Probe Sequence
gagggctctttcttatacacactgc

SEQ ID NO: 68336 - DNA, 25 bp, Probe Sequence
acgagggctctttcttatacacact

SEQ ID NO: 68337 - DNA, 25 bp, Probe Sequence
cacaatttaggcagaagctgatatc

SEQ ID NO: 68338 - DNA, 25 bp, Probe Sequence
gaagctgatatcccagaaagactat

SEQ ID NO: 68339 - DNA, 25 bp, Probe Sequence
agaagctgatatcccagaaagacta

SEQ ID NO: 68340 - DNA, 25 bp, Probe Sequence
acaatttaggcagaagctgatatcc

SEQ ID NO: 68341 - DNA, 25 bp, Probe Sequence
aagctgatatcccagaaagactata

SEQ ID NO: 68342 - DNA, 25 bp, Probe Sequence
caatttaggcagaagctgatatccc

SEQ ID NO: 68343 - DNA, 25 bp, Probe Sequence
tctcacaatttaggcagaagctgat

SEQ ID NO: 68344 - DNA, 25 bp, Probe Sequence
agctgatatcccagaaagactatat

SEQ ID NO: 68345 - DNA, 25 bp, Probe Sequence
ggacgagggctctttcttatacaca

SEQ ID NO: 68346 - DNA, 25 bp, Probe Sequence
cagaagctgatatcccagaaagact

SEQ ID NO: 68347 - DNA, 25 bp, Probe Sequence
aatttaggcagaagctgatatccca

SEQ ID NO: 68348 - DNA, 25 bp, Probe Sequence
ttttgaaacaccacctctcacaatt

SEQ ID NO: 68349 - DNA, 25 bp, Probe Sequence
ccacctctcacaatttaggcagaag

SEQ ID NO: 68350 - DNA, 25 bp, Probe Sequence
gagacattccaatagttcacagagt

SEQ ID NO: 68351 - DNA, 25 bp, Probe Sequence
agacattccaatagttcacagagta

SEQ ID NO: 68352 - DNA, 25 bp, Probe Sequence
aatgaagttgatgatagaggcttgt

SEQ ID NO: 68353 - DNA, 25 bp, Probe Sequence
atgaagttgatgatagaggcttgta

SEQ ID NO: 68354 - DNA, 25 bp, Probe Sequence
cgagacattccaatagttcacagag

SEQ ID NO: 68355 - DNA, 25 bp, Probe Sequence
gacattccaatagttcacagagtaa

SEQ ID NO: 68356 - DNA, 25 bp, Probe Sequence
gacgagacattccaatagttcacag

SEQ ID NO: 68357 - DNA, 25 bp, Probe Sequence
taatgaagttgatgatagaggcttg

SEQ ID NO: 68358 - DNA, 25 bp, Probe Sequence
acgagacattccaatagttcacaga

SEQ ID NO: 68359 - DNA, 25 bp, Probe Sequence
tgaagttgatgatagaggcttgtac

SEQ ID NO: 68360 - DNA, 25 bp, Probe Sequence
ttccaatagttcacagagtaatcaa

SEQ ID NO: 68361 - DNA, 25 bp, Probe Sequence
acattccaatagttcacagagtaat

SEQ ID NO: 68362 - DNA, 25 bp, Probe Sequence
aataatgaagttgatgatagaggct

SEQ ID NO: 68363 - DNA, 25 bp, Probe Sequence
attccaatagttcacagagtaatca

SEQ ID NO: 68364 - DNA, 25 bp, Probe Sequence
ataatgaagttgatgatagaggctt

SEQ ID NO: 68365 - DNA, 25 bp, Probe Sequence
cattccaatagttcacagagtaatc

SEQ ID NO: 68366 - DNA, 25 bp, Probe Sequence
gaaggacgagacattccaatagttc

SEQ ID NO: 68367 - DNA, 25 bp, Probe Sequence
gttgaaggacgagacattccaatag

SEQ ID NO: 68368 - DNA, 25 bp, Probe Sequence
aaggacgagacattccaatagttca

SEQ ID NO: 68369 - DNA, 25 bp, Probe Sequence
tgaaggacgagacattccaatagtt

SEQ ID NO: 68370 - DNA, 25 bp, Probe Sequence
ttgaaggacgagacattccaatagt

SEQ ID NO: 68371 - DNA, 25 bp, Probe Sequence
agttgaaggacgagacattccaata

SEQ ID NO: 68372 - DNA, 25 bp, Probe Sequence
agttcacagagtaatcaaagttcat

SEQ ID NO: 68373 - DNA, 25 bp, Probe Sequence
aggacgagacattccaatagttcac

SEQ ID NO: 68374 - DNA, 25 bp, Probe Sequence
ctgtctatgctctgtctcacttaac

SEQ ID NO: 68375 - DNA, 25 bp, Probe Sequence
ctggagaatggatagtattgtctgt

SEQ ID NO: 68376 - DNA, 25 bp, Probe Sequence
aatgctctcacatacaggaattagg

SEQ ID NO: 68377 - DNA, 25 bp, Probe Sequence
gctggagaatggatagtattgtctg

SEQ ID NO: 68378 - DNA, 25 bp, Probe Sequence
cctgtctatgctctgtctcacttaa

SEQ ID NO: 68379 - DNA, 25 bp, Probe Sequence
tggagaatggatagtattgtctgta

SEQ ID NO: 68380 - DNA, 25 bp, Probe Sequence
tatgctctgtctcacttaacactac

SEQ ID NO: 68381 - DNA, 25 bp, Probe Sequence
acactatcttatgtaacctgtctgg

SEQ ID NO: 68382 - DNA, 25 bp, Probe Sequence
ctatgctctgtctcacttaacacta

SEQ ID NO: 68383 - DNA, 25 bp, Probe Sequence
tctatgctctgtctcacttaacact

SEQ ID NO: 68384 - DNA, 25 bp, Probe Sequence
gtctatgctctgtctcacttaacac

SEQ ID NO: 68385 - DNA, 25 bp, Probe Sequence
tcctgtctatgctctgtctcactta

SEQ ID NO: 68386 - DNA, 25 bp, Probe Sequence
tgtctatgctctgtctcacttaaca

SEQ ID NO: 68387 - DNA, 25 bp, Probe Sequence
aagagctggagaatggatagtattg

SEQ ID NO: 68388 - DNA, 25 bp, Probe Sequence
gaagagctggagaatggatagtatt

SEQ ID NO: 68389 - DNA, 25 bp, Probe Sequence
agaagagctggagaatggatagtat

SEQ ID NO: 68390 - DNA, 25 bp, Probe Sequence
gagctggagaatggatagtattgtc

SEQ ID NO: 68391 - DNA, 25 bp, Probe Sequence
agagctggagaatggatagtattgt

SEQ ID NO: 68392 - DNA, 25 bp, Probe Sequence
gagaagagctggagaatggatagta

SEQ ID NO: 68393 - DNA, 25 bp, Probe Sequence
actatcttatgtaacctgtctggtg

SEQ ID NO: 68394 - DNA, 25 bp, Probe Sequence
cactatcttatgtaacctgtctggt

SEQ ID NO: 68395 - DNA, 25 bp, Probe Sequence
tatcttatgtaacctgtctggtgag

SEQ ID NO: 68396 - DNA, 25 bp, Probe Sequence
ctatcttatgtaacctgtctggtga

SEQ ID NO: 68397 - DNA, 25 bp, Probe Sequence
agctggagaatggatagtattgtct

SEQ ID NO: 68398 - DNA, 25 bp, Probe Sequence
ccacaaatataaggcaaagaggaac

SEQ ID NO: 68399 - DNA, 25 bp, Probe Sequence
taccacaaatataaggcaaagagga

SEQ ID NO: 68400 - DNA, 25 bp, Probe Sequence
accacaaatataaggcaaagaggaa

SEQ ID NO: 68401 - DNA, 25 bp, Probe Sequence
acaaatataaggcaaagaggaactg

SEQ ID NO: 68402 - DNA, 25 bp, Probe Sequence
cacaaatataaggcaaagaggaact

SEQ ID NO: 68403 - DNA, 25 bp, Probe Sequence
cgtaccacaaatataaggcaaagag

SEQ ID NO: 68404 - DNA, 25 bp, Probe Sequence
gtaccacaaatataaggcaaagagg

SEQ ID NO: 68405 - DNA, 25 bp, Probe Sequence
gcgtaccacaaatataaggcaaaga

SEQ ID NO: 68406 - DNA, 25 bp, Probe Sequence
caagaaggttatctcctcagccaac

SEQ ID NO: 68407 - DNA, 25 bp, Probe Sequence
ggcgtaccacaaatataaggcaaag

SEQ ID NO: 68408 - DNA, 25 bp, Probe Sequence
aagaaggttatctcctcagccaaca

SEQ ID NO: 68409 - DNA, 25 bp, Probe Sequence
cgaattgacaaacccatcttgaagg

SEQ ID NO: 68410 - DNA, 25 bp, Probe Sequence
ccgaattgacaaacccatcttgaag

SEQ ID NO: 68411 - DNA, 25 bp, Probe Sequence
gaattgacaaacccatcttgaaggc

SEQ ID NO: 68412 - DNA, 25 bp, Probe Sequence
gcctcaataaagtttgtgtttatgc

SEQ ID NO: 68413 - DNA, 25 bp, Probe Sequence
cctcaataaagtttgtgtttatgcc

SEQ ID NO: 68414 - DNA, 25 bp, Probe Sequence
aaggttatctcctcagccaacagag

SEQ ID NO: 68415 - DNA, 25 bp, Probe Sequence
gaaggttatctcctcagccaacaga

SEQ ID NO: 68416 - DNA, 25 bp, Probe Sequence
agaaggttatctcctcagccaacag

SEQ ID NO: 68417 - DNA, 25 bp, Probe Sequence
aattgacaaacccatcttgaaggct

SEQ ID NO: 68418 - DNA, 25 bp, Probe Sequence
ctcaataaagtttgtgtttatgcca

SEQ ID NO: 68419 - DNA, 25 bp, Probe Sequence
ccaagaaggttatctcctcagccaa

SEQ ID NO: 68420 - DNA, 25 bp, Probe Sequence
aaatataaggcaaagaggaactgct

SEQ ID NO: 68421 - DNA, 25 bp, Probe Sequence
caaatataaggcaaagaggaactgc

SEQ ID NO: 68422 - DNA, 25 bp, Probe Sequence
aatccagaagaagctgactccattc

SEQ ID NO: 68423 - DNA, 25 bp, Probe Sequence
aaatccagaagaagctgactccatt

SEQ ID NO: 68424 - DNA, 25 bp, Probe Sequence
gtcatgtctctctccaccacagatc

SEQ ID NO: 68425 - DNA, 25 bp, Probe Sequence
ctgtacggagtcttcctctacatgg

SEQ ID NO: 68426 - DNA, 25 bp, Probe Sequence
atccagaagaagctgactccattct

SEQ ID NO: 68427 - DNA, 25 bp, Probe Sequence
aattcaaaatccagaagaagctgac

SEQ ID NO: 68428 - DNA, 25 bp, Probe Sequence
gctgtacggagtcttcctctacatg

SEQ ID NO: 68429 - DNA, 25 bp, Probe Sequence
attcaaaatccagaagaagctgact

SEQ ID NO: 68430 - DNA, 25 bp, Probe Sequence
ttcaaaatccagaagaagctgactc

SEQ ID NO: 68431 - DNA, 25 bp, Probe Sequence
tgctgtacggagtcttcctctacat

SEQ ID NO: 68432 - DNA, 25 bp, Probe Sequence
atgtctctctccaccacagatcctg

SEQ ID NO: 68433 - DNA, 25 bp, Probe Sequence
catgtctctctccaccacagatcct

SEQ ID NO: 68434 - DNA, 25 bp, Probe Sequence
tcatgtctctctccaccacagatcc

SEQ ID NO: 68435 - DNA, 25 bp, Probe Sequence
cagaattcaaaatccagaagaagct

SEQ ID NO: 68436 - DNA, 25 bp, Probe Sequence
tcagaattcaaaatccagaagaagc

SEQ ID NO: 68437 - DNA, 25 bp, Probe Sequence
ggtcagaattcaaaatccagaagaa

SEQ ID NO: 68438 - DNA, 25 bp, Probe Sequence
gggtcagaattcaaaatccagaaga

SEQ ID NO: 68439 - DNA, 25 bp, Probe Sequence
agggtcagaattcaaaatccagaag

SEQ ID NO: 68440 - DNA, 25 bp, Probe Sequence
gagggtcagaattcaaaatccagaa

SEQ ID NO: 68441 - DNA, 25 bp, Probe Sequence
aaaatccagaagaagctgactccat

SEQ ID NO: 68442 - DNA, 25 bp, Probe Sequence
gtcagaattcaaaatccagaagaag

SEQ ID NO: 68443 - DNA, 25 bp, Probe Sequence
gaattcaaaatccagaagaagctga

SEQ ID NO: 68444 - DNA, 25 bp, Probe Sequence
agaattcaaaatccagaagaagctg

SEQ ID NO: 68445 - DNA, 25 bp, Probe Sequence
tcaaaatccagaagaagctgactcc

SEQ ID NO: 68446 - DNA, 25 bp, Probe Sequence
gctccttgtctttcttacctgtaaa

SEQ ID NO: 68447 - DNA, 25 bp, Probe Sequence
ctgctccttgtctttcttacctgta

SEQ ID NO: 68448 - DNA, 25 bp, Probe Sequence
tgctccttgtctttcttacctgtaa

SEQ ID NO: 68449 - DNA, 25 bp, Probe Sequence
ctctgctccttgtctttcttacctg

SEQ ID NO: 68450 - DNA, 25 bp, Probe Sequence
tctgctccttgtctttcttacctgt

SEQ ID NO: 68451 - DNA, 25 bp, Probe Sequence
ttgtctttcttacctgtaaaatggg

SEQ ID NO: 68452 - DNA, 25 bp, Probe Sequence
cctctgctccttgtctttcttacct

SEQ ID NO: 68453 - DNA, 25 bp, Probe Sequence
ctccttgtctttcttacctgtaaaa

SEQ ID NO: 68454 - DNA, 25 bp, Probe Sequence
cttgtctttcttacctgtaaaatgg

SEQ ID NO: 68455 - DNA, 25 bp, Probe Sequence
ccttgtctttcttacctgtaaaatg

SEQ ID NO: 68456 - DNA, 25 bp, Probe Sequence
tccttgtctttcttacctgtaaaat

SEQ ID NO: 68457 - DNA, 25 bp, Probe Sequence
attagttctgtccccttcacaatga

SEQ ID NO: 68458 - DNA, 25 bp, Probe Sequence
cttacctgtaaaatgggtctcagat

SEQ ID NO: 68459 - DNA, 25 bp, Probe Sequence
tgtctttcttacctgtaaaatgggt

SEQ ID NO: 68460 - DNA, 25 bp, Probe Sequence
ttacctgtaaaatgggtctcagatg

SEQ ID NO: 68461 - DNA, 25 bp, Probe Sequence
ttcttacctgtaaaatgggtctcag

SEQ ID NO: 68462 - DNA, 25 bp, Probe Sequence
tttcttacctgtaaaatgggtctca

SEQ ID NO: 68463 - DNA, 25 bp, Probe Sequence
gtctttcttacctgtaaaatgggtc

SEQ ID NO: 68464 - DNA, 25 bp, Probe Sequence
tctttcttacctgtaaaatgggtct

SEQ ID NO: 68465 - DNA, 25 bp, Probe Sequence
ctttcttacctgtaaaatgggtctc

SEQ ID NO: 68466 - DNA, 25 bp, Probe Sequence
tcttacctgtaaaatgggtctcaga

SEQ ID NO: 68467 - DNA, 25 bp, Probe Sequence
ttagttctgtccccttcacaatgag

SEQ ID NO: 68468 - DNA, 25 bp, Probe Sequence
gtgaaagatgctattgtccgtgctg

SEQ ID NO: 68469 - DNA, 25 bp, Probe Sequence
ccattagttctgtccccttcacaat

SEQ ID NO: 68470 - DNA, 25 bp, Probe Sequence
ctaggaggtctctgaggttactgta

SEQ ID NO: 68471 - DNA, 25 bp, Probe Sequence
agtctacatcaaggtctcacacttc

SEQ ID NO: 68472 - DNA, 25 bp, Probe Sequence
gagtctacatcaaggtctcacactt

SEQ ID NO: 68473 - DNA, 25 bp, Probe Sequence
aagtctaggaggtctctgaggttac

SEQ ID NO: 68474 - DNA, 25 bp, Probe Sequence
caagtctaggaggtctctgaggtta

SEQ ID NO: 68475 - DNA, 25 bp, Probe Sequence
taggaggtctctgaggttactgtac

SEQ ID NO: 68476 - DNA, 25 bp, Probe Sequence
gtctacatcaaggtctcacacttcc

SEQ ID NO: 68477 - DNA, 25 bp, Probe Sequence
gtctaggaggtctctgaggttactg

SEQ ID NO: 68478 - DNA, 25 bp, Probe Sequence
tggatctctggtgtaaatatgactg

SEQ ID NO: 68479 - DNA, 25 bp, Probe Sequence
ggactgtaataaatggatctctggt

SEQ ID NO: 68480 - DNA, 25 bp, Probe Sequence
gcaggactgtaataaatggatctct

SEQ ID NO: 68481 - DNA, 25 bp, Probe Sequence
ccctggataaagagaacaatgaagc

SEQ ID NO: 68482 - DNA, 25 bp, Probe Sequence
gccctggataaagagaacaatgaag

SEQ ID NO: 68483 - DNA, 25 bp, Probe Sequence
aggactgtaataaatggatctctgg

SEQ ID NO: 68484 - DNA, 25 bp, Probe Sequence
actgtaataaatggatctctggtgt

SEQ ID NO: 68485 - DNA, 25 bp, Probe Sequence
tctaggaggtctctgaggttactgt

SEQ ID NO: 68486 - DNA, 25 bp, Probe Sequence
atggatctctggtgtaaatatgact

SEQ ID NO: 68487 - DNA, 25 bp, Probe Sequence
gactgtaataaatggatctctggtg

SEQ ID NO: 68488 - DNA, 25 bp, Probe Sequence
ctacatcaaggtctcacacttcctg

SEQ ID NO: 68489 - DNA, 25 bp, Probe Sequence
tctacatcaaggtctcacacttcct

SEQ ID NO: 68490 - DNA, 25 bp, Probe Sequence
agtctaggaggtctctgaggttact

SEQ ID NO: 68491 - DNA, 25 bp, Probe Sequence
cctggataaagagaacaatgaagcg

SEQ ID NO: 68492 - DNA, 25 bp, Probe Sequence
tgccctggataaagagaacaatgaa

SEQ ID NO: 68493 - DNA, 25 bp, Probe Sequence
aatggatctctggtgtaaatatgac

SEQ ID NO: 68494 - DNA, 25 bp, Probe Sequence
agtcagtgtctctaagattgtggtg

SEQ ID NO: 68495 - DNA, 25 bp, Probe Sequence
cagtcagtgtctctaagattgtggt

SEQ ID NO: 68496 - DNA, 25 bp, Probe Sequence
gcagtcagtgtctctaagattgtgg

SEQ ID NO: 68497 - DNA, 25 bp, Probe Sequence
ggcagtcagtgtctctaagattgtg

SEQ ID NO: 68498 - DNA, 25 bp, Probe Sequence
ccaattacatcgactggatcaattc

SEQ ID NO: 68499 - DNA, 25 bp, Probe Sequence
ctggcagtcagtgtctctaagattg

SEQ ID NO: 68500 - DNA, 25 bp, Probe Sequence
tggcagtcagtgtctctaagattgt

SEQ ID NO: 68501 - DNA, 25 bp, Probe Sequence
caattacatcgactggatcaattcg

SEQ ID NO: 68502 - DNA, 25 bp, Probe Sequence
aattacatcgactggatcaattcgg

SEQ ID NO: 68503 - DNA, 25 bp, Probe Sequence
cacttacccaccttatgtgactagg

SEQ ID NO: 68504 - DNA, 25 bp, Probe Sequence
ccacttacccaccttatgtgactag

SEQ ID NO: 68505 - DNA, 25 bp, Probe Sequence
attacatcgactggatcaattcggt

SEQ ID NO: 68506 - DNA, 25 bp, Probe Sequence
caaatctccaaagggaacgacattg

SEQ ID NO: 68507 - DNA, 25 bp, Probe Sequence
gaactccaaccaaatctccaaaggg

SEQ ID NO: 68508 - DNA, 25 bp, Probe Sequence
ttacatcgactggatcaattcggtg

SEQ ID NO: 68509 - DNA, 25 bp, Probe Sequence
gctggcagtcagtgtctctaagatt

SEQ ID NO: 68510 - DNA, 25 bp, Probe Sequence
cccacttacccaccttatgtgacta

SEQ ID NO: 68511 - DNA, 25 bp, Probe Sequence
ccaaatctccaaagggaacgacatt

SEQ ID NO: 68512 - DNA, 25 bp, Probe Sequence
atcgactggatcaattcggtgattg

SEQ ID NO: 68513 - DNA, 25 bp, Probe Sequence
catcgactggatcaattcggtgatt

SEQ ID NO: 68514 - DNA, 25 bp, Probe Sequence
tccaattacatcgactggatcaatt

SEQ ID NO: 68515 - DNA, 25 bp, Probe Sequence
ctccaattacatcgactggatcaat

SEQ ID NO: 68516 - DNA, 25 bp, Probe Sequence
tacatcgactggatcaattcggtga

SEQ ID NO: 68517 - DNA, 25 bp, Probe Sequence
ctccaaccaaatctccaaagggaac

SEQ ID NO: 68518 - DNA, 25 bp, Probe Sequence
gttcacagaggaagagattgagttc

SEQ ID NO: 68519 - DNA, 25 bp, Probe Sequence
agttcacagaggaagagattgagtt

SEQ ID NO: 68520 - DNA, 25 bp, Probe Sequence
gagttcacagaggaagagattgagt

SEQ ID NO: 68521 - DNA, 25 bp, Probe Sequence
tgagttcacagaggaagagattgag

SEQ ID NO: 68522 - DNA, 25 bp, Probe Sequence
caacttcatcatcgctgttaaggac

SEQ ID NO: 68523 - DNA, 25 bp, Probe Sequence
gaaagtagatgtcttatcctgggtc

SEQ ID NO: 68524 - DNA, 25 bp, Probe Sequence
gagaaagtagatgtcttatcctggg

SEQ ID NO: 68525 - DNA, 25 bp, Probe Sequence
agaaagtagatgtcttatcctgggt

SEQ ID NO: 68526 - DNA, 25 bp, Probe Sequence
acaacttcatcatcgctgttaagga

SEQ ID NO: 68527 - DNA, 25 bp, Probe Sequence
aaagtagatgtcttatcctgggtcc

SEQ ID NO: 68528 - DNA, 25 bp, Probe Sequence
aacttcatcatcgctgttaaggacc

SEQ ID NO: 68529 - DNA, 25 bp, Probe Sequence
gtgagttcacagaggaagagattga

SEQ ID NO: 68530 - DNA, 25 bp, Probe Sequence
agtgagttcacagaggaagagattg

SEQ ID NO: 68531 - DNA, 25 bp, Probe Sequence
cagtgagttcacagaggaagagatt

SEQ ID NO: 68532 - DNA, 25 bp, Probe Sequence
ggagaaagtagatgtcttatcctgg

SEQ ID NO: 68533 - DNA, 25 bp, Probe Sequence
agtagatgtcttatcctgggtccat

SEQ ID NO: 68534 - DNA, 25 bp, Probe Sequence
cgtggagaaagtagatgtcttatcc

SEQ ID NO: 68535 - DNA, 25 bp, Probe Sequence
tggagaaagtagatgtcttatcctg

SEQ ID NO: 68536 - DNA, 25 bp, Probe Sequence
gtggagaaagtagatgtcttatcct

SEQ ID NO: 68537 - DNA, 25 bp, Probe Sequence
aagtagatgtcttatcctgggtcca

SEQ ID NO: 68538 - DNA, 25 bp, Probe Sequence
gtagatgtcttatcctgggtccatg

SEQ ID NO: 68539 - DNA, 25 bp, Probe Sequence
acagtgagttcacagaggaagagat

SEQ ID NO: 68540 - DNA, 25 bp, Probe Sequence
caacaacttcatcatcgctgttaag

SEQ ID NO: 68541 - DNA, 25 bp, Probe Sequence
acgtggagaaagtagatgtcttatc

SEQ ID NO: 68542 - DNA, 25 bp, Probe Sequence
ctacaaggacatattcgtcactgtg

SEQ ID NO: 68543 - DNA, 25 bp, Probe Sequence
atcaaaggctacaaggacatattcg

SEQ ID NO: 68544 - DNA, 25 bp, Probe Sequence
tacaaggacatattcgtcactgtgg

SEQ ID NO: 68545 - DNA, 25 bp, Probe Sequence
gagatcaaaggctacaaggacatat

SEQ ID NO: 68546 - DNA, 25 bp, Probe Sequence
agatcaaaggctacaaggacatatt

SEQ ID NO: 68547 - DNA, 25 bp, Probe Sequence
gatcaaaggctacaaggacatattc

SEQ ID NO: 68548 - DNA, 25 bp, Probe Sequence
gctacaaggacatattcgtcactgt

SEQ ID NO: 68549 - DNA, 25 bp, Probe Sequence
aaggctacaaggacatattcgtcac

SEQ ID NO: 68550 - DNA, 25 bp, Probe Sequence
tcaaaggctacaaggacatattcgt

SEQ ID NO: 68551 - DNA, 25 bp, Probe Sequence
ggagatcaaaggctacaaggacata

SEQ ID NO: 68552 - DNA, 25 bp, Probe Sequence
ggctacaaggacatattcgtcactg

SEQ ID NO: 68553 - DNA, 25 bp, Probe Sequence
caaaggctacaaggacatattcgtc

SEQ ID NO: 68554 - DNA, 25 bp, Probe Sequence
aggctacaaggacatattcgtcact

SEQ ID NO: 68555 - DNA, 25 bp, Probe Sequence
aaaggctacaaggacatattcgtca

SEQ ID NO: 68556 - DNA, 25 bp, Probe Sequence
aaggacatattcgtcactgtggctg

SEQ ID NO: 68557 - DNA, 25 bp, Probe Sequence
caaggacatattcgtcactgtggct

SEQ ID NO: 68558 - DNA, 25 bp, Probe Sequence
acaaggacatattcgtcactgtggc

SEQ ID NO: 68559 - DNA, 25 bp, Probe Sequence
ctactacaaccgctgctatatggac

SEQ ID NO: 68560 - DNA, 25 bp, Probe Sequence
cacctactacaaccgctgctatatg

SEQ ID NO: 68561 - DNA, 25 bp, Probe Sequence
tcacctactacaaccgctgctatat

SEQ ID NO: 68562 - DNA, 25 bp, Probe Sequence
ctcacctactacaaccgctgctata

SEQ ID NO: 68563 - DNA, 25 bp, Probe Sequence
cctactacaaccgctgctatatgga

SEQ ID NO: 68564 - DNA, 25 bp, Probe Sequence
acctactacaaccgctgctatatgg

SEQ ID NO: 68565 - DNA, 25 bp, Probe Sequence
tactacaaccgctgctatatggacg

SEQ ID NO: 68566 - DNA, 25 bp, Probe Sequence
gatgacaagatgggcctcaagttct

SEQ ID NO: 68567 - DNA, 25 bp, Probe Sequence
atgacaagatgggcctcaagttctt

SEQ ID NO: 68568 - DNA, 25 bp, Probe Sequence
cttcagttactcatcataccacacc

SEQ ID NO: 68569 - DNA, 25 bp, Probe Sequence
gcttcagttactcatcataccacac

SEQ ID NO: 68570 - DNA, 25 bp, Probe Sequence
aataagattgtcagtgattatggca

SEQ ID NO: 68571 - DNA, 25 bp, Probe Sequence
ataagattgtcagtgattatggcaa

SEQ ID NO: 68572 - DNA, 25 bp, Probe Sequence
tggaggagatatatagctggattga

SEQ ID NO: 68573 - DNA, 25 bp, Probe Sequence
ggaggagatatatagctggattgac

SEQ ID NO: 68574 - DNA, 25 bp, Probe Sequence
ctggaggagatatatagctggattg

SEQ ID NO: 68575 - DNA, 25 bp, Probe Sequence
cctggaggagatatatagctggatt

SEQ ID NO: 68576 - DNA, 25 bp, Probe Sequence
gaggagatatatagctggattgaca

SEQ ID NO: 68577 - DNA, 25 bp, Probe Sequence
caacagcttcagttactcatcatac

SEQ ID NO: 68578 - DNA, 25 bp, Probe Sequence
aacagcttcagttactcatcatacc

SEQ ID NO: 68579 - DNA, 25 bp, Probe Sequence
ccaacagcttcagttactcatcata

SEQ ID NO: 68580 - DNA, 25 bp, Probe Sequence
cagcttcagttactcatcataccac

SEQ ID NO: 68581 - DNA, 25 bp, Probe Sequence
ggagatatatagctggattgacaac

SEQ ID NO: 68582 - DNA, 25 bp, Probe Sequence
aggagatatatagctggattgacaa

SEQ ID NO: 68583 - DNA, 25 bp, Probe Sequence
agcttcagttactcatcataccaca

SEQ ID NO: 68584 - DNA, 25 bp, Probe Sequence
acagcttcagttactcatcatacca

SEQ ID NO: 68585 - DNA, 25 bp, Probe Sequence
taatggagcattccgatattgtctc

SEQ ID NO: 68586 - DNA, 25 bp, Probe Sequence
ttgtaatggagcattccgatattgt

SEQ ID NO: 68587 - DNA, 25 bp, Probe Sequence
gtaatggagcattccgatattgtct

SEQ ID NO: 68588 - DNA, 25 bp, Probe Sequence
aagattgtcagtgattatggcaaag

SEQ ID NO: 68589 - DNA, 25 bp, Probe Sequence
ctgccaataagattgtcagtgatta

SEQ ID NO: 68590 - DNA, 25 bp, Probe Sequence
agattgtcagtgattatggcaaaga

SEQ ID NO: 68591 - DNA, 25 bp, Probe Sequence
tgtaatggagcattccgatattgtc

SEQ ID NO: 68592 - DNA, 25 bp, Probe Sequence
ctacagaattggcttcatagaggag

SEQ ID NO: 68593 - DNA, 25 bp, Probe Sequence
tacagaattggcttcatagaggagg

SEQ ID NO: 68594 - DNA, 25 bp, Probe Sequence
tctacagaattggcttcatagagga

SEQ ID NO: 68595 - DNA, 25 bp, Probe Sequence
agacagctatgatctcaattccatt

SEQ ID NO: 68596 - DNA, 25 bp, Probe Sequence
aagacagctatgatctcaattccat

SEQ ID NO: 68597 - DNA, 25 bp, Probe Sequence
gaagacagctatgatctcaattcca

SEQ ID NO: 68598 - DNA, 25 bp, Probe Sequence
tggaagacagctatgatctcaattc

SEQ ID NO: 68599 - DNA, 25 bp, Probe Sequence
ctggaagacagctatgatctcaatt

SEQ ID NO: 68600 - DNA, 25 bp, Probe Sequence
acctttctgtctaaatgcgaatgaa

SEQ ID NO: 68601 - DNA, 25 bp, Probe Sequence
cagaattggcttcatagaggaggtg

SEQ ID NO: 68602 - DNA, 25 bp, Probe Sequence
gaatctctccaagtcccaatttgta

SEQ ID NO: 68603 - DNA, 25 bp, Probe Sequence
ctcactctaaagataacctgaaggg

SEQ ID NO: 68604 - DNA, 25 bp, Probe Sequence
agaattggcttcatagaggaggtga

SEQ ID NO: 68605 - DNA, 25 bp, Probe Sequence
tctcactctaaagataacctgaagg

SEQ ID NO: 68606 - DNA, 25 bp, Probe Sequence
cacctttctgtctaaatgcgaatga

SEQ ID NO: 68607 - DNA, 25 bp, Probe Sequence
acagaattggcttcatagaggaggt

SEQ ID NO: 68608 - DNA, 25 bp, Probe Sequence
ctacgatcttgggtggagtttaatg

SEQ ID NO: 68609 - DNA, 25 bp, Probe Sequence
tatctttgatgaaacgagggctgat

SEQ ID NO: 68610 - DNA, 25 bp, Probe Sequence
aatctctccaagtcccaatttgtac

SEQ ID NO: 68611 - DNA, 25 bp, Probe Sequence
atatctttgatgaaacgagggctga

SEQ ID NO: 68612 - DNA, 25 bp, Probe Sequence
caagagtgtgaagatgatgacgcaa

SEQ ID NO: 68613 - DNA, 25 bp, Probe Sequence
cctggaagacagctatgatctcaat

SEQ ID NO: 68614 - DNA, 25 bp, Probe Sequence
tacaagacatgggcattacggatat

SEQ ID NO: 68615 - DNA, 25 bp, Probe Sequence
aaacaagagtgtgaagatgatgacg

SEQ ID NO: 68616 - DNA, 25 bp, Probe Sequence
ctcataccaacacgatcctattctg

SEQ ID NO: 68617 - DNA, 25 bp, Probe Sequence
actcataccaacacgatcctattct

SEQ ID NO: 68618 - DNA, 25 bp, Probe Sequence
cactcataccaacacgatcctattc

SEQ ID NO: 68619 - DNA, 25 bp, Probe Sequence
ttataaggcacactcataccaacac

SEQ ID NO: 68620 - DNA, 25 bp, Probe Sequence
acactcataccaacacgatcctatt

SEQ ID NO: 68621 - DNA, 25 bp, Probe Sequence
tataaggcacactcataccaacacg

SEQ ID NO: 68622 - DNA, 25 bp, Probe Sequence
cacactcataccaacacgatcctat

SEQ ID NO: 68623 - DNA, 25 bp, Probe Sequence
tcataccaacacgatcctattctgt

SEQ ID NO: 68624 - DNA, 25 bp, Probe Sequence
gacaagctcttctaacatgatggaa

SEQ ID NO: 68625 - DNA, 25 bp, Probe Sequence
cataccaacacgatcctattctgtg

SEQ ID NO: 68626 - DNA, 25 bp, Probe Sequence
gtggacaagctcttctaacatgatg

SEQ ID NO: 68627 - DNA, 25 bp, Probe Sequence
agtggacaagctcttctaacatgat

SEQ ID NO: 68628 - DNA, 25 bp, Probe Sequence
catgattattctgcttccagtaggc

SEQ ID NO: 68629 - DNA, 25 bp, Probe Sequence
tgatggaaagagaagttgaagtaca

SEQ ID NO: 68630 - DNA, 25 bp, Probe Sequence
gatggaaagagaagttgaagtacac

SEQ ID NO: 68631 - DNA, 25 bp, Probe Sequence
atggaaagagaagttgaagtacacc

SEQ ID NO: 68632 - DNA, 25 bp, Probe Sequence
atgagtggacaagctcttctaacat

SEQ ID NO: 68633 - DNA, 25 bp, Probe Sequence
ggacaagctcttctaacatgatgga

SEQ ID NO: 68634 - DNA, 25 bp, Probe Sequence
acatgatggaaagagaagttgaagt

SEQ ID NO: 68635 - DNA, 25 bp, Probe Sequence
atgatggaaagagaagttgaagtac

SEQ ID NO: 68636 - DNA, 25 bp, Probe Sequence
tttataaggcacactcataccaaca

SEQ ID NO: 68637 - DNA, 25 bp, Probe Sequence
tggacaagctcttctaacatgatgg

SEQ ID NO: 68638 - DNA, 25 bp, Probe Sequence
ataccaacacgatcctattctgtgg

SEQ ID NO: 68639 - DNA, 25 bp, Probe Sequence
aacatgatggaaagagaagttgaag

SEQ ID NO: 68640 - DNA, 25 bp, Probe Sequence
attaacaagatatcatcaacggagc

SEQ ID NO: 68641 - DNA, 25 bp, Probe Sequence
ttaacaagatatcatcaacggagcc

SEQ ID NO: 68642 - DNA, 25 bp, Probe Sequence
ccattaacaagatatcatcaacgga

SEQ ID NO: 68643 - DNA, 25 bp, Probe Sequence
cattaacaagatatcatcaacggag

SEQ ID NO: 68644 - DNA, 25 bp, Probe Sequence
cccattaacaagatatcatcaacgg

SEQ ID NO: 68645 - DNA, 25 bp, Probe Sequence
tcccattaacaagatatcatcaacg

SEQ ID NO: 68646 - DNA, 25 bp, Probe Sequence
caacctggagaagacctgagacatc

SEQ ID NO: 68647 - DNA, 25 bp, Probe Sequence
ccctacatcccattaacaagatatc

SEQ ID NO: 68648 - DNA, 25 bp, Probe Sequence
cccctacatcccattaacaagatat

SEQ ID NO: 68649 - DNA, 25 bp, Probe Sequence
acccctacatcccattaacaagata

SEQ ID NO: 68650 - DNA, 25 bp, Probe Sequence
aatctgaacccctacatcccattaa

SEQ ID NO: 68651 - DNA, 25 bp, Probe Sequence
cctacatcccattaacaagatatca

SEQ ID NO: 68652 - DNA, 25 bp, Probe Sequence
aacccctacatcccattaacaagat

SEQ ID NO: 68653 - DNA, 25 bp, Probe Sequence
acatcccattaacaagatatcatca

SEQ ID NO: 68654 - DNA, 25 bp, Probe Sequence
caatctgaacccctacatcccatta

SEQ ID NO: 68655 - DNA, 25 bp, Probe Sequence
taacaagatatcatcaacggagccc

SEQ ID NO: 68656 - DNA, 25 bp, Probe Sequence
atctgaacccctacatcccattaac

SEQ ID NO: 68657 - DNA, 25 bp, Probe Sequence
gaacccctacatcccattaacaaga

SEQ ID NO: 68658 - DNA, 25 bp, Probe Sequence
tgaacccctacatcccattaacaag

SEQ ID NO: 68659 - DNA, 25 bp, Probe Sequence
ctgaacccctacatcccattaacaa

SEQ ID NO: 68660 - DNA, 25 bp, Probe Sequence
atcccattaacaagatatcatcaac

SEQ ID NO: 68661 - DNA, 25 bp, Probe Sequence
catcccattaacaagatatcatcaa

SEQ ID NO: 68662 - DNA, 25 bp, Probe Sequence
tctgaacccctacatcccattaaca

SEQ ID NO: 68663 - DNA, 25 bp, Probe Sequence
acaatctgaacccctacatcccatt

SEQ ID NO: 68664 - DNA, 25 bp, Probe Sequence
caaatatacaatgaccacccttctt

SEQ ID NO: 68665 - DNA, 25 bp, Probe Sequence
aaatatacaatgaccacccttcttc

SEQ ID NO: 68666 - DNA, 25 bp, Probe Sequence
tatacaatgaccacccttcttcaaa

SEQ ID NO: 68667 - DNA, 25 bp, Probe Sequence
atatacaatgaccacccttcttcaa

SEQ ID NO: 68668 - DNA, 25 bp, Probe Sequence
aatatacaatgaccacccttcttca

SEQ ID NO: 68669 - DNA, 25 bp, Probe Sequence
tcaaatatacaatgaccacccttct

SEQ ID NO: 68670 - DNA, 25 bp, Probe Sequence
ccttcaaatatacaatgaccaccct

SEQ ID NO: 68671 - DNA, 25 bp, Probe Sequence
tccttcaaatatacaatgaccaccc

SEQ ID NO: 68672 - DNA, 25 bp, Probe Sequence
ttcaaatatacaatgaccacccttc

SEQ ID NO: 68673 - DNA, 25 bp, Probe Sequence
cttcaaatatacaatgaccaccctt

SEQ ID NO: 68674 - DNA, 25 bp, Probe Sequence
gtccttcaaatatacaatgaccacc

SEQ ID NO: 68675 - DNA, 25 bp, Probe Sequence
caactcagtgtccttcaaatataca

SEQ ID NO: 68676 - DNA, 25 bp, Probe Sequence
acaactcagtgtccttcaaatatac

SEQ ID NO: 68677 - DNA, 25 bp, Probe Sequence
tgtccttcaaatatacaatgaccac

SEQ ID NO: 68678 - DNA, 25 bp, Probe Sequence
gtgtccttcaaatatacaatgacca

SEQ ID NO: 68679 - DNA, 25 bp, Probe Sequence
agtgtccttcaaatatacaatgacc

SEQ ID NO: 68680 - DNA, 25 bp, Probe Sequence
ccacaactcagtgtccttcaaatat

SEQ ID NO: 68681 - DNA, 25 bp, Probe Sequence
cacaactcagtgtccttcaaatata

SEQ ID NO: 68682 - DNA, 25 bp, Probe Sequence
aactcagtgtccttcaaatatacaa

SEQ ID NO: 68683 - DNA, 25 bp, Probe Sequence
tacagtctcaggacaacttagcctc

SEQ ID NO: 68684 - DNA, 25 bp, Probe Sequence
tcagtgtccttcaaatatacaatga

SEQ ID NO: 68685 - DNA, 25 bp, Probe Sequence
actcagtgtccttcaaatatacaat

SEQ ID NO: 68686 - DNA, 25 bp, Probe Sequence
cagtgtccttcaaatatacaatgac

SEQ ID NO: 68687 - DNA, 25 bp, Probe Sequence
ctcagtgtccttcaaatatacaatg

SEQ ID NO: 68688 - DNA, 25 bp, Probe Sequence
aggattactctgaacaatgacatca

SEQ ID NO: 68689 - DNA, 25 bp, Probe Sequence
acaggattactctgaacaatgacat

SEQ ID NO: 68690 - DNA, 25 bp, Probe Sequence
aacaggattactctgaacaatgaca

SEQ ID NO: 68691 - DNA, 25 bp, Probe Sequence
caacaggattactctgaacaatgac

SEQ ID NO: 68692 - DNA, 25 bp, Probe Sequence
acaacaggattactctgaacaatga

SEQ ID NO: 68693 - DNA, 25 bp, Probe Sequence
caggattactctgaacaatgacatc

SEQ ID NO: 68694 - DNA, 25 bp, Probe Sequence
attactctgaacaatgacatcatgc

SEQ ID NO: 68695 - DNA, 25 bp, Probe Sequence
ggattactctgaacaatgacatcat

SEQ ID NO: 68696 - DNA, 25 bp, Probe Sequence
ttactctgaacaatgacatcatgct

SEQ ID NO: 68697 - DNA, 25 bp, Probe Sequence
tacaacaggattactctgaacaatg

SEQ ID NO: 68698 - DNA, 25 bp, Probe Sequence
aagattaccagcaagatgttctgtg

SEQ ID NO: 68699 - DNA, 25 bp, Probe Sequence
tactctgaacaatgacatcatgctg

SEQ ID NO: 68700 - DNA, 25 bp, Probe Sequence
aatacaacaggattactctgaacaa

SEQ ID NO: 68701 - DNA, 25 bp, Probe Sequence
atacaacaggattactctgaacaat

SEQ ID NO: 68702 - DNA, 25 bp, Probe Sequence
gattactctgaacaatgacatcatg

SEQ ID NO: 68703 - DNA, 25 bp, Probe Sequence
agattaccagcaagatgttctgtgt

SEQ ID NO: 68704 - DNA, 25 bp, Probe Sequence
actctgaacaatgacatcatgctga

SEQ ID NO: 68705 - DNA, 25 bp, Probe Sequence
ttaaagattaccagcaagatgttct

SEQ ID NO: 68706 - DNA, 25 bp, Probe Sequence
cccaaatacaacaggattactctga

SEQ ID NO: 68707 - DNA, 25 bp, Probe Sequence
aaagattaccagcaagatgttctgt

SEQ ID NO: 68708 - DNA, 25 bp, Probe Sequence
taaagattaccagcaagatgttctg

SEQ ID NO: 68709 - DNA, 25 bp, Probe Sequence
ccaaatacaacaggattactctgaa

SEQ ID NO: 68710 - DNA, 25 bp, Probe Sequence
tctgaacaatgacatcatgctgatc

SEQ ID NO: 68711 - DNA, 25 bp, Probe Sequence
ctctgaacaatgacatcatgctgat

SEQ ID NO: 68712 - DNA, 25 bp, Probe Sequence
tacaggaccttagggactttctact

SEQ ID NO: 68713 - DNA, 25 bp, Probe Sequence
gtacaggaccttagggactttctac

SEQ ID NO: 68714 - DNA, 25 bp, Probe Sequence
caggaccttagggactttctacttg

SEQ ID NO: 68715 - DNA, 25 bp, Probe Sequence
acaggaccttagggactttctactt

SEQ ID NO: 68716 - DNA, 25 bp, Probe Sequence
agtacaggaccttagggactttcta

SEQ ID NO: 68717 - DNA, 25 bp, Probe Sequence
cataatgcccagtacaggaccttag

SEQ ID NO: 68718 - DNA, 25 bp, Probe Sequence
cttagggactttctacttggcagta

SEQ ID NO: 68719 - DNA, 25 bp, Probe Sequence
aggaccttagggactttctacttgg

SEQ ID NO: 68720 - DNA, 25 bp, Probe Sequence
cagatacatcaatgggcgtggatag

SEQ ID NO: 68721 - DNA, 25 bp, Probe Sequence
ttagggactttctacttggcagtac

SEQ ID NO: 68722 - DNA, 25 bp, Probe Sequence
cagtacaggaccttagggactttct

SEQ ID NO: 68723 - DNA, 25 bp, Probe Sequence
atatagcaagaccccacctctaaaa

SEQ ID NO: 68724 - DNA, 25 bp, Probe Sequence
ataatgcccagtacaggaccttagg

SEQ ID NO: 68725 - DNA, 25 bp, Probe Sequence
tatatagcaagaccccacctctaaa

SEQ ID NO: 68726 - DNA, 25 bp, Probe Sequence
aatcggttttggcagatacatcaat

SEQ ID NO: 68727 - DNA, 25 bp, Probe Sequence
atatatagcaagaccccacctctaa

SEQ ID NO: 68728 - DNA, 25 bp, Probe Sequence
tagggactttctacttggcagtaca

SEQ ID NO: 68729 - DNA, 25 bp, Probe Sequence
accttagggactttctacttggcag

SEQ ID NO: 68730 - DNA, 25 bp, Probe Sequence
gaccttagggactttctacttggca

SEQ ID NO: 68731 - DNA, 25 bp, Probe Sequence
atcggttttggcagatacatcaatg

SEQ ID NO: 68732 - DNA, 25 bp, Probe Sequence
gaatcggttttggcagatacatcaa

SEQ ID NO: 68733 - DNA, 25 bp, Probe Sequence
ccttagggactttctacttggcagt

SEQ ID NO: 68734 - DNA, 25 bp, Probe Sequence
gtgaatcggttttggcagatacatc

SEQ ID NO: 68735 - DNA, 25 bp, Probe Sequence
agggactttctacttggcagtacat

SEQ ID NO: 68736 - DNA, 25 bp, Probe Sequence
cttacttgctacctccacttgaata

SEQ ID NO: 68737 - DNA, 25 bp, Probe Sequence
tacttgctacctccacttgaatatc

SEQ ID NO: 68738 - DNA, 25 bp, Probe Sequence
cttgctacctccacttgaatatcta

SEQ ID NO: 68739 - DNA, 25 bp, Probe Sequence
ttacttgctacctccacttgaatat

SEQ ID NO: 68740 - DNA, 25 bp, Probe Sequence
ttgctacctccacttgaatatctaa

SEQ ID NO: 68741 - DNA, 25 bp, Probe Sequence
tgctacctccacttgaatatctaat

SEQ ID NO: 68742 - DNA, 25 bp, Probe Sequence
acttgctacctccacttgaatatct

SEQ ID NO: 68743 - DNA, 25 bp, Probe Sequence
ttcagttcatagatgccttcctctc

SEQ ID NO: 68744 - DNA, 25 bp, Probe Sequence
gttcagttcatagatgccttcctct

SEQ ID NO: 68745 - DNA, 25 bp, Probe Sequence
gctacctccacttgaatatctaata

SEQ ID NO: 68746 - DNA, 25 bp, Probe Sequence
cagttcatagatgccttcctctcag

SEQ ID NO: 68747 - DNA, 25 bp, Probe Sequence
agttcatagatgccttcctctcaga

SEQ ID NO: 68748 - DNA, 25 bp, Probe Sequence
gcttacttgctacctccacttgaat

SEQ ID NO: 68749 - DNA, 25 bp, Probe Sequence
atttctatctccaactttgcctctt

SEQ ID NO: 68750 - DNA, 25 bp, Probe Sequence
tttctatctccaactttgcctcttt

SEQ ID NO: 68751 - DNA, 25 bp, Probe Sequence
actccaaggttcagttcatagatgc

SEQ ID NO: 68752 - DNA, 25 bp, Probe Sequence
aatttctatctccaactttgcctct

SEQ ID NO: 68753 - DNA, 25 bp, Probe Sequence
tcagttcatagatgccttcctctca

SEQ ID NO: 68754 - DNA, 25 bp, Probe Sequence
ggttcagttcatagatgccttcctc

SEQ ID NO: 68755 - DNA, 25 bp, Probe Sequence
ttctatctccaactttgcctctttc

SEQ ID NO: 68756 - DNA, 25 bp, Probe Sequence
cctccacttgaatatctaatagaca

SEQ ID NO: 68757 - DNA, 25 bp, Probe Sequence
acctccacttgaatatctaatagac

SEQ ID NO: 68758 - DNA, 25 bp, Probe Sequence
cctctttcctcaactacagacttat

SEQ ID NO: 68759 - DNA, 25 bp, Probe Sequence
ttcattggctagtttctctctcatc

SEQ ID NO: 68760 - DNA, 25 bp, Probe Sequence
agttgttgagtaagtgaatgaatga

SEQ ID NO: 68761 - DNA, 25 bp, Probe Sequence
tgatgtgtcaatactggcttatgaa

SEQ ID NO: 68762 - DNA, 25 bp, Probe Sequence
atgatgtgtcaatactggcttatga

SEQ ID NO: 68763 - DNA, 25 bp, Probe Sequence
agttaatgatgtgtcaatactggct

SEQ ID NO: 68764 - DNA, 25 bp, Probe Sequence
gttaatgatgtgtcaatactggctt

SEQ ID NO: 68765 - DNA, 25 bp, Probe Sequence
tgagaagtgaatgactatatgctgt

SEQ ID NO: 68766 - DNA, 25 bp, Probe Sequence
aatgatgtgtcaatactggcttatg

SEQ ID NO: 68767 - DNA, 25 bp, Probe Sequence
gatgtgtcaatactggcttatgaat

SEQ ID NO: 68768 - DNA, 25 bp, Probe Sequence
tagttaatgatgtgtcaatactggc

SEQ ID NO: 68769 - DNA, 25 bp, Probe Sequence
gttgttgagtaagtgaatgaatgaa

SEQ ID NO: 68770 - DNA, 25 bp, Probe Sequence
atgtgtcaatactggcttatgaatt

SEQ ID NO: 68771 - DNA, 25 bp, Probe Sequence
ttgagaagtgaatgactatatgctg

SEQ ID NO: 68772 - DNA, 25 bp, Probe Sequence
aagttgttgagtaagtgaatgaatg

SEQ ID NO: 68773 - DNA, 25 bp, Probe Sequence
ttaatgatgtgtcaatactggctta

SEQ ID NO: 68774 - DNA, 25 bp, Probe Sequence
tgtgtcaatactggcttatgaatta

SEQ ID NO: 68775 - DNA, 25 bp, Probe Sequence
taatgatgtgtcaatactggcttat

SEQ ID NO: 68776 - DNA, 25 bp, Probe Sequence
gagaagtgaatgactatatgctgta

SEQ ID NO: 68777 - DNA, 25 bp, Probe Sequence
gaatgtataacacagagagtgaact

SEQ ID NO: 68778 - DNA, 25 bp, Probe Sequence
agaatgtataacacagagagtgaac

SEQ ID NO: 68779 - DNA, 25 bp, Probe Sequence
ttgttgagtaagtgaatgaatgaat

SEQ ID NO: 68780 - DNA, 25 bp, Probe Sequence
tgatatttgcccagatgagttgaaa

SEQ ID NO: 68781 - DNA, 25 bp, Probe Sequence
ttgatatttgcccagatgagttgaa

SEQ ID NO: 68782 - DNA, 25 bp, Probe Sequence
ccatagaatgtataacacagagagt

SEQ ID NO: 68783 - DNA, 25 bp, Probe Sequence
agaagtgaatgactatatgctgtat

SEQ ID NO: 68784 - DNA, 25 bp, Probe Sequence
cagtgatagttgataagagttgtgt

SEQ ID NO: 68785 - DNA, 25 bp, Probe Sequence
tggtacagtgatagttgataagagt

SEQ ID NO: 68786 - DNA, 25 bp, Probe Sequence
gatattggtccatgattgaatgtgc

SEQ ID NO: 68787 - DNA, 25 bp, Probe Sequence
agatattggtccatgattgaatgtg

SEQ ID NO: 68788 - DNA, 25 bp, Probe Sequence
cagatattggtccatgattgaatgt

SEQ ID NO: 68789 - DNA, 25 bp, Probe Sequence
acagtgatagttgataagagttgtg

SEQ ID NO: 68790 - DNA, 25 bp, Probe Sequence
gaatgtaacctggaagtcatggaag

SEQ ID NO: 68791 - DNA, 25 bp, Probe Sequence
tcagatattggtccatgattgaatg

SEQ ID NO: 68792 - DNA, 25 bp, Probe Sequence
aatgtaacctggaagtcatggaaga

SEQ ID NO: 68793 - DNA, 25 bp, Probe Sequence
ggtacagtgatagttgataagagtt

SEQ ID NO: 68794 - DNA, 25 bp, Probe Sequence
gagatactagctgtgaatcaatgtt

SEQ ID NO: 68795 - DNA, 25 bp, Probe Sequence
tgagatactagctgtgaatcaatgt

SEQ ID NO: 68796 - DNA, 25 bp, Probe Sequence
atggactaagagaaagaacacagag

SEQ ID NO: 68797 - DNA, 25 bp, Probe Sequence
agtgatagttgataagagttgtgta

SEQ ID NO: 68798 - DNA, 25 bp, Probe Sequence
attagtggtttgagaaatgatacgc

SEQ ID NO: 68799 - DNA, 25 bp, Probe Sequence
agatactagctgtgaatcaatgttc

SEQ ID NO: 68800 - DNA, 25 bp, Probe Sequence
ttagtggtttgagaaatgatacgca

SEQ ID NO: 68801 - DNA, 25 bp, Probe Sequence
gtatgtcagtaggtatcacgtcatg

SEQ ID NO: 68802 - DNA, 25 bp, Probe Sequence
agtatgtcagtaggtatcacgtcat

SEQ ID NO: 68803 - DNA, 25 bp, Probe Sequence
ggaaggatatttctggagtgtcaat

SEQ ID NO: 68804 - DNA, 25 bp, Probe Sequence
taagagtttgccttcattagtggtt

SEQ ID NO: 68805 - DNA, 25 bp, Probe Sequence
ctggtacagtgatagttgataagag

SEQ ID NO: 68806 - DNA, 25 bp, Probe Sequence
taggaaggatatttctggagtgtca

SEQ ID NO: 68807 - DNA, 25 bp, Probe Sequence
ttaagagtttgccttcattagtggt

SEQ ID NO: 68808 - DNA, 25 bp, Probe Sequence
ggttccttgtacgattgtagatact

SEQ ID NO: 68809 - DNA, 25 bp, Probe Sequence
aggttccttgtacgattgtagatac

SEQ ID NO: 68810 - DNA, 25 bp, Probe Sequence
gaggttccttgtacgattgtagata

SEQ ID NO: 68811 - DNA, 25 bp, Probe Sequence
tgaggttccttgtacgattgtagat

SEQ ID NO: 68812 - DNA, 25 bp, Probe Sequence
ttgaggttccttgtacgattgtaga

SEQ ID NO: 68813 - DNA, 25 bp, Probe Sequence
gttccttgtacgattgtagatacta

SEQ ID NO: 68814 - DNA, 25 bp, Probe Sequence
ttccttgtacgattgtagatactag

SEQ ID NO: 68815 - DNA, 25 bp, Probe Sequence
ttaactctgctgattgtttctgttg

SEQ ID NO: 68816 - DNA, 25 bp, Probe Sequence
tttctttgaggttccttgtacgatt

SEQ ID NO: 68817 - DNA, 25 bp, Probe Sequence
tttgaggttccttgtacgattgtag

SEQ ID NO: 68818 - DNA, 25 bp, Probe Sequence
ctttgaggttccttgtacgattgta

SEQ ID NO: 68819 - DNA, 25 bp, Probe Sequence
taactctgctgattgtttctgttgg

SEQ ID NO: 68820 - DNA, 25 bp, Probe Sequence
ttctttgaggttccttgtacgattg

SEQ ID NO: 68821 - DNA, 25 bp, Probe Sequence
gtttctttgaggttccttgtacgat

SEQ ID NO: 68822 - DNA, 25 bp, Probe Sequence
aagtttctttgaggttccttgtacg

SEQ ID NO: 68823 - DNA, 25 bp, Probe Sequence
ttgtctgttaactctgctgattgtt

SEQ ID NO: 68824 - DNA, 25 bp, Probe Sequence
atatgtcctttccgcaattaccctt

SEQ ID NO: 68825 - DNA, 25 bp, Probe Sequence
tatgtcctttccgcaattacccttt

SEQ ID NO: 68826 - DNA, 25 bp, Probe Sequence
tctttgaggttccttgtacgattgt

SEQ ID NO: 68827 - DNA, 25 bp, Probe Sequence
agtttctttgaggttccttgtacga

SEQ ID NO: 68828 - DNA, 25 bp, Probe Sequence
gttgtctgttaactctgctgattgt

SEQ ID NO: 68829 - DNA, 25 bp, Probe Sequence
tccttgtacgattgtagatactagt

SEQ ID NO: 68830 - DNA, 25 bp, Probe Sequence
cttgtacgattgtagatactagtcc

SEQ ID NO: 68831 - DNA, 25 bp, Probe Sequence
ccttgtacgattgtagatactagtc

SEQ ID NO: 68832 - DNA, 25 bp, Probe Sequence
agcatggttgttagaagtctgtaag

SEQ ID NO: 68833 - DNA, 25 bp, Probe Sequence
gtatctactgtattcgtccagagac

SEQ ID NO: 68834 - DNA, 25 bp, Probe Sequence
tgtatctactgtattcgtccagaga

SEQ ID NO: 68835 - DNA, 25 bp, Probe Sequence
gtgtatctactgtattcgtccagag

SEQ ID NO: 68836 - DNA, 25 bp, Probe Sequence
ttgtgtatctactgtattcgtccag

SEQ ID NO: 68837 - DNA, 25 bp, Probe Sequence
actgtattcgtccagagacctatta

SEQ ID NO: 68838 - DNA, 25 bp, Probe Sequence
tactgtattcgtccagagacctatt

SEQ ID NO: 68839 - DNA, 25 bp, Probe Sequence
catggttgttagaagtctgtaagtt

SEQ ID NO: 68840 - DNA, 25 bp, Probe Sequence
gcatggttgttagaagtctgtaagt

SEQ ID NO: 68841 - DNA, 25 bp, Probe Sequence
tgtattcgtccagagacctattatg

SEQ ID NO: 68842 - DNA, 25 bp, Probe Sequence
tgtgtatctactgtattcgtccaga

SEQ ID NO: 68843 - DNA, 25 bp, Probe Sequence
ctactgtattcgtccagagacctat

SEQ ID NO: 68844 - DNA, 25 bp, Probe Sequence
tatctactgtattcgtccagagacc

SEQ ID NO: 68845 - DNA, 25 bp, Probe Sequence
gtattcgtccagagacctattatga

SEQ ID NO: 68846 - DNA, 25 bp, Probe Sequence
ctgtattcgtccagagacctattat

SEQ ID NO: 68847 - DNA, 25 bp, Probe Sequence
tattcgtccagagacctattatgag

SEQ ID NO: 68848 - DNA, 25 bp, Probe Sequence
attcgtccagagacctattatgagg

SEQ ID NO: 68849 - DNA, 25 bp, Probe Sequence
tctactgtattcgtccagagaccta

SEQ ID NO: 68850 - DNA, 25 bp, Probe Sequence
cagcatggttgttagaagtctgtaa

SEQ ID NO: 68851 - DNA, 25 bp, Probe Sequence
aacaacacaggaagagaaataatgg

SEQ ID NO: 68852 - DNA, 25 bp, Probe Sequence
tttgtgtatctactgtattcgtcca

SEQ ID NO: 68853 - DNA, 25 bp, Probe Sequence
atctactgtattcgtccagagacct

SEQ ID NO: 68854 - DNA, 25 bp, Probe Sequence
gtttgtgtatctactgtattcgtcc

SEQ ID NO: 68855 - DNA, 25 bp, Probe Sequence
aagagaaataatgggttggctgaaa

SEQ ID NO: 68856 - DNA, 25 bp, Probe Sequence
aggagataggataggagagagtagt

SEQ ID NO: 68857 - DNA, 25 bp, Probe Sequence
agaggagataggataggagagagta

SEQ ID NO: 68858 - DNA, 25 bp, Probe Sequence
tagaggagataggataggagagagt

SEQ ID NO: 68859 - DNA, 25 bp, Probe Sequence
gaggagataggataggagagagtag

SEQ ID NO: 68860 - DNA, 25 bp, Probe Sequence
ggagataggataggagagagtagtt

SEQ ID NO: 68861 - DNA, 25 bp, Probe Sequence
ttgcttgtgtaaggctactatatga

SEQ ID NO: 68862 - DNA, 25 bp, Probe Sequence
actattgcttgtgtaaggctactat

SEQ ID NO: 68863 - DNA, 25 bp, Probe Sequence
tgcttgtgtaaggctactatatgat

SEQ ID NO: 68864 - DNA, 25 bp, Probe Sequence
ttagaggagataggataggagagag

SEQ ID NO: 68865 - DNA, 25 bp, Probe Sequence
attgcttgtgtaaggctactatatg

SEQ ID NO: 68866 - DNA, 25 bp, Probe Sequence
gtgtcttaatccagtctatcattgt

SEQ ID NO: 68867 - DNA, 25 bp, Probe Sequence
agagtgtcttaatccagtctatcat

SEQ ID NO: 68868 - DNA, 25 bp, Probe Sequence
agtgtcttaatccagtctatcattg

SEQ ID NO: 68869 - DNA, 25 bp, Probe Sequence
gagtgtcttaatccagtctatcatt

SEQ ID NO: 68870 - DNA, 25 bp, Probe Sequence
aggataggagagagtagttaatgtt

SEQ ID NO: 68871 - DNA, 25 bp, Probe Sequence
ctattgcttgtgtaaggctactata

SEQ ID NO: 68872 - DNA, 25 bp, Probe Sequence
aactgaagatattcgttcgtacatg

SEQ ID NO: 68873 - DNA, 25 bp, Probe Sequence
cactattgcttgtgtaaggctacta

SEQ ID NO: 68874 - DNA, 25 bp, Probe Sequence
tgtcttaatccagtctatcattgtt

SEQ ID NO: 68875 - DNA, 25 bp, Probe Sequence
gcttgtgtaaggctactatatgata

SEQ ID NO: 68876 - DNA, 25 bp, Probe Sequence
gtcttaatccagtctatcattgttg

SEQ ID NO: 68877 - DNA, 25 bp, Probe Sequence
ttaactgaagatattcgttcgtaca

SEQ ID NO: 68878 - DNA, 25 bp, Probe Sequence
taactgaagatattcgttcgtacat

SEQ ID NO: 68879 - DNA, 25 bp, Probe Sequence
tattgcttgtgtaaggctactatat

SEQ ID NO: 68880 - DNA, 25 bp, Probe Sequence
ggaattatatagtggtgatggttgc

SEQ ID NO: 68881 - DNA, 25 bp, Probe Sequence
gcatgtggctatctaattgttctaa

SEQ ID NO: 68882 - DNA, 25 bp, Probe Sequence
tggaattatatagtggtgatggttg

SEQ ID NO: 68883 - DNA, 25 bp, Probe Sequence
ttggaattatatagtggtgatggtt

SEQ ID NO: 68884 - DNA, 25 bp, Probe Sequence
tgcatgtggctatctaattgttcta

SEQ ID NO: 68885 - DNA, 25 bp, Probe Sequence
ttatatagtggtgatggttgcagaa

SEQ ID NO: 68886 - DNA, 25 bp, Probe Sequence
attatatagtggtgatggttgcaga

SEQ ID NO: 68887 - DNA, 25 bp, Probe Sequence
ttgcagaacttcgtgaatgtattaa

SEQ ID NO: 68888 - DNA, 25 bp, Probe Sequence
catgtggctatctaattgttctaac

SEQ ID NO: 68889 - DNA, 25 bp, Probe Sequence
ttgcatgtggctatctaattgttct

SEQ ID NO: 68890 - DNA, 25 bp, Probe Sequence
tgtggctatctaattgttctaacac

SEQ ID NO: 68891 - DNA, 25 bp, Probe Sequence
gttgcagaacttcgtgaatgtatta

SEQ ID NO: 68892 - DNA, 25 bp, Probe Sequence
tatatagtggtgatggttgcagaac

SEQ ID NO: 68893 - DNA, 25 bp, Probe Sequence
aattatatagtggtgatggttgcag

SEQ ID NO: 68894 - DNA, 25 bp, Probe Sequence
gaattatatagtggtgatggttgca

SEQ ID NO: 68895 - DNA, 25 bp, Probe Sequence
tgaggtccataaagatttactgcta

SEQ ID NO: 68896 - DNA, 25 bp, Probe Sequence
atgaggtccataaagatttactgct

SEQ ID NO: 68897 - DNA, 25 bp, Probe Sequence
gtggctatctaattgttctaacact

SEQ ID NO: 68898 - DNA, 25 bp, Probe Sequence
atgtggctatctaattgttctaaca

SEQ ID NO: 68899 - DNA, 25 bp, Probe Sequence
ctttatctattcaatggtcttggca

SEQ ID NO: 68900 - DNA, 25 bp, Probe Sequence
tttaatccattgtcagtatttgtgc

SEQ ID NO: 68901 - DNA, 25 bp, Probe Sequence
tctttatctattcaatggtcttggc

SEQ ID NO: 68902 - DNA, 25 bp, Probe Sequence
ttatctattcaatggtcttggcatt

SEQ ID NO: 68903 - DNA, 25 bp, Probe Sequence
gaggtccataaagatttactgctat

SEQ ID NO: 68904 - DNA, 25 bp, Probe Sequence
acactggacttctggactacatata

SEQ ID NO: 68905 - DNA, 25 bp, Probe Sequence
cactggacttctggactacatatag

SEQ ID NO: 68906 - DNA, 25 bp, Probe Sequence
actggacttctggactacatataga

SEQ ID NO: 68907 - DNA, 25 bp, Probe Sequence
cacactggacttctggactacatat

SEQ ID NO: 68908 - DNA, 25 bp, Probe Sequence
acctcatcacctcacttaaacaatt

SEQ ID NO: 68909 - DNA, 25 bp, Probe Sequence
gacctcatcacctcacttaaacaat

SEQ ID NO: 68910 - DNA, 25 bp, Probe Sequence
cctcatcacctcacttaaacaatta

SEQ ID NO: 68911 - DNA, 25 bp, Probe Sequence
ttcatccataaatacttcagtgtgt

SEQ ID NO: 68912 - DNA, 25 bp, Probe Sequence
ctggacttctggactacatatagaa

SEQ ID NO: 68913 - DNA, 25 bp, Probe Sequence
aaatataagaaattagccaggcgtg

SEQ ID NO: 68914 - DNA, 25 bp, Probe Sequence
tgacctcatcacctcacttaaacaa

SEQ ID NO: 68915 - DNA, 25 bp, Probe Sequence
tgccataataccattattacctctt

SEQ ID NO: 68916 - DNA, 25 bp, Probe Sequence
ttgccataataccattattacctct

SEQ ID NO: 68917 - DNA, 25 bp, Probe Sequence
atgacctcatcacctcacttaaaca

SEQ ID NO: 68918 - DNA, 25 bp, Probe Sequence
tcatccataaatacttcagtgtgta

SEQ ID NO: 68919 - DNA, 25 bp, Probe Sequence
catgacctcatcacctcacttaaac

SEQ ID NO: 68920 - DNA, 25 bp, Probe Sequence
tttcatccataaatacttcagtgtg

SEQ ID NO: 68921 - DNA, 25 bp, Probe Sequence
gattagttaaccactcattgccaca

SEQ ID NO: 68922 - DNA, 25 bp, Probe Sequence
attagttaaccactcattgccacac

SEQ ID NO: 68923 - DNA, 25 bp, Probe Sequence
ctcatcacctcacttaaacaattat

SEQ ID NO: 68924 - DNA, 25 bp, Probe Sequence
ccacactggacttctggactacata

SEQ ID NO: 68925 - DNA, 25 bp, Probe Sequence
aatataagaaattagccaggcgtgg

SEQ ID NO: 68926 - DNA, 25 bp, Probe Sequence
attgccataataccattattacctc

SEQ ID NO: 68927 - DNA, 25 bp, Probe Sequence
ttagttaaccactcattgccacact

SEQ ID NO: 68928 - DNA, 25 bp, Probe Sequence
cagaggcacagatgtaaggtttata

SEQ ID NO: 68929 - DNA, 25 bp, Probe Sequence
ttcctaatctccttgtcatcccatt

SEQ ID NO: 68930 - DNA, 25 bp, Probe Sequence
tttcctaatctccttgtcatcccat

SEQ ID NO: 68931 - DNA, 25 bp, Probe Sequence
atttcctaatctccttgtcatccca

SEQ ID NO: 68932 - DNA, 25 bp, Probe Sequence
ctaatctccttgtcatcccattcaa

SEQ ID NO: 68933 - DNA, 25 bp, Probe Sequence
tcctaatctccttgtcatcccattc

SEQ ID NO: 68934 - DNA, 25 bp, Probe Sequence
cctaatctccttgtcatcccattca

SEQ ID NO: 68935 - DNA, 25 bp, Probe Sequence
gataaccatttcacacagggaacag

SEQ ID NO: 68936 - DNA, 25 bp, Probe Sequence
agaggcacagatgtaaggtttataa

SEQ ID NO: 68937 - DNA, 25 bp, Probe Sequence
aggcacagatgtaaggtttataact

SEQ ID NO: 68938 - DNA, 25 bp, Probe Sequence
gaggcacagatgtaaggtttataac

SEQ ID NO: 68939 - DNA, 25 bp, Probe Sequence
aggtttataactggaaataggtggt

SEQ ID NO: 68940 - DNA, 25 bp, Probe Sequence
ataactggaaataggtggtaagaaa

SEQ ID NO: 68941 - DNA, 25 bp, Probe Sequence
gatgaagcaccattctttgatctcc

SEQ ID NO: 68942 - DNA, 25 bp, Probe Sequence
aaggtttataactggaaataggtgg

SEQ ID NO: 68943 - DNA, 25 bp, Probe Sequence
gatttcctaatctccttgtcatccc

SEQ ID NO: 68944 - DNA, 25 bp, Probe Sequence
gcacagatgtaaggtttataactgg

SEQ ID NO: 68945 - DNA, 25 bp, Probe Sequence
ggcacagatgtaaggtttataactg

SEQ ID NO: 68946 - DNA, 25 bp, Probe Sequence
gcagaggcacagatgtaaggtttat

SEQ ID NO: 68947 - DNA, 25 bp, Probe Sequence
ttgtacttaaatggtatgcagaggc

SEQ ID NO: 68948 - DNA, 25 bp, Probe Sequence
attgtacttaaatggtatgcagagg

SEQ ID NO: 68949 - DNA, 25 bp, Probe Sequence
ggtttataactggaaataggtggta

SEQ ID NO: 68950 - DNA, 25 bp, Probe Sequence
attctttgatctccctttgccagtt

SEQ ID NO: 68951 - DNA, 25 bp, Probe Sequence
ggataaccatttcacacagggaaca

SEQ ID NO: 68952 - DNA, 25 bp, Probe Sequence
cacggttggtactacttctgattag

SEQ ID NO: 68953 - DNA, 25 bp, Probe Sequence
acggttggtactacttctgattagg

SEQ ID NO: 68954 - DNA, 25 bp, Probe Sequence
ggttggtactacttctgattaggca

SEQ ID NO: 68955 - DNA, 25 bp, Probe Sequence
gttggtactacttctgattaggcag

SEQ ID NO: 68956 - DNA, 25 bp, Probe Sequence
attaggcagattacaccacggattc

SEQ ID NO: 68957 - DNA, 25 bp, Probe Sequence
gattaggcagattacaccacggatt

SEQ ID NO: 68958 - DNA, 25 bp, Probe Sequence
gcacggttggtactacttctgatta

SEQ ID NO: 68959 - DNA, 25 bp, Probe Sequence
taaaggaaatgtgggtatctctcag

SEQ ID NO: 68960 - DNA, 25 bp, Probe Sequence
ctaaaggaaatgtgggtatctctca

SEQ ID NO: 68961 - DNA, 25 bp, Probe Sequence
tctaaaggaaatgtgggtatctctc

SEQ ID NO: 68962 - DNA, 25 bp, Probe Sequence
tctgtttgttctaaaggaaatgtgg

SEQ ID NO: 68963 - DNA, 25 bp, Probe Sequence
tgttctaaaggaaatgtgggtatct

SEQ ID NO: 68964 - DNA, 25 bp, Probe Sequence
ctgtttgttctaaaggaaatgtggg

SEQ ID NO: 68965 - DNA, 25 bp, Probe Sequence
gcagattacaccacggattccttaa

SEQ ID NO: 68966 - DNA, 25 bp, Probe Sequence
gtttgttctaaaggaaatgtgggta

SEQ ID NO: 68967 - DNA, 25 bp, Probe Sequence
gttctaaaggaaatgtgggtatctc

SEQ ID NO: 68968 - DNA, 25 bp, Probe Sequence
ttctaaaggaaatgtgggtatctct

SEQ ID NO: 68969 - DNA, 25 bp, Probe Sequence
ttgttctaaaggaaatgtgggtatc

SEQ ID NO: 68970 - DNA, 25 bp, Probe Sequence
tgtttgttctaaaggaaatgtgggt

SEQ ID NO: 68971 - DNA, 25 bp, Probe Sequence
cggttggtactacttctgattaggc

SEQ ID NO: 68972 - DNA, 25 bp, Probe Sequence
tttgttctaaaggaaatgtgggtat

SEQ ID NO: 68973 - DNA, 25 bp, Probe Sequence
agtgatccttgaaatggttattgtt

SEQ ID NO: 68974 - DNA, 25 bp, Probe Sequence
cagattacaccacggattccttaag

SEQ ID NO: 68975 - DNA, 25 bp, Probe Sequence
aaaggaaatgtgggtatctctcagg

SEQ ID NO: 68976 - DNA, 25 bp, Probe Sequence
tccatattctgtcaccatcaatcaa

SEQ ID NO: 68977 - DNA, 25 bp, Probe Sequence
tctccatattctgtcaccatcaatc

SEQ ID NO: 68978 - DNA, 25 bp, Probe Sequence
ccatattctgtcaccatcaatcaag

SEQ ID NO: 68979 - DNA, 25 bp, Probe Sequence
ttctccatattctgtcaccatcaat

SEQ ID NO: 68980 - DNA, 25 bp, Probe Sequence
cttctccatattctgtcaccatcaa

SEQ ID NO: 68981 - DNA, 25 bp, Probe Sequence
ctccatattctgtcaccatcaatca

SEQ ID NO: 68982 - DNA, 25 bp, Probe Sequence
aactgacacacttctccatattctg

SEQ ID NO: 68983 - DNA, 25 bp, Probe Sequence
cacttctccatattctgtcaccatc

SEQ ID NO: 68984 - DNA, 25 bp, Probe Sequence
gaactgacacacttctccatattct

SEQ ID NO: 68985 - DNA, 25 bp, Probe Sequence
cttcaagagaacttcaagagaactg

SEQ ID NO: 68986 - DNA, 25 bp, Probe Sequence
ccttcaagagaacttcaagagaact

SEQ ID NO: 68987 - DNA, 25 bp, Probe Sequence
tccttcaagagaacttcaagagaac

SEQ ID NO: 68988 - DNA, 25 bp, Probe Sequence
tgaactgacacacttctccatattc

SEQ ID NO: 68989 - DNA, 25 bp, Probe Sequence
ctgaactgacacacttctccatatt

SEQ ID NO: 68990 - DNA, 25 bp, Probe Sequence
ttcaagagaacttcaagagaactgg

SEQ ID NO: 68991 - DNA, 25 bp, Probe Sequence
acttctccatattctgtcaccatca

SEQ ID NO: 68992 - DNA, 25 bp, Probe Sequence
catattctgtcaccatcaatcaaga

SEQ ID NO: 68993 - DNA, 25 bp, Probe Sequence
ctccttcaagagaacttcaagagaa

SEQ ID NO: 68994 - DNA, 25 bp, Probe Sequence
tctgtcaccatcaatcaagaataca

SEQ ID NO: 68995 - DNA, 25 bp, Probe Sequence
ctgtcaccatcaatcaagaatacat

SEQ ID NO: 68996 - DNA, 25 bp, Probe Sequence
gtcaccatcaatcaagaatacatgc

SEQ ID NO: 68997 - DNA, 25 bp, Probe Sequence
cctgaactgacacacttctccatat

SEQ ID NO: 68998 - DNA, 25 bp, Probe Sequence
acacttctccatattctgtcaccat

SEQ ID NO: 68999 - DNA, 25 bp, Probe Sequence
actgacacacttctccatattctgt

SEQ ID NO: 69000 - DNA, 25 bp, Probe Sequence
tctctctgtaggaaccttatgactt

SEQ ID NO: 69001 - DNA, 25 bp, Probe Sequence
ttcttagttctgctctctctgtagg

SEQ ID NO: 69002 - DNA, 25 bp, Probe Sequence
ctctgtaggaaccttatgacttacg

SEQ ID NO: 69003 - DNA, 25 bp, Probe Sequence
tattatgccagaacttgcgtaagaa

SEQ ID NO: 69004 - DNA, 25 bp, Probe Sequence
cattgttctactgaggtaaggatgg

SEQ ID NO: 69005 - DNA, 25 bp, Probe Sequence
ctctctctgtaggaaccttatgact

SEQ ID NO: 69006 - DNA, 25 bp, Probe Sequence
gactattatgccagaacttgcgtaa

SEQ ID NO: 69007 - DNA, 25 bp, Probe Sequence
acctagactattatgccagaacttg

SEQ ID NO: 69008 - DNA, 25 bp, Probe Sequence
cacctagactattatgccagaactt

SEQ ID NO: 69009 - DNA, 25 bp, Probe Sequence
tcacctagactattatgccagaact

SEQ ID NO: 69010 - DNA, 25 bp, Probe Sequence
ctattatgccagaacttgcgtaaga

SEQ ID NO: 69011 - DNA, 25 bp, Probe Sequence
cttagttctgctctctctgtaggaa

SEQ ID NO: 69012 - DNA, 25 bp, Probe Sequence
tctctgtaggaaccttatgacttac

SEQ ID NO: 69013 - DNA, 25 bp, Probe Sequence
tcattgttctactgaggtaaggatg

SEQ ID NO: 69014 - DNA, 25 bp, Probe Sequence
actattatgccagaacttgcgtaag

SEQ ID NO: 69015 - DNA, 25 bp, Probe Sequence
ttcacctagactattatgccagaac

SEQ ID NO: 69016 - DNA, 25 bp, Probe Sequence
cattcacctagactattatgccaga

SEQ ID NO: 69017 - DNA, 25 bp, Probe Sequence
ctctctgtaggaaccttatgactta

SEQ ID NO: 69018 - DNA, 25 bp, Probe Sequence
cctagactattatgccagaacttgc

SEQ ID NO: 69019 - DNA, 25 bp, Probe Sequence
tcttagttctgctctctctgtagga

SEQ ID NO: 69020 - DNA, 25 bp, Probe Sequence
agactattatgccagaacttgcgta

SEQ ID NO: 69021 - DNA, 25 bp, Probe Sequence
tagactattatgccagaacttgcgt

SEQ ID NO: 69022 - DNA, 25 bp, Probe Sequence
ctagactattatgccagaacttgcg

SEQ ID NO: 69023 - DNA, 25 bp, Probe Sequence
attcacctagactattatgccagaa

SEQ ID NO: 69024 - DNA, 25 bp, Probe Sequence
gtatgctgcctctcctaattcatta

SEQ ID NO: 69025 - DNA, 25 bp, Probe Sequence
gctgcctctcctaattcattatgtt

SEQ ID NO: 69026 - DNA, 25 bp, Probe Sequence
tatgctgcctctcctaattcattat

SEQ ID NO: 69027 - DNA, 25 bp, Probe Sequence
atgctgcctctcctaattcattatg

SEQ ID NO: 69028 - DNA, 25 bp, Probe Sequence
tgctgcctctcctaattcattatgt

SEQ ID NO: 69029 - DNA, 25 bp, Probe Sequence
tgtatgctgcctctcctaattcatt

SEQ ID NO: 69030 - DNA, 25 bp, Probe Sequence
ctgtatgctgcctctcctaattcat

SEQ ID NO: 69031 - DNA, 25 bp, Probe Sequence
gtctgtatgctgcctctcctaattc

SEQ ID NO: 69032 - DNA, 25 bp, Probe Sequence
gtcaccagttaatctttctccaatg

SEQ ID NO: 69033 - DNA, 25 bp, Probe Sequence
tgtcaccagttaatctttctccaat

SEQ ID NO: 69034 - DNA, 25 bp, Probe Sequence
cttgcatctagtcacttaactctct

SEQ ID NO: 69035 - DNA, 25 bp, Probe Sequence
tcttgcatctagtcacttaactctc

SEQ ID NO: 69036 - DNA, 25 bp, Probe Sequence
gtcttgcatctagtcacttaactct

SEQ ID NO: 69037 - DNA, 25 bp, Probe Sequence
ttgtcttgcatctagtcacttaact

SEQ ID NO: 69038 - DNA, 25 bp, Probe Sequence
caccagttaatctttctccaatgat

SEQ ID NO: 69039 - DNA, 25 bp, Probe Sequence
tgtcttgcatctagtcacttaactc

SEQ ID NO: 69040 - DNA, 25 bp, Probe Sequence
gtgtcaccagttaatctttctccaa

SEQ ID NO: 69041 - DNA, 25 bp, Probe Sequence
ttgcatctagtcacttaactctctt

SEQ ID NO: 69042 - DNA, 25 bp, Probe Sequence
ctgcctctcctaattcattatgttt

SEQ ID NO: 69043 - DNA, 25 bp, Probe Sequence
tctgtatgctgcctctcctaattca

SEQ ID NO: 69044 - DNA, 25 bp, Probe Sequence
tcaccagttaatctttctccaatga

SEQ ID NO: 69045 - DNA, 25 bp, Probe Sequence
ccagttaatctttctccaatgatcc

SEQ ID NO: 69046 - DNA, 25 bp, Probe Sequence
accagttaatctttctccaatgatc

SEQ ID NO: 69047 - DNA, 25 bp, Probe Sequence
tgtgtcaccagttaatctttctcca

SEQ ID NO: 69048 - DNA, 25 bp, Probe Sequence
tgtatgtcttcttaacctcctccta

SEQ ID NO: 69049 - DNA, 25 bp, Probe Sequence
ctgtgtatgtcttcttaacctcctc

SEQ ID NO: 69050 - DNA, 25 bp, Probe Sequence
tactgtgtatgtcttcttaacctcc

SEQ ID NO: 69051 - DNA, 25 bp, Probe Sequence
gcttactgtgtatgtcttcttaacc

SEQ ID NO: 69052 - DNA, 25 bp, Probe Sequence
ggcttactgtgtatgtcttcttaac

SEQ ID NO: 69053 - DNA, 25 bp, Probe Sequence
actgtgtatgtcttcttaacctcct

SEQ ID NO: 69054 - DNA, 25 bp, Probe Sequence
tatgtcttcttaacctcctcctagt

SEQ ID NO: 69055 - DNA, 25 bp, Probe Sequence
gtgtatgtcttcttaacctcctcct

SEQ ID NO: 69056 - DNA, 25 bp, Probe Sequence
gtatgtcttcttaacctcctcctag

SEQ ID NO: 69057 - DNA, 25 bp, Probe Sequence
catatctgatgccttgtaatgccat

SEQ ID NO: 69058 - DNA, 25 bp, Probe Sequence
tgtgtatgtcttcttaacctcctcc

SEQ ID NO: 69059 - DNA, 25 bp, Probe Sequence
atgtcttcttaacctcctcctagtt

SEQ ID NO: 69060 - DNA, 25 bp, Probe Sequence
ttcttaacctcctcctagttgtctt

SEQ ID NO: 69061 - DNA, 25 bp, Probe Sequence
cttcttaacctcctcctagttgtct

SEQ ID NO: 69062 - DNA, 25 bp, Probe Sequence
tcttcttaacctcctcctagttgtc

SEQ ID NO: 69063 - DNA, 25 bp, Probe Sequence
gtcttcttaacctcctcctagttgt

SEQ ID NO: 69064 - DNA, 25 bp, Probe Sequence
tgtcttcttaacctcctcctagttg

SEQ ID NO: 69065 - DNA, 25 bp, Probe Sequence
ttactgtgtatgtcttcttaacctc

SEQ ID NO: 69066 - DNA, 25 bp, Probe Sequence
cttactgtgtatgtcttcttaacct

SEQ ID NO: 69067 - DNA, 25 bp, Probe Sequence
atatctgatgccttgtaatgccatg

SEQ ID NO: 69068 - DNA, 25 bp, Probe Sequence
tgaattacttacatatctgatgcct

SEQ ID NO: 69069 - DNA, 25 bp, Probe Sequence
tgtgtgtatcaatagtgcattcctt

SEQ ID NO: 69070 - DNA, 25 bp, Probe Sequence
attacttacatatctgatgccttgt

SEQ ID NO: 69071 - DNA, 25 bp, Probe Sequence
gggcttactgtgtatgtcttcttaa

SEQ ID NO: 69072 - DNA, 25 bp, Probe Sequence
cctacttggatatacttctggtcag

SEQ ID NO: 69073 - DNA, 25 bp, Probe Sequence
tacacctacttggatatacttctgg

SEQ ID NO: 69074 - DNA, 25 bp, Probe Sequence
ctacttggatatacttctggtcagt

SEQ ID NO: 69075 - DNA, 25 bp, Probe Sequence
tcagtagccagcatcttgtaactaa

SEQ ID NO: 69076 - DNA, 25 bp, Probe Sequence
ctacacctacttggatatacttctg

SEQ ID NO: 69077 - DNA, 25 bp, Probe Sequence
tctacacctacttggatatacttct

SEQ ID NO: 69078 - DNA, 25 bp, Probe Sequence
gtcagtagccagcatcttgtaacta

SEQ ID NO: 69079 - DNA, 25 bp, Probe Sequence
cacctacttggatatacttctggtc

SEQ ID NO: 69080 - DNA, 25 bp, Probe Sequence
cttggatatacttctggtcagtagc

SEQ ID NO: 69081 - DNA, 25 bp, Probe Sequence
acctacttggatatacttctggtca

SEQ ID NO: 69082 - DNA, 25 bp, Probe Sequence
acacctacttggatatacttctggt

SEQ ID NO: 69083 - DNA, 25 bp, Probe Sequence
acttggatatacttctggtcagtag

SEQ ID NO: 69084 - DNA, 25 bp, Probe Sequence
ataaataaggttggtagtctgtgcc

SEQ ID NO: 69085 - DNA, 25 bp, Probe Sequence
ttggatatacttctggtcagtagcc

SEQ ID NO: 69086 - DNA, 25 bp, Probe Sequence
ttctacacctacttggatatacttc

SEQ ID NO: 69087 - DNA, 25 bp, Probe Sequence
tagccagcatcttgtaactaaatga

SEQ ID NO: 69088 - DNA, 25 bp, Probe Sequence
gtagccagcatcttgtaactaaatg

SEQ ID NO: 69089 - DNA, 25 bp, Probe Sequence
agccagcatcttgtaactaaatgat

SEQ ID NO: 69090 - DNA, 25 bp, Probe Sequence
gccagcatcttgtaactaaatgata

SEQ ID NO: 69091 - DNA, 25 bp, Probe Sequence
agtagccagcatcttgtaactaaat

SEQ ID NO: 69092 - DNA, 25 bp, Probe Sequence
tataaataaggttggtagtctgtgc

SEQ ID NO: 69093 - DNA, 25 bp, Probe Sequence
cagtagccagcatcttgtaactaaa

SEQ ID NO: 69094 - DNA, 25 bp, Probe Sequence
tacttggatatacttctggtcagta

SEQ ID NO: 69095 - DNA, 25 bp, Probe Sequence
tggatatacttctggtcagtagcca

SEQ ID NO: 69096 - DNA, 25 bp, Probe Sequence
aactaactatacacacacacacaca

SEQ ID NO: 69097 - DNA, 25 bp, Probe Sequence
gaactaactatacacacacacacac

SEQ ID NO: 69098 - DNA, 25 bp, Probe Sequence
agaactaactatacacacacacaca

SEQ ID NO: 69099 - DNA, 25 bp, Probe Sequence
ctaactatacacacacacacacaca

SEQ ID NO: 69100 - DNA, 25 bp, Probe Sequence
actaactatacacacacacacacac

SEQ ID NO: 69101 - DNA, 25 bp, Probe Sequence
taactatacacacacacacacacac

SEQ ID NO: 69102 - DNA, 25 bp, Probe Sequence
ccatacaggctatacacgagagtag

SEQ ID NO: 69103 - DNA, 25 bp, Probe Sequence
tagaactaactatacacacacacac

SEQ ID NO: 69104 - DNA, 25 bp, Probe Sequence
gttgtgacattgtaccattaggagg

SEQ ID NO: 69105 - DNA, 25 bp, Probe Sequence
ttgtgacattgtaccattaggagga

SEQ ID NO: 69106 - DNA, 25 bp, Probe Sequence
accatacaggctatacacgagagta

SEQ ID NO: 69107 - DNA, 25 bp, Probe Sequence
ctatacacacacacacacacacaca

SEQ ID NO: 69108 - DNA, 25 bp, Probe Sequence
actatacacacacacacacacacac

SEQ ID NO: 69109 - DNA, 25 bp, Probe Sequence
tgtgacattgtaccattaggaggag

SEQ ID NO: 69110 - DNA, 25 bp, Probe Sequence
aactatacacacacacacacacaca

SEQ ID NO: 69111 - DNA, 25 bp, Probe Sequence
tatacacacacacacacacacacac

SEQ ID NO: 69112 - DNA, 25 bp, Probe Sequence
gccaatatagtgaaaccctgtcttt

SEQ ID NO: 69113 - DNA, 25 bp, Probe Sequence
ggttgtgacattgtaccattaggag

SEQ ID NO: 69114 - DNA, 25 bp, Probe Sequence
aggttgtgacattgtaccattagga

SEQ ID NO: 69115 - DNA, 25 bp, Probe Sequence
caggttgtgacattgtaccattagg

SEQ ID NO: 69116 - DNA, 25 bp, Probe Sequence
ccaatatagtgaaaccctgtcttta

SEQ ID NO: 69117 - DNA, 25 bp, Probe Sequence
gtgacattgtaccattaggaggagc

SEQ ID NO: 69118 - DNA, 25 bp, Probe Sequence
tgatctcttggtgttatttcgttac

SEQ ID NO: 69119 - DNA, 25 bp, Probe Sequence
catgatctcttggtgttatttcgtt

SEQ ID NO: 69120 - DNA, 25 bp, Probe Sequence
gactgagttgtgaatctgtaaaggg

SEQ ID NO: 69121 - DNA, 25 bp, Probe Sequence
ggactgagttgtgaatctgtaaagg

SEQ ID NO: 69122 - DNA, 25 bp, Probe Sequence
gggactgagttgtgaatctgtaaag

SEQ ID NO: 69123 - DNA, 25 bp, Probe Sequence
ggagtggtttggtatattactgagt

SEQ ID NO: 69124 - DNA, 25 bp, Probe Sequence
aggagtggtttggtatattactgag

SEQ ID NO: 69125 - DNA, 25 bp, Probe Sequence
agtggtttggtatattactgagtgc

SEQ ID NO: 69126 - DNA, 25 bp, Probe Sequence
gagtggtttggtatattactgagtg

SEQ ID NO: 69127 - DNA, 25 bp, Probe Sequence
attcctgcactcaatgtattgtgta

SEQ ID NO: 69128 - DNA, 25 bp, Probe Sequence
cccatctctacataaatcacaaaga

SEQ ID NO: 69129 - DNA, 25 bp, Probe Sequence
ttcctgcactcaatgtattgtgtaa

SEQ ID NO: 69130 - DNA, 25 bp, Probe Sequence
caggagtggtttggtatattactga

SEQ ID NO: 69131 - DNA, 25 bp, Probe Sequence
tggtatattactgagtgcaatcatt

SEQ ID NO: 69132 - DNA, 25 bp, Probe Sequence
ttggtatattactgagtgcaatcat

SEQ ID NO: 69133 - DNA, 25 bp, Probe Sequence
ccattccatcattgtgccactctag

SEQ ID NO: 69134 - DNA, 25 bp, Probe Sequence
ggtatattactgagtgcaatcattg

SEQ ID NO: 69135 - DNA, 25 bp, Probe Sequence
aagtctagggtctaaacaaagccag

SEQ ID NO: 69136 - DNA, 25 bp, Probe Sequence
ctacaaagctagaccctatctcaaa

SEQ ID NO: 69137 - DNA, 25 bp, Probe Sequence
ccaggagtggtttggtatattactg

SEQ ID NO: 69138 - DNA, 25 bp, Probe Sequence
caagtctagggtctaaacaaagcca

SEQ ID NO: 69139 - DNA, 25 bp, Probe Sequence
cgggactgagttgtgaatctgtaaa

SEQ ID NO: 69140 - DNA, 25 bp, Probe Sequence
accattccatcattgtgccactcta

SEQ ID NO: 69141 - DNA, 25 bp, Probe Sequence
gtggtttggtatattactgagtgca

SEQ ID NO: 69142 - DNA, 25 bp, Probe Sequence
caagaggtctacgagaagtttgagg

SEQ ID NO: 69143 - DNA, 25 bp, Probe Sequence
aagccaggagtggtttggtatatta

SEQ ID NO: 69144 - DNA, 25 bp, Probe Sequence
catctcattatccttccacttctgt

SEQ ID NO: 69145 - DNA, 25 bp, Probe Sequence
acatctcattatccttccacttctg

SEQ ID NO: 69146 - DNA, 25 bp, Probe Sequence
gtagatgagcagagcaagaatgtaa

SEQ ID NO: 69147 - DNA, 25 bp, Probe Sequence
tctcattatccttccacttctgtag

SEQ ID NO: 69148 - DNA, 25 bp, Probe Sequence
atctcattatccttccacttctgta

SEQ ID NO: 69149 - DNA, 25 bp, Probe Sequence
tacatctcattatccttccacttct

SEQ ID NO: 69150 - DNA, 25 bp, Probe Sequence
tgtagatgagcagagcaagaatgta

SEQ ID NO: 69151 - DNA, 25 bp, Probe Sequence
cattatccttccacttctgtagtcc

SEQ ID NO: 69152 - DNA, 25 bp, Probe Sequence
tcattatccttccacttctgtagtc

SEQ ID NO: 69153 - DNA, 25 bp, Probe Sequence
ctcattatccttccacttctgtagt

SEQ ID NO: 69154 - DNA, 25 bp, Probe Sequence
aatacctacacaacattctgacaat

SEQ ID NO: 69155 - DNA, 25 bp, Probe Sequence
ttacatctcattatccttccacttc

SEQ ID NO: 69156 - DNA, 25 bp, Probe Sequence
atgtgtagatgagcagagcaagaat

SEQ ID NO: 69157 - DNA, 25 bp, Probe Sequence
aatgtgtagatgagcagagcaagaa

SEQ ID NO: 69158 - DNA, 25 bp, Probe Sequence
attacatctcattatccttccactt

SEQ ID NO: 69159 - DNA, 25 bp, Probe Sequence
tagatgagcagagcaagaatgtaaa

SEQ ID NO: 69160 - DNA, 25 bp, Probe Sequence
gtgtagatgagcagagcaagaatgt

SEQ ID NO: 69161 - DNA, 25 bp, Probe Sequence
tgtgtagatgagcagagcaagaatg

SEQ ID NO: 69162 - DNA, 25 bp, Probe Sequence
agaaagagagaaaggaaggaagaaa

SEQ ID NO: 69163 - DNA, 25 bp, Probe Sequence
aagaaagagagaaaggaaggaagaa

SEQ ID NO: 69164 - DNA, 25 bp, Probe Sequence
aaagaaagagagaaaggaaggaaga

SEQ ID NO: 69165 - DNA, 25 bp, Probe Sequence
agcagagcaagaatgtaaagtgtat

SEQ ID NO: 69166 - DNA, 25 bp, Probe Sequence
gcagagcaagaatgtaaagtgtata

SEQ ID NO: 69167 - DNA, 25 bp, Probe Sequence
ttgactcactgacagaagtaaccag

SEQ ID NO: 69168 - DNA, 25 bp, Probe Sequence
atcgtctctcataataccacacaag

SEQ ID NO: 69169 - DNA, 25 bp, Probe Sequence
aatcgtctctcataataccacacaa

SEQ ID NO: 69170 - DNA, 25 bp, Probe Sequence
tcaatcgtctctcataataccacac

SEQ ID NO: 69171 - DNA, 25 bp, Probe Sequence
caatcgtctctcataataccacaca

SEQ ID NO: 69172 - DNA, 25 bp, Probe Sequence
ttcaatcgtctctcataataccaca

SEQ ID NO: 69173 - DNA, 25 bp, Probe Sequence
tgttcaatcgtctctcataatacca

SEQ ID NO: 69174 - DNA, 25 bp, Probe Sequence
gttcaatcgtctctcataataccac

SEQ ID NO: 69175 - DNA, 25 bp, Probe Sequence
ctgttcaatcgtctctcataatacc

SEQ ID NO: 69176 - DNA, 25 bp, Probe Sequence
tcgtctctcataataccacacaagt

SEQ ID NO: 69177 - DNA, 25 bp, Probe Sequence
gactgactcactatggaactagaat

SEQ ID NO: 69178 - DNA, 25 bp, Probe Sequence
actgttcaatcgtctctcataatac

SEQ ID NO: 69179 - DNA, 25 bp, Probe Sequence
gatgatactgttcaatcgtctctca

SEQ ID NO: 69180 - DNA, 25 bp, Probe Sequence
agatgatactgttcaatcgtctctc

SEQ ID NO: 69181 - DNA, 25 bp, Probe Sequence
agttcaaccaagatgatactgttca

SEQ ID NO: 69182 - DNA, 25 bp, Probe Sequence
agaagttcaaccaagatgatactgt

SEQ ID NO: 69183 - DNA, 25 bp, Probe Sequence
caaccaagatgatactgttcaatcg

SEQ ID NO: 69184 - DNA, 25 bp, Probe Sequence
aagatgatactgttcaatcgtctct

SEQ ID NO: 69185 - DNA, 25 bp, Probe Sequence
caagatgatactgttcaatcgtctc

SEQ ID NO: 69186 - DNA, 25 bp, Probe Sequence
aaccaagatgatactgttcaatcgt

SEQ ID NO: 69187 - DNA, 25 bp, Probe Sequence
gttcaaccaagatgatactgttcaa

SEQ ID NO: 69188 - DNA, 25 bp, Probe Sequence
ccaagatgatactgttcaatcgtct

SEQ ID NO: 69189 - DNA, 25 bp, Probe Sequence
aagttcaaccaagatgatactgttc

SEQ ID NO: 69190 - DNA, 25 bp, Probe Sequence
gaagttcaaccaagatgatactgtt

SEQ ID NO: 69191 - DNA, 25 bp, Probe Sequence
tgatactgttcaatcgtctctcata

SEQ ID NO: 69192 - DNA, 25 bp, Probe Sequence
tgccaatgtgatgatattaagaggt

SEQ ID NO: 69193 - DNA, 25 bp, Probe Sequence
ttgccaatgtgatgatattaagagg

SEQ ID NO: 69194 - DNA, 25 bp, Probe Sequence
agtgttgccaatgtgatgatattaa

SEQ ID NO: 69195 - DNA, 25 bp, Probe Sequence
aagtgttgccaatgtgatgatatta

SEQ ID NO: 69196 - DNA, 25 bp, Probe Sequence
tgttgccaatgtgatgatattaaga

SEQ ID NO: 69197 - DNA, 25 bp, Probe Sequence
gtgttgccaatgtgatgatattaag

SEQ ID NO: 69198 - DNA, 25 bp, Probe Sequence
caagtgttgccaatgtgatgatatt

SEQ ID NO: 69199 - DNA, 25 bp, Probe Sequence
gccaatgtgatgatattaagaggta

SEQ ID NO: 69200 - DNA, 25 bp, Probe Sequence
gttgccaatgtgatgatattaagag

SEQ ID NO: 69201 - DNA, 25 bp, Probe Sequence
tcaagtgttgccaatgtgatgatat

SEQ ID NO: 69202 - DNA, 25 bp, Probe Sequence
tgtgatgatattaagaggtaggact

SEQ ID NO: 69203 - DNA, 25 bp, Probe Sequence
ttcaagtgttgccaatgtgatgata

SEQ ID NO: 69204 - DNA, 25 bp, Probe Sequence
actcactctctgttattctgttaca

SEQ ID NO: 69205 - DNA, 25 bp, Probe Sequence
attcaagtgttgccaatgtgatgat

SEQ ID NO: 69206 - DNA, 25 bp, Probe Sequence
tactcactctctgttattctgttac

SEQ ID NO: 69207 - DNA, 25 bp, Probe Sequence
aattcaagtgttgccaatgtgatga

SEQ ID NO: 69208 - DNA, 25 bp, Probe Sequence
ctcactctctgttattctgttacaa

SEQ ID NO: 69209 - DNA, 25 bp, Probe Sequence
attactcactctctgttattctgtt

SEQ ID NO: 69210 - DNA, 25 bp, Probe Sequence
atgtgatgatattaagaggtaggac

SEQ ID NO: 69211 - DNA, 25 bp, Probe Sequence
aattactcactctctgttattctgt

SEQ ID NO: 69212 - DNA, 25 bp, Probe Sequence
gtgatgatattaagaggtaggactt

SEQ ID NO: 69213 - DNA, 25 bp, Probe Sequence
tcactctctgttattctgttacaat

SEQ ID NO: 69214 - DNA, 25 bp, Probe Sequence
tggattcacagacattctatttggt

SEQ ID NO: 69215 - DNA, 25 bp, Probe Sequence
ttactcactctctgttattctgtta

SEQ ID NO: 69216 - DNA, 25 bp, Probe Sequence
ctcctgaagtgataattgccttaga

SEQ ID NO: 69217 - DNA, 25 bp, Probe Sequence
tcctgaagtgataattgccttagat

SEQ ID NO: 69218 - DNA, 25 bp, Probe Sequence
gctcatcctcttctcttatgtccta

SEQ ID NO: 69219 - DNA, 25 bp, Probe Sequence
cctcctgaagtgataattgccttag

SEQ ID NO: 69220 - DNA, 25 bp, Probe Sequence
cctgaagtgataattgccttagatt

SEQ ID NO: 69221 - DNA, 25 bp, Probe Sequence
tcctcctgaagtgataattgcctta

SEQ ID NO: 69222 - DNA, 25 bp, Probe Sequence
ctcatcctcttctcttatgtcctag

SEQ ID NO: 69223 - DNA, 25 bp, Probe Sequence
ttggtgctcatcctcttctcttatg

SEQ ID NO: 69224 - DNA, 25 bp, Probe Sequence
ttccagagaagaggagaagactatt

SEQ ID NO: 69225 - DNA, 25 bp, Probe Sequence
gttccagagaagaggagaagactat

SEQ ID NO: 69226 - DNA, 25 bp, Probe Sequence
gtgctcatcctcttctcttatgtcc

SEQ ID NO: 69227 - DNA, 25 bp, Probe Sequence
ggtgctcatcctcttctcttatgtc

SEQ ID NO: 69228 - DNA, 25 bp, Probe Sequence
tgctcatcctcttctcttatgtcct

SEQ ID NO: 69229 - DNA, 25 bp, Probe Sequence
gtcctcctgaagtgataattgcctt

SEQ ID NO: 69230 - DNA, 25 bp, Probe Sequence
gtctggagcagttatgatgtcattc

SEQ ID NO: 69231 - DNA, 25 bp, Probe Sequence
cgggatgttgggataaagatttaga

SEQ ID NO: 69232 - DNA, 25 bp, Probe Sequence
tgggataaagatttagaactgaggt

SEQ ID NO: 69233 - DNA, 25 bp, Probe Sequence
aagcctgaggaacatatctgtcttg

SEQ ID NO: 69234 - DNA, 25 bp, Probe Sequence
ccagagaagaggagaagactattta

SEQ ID NO: 69235 - DNA, 25 bp, Probe Sequence
tgtctggagcagttatgatgtcatt

SEQ ID NO: 69236 - DNA, 25 bp, Probe Sequence
ttgtctggagcagttatgatgtcat

SEQ ID NO: 69237 - DNA, 25 bp, Probe Sequence
tttggtgctcatcctcttctcttat

SEQ ID NO: 69238 - DNA, 25 bp, Probe Sequence
tggtgctcatcctcttctcttatgt

SEQ ID NO: 69239 - DNA, 25 bp, Probe Sequence
ctgaggaacatatctgtcttggtgg

SEQ ID NO: 69240 - DNA, 25 bp, Probe Sequence
aattcttctgctccaatgcctattc

SEQ ID NO: 69241 - DNA, 25 bp, Probe Sequence
catcttcttctggtgatcttccttc

SEQ ID NO: 69242 - DNA, 25 bp, Probe Sequence
atcttcttctggtgatcttccttcc

SEQ ID NO: 69243 - DNA, 25 bp, Probe Sequence
gtaagttgtctgaacaggttgtcac

SEQ ID NO: 69244 - DNA, 25 bp, Probe Sequence
tcctcttcttgtaaactcctctact

SEQ ID NO: 69245 - DNA, 25 bp, Probe Sequence
ctcctcttcttgtaaactcctctac

SEQ ID NO: 69246 - DNA, 25 bp, Probe Sequence
ttctggtaagttgtctgaacaggtt

SEQ ID NO: 69247 - DNA, 25 bp, Probe Sequence
cctcttcttgtaaactcctctactt

SEQ ID NO: 69248 - DNA, 25 bp, Probe Sequence
tcctattctttgagttgtttcctgg

SEQ ID NO: 69249 - DNA, 25 bp, Probe Sequence
attcttctgctccaatgcctattcc

SEQ ID NO: 69250 - DNA, 25 bp, Probe Sequence
atcttcaaattcttctgctccaatg

SEQ ID NO: 69251 - DNA, 25 bp, Probe Sequence
catcttcaaattcttctgctccaat

SEQ ID NO: 69252 - DNA, 25 bp, Probe Sequence
tgtcaaatccaattatcatccctct

SEQ ID NO: 69253 - DNA, 25 bp, Probe Sequence
gtcaaatccaattatcatccctctg

SEQ ID NO: 69254 - DNA, 25 bp, Probe Sequence
atcctattctttgagttgtttcctg

SEQ ID NO: 69255 - DNA, 25 bp, Probe Sequence
gctcctcttcttgtaaactcctcta

SEQ ID NO: 69256 - DNA, 25 bp, Probe Sequence
ctattctttgagttgtttcctggct

SEQ ID NO: 69257 - DNA, 25 bp, Probe Sequence
aaattcttctgctccaatgcctatt

SEQ ID NO: 69258 - DNA, 25 bp, Probe Sequence
aaatccaattatcatccctctgacc

SEQ ID NO: 69259 - DNA, 25 bp, Probe Sequence
atgtcaaatccaattatcatccctc

SEQ ID NO: 69260 - DNA, 25 bp, Probe Sequence
caaatccaattatcatccctctgac

SEQ ID NO: 69261 - DNA, 25 bp, Probe Sequence
tcaaatccaattatcatccctctga

SEQ ID NO: 69262 - DNA, 25 bp, Probe Sequence
tctggtaagttgtctgaacaggttg

SEQ ID NO: 69263 - DNA, 25 bp, Probe Sequence
caaattcttctgctccaatgcctat

SEQ ID NO: 69264 - DNA, 25 bp, Probe Sequence
gactccgtacattccaattattaga

SEQ ID NO: 69265 - DNA, 25 bp, Probe Sequence
agactccgtacattccaattattag

SEQ ID NO: 69266 - DNA, 25 bp, Probe Sequence
aatgttctctctataattggacagg

SEQ ID NO: 69267 - DNA, 25 bp, Probe Sequence
aagactccgtacattccaattatta

SEQ ID NO: 69268 - DNA, 25 bp, Probe Sequence
cactgctgcctagtctctgataatt

SEQ ID NO: 69269 - DNA, 25 bp, Probe Sequence
tttggtggctgataaatactggtta

SEQ ID NO: 69270 - DNA, 25 bp, Probe Sequence
acagtatctccttctattagtccca

SEQ ID NO: 69271 - DNA, 25 bp, Probe Sequence
actccgtacattccaattattagaa

SEQ ID NO: 69272 - DNA, 25 bp, Probe Sequence
ctgagtttccaatgtgttaataccc

SEQ ID NO: 69273 - DNA, 25 bp, Probe Sequence
agtatctccttctattagtcccagc

SEQ ID NO: 69274 - DNA, 25 bp, Probe Sequence
cagtatctccttctattagtcccag

SEQ ID NO: 69275 - DNA, 25 bp, Probe Sequence
actgagtttccaatgtgttaatacc

SEQ ID NO: 69276 - DNA, 25 bp, Probe Sequence
gttctctctataattggacagggat

SEQ ID NO: 69277 - DNA, 25 bp, Probe Sequence
tggtggctgataaatactggttatt

SEQ ID NO: 69278 - DNA, 25 bp, Probe Sequence
ttggtggctgataaatactggttat

SEQ ID NO: 69279 - DNA, 25 bp, Probe Sequence
aacagtatctccttctattagtccc

SEQ ID NO: 69280 - DNA, 25 bp, Probe Sequence
tgctgcctagtctctgataatttag

SEQ ID NO: 69281 - DNA, 25 bp, Probe Sequence
ctgctgcctagtctctgataattta

SEQ ID NO: 69282 - DNA, 25 bp, Probe Sequence
tatctccttctattagtcccagcct

SEQ ID NO: 69283 - DNA, 25 bp, Probe Sequence
gtatctccttctattagtcccagcc

SEQ ID NO: 69284 - DNA, 25 bp, Probe Sequence
ttacagagaagaagagaaagactcc

SEQ ID NO: 69285 - DNA, 25 bp, Probe Sequence
agaaagactccgtacattccaatta

SEQ ID NO: 69286 - DNA, 25 bp, Probe Sequence
tgttctctctataattggacaggga

SEQ ID NO: 69287 - DNA, 25 bp, Probe Sequence
atgttctctctataattggacaggg

SEQ ID NO: 69288 - DNA, 25 bp, Probe Sequence
caagtacatcaatgggcgtggatag

SEQ ID NO: 69289 - DNA, 25 bp, Probe Sequence
aagtacatcaatgggcgtggatagc

SEQ ID NO: 69290 - DNA, 25 bp, Probe Sequence
atgcggttttgcaagtacatcaatg

SEQ ID NO: 69291 - DNA, 25 bp, Probe Sequence
gatgcggttttgcaagtacatcaat

SEQ ID NO: 69292 - DNA, 25 bp, Probe Sequence
ttttgcaagtacatcaatgggcgtg

SEQ ID NO: 69293 - DNA, 25 bp, Probe Sequence
gttttgcaagtacatcaatgggcgt

SEQ ID NO: 69294 - DNA, 25 bp, Probe Sequence
tgcggttttgcaagtacatcaatgg

SEQ ID NO: 69295 - DNA, 25 bp, Probe Sequence
tccttgtccttcagttctgttatac

SEQ ID NO: 69296 - DNA, 25 bp, Probe Sequence
ctccttgtccttcagttctgttata

SEQ ID NO: 69297 - DNA, 25 bp, Probe Sequence
tacaattcttctctcagactccaac

SEQ ID NO: 69298 - DNA, 25 bp, Probe Sequence
ttacaattcttctctcagactccaa

SEQ ID NO: 69299 - DNA, 25 bp, Probe Sequence
gccattacaattcttctctcagact

SEQ ID NO: 69300 - DNA, 25 bp, Probe Sequence
attacaattcttctctcagactcca

SEQ ID NO: 69301 - DNA, 25 bp, Probe Sequence
ttgtccttcagttctgttatactcc

SEQ ID NO: 69302 - DNA, 25 bp, Probe Sequence
ccttgtccttcagttctgttatact

SEQ ID NO: 69303 - DNA, 25 bp, Probe Sequence
cattacaattcttctctcagactcc

SEQ ID NO: 69304 - DNA, 25 bp, Probe Sequence
ccattacaattcttctctcagactc

SEQ ID NO: 69305 - DNA, 25 bp, Probe Sequence
tactccttgtccttcagttctgtta

SEQ ID NO: 69306 - DNA, 25 bp, Probe Sequence
tgtccttcagttctgttatactcca

SEQ ID NO: 69307 - DNA, 25 bp, Probe Sequence
cttgtccttcagttctgttatactc

SEQ ID NO: 69308 - DNA, 25 bp, Probe Sequence
gtccttcagttctgttatactccag

SEQ ID NO: 69309 - DNA, 25 bp, Probe Sequence
actccttgtccttcagttctgttat

SEQ ID NO: 69310 - DNA, 25 bp, Probe Sequence
cattgtaacttcatgtgtctccaac

SEQ ID NO: 69311 - DNA, 25 bp, Probe Sequence
ccattgtaacttcatgtgtctccaa

SEQ ID NO: 69312 - DNA, 25 bp, Probe Sequence
tcagttctgttatactccagccatt

SEQ ID NO: 69313 - DNA, 25 bp, Probe Sequence
ttcagttctgttatactccagccat

SEQ ID NO: 69314 - DNA, 25 bp, Probe Sequence
ctactccttgtccttcagttctgtt

SEQ ID NO: 69315 - DNA, 25 bp, Probe Sequence
atctgagtcctagaccttctacttc

SEQ ID NO: 69316 - DNA, 25 bp, Probe Sequence
acaattcttctctcagactccaacc

SEQ ID NO: 69317 - DNA, 25 bp, Probe Sequence
attgtaacttcatgtgtctccaaca

SEQ ID NO: 69318 - DNA, 25 bp, Probe Sequence
ctctactccttgtccttcagttctg

SEQ ID NO: 69319 - DNA, 25 bp, Probe Sequence
aattcagagtgactagaagaccagt

SEQ ID NO: 69320 - DNA, 25 bp, Probe Sequence
ttctctagctgattcctataccact

SEQ ID NO: 69321 - DNA, 25 bp, Probe Sequence
gttctctagctgattcctataccac

SEQ ID NO: 69322 - DNA, 25 bp, Probe Sequence
agttctctagctgattcctatacca

SEQ ID NO: 69323 - DNA, 25 bp, Probe Sequence
gtacagactgatccaagatgacact

SEQ ID NO: 69324 - DNA, 25 bp, Probe Sequence
tctctagctgattcctataccactc

SEQ ID NO: 69325 - DNA, 25 bp, Probe Sequence
ccacatcgagttacaacaatagaag

SEQ ID NO: 69326 - DNA, 25 bp, Probe Sequence
accacatcgagttacaacaatagaa

SEQ ID NO: 69327 - DNA, 25 bp, Probe Sequence
gaccacatcgagttacaacaataga

SEQ ID NO: 69328 - DNA, 25 bp, Probe Sequence
tgaccacatcgagttacaacaatag

SEQ ID NO: 69329 - DNA, 25 bp, Probe Sequence
cacatcgagttacaacaatagaaga

SEQ ID NO: 69330 - DNA, 25 bp, Probe Sequence
gtgaccacatcgagttacaacaata

SEQ ID NO: 69331 - DNA, 25 bp, Probe Sequence
tctagctgattcctataccactcaa

SEQ ID NO: 69332 - DNA, 25 bp, Probe Sequence
acaacaatagaagaaatcccagaga

SEQ ID NO: 69333 - DNA, 25 bp, Probe Sequence
ctctagctgattcctataccactca

SEQ ID NO: 69334 - DNA, 25 bp, Probe Sequence
acaatagaagaaatcccagagaagt

SEQ ID NO: 69335 - DNA, 25 bp, Probe Sequence
gggagagcattaagacaaataccta

SEQ ID NO: 69336 - DNA, 25 bp, Probe Sequence
gagggagagcattaagacaaatacc

SEQ ID NO: 69337 - DNA, 25 bp, Probe Sequence
ggagggagagcattaagacaaatac

SEQ ID NO: 69338 - DNA, 25 bp, Probe Sequence
aacatagatgatgggttgataggtg

SEQ ID NO: 69339 - DNA, 25 bp, Probe Sequence
tacagactgatccaagatgacactg

SEQ ID NO: 69340 - DNA, 25 bp, Probe Sequence
acatcgagttacaacaatagaagaa

SEQ ID NO: 69341 - DNA, 25 bp, Probe Sequence
caacaatagaagaaatcccagagaa

SEQ ID NO: 69342 - DNA, 25 bp, Probe Sequence
aaacatagatgatgggttgataggt

SEQ ID NO: 69343 - DNA, 25 bp, Probe Sequence
aggtagtgttctcagtagtctaagt

SEQ ID NO: 69344 - DNA, 25 bp, Probe Sequence
tcaggtagtgttctcagtagtctaa

SEQ ID NO: 69345 - DNA, 25 bp, Probe Sequence
cagtagtctaagtattccacacaca

SEQ ID NO: 69346 - DNA, 25 bp, Probe Sequence
caggtagtgttctcagtagtctaag

SEQ ID NO: 69347 - DNA, 25 bp, Probe Sequence
tcagtagtctaagtattccacacac

SEQ ID NO: 69348 - DNA, 25 bp, Probe Sequence
gtcaggtagtgttctcagtagtcta

SEQ ID NO: 69349 - DNA, 25 bp, Probe Sequence
ctcagtagtctaagtattccacaca

SEQ ID NO: 69350 - DNA, 25 bp, Probe Sequence
tctcagtagtctaagtattccacac

SEQ ID NO: 69351 - DNA, 25 bp, Probe Sequence
aatgtcaggtagtgttctcagtagt

SEQ ID NO: 69352 - DNA, 25 bp, Probe Sequence
agtagtctaagtattccacacacat

SEQ ID NO: 69353 - DNA, 25 bp, Probe Sequence
atgtcaggtagtgttctcagtagtc

SEQ ID NO: 69354 - DNA, 25 bp, Probe Sequence
ggtagtgttctcagtagtctaagta

SEQ ID NO: 69355 - DNA, 25 bp, Probe Sequence
gagtctgtattaggagaacttcgtc

SEQ ID NO: 69356 - DNA, 25 bp, Probe Sequence
agagtctgtattaggagaacttcgt

SEQ ID NO: 69357 - DNA, 25 bp, Probe Sequence
ttctcagtagtctaagtattccaca

SEQ ID NO: 69358 - DNA, 25 bp, Probe Sequence
tgttctcagtagtctaagtattcca

SEQ ID NO: 69359 - DNA, 25 bp, Probe Sequence
gtagtctaagtattccacacacatt

SEQ ID NO: 69360 - DNA, 25 bp, Probe Sequence
agtaggtaatctagttccagagtct

SEQ ID NO: 69361 - DNA, 25 bp, Probe Sequence
acttcgtcctgaggttactctatat

SEQ ID NO: 69362 - DNA, 25 bp, Probe Sequence
gttctcagtagtctaagtattccac

SEQ ID NO: 69363 - DNA, 25 bp, Probe Sequence
gtgttctcagtagtctaagtattcc

SEQ ID NO: 69364 - DNA, 25 bp, Probe Sequence
aacttcgtcctgaggttactctata

SEQ ID NO: 69365 - DNA, 25 bp, Probe Sequence
cttcgtcctgaggttactctatatt

SEQ ID NO: 69366 - DNA, 25 bp, Probe Sequence
aagtaggtaatctagttccagagtc

SEQ ID NO: 69367 - DNA, 25 bp, Probe Sequence
tcttggatagaacataaggaactga

SEQ ID NO: 69368 - DNA, 25 bp, Probe Sequence
cttggatagaacataaggaactgaa

SEQ ID NO: 69369 - DNA, 25 bp, Probe Sequence
agttacagtagaagttgttacacct

SEQ ID NO: 69370 - DNA, 25 bp, Probe Sequence
ttacagtagaagttgttacacctct

SEQ ID NO: 69371 - DNA, 25 bp, Probe Sequence
gttacagtagaagttgttacacctc

SEQ ID NO: 69372 - DNA, 25 bp, Probe Sequence
agcgtacatgaatcagtatagacat

SEQ ID NO: 69373 - DNA, 25 bp, Probe Sequence
tagcgtacatgaatcagtatagaca

SEQ ID NO: 69374 - DNA, 25 bp, Probe Sequence
gcgtacatgaatcagtatagacatc

SEQ ID NO: 69375 - DNA, 25 bp, Probe Sequence
gaaggatcggaagtcatggttaatg

SEQ ID NO: 69376 - DNA, 25 bp, Probe Sequence
acagtagaagttgttacacctctaa

SEQ ID NO: 69377 - DNA, 25 bp, Probe Sequence
aagcatagttacagtagaagttgtt

SEQ ID NO: 69378 - DNA, 25 bp, Probe Sequence
tagttacagtagaagttgttacacc

SEQ ID NO: 69379 - DNA, 25 bp, Probe Sequence
atagcgtacatgaatcagtatagac

SEQ ID NO: 69380 - DNA, 25 bp, Probe Sequence
ttcagatacaccacatacatattgt

SEQ ID NO: 69381 - DNA, 25 bp, Probe Sequence
aaatcctgggcattctgaagtaaat

SEQ ID NO: 69382 - DNA, 25 bp, Probe Sequence
tacagtagaagttgttacacctcta

SEQ ID NO: 69383 - DNA, 25 bp, Probe Sequence
ggaaggatcggaagtcatggttaat

SEQ ID NO: 69384 - DNA, 25 bp, Probe Sequence
cgtacatgaatcagtatagacatca

SEQ ID NO: 69385 - DNA, 25 bp, Probe Sequence
aatcctgggcattctgaagtaaatt

SEQ ID NO: 69386 - DNA, 25 bp, Probe Sequence
gcatagttacagtagaagttgttac

SEQ ID NO: 69387 - DNA, 25 bp, Probe Sequence
aattgttatgttatgtgcatcgttg

SEQ ID NO: 69388 - DNA, 25 bp, Probe Sequence
ggtaattgttatgttatgtgcatcg

SEQ ID NO: 69389 - DNA, 25 bp, Probe Sequence
ggaactgaaattagagagaaacaca

SEQ ID NO: 69390 - DNA, 25 bp, Probe Sequence
agcatagttacagtagaagttgtta

SEQ ID NO: 69391 - DNA, 25 bp, Probe Sequence
gcaataataaggagagaagtgactg

SEQ ID NO: 69392 - DNA, 25 bp, Probe Sequence
gagcaataataaggagagaagtgac

SEQ ID NO: 69393 - DNA, 25 bp, Probe Sequence
agagcaataataaggagagaagtga

SEQ ID NO: 69394 - DNA, 25 bp, Probe Sequence
agcaataataaggagagaagtgact

SEQ ID NO: 69395 - DNA, 25 bp, Probe Sequence
aagagcaataataaggagagaagtg

SEQ ID NO: 69396 - DNA, 25 bp, Probe Sequence
caataataaggagagaagtgactgt

SEQ ID NO: 69397 - DNA, 25 bp, Probe Sequence
agaagactgtgatcctcatgtactc

SEQ ID NO: 69398 - DNA, 25 bp, Probe Sequence
aataataaggagagaagtgactgtt

SEQ ID NO: 69399 - DNA, 25 bp, Probe Sequence
gagaagactgtgatcctcatgtact

SEQ ID NO: 69400 - DNA, 25 bp, Probe Sequence
gaagactgtgatcctcatgtactca

SEQ ID NO: 69401 - DNA, 25 bp, Probe Sequence
gataaaccaacgagatgagaagact

SEQ ID NO: 69402 - DNA, 25 bp, Probe Sequence
agataaaccaacgagatgagaagac

SEQ ID NO: 69403 - DNA, 25 bp, Probe Sequence
ataaaccaacgagatgagaagactg

SEQ ID NO: 69404 - DNA, 25 bp, Probe Sequence
tagataaaccaacgagatgagaaga

SEQ ID NO: 69405 - DNA, 25 bp, Probe Sequence
aagactgtgatcctcatgtactcag

SEQ ID NO: 69406 - DNA, 25 bp, Probe Sequence
cgtggataaactaacctctaacaga

SEQ ID NO: 69407 - DNA, 25 bp, Probe Sequence
tttcccattgaatagaagccagttt

SEQ ID NO: 69408 - DNA, 25 bp, Probe Sequence
ttctttgtaaacagttggatggatt

SEQ ID NO: 69409 - DNA, 25 bp, Probe Sequence
cattctttgtaaacagttggatgga

SEQ ID NO: 69410 - DNA, 25 bp, Probe Sequence
accaatgaaatagataaaccaacga

SEQ ID NO: 69411 - DNA, 25 bp, Probe Sequence
attctttgtaaacagttggatggat

SEQ ID NO: 69412 - DNA, 25 bp, Probe Sequence
gactgtgatcctcatgtactcagag

SEQ ID NO: 69413 - DNA, 25 bp, Probe Sequence
taaaccaacgagatgagaagactgt

SEQ ID NO: 69414 - DNA, 25 bp, Probe Sequence
ccaatgaaatagataaaccaacgag

SEQ ID NO: 69415 - DNA, 25 bp, Probe Sequence
atagacagcagttagtattattggc

SEQ ID NO: 69416 - DNA, 25 bp, Probe Sequence
tgctacaccattaagaatatgtcct

SEQ ID NO: 69417 - DNA, 25 bp, Probe Sequence
ttgctacaccattaagaatatgtcc

SEQ ID NO: 69418 - DNA, 25 bp, Probe Sequence
gctacaccattaagaatatgtcctt

SEQ ID NO: 69419 - DNA, 25 bp, Probe Sequence
taggcatcttagtggacgattgttc

SEQ ID NO: 69420 - DNA, 25 bp, Probe Sequence
gtaggcatcttagtggacgattgtt

SEQ ID NO: 69421 - DNA, 25 bp, Probe Sequence
taaatgacaggtaggcatcttagtg

SEQ ID NO: 69422 - DNA, 25 bp, Probe Sequence
ataaatgacaggtaggcatcttagt

SEQ ID NO: 69423 - DNA, 25 bp, Probe Sequence
aatgacaggtaggcatcttagtgga

SEQ ID NO: 69424 - DNA, 25 bp, Probe Sequence
tattggcttattaccatgagactgc

SEQ ID NO: 69425 - DNA, 25 bp, Probe Sequence
tttcactttgctacaccattaagaa

SEQ ID NO: 69426 - DNA, 25 bp, Probe Sequence
ttcactttgctacaccattaagaat

SEQ ID NO: 69427 - DNA, 25 bp, Probe Sequence
agacagcagttagtattattggctt

SEQ ID NO: 69428 - DNA, 25 bp, Probe Sequence
gacgattgttctccataaggcattt

SEQ ID NO: 69429 - DNA, 25 bp, Probe Sequence
gtggtaggtactaaatagacagcag

SEQ ID NO: 69430 - DNA, 25 bp, Probe Sequence
tagacagcagttagtattattggct

SEQ ID NO: 69431 - DNA, 25 bp, Probe Sequence
ttattggcttattaccatgagactg

SEQ ID NO: 69432 - DNA, 25 bp, Probe Sequence
atggcatgtggtaggtactaaatag

SEQ ID NO: 69433 - DNA, 25 bp, Probe Sequence
gatggcatgtggtaggtactaaata

SEQ ID NO: 69434 - DNA, 25 bp, Probe Sequence
ggcatgtggtaggtactaaatagac

SEQ ID NO: 69435 - DNA, 25 bp, Probe Sequence
caggacttagcacgagattcacttg

SEQ ID NO: 69436 - DNA, 25 bp, Probe Sequence
tggcatgtggtaggtactaaataga

SEQ ID NO: 69437 - DNA, 25 bp, Probe Sequence
gacagcagttagtattattggctta

SEQ ID NO: 69438 - DNA, 25 bp, Probe Sequence
ggcatcttagtggacgattgttctc

SEQ ID NO: 69439 - DNA, 25 bp, Probe Sequence
tgttaagtgatattgctagatggtg

SEQ ID NO: 69440 - DNA, 25 bp, Probe Sequence
gtgttaagtgatattgctagatggt

SEQ ID NO: 69441 - DNA, 25 bp, Probe Sequence
gttaagtgatattgctagatggtga

SEQ ID NO: 69442 - DNA, 25 bp, Probe Sequence
agtgttaagtgatattgctagatgg

SEQ ID NO: 69443 - DNA, 25 bp, Probe Sequence
aattatggagcacaatgtaagacaa

SEQ ID NO: 69444 - DNA, 25 bp, Probe Sequence
acagtgttaagtgatattgctagat

SEQ ID NO: 69445 - DNA, 25 bp, Probe Sequence
ttaagtgatattgctagatggtgat

SEQ ID NO: 69446 - DNA, 25 bp, Probe Sequence
cagtgttaagtgatattgctagatg

SEQ ID NO: 69447 - DNA, 25 bp, Probe Sequence
aacagtgttaagtgatattgctaga

SEQ ID NO: 69448 - DNA, 25 bp, Probe Sequence
ctgatgtgacattatgccacttctt

SEQ ID NO: 69449 - DNA, 25 bp, Probe Sequence
ctcaggatgcagataatactcatgt

SEQ ID NO: 69450 - DNA, 25 bp, Probe Sequence
cctcaggatgcagataatactcatg

SEQ ID NO: 69451 - DNA, 25 bp, Probe Sequence
agtgatattgctagatggtgatatt

SEQ ID NO: 69452 - DNA, 25 bp, Probe Sequence
aagtgatattgctagatggtgatat

SEQ ID NO: 69453 - DNA, 25 bp, Probe Sequence
gttctcccttattaacttggcattt

SEQ ID NO: 69454 - DNA, 25 bp, Probe Sequence
tcaggatgcagataatactcatgta

SEQ ID NO: 69455 - DNA, 25 bp, Probe Sequence
ttgaccatagagccaaattagttct

SEQ ID NO: 69456 - DNA, 25 bp, Probe Sequence
tagtgggcgtagataaactcataag

SEQ ID NO: 69457 - DNA, 25 bp, Probe Sequence
ggttctcccttattaacttggcatt

SEQ ID NO: 69458 - DNA, 25 bp, Probe Sequence
tttggttctcccttattaacttggc

SEQ ID NO: 69459 - DNA, 25 bp, Probe Sequence
atagtgggcgtagataaactcataa

SEQ ID NO: 69460 - DNA, 25 bp, Probe Sequence
aatatagtgggcgtagataaactca

SEQ ID NO: 69461 - DNA, 25 bp, Probe Sequence
tgaatatagtgggcgtagataaact

SEQ ID NO: 69462 - DNA, 25 bp, Probe Sequence
atgaatatagtgggcgtagataaac

SEQ ID NO: 69463 - DNA, 25 bp, Probe Sequence
gtgatagagcaagaacctgtctcaa

SEQ ID NO: 69464 - DNA, 25 bp, Probe Sequence
tgatagagcaagaacctgtctcaaa

SEQ ID NO: 69465 - DNA, 25 bp, Probe Sequence
ggtgatagagcaagaacctgtctca

SEQ ID NO: 69466 - DNA, 25 bp, Probe Sequence
gatagagcaagaacctgtctcaaaa

SEQ ID NO: 69467 - DNA, 25 bp, Probe Sequence
gggtgatagagcaagaacctgtctc

SEQ ID NO: 69468 - DNA, 25 bp, Probe Sequence
ctgggtgatagagcaagaacctgtc

SEQ ID NO: 69469 - DNA, 25 bp, Probe Sequence
tgggtgatagagcaagaacctgtct

SEQ ID NO: 69470 - DNA, 25 bp, Probe Sequence
tggttgtcaaatgttaagtcctcta

SEQ ID NO: 69471 - DNA, 25 bp, Probe Sequence
atggttgtcaaatgttaagtcctct

SEQ ID NO: 69472 - DNA, 25 bp, Probe Sequence
aatggttgtcaaatgttaagtcctc

SEQ ID NO: 69473 - DNA, 25 bp, Probe Sequence
aaatggttgtcaaatgttaagtcct

SEQ ID NO: 69474 - DNA, 25 bp, Probe Sequence
gaaatggttgtcaaatgttaagtcc

SEQ ID NO: 69475 - DNA, 25 bp, Probe Sequence
tttgtctgaggaaagaaaggtatct

SEQ ID NO: 69476 - DNA, 25 bp, Probe Sequence
tctatttgtctgaggaaagaaaggt

SEQ ID NO: 69477 - DNA, 25 bp, Probe Sequence
ggttgtcaaatgttaagtcctctat

SEQ ID NO: 69478 - DNA, 25 bp, Probe Sequence
atttgtctgaggaaagaaaggtatc

SEQ ID NO: 69479 - DNA, 25 bp, Probe Sequence
ctctatttgtctgaggaaagaaagg

SEQ ID NO: 69480 - DNA, 25 bp, Probe Sequence
agaaatggttgtcaaatgttaagtc

SEQ ID NO: 69481 - DNA, 25 bp, Probe Sequence
gagaaatggttgtcaaatgttaagt

SEQ ID NO: 69482 - DNA, 25 bp, Probe Sequence
ctatttgtctgaggaaagaaaggta

SEQ ID NO: 69483 - DNA, 25 bp, Probe Sequence
tgagaaatggttgtcaaatgttaag

SEQ ID NO: 69484 - DNA, 25 bp, Probe Sequence
atacacctataatcccagctactca

SEQ ID NO: 69485 - DNA, 25 bp, Probe Sequence
catacacctataatcccagctactc

SEQ ID NO: 69486 - DNA, 25 bp, Probe Sequence
aatgttaagtcctctatttgtctga

SEQ ID NO: 69487 - DNA, 25 bp, Probe Sequence
tacacctataatcccagctactcag

SEQ ID NO: 69488 - DNA, 25 bp, Probe Sequence
atgttaagtcctctatttgtctgag

SEQ ID NO: 69489 - DNA, 25 bp, Probe Sequence
tatttgtctgaggaaagaaaggtat

SEQ ID NO: 69490 - DNA, 25 bp, Probe Sequence
gttgtcaaatgttaagtcctctatt

SEQ ID NO: 69491 - DNA, 25 bp, Probe Sequence
gcatacacctataatcccagctact

SEQ ID NO: 69492 - DNA, 25 bp, Probe Sequence
cataaagatactgcatgggtcattt

SEQ ID NO: 69493 - DNA, 25 bp, Probe Sequence
taaagatactgcatgggtcatttcc

SEQ ID NO: 69494 - DNA, 25 bp, Probe Sequence
ataatgttggatgctatgagaaggc

SEQ ID NO: 69495 - DNA, 25 bp, Probe Sequence
ttactatctctacgccttgctaatt

SEQ ID NO: 69496 - DNA, 25 bp, Probe Sequence
tataatgttggatgctatgagaagg

SEQ ID NO: 69497 - DNA, 25 bp, Probe Sequence
cctataatgttggatgctatgagaa

SEQ ID NO: 69498 - DNA, 25 bp, Probe Sequence
gattgaacacctactatgtgatcct

SEQ ID NO: 69499 - DNA, 25 bp, Probe Sequence
tgattgaacacctactatgtgatcc

SEQ ID NO: 69500 - DNA, 25 bp, Probe Sequence
tcctataatgttggatgctatgaga

SEQ ID NO: 69501 - DNA, 25 bp, Probe Sequence
ctataatgttggatgctatgagaag

SEQ ID NO: 69502 - DNA, 25 bp, Probe Sequence
atcttcatagggacttggcatatac

SEQ ID NO: 69503 - DNA, 25 bp, Probe Sequence
tataagggagggagataacaggttt

SEQ ID NO: 69504 - DNA, 25 bp, Probe Sequence
tttactatctctacgccttgctaat

SEQ ID NO: 69505 - DNA, 25 bp, Probe Sequence
ttgaacacctactatgtgatcctat

SEQ ID NO: 69506 - DNA, 25 bp, Probe Sequence
attgaacacctactatgtgatccta

SEQ ID NO: 69507 - DNA, 25 bp, Probe Sequence
ttgattgaacacctactatgtgatc

SEQ ID NO: 69508 - DNA, 25 bp, Probe Sequence
atagggacttggcatatacacagat

SEQ ID NO: 69509 - DNA, 25 bp, Probe Sequence
cttcatagggacttggcatatacac

SEQ ID NO: 69510 - DNA, 25 bp, Probe Sequence
tcttcatagggacttggcatataca

SEQ ID NO: 69511 - DNA, 25 bp, Probe Sequence
ccaaatacaaatacaccgttaggat

SEQ ID NO: 69512 - DNA, 25 bp, Probe Sequence
atccaaatacaaatacaccgttagg

SEQ ID NO: 69513 - DNA, 25 bp, Probe Sequence
actatctctacgccttgctaatttc

SEQ ID NO: 69514 - DNA, 25 bp, Probe Sequence
tactatctctacgccttgctaattt

SEQ ID NO: 69515 - DNA, 25 bp, Probe Sequence
ttcggtggaccaactattccttaat

SEQ ID NO: 69516 - DNA, 25 bp, Probe Sequence
attgattgaacacctactatgtgat

SEQ ID NO: 69517 - DNA, 25 bp, Probe Sequence
ttcatagggacttggcatatacaca

SEQ ID NO: 69518 - DNA, 25 bp, Probe Sequence
gttgtctaagatgtaatgagtgctc

SEQ ID NO: 69519 - DNA, 25 bp, Probe Sequence
cgttgtctaagatgtaatgagtgct

SEQ ID NO: 69520 - DNA, 25 bp, Probe Sequence
ttgtctaagatgtaatgagtgctct

SEQ ID NO: 69521 - DNA, 25 bp, Probe Sequence
tgtctaagatgtaatgagtgctctc

SEQ ID NO: 69522 - DNA, 25 bp, Probe Sequence
taagatgtaatgagtgctctctgag

SEQ ID NO: 69523 - DNA, 25 bp, Probe Sequence
ctaagatgtaatgagtgctctctga

SEQ ID NO: 69524 - DNA, 25 bp, Probe Sequence
tctaagatgtaatgagtgctctctg

SEQ ID NO: 69525 - DNA, 25 bp, Probe Sequence
gtctaagatgtaatgagtgctctct

SEQ ID NO: 69526 - DNA, 25 bp, Probe Sequence
aagatgtaatgagtgctctctgaga

SEQ ID NO: 69527 - DNA, 25 bp, Probe Sequence
acgttgtctaagatgtaatgagtgc

SEQ ID NO: 69528 - DNA, 25 bp, Probe Sequence
agagaatcactcaattcctattgga

SEQ ID NO: 69529 - DNA, 25 bp, Probe Sequence
gagaatcactcaattcctattggag

SEQ ID NO: 69530 - DNA, 25 bp, Probe Sequence
gagagaatcactcaattcctattgg

SEQ ID NO: 69531 - DNA, 25 bp, Probe Sequence
gagtgcaatccttacttgagaactt

SEQ ID NO: 69532 - DNA, 25 bp, Probe Sequence
tgacgttgtctaagatgtaatgagt

SEQ ID NO: 69533 - DNA, 25 bp, Probe Sequence
agtgacgttgtctaagatgtaatga

SEQ ID NO: 69534 - DNA, 25 bp, Probe Sequence
gaagagtgacgttgtctaagatgta

SEQ ID NO: 69535 - DNA, 25 bp, Probe Sequence
aagagtgacgttgtctaagatgtaa

SEQ ID NO: 69536 - DNA, 25 bp, Probe Sequence
gacgttgtctaagatgtaatgagtg

SEQ ID NO: 69537 - DNA, 25 bp, Probe Sequence
gtgacgttgtctaagatgtaatgag

SEQ ID NO: 69538 - DNA, 25 bp, Probe Sequence
gagtgacgttgtctaagatgtaatg

SEQ ID NO: 69539 - DNA, 25 bp, Probe Sequence
agagtgacgttgtctaagatgtaat

SEQ ID NO: 69540 - DNA, 25 bp, Probe Sequence
aagaagagtgacgttgtctaagatg

SEQ ID NO: 69541 - DNA, 25 bp, Probe Sequence
agaagagtgacgttgtctaagatgt

SEQ ID NO: 69542 - DNA, 25 bp, Probe Sequence
ggacgaggtagttctaatgcttcta

SEQ ID NO: 69543 - DNA, 25 bp, Probe Sequence
tctattgatgctcttccttagtcat

SEQ ID NO: 69544 - DNA, 25 bp, Probe Sequence
atctattgatgctcttccttagtca

SEQ ID NO: 69545 - DNA, 25 bp, Probe Sequence
tatctattgatgctcttccttagtc

SEQ ID NO: 69546 - DNA, 25 bp, Probe Sequence
attctgtcctccttcgattcttcta

SEQ ID NO: 69547 - DNA, 25 bp, Probe Sequence
ttctgtcctccttcgattcttctaa

SEQ ID NO: 69548 - DNA, 25 bp, Probe Sequence
ctggacgaggtagttctaatgcttc

SEQ ID NO: 69549 - DNA, 25 bp, Probe Sequence
ctattgatgctcttccttagtcata

SEQ ID NO: 69550 - DNA, 25 bp, Probe Sequence
atttcccatcttactttctcattgc

SEQ ID NO: 69551 - DNA, 25 bp, Probe Sequence
accaatttcccatcttactttctca

SEQ ID NO: 69552 - DNA, 25 bp, Probe Sequence
gctacaccatatttccttctccaaa

SEQ ID NO: 69553 - DNA, 25 bp, Probe Sequence
gctcttccttagtcataaattgtgc

SEQ ID NO: 69554 - DNA, 25 bp, Probe Sequence
tctgtcctccttcgattcttctaag

SEQ ID NO: 69555 - DNA, 25 bp, Probe Sequence
tggacgaggtagttctaatgcttct

SEQ ID NO: 69556 - DNA, 25 bp, Probe Sequence
tttcccatcttactttctcattgcc

SEQ ID NO: 69557 - DNA, 25 bp, Probe Sequence
acacacattcagagtttctaccaat

SEQ ID NO: 69558 - DNA, 25 bp, Probe Sequence
tgctcttccttagtcataaattgtg

SEQ ID NO: 69559 - DNA, 25 bp, Probe Sequence
gattctgtcctccttcgattcttct

SEQ ID NO: 69560 - DNA, 25 bp, Probe Sequence
tattgatgctcttccttagtcataa

SEQ ID NO: 69561 - DNA, 25 bp, Probe Sequence
ccaatttcccatcttactttctcat

SEQ ID NO: 69562 - DNA, 25 bp, Probe Sequence
agagtttctaccaatttcccatctt

SEQ ID NO: 69563 - DNA, 25 bp, Probe Sequence
ttcagagtttctaccaatttcccat

SEQ ID NO: 69564 - DNA, 25 bp, Probe Sequence
attcagagtttctaccaatttccca

SEQ ID NO: 69565 - DNA, 25 bp, Probe Sequence
cattcagagtttctaccaatttccc

SEQ ID NO: 69566 - DNA, 25 bp, Probe Sequence
gctcaatgtctcatacctgtaatcc

SEQ ID NO: 69567 - DNA, 25 bp, Probe Sequence
ggctcaatgtctcatacctgtaatc

SEQ ID NO: 69568 - DNA, 25 bp, Probe Sequence
tggctcaatgtctcatacctgtaat

SEQ ID NO: 69569 - DNA, 25 bp, Probe Sequence
ctggctcaatgtctcatacctgtaa

SEQ ID NO: 69570 - DNA, 25 bp, Probe Sequence
ttggatgtagagaccgcttcattac

SEQ ID NO: 69571 - DNA, 25 bp, Probe Sequence
atatttacatttgagaagcccttgc

SEQ ID NO: 69572 - DNA, 25 bp, Probe Sequence
ctcaatgtctcatacctgtaatccc

SEQ ID NO: 69573 - DNA, 25 bp, Probe Sequence
tagagaccgcttcattactccttct

SEQ ID NO: 69574 - DNA, 25 bp, Probe Sequence
gtagagaccgcttcattactccttc

SEQ ID NO: 69575 - DNA, 25 bp, Probe Sequence
gatgtagagaccgcttcattactcc

SEQ ID NO: 69576 - DNA, 25 bp, Probe Sequence
ggatgtagagaccgcttcattactc

SEQ ID NO: 69577 - DNA, 25 bp, Probe Sequence
tcaatgtctcatacctgtaatccca

SEQ ID NO: 69578 - DNA, 25 bp, Probe Sequence
tggatgtagagaccgcttcattact

SEQ ID NO: 69579 - DNA, 25 bp, Probe Sequence
caagtagatgcaaggagttcaagac

SEQ ID NO: 69580 - DNA, 25 bp, Probe Sequence
tatttacatttgagaagcccttgcc

SEQ ID NO: 69581 - DNA, 25 bp, Probe Sequence
catatttacatttgagaagcccttg

SEQ ID NO: 69582 - DNA, 25 bp, Probe Sequence
caagatccctagatgatacacactc

SEQ ID NO: 69583 - DNA, 25 bp, Probe Sequence
aacaagatccctagatgatacacac

SEQ ID NO: 69584 - DNA, 25 bp, Probe Sequence
atgtagagaccgcttcattactcct

SEQ ID NO: 69585 - DNA, 25 bp, Probe Sequence
acaagatccctagatgatacacact

SEQ ID NO: 69586 - DNA, 25 bp, Probe Sequence
aaacaagatccctagatgatacaca

SEQ ID NO: 69587 - DNA, 25 bp, Probe Sequence
catggtcaggtagcatcagtatcac

SEQ ID NO: 69588 - DNA, 25 bp, Probe Sequence
tgtagagaccgcttcattactcctt

SEQ ID NO: 69589 - DNA, 25 bp, Probe Sequence
tttggatgtagagaccgcttcatta

SEQ ID NO: 69590 - DNA, 25 bp, Probe Sequence
atgaccttatggactttcctacttg

SEQ ID NO: 69591 - DNA, 25 bp, Probe Sequence
caaatcaacgggactttccataatg

SEQ ID NO: 69592 - DNA, 25 bp, Probe Sequence
ccaaatcaacgggactttccataat

SEQ ID NO: 69593 - DNA, 25 bp, Probe Sequence
catgaccttatggactttcctactt

SEQ ID NO: 69594 - DNA, 25 bp, Probe Sequence
tacatgaccttatggactttcctac

SEQ ID NO: 69595 - DNA, 25 bp, Probe Sequence
ctacatgaccttatggactttccta

SEQ ID NO: 69596 - DNA, 25 bp, Probe Sequence
acatgaccttatggactttcctact

SEQ ID NO: 69597 - DNA, 25 bp, Probe Sequence
cctacatgaccttatggactttcct

SEQ ID NO: 69598 - DNA, 25 bp, Probe Sequence
tgaccttatggactttcctacttgc

SEQ ID NO: 69599 - DNA, 25 bp, Probe Sequence
accaaatcaacgggactttccataa

SEQ ID NO: 69600 - DNA, 25 bp, Probe Sequence
cttatggactttcctacttgcagta

SEQ ID NO: 69601 - DNA, 25 bp, Probe Sequence
ttatggactttcctacttgcagtac

SEQ ID NO: 69602 - DNA, 25 bp, Probe Sequence
ccctacatgaccttatggactttcc

SEQ ID NO: 69603 - DNA, 25 bp, Probe Sequence
tatggactttcctacttgcagtaca

SEQ ID NO: 69604 - DNA, 25 bp, Probe Sequence
atggactttcctacttgcagtacat

SEQ ID NO: 69605 - DNA, 25 bp, Probe Sequence
caccaaatcaacgggactttccata

SEQ ID NO: 69606 - DNA, 25 bp, Probe Sequence
ccttatggactttcctacttgcagt

SEQ ID NO: 69607 - DNA, 25 bp, Probe Sequence
accttatggactttcctacttgcag

SEQ ID NO: 69608 - DNA, 25 bp, Probe Sequence
gaccttatggactttcctacttgca

SEQ ID NO: 69609 - DNA, 25 bp, Probe Sequence
tggactttcctacttgcagtacatc

SEQ ID NO: 69610 - DNA, 25 bp, Probe Sequence
cccctacatgaccttatggactttc

SEQ ID NO: 69611 - DNA, 25 bp, Probe Sequence
cttatgcccctacatgaccttatgg

SEQ ID NO: 69612 - DNA, 25 bp, Probe Sequence
ttatgcccctacatgaccttatgga

SEQ ID NO: 69613 - DNA, 25 bp, Probe Sequence
gcttatgcccctacatgaccttatg

SEQ ID NO: 69614 - DNA, 25 bp, Probe Sequence
taatgatagtggcatctgtatgagc

SEQ ID NO: 69615 - DNA, 25 bp, Probe Sequence
ataatgatagtggcatctgtatgag

SEQ ID NO: 69616 - DNA, 25 bp, Probe Sequence
gataatgatagtggcatctgtatga

SEQ ID NO: 69617 - DNA, 25 bp, Probe Sequence
atatcactgaaggagataggaagcc

SEQ ID NO: 69618 - DNA, 25 bp, Probe Sequence
gaaggagataggaagccagactaca

SEQ ID NO: 69619 - DNA, 25 bp, Probe Sequence
tgaaggagataggaagccagactac

SEQ ID NO: 69620 - DNA, 25 bp, Probe Sequence
tgaaagatttgatagaagaggtccg

SEQ ID NO: 69621 - DNA, 25 bp, Probe Sequence
cagagagcttcttatgtgttgagtc

SEQ ID NO: 69622 - DNA, 25 bp, Probe Sequence
tatcactgaaggagataggaagcca

SEQ ID NO: 69623 - DNA, 25 bp, Probe Sequence
ccttcagataatgatagtggcatct

SEQ ID NO: 69624 - DNA, 25 bp, Probe Sequence
ctgaaagatttgatagaagaggtcc

SEQ ID NO: 69625 - DNA, 25 bp, Probe Sequence
aaggagataggaagccagactacac

SEQ ID NO: 69626 - DNA, 25 bp, Probe Sequence
aaaggagtgatgaaactggagtaat

SEQ ID NO: 69627 - DNA, 25 bp, Probe Sequence
gtaaaggagtgatgaaactggagta

SEQ ID NO: 69628 - DNA, 25 bp, Probe Sequence
gaaagatttgatagaagaggtccgc

SEQ ID NO: 69629 - DNA, 25 bp, Probe Sequence
aagtaaaggagtgatgaaactggag

SEQ ID NO: 69630 - DNA, 25 bp, Probe Sequence
ggagtgatgaaactggagtaatgaa

SEQ ID NO: 69631 - DNA, 25 bp, Probe Sequence
aaggagtgatgaaactggagtaatg

SEQ ID NO: 69632 - DNA, 25 bp, Probe Sequence
gagtgatgaaactggagtaatgaag

SEQ ID NO: 69633 - DNA, 25 bp, Probe Sequence
taaaggagtgatgaaactggagtaa

SEQ ID NO: 69634 - DNA, 25 bp, Probe Sequence
caagtaaaggagtgatgaaactgga

SEQ ID NO: 69635 - DNA, 25 bp, Probe Sequence
cccttcagataatgatagtggcatc

SEQ ID NO: 69636 - DNA, 25 bp, Probe Sequence
agagcttcttatgtgttgagtccaa

SEQ ID NO: 69637 - DNA, 25 bp, Probe Sequence
agagagcttcttatgtgttgagtcc

SEQ ID NO: 69638 - DNA, 25 bp, Probe Sequence
taatgatagtggcatctgtatgagc

SEQ ID NO: 69639 - DNA, 25 bp, Probe Sequence
ataatgatagtggcatctgtatgag

SEQ ID NO: 69640 - DNA, 25 bp, Probe Sequence
gataatgatagtggcatctgtatga

SEQ ID NO: 69641 - DNA, 25 bp, Probe Sequence
atatcactgaaggagataggaagcc

SEQ ID NO: 69642 - DNA, 25 bp, Probe Sequence
gaaggagataggaagccagactaca

SEQ ID NO: 69643 - DNA, 25 bp, Probe Sequence
tgaaggagataggaagccagactac

SEQ ID NO: 69644 - DNA, 25 bp, Probe Sequence
tgaaagatttgatagaagaggtccg

SEQ ID NO: 69645 - DNA, 25 bp, Probe Sequence
cagagagcttcttatgtgttgagtc

SEQ ID NO: 69646 - DNA, 25 bp, Probe Sequence
tatcactgaaggagataggaagcca

SEQ ID NO: 69647 - DNA, 25 bp, Probe Sequence
ccttcagataatgatagtggcatct

SEQ ID NO: 69648 - DNA, 25 bp, Probe Sequence
ctgaaagatttgatagaagaggtcc

SEQ ID NO: 69649 - DNA, 25 bp, Probe Sequence
aaggagataggaagccagactacac

SEQ ID NO: 69650 - DNA, 25 bp, Probe Sequence
aaaggagtgatgaaactggagtaat

SEQ ID NO: 69651 - DNA, 25 bp, Probe Sequence
gtaaaggagtgatgaaactggagta

SEQ ID NO: 69652 - DNA, 25 bp, Probe Sequence
gaaagatttgatagaagaggtccgc

SEQ ID NO: 69653 - DNA, 25 bp, Probe Sequence
aagtaaaggagtgatgaaactggag

SEQ ID NO: 69654 - DNA, 25 bp, Probe Sequence
ggagtgatgaaactggagtaatgaa

SEQ ID NO: 69655 - DNA, 25 bp, Probe Sequence
aaggagtgatgaaactggagtaatg

SEQ ID NO: 69656 - DNA, 25 bp, Probe Sequence
gagtgatgaaactggagtaatgaag

SEQ ID NO: 69657 - DNA, 25 bp, Probe Sequence
taaaggagtgatgaaactggagtaa

SEQ ID NO: 69658 - DNA, 25 bp, Probe Sequence
caagtaaaggagtgatgaaactgga

SEQ ID NO: 69659 - DNA, 25 bp, Probe Sequence
cccttcagataatgatagtggcatc

SEQ ID NO: 69660 - DNA, 25 bp, Probe Sequence
agagcttcttatgtgttgagtccaa

SEQ ID NO: 69661 - DNA, 25 bp, Probe Sequence
agagagcttcttatgtgttgagtcc

SEQ ID NO: 69662 - DNA, 25 bp, Probe Sequence
gtcctctaggtaactcaagtgtcac

SEQ ID NO: 69663 - DNA, 25 bp, Probe Sequence
cgtcctctaggtaactcaagtgtca

SEQ ID NO: 69664 - DNA, 25 bp, Probe Sequence
tcctctaggtaactcaagtgtcacc

SEQ ID NO: 69665 - DNA, 25 bp, Probe Sequence
ccgtcctctaggtaactcaagtgtc

SEQ ID NO: 69666 - DNA, 25 bp, Probe Sequence
ttcttccctctcttaccgtcctcta

SEQ ID NO: 69667 - DNA, 25 bp, Probe Sequence
aatccttcttgctggaccacttctt

SEQ ID NO: 69668 - DNA, 25 bp, Probe Sequence
taccgtcctctaggtaactcaagtg

SEQ ID NO: 69669 - DNA, 25 bp, Probe Sequence
tcttccctctcttaccgtcctctag

SEQ ID NO: 69670 - DNA, 25 bp, Probe Sequence
atccttcttgctggaccacttcttc

SEQ ID NO: 69671 - DNA, 25 bp, Probe Sequence
accgtcctctaggtaactcaagtgt

SEQ ID NO: 69672 - DNA, 25 bp, Probe Sequence
caatccttcttgctggaccacttct

SEQ ID NO: 69673 - DNA, 25 bp, Probe Sequence
ctggaccacttcttccctctcttac

SEQ ID NO: 69674 - DNA, 25 bp, Probe Sequence
cttcttccctctcttaccgtcctct

SEQ ID NO: 69675 - DNA, 25 bp, Probe Sequence
ctctaggtaactcaagtgtcacctc

SEQ ID NO: 69676 - DNA, 25 bp, Probe Sequence
acttcttccctctcttaccgtcctc

SEQ ID NO: 69677 - DNA, 25 bp, Probe Sequence
gtaactcaagtgtcacctccttgga

SEQ ID NO: 69678 - DNA, 25 bp, Probe Sequence
taggtaactcaagtgtcacctcctt

SEQ ID NO: 69679 - DNA, 25 bp, Probe Sequence
cacttcttccctctcttaccgtcct

SEQ ID NO: 69680 - DNA, 25 bp, Probe Sequence
taactcaagtgtcacctccttggag

SEQ ID NO: 69681 - DNA, 25 bp, Probe Sequence
ctaggtaactcaagtgtcacctcct

SEQ ID NO: 69682 - DNA, 25 bp, Probe Sequence
tctaggtaactcaagtgtcacctcc

SEQ ID NO: 69683 - DNA, 25 bp, Probe Sequence
cctctaggtaactcaagtgtcacct

SEQ ID NO: 69684 - DNA, 25 bp, Probe Sequence
cttccctctcttaccgtcctctagg

SEQ ID NO: 69685 - DNA, 25 bp, Probe Sequence
tggaccacttcttccctctcttacc

SEQ ID NO: 69686 - DNA, 25 bp, Probe Sequence
gatacacacataacctccttccatg

SEQ ID NO: 69687 - DNA, 25 bp, Probe Sequence
acttctgctgttgtctgatctaaga

SEQ ID NO: 69688 - DNA, 25 bp, Probe Sequence
atacacacataacctccttccatga

SEQ ID NO: 69689 - DNA, 25 bp, Probe Sequence
tacacacataacctccttccatgaa

SEQ ID NO: 69690 - DNA, 25 bp, Probe Sequence
catattcagatcactggagagaagt

SEQ ID NO: 69691 - DNA, 25 bp, Probe Sequence
attcagatcactggagagaagtaca

SEQ ID NO: 69692 - DNA, 25 bp, Probe Sequence
cttggatacacacataacctccttc

SEQ ID NO: 69693 - DNA, 25 bp, Probe Sequence
tattcagatcactggagagaagtac

SEQ ID NO: 69694 - DNA, 25 bp, Probe Sequence
aattggcaggaattagtcgtacttg

SEQ ID NO: 69695 - DNA, 25 bp, Probe Sequence
tatgccttggatacacacataacct

SEQ ID NO: 69696 - DNA, 25 bp, Probe Sequence
gacttctgctgttgtctgatctaag

SEQ ID NO: 69697 - DNA, 25 bp, Probe Sequence
ttcagatcactggagagaagtacag

SEQ ID NO: 69698 - DNA, 25 bp, Probe Sequence
atgccttggatacacacataacctc

SEQ ID NO: 69699 - DNA, 25 bp, Probe Sequence
tagacctcatttatgccttggatac

SEQ ID NO: 69700 - DNA, 25 bp, Probe Sequence
ccatattcagatcactggagagaag

SEQ ID NO: 69701 - DNA, 25 bp, Probe Sequence
aagagttccatattcagatcactgg

SEQ ID NO: 69702 - DNA, 25 bp, Probe Sequence
atattcagatcactggagagaagta

SEQ ID NO: 69703 - DNA, 25 bp, Probe Sequence
tcatttatgccttggatacacacat

SEQ ID NO: 69704 - DNA, 25 bp, Probe Sequence
attgtttctctgccattgtttctct

SEQ ID NO: 69705 - DNA, 25 bp, Probe Sequence
cattgtttctctgccattgtttctc

SEQ ID NO: 69706 - DNA, 25 bp, Probe Sequence
ggatacacacataacctccttccat

SEQ ID NO: 69707 - DNA, 25 bp, Probe Sequence
ctcatttatgccttggatacacaca

SEQ ID NO: 69708 - DNA, 25 bp, Probe Sequence
ctagacctcatttatgccttggata

SEQ ID NO: 69709 - DNA, 25 bp, Probe Sequence
ttggatacacacataacctccttcc

SEQ ID NO: 69710 - DNA, 25 bp, Probe Sequence
ttgaacagtgaattatcagtgacat

SEQ ID NO: 69711 - DNA, 25 bp, Probe Sequence
attgaacagtgaattatcagtgaca

SEQ ID NO: 69712 - DNA, 25 bp, Probe Sequence
gaacagaacaggaactggaagataa

SEQ ID NO: 69713 - DNA, 25 bp, Probe Sequence
gattgaacagtgaattatcagtgac

SEQ ID NO: 69714 - DNA, 25 bp, Probe Sequence
agaacagaacaggaactggaagata

SEQ ID NO: 69715 - DNA, 25 bp, Probe Sequence
tgaacagtgaattatcagtgacatg

SEQ ID NO: 69716 - DNA, 25 bp, Probe Sequence
agattgaacagtgaattatcagtga

SEQ ID NO: 69717 - DNA, 25 bp, Probe Sequence
aagaacagaacaggaactggaagat

SEQ ID NO: 69718 - DNA, 25 bp, Probe Sequence
aagattgaacagtgaattatcagtg

SEQ ID NO: 69719 - DNA, 25 bp, Probe Sequence
tgaaagaaagaagccagacagaaat

SEQ ID NO: 69720 - DNA, 25 bp, Probe Sequence
atgaaagaaagaagccagacagaaa

SEQ ID NO: 69721 - DNA, 25 bp, Probe Sequence
aatgaaagaaagaagccagacagaa

SEQ ID NO: 69722 - DNA, 25 bp, Probe Sequence
aaatgaaagaaagaagccagacaga

SEQ ID NO: 69723 - DNA, 25 bp, Probe Sequence
gaaagaaagaagccagacagaaatt

SEQ ID NO: 69724 - DNA, 25 bp, Probe Sequence
acttagattaccaaattagcccagg

SEQ ID NO: 69725 - DNA, 25 bp, Probe Sequence
atgtgaggcagtattaaatggtatt

SEQ ID NO: 69726 - DNA, 25 bp, Probe Sequence
acagaacaggaactggaagataaat

SEQ ID NO: 69727 - DNA, 25 bp, Probe Sequence
aacagaacaggaactggaagataaa

SEQ ID NO: 69728 - DNA, 25 bp, Probe Sequence
ttaaagaacagaacaggaactggaa

SEQ ID NO: 69729 - DNA, 25 bp, Probe Sequence
tacttagattaccaaattagcccag

SEQ ID NO: 69730 - DNA, 25 bp, Probe Sequence
ctacttagattaccaaattagccca

SEQ ID NO: 69731 - DNA, 25 bp, Probe Sequence
taaagaacagaacaggaactggaag

SEQ ID NO: 69732 - DNA, 25 bp, Probe Sequence
gttaaagaacagaacaggaactgga

SEQ ID NO: 69733 - DNA, 25 bp, Probe Sequence
tgtgaggcagtattaaatggtatta

SEQ ID NO: 69734 - DNA, 25 bp, Probe Sequence
taatgtggcataaaccctgtctcta

SEQ ID NO: 69735 - DNA, 25 bp, Probe Sequence
ggcataaaccctgtctctactgaaa

SEQ ID NO: 69736 - DNA, 25 bp, Probe Sequence
caggagaattgcttgaactcaggag

SEQ ID NO: 69737 - DNA, 25 bp, Probe Sequence
ctaatgtggcataaaccctgtctct

SEQ ID NO: 69738 - DNA, 25 bp, Probe Sequence
aatgtggcataaaccctgtctctac

SEQ ID NO: 69739 - DNA, 25 bp, Probe Sequence
atgcctgtaatcccagttatctcag

SEQ ID NO: 69740 - DNA, 25 bp, Probe Sequence
gtaatcccagttatctcaggagact

SEQ ID NO: 69741 - DNA, 25 bp, Probe Sequence
ctgtaatcccagttatctcaggaga

SEQ ID NO: 69742 - DNA, 25 bp, Probe Sequence
tgtaatcccagttatctcaggagac

SEQ ID NO: 69743 - DNA, 25 bp, Probe Sequence
tggcataaaccctgtctctactgaa

SEQ ID NO: 69744 - DNA, 25 bp, Probe Sequence
catgcctgtaatcccagttatctca

SEQ ID NO: 69745 - DNA, 25 bp, Probe Sequence
acatgcctgtaatcccagttatctc

SEQ ID NO: 69746 - DNA, 25 bp, Probe Sequence
atgtggcataaaccctgtctctact

SEQ ID NO: 69747 - DNA, 25 bp, Probe Sequence
gcataaaccctgtctctactgaaaa

SEQ ID NO: 69748 - DNA, 25 bp, Probe Sequence
cacatgcctgtaatcccagttatct

SEQ ID NO: 69749 - DNA, 25 bp, Probe Sequence
aggagaattgcttgaactcaggagg

SEQ ID NO: 69750 - DNA, 25 bp, Probe Sequence
cataaaccctgtctctactgaaaat

SEQ ID NO: 69751 - DNA, 25 bp, Probe Sequence
gtggcataaaccctgtctctactga

SEQ ID NO: 69752 - DNA, 25 bp, Probe Sequence
gctaatgtggcataaaccctgtctc

SEQ ID NO: 69753 - DNA, 25 bp, Probe Sequence
aaccctgtctctactgaaaataaaa

SEQ ID NO: 69754 - DNA, 25 bp, Probe Sequence
aaaccctgtctctactgaaaataaa

SEQ ID NO: 69755 - DNA, 25 bp, Probe Sequence
tgtggcataaaccctgtctctactg

SEQ ID NO: 69756 - DNA, 25 bp, Probe Sequence
taaaccctgtctctactgaaaataa

SEQ ID NO: 69757 - DNA, 25 bp, Probe Sequence
ataaaccctgtctctactgaaaata

SEQ ID NO: 69758 - DNA, 25 bp, Probe Sequence
ttctcacttgctcttcatacttcta

SEQ ID NO: 69759 - DNA, 25 bp, Probe Sequence
tctcacttgctcttcatacttctat

SEQ ID NO: 69760 - DNA, 25 bp, Probe Sequence
ctcacttgctcttcatacttctatt

SEQ ID NO: 69761 - DNA, 25 bp, Probe Sequence
ttgaggtaactgttgtaactatgaa

SEQ ID NO: 69762 - DNA, 25 bp, Probe Sequence
tttctcacttgctcttcatacttct

SEQ ID NO: 69763 - DNA, 25 bp, Probe Sequence
atttctcacttgctcttcatacttc

SEQ ID NO: 69764 - DNA, 25 bp, Probe Sequence
gatttctcacttgctcttcatactt

SEQ ID NO: 69765 - DNA, 25 bp, Probe Sequence
tctgaaagtagtgcttaaacctgat

SEQ ID NO: 69766 - DNA, 25 bp, Probe Sequence
atctgaaagtagtgcttaaacctga

SEQ ID NO: 69767 - DNA, 25 bp, Probe Sequence
tgaaatgcttatctgaaagtagtgc

SEQ ID NO: 69768 - DNA, 25 bp, Probe Sequence
gaaatgcttatctgaaagtagtgct

SEQ ID NO: 69769 - DNA, 25 bp, Probe Sequence
agatttctcacttgctcttcatact

SEQ ID NO: 69770 - DNA, 25 bp, Probe Sequence
cagatttctcacttgctcttcatac

SEQ ID NO: 69771 - DNA, 25 bp, Probe Sequence
ctgaaagtagtgcttaaacctgatt

SEQ ID NO: 69772 - DNA, 25 bp, Probe Sequence
ccagatttctcacttgctcttcata

SEQ ID NO: 69773 - DNA, 25 bp, Probe Sequence
aaatgcttatctgaaagtagtgctt

SEQ ID NO: 69774 - DNA, 25 bp, Probe Sequence
tgaaagtagtgcttaaacctgattt

SEQ ID NO: 69775 - DNA, 25 bp, Probe Sequence
cgatgggattggaatacattgtaac

SEQ ID NO: 69776 - DNA, 25 bp, Probe Sequence
ggtaactgttgtaactatgaaatgc

SEQ ID NO: 69777 - DNA, 25 bp, Probe Sequence
cctagtgtaacaatgaaaccagatt

SEQ ID NO: 69778 - DNA, 25 bp, Probe Sequence
gcctagtgtaacaatgaaaccagat

SEQ ID NO: 69779 - DNA, 25 bp, Probe Sequence
aaagtagtgcttaaacctgatttct

SEQ ID NO: 69780 - DNA, 25 bp, Probe Sequence
tatctgaaagtagtgcttaaacctg

SEQ ID NO: 69781 - DNA, 25 bp, Probe Sequence
tgcttatctgaaagtagtgcttaaa

SEQ ID NO: 69782 - DNA, 25 bp, Probe Sequence
tttgtttgttccagggtaagcatct

SEQ ID NO: 69783 - DNA, 25 bp, Probe Sequence
gagattcagcacctagtgtcttcct

SEQ ID NO: 69784 - DNA, 25 bp, Probe Sequence
aggagattcagcacctagtgtcttc

SEQ ID NO: 69785 - DNA, 25 bp, Probe Sequence
agattcagcacctagtgtcttcctg

SEQ ID NO: 69786 - DNA, 25 bp, Probe Sequence
caggagattcagcacctagtgtctt

SEQ ID NO: 69787 - DNA, 25 bp, Probe Sequence
tttgttccagggtaagcatctgttt

SEQ ID NO: 69788 - DNA, 25 bp, Probe Sequence
atcagaactcatccttgatgtcaaa

SEQ ID NO: 69789 - DNA, 25 bp, Probe Sequence
cagggtaagcatctgttttattcag

SEQ ID NO: 69790 - DNA, 25 bp, Probe Sequence
ttccagggtaagcatctgttttatt

SEQ ID NO: 69791 - DNA, 25 bp, Probe Sequence
ttttgtttgttccagggtaagcatc

SEQ ID NO: 69792 - DNA, 25 bp, Probe Sequence
tccagggtaagcatctgttttattc

SEQ ID NO: 69793 - DNA, 25 bp, Probe Sequence
gtttgttccagggtaagcatctgtt

SEQ ID NO: 69794 - DNA, 25 bp, Probe Sequence
ttgtttgttccagggtaagcatctg

SEQ ID NO: 69795 - DNA, 25 bp, Probe Sequence
ccagggtaagcatctgttttattca

SEQ ID NO: 69796 - DNA, 25 bp, Probe Sequence
gttccagggtaagcatctgttttat

SEQ ID NO: 69797 - DNA, 25 bp, Probe Sequence
gggaacatcagaactcatccttgat

SEQ ID NO: 69798 - DNA, 25 bp, Probe Sequence
gtacactttggtgaagacctcatcc

SEQ ID NO: 69799 - DNA, 25 bp, Probe Sequence
ggagattcagcacctagtgtcttcc

SEQ ID NO: 69800 - DNA, 25 bp, Probe Sequence
tacactttggtgaagacctcatcca

SEQ ID NO: 69801 - DNA, 25 bp, Probe Sequence
ggtatttggctttgtacactttggt

SEQ ID NO: 69802 - DNA, 25 bp, Probe Sequence
tgttccagggtaagcatctgtttta

SEQ ID NO: 69803 - DNA, 25 bp, Probe Sequence
tatttggctttgtacactttggtga

SEQ ID NO: 69804 - DNA, 25 bp, Probe Sequence
gtatttggctttgtacactttggtg

SEQ ID NO: 69805 - DNA, 25 bp, Probe Sequence
gggtatttggctttgtacactttgg

SEQ ID NO: 69806 - DNA, 25 bp, Probe Sequence
aacactaatgatagctgatgaggaa

SEQ ID NO: 69807 - DNA, 25 bp, Probe Sequence
cacagtctcacagctaataacacaa

SEQ ID NO: 69808 - DNA, 25 bp, Probe Sequence
taacactaatgatagctgatgagga

SEQ ID NO: 69809 - DNA, 25 bp, Probe Sequence
ctaacactaatgatagctgatgagg

SEQ ID NO: 69810 - DNA, 25 bp, Probe Sequence
gtaggtagaagtagaaagcaatcca

SEQ ID NO: 69811 - DNA, 25 bp, Probe Sequence
ggtagaagtagaaagcaatccaatg

SEQ ID NO: 69812 - DNA, 25 bp, Probe Sequence
aggtagaagtagaaagcaatccaat

SEQ ID NO: 69813 - DNA, 25 bp, Probe Sequence
agtaggtagaagtagaaagcaatcc

SEQ ID NO: 69814 - DNA, 25 bp, Probe Sequence
acactaacactaatgatagctgatg

SEQ ID NO: 69815 - DNA, 25 bp, Probe Sequence
taggtagaagtagaaagcaatccaa

SEQ ID NO: 69816 - DNA, 25 bp, Probe Sequence
gtagaagtagaaagcaatccaatgt

SEQ ID NO: 69817 - DNA, 25 bp, Probe Sequence
agaagtagaaagcaatccaatgttt

SEQ ID NO: 69818 - DNA, 25 bp, Probe Sequence
gccacacataaactacactaacact

SEQ ID NO: 69819 - DNA, 25 bp, Probe Sequence
gaatcagttcttacacaatatcccg

SEQ ID NO: 69820 - DNA, 25 bp, Probe Sequence
cgagggaatcagttcttacacaata

SEQ ID NO: 69821 - DNA, 25 bp, Probe Sequence
cactaacactaatgatagctgatga

SEQ ID NO: 69822 - DNA, 25 bp, Probe Sequence
aatcagttcttacacaatatcccgc

SEQ ID NO: 69823 - DNA, 25 bp, Probe Sequence
gtagaaagcaatccaatgtttgttg

SEQ ID NO: 69824 - DNA, 25 bp, Probe Sequence
agtagaaagcaatccaatgtttgtt

SEQ ID NO: 69825 - DNA, 25 bp, Probe Sequence
aagtagaaagcaatccaatgtttgt

SEQ ID NO: 69826 - DNA, 25 bp, Probe Sequence
actaacactaatgatagctgatgag

SEQ ID NO: 69827 - DNA, 25 bp, Probe Sequence
gctttctaatccaccaacaactgta

SEQ ID NO: 69828 - DNA, 25 bp, Probe Sequence
gaagtagaaagcaatccaatgtttg

SEQ ID NO: 69829 - DNA, 25 bp, Probe Sequence
actacactaacactaatgatagctg

SEQ ID NO: 69830 - DNA, 25 bp, Probe Sequence
caatatggtaaaactccgtctctac

SEQ ID NO: 69831 - DNA, 25 bp, Probe Sequence
aaataaataaataagaggccgggcg

SEQ ID NO: 69832 - DNA, 25 bp, Probe Sequence
ccaatatggtaaaactccgtctcta

SEQ ID NO: 69833 - DNA, 25 bp, Probe Sequence
aataaataaataagaggccgggcgt

SEQ ID NO: 69834 - DNA, 25 bp, Probe Sequence
ataaataaataagaggccgggcgtg

SEQ ID NO: 69835 - DNA, 25 bp, Probe Sequence
aaaataaataaataagaggccgggc

SEQ ID NO: 69836 - DNA, 25 bp, Probe Sequence
gccaatatggtaaaactccgtctct

SEQ ID NO: 69837 - DNA, 25 bp, Probe Sequence
aatatggtaaaactccgtctctacc

SEQ ID NO: 69838 - DNA, 25 bp, Probe Sequence
taaataaataagaggccgggcgtgg

SEQ ID NO: 69839 - DNA, 25 bp, Probe Sequence
ggccaatatggtaaaactccgtctc

SEQ ID NO: 69840 - DNA, 25 bp, Probe Sequence
caatgccaggttccatactacttaa

SEQ ID NO: 69841 - DNA, 25 bp, Probe Sequence
ggataatcttggaagagtcactgat

SEQ ID NO: 69842 - DNA, 25 bp, Probe Sequence
tgtaggataatcttggaagagtcac

SEQ ID NO: 69843 - DNA, 25 bp, Probe Sequence
aggataatcttggaagagtcactga

SEQ ID NO: 69844 - DNA, 25 bp, Probe Sequence
taggataatcttggaagagtcactg

SEQ ID NO: 69845 - DNA, 25 bp, Probe Sequence
gtaggataatcttggaagagtcact

SEQ ID NO: 69846 - DNA, 25 bp, Probe Sequence
atgtaggataatcttggaagagtca

SEQ ID NO: 69847 - DNA, 25 bp, Probe Sequence
ccaatgccaggttccatactactta

SEQ ID NO: 69848 - DNA, 25 bp, Probe Sequence
cacagtggctcacacctataatata

SEQ ID NO: 69849 - DNA, 25 bp, Probe Sequence
acagtggctcacacctataatatag

SEQ ID NO: 69850 - DNA, 25 bp, Probe Sequence
catgtaggataatcttggaagagtc

SEQ ID NO: 69851 - DNA, 25 bp, Probe Sequence
tgccaggttccatactacttaaatt

SEQ ID NO: 69852 - DNA, 25 bp, Probe Sequence
aatgccaggttccatactacttaaa

SEQ ID NO: 69853 - DNA, 25 bp, Probe Sequence
atgccaggttccatactacttaaat

SEQ ID NO: 69854 - DNA, 25 bp, Probe Sequence
gaagagtcactgatttgaagaactg

SEQ ID NO: 69855 - DNA, 25 bp, Probe Sequence
gataatcttggaagagtcactgatt

SEQ ID NO: 69856 - DNA, 25 bp, Probe Sequence
aagagtcactgatttgaagaactgt

SEQ ID NO: 69857 - DNA, 25 bp, Probe Sequence
ttggaagagtcactgatttgaagaa

SEQ ID NO: 69858 - DNA, 25 bp, Probe Sequence
agtcactgatttgaagaactgtcta

SEQ ID NO: 69859 - DNA, 25 bp, Probe Sequence
ctgttagccaggtatggtgatacat

SEQ ID NO: 69860 - DNA, 25 bp, Probe Sequence
cactgatttgaagaactgtctatga

SEQ ID NO: 69861 - DNA, 25 bp, Probe Sequence
gagtcactgatttgaagaactgtct

SEQ ID NO: 69862 - DNA, 25 bp, Probe Sequence
agagtcactgatttgaagaactgtc

SEQ ID NO: 69863 - DNA, 25 bp, Probe Sequence
ggaagagtcactgatttgaagaact

SEQ ID NO: 69864 - DNA, 25 bp, Probe Sequence
cataacttcaggtacagcagagata

SEQ ID NO: 69865 - DNA, 25 bp, Probe Sequence
ataacttcaggtacagcagagataa

SEQ ID NO: 69866 - DNA, 25 bp, Probe Sequence
acataacttcaggtacagcagagat

SEQ ID NO: 69867 - DNA, 25 bp, Probe Sequence
aacataacttcaggtacagcagaga

SEQ ID NO: 69868 - DNA, 25 bp, Probe Sequence
taacttcaggtacagcagagataaa

SEQ ID NO: 69869 - DNA, 25 bp, Probe Sequence
actctgagagactacttatgaataa

SEQ ID NO: 69870 - DNA, 25 bp, Probe Sequence
aactctgagagactacttatgaata

SEQ ID NO: 69871 - DNA, 25 bp, Probe Sequence
aacttcaggtacagcagagataaaa

SEQ ID NO: 69872 - DNA, 25 bp, Probe Sequence
cttcaggtacagcagagataaaact

SEQ ID NO: 69873 - DNA, 25 bp, Probe Sequence
acttcaggtacagcagagataaaac

SEQ ID NO: 69874 - DNA, 25 bp, Probe Sequence
aaactctgagagactacttatgaat

SEQ ID NO: 69875 - DNA, 25 bp, Probe Sequence
ttcaggtacagcagagataaaactc

SEQ ID NO: 69876 - DNA, 25 bp, Probe Sequence
ctctgagagactacttatgaataag

SEQ ID NO: 69877 - DNA, 25 bp, Probe Sequence
gagataaaactctgagagactactt

SEQ ID NO: 69878 - DNA, 25 bp, Probe Sequence
aaaactctgagagactacttatgaa

SEQ ID NO: 69879 - DNA, 25 bp, Probe Sequence
tcaggtacagcagagataaaactct

SEQ ID NO: 69880 - DNA, 25 bp, Probe Sequence
taaaactctgagagactacttatga

SEQ ID NO: 69881 - DNA, 25 bp, Probe Sequence
agataaaactctgagagactactta

SEQ ID NO: 69882 - DNA, 25 bp, Probe Sequence
agagataaaactctgagagactact

SEQ ID NO: 69883 - DNA, 25 bp, Probe Sequence
tctgagagactacttatgaataagt

SEQ ID NO: 69884 - DNA, 25 bp, Probe Sequence
ataaaactctgagagactacttatg

SEQ ID NO: 69885 - DNA, 25 bp, Probe Sequence
ctgagagactacttatgaataagtt

SEQ ID NO: 69886 - DNA, 25 bp, Probe Sequence
gataaaactctgagagactacttat

SEQ ID NO: 69887 - DNA, 25 bp, Probe Sequence
tatgacgactatacacacacacaca

SEQ ID NO: 69888 - DNA, 25 bp, Probe Sequence
tgtatcattgctgtcattccactta

SEQ ID NO: 69889 - DNA, 25 bp, Probe Sequence
gtattgttgtcttccattcgtcttg

SEQ ID NO: 69890 - DNA, 25 bp, Probe Sequence
tattgttgtcttccattcgtcttgt

SEQ ID NO: 69891 - DNA, 25 bp, Probe Sequence
gtatcattgctgtcattccacttat

SEQ ID NO: 69892 - DNA, 25 bp, Probe Sequence
tattccgtattgttgtcttccattc

SEQ ID NO: 69893 - DNA, 25 bp, Probe Sequence
atgtatcattgctgtcattccactt

SEQ ID NO: 69894 - DNA, 25 bp, Probe Sequence
gtatgacgactatacacacacacac

SEQ ID NO: 69895 - DNA, 25 bp, Probe Sequence
agtatgacgactatacacacacaca

SEQ ID NO: 69896 - DNA, 25 bp, Probe Sequence
tatggaacaggttagtggaacttac

SEQ ID NO: 69897 - DNA, 25 bp, Probe Sequence
tattattctctcttctagcgtggtt

SEQ ID NO: 69898 - DNA, 25 bp, Probe Sequence
ttattattctctcttctagcgtggt

SEQ ID NO: 69899 - DNA, 25 bp, Probe Sequence
cgtattgttgtcttccattcgtctt

SEQ ID NO: 69900 - DNA, 25 bp, Probe Sequence
attccgtattgttgtcttccattcg

SEQ ID NO: 69901 - DNA, 25 bp, Probe Sequence
atatggaacaggttagtggaactta

SEQ ID NO: 69902 - DNA, 25 bp, Probe Sequence
atcattgctgtcattccacttatat

SEQ ID NO: 69903 - DNA, 25 bp, Probe Sequence
atgacgactatacacacacacacac

SEQ ID NO: 69904 - DNA, 25 bp, Probe Sequence
gactatacacacacacacacacaca

SEQ ID NO: 69905 - DNA, 25 bp, Probe Sequence
atggaacaggttagtggaacttact

SEQ ID NO: 69906 - DNA, 25 bp, Probe Sequence
attgttgtcttccattcgtcttgtg

SEQ ID NO: 69907 - DNA, 25 bp, Probe Sequence
tatcattgctgtcattccacttata

SEQ ID NO: 69908 - DNA, 25 bp, Probe Sequence
ctatacacacacacacacacacaca

SEQ ID NO: 69909 - DNA, 25 bp, Probe Sequence
actatacacacacacacacacacac

SEQ ID NO: 69910 - DNA, 25 bp, Probe Sequence
aagtatgacgactatacacacacac

SEQ ID NO: 69911 - DNA, 25 bp, Probe Sequence
agtgttctgtggtctcttgttcatc

SEQ ID NO: 69912 - DNA, 25 bp, Probe Sequence
tactcttccctccttgtcttatgtt

SEQ ID NO: 69913 - DNA, 25 bp, Probe Sequence
actcttccctccttgtcttatgttt

SEQ ID NO: 69914 - DNA, 25 bp, Probe Sequence
acagttactttcacttcccgaataa

SEQ ID NO: 69915 - DNA, 25 bp, Probe Sequence
gttctgtggtctcttgttcatcctg

SEQ ID NO: 69916 - DNA, 25 bp, Probe Sequence
cagttactttcacttcccgaataaa

SEQ ID NO: 69917 - DNA, 25 bp, Probe Sequence
attcctagtcgttgcttcagtgttc

SEQ ID NO: 69918 - DNA, 25 bp, Probe Sequence
cacagttactttcacttcccgaata

SEQ ID NO: 69919 - DNA, 25 bp, Probe Sequence
ttgtactcttccctccttgtcttat

SEQ ID NO: 69920 - DNA, 25 bp, Probe Sequence
tttcacttcccgaataaaggttacc

SEQ ID NO: 69921 - DNA, 25 bp, Probe Sequence
cattcctagtcgttgcttcagtgtt

SEQ ID NO: 69922 - DNA, 25 bp, Probe Sequence
gtactcttccctccttgtcttatgt

SEQ ID NO: 69923 - DNA, 25 bp, Probe Sequence
tgtactcttccctccttgtcttatg

SEQ ID NO: 69924 - DNA, 25 bp, Probe Sequence
ttcagtgttctgtggtctcttgttc

SEQ ID NO: 69925 - DNA, 25 bp, Probe Sequence
cttcagtgttctgtggtctcttgtt

SEQ ID NO: 69926 - DNA, 25 bp, Probe Sequence
tgttctgtggtctcttgttcatcct

SEQ ID NO: 69927 - DNA, 25 bp, Probe Sequence
gtgttctgtggtctcttgttcatcc

SEQ ID NO: 69928 - DNA, 25 bp, Probe Sequence
gttgtactcttccctccttgtctta

SEQ ID NO: 69929 - DNA, 25 bp, Probe Sequence
cagtgttctgtggtctcttgttcat

SEQ ID NO: 69930 - DNA, 25 bp, Probe Sequence
tgtttcacagttactttcacttccc

SEQ ID NO: 69931 - DNA, 25 bp, Probe Sequence
gtgtaagctgcatagttgtactgtg

SEQ ID NO: 69932 - DNA, 25 bp, Probe Sequence
agtgtaagctgcatagttgtactgt

SEQ ID NO: 69933 - DNA, 25 bp, Probe Sequence
ttcacttcccgaataaaggttacca

SEQ ID NO: 69934 - DNA, 25 bp, Probe Sequence
cttgaagattcggatgtgtggaagg

SEQ ID NO: 69935 - DNA, 25 bp, Probe Sequence
ccgagccatctcaattaccatatat

SEQ ID NO: 69936 - DNA, 25 bp, Probe Sequence
ctactcctcctagacctaacctgac

SEQ ID NO: 69937 - DNA, 25 bp, Probe Sequence
actactaatcaacgcccataatcat

SEQ ID NO: 69938 - DNA, 25 bp, Probe Sequence
atcctaaccctactcctaatcacat

SEQ ID NO: 69939 - DNA, 25 bp, Probe Sequence
tttacttcctctctttcttcttccc

SEQ ID NO: 69940 - DNA, 25 bp, Probe Sequence
accctactcctaatcacataaccta

SEQ ID NO: 69941 - DNA, 25 bp, Probe Sequence
ctcatcctaaccctactcctaatca

SEQ ID NO: 69942 - DNA, 25 bp, Probe Sequence
actcatcctaaccctactcctaatc

SEQ ID NO: 69943 - DNA, 25 bp, Probe Sequence
taatcaacgcccataatcataccaa

SEQ ID NO: 69944 - DNA, 25 bp, Probe Sequence
aactactactaatcaacgcccataa

SEQ ID NO: 69945 - DNA, 25 bp, Probe Sequence
gtaactactactaatcaacgcccat

SEQ ID NO: 69946 - DNA, 25 bp, Probe Sequence
aaccctactcctaatcacataacct

SEQ ID NO: 69947 - DNA, 25 bp, Probe Sequence
cactcatcctaaccctactcctaat

SEQ ID NO: 69948 - DNA, 25 bp, Probe Sequence
tactactaatcaacgcccataatca

SEQ ID NO: 69949 - DNA, 25 bp, Probe Sequence
actactactaatcaacgcccataat

SEQ ID NO: 69950 - DNA, 25 bp, Probe Sequence
tcctaaccctactcctaatcacata

SEQ ID NO: 69951 - DNA, 25 bp, Probe Sequence
tcatcctaaccctactcctaatcac

SEQ ID NO: 69952 - DNA, 25 bp, Probe Sequence
attaccttaaaccatttcacagcac

SEQ ID NO: 69953 - DNA, 25 bp, Probe Sequence
ctaatcaacgcccataatcatacca

SEQ ID NO: 69954 - DNA, 25 bp, Probe Sequence
actaatcaacgcccataatcatacc

SEQ ID NO: 69955 - DNA, 25 bp, Probe Sequence
actcctaatcacataacctattccc

SEQ ID NO: 69956 - DNA, 25 bp, Probe Sequence
actcctcctagacctaacctgacta

SEQ ID NO: 69957 - DNA, 25 bp, Probe Sequence
tactcctcctagacctaacctgact

SEQ ID NO: 69958 - DNA, 25 bp, Probe Sequence
tactcctaatcacataacctattcc

SEQ ID NO: 69959 - DNA, 25 bp, Probe Sequence
tctgtggattagtgctagaatagag

SEQ ID NO: 69960 - DNA, 25 bp, Probe Sequence
caataagcatgtgtgttgaatgtca

SEQ ID NO: 69961 - DNA, 25 bp, Probe Sequence
aagcaataagcatgtgtgttgaatg

SEQ ID NO: 69962 - DNA, 25 bp, Probe Sequence
gcaataagcatgtgtgttgaatgtc

SEQ ID NO: 69963 - DNA, 25 bp, Probe Sequence
aataagcatgtgtgttgaatgtcac

SEQ ID NO: 69964 - DNA, 25 bp, Probe Sequence
aataggagcacagggaaataaagaa

SEQ ID NO: 69965 - DNA, 25 bp, Probe Sequence
aaataggagcacagggaaataaaga

SEQ ID NO: 69966 - DNA, 25 bp, Probe Sequence
ataggagcacagggaaataaagaat

SEQ ID NO: 69967 - DNA, 25 bp, Probe Sequence
taggagcacagggaaataaagaatt

SEQ ID NO: 69968 - DNA, 25 bp, Probe Sequence
agcaataagcatgtgtgttgaatgt

SEQ ID NO: 69969 - DNA, 25 bp, Probe Sequence
taaagaaatgaaaggattgcccgat

SEQ ID NO: 69970 - DNA, 25 bp, Probe Sequence
ttaaagaaatgaaaggattgcccga

SEQ ID NO: 69971 - DNA, 25 bp, Probe Sequence
ctgtggattagtgctagaatagagc

SEQ ID NO: 69972 - DNA, 25 bp, Probe Sequence
aaagaaatgaaaggattgcccgatt

SEQ ID NO: 69973 - DNA, 25 bp, Probe Sequence
ttctgtggattagtgctagaataga

SEQ ID NO: 69974 - DNA, 25 bp, Probe Sequence
aggagcacagggaaataaagaattt

SEQ ID NO: 69975 - DNA, 25 bp, Probe Sequence
ggagcacagggaaataaagaattta

SEQ ID NO: 69976 - DNA, 25 bp, Probe Sequence
tatgaaagcaataagcatgtgtgtt

SEQ ID NO: 69977 - DNA, 25 bp, Probe Sequence
ctatgaaagcaataagcatgtgtgt

SEQ ID NO: 69978 - DNA, 25 bp, Probe Sequence
tttactaaatgaaatgcttccacag

SEQ ID NO: 69979 - DNA, 25 bp, Probe Sequence
aaagcaataagcatgtgtgttgaat

SEQ ID NO: 69980 - DNA, 25 bp, Probe Sequence
gaaagcaataagcatgtgtgttgaa

SEQ ID NO: 69981 - DNA, 25 bp, Probe Sequence
atgaaagcaataagcatgtgtgttg

SEQ ID NO: 69982 - DNA, 25 bp, Probe Sequence
tttaaagaaatgaaaggattgcccg

SEQ ID NO: 69983 - DNA, 25 bp, Probe Sequence
cctcacctctaatctaccttctgta

SEQ ID NO: 69984 - DNA, 25 bp, Probe Sequence
tcacctctaatctaccttctgtact

SEQ ID NO: 69985 - DNA, 25 bp, Probe Sequence
acctctaatctaccttctgtactct

SEQ ID NO: 69986 - DNA, 25 bp, Probe Sequence
cacctctaatctaccttctgtactc

SEQ ID NO: 69987 - DNA, 25 bp, Probe Sequence
ctcacctctaatctaccttctgtac

SEQ ID NO: 69988 - DNA, 25 bp, Probe Sequence
aatctaccttctgtactcttcttcc

SEQ ID NO: 69989 - DNA, 25 bp, Probe Sequence
ttctgttcttgttcatgttgcttac

SEQ ID NO: 69990 - DNA, 25 bp, Probe Sequence
cctctaatctaccttctgtactctt

SEQ ID NO: 69991 - DNA, 25 bp, Probe Sequence
tctgttcttgttcatgttgcttaca

SEQ ID NO: 69992 - DNA, 25 bp, Probe Sequence
tctaatctaccttctgtactcttct

SEQ ID NO: 69993 - DNA, 25 bp, Probe Sequence
ctctaatctaccttctgtactcttc

SEQ ID NO: 69994 - DNA, 25 bp, Probe Sequence
ttcttgttcatgttgcttacaggac

SEQ ID NO: 69995 - DNA, 25 bp, Probe Sequence
gttcttgttcatgttgcttacagga

SEQ ID NO: 69996 - DNA, 25 bp, Probe Sequence
tgttcttgttcatgttgcttacagg

SEQ ID NO: 69997 - DNA, 25 bp, Probe Sequence
attctgggcttctaagttctggtta

SEQ ID NO: 69998 - DNA, 25 bp, Probe Sequence
atctaccttctgtactcttcttccc

SEQ ID NO: 69999 - DNA, 25 bp, Probe Sequence
taatctaccttctgtactcttcttc

SEQ ID NO: 70000 - DNA, 25 bp, Probe Sequence
ctaatctaccttctgtactcttctt

SEQ ID NO: 70001 - DNA, 25 bp, Probe Sequence
tttctgttcttgttcatgttgctta

SEQ ID NO: 70002 - DNA, 25 bp, Probe Sequence
ccctcttaatgcctgtataacccat

SEQ ID NO: 70003 - DNA, 25 bp, Probe Sequence
ggcttctaagttctggttacttcat

SEQ ID NO: 70004 - DNA, 25 bp, Probe Sequence
ttctgggcttctaagttctggttac

SEQ ID NO: 70005 - DNA, 25 bp, Probe Sequence
ctccaactgtttctcagacttcttt

SEQ ID NO: 70006 - DNA, 25 bp, Probe Sequence
gctgctttctgaagttattatttct

SEQ ID NO: 70007 - DNA, 25 bp, Probe Sequence
cgtattcattgtctacctgctaagt

SEQ ID NO: 70008 - DNA, 25 bp, Probe Sequence
tattcattgtctacctgctaagtca

SEQ ID NO: 70009 - DNA, 25 bp, Probe Sequence
gtattcattgtctacctgctaagtc

SEQ ID NO: 70010 - DNA, 25 bp, Probe Sequence
attcattgtctacctgctaagtcaa

SEQ ID NO: 70011 - DNA, 25 bp, Probe Sequence
ttcattgtctacctgctaagtcaag

SEQ ID NO: 70012 - DNA, 25 bp, Probe Sequence
acgtattcattgtctacctgctaag

SEQ ID NO: 70013 - DNA, 25 bp, Probe Sequence
gtgctttccaaacaatacctatcat

SEQ ID NO: 70014 - DNA, 25 bp, Probe Sequence
tcattgtctacctgctaagtcaagg

SEQ ID NO: 70015 - DNA, 25 bp, Probe Sequence
tgctttccaaacaatacctatcata

SEQ ID NO: 70016 - DNA, 25 bp, Probe Sequence
ccaaacaatacctatcataactacg

SEQ ID NO: 70017 - DNA, 25 bp, Probe Sequence
gctttccaaacaatacctatcataa

SEQ ID NO: 70018 - DNA, 25 bp, Probe Sequence
ctacgtattcattgtctacctgcta

SEQ ID NO: 70019 - DNA, 25 bp, Probe Sequence
tacgtattcattgtctacctgctaa

SEQ ID NO: 70020 - DNA, 25 bp, Probe Sequence
aactacgtattcattgtctacctgc

SEQ ID NO: 70021 - DNA, 25 bp, Probe Sequence
actacgtattcattgtctacctgct

SEQ ID NO: 70022 - DNA, 25 bp, Probe Sequence
catttctccttcctcagaatacact

SEQ ID NO: 70023 - DNA, 25 bp, Probe Sequence
atttctccttcctcagaatacactc

SEQ ID NO: 70024 - DNA, 25 bp, Probe Sequence
tttctccttcctcagaatacactct

SEQ ID NO: 70025 - DNA, 25 bp, Probe Sequence
taactacgtattcattgtctacctg

SEQ ID NO: 70026 - DNA, 25 bp, Probe Sequence
ttctccttcctcagaatacactctg

SEQ ID NO: 70027 - DNA, 25 bp, Probe Sequence
gcatttctccttcctcagaatacac

SEQ ID NO: 70028 - DNA, 25 bp, Probe Sequence
cattgtctacctgctaagtcaaggg

SEQ ID NO: 70029 - DNA, 25 bp, Probe Sequence
ctaagtcaagggttcactgcatttc

SEQ ID NO: 70030 - DNA, 25 bp, Probe Sequence
tttccaaacaatacctatcataact

SEQ ID NO: 70031 - DNA, 25 bp, Probe Sequence
ctgagcgagattaccaagtataaga

SEQ ID NO: 70032 - DNA, 25 bp, Probe Sequence
tgagcgagattaccaagtataagat

SEQ ID NO: 70033 - DNA, 25 bp, Probe Sequence
tctgagcgagattaccaagtataag

SEQ ID NO: 70034 - DNA, 25 bp, Probe Sequence
tgagataatgaccgtacatagaagg

SEQ ID NO: 70035 - DNA, 25 bp, Probe Sequence
gtatcactagaggtcaagagttcaa

SEQ ID NO: 70036 - DNA, 25 bp, Probe Sequence
atcactagaggtcaagagttcaaga

SEQ ID NO: 70037 - DNA, 25 bp, Probe Sequence
tatcactagaggtcaagagttcaag

SEQ ID NO: 70038 - DNA, 25 bp, Probe Sequence
aggtatcactagaggtcaagagttc

SEQ ID NO: 70039 - DNA, 25 bp, Probe Sequence
ggtatcactagaggtcaagagttca

SEQ ID NO: 70040 - DNA, 25 bp, Probe Sequence
caggtatcactagaggtcaagagtt

SEQ ID NO: 70041 - DNA, 25 bp, Probe Sequence
gagcgagattaccaagtataagata

SEQ ID NO: 70042 - DNA, 25 bp, Probe Sequence
tcactagaggtcaagagttcaagac

SEQ ID NO: 70043 - DNA, 25 bp, Probe Sequence
atgagataatgaccgtacatagaag

SEQ ID NO: 70044 - DNA, 25 bp, Probe Sequence
gagataatgaccgtacatagaaggt

SEQ ID NO: 70045 - DNA, 25 bp, Probe Sequence
agcgagattaccaagtataagatat

SEQ ID NO: 70046 - DNA, 25 bp, Probe Sequence
atctgagcgagattaccaagtataa

SEQ ID NO: 70047 - DNA, 25 bp, Probe Sequence
gatctgagcgagattaccaagtata

SEQ ID NO: 70048 - DNA, 25 bp, Probe Sequence
aatgagataatgaccgtacatagaa

SEQ ID NO: 70049 - DNA, 25 bp, Probe Sequence
tgatctgagcgagattaccaagtat

SEQ ID NO: 70050 - DNA, 25 bp, Probe Sequence
atgatctgagcgagattaccaagta

SEQ ID NO: 70051 - DNA, 25 bp, Probe Sequence
ggatacctgtaattccagctacttg

SEQ ID NO: 70052 - DNA, 25 bp, Probe Sequence
gatacctgtaattccagctacttgg

SEQ ID NO: 70053 - DNA, 25 bp, Probe Sequence
gcaggtatcactagaggtcaagagt

SEQ ID NO: 70054 - DNA, 25 bp, Probe Sequence
gcgagattaccaagtataagatatt

SEQ ID NO: 70055 - DNA, 25 bp, Probe Sequence
gcaggagtagtattgatgtaaggaa

SEQ ID NO: 70056 - DNA, 25 bp, Probe Sequence
ggaagcaggagtagtattgatgtaa

SEQ ID NO: 70057 - DNA, 25 bp, Probe Sequence
aagcaggagtagtattgatgtaagg

SEQ ID NO: 70058 - DNA, 25 bp, Probe Sequence
agcaggagtagtattgatgtaagga

SEQ ID NO: 70059 - DNA, 25 bp, Probe Sequence
gaagcaggagtagtattgatgtaag

SEQ ID NO: 70060 - DNA, 25 bp, Probe Sequence
aggagtagtattgatgtaaggaagt

SEQ ID NO: 70061 - DNA, 25 bp, Probe Sequence
caggagtagtattgatgtaaggaag

SEQ ID NO: 70062 - DNA, 25 bp, Probe Sequence
ttcctctgttatagcattcaatgac

SEQ ID NO: 70063 - DNA, 25 bp, Probe Sequence
tcctctgttatagcattcaatgaca

SEQ ID NO: 70064 - DNA, 25 bp, Probe Sequence
cctctgttatagcattcaatgacat

SEQ ID NO: 70065 - DNA, 25 bp, Probe Sequence
atattgggaagcaggagtagtattg

SEQ ID NO: 70066 - DNA, 25 bp, Probe Sequence
tctatattgggaagcaggagtagta

SEQ ID NO: 70067 - DNA, 25 bp, Probe Sequence
tattgggaagcaggagtagtattga

SEQ ID NO: 70068 - DNA, 25 bp, Probe Sequence
ggagtagtattgatgtaaggaagta

SEQ ID NO: 70069 - DNA, 25 bp, Probe Sequence
gttgctttgtgagtgtaattgagta

SEQ ID NO: 70070 - DNA, 25 bp, Probe Sequence
ttctatattgggaagcaggagtagt

SEQ ID NO: 70071 - DNA, 25 bp, Probe Sequence
attctatattgggaagcaggagtag

SEQ ID NO: 70072 - DNA, 25 bp, Probe Sequence
ggcttcttcctttgtcttaatactt

SEQ ID NO: 70073 - DNA, 25 bp, Probe Sequence
ctatattgggaagcaggagtagtat

SEQ ID NO: 70074 - DNA, 25 bp, Probe Sequence
attgggaagcaggagtagtattgat

SEQ ID NO: 70075 - DNA, 25 bp, Probe Sequence
ttgctttgtgagtgtaattgagtaa

SEQ ID NO: 70076 - DNA, 25 bp, Probe Sequence
ctgttgctttgtgagtgtaattgag

SEQ ID NO: 70077 - DNA, 25 bp, Probe Sequence
gggaagcaggagtagtattgatgta

SEQ ID NO: 70078 - DNA, 25 bp, Probe Sequence
caagtaaatctgagtgttgtccatc

SEQ ID NO: 70079 - DNA, 25 bp, Probe Sequence
ttcaatgtataatgcctcaagtgtg

SEQ ID NO: 70080 - DNA, 25 bp, Probe Sequence
caatgtataatgcctcaagtgtgtg

SEQ ID NO: 70081 - DNA, 25 bp, Probe Sequence
tcaatgtataatgcctcaagtgtgt

SEQ ID NO: 70082 - DNA, 25 bp, Probe Sequence
atgcttcaatgtataatgcctcaag

SEQ ID NO: 70083 - DNA, 25 bp, Probe Sequence
gcttcaatgtataatgcctcaagtg

SEQ ID NO: 70084 - DNA, 25 bp, Probe Sequence
cttcaatgtataatgcctcaagtgt

SEQ ID NO: 70085 - DNA, 25 bp, Probe Sequence
tgcttcaatgtataatgcctcaagt

SEQ ID NO: 70086 - DNA, 25 bp, Probe Sequence
aatgtataatgcctcaagtgtgtgg

SEQ ID NO: 70087 - DNA, 25 bp, Probe Sequence
tctaggatcaataggctgtaccata

SEQ ID NO: 70088 - DNA, 25 bp, Probe Sequence
tgtagtctaggatcaataggctgta

SEQ ID NO: 70089 - DNA, 25 bp, Probe Sequence
cagcagtgtgagaattgactaatac

SEQ ID NO: 70090 - DNA, 25 bp, Probe Sequence
tagtctaggatcaataggctgtacc

SEQ ID NO: 70091 - DNA, 25 bp, Probe Sequence
gtagtctaggatcaataggctgtac

SEQ ID NO: 70092 - DNA, 25 bp, Probe Sequence
agcagtgtgagaattgactaataca

SEQ ID NO: 70093 - DNA, 25 bp, Probe Sequence
acagcagtgtgagaattgactaata

SEQ ID NO: 70094 - DNA, 25 bp, Probe Sequence
tacagcagtgtgagaattgactaat

SEQ ID NO: 70095 - DNA, 25 bp, Probe Sequence
aggatcaataggctgtaccatatag

SEQ ID NO: 70096 - DNA, 25 bp, Probe Sequence
ctaggatcaataggctgtaccatat

SEQ ID NO: 70097 - DNA, 25 bp, Probe Sequence
ttacagcagtgtgagaattgactaa

SEQ ID NO: 70098 - DNA, 25 bp, Probe Sequence
gcagtgtgagaattgactaatacaa

SEQ ID NO: 70099 - DNA, 25 bp, Probe Sequence
gtctaggatcaataggctgtaccat

SEQ ID NO: 70100 - DNA, 25 bp, Probe Sequence
catgcttcaatgtataatgcctcaa

SEQ ID NO: 70101 - DNA, 25 bp, Probe Sequence
ctcatgcttcaatgtataatgcctc

SEQ ID NO: 70102 - DNA, 25 bp, Probe Sequence
ttgtagtctaggatcaataggctgt

SEQ ID NO: 70103 - DNA, 25 bp, Probe Sequence
ccaggttaatgagacatcttacaga

SEQ ID NO: 70104 - DNA, 25 bp, Probe Sequence
caggttaatgagacatcttacagaa

SEQ ID NO: 70105 - DNA, 25 bp, Probe Sequence
caattagaagcatcaatgatcttgg

SEQ ID NO: 70106 - DNA, 25 bp, Probe Sequence
aattagaagcatcaatgatcttgga

SEQ ID NO: 70107 - DNA, 25 bp, Probe Sequence
acatgacaattagaagcatcaatga

SEQ ID NO: 70108 - DNA, 25 bp, Probe Sequence
aagacatgacaattagaagcatcaa

SEQ ID NO: 70109 - DNA, 25 bp, Probe Sequence
tgacaattagaagcatcaatgatct

SEQ ID NO: 70110 - DNA, 25 bp, Probe Sequence
atgacatgaatctgaacattaaggt

SEQ ID NO: 70111 - DNA, 25 bp, Probe Sequence
gacatgacaattagaagcatcaatg

SEQ ID NO: 70112 - DNA, 25 bp, Probe Sequence
agacatgacaattagaagcatcaat

SEQ ID NO: 70113 - DNA, 25 bp, Probe Sequence
attagaagcatcaatgatcttggat

SEQ ID NO: 70114 - DNA, 25 bp, Probe Sequence
aggttaatgagacatcttacagaat

SEQ ID NO: 70115 - DNA, 25 bp, Probe Sequence
gcaggataggtagtaaagtttggat

SEQ ID NO: 70116 - DNA, 25 bp, Probe Sequence
acaattagaagcatcaatgatcttg

SEQ ID NO: 70117 - DNA, 25 bp, Probe Sequence
aatctacaccatattccctcaactc

SEQ ID NO: 70118 - DNA, 25 bp, Probe Sequence
ggataggtagtaaagtttggatggg

SEQ ID NO: 70119 - DNA, 25 bp, Probe Sequence
ctacaccatattccctcaactcttc

SEQ ID NO: 70120 - DNA, 25 bp, Probe Sequence
aggataggtagtaaagtttggatgg

SEQ ID NO: 70121 - DNA, 25 bp, Probe Sequence
tgacatgaatctgaacattaaggta

SEQ ID NO: 70122 - DNA, 25 bp, Probe Sequence
atctacaccatattccctcaactct

SEQ ID NO: 70123 - DNA, 25 bp, Probe Sequence
tctacaccatattccctcaactctt

SEQ ID NO: 70124 - DNA, 25 bp, Probe Sequence
gtataacacttcccaactcactctg

SEQ ID NO: 70125 - DNA, 25 bp, Probe Sequence
acattaaggtaaacacaagacagac

SEQ ID NO: 70126 - DNA, 25 bp, Probe Sequence
gacaattagaagcatcaatgatctt

SEQ ID NO: 70127 - DNA, 25 bp, Probe Sequence
ctagaaataaaatcaccctgactgt

SEQ ID NO: 70128 - DNA, 25 bp, Probe Sequence
agaaataaaatcaccctgactgtgg

SEQ ID NO: 70129 - DNA, 25 bp, Probe Sequence
tagaaataaaatcaccctgactgtg

SEQ ID NO: 70130 - DNA, 25 bp, Probe Sequence
gaaataaaatcaccctgactgtggg

SEQ ID NO: 70131 - DNA, 25 bp, Probe Sequence
tctagaaataaaatcaccctgactg

SEQ ID NO: 70132 - DNA, 25 bp, Probe Sequence
aaataaaatcaccctgactgtgggg

SEQ ID NO: 70133 - DNA, 25 bp, Probe Sequence
aagaggctatactaatgaatccact

SEQ ID NO: 70134 - DNA, 25 bp, Probe Sequence
cacaataattctccagtaacagacc

SEQ ID NO: 70135 - DNA, 25 bp, Probe Sequence
aggctatactaatgaatccactcag

SEQ ID NO: 70136 - DNA, 25 bp, Probe Sequence
acacaataattctccagtaacagac

SEQ ID NO: 70137 - DNA, 25 bp, Probe Sequence
gaggctatactaatgaatccactca

SEQ ID NO: 70138 - DNA, 25 bp, Probe Sequence
agaggctatactaatgaatccactc

SEQ ID NO: 70139 - DNA, 25 bp, Probe Sequence
caggtatcaatgtaggaacacaaga

SEQ ID NO: 70140 - DNA, 25 bp, Probe Sequence
aggtatcaatgtaggaacacaagaa

SEQ ID NO: 70141 - DNA, 25 bp, Probe Sequence
aacacaataattctccagtaacaga

SEQ ID NO: 70142 - DNA, 25 bp, Probe Sequence
gcaggtatcaatgtaggaacacaag

SEQ ID NO: 70143 - DNA, 25 bp, Probe Sequence
atactaatgaatccactcagctacc

SEQ ID NO: 70144 - DNA, 25 bp, Probe Sequence
taaacggcaaagaggctatactaat

SEQ ID NO: 70145 - DNA, 25 bp, Probe Sequence
ataaacggcaaagaggctatactaa

SEQ ID NO: 70146 - DNA, 25 bp, Probe Sequence
aataaacggcaaagaggctatacta

SEQ ID NO: 70147 - DNA, 25 bp, Probe Sequence
gcaaagaggctatactaatgaatcc

SEQ ID NO: 70148 - DNA, 25 bp, Probe Sequence
ggcaaagaggctatactaatgaatc

SEQ ID NO: 70149 - DNA, 25 bp, Probe Sequence
ctcatctacatttcccacaaagtca

SEQ ID NO: 70150 - DNA, 25 bp, Probe Sequence
cggcaaagaggctatactaatgaat

SEQ ID NO: 70151 - DNA, 25 bp, Probe Sequence
gaataaacggcaaagaggctatact

SEQ ID NO: 70152 - DNA, 25 bp, Probe Sequence
ctgaataaacggcaaagaggctata

SEQ ID NO: 70153 - DNA, 25 bp, Probe Sequence
tcatctacatttcccacaaagtcac

SEQ ID NO: 70154 - DNA, 25 bp, Probe Sequence
aaacggcaaagaggctatactaatg

SEQ ID NO: 70155 - DNA, 25 bp, Probe Sequence
tgaataaacggcaaagaggctatac

SEQ ID NO: 70156 - DNA, 25 bp, Probe Sequence
catctacatttcccacaaagtcact

SEQ ID NO: 70157 - DNA, 25 bp, Probe Sequence
catacagatagtagaccgttggaat

SEQ ID NO: 70158 - DNA, 25 bp, Probe Sequence
gagtgatggcatacagatagtagac

SEQ ID NO: 70159 - DNA, 25 bp, Probe Sequence
agagtgatggcatacagatagtaga

SEQ ID NO: 70160 - DNA, 25 bp, Probe Sequence
gagagtgatggcatacagatagtag

SEQ ID NO: 70161 - DNA, 25 bp, Probe Sequence
tgagagtgatggcatacagatagta

SEQ ID NO: 70162 - DNA, 25 bp, Probe Sequence
gtaagaagagaatgtgaatgttggt

SEQ ID NO: 70163 - DNA, 25 bp, Probe Sequence
gtgttcatagtcaggcgttagtaat

SEQ ID NO: 70164 - DNA, 25 bp, Probe Sequence
tagtagaccgttggaataatgttgc

SEQ ID NO: 70165 - DNA, 25 bp, Probe Sequence
agatagtagaccgttggaataatgt

SEQ ID NO: 70166 - DNA, 25 bp, Probe Sequence
acagatagtagaccgttggaataat

SEQ ID NO: 70167 - DNA, 25 bp, Probe Sequence
agtaagaagagaatgtgaatgttgg

SEQ ID NO: 70168 - DNA, 25 bp, Probe Sequence
ttcatagtcaggcgttagtaatgtc

SEQ ID NO: 70169 - DNA, 25 bp, Probe Sequence
cagatagtagaccgttggaataatg

SEQ ID NO: 70170 - DNA, 25 bp, Probe Sequence
gttcatagtcaggcgttagtaatgt

SEQ ID NO: 70171 - DNA, 25 bp, Probe Sequence
tgttcatagtcaggcgttagtaatg

SEQ ID NO: 70172 - DNA, 25 bp, Probe Sequence
tattgtgttagtgtaagtgttcagg

SEQ ID NO: 70173 - DNA, 25 bp, Probe Sequence
ggagagaatactaggaagaggaaga

SEQ ID NO: 70174 - DNA, 25 bp, Probe Sequence
atagtagaccgttggaataatgttg

SEQ ID NO: 70175 - DNA, 25 bp, Probe Sequence
agtgatggcatacagatagtagacc

SEQ ID NO: 70176 - DNA, 25 bp, Probe Sequence
taagaagagaatgtgaatgttggtt

SEQ ID NO: 70177 - DNA, 25 bp, Probe Sequence
agtgttcatagtcaggcgttagtaa

SEQ ID NO: 70178 - DNA, 25 bp, Probe Sequence
gatagtagaccgttggaataatgtt

SEQ ID NO: 70179 - DNA, 25 bp, Probe Sequence
agagaatactaggaagaggaagaga

SEQ ID NO: 70180 - DNA, 25 bp, Probe Sequence
tacagatagtagaccgttggaataa

SEQ ID NO: 70181 - DNA, 25 bp, Probe Sequence
tgtgtgaaccttgagtgatactaat

SEQ ID NO: 70182 - DNA, 25 bp, Probe Sequence
atgtgtgaaccttgagtgatactaa

SEQ ID NO: 70183 - DNA, 25 bp, Probe Sequence
gtgtgaaccttgagtgatactaatc

SEQ ID NO: 70184 - DNA, 25 bp, Probe Sequence
catgtgtgaaccttgagtgatacta

SEQ ID NO: 70185 - DNA, 25 bp, Probe Sequence
ggtatcagattctattgtgacttca

SEQ ID NO: 70186 - DNA, 25 bp, Probe Sequence
agtgtcttgtacgttgttatgatga

SEQ ID NO: 70187 - DNA, 25 bp, Probe Sequence
cagtgtcttgtacgttgttatgatg

SEQ ID NO: 70188 - DNA, 25 bp, Probe Sequence
gtgtcttgtacgttgttatgatgaa

SEQ ID NO: 70189 - DNA, 25 bp, Probe Sequence
aatcagtgtcttgtacgttgttatg

SEQ ID NO: 70190 - DNA, 25 bp, Probe Sequence
ttccatgtgtgaaccttgagtgata

SEQ ID NO: 70191 - DNA, 25 bp, Probe Sequence
gtgtggtgactcctttatattcgta

SEQ ID NO: 70192 - DNA, 25 bp, Probe Sequence
ggtgactctactgtgctttatcttt

SEQ ID NO: 70193 - DNA, 25 bp, Probe Sequence
tcttgtacgttgttatgatgaatcc

SEQ ID NO: 70194 - DNA, 25 bp, Probe Sequence
tgtcttgtacgttgttatgatgaat

SEQ ID NO: 70195 - DNA, 25 bp, Probe Sequence
ttaacattaagtgcctttggttcag

SEQ ID NO: 70196 - DNA, 25 bp, Probe Sequence
tttaacattaagtgcctttggttca

SEQ ID NO: 70197 - DNA, 25 bp, Probe Sequence
ttgaatcatgcactgtgttgaataa

SEQ ID NO: 70198 - DNA, 25 bp, Probe Sequence
tcagtgtcttgtacgttgttatgat

SEQ ID NO: 70199 - DNA, 25 bp, Probe Sequence
atcagtgtcttgtacgttgttatga

SEQ ID NO: 70200 - DNA, 25 bp, Probe Sequence
taacattaagtgcctttggttcaga

SEQ ID NO: 70201 - DNA, 25 bp, Probe Sequence
tccatgtgtgaaccttgagtgatac

SEQ ID NO: 70202 - DNA, 25 bp, Probe Sequence
gtcttgtacgttgttatgatgaatc

SEQ ID NO: 70203 - DNA, 25 bp, Probe Sequence
tggtgactcctttatattcgtactg

SEQ ID NO: 70204 - DNA, 25 bp, Probe Sequence
gtggtgactcctttatattcgtact

SEQ ID NO: 70205 - DNA, 25 bp, Probe Sequence
gtatgtgtgtgtgtgtgtgtgtgag

SEQ ID NO: 70206 - DNA, 25 bp, Probe Sequence
cttgtgtgtatgtgtgtgtgtgtgt

SEQ ID NO: 70207 - DNA, 25 bp, Probe Sequence
ttgtgtgtatgtgtgtgtgtgtgtg

SEQ ID NO: 70208 - DNA, 25 bp, Probe Sequence
ccattatgcccagtacatgacctta

SEQ ID NO: 70209 - DNA, 25 bp, Probe Sequence
gtgtatgtgtgtgtgtgtgtgtgtg

SEQ ID NO: 70210 - DNA, 25 bp, Probe Sequence
gtgtgtatgtgtgtgtgtgtgtgtg

SEQ ID NO: 70211 - DNA, 25 bp, Probe Sequence
tgtatgtgtgtgtgtgtgtgtgtga

SEQ ID NO: 70212 - DNA, 25 bp, Probe Sequence
tgtgtatgtgtgtgtgtgtgtgtgt

SEQ ID NO: 70213 - DNA, 25 bp, Probe Sequence
tgtgtgtatgtgtgtgtgtgtgtgt

SEQ ID NO: 70214 - DNA, 25 bp, Probe Sequence
ccttgtgtgtatgtgtgtgtgtgtg

SEQ ID NO: 70215 - DNA, 25 bp, Probe Sequence
ccttatgggactttcctacttgcag

SEQ ID NO: 70216 - DNA, 25 bp, Probe Sequence
gccattatgcccagtacatgacctt

SEQ ID NO: 70217 - DNA, 25 bp, Probe Sequence
gggacatatcctagggttttcaaat

SEQ ID NO: 70218 - DNA, 25 bp, Probe Sequence
ggggacatatcctagggttttcaaa

SEQ ID NO: 70219 - DNA, 25 bp, Probe Sequence
ggacatatcctagggttttcaaata

SEQ ID NO: 70220 - DNA, 25 bp, Probe Sequence
agggttttcaaataaaacatccaga

SEQ ID NO: 70221 - DNA, 25 bp, Probe Sequence
aggggacatatcctagggttttcaa

SEQ ID NO: 70222 - DNA, 25 bp, Probe Sequence
gacatatcctagggttttcaaataa

SEQ ID NO: 70223 - DNA, 25 bp, Probe Sequence
gggttttcaaataaaacatccagaa

SEQ ID NO: 70224 - DNA, 25 bp, Probe Sequence
gaggggacatatcctagggttttca

SEQ ID NO: 70225 - DNA, 25 bp, Probe Sequence
tagggttttcaaataaaacatccag

SEQ ID NO: 70226 - DNA, 25 bp, Probe Sequence
ctagggttttcaaataaaacatcca

SEQ ID NO: 70227 - DNA, 25 bp, Probe Sequence
acatatcctagggttttcaaataaa

SEQ ID NO: 70228 - DNA, 25 bp, Probe Sequence
ggaggggacatatcctagggttttc

SEQ ID NO: 70229 - DNA, 25 bp, Probe Sequence
tgatggtgtatgtacgatgaatgaa

SEQ ID NO: 70230 - DNA, 25 bp, Probe Sequence
ttgatggtgtatgtacgatgaatga

SEQ ID NO: 70231 - DNA, 25 bp, Probe Sequence
gatggtgtatgtacgatgaatgaat

SEQ ID NO: 70232 - DNA, 25 bp, Probe Sequence
taatggaagacatcagcatggatag

SEQ ID NO: 70233 - DNA, 25 bp, Probe Sequence
ttaatggaagacatcagcatggata

SEQ ID NO: 70234 - DNA, 25 bp, Probe Sequence
aagcacagaagtcactgaatataca

SEQ ID NO: 70235 - DNA, 25 bp, Probe Sequence
gcacagaagtcactgaatatacact

SEQ ID NO: 70236 - DNA, 25 bp, Probe Sequence
agcacagaagtcactgaatatacac

SEQ ID NO: 70237 - DNA, 25 bp, Probe Sequence
attaatggaagacatcagcatggat

SEQ ID NO: 70238 - DNA, 25 bp, Probe Sequence
taagcacagaagtcactgaatatac

SEQ ID NO: 70239 - DNA, 25 bp, Probe Sequence
tggtgtatgtacgatgaatgaatat

SEQ ID NO: 70240 - DNA, 25 bp, Probe Sequence
atggtgtatgtacgatgaatgaata

SEQ ID NO: 70241 - DNA, 25 bp, Probe Sequence
gcaacaatatgggctacatttagtc

SEQ ID NO: 70242 - DNA, 25 bp, Probe Sequence
ctcaatatgggtatcacagtgtctt

SEQ ID NO: 70243 - DNA, 25 bp, Probe Sequence
acaatatgggctacatttagtcaga

SEQ ID NO: 70244 - DNA, 25 bp, Probe Sequence
ttaagcacagaagtcactgaatata

SEQ ID NO: 70245 - DNA, 25 bp, Probe Sequence
caacaatatgggctacatttagtca

SEQ ID NO: 70246 - DNA, 25 bp, Probe Sequence
tcaatatgggtatcacagtgtctta

SEQ ID NO: 70247 - DNA, 25 bp, Probe Sequence
aacaatatgggctacatttagtcag

SEQ ID NO: 70248 - DNA, 25 bp, Probe Sequence
actttgatggtgtatgtacgatgaa

SEQ ID NO: 70249 - DNA, 25 bp, Probe Sequence
tttgatggtgtatgtacgatgaatg

SEQ ID NO: 70250 - DNA, 25 bp, Probe Sequence
caatatgggctacatttagtcagaa

SEQ ID NO: 70251 - DNA, 25 bp, Probe Sequence
gacatcagcatggatagcagagtag

SEQ ID NO: 70252 - DNA, 25 bp, Probe Sequence
ctttgatggtgtatgtacgatgaat

SEQ ID NO: 70253 - DNA, 25 bp, Probe Sequence
gtcttatcacaatgcctcagtagtt

SEQ ID NO: 70254 - DNA, 25 bp, Probe Sequence
ggttactctctaagacattctctga

SEQ ID NO: 70255 - DNA, 25 bp, Probe Sequence
agaagatagtgtcaaggagtgagaa

SEQ ID NO: 70256 - DNA, 25 bp, Probe Sequence
tactctctaagacattctctgaggt

SEQ ID NO: 70257 - DNA, 25 bp, Probe Sequence
tctgttgaagccatacaatgttcta

SEQ ID NO: 70258 - DNA, 25 bp, Probe Sequence
actctctaagacattctctgaggtg

SEQ ID NO: 70259 - DNA, 25 bp, Probe Sequence
ctgttgaagccatacaatgttctat

SEQ ID NO: 70260 - DNA, 25 bp, Probe Sequence
cagaagatagtgtcaaggagtgaga

SEQ ID NO: 70261 - DNA, 25 bp, Probe Sequence
ttactctctaagacattctctgagg

SEQ ID NO: 70262 - DNA, 25 bp, Probe Sequence
ttctgttgaagccatacaatgttct

SEQ ID NO: 70263 - DNA, 25 bp, Probe Sequence
ctctctaagacattctctgaggtgt

SEQ ID NO: 70264 - DNA, 25 bp, Probe Sequence
tcgtcttatcacaatgcctcagtag

SEQ ID NO: 70265 - DNA, 25 bp, Probe Sequence
ctcgtcttatcacaatgcctcagta

SEQ ID NO: 70266 - DNA, 25 bp, Probe Sequence
tctctaagacattctctgaggtgtg

SEQ ID NO: 70267 - DNA, 25 bp, Probe Sequence
tgttgaagccatacaatgttctatg

SEQ ID NO: 70268 - DNA, 25 bp, Probe Sequence
cgtcttatcacaatgcctcagtagt

SEQ ID NO: 70269 - DNA, 25 bp, Probe Sequence
ctctaagacattctctgaggtgtgt

SEQ ID NO: 70270 - DNA, 25 bp, Probe Sequence
acagaagatagtgtcaaggagtgag

SEQ ID NO: 70271 - DNA, 25 bp, Probe Sequence
taagacattctctgaggtgtgtgag

SEQ ID NO: 70272 - DNA, 25 bp, Probe Sequence
ctaagacattctctgaggtgtgtga

SEQ ID NO: 70273 - DNA, 25 bp, Probe Sequence
tctaagacattctctgaggtgtgtg

SEQ ID NO: 70274 - DNA, 25 bp, Probe Sequence
aactctcgtcttatcacaatgcctc

SEQ ID NO: 70275 - DNA, 25 bp, Probe Sequence
gttactctctaagacattctctgag

SEQ ID NO: 70276 - DNA, 25 bp, Probe Sequence
catgccattggattgctcagaataa

SEQ ID NO: 70277 - DNA, 25 bp, Probe Sequence
tactcctcaggttgatgtattcatg

SEQ ID NO: 70278 - DNA, 25 bp, Probe Sequence
atactcctcaggttgatgtattcat

SEQ ID NO: 70279 - DNA, 25 bp, Probe Sequence
tgtggacccttaaagttattgagtt

SEQ ID NO: 70280 - DNA, 25 bp, Probe Sequence
gtaaactggatatgtggacccttaa

SEQ ID NO: 70281 - DNA, 25 bp, Probe Sequence
atgtggacccttaaagttattgagt

SEQ ID NO: 70282 - DNA, 25 bp, Probe Sequence
ctggatatgtggacccttaaagtta

SEQ ID NO: 70283 - DNA, 25 bp, Probe Sequence
aaactggatatgtggacccttaaag

SEQ ID NO: 70284 - DNA, 25 bp, Probe Sequence
agtaaactggatatgtggaccctta

SEQ ID NO: 70285 - DNA, 25 bp, Probe Sequence
taaactggatatgtggacccttaaa

SEQ ID NO: 70286 - DNA, 25 bp, Probe Sequence
gtggacccttaaagttattgagttt

SEQ ID NO: 70287 - DNA, 25 bp, Probe Sequence
tggatatgtggacccttaaagttat

SEQ ID NO: 70288 - DNA, 25 bp, Probe Sequence
aataaggaacaaacactattgctgc

SEQ ID NO: 70289 - DNA, 25 bp, Probe Sequence
cgaatgccataacactgagttgtac

SEQ ID NO: 70290 - DNA, 25 bp, Probe Sequence
aagtaaactggatatgtggaccctt

SEQ ID NO: 70291 - DNA, 25 bp, Probe Sequence
tatgtggacccttaaagttattgag

SEQ ID NO: 70292 - DNA, 25 bp, Probe Sequence
ggatatgtggacccttaaagttatt

SEQ ID NO: 70293 - DNA, 25 bp, Probe Sequence
gaataaggaacaaacactattgctg

SEQ ID NO: 70294 - DNA, 25 bp, Probe Sequence
agaataaggaacaaacactattgct

SEQ ID NO: 70295 - DNA, 25 bp, Probe Sequence
aagttgttgtttagcagtgacattt

SEQ ID NO: 70296 - DNA, 25 bp, Probe Sequence
aaagttgttgtttagcagtgacatt

SEQ ID NO: 70297 - DNA, 25 bp, Probe Sequence
ttaaagttgttgtttagcagtgaca

SEQ ID NO: 70298 - DNA, 25 bp, Probe Sequence
agttgttgtttagcagtgacattta

SEQ ID NO: 70299 - DNA, 25 bp, Probe Sequence
taaagttgttgtttagcagtgacat

SEQ ID NO: 70300 - DNA, 25 bp, Probe Sequence
gagaataaggaacaaacactattgc

SEQ ID NO: 70301 - DNA, 25 bp, Probe Sequence
ttcacaccaatccttgctacttaga

SEQ ID NO: 70302 - DNA, 25 bp, Probe Sequence
gttcacaccaatccttgctacttag

SEQ ID NO: 70303 - DNA, 25 bp, Probe Sequence
tgttcacaccaatccttgctactta

SEQ ID NO: 70304 - DNA, 25 bp, Probe Sequence
actccagaaatgtcttgtaaccttt

SEQ ID NO: 70305 - DNA, 25 bp, Probe Sequence
ttgttcacaccaatccttgctactt

SEQ ID NO: 70306 - DNA, 25 bp, Probe Sequence
cactccagaaatgtcttgtaacctt

SEQ ID NO: 70307 - DNA, 25 bp, Probe Sequence
ccactccagaaatgtcttgtaacct

SEQ ID NO: 70308 - DNA, 25 bp, Probe Sequence
aatgtcttgtaacctttcagagctt

SEQ ID NO: 70309 - DNA, 25 bp, Probe Sequence
aaatgtcttgtaacctttcagagct

SEQ ID NO: 70310 - DNA, 25 bp, Probe Sequence
ctttgttcacaccaatccttgctac

SEQ ID NO: 70311 - DNA, 25 bp, Probe Sequence
atgtcttgtaacctttcagagcttg

SEQ ID NO: 70312 - DNA, 25 bp, Probe Sequence
ccagaaatgtcttgtaacctttcag

SEQ ID NO: 70313 - DNA, 25 bp, Probe Sequence
ctccagaaatgtcttgtaacctttc

SEQ ID NO: 70314 - DNA, 25 bp, Probe Sequence
gaaatgtcttgtaacctttcagagc

SEQ ID NO: 70315 - DNA, 25 bp, Probe Sequence
tccagaaatgtcttgtaacctttca

SEQ ID NO: 70316 - DNA, 25 bp, Probe Sequence
cagaaatgtcttgtaacctttcaga

SEQ ID NO: 70317 - DNA, 25 bp, Probe Sequence
tttgttcacaccaatccttgctact

SEQ ID NO: 70318 - DNA, 25 bp, Probe Sequence
agaaatgtcttgtaacctttcagag

SEQ ID NO: 70319 - DNA, 25 bp, Probe Sequence
gtcttgtaacctttcagagcttgtg

SEQ ID NO: 70320 - DNA, 25 bp, Probe Sequence
tgtcttgtaacctttcagagcttgt

SEQ ID NO: 70321 - DNA, 25 bp, Probe Sequence
cctttgttcacaccaatccttgcta

SEQ ID NO: 70322 - DNA, 25 bp, Probe Sequence
gccactccagaaatgtcttgtaacc

SEQ ID NO: 70323 - DNA, 25 bp, Probe Sequence
tcttgtaacctttcagagcttgtgc

SEQ ID NO: 70324 - DNA, 25 bp, Probe Sequence
taacctttcagagcttgtgcctttg

SEQ ID NO: 70325 - DNA, 25 bp, Probe Sequence
tgctctaataattctactgctagga

SEQ ID NO: 70326 - DNA, 25 bp, Probe Sequence
ttgctctaataattctactgctagg

SEQ ID NO: 70327 - DNA, 25 bp, Probe Sequence
gctctaataattctactgctaggaa

SEQ ID NO: 70328 - DNA, 25 bp, Probe Sequence
ccgtttgctctaataattctactgc

SEQ ID NO: 70329 - DNA, 25 bp, Probe Sequence
tattaaactggtaaatgtgatgccc

SEQ ID NO: 70330 - DNA, 25 bp, Probe Sequence
cgtttgctctaataattctactgct

SEQ ID NO: 70331 - DNA, 25 bp, Probe Sequence
tccgtttgctctaataattctactg

SEQ ID NO: 70332 - DNA, 25 bp, Probe Sequence
cttcagggtagccaattaagatatg

SEQ ID NO: 70333 - DNA, 25 bp, Probe Sequence
ctattaaactggtaaatgtgatgcc

SEQ ID NO: 70334 - DNA, 25 bp, Probe Sequence
ttccgtttgctctaataattctact

SEQ ID NO: 70335 - DNA, 25 bp, Probe Sequence
aaatgttaaattccgtttgctctaa

SEQ ID NO: 70336 - DNA, 25 bp, Probe Sequence
aatgttaaattccgtttgctctaat

SEQ ID NO: 70337 - DNA, 25 bp, Probe Sequence
actgctaggaatttacctttcagat

SEQ ID NO: 70338 - DNA, 25 bp, Probe Sequence
gcctggaaatgtctaaatcttatcc

SEQ ID NO: 70339 - DNA, 25 bp, Probe Sequence
tactgctaggaatttacctttcaga

SEQ ID NO: 70340 - DNA, 25 bp, Probe Sequence
tctactgctaggaatttacctttca

SEQ ID NO: 70341 - DNA, 25 bp, Probe Sequence
ctactgctaggaatttacctttcag

SEQ ID NO: 70342 - DNA, 25 bp, Probe Sequence
ttcagggtagccaattaagatatgg

SEQ ID NO: 70343 - DNA, 25 bp, Probe Sequence
agggtagccaattaagatatggttt

SEQ ID NO: 70344 - DNA, 25 bp, Probe Sequence
cagggtagccaattaagatatggtt

SEQ ID NO: 70345 - DNA, 25 bp, Probe Sequence
tctattaaactggtaaatgtgatgc

SEQ ID NO: 70346 - DNA, 25 bp, Probe Sequence
attaaactggtaaatgtgatgccca

SEQ ID NO: 70347 - DNA, 25 bp, Probe Sequence
tcagggtagccaattaagatatggt

SEQ ID NO: 70348 - DNA, 25 bp, Probe Sequence
attccgtttgctctaataattctac

SEQ ID NO: 70349 - DNA, 25 bp, Probe Sequence
ataatctgctgagtaatcttccgtt

SEQ ID NO: 70350 - DNA, 25 bp, Probe Sequence
aagttgtggtctggaattatatggt

SEQ ID NO: 70351 - DNA, 25 bp, Probe Sequence
agttgtggtctggaattatatggtc

SEQ ID NO: 70352 - DNA, 25 bp, Probe Sequence
aaggaagttgtggtctggaattata

SEQ ID NO: 70353 - DNA, 25 bp, Probe Sequence
tataatctgctgagtaatcttccgt

SEQ ID NO: 70354 - DNA, 25 bp, Probe Sequence
gaagttgtggtctggaattatatgg

SEQ ID NO: 70355 - DNA, 25 bp, Probe Sequence
ggaagttgtggtctggaattatatg

SEQ ID NO: 70356 - DNA, 25 bp, Probe Sequence
aggaagttgtggtctggaattatat

SEQ ID NO: 70357 - DNA, 25 bp, Probe Sequence
ctataatctgctgagtaatcttccg

SEQ ID NO: 70358 - DNA, 25 bp, Probe Sequence
aacctcaggcataatctcatcttct

SEQ ID NO: 70359 - DNA, 25 bp, Probe Sequence
caacctcaggcataatctcatcttc

SEQ ID NO: 70360 - DNA, 25 bp, Probe Sequence
cctataatctgctgagtaatcttcc

SEQ ID NO: 70361 - DNA, 25 bp, Probe Sequence
acaacctcaggcataatctcatctt

SEQ ID NO: 70362 - DNA, 25 bp, Probe Sequence
aacaacctcaggcataatctcatct

SEQ ID NO: 70363 - DNA, 25 bp, Probe Sequence
caacaacctcaggcataatctcatc

SEQ ID NO: 70364 - DNA, 25 bp, Probe Sequence
ctcaggcataatctcatcttctgtt

SEQ ID NO: 70365 - DNA, 25 bp, Probe Sequence
atggcacctgtgattgtactcttat

SEQ ID NO: 70366 - DNA, 25 bp, Probe Sequence
gttgtggtctggaattatatggtcc

SEQ ID NO: 70367 - DNA, 25 bp, Probe Sequence
taatctgctgagtaatcttccgttt

SEQ ID NO: 70368 - DNA, 25 bp, Probe Sequence
aggcataatctcatcttctgtttct

SEQ ID NO: 70369 - DNA, 25 bp, Probe Sequence
cctcaggcataatctcatcttctgt

SEQ ID NO: 70370 - DNA, 25 bp, Probe Sequence
acctcaggcataatctcatcttctg

SEQ ID NO: 70371 - DNA, 25 bp, Probe Sequence
tggcacctgtgattgtactcttatc

SEQ ID NO: 70372 - DNA, 25 bp, Probe Sequence
ttccaacaacctcaggcataatctc

SEQ ID NO: 70373 - DNA, 25 bp, Probe Sequence
tagaacagcaagagcaattactact

SEQ ID NO: 70374 - DNA, 25 bp, Probe Sequence
cctagtagaacagcaagagcaatta

SEQ ID NO: 70375 - DNA, 25 bp, Probe Sequence
ctagtagaacagcaagagcaattac

SEQ ID NO: 70376 - DNA, 25 bp, Probe Sequence
caaggaggagtcaactaatgaagaa

SEQ ID NO: 70377 - DNA, 25 bp, Probe Sequence
agaacagcaagagcaattactactc

SEQ ID NO: 70378 - DNA, 25 bp, Probe Sequence
caagagcaattactactcgttctgg

SEQ ID NO: 70379 - DNA, 25 bp, Probe Sequence
taacattgatgtgcctagtagaaca

SEQ ID NO: 70380 - DNA, 25 bp, Probe Sequence
aacattgatgtgcctagtagaacag

SEQ ID NO: 70381 - DNA, 25 bp, Probe Sequence
gtacaactgtccttagactgatgag

SEQ ID NO: 70382 - DNA, 25 bp, Probe Sequence
aacctgacggctatgattactatgc

SEQ ID NO: 70383 - DNA, 25 bp, Probe Sequence
aattcaatattcacctgccagactg

SEQ ID NO: 70384 - DNA, 25 bp, Probe Sequence
gatgagcaaggaggagtcaactaat

SEQ ID NO: 70385 - DNA, 25 bp, Probe Sequence
agtagaacagcaagagcaattacta

SEQ ID NO: 70386 - DNA, 25 bp, Probe Sequence
tagtagaacagcaagagcaattact

SEQ ID NO: 70387 - DNA, 25 bp, Probe Sequence
gcaagagcaattactactcgttctg

SEQ ID NO: 70388 - DNA, 25 bp, Probe Sequence
agcaagagcaattactactcgttct

SEQ ID NO: 70389 - DNA, 25 bp, Probe Sequence
cagcaagagcaattactactcgttc

SEQ ID NO: 70390 - DNA, 25 bp, Probe Sequence
gaacagcaagagcaattactactcg

SEQ ID NO: 70391 - DNA, 25 bp, Probe Sequence
ataacattgatgtgcctagtagaac

SEQ ID NO: 70392 - DNA, 25 bp, Probe Sequence
gcaaggaggagtcaactaatgaaga

SEQ ID NO: 70393 - DNA, 25 bp, Probe Sequence
agcaaggaggagtcaactaatgaag

SEQ ID NO: 70394 - DNA, 25 bp, Probe Sequence
gagcaaggaggagtcaactaatgaa

SEQ ID NO: 70395 - DNA, 25 bp, Probe Sequence
caagtctggtacaactgtccttaga

SEQ ID NO: 70396 - DNA, 25 bp, Probe Sequence
tacaactgtccttagactgatgagc

SEQ ID NO: 70397 - DNA, 25 bp, Probe Sequence
gcacttgtattgaatgaatgtccta

SEQ ID NO: 70398 - DNA, 25 bp, Probe Sequence
gcaggaactaatggtagactataca

SEQ ID NO: 70399 - DNA, 25 bp, Probe Sequence
aggcatgttaattctggttctatct

SEQ ID NO: 70400 - DNA, 25 bp, Probe Sequence
gaggcatgttaattctggttctatc

SEQ ID NO: 70401 - DNA, 25 bp, Probe Sequence
aagaggcatgttaattctggttcta

SEQ ID NO: 70402 - DNA, 25 bp, Probe Sequence
agaggcatgttaattctggttctat

SEQ ID NO: 70403 - DNA, 25 bp, Probe Sequence
gaagaggcatgttaattctggttct

SEQ ID NO: 70404 - DNA, 25 bp, Probe Sequence
caactcagaagaggcatgttaattc

SEQ ID NO: 70405 - DNA, 25 bp, Probe Sequence
tcaactcagaagaggcatgttaatt

SEQ ID NO: 70406 - DNA, 25 bp, Probe Sequence
ttcaactcagaagaggcatgttaat

SEQ ID NO: 70407 - DNA, 25 bp, Probe Sequence
caggagaatcacttgaacctagaag

SEQ ID NO: 70408 - DNA, 25 bp, Probe Sequence
ggcatgttaattctggttctatcta

SEQ ID NO: 70409 - DNA, 25 bp, Probe Sequence
cacttgtattgaatgaatgtcctaa

SEQ ID NO: 70410 - DNA, 25 bp, Probe Sequence
ctggttctatctacctcaacaagtt

SEQ ID NO: 70411 - DNA, 25 bp, Probe Sequence
ttctggttctatctacctcaacaag

SEQ ID NO: 70412 - DNA, 25 bp, Probe Sequence
tctggttctatctacctcaacaagt

SEQ ID NO: 70413 - DNA, 25 bp, Probe Sequence
aggagaatcacttgaacctagaagg

SEQ ID NO: 70414 - DNA, 25 bp, Probe Sequence
atgcacttgtattgaatgaatgtcc

SEQ ID NO: 70415 - DNA, 25 bp, Probe Sequence
attctggttctatctacctcaacaa

SEQ ID NO: 70416 - DNA, 25 bp, Probe Sequence
aattctggttctatctacctcaaca

SEQ ID NO: 70417 - DNA, 25 bp, Probe Sequence
tgcaggaactaatggtagactatac

SEQ ID NO: 70418 - DNA, 25 bp, Probe Sequence
agatgcacttgtattgaatgaatgt

SEQ ID NO: 70419 - DNA, 25 bp, Probe Sequence
ttgaatgaatgtcctaaatgccttt

SEQ ID NO: 70420 - DNA, 25 bp, Probe Sequence
gatgcacttgtattgaatgaatgtc

SEQ ID NO: 70421 - DNA, 25 bp, Probe Sequence
actagaccaagcagaagaaagaaat

SEQ ID NO: 70422 - DNA, 25 bp, Probe Sequence
atagactagaccaagcagaagaaag

SEQ ID NO: 70423 - DNA, 25 bp, Probe Sequence
gaaatagactagaccaagcagaaga

SEQ ID NO: 70424 - DNA, 25 bp, Probe Sequence
agaaatagactagaccaagcagaag

SEQ ID NO: 70425 - DNA, 25 bp, Probe Sequence
tagactagaccaagcagaagaaaga

SEQ ID NO: 70426 - DNA, 25 bp, Probe Sequence
aatagactagaccaagcagaagaaa

SEQ ID NO: 70427 - DNA, 25 bp, Probe Sequence
aaatagactagaccaagcagaagaa

SEQ ID NO: 70428 - DNA, 25 bp, Probe Sequence
ctagaccaagcagaagaaagaaatt

SEQ ID NO: 70429 - DNA, 25 bp, Probe Sequence
gactagaccaagcagaagaaagaaa

SEQ ID NO: 70430 - DNA, 25 bp, Probe Sequence
ggaattacaaacacagttgaaagac

SEQ ID NO: 70431 - DNA, 25 bp, Probe Sequence
aggaattacaaacacagttgaaaga

SEQ ID NO: 70432 - DNA, 25 bp, Probe Sequence
acaaacacagttgaaagacttagaa

SEQ ID NO: 70433 - DNA, 25 bp, Probe Sequence
agactagaccaagcagaagaaagaa

SEQ ID NO: 70434 - DNA, 25 bp, Probe Sequence
tagaaatagactagaccaagcagaa

SEQ ID NO: 70435 - DNA, 25 bp, Probe Sequence
ttagaaatagactagaccaagcaga

SEQ ID NO: 70436 - DNA, 25 bp, Probe Sequence
acttagaaatagactagaccaagca

SEQ ID NO: 70437 - DNA, 25 bp, Probe Sequence
cttagaaatagactagaccaagcag

SEQ ID NO: 70438 - DNA, 25 bp, Probe Sequence
gacttagaaatagactagaccaagc

SEQ ID NO: 70439 - DNA, 25 bp, Probe Sequence
tacaaacacagttgaaagacttaga

SEQ ID NO: 70440 - DNA, 25 bp, Probe Sequence
caaacacagttgaaagacttagaaa

SEQ ID NO: 70441 - DNA, 25 bp, Probe Sequence
gaattacaaacacagttgaaagact

SEQ ID NO: 70442 - DNA, 25 bp, Probe Sequence
ccaagcagaagaaagaaatttagca

SEQ ID NO: 70443 - DNA, 25 bp, Probe Sequence
accaagcagaagaaagaaatttagc

SEQ ID NO: 70444 - DNA, 25 bp, Probe Sequence
aattacaaacacagttgaaagactt

SEQ ID NO: 70445 - DNA, 25 bp, Probe Sequence
tctctaacgcagaacatctctctag

SEQ ID NO: 70446 - DNA, 25 bp, Probe Sequence
caagtgctgagattacaggtatgtg

SEQ ID NO: 70447 - DNA, 25 bp, Probe Sequence
acatggtgaactctgtgtctactaa

SEQ ID NO: 70448 - DNA, 25 bp, Probe Sequence
ctgagattacaggtatgtgccttct

SEQ ID NO: 70449 - DNA, 25 bp, Probe Sequence
aaacaagtattccagatttcccatc

SEQ ID NO: 70450 - DNA, 25 bp, Probe Sequence
tgagattacaggtatgtgccttctg

SEQ ID NO: 70451 - DNA, 25 bp, Probe Sequence
ccaagtgctgagattacaggtatgt

SEQ ID NO: 70452 - DNA, 25 bp, Probe Sequence
ttattccttgtgaggcgacataaca

SEQ ID NO: 70453 - DNA, 25 bp, Probe Sequence
cctaagatgtttgatggattgattg

SEQ ID NO: 70454 - DNA, 25 bp, Probe Sequence
ttctctaacgcagaacatctctcta

SEQ ID NO: 70455 - DNA, 25 bp, Probe Sequence
catggtgaactctgtgtctactaaa

SEQ ID NO: 70456 - DNA, 25 bp, Probe Sequence
cttcttctctaacgcagaacatctc

SEQ ID NO: 70457 - DNA, 25 bp, Probe Sequence
taaatacataaaccatgccttccct

SEQ ID NO: 70458 - DNA, 25 bp, Probe Sequence
gtaaatacataaaccatgccttccc

SEQ ID NO: 70459 - DNA, 25 bp, Probe Sequence
aagtgctgagattacaggtatgtgc

SEQ ID NO: 70460 - DNA, 25 bp, Probe Sequence
ttcttctctaacgcagaacatctct

SEQ ID NO: 70461 - DNA, 25 bp, Probe Sequence
tgtcctctcgcattgtaaatacata

SEQ ID NO: 70462 - DNA, 25 bp, Probe Sequence
aagatgtttgatggattgattgaaa

SEQ ID NO: 70463 - DNA, 25 bp, Probe Sequence
gtcctctcgcattgtaaatacataa

SEQ ID NO: 70464 - DNA, 25 bp, Probe Sequence
aaatacataaaccatgccttccctg

SEQ ID NO: 70465 - DNA, 25 bp, Probe Sequence
tctcgcattgtaaatacataaacca

SEQ ID NO: 70466 - DNA, 25 bp, Probe Sequence
cttctctaacgcagaacatctctct

SEQ ID NO: 70467 - DNA, 25 bp, Probe Sequence
tcttctctaacgcagaacatctctc

SEQ ID NO: 70468 - DNA, 25 bp, Probe Sequence
tgtaaatacataaaccatgccttcc

SEQ ID NO: 70469 - DNA, 25 bp, Probe Sequence
ctcttagacgatctccagatgtact

SEQ ID NO: 70470 - DNA, 25 bp, Probe Sequence
gaattgtatcttcatccttagcaca

SEQ ID NO: 70471 - DNA, 25 bp, Probe Sequence
cctcttagacgatctccagatgtac

SEQ ID NO: 70472 - DNA, 25 bp, Probe Sequence
ggaattgtatcttcatccttagcac

SEQ ID NO: 70473 - DNA, 25 bp, Probe Sequence
tcttagacgatctccagatgtactg

SEQ ID NO: 70474 - DNA, 25 bp, Probe Sequence
aagagttcctgaagtaccacatctg

SEQ ID NO: 70475 - DNA, 25 bp, Probe Sequence
ataagtctaccaagagctgaggaat

SEQ ID NO: 70476 - DNA, 25 bp, Probe Sequence
cttagacgatctccagatgtactgt

SEQ ID NO: 70477 - DNA, 25 bp, Probe Sequence
taagtctaccaagagctgaggaatt

SEQ ID NO: 70478 - DNA, 25 bp, Probe Sequence
agagctgaggaattgtatcttcatc

SEQ ID NO: 70479 - DNA, 25 bp, Probe Sequence
ctaccaagagctgaggaattgtatc

SEQ ID NO: 70480 - DNA, 25 bp, Probe Sequence
ttagacgatctccagatgtactgtg

SEQ ID NO: 70481 - DNA, 25 bp, Probe Sequence
taccaagagctgaggaattgtatct

SEQ ID NO: 70482 - DNA, 25 bp, Probe Sequence
tctaccaagagctgaggaattgtat

SEQ ID NO: 70483 - DNA, 25 bp, Probe Sequence
atctccagatgtactgtgatgtgag

SEQ ID NO: 70484 - DNA, 25 bp, Probe Sequence
gatctccagatgtactgtgatgtga

SEQ ID NO: 70485 - DNA, 25 bp, Probe Sequence
cataagtctaccaagagctgaggaa

SEQ ID NO: 70486 - DNA, 25 bp, Probe Sequence
gccacgcaatcaataatttaccatt

SEQ ID NO: 70487 - DNA, 25 bp, Probe Sequence
tatcttcatccttagcacaaagcac

SEQ ID NO: 70488 - DNA, 25 bp, Probe Sequence
gtatcttcatccttagcacaaagca

SEQ ID NO: 70489 - DNA, 25 bp, Probe Sequence
ctccagatgtactgtgatgtgagtt

SEQ ID NO: 70490 - DNA, 25 bp, Probe Sequence
tagacgatctccagatgtactgtga

SEQ ID NO: 70491 - DNA, 25 bp, Probe Sequence
gtctaccaagagctgaggaattgta

SEQ ID NO: 70492 - DNA, 25 bp, Probe Sequence
tttgtactaataaagcaggctggta

SEQ ID NO: 70493 - DNA, 25 bp, Probe Sequence
ttatcctgaagttgctatggctatc

SEQ ID NO: 70494 - DNA, 25 bp, Probe Sequence
attatcctgaagttgctatggctat

SEQ ID NO: 70495 - DNA, 25 bp, Probe Sequence
gtgtccattatcctgaagttgctat

SEQ ID NO: 70496 - DNA, 25 bp, Probe Sequence
tatcctgaagttgctatggctatct

SEQ ID NO: 70497 - DNA, 25 bp, Probe Sequence
cattatcctgaagttgctatggcta

SEQ ID NO: 70498 - DNA, 25 bp, Probe Sequence
tgtccattatcctgaagttgctatg

SEQ ID NO: 70499 - DNA, 25 bp, Probe Sequence
gaagttgctatggctatcttgtctt

SEQ ID NO: 70500 - DNA, 25 bp, Probe Sequence
ctgaagttgctatggctatcttgtc

SEQ ID NO: 70501 - DNA, 25 bp, Probe Sequence
atcctgaagttgctatggctatctt

SEQ ID NO: 70502 - DNA, 25 bp, Probe Sequence
tgaagttgctatggctatcttgtct

SEQ ID NO: 70503 - DNA, 25 bp, Probe Sequence
tcctgaagttgctatggctatcttg

SEQ ID NO: 70504 - DNA, 25 bp, Probe Sequence
cgtgtccattatcctgaagttgcta

SEQ ID NO: 70505 - DNA, 25 bp, Probe Sequence
cctgaagttgctatggctatcttgt

SEQ ID NO: 70506 - DNA, 25 bp, Probe Sequence
aagccacctattcatttctgtctaa

SEQ ID NO: 70507 - DNA, 25 bp, Probe Sequence
aaagccacctattcatttctgtcta

SEQ ID NO: 70508 - DNA, 25 bp, Probe Sequence
agccacctattcatttctgtctaat

SEQ ID NO: 70509 - DNA, 25 bp, Probe Sequence
aaatgtgatgaaaccctatgtatgc

SEQ ID NO: 70510 - DNA, 25 bp, Probe Sequence
tctgtctaatttcactctgttcctc

SEQ ID NO: 70511 - DNA, 25 bp, Probe Sequence
ttctgtctaatttcactctgttcct

SEQ ID NO: 70512 - DNA, 25 bp, Probe Sequence
aagttgctatggctatcttgtcttt

SEQ ID NO: 70513 - DNA, 25 bp, Probe Sequence
ctgtctaatttcactctgttcctcc

SEQ ID NO: 70514 - DNA, 25 bp, Probe Sequence
gccacctattcatttctgtctaatt

SEQ ID NO: 70515 - DNA, 25 bp, Probe Sequence
tttctgtctaatttcactctgttcc

SEQ ID NO: 70516 - DNA, 25 bp, Probe Sequence
gtctaatttcactctgttcctccac

SEQ ID NO: 70517 - DNA, 25 bp, Probe Sequence
cttgacattcctcagctcctagtat

SEQ ID NO: 70518 - DNA, 25 bp, Probe Sequence
ttgacattcctcagctcctagtatg

SEQ ID NO: 70519 - DNA, 25 bp, Probe Sequence
tgacattcctcagctcctagtatgc

SEQ ID NO: 70520 - DNA, 25 bp, Probe Sequence
gacattcctcagctcctagtatgcc

SEQ ID NO: 70521 - DNA, 25 bp, Probe Sequence
acattcctcagctcctagtatgcct

SEQ ID NO: 70522 - DNA, 25 bp, Probe Sequence
cattcctcagctcctagtatgcctg

SEQ ID NO: 70523 - DNA, 25 bp, Probe Sequence
gcttgacattcctcagctcctagta

SEQ ID NO: 70524 - DNA, 25 bp, Probe Sequence
cagcttgacattcctcagctcctag

SEQ ID NO: 70525 - DNA, 25 bp, Probe Sequence
agcttgacattcctcagctcctagt

SEQ ID NO: 70526 - DNA, 25 bp, Probe Sequence
aagcacataatggaccaagtaagat

SEQ ID NO: 70527 - DNA, 25 bp, Probe Sequence
tagccttgaattaagtcttccttcc

SEQ ID NO: 70528 - DNA, 25 bp, Probe Sequence
agcacataatggaccaagtaagatc

SEQ ID NO: 70529 - DNA, 25 bp, Probe Sequence
gcacataatggaccaagtaagatca

SEQ ID NO: 70530 - DNA, 25 bp, Probe Sequence
atagccttgaattaagtcttccttc

SEQ ID NO: 70531 - DNA, 25 bp, Probe Sequence
acctccagttatgaagatatgagaa

SEQ ID NO: 70532 - DNA, 25 bp, Probe Sequence
aatagccttgaattaagtcttcctt

SEQ ID NO: 70533 - DNA, 25 bp, Probe Sequence
cacataatggaccaagtaagatcat

SEQ ID NO: 70534 - DNA, 25 bp, Probe Sequence
cataatggaccaagtaagatcatgt

SEQ ID NO: 70535 - DNA, 25 bp, Probe Sequence
acataatggaccaagtaagatcatg

SEQ ID NO: 70536 - DNA, 25 bp, Probe Sequence
taatggaccaagtaagatcatgttg

SEQ ID NO: 70537 - DNA, 25 bp, Probe Sequence
tacctccagttatgaagatatgaga

SEQ ID NO: 70538 - DNA, 25 bp, Probe Sequence
ataatggaccaagtaagatcatgtt

SEQ ID NO: 70539 - DNA, 25 bp, Probe Sequence
ttgttccaacagcatgtattatcta

SEQ ID NO: 70540 - DNA, 25 bp, Probe Sequence
aaagcacataatggaccaagtaaga

SEQ ID NO: 70541 - DNA, 25 bp, Probe Sequence
ccttgaattaagtcttccttcccta

SEQ ID NO: 70542 - DNA, 25 bp, Probe Sequence
ttacctccagttatgaagatatgag

SEQ ID NO: 70543 - DNA, 25 bp, Probe Sequence
tgttccaacagcatgtattatctat

SEQ ID NO: 70544 - DNA, 25 bp, Probe Sequence
attacctccagttatgaagatatga

SEQ ID NO: 70545 - DNA, 25 bp, Probe Sequence
cctaaattcagtggatttcttgctc

SEQ ID NO: 70546 - DNA, 25 bp, Probe Sequence
gagcctaaattcagtggatttcttg

SEQ ID NO: 70547 - DNA, 25 bp, Probe Sequence
ggagcctaaattcagtggatttctt

SEQ ID NO: 70548 - DNA, 25 bp, Probe Sequence
aaatagccttgaattaagtcttcct

SEQ ID NO: 70549 - DNA, 25 bp, Probe Sequence
taggagcctaaattcagtggatttc

SEQ ID NO: 70550 - DNA, 25 bp, Probe Sequence
accagaccttaatacctatgagaag

SEQ ID NO: 70551 - DNA, 25 bp, Probe Sequence
aaccagaccttaatacctatgagaa

SEQ ID NO: 70552 - DNA, 25 bp, Probe Sequence
ccagaccttaatacctatgagaaga

SEQ ID NO: 70553 - DNA, 25 bp, Probe Sequence
catcaggtgtttagtaggttccata

SEQ ID NO: 70554 - DNA, 25 bp, Probe Sequence
cataaatgcccgacaagtaagtaat

SEQ ID NO: 70555 - DNA, 25 bp, Probe Sequence
cagaccttaatacctatgagaagaa

SEQ ID NO: 70556 - DNA, 25 bp, Probe Sequence
tcagatgtaaacaagtcctttcagt

SEQ ID NO: 70557 - DNA, 25 bp, Probe Sequence
atcaggtgtttagtaggttccataa

SEQ ID NO: 70558 - DNA, 25 bp, Probe Sequence
caatgctgtaaccacctcagttaag

SEQ ID NO: 70559 - DNA, 25 bp, Probe Sequence
ccataaatgcccgacaagtaagtaa

SEQ ID NO: 70560 - DNA, 25 bp, Probe Sequence
agaccttaatacctatgagaagaag

SEQ ID NO: 70561 - DNA, 25 bp, Probe Sequence
atcagatgtaaacaagtcctttcag

SEQ ID NO: 70562 - DNA, 25 bp, Probe Sequence
gtgtttagtaggttccataaatgcc

SEQ ID NO: 70563 - DNA, 25 bp, Probe Sequence
ggtgtttagtaggttccataaatgc

SEQ ID NO: 70564 - DNA, 25 bp, Probe Sequence
ggactttaattcaaaccagacctta

SEQ ID NO: 70565 - DNA, 25 bp, Probe Sequence
caaaccagaccttaatacctatgag

SEQ ID NO: 70566 - DNA, 25 bp, Probe Sequence
cagatgtaaacaagtcctttcagtt

SEQ ID NO: 70567 - DNA, 25 bp, Probe Sequence
tcaggtgtttagtaggttccataaa

SEQ ID NO: 70568 - DNA, 25 bp, Probe Sequence
aaaccagaccttaatacctatgaga

SEQ ID NO: 70569 - DNA, 25 bp, Probe Sequence
gtatgctgcggactttaattcaaac

SEQ ID NO: 70570 - DNA, 25 bp, Probe Sequence
taaacaagtcctttcagttactccc

SEQ ID NO: 70571 - DNA, 25 bp, Probe Sequence
tgtttagtaggttccataaatgccc

SEQ ID NO: 70572 - DNA, 25 bp, Probe Sequence
cggactttaattcaaaccagacctt

SEQ ID NO: 70573 - DNA, 25 bp, Probe Sequence
taccactatctcctgtgttcctgaa

SEQ ID NO: 70574 - DNA, 25 bp, Probe Sequence
aatcttgtagccagtattgagaacc

SEQ ID NO: 70575 - DNA, 25 bp, Probe Sequence
gaggattcaatcttgtagccagtat

SEQ ID NO: 70576 - DNA, 25 bp, Probe Sequence
aggattcaatcttgtagccagtatt

SEQ ID NO: 70577 - DNA, 25 bp, Probe Sequence
atcttgtagccagtattgagaacct

SEQ ID NO: 70578 - DNA, 25 bp, Probe Sequence
tcttgtagccagtattgagaacctt

SEQ ID NO: 70579 - DNA, 25 bp, Probe Sequence
agaggattcaatcttgtagccagta

SEQ ID NO: 70580 - DNA, 25 bp, Probe Sequence
ccatagtcctcaactccagatacat

SEQ ID NO: 70581 - DNA, 25 bp, Probe Sequence
tagtcctcaactccagatacatgat

SEQ ID NO: 70582 - DNA, 25 bp, Probe Sequence
atagtcctcaactccagatacatga

SEQ ID NO: 70583 - DNA, 25 bp, Probe Sequence
catagtcctcaactccagatacatg

SEQ ID NO: 70584 - DNA, 25 bp, Probe Sequence
gtcctcaactccagatacatgatta

SEQ ID NO: 70585 - DNA, 25 bp, Probe Sequence
gtctctgttgtcaacctcatagaag

SEQ ID NO: 70586 - DNA, 25 bp, Probe Sequence
ctctgttgtcaacctcatagaagtg

SEQ ID NO: 70587 - DNA, 25 bp, Probe Sequence
tctctgttgtcaacctcatagaagt

SEQ ID NO: 70588 - DNA, 25 bp, Probe Sequence
agtctctgttgtcaacctcatagaa

SEQ ID NO: 70589 - DNA, 25 bp, Probe Sequence
tcctcaactccagatacatgattaa

SEQ ID NO: 70590 - DNA, 25 bp, Probe Sequence
agtcctcaactccagatacatgatt

SEQ ID NO: 70591 - DNA, 25 bp, Probe Sequence
ctgtcacctggcactctattctaac

SEQ ID NO: 70592 - DNA, 25 bp, Probe Sequence
cagaggattcaatcttgtagccagt

SEQ ID NO: 70593 - DNA, 25 bp, Probe Sequence
ctctccagaggattcaatcttgtag

SEQ ID NO: 70594 - DNA, 25 bp, Probe Sequence
tattctaacaccctgagtctacctt

SEQ ID NO: 70595 - DNA, 25 bp, Probe Sequence
gtcacctggcactctattctaacac

SEQ ID NO: 70596 - DNA, 25 bp, Probe Sequence
ctattctaacaccctgagtctacct

SEQ ID NO: 70597 - DNA, 25 bp, Probe Sequence
tctattctaacaccctgagtctacc

SEQ ID NO: 70598 - DNA, 25 bp, Probe Sequence
gataaattcatagcccaacaaggta

SEQ ID NO: 70599 - DNA, 25 bp, Probe Sequence
ctgataaattcatagcccaacaagg

SEQ ID NO: 70600 - DNA, 25 bp, Probe Sequence
cctgataaattcatagcccaacaag

SEQ ID NO: 70601 - DNA, 25 bp, Probe Sequence
tgtaacctgataaattcatagccca

SEQ ID NO: 70602 - DNA, 25 bp, Probe Sequence
tgataaattcatagcccaacaaggt

SEQ ID NO: 70603 - DNA, 25 bp, Probe Sequence
acctgataaattcatagcccaacaa

SEQ ID NO: 70604 - DNA, 25 bp, Probe Sequence
aacctgataaattcatagcccaaca

SEQ ID NO: 70605 - DNA, 25 bp, Probe Sequence
taaattcatagcccaacaaggtaat

SEQ ID NO: 70606 - DNA, 25 bp, Probe Sequence
ataaattcatagcccaacaaggtaa

SEQ ID NO: 70607 - DNA, 25 bp, Probe Sequence
taacctgataaattcatagcccaac

SEQ ID NO: 70608 - DNA, 25 bp, Probe Sequence
gtaacctgataaattcatagcccaa

SEQ ID NO: 70609 - DNA, 25 bp, Probe Sequence
ttgtaacctgataaattcatagccc

SEQ ID NO: 70610 - DNA, 25 bp, Probe Sequence
aaattcatagcccaacaaggtaatt

SEQ ID NO: 70611 - DNA, 25 bp, Probe Sequence
tcatagcccaacaaggtaattattt

SEQ ID NO: 70612 - DNA, 25 bp, Probe Sequence
ttcatagcccaacaaggtaattatt

SEQ ID NO: 70613 - DNA, 25 bp, Probe Sequence
attcatagcccaacaaggtaattat

SEQ ID NO: 70614 - DNA, 25 bp, Probe Sequence
aattcatagcccaacaaggtaatta

SEQ ID NO: 70615 - DNA, 25 bp, Probe Sequence
attgtaacctgataaattcatagcc

SEQ ID NO: 70616 - DNA, 25 bp, Probe Sequence
agcccaacaaggtaattattttaga

SEQ ID NO: 70617 - DNA, 25 bp, Probe Sequence
tatgataaactctagctctaaatgc

SEQ ID NO: 70618 - DNA, 25 bp, Probe Sequence
atgataaactctagctctaaatgct

SEQ ID NO: 70619 - DNA, 25 bp, Probe Sequence
gcccaacaaggtaattattttagaa

SEQ ID NO: 70620 - DNA, 25 bp, Probe Sequence
catagcccaacaaggtaattatttt

SEQ ID NO: 70621 - DNA, 25 bp, Probe Sequence
tagcccaacaaggtaattattttag

SEQ ID NO: 70622 - DNA, 25 bp, Probe Sequence
taaggcttcttggtctggtagagag

SEQ ID NO: 70623 - DNA, 25 bp, Probe Sequence
gagaccttcttgtccaccatcttac

SEQ ID NO: 70624 - DNA, 25 bp, Probe Sequence
gtaaggcttcttggtctggtagaga

SEQ ID NO: 70625 - DNA, 25 bp, Probe Sequence
gaccttcttgtccaccatcttacag

SEQ ID NO: 70626 - DNA, 25 bp, Probe Sequence
agaccttcttgtccaccatcttaca

SEQ ID NO: 70627 - DNA, 25 bp, Probe Sequence
agatagatcaagggtctcagtgtct

SEQ ID NO: 70628 - DNA, 25 bp, Probe Sequence
cagatagatcaagggtctcagtgtc

SEQ ID NO: 70629 - DNA, 25 bp, Probe Sequence
ctgatatctctgtggctctcatgtc

SEQ ID NO: 70630 - DNA, 25 bp, Probe Sequence
gactgatatctctgtggctctcatg

SEQ ID NO: 70631 - DNA, 25 bp, Probe Sequence
agactgatatctctgtggctctcat

SEQ ID NO: 70632 - DNA, 25 bp, Probe Sequence
ggtaaggcttcttggtctggtagag

SEQ ID NO: 70633 - DNA, 25 bp, Probe Sequence
gatagatcaagggtctcagtgtctg

SEQ ID NO: 70634 - DNA, 25 bp, Probe Sequence
cgagaccttcttgtccaccatctta

SEQ ID NO: 70635 - DNA, 25 bp, Probe Sequence
tgatatctctgtggctctcatgtca

SEQ ID NO: 70636 - DNA, 25 bp, Probe Sequence
actgatatctctgtggctctcatgt

SEQ ID NO: 70637 - DNA, 25 bp, Probe Sequence
cttggtctggtagagagactgatat

SEQ ID NO: 70638 - DNA, 25 bp, Probe Sequence
gatatctctgtggctctcatgtcac

SEQ ID NO: 70639 - DNA, 25 bp, Probe Sequence
aaggcttcttggtctggtagagaga

SEQ ID NO: 70640 - DNA, 25 bp, Probe Sequence
accttcttgtccaccatcttacagg

SEQ ID NO: 70641 - DNA, 25 bp, Probe Sequence
ccagatagatcaagggtctcagtgt

SEQ ID NO: 70642 - DNA, 25 bp, Probe Sequence
tcttggtctggtagagagactgata

SEQ ID NO: 70643 - DNA, 25 bp, Probe Sequence
atagatcaagggtctcagtgtctgg

SEQ ID NO: 70644 - DNA, 25 bp, Probe Sequence
ttcttggtctggtagagagactgat

SEQ ID NO: 70645 - DNA, 25 bp, Probe Sequence
ttggtctggtagagagactgatatc

SEQ ID NO: 70646 - DNA, 25 bp, Probe Sequence
acttctgtgattcatctatgttgga

SEQ ID NO: 70647 - DNA, 25 bp, Probe Sequence
attcttctctatatccgccattgat

SEQ ID NO: 70648 - DNA, 25 bp, Probe Sequence
tattcttctctatatccgccattga

SEQ ID NO: 70649 - DNA, 25 bp, Probe Sequence
gcaacttctgtgattcatctatgtt

SEQ ID NO: 70650 - DNA, 25 bp, Probe Sequence
aacttctgtgattcatctatgttgg

SEQ ID NO: 70651 - DNA, 25 bp, Probe Sequence
cttctgtgattcatctatgttggat

SEQ ID NO: 70652 - DNA, 25 bp, Probe Sequence
cgcaacttctgtgattcatctatgt

SEQ ID NO: 70653 - DNA, 25 bp, Probe Sequence
ttattcttctctatatccgccattg

SEQ ID NO: 70654 - DNA, 25 bp, Probe Sequence
gataacgctgtgtactcatctcatt

SEQ ID NO: 70655 - DNA, 25 bp, Probe Sequence
ggtattattcttctctatatccgcc

SEQ ID NO: 70656 - DNA, 25 bp, Probe Sequence
ataacgctgtgtactcatctcattg

SEQ ID NO: 70657 - DNA, 25 bp, Probe Sequence
ttctgtgattcatctatgttggatt

SEQ ID NO: 70658 - DNA, 25 bp, Probe Sequence
ccgcaacttctgtgattcatctatg

SEQ ID NO: 70659 - DNA, 25 bp, Probe Sequence
tgtgtactcatctcattgtgaacta

SEQ ID NO: 70660 - DNA, 25 bp, Probe Sequence
ctgtgtactcatctcattgtgaact

SEQ ID NO: 70661 - DNA, 25 bp, Probe Sequence
ttcttctctatatccgccattgata

SEQ ID NO: 70662 - DNA, 25 bp, Probe Sequence
gtgtactcatctcattgtgaactag

SEQ ID NO: 70663 - DNA, 25 bp, Probe Sequence
accgcaacttctgtgattcatctat

SEQ ID NO: 70664 - DNA, 25 bp, Probe Sequence
gtattattcttctctatatccgcca

SEQ ID NO: 70665 - DNA, 25 bp, Probe Sequence
attattcttctctatatccgccatt

SEQ ID NO: 70666 - DNA, 25 bp, Probe Sequence
taacgctgtgtactcatctcattgt

SEQ ID NO: 70667 - DNA, 25 bp, Probe Sequence
tgataacgctgtgtactcatctcat

SEQ ID NO: 70668 - DNA, 25 bp, Probe Sequence
aggtattattcttctctatatccgc

SEQ ID NO: 70669 - DNA, 25 bp, Probe Sequence
tctgtgattcatctatgttggatta

SEQ ID NO: 70670 - DNA, 25 bp, Probe Sequence
tccaggtagtcagtcagaatatcag

SEQ ID NO: 70671 - DNA, 25 bp, Probe Sequence
ctccaggtagtcagtcagaatatca

SEQ ID NO: 70672 - DNA, 25 bp, Probe Sequence
caggtagtcagtcagaatatcagta

SEQ ID NO: 70673 - DNA, 25 bp, Probe Sequence
ccaggtagtcagtcagaatatcagt

SEQ ID NO: 70674 - DNA, 25 bp, Probe Sequence
aggtagtcagtcagaatatcagtaa

SEQ ID NO: 70675 - DNA, 25 bp, Probe Sequence
attctggcttagatcctagtgacta

SEQ ID NO: 70676 - DNA, 25 bp, Probe Sequence
tagattctggcttagatcctagtga

SEQ ID NO: 70677 - DNA, 25 bp, Probe Sequence
ggtagtcagtcagaatatcagtaag

SEQ ID NO: 70678 - DNA, 25 bp, Probe Sequence
gctccaggtagtcagtcagaatatc

SEQ ID NO: 70679 - DNA, 25 bp, Probe Sequence
ttctggcttagatcctagtgactac

SEQ ID NO: 70680 - DNA, 25 bp, Probe Sequence
acacagatccatacctcattactaa

SEQ ID NO: 70681 - DNA, 25 bp, Probe Sequence
aacacagatccatacctcattacta

SEQ ID NO: 70682 - DNA, 25 bp, Probe Sequence
ttagattctggcttagatcctagtg

SEQ ID NO: 70683 - DNA, 25 bp, Probe Sequence
acagatccatacctcattactaact

SEQ ID NO: 70684 - DNA, 25 bp, Probe Sequence
cacagatccatacctcattactaac

SEQ ID NO: 70685 - DNA, 25 bp, Probe Sequence
gattctggcttagatcctagtgact

SEQ ID NO: 70686 - DNA, 25 bp, Probe Sequence
agattctggcttagatcctagtgac

SEQ ID NO: 70687 - DNA, 25 bp, Probe Sequence
acctcattactaacttagacattgg

SEQ ID NO: 70688 - DNA, 25 bp, Probe Sequence
tctccacttcattaatatacaggct

SEQ ID NO: 70689 - DNA, 25 bp, Probe Sequence
tgctccaggtagtcagtcagaatat

SEQ ID NO: 70690 - DNA, 25 bp, Probe Sequence
tctggcttagatcctagtgactaca

SEQ ID NO: 70691 - DNA, 25 bp, Probe Sequence
gtagtcagtcagaatatcagtaagt

SEQ ID NO: 70692 - DNA, 25 bp, Probe Sequence
ctccacttcattaatatacaggctt

SEQ ID NO: 70693 - DNA, 25 bp, Probe Sequence
ttctccacttcattaatatacaggc

SEQ ID NO: 70694 - DNA, 25 bp, Probe Sequence
ttcctcttggtaatgaatgtgttct

SEQ ID NO: 70695 - DNA, 25 bp, Probe Sequence
cttcctcttggtaatgaatgtgttc

SEQ ID NO: 70696 - DNA, 25 bp, Probe Sequence
tcctcttggtaatgaatgtgttctc

SEQ ID NO: 70697 - DNA, 25 bp, Probe Sequence
ccttcctcttggtaatgaatgtgtt

SEQ ID NO: 70698 - DNA, 25 bp, Probe Sequence
cctcttggtaatgaatgtgttctca

SEQ ID NO: 70699 - DNA, 25 bp, Probe Sequence
gaattgtgccttcctcttggtaatg

SEQ ID NO: 70700 - DNA, 25 bp, Probe Sequence
aattgtgccttcctcttggtaatga

SEQ ID NO: 70701 - DNA, 25 bp, Probe Sequence
ttgtgccttcctcttggtaatgaat

SEQ ID NO: 70702 - DNA, 25 bp, Probe Sequence
attgtgccttcctcttggtaatgaa

SEQ ID NO: 70703 - DNA, 25 bp, Probe Sequence
gagaactacaagaagaaactgaacc

SEQ ID NO: 70704 - DNA, 25 bp, Probe Sequence
ggagaactacaagaagaaactgaac

SEQ ID NO: 70705 - DNA, 25 bp, Probe Sequence
gacataataccaaagacttacggga

SEQ ID NO: 70706 - DNA, 25 bp, Probe Sequence
agacataataccaaagacttacggg

SEQ ID NO: 70707 - DNA, 25 bp, Probe Sequence
aactacaagaagaaactgaacccaa

SEQ ID NO: 70708 - DNA, 25 bp, Probe Sequence
agaactacaagaagaaactgaaccc

SEQ ID NO: 70709 - DNA, 25 bp, Probe Sequence
acataataccaaagacttacgggat

SEQ ID NO: 70710 - DNA, 25 bp, Probe Sequence
cggagaactacaagaagaaactgaa

SEQ ID NO: 70711 - DNA, 25 bp, Probe Sequence
ataataccaaagacttacgggatgc

SEQ ID NO: 70712 - DNA, 25 bp, Probe Sequence
actacaagaagaaactgaacccaag

SEQ ID NO: 70713 - DNA, 25 bp, Probe Sequence
gaactacaagaagaaactgaaccca

SEQ ID NO: 70714 - DNA, 25 bp, Probe Sequence
cataataccaaagacttacgggatg

SEQ ID NO: 70715 - DNA, 25 bp, Probe Sequence
gctaacagaaggaaggaaataagaa

SEQ ID NO: 70716 - DNA, 25 bp, Probe Sequence
cctctttcctttacaattacttggc

SEQ ID NO: 70717 - DNA, 25 bp, Probe Sequence
gccttcctcttggtaatgaatgtgt

SEQ ID NO: 70718 - DNA, 25 bp, Probe Sequence
attcagagaagaggttgaggagtaa

SEQ ID NO: 70719 - DNA, 25 bp, Probe Sequence
ttaattcagagaagaggttgaggag

SEQ ID NO: 70720 - DNA, 25 bp, Probe Sequence
aattcagagaagaggttgaggagta

SEQ ID NO: 70721 - DNA, 25 bp, Probe Sequence
taattcagagaagaggttgaggagt

SEQ ID NO: 70722 - DNA, 25 bp, Probe Sequence
tccttgaggcaactatcatattcat

SEQ ID NO: 70723 - DNA, 25 bp, Probe Sequence
atccttgaggcaactatcatattca

SEQ ID NO: 70724 - DNA, 25 bp, Probe Sequence
tgttgaattgtcattatcggctaat

SEQ ID NO: 70725 - DNA, 25 bp, Probe Sequence
catccttgaggcaactatcatattc

SEQ ID NO: 70726 - DNA, 25 bp, Probe Sequence
ttcagagaagaggttgaggagtaag

SEQ ID NO: 70727 - DNA, 25 bp, Probe Sequence
gcatccttgaggcaactatcatatt

SEQ ID NO: 70728 - DNA, 25 bp, Probe Sequence
gctgttgagttaattaggaggacta

SEQ ID NO: 70729 - DNA, 25 bp, Probe Sequence
tagctgttgagttaattaggaggac

SEQ ID NO: 70730 - DNA, 25 bp, Probe Sequence
ccttgaggcaactatcatattcata

SEQ ID NO: 70731 - DNA, 25 bp, Probe Sequence
atagctgttgagttaattaggagga

SEQ ID NO: 70732 - DNA, 25 bp, Probe Sequence
acccacacttaaagagagatttcaa

SEQ ID NO: 70733 - DNA, 25 bp, Probe Sequence
gacccacacttaaagagagatttca

SEQ ID NO: 70734 - DNA, 25 bp, Probe Sequence
aatagctgttgagttaattaggagg

SEQ ID NO: 70735 - DNA, 25 bp, Probe Sequence
agctgttgagttaattaggaggact

SEQ ID NO: 70736 - DNA, 25 bp, Probe Sequence
cccacacttaaagagagatttcaaa

SEQ ID NO: 70737 - DNA, 25 bp, Probe Sequence
ggacccacacttaaagagagatttc

SEQ ID NO: 70738 - DNA, 25 bp, Probe Sequence
aggacccacacttaaagagagattt

SEQ ID NO: 70739 - DNA, 25 bp, Probe Sequence
atggtttaattcagagaagaggttg

SEQ ID NO: 70740 - DNA, 25 bp, Probe Sequence
tggtttaattcagagaagaggttga

SEQ ID NO: 70741 - DNA, 25 bp, Probe Sequence
ggtatggtttaattcagagaagagg

SEQ ID NO: 70742 - DNA, 25 bp, Probe Sequence
tagaccaggcttgttgatatgtatg

SEQ ID NO: 70743 - DNA, 25 bp, Probe Sequence
ctagaccaggcttgttgatatgtat

SEQ ID NO: 70744 - DNA, 25 bp, Probe Sequence
aatgtccaccttcttctgattcctt

SEQ ID NO: 70745 - DNA, 25 bp, Probe Sequence
ttattgttggtgttgttaatgtcat

SEQ ID NO: 70746 - DNA, 25 bp, Probe Sequence
aataccataccattgttgaacatgc

SEQ ID NO: 70747 - DNA, 25 bp, Probe Sequence
tattgttggtgttgttaatgtcatg

SEQ ID NO: 70748 - DNA, 25 bp, Probe Sequence
attattgttggtgttgttaatgtca

SEQ ID NO: 70749 - DNA, 25 bp, Probe Sequence
ataccataccattgttgaacatgct

SEQ ID NO: 70750 - DNA, 25 bp, Probe Sequence
cataccattgttgaacatgctcatg

SEQ ID NO: 70751 - DNA, 25 bp, Probe Sequence
taccataccattgttgaacatgctc

SEQ ID NO: 70752 - DNA, 25 bp, Probe Sequence
agaccaggcttgttgatatgtatgc

SEQ ID NO: 70753 - DNA, 25 bp, Probe Sequence
ccataccattgttgaacatgctcat

SEQ ID NO: 70754 - DNA, 25 bp, Probe Sequence
tgtgtcatttgaaaccaatatcctg

SEQ ID NO: 70755 - DNA, 25 bp, Probe Sequence
ccatctgtgtcatttgaaaccaata

SEQ ID NO: 70756 - DNA, 25 bp, Probe Sequence
atctaataccataccattgttgaac

SEQ ID NO: 70757 - DNA, 25 bp, Probe Sequence
ctgtgtcatttgaaaccaatatcct

SEQ ID NO: 70758 - DNA, 25 bp, Probe Sequence
tctgtgtcatttgaaaccaatatcc

SEQ ID NO: 70759 - DNA, 25 bp, Probe Sequence
tctaataccataccattgttgaaca

SEQ ID NO: 70760 - DNA, 25 bp, Probe Sequence
gtgtcatttgaaaccaatatcctga

SEQ ID NO: 70761 - DNA, 25 bp, Probe Sequence
atgtccaccttcttctgattccttt

SEQ ID NO: 70762 - DNA, 25 bp, Probe Sequence
caattattgttggtgttgttaatgt

SEQ ID NO: 70763 - DNA, 25 bp, Probe Sequence
atcccgtttctggtaataagatcac

SEQ ID NO: 70764 - DNA, 25 bp, Probe Sequence
gaatgtccaccttcttctgattcct

SEQ ID NO: 70765 - DNA, 25 bp, Probe Sequence
tgtcatttgaaaccaatatcctgat

SEQ ID NO: 70766 - DNA, 25 bp, Probe Sequence
aatcaactggcttcaatctacttct

SEQ ID NO: 70767 - DNA, 25 bp, Probe Sequence
cctaatcaactggcttcaatctact

SEQ ID NO: 70768 - DNA, 25 bp, Probe Sequence
atcaactggcttcaatctacttctc

SEQ ID NO: 70769 - DNA, 25 bp, Probe Sequence
taatcaactggcttcaatctacttc

SEQ ID NO: 70770 - DNA, 25 bp, Probe Sequence
ctaatcaactggcttcaatctactt

SEQ ID NO: 70771 - DNA, 25 bp, Probe Sequence
tcaactggcttcaatctacttctcc

SEQ ID NO: 70772 - DNA, 25 bp, Probe Sequence
ccctaatcaactggcttcaatctac

SEQ ID NO: 70773 - DNA, 25 bp, Probe Sequence
ttactagaccaatgggacttaaacc

SEQ ID NO: 70774 - DNA, 25 bp, Probe Sequence
ccttactagaccaatgggacttaaa

SEQ ID NO: 70775 - DNA, 25 bp, Probe Sequence
accctaatcaactggcttcaatcta

SEQ ID NO: 70776 - DNA, 25 bp, Probe Sequence
gacttaaacccacaaacacttagtt

SEQ ID NO: 70777 - DNA, 25 bp, Probe Sequence
cttactagaccaatgggacttaaac

SEQ ID NO: 70778 - DNA, 25 bp, Probe Sequence
ggacttaaacccacaaacacttagt

SEQ ID NO: 70779 - DNA, 25 bp, Probe Sequence
acttaaacccacaaacacttagtta

SEQ ID NO: 70780 - DNA, 25 bp, Probe Sequence
gaacgcaaatcagccactttaatta

SEQ ID NO: 70781 - DNA, 25 bp, Probe Sequence
ttaacagctaagcaccctaatcaac

SEQ ID NO: 70782 - DNA, 25 bp, Probe Sequence
caccctaatcaactggcttcaatct

SEQ ID NO: 70783 - DNA, 25 bp, Probe Sequence
tgaacgcaaatcagccactttaatt

SEQ ID NO: 70784 - DNA, 25 bp, Probe Sequence
cttaaacccacaaacacttagttaa

SEQ ID NO: 70785 - DNA, 25 bp, Probe Sequence
taacagctaagcaccctaatcaact

SEQ ID NO: 70786 - DNA, 25 bp, Probe Sequence
aattaagctaagcccttactagacc

SEQ ID NO: 70787 - DNA, 25 bp, Probe Sequence
caactggcttcaatctacttctccc

SEQ ID NO: 70788 - DNA, 25 bp, Probe Sequence
taagctaagcccttactagaccaat

SEQ ID NO: 70789 - DNA, 25 bp, Probe Sequence
attaagctaagcccttactagacca

SEQ ID NO: 70790 - DNA, 25 bp, Probe Sequence
ataggtatgtggtatcaggtaagca

SEQ ID NO: 70791 - DNA, 25 bp, Probe Sequence
agtatgtatggtatatgtgcttgga

SEQ ID NO: 70792 - DNA, 25 bp, Probe Sequence
taggtatgtggtatcaggtaagcag

SEQ ID NO: 70793 - DNA, 25 bp, Probe Sequence
tataggtatgtggtatcaggtaagc

SEQ ID NO: 70794 - DNA, 25 bp, Probe Sequence
gtatgtatggtatatgtgcttggaa

SEQ ID NO: 70795 - DNA, 25 bp, Probe Sequence
aagtatgtatggtatatgtgcttgg

SEQ ID NO: 70796 - DNA, 25 bp, Probe Sequence
tatgtatggtatatgtgcttggaag

SEQ ID NO: 70797 - DNA, 25 bp, Probe Sequence
gcttacagaagtcactatgaatgtg

SEQ ID NO: 70798 - DNA, 25 bp, Probe Sequence
tacagaagtcactatgaatgtgtgc

SEQ ID NO: 70799 - DNA, 25 bp, Probe Sequence
ttacagaagtcactatgaatgtgtg

SEQ ID NO: 70800 - DNA, 25 bp, Probe Sequence
gcttatataggtatgtggtatcagg

SEQ ID NO: 70801 - DNA, 25 bp, Probe Sequence
cttacagaagtcactatgaatgtgt

SEQ ID NO: 70802 - DNA, 25 bp, Probe Sequence
ctgggtagtgggattatttgtagtt

SEQ ID NO: 70803 - DNA, 25 bp, Probe Sequence
atttctgggtagtgggattatttgt

SEQ ID NO: 70804 - DNA, 25 bp, Probe Sequence
ttctgggtagtgggattatttgtag

SEQ ID NO: 70805 - DNA, 25 bp, Probe Sequence
tgggtagtgggattatttgtagttt

SEQ ID NO: 70806 - DNA, 25 bp, Probe Sequence
tctgggtagtgggattatttgtagt

SEQ ID NO: 70807 - DNA, 25 bp, Probe Sequence
tttcagagcaacaagataaagtgga

SEQ ID NO: 70808 - DNA, 25 bp, Probe Sequence
tttctgggtagtgggattatttgta

SEQ ID NO: 70809 - DNA, 25 bp, Probe Sequence
ggtcaaagaggttaaataaagtgct

SEQ ID NO: 70810 - DNA, 25 bp, Probe Sequence
aggtcaaagaggttaaataaagtgc

SEQ ID NO: 70811 - DNA, 25 bp, Probe Sequence
gtgcttatataggtatgtggtatca

SEQ ID NO: 70812 - DNA, 25 bp, Probe Sequence
agcttacagaagtcactatgaatgt

SEQ ID NO: 70813 - DNA, 25 bp, Probe Sequence
ggaatgttagcttacagaagtcact

SEQ ID NO: 70814 - DNA, 25 bp, Probe Sequence
atcatactacggactagacataggt

SEQ ID NO: 70815 - DNA, 25 bp, Probe Sequence
actacggactagacataggtatgaa

SEQ ID NO: 70816 - DNA, 25 bp, Probe Sequence
tcatactacggactagacataggta

SEQ ID NO: 70817 - DNA, 25 bp, Probe Sequence
ctacggactagacataggtatgaag

SEQ ID NO: 70818 - DNA, 25 bp, Probe Sequence
ttgaatcatactacggactagacat

SEQ ID NO: 70819 - DNA, 25 bp, Probe Sequence
aatcatactacggactagacatagg

SEQ ID NO: 70820 - DNA, 25 bp, Probe Sequence
tactacggactagacataggtatga

SEQ ID NO: 70821 - DNA, 25 bp, Probe Sequence
tacggactagacataggtatgaagc

SEQ ID NO: 70822 - DNA, 25 bp, Probe Sequence
taggagactaagttcagttactcgg

SEQ ID NO: 70823 - DNA, 25 bp, Probe Sequence
ttaggagactaagttcagttactcg

SEQ ID NO: 70824 - DNA, 25 bp, Probe Sequence
tgaatcatactacggactagacata

SEQ ID NO: 70825 - DNA, 25 bp, Probe Sequence
tattatgtgcttagcttgcttgaga

SEQ ID NO: 70826 - DNA, 25 bp, Probe Sequence
gtattatgtgcttagcttgcttgag

SEQ ID NO: 70827 - DNA, 25 bp, Probe Sequence
attatgtgcttagcttgcttgagat

SEQ ID NO: 70828 - DNA, 25 bp, Probe Sequence
ttatgtgcttagcttgcttgagatt

SEQ ID NO: 70829 - DNA, 25 bp, Probe Sequence
gaatcatactacggactagacatag

SEQ ID NO: 70830 - DNA, 25 bp, Probe Sequence
tagacataggtatgaagctcaacac

SEQ ID NO: 70831 - DNA, 25 bp, Probe Sequence
ctagacataggtatgaagctcaaca

SEQ ID NO: 70832 - DNA, 25 bp, Probe Sequence
actagacataggtatgaagctcaac

SEQ ID NO: 70833 - DNA, 25 bp, Probe Sequence
ggtattatgtgcttagcttgcttga

SEQ ID NO: 70834 - DNA, 25 bp, Probe Sequence
gactagacataggtatgaagctcaa

SEQ ID NO: 70835 - DNA, 25 bp, Probe Sequence
ggactagacataggtatgaagctca

SEQ ID NO: 70836 - DNA, 25 bp, Probe Sequence
atactacggactagacataggtatg

SEQ ID NO: 70837 - DNA, 25 bp, Probe Sequence
catactacggactagacataggtat

SEQ ID NO: 70838 - DNA, 25 bp, Probe Sequence
tctcttgtggtgctatctatctgtt

SEQ ID NO: 70839 - DNA, 25 bp, Probe Sequence
ctctcttgtggtgctatctatctgt

SEQ ID NO: 70840 - DNA, 25 bp, Probe Sequence
gctctcttgtggtgctatctatctg

SEQ ID NO: 70841 - DNA, 25 bp, Probe Sequence
gttgccaaggactctaagatcaatg

SEQ ID NO: 70842 - DNA, 25 bp, Probe Sequence
tgttgccaaggactctaagatcaat

SEQ ID NO: 70843 - DNA, 25 bp, Probe Sequence
tttctttatcctgttattgcctcca

SEQ ID NO: 70844 - DNA, 25 bp, Probe Sequence
gctttctttatcctgttattgcctc

SEQ ID NO: 70845 - DNA, 25 bp, Probe Sequence
ccctgctttctttatcctgttattg

SEQ ID NO: 70846 - DNA, 25 bp, Probe Sequence
tccctgctttctttatcctgttatt

SEQ ID NO: 70847 - DNA, 25 bp, Probe Sequence
aatctttatttgcttcctcgtttcc

SEQ ID NO: 70848 - DNA, 25 bp, Probe Sequence
ctttctttatcctgttattgcctcc

SEQ ID NO: 70849 - DNA, 25 bp, Probe Sequence
ctccctgctttctttatcctgttat

SEQ ID NO: 70850 - DNA, 25 bp, Probe Sequence
ctcttgtggtgctatctatctgttt

SEQ ID NO: 70851 - DNA, 25 bp, Probe Sequence
ctgctttctttatcctgttattgcc

SEQ ID NO: 70852 - DNA, 25 bp, Probe Sequence
cctgctttctttatcctgttattgc

SEQ ID NO: 70853 - DNA, 25 bp, Probe Sequence
tgctttctttatcctgttattgcct

SEQ ID NO: 70854 - DNA, 25 bp, Probe Sequence
ttctttatcctgttattgcctccac

SEQ ID NO: 70855 - DNA, 25 bp, Probe Sequence
tctccctgctttctttatcctgtta

SEQ ID NO: 70856 - DNA, 25 bp, Probe Sequence
ctgttgccaaggactctaagatcaa

SEQ ID NO: 70857 - DNA, 25 bp, Probe Sequence
ttctccctgctttctttatcctgtt

SEQ ID NO: 70858 - DNA, 25 bp, Probe Sequence
atctttatttgcttcctcgtttccg

SEQ ID NO: 70859 - DNA, 25 bp, Probe Sequence
ggctctcttgtggtgctatctatct

SEQ ID NO: 70860 - DNA, 25 bp, Probe Sequence
taatctttatttgcttcctcgtttc

SEQ ID NO: 70861 - DNA, 25 bp, Probe Sequence
tacacttctctcttgtggctctctt

SEQ ID NO: 70862 - DNA, 25 bp, Probe Sequence
tgcctataatatgctggttgtgtat

SEQ ID NO: 70863 - DNA, 25 bp, Probe Sequence
atgcctataatatgctggttgtgta

SEQ ID NO: 70864 - DNA, 25 bp, Probe Sequence
cctataatatgctggttgtgtatgc

SEQ ID NO: 70865 - DNA, 25 bp, Probe Sequence
gcctataatatgctggttgtgtatg

SEQ ID NO: 70866 - DNA, 25 bp, Probe Sequence
tatgttgtgtctaatctccttctga

SEQ ID NO: 70867 - DNA, 25 bp, Probe Sequence
ctataatatgctggttgtgtatgct

SEQ ID NO: 70868 - DNA, 25 bp, Probe Sequence
tataatatgctggttgtgtatgctt

SEQ ID NO: 70869 - DNA, 25 bp, Probe Sequence
atgttgtgtctaatctccttctgag

SEQ ID NO: 70870 - DNA, 25 bp, Probe Sequence
atatgttgtgtctaatctccttctg

SEQ ID NO: 70871 - DNA, 25 bp, Probe Sequence
ttatgaagaagtctgaagaacgcct

SEQ ID NO: 70872 - DNA, 25 bp, Probe Sequence
tatgaagaagtctgaagaacgcctt

SEQ ID NO: 70873 - DNA, 25 bp, Probe Sequence
gttatgaagaagtctgaagaacgcc

SEQ ID NO: 70874 - DNA, 25 bp, Probe Sequence
ggttatgaagaagtctgaagaacgc

SEQ ID NO: 70875 - DNA, 25 bp, Probe Sequence
ttacatgcctataatatgctggttg

SEQ ID NO: 70876 - DNA, 25 bp, Probe Sequence
catgcctataatatgctggttgtgt

SEQ ID NO: 70877 - DNA, 25 bp, Probe Sequence
tacatgcctataatatgctggttgt

SEQ ID NO: 70878 - DNA, 25 bp, Probe Sequence
acatgcctataatatgctggttgtg

SEQ ID NO: 70879 - DNA, 25 bp, Probe Sequence
taatatgctggttgtgtatgctttg

SEQ ID NO: 70880 - DNA, 25 bp, Probe Sequence
gtgggttatgaagaagtctgaagaa

SEQ ID NO: 70881 - DNA, 25 bp, Probe Sequence
ataatatgctggttgtgtatgcttt

SEQ ID NO: 70882 - DNA, 25 bp, Probe Sequence
tgggttatgaagaagtctgaagaac

SEQ ID NO: 70883 - DNA, 25 bp, Probe Sequence
aatatgctggttgtgtatgctttgt

SEQ ID NO: 70884 - DNA, 25 bp, Probe Sequence
accatatgttgtgtctaatctcctt

SEQ ID NO: 70885 - DNA, 25 bp, Probe Sequence
tgatttatgtaataagaacgggcaa

SEQ ID NO: 70886 - DNA, 25 bp, Probe Sequence
ttataagaatgtatgtgtccaggcg

SEQ ID NO: 70887 - DNA, 25 bp, Probe Sequence
atagatggaattactgaatgaaggt

SEQ ID NO: 70888 - DNA, 25 bp, Probe Sequence
ttagagataacacacaagctgactc

SEQ ID NO: 70889 - DNA, 25 bp, Probe Sequence
agattaggaattgggaggttagaga

SEQ ID NO: 70890 - DNA, 25 bp, Probe Sequence
aagattaggaattgggaggttagag

SEQ ID NO: 70891 - DNA, 25 bp, Probe Sequence
gattaggaattgggaggttagagat

SEQ ID NO: 70892 - DNA, 25 bp, Probe Sequence
aaagattaggaattgggaggttaga

SEQ ID NO: 70893 - DNA, 25 bp, Probe Sequence
tagagataacacacaagctgactca

SEQ ID NO: 70894 - DNA, 25 bp, Probe Sequence
tagatggaattactgaatgaaggta

SEQ ID NO: 70895 - DNA, 25 bp, Probe Sequence
atggaattactgaatgaaggtaact

SEQ ID NO: 70896 - DNA, 25 bp, Probe Sequence
tacatctgttacctgatttgaaacc

SEQ ID NO: 70897 - DNA, 25 bp, Probe Sequence
gttagagataacacacaagctgact

SEQ ID NO: 70898 - DNA, 25 bp, Probe Sequence
acatctgttacctgatttgaaaccc

SEQ ID NO: 70899 - DNA, 25 bp, Probe Sequence
ttaggaattgggaggttagagataa

SEQ ID NO: 70900 - DNA, 25 bp, Probe Sequence
gatggaattactgaatgaaggtaac

SEQ ID NO: 70901 - DNA, 25 bp, Probe Sequence
agatggaattactgaatgaaggtaa

SEQ ID NO: 70902 - DNA, 25 bp, Probe Sequence
tttatatgtgtgggtatgtttcctt

SEQ ID NO: 70903 - DNA, 25 bp, Probe Sequence
gaattactgaatgaaggtaactacg

SEQ ID NO: 70904 - DNA, 25 bp, Probe Sequence
attaggaattgggaggttagagata

SEQ ID NO: 70905 - DNA, 25 bp, Probe Sequence
cggttgatctccatgtttagtgtaa

SEQ ID NO: 70906 - DNA, 25 bp, Probe Sequence
gaggttagagataacacacaagctg

SEQ ID NO: 70907 - DNA, 25 bp, Probe Sequence
aatagatggaattactgaatgaagg

SEQ ID NO: 70908 - DNA, 25 bp, Probe Sequence
ggttagagataacacacaagctgac

SEQ ID NO: 70909 - DNA, 25 bp, Probe Sequence
aggttagagataacacacaagctga

SEQ ID NO: 70910 - DNA, 25 bp, Probe Sequence
agaagcagtgagagtagacatattg

SEQ ID NO: 70911 - DNA, 25 bp, Probe Sequence
gagaagcagtgagagtagacatatt

SEQ ID NO: 70912 - DNA, 25 bp, Probe Sequence
acttggttgtgatgttatccttctt

SEQ ID NO: 70913 - DNA, 25 bp, Probe Sequence
tacttggttgtgatgttatccttct

SEQ ID NO: 70914 - DNA, 25 bp, Probe Sequence
cctacttggttgtgatgttatcctt

SEQ ID NO: 70915 - DNA, 25 bp, Probe Sequence
ctacttggttgtgatgttatccttc

SEQ ID NO: 70916 - DNA, 25 bp, Probe Sequence
ggagaagcagtgagagtagacatat

SEQ ID NO: 70917 - DNA, 25 bp, Probe Sequence
cttggttgtgatgttatccttctta

SEQ ID NO: 70918 - DNA, 25 bp, Probe Sequence
ttggttgtgatgttatccttcttat

SEQ ID NO: 70919 - DNA, 25 bp, Probe Sequence
tggagaagcagtgagagtagacata

SEQ ID NO: 70920 - DNA, 25 bp, Probe Sequence
aatgttggagaagcagtgagagtag

SEQ ID NO: 70921 - DNA, 25 bp, Probe Sequence
tggttgtgatgttatccttcttata

SEQ ID NO: 70922 - DNA, 25 bp, Probe Sequence
cttctttattctgttgatgtggtgt

SEQ ID NO: 70923 - DNA, 25 bp, Probe Sequence
tcttctttattctgttgatgtggtg

SEQ ID NO: 70924 - DNA, 25 bp, Probe Sequence
ttggagaagcagtgagagtagacat

SEQ ID NO: 70925 - DNA, 25 bp, Probe Sequence
atgttggagaagcagtgagagtaga

SEQ ID NO: 70926 - DNA, 25 bp, Probe Sequence
tattctgttgatgtggtgtaataca

SEQ ID NO: 70927 - DNA, 25 bp, Probe Sequence
taaatgtttcatagtgccctttgtc

SEQ ID NO: 70928 - DNA, 25 bp, Probe Sequence
ataaatgtttcatagtgccctttgt

SEQ ID NO: 70929 - DNA, 25 bp, Probe Sequence
tgccaaatatgttgtctccatctat

SEQ ID NO: 70930 - DNA, 25 bp, Probe Sequence
ttgccaaatatgttgtctccatcta

SEQ ID NO: 70931 - DNA, 25 bp, Probe Sequence
ttattctgttgatgtggtgtaatac

SEQ ID NO: 70932 - DNA, 25 bp, Probe Sequence
ttcttctttattctgttgatgtggt

SEQ ID NO: 70933 - DNA, 25 bp, Probe Sequence
catactgcataggctagaatctcca

SEQ ID NO: 70934 - DNA, 25 bp, Probe Sequence
ctcaatctgtctactcttatctggc

SEQ ID NO: 70935 - DNA, 25 bp, Probe Sequence
aatctgtctactcttatctggcact

SEQ ID NO: 70936 - DNA, 25 bp, Probe Sequence
caatctgtctactcttatctggcac

SEQ ID NO: 70937 - DNA, 25 bp, Probe Sequence
tcaatctgtctactcttatctggca

SEQ ID NO: 70938 - DNA, 25 bp, Probe Sequence
tctcaatctgtctactcttatctgg

SEQ ID NO: 70939 - DNA, 25 bp, Probe Sequence
gcattcctactcctagattctcatc

SEQ ID NO: 70940 - DNA, 25 bp, Probe Sequence
atctgtctactcttatctggcactg

SEQ ID NO: 70941 - DNA, 25 bp, Probe Sequence
ccaagaatgaatgactcaatcaagg

SEQ ID NO: 70942 - DNA, 25 bp, Probe Sequence
ctgtctactcttatctggcactgat

SEQ ID NO: 70943 - DNA, 25 bp, Probe Sequence
aagaatgaatgactcaatcaaggct

SEQ ID NO: 70944 - DNA, 25 bp, Probe Sequence
caagaatgaatgactcaatcaaggc

SEQ ID NO: 70945 - DNA, 25 bp, Probe Sequence
tccaagaatgaatgactcaatcaag

SEQ ID NO: 70946 - DNA, 25 bp, Probe Sequence
ctccaagaatgaatgactcaatcaa

SEQ ID NO: 70947 - DNA, 25 bp, Probe Sequence
ggcattcctactcctagattctcat

SEQ ID NO: 70948 - DNA, 25 bp, Probe Sequence
cctccaagaatgaatgactcaatca

SEQ ID NO: 70949 - DNA, 25 bp, Probe Sequence
aatgaatgactcaatcaaggctgaa

SEQ ID NO: 70950 - DNA, 25 bp, Probe Sequence
tgtctactcttatctggcactgata

SEQ ID NO: 70951 - DNA, 25 bp, Probe Sequence
gaatgaatgactcaatcaaggctga

SEQ ID NO: 70952 - DNA, 25 bp, Probe Sequence
agaatgaatgactcaatcaaggctg

SEQ ID NO: 70953 - DNA, 25 bp, Probe Sequence
tctgtctactcttatctggcactga

SEQ ID NO: 70954 - DNA, 25 bp, Probe Sequence
gcctccaagaatgaatgactcaatc

SEQ ID NO: 70955 - DNA, 25 bp, Probe Sequence
ttctcaatctgtctactcttatctg

SEQ ID NO: 70956 - DNA, 25 bp, Probe Sequence
agcctccaagaatgaatgactcaat

SEQ ID NO: 70957 - DNA, 25 bp, Probe Sequence
ctggtttctcaatctgtctactctt

SEQ ID NO: 70958 - DNA, 25 bp, Probe Sequence
ccaaatcaacggactttccaaatgt

SEQ ID NO: 70959 - DNA, 25 bp, Probe Sequence
accaaatcaacggactttccaaatg

SEQ ID NO: 70960 - DNA, 25 bp, Probe Sequence
caccaaatcaacggactttccaaat

SEQ ID NO: 70961 - DNA, 25 bp, Probe Sequence
cggactttccaaatgtcgtaacaac

SEQ ID NO: 70962 - DNA, 25 bp, Probe Sequence
ttttcaatccactttagcacacatg

SEQ ID NO: 70963 - DNA, 25 bp, Probe Sequence
aaaatgtgttgaagaaaacccttta

SEQ ID NO: 70964 - DNA, 25 bp, Probe Sequence
aaatgtgttgaagaaaaccctttaa

SEQ ID NO: 70965 - DNA, 25 bp, Probe Sequence
tataacatatgaatgacattgctgt

SEQ ID NO: 70966 - DNA, 25 bp, Probe Sequence
tcaatccactttagcacacatgtaa

SEQ ID NO: 70967 - DNA, 25 bp, Probe Sequence
ttcaatccactttagcacacatgta

SEQ ID NO: 70968 - DNA, 25 bp, Probe Sequence
caatccactttagcacacatgtaaa

SEQ ID NO: 70969 - DNA, 25 bp, Probe Sequence
tttcaatccactttagcacacatgt

SEQ ID NO: 70970 - DNA, 25 bp, Probe Sequence
taacatatgaatgacattgctgtcg

SEQ ID NO: 70971 - DNA, 25 bp, Probe Sequence
atcaacggactttccaaatgtcgta

SEQ ID NO: 70972 - DNA, 25 bp, Probe Sequence
caacggactttccaaatgtcgtaac

SEQ ID NO: 70973 - DNA, 25 bp, Probe Sequence
gcaattttggatgattattctttgt

SEQ ID NO: 70974 - DNA, 25 bp, Probe Sequence
tcaacggactttccaaatgtcgtaa

SEQ ID NO: 70975 - DNA, 25 bp, Probe Sequence
acatatgaatgacattgctgtcgtt

SEQ ID NO: 70976 - DNA, 25 bp, Probe Sequence
aacatatgaatgacattgctgtcgt

SEQ ID NO: 70977 - DNA, 25 bp, Probe Sequence
atgtgttgaagaaaaccctttaaaa

SEQ ID NO: 70978 - DNA, 25 bp, Probe Sequence
aatgtgttgaagaaaaccctttaaa

SEQ ID NO: 70979 - DNA, 25 bp, Probe Sequence
acggactttccaaatgtcgtaacaa

SEQ ID NO: 70980 - DNA, 25 bp, Probe Sequence
aacggactttccaaatgtcgtaaca

SEQ ID NO: 70981 - DNA, 25 bp, Probe Sequence
atataacatatgaatgacattgctg

SEQ ID NO: 70982 - DNA, 25 bp, Probe Sequence
taagtattgtaggcatagcgttcag

SEQ ID NO: 70983 - DNA, 25 bp, Probe Sequence
ttaagtattgtaggcatagcgttca

SEQ ID NO: 70984 - DNA, 25 bp, Probe Sequence
agtattgtaggcatagcgttcagat

SEQ ID NO: 70985 - DNA, 25 bp, Probe Sequence
aactgataggaggatgttctcttct

SEQ ID NO: 70986 - DNA, 25 bp, Probe Sequence
aagtattgtaggcatagcgttcaga

SEQ ID NO: 70987 - DNA, 25 bp, Probe Sequence
gtattgtaggcatagcgttcagatg

SEQ ID NO: 70988 - DNA, 25 bp, Probe Sequence
ctgataggaggatgttctcttctga

SEQ ID NO: 70989 - DNA, 25 bp, Probe Sequence
aggatgttctcttctgaccagttac

SEQ ID NO: 70990 - DNA, 25 bp, Probe Sequence
actgataggaggatgttctcttctg

SEQ ID NO: 70991 - DNA, 25 bp, Probe Sequence
tgataggaggatgttctcttctgac

SEQ ID NO: 70992 - DNA, 25 bp, Probe Sequence
tattgtaggcatagcgttcagatgt

SEQ ID NO: 70993 - DNA, 25 bp, Probe Sequence
gaggatgttctcttctgaccagtta

SEQ ID NO: 70994 - DNA, 25 bp, Probe Sequence
gataggaggatgttctcttctgacc

SEQ ID NO: 70995 - DNA, 25 bp, Probe Sequence
ggatgttctcttctgaccagttacc

SEQ ID NO: 70996 - DNA, 25 bp, Probe Sequence
ataggaggatgttctcttctgacca

SEQ ID NO: 70997 - DNA, 25 bp, Probe Sequence
tttaagtattgtaggcatagcgttc

SEQ ID NO: 70998 - DNA, 25 bp, Probe Sequence
catttaagtattgtaggcatagcgt

SEQ ID NO: 70999 - DNA, 25 bp, Probe Sequence
tacctttgctttcagaaccacttag

SEQ ID NO: 71000 - DNA, 25 bp, Probe Sequence
ctacctttgctttcagaaccactta

SEQ ID NO: 71001 - DNA, 25 bp, Probe Sequence
atgttaatcttgtcaatgagaggga

SEQ ID NO: 71002 - DNA, 25 bp, Probe Sequence
atttaagtattgtaggcatagcgtt

SEQ ID NO: 71003 - DNA, 25 bp, Probe Sequence
taggaggatgttctcttctgaccag

SEQ ID NO: 71004 - DNA, 25 bp, Probe Sequence
attgtaggcatagcgttcagatgtg

SEQ ID NO: 71005 - DNA, 25 bp, Probe Sequence
ttatgttaatcttgtcaatgagagg

SEQ ID NO: 71006 - DNA, 25 bp, Probe Sequence
ctggtataagatgtgagcaagacta

SEQ ID NO: 71007 - DNA, 25 bp, Probe Sequence
gaatctgatattgtgtgtgtgtgtg

SEQ ID NO: 71008 - DNA, 25 bp, Probe Sequence
agaatctgatattgtgtgtgtgtgt

SEQ ID NO: 71009 - DNA, 25 bp, Probe Sequence
aagaatctgatattgtgtgtgtgtg

SEQ ID NO: 71010 - DNA, 25 bp, Probe Sequence
tggtataagatgtgagcaagactaa

SEQ ID NO: 71011 - DNA, 25 bp, Probe Sequence
aatctgatattgtgtgtgtgtgtgt

SEQ ID NO: 71012 - DNA, 25 bp, Probe Sequence
ggtataagatgtgagcaagactaac

SEQ ID NO: 71013 - DNA, 25 bp, Probe Sequence
actggtataagatgtgagcaagact

SEQ ID NO: 71014 - DNA, 25 bp, Probe Sequence
ggtgtggatatggatggatatagat

SEQ ID NO: 71015 - DNA, 25 bp, Probe Sequence
atctgatattgtgtgtgtgtgtgtg

SEQ ID NO: 71016 - DNA, 25 bp, Probe Sequence
taagaatctgatattgtgtgtgtgt

SEQ ID NO: 71017 - DNA, 25 bp, Probe Sequence
gtataagatgtgagcaagactaaca

SEQ ID NO: 71018 - DNA, 25 bp, Probe Sequence
ctgatattgtgtgtgtgtgtgtgtg

SEQ ID NO: 71019 - DNA, 25 bp, Probe Sequence
cactggtataagatgtgagcaagac

SEQ ID NO: 71020 - DNA, 25 bp, Probe Sequence
tctgatattgtgtgtgtgtgtgtgt

SEQ ID NO: 71021 - DNA, 25 bp, Probe Sequence
ttaagaatctgatattgtgtgtgtg

SEQ ID NO: 71022 - DNA, 25 bp, Probe Sequence
gttaagaatctgatattgtgtgtgt

SEQ ID NO: 71023 - DNA, 25 bp, Probe Sequence
tgttaagaatctgatattgtgtgtg

SEQ ID NO: 71024 - DNA, 25 bp, Probe Sequence
tctgagcactggtataagatgtgag

SEQ ID NO: 71025 - DNA, 25 bp, Probe Sequence
gtcctcataaaccacagatacagat

SEQ ID NO: 71026 - DNA, 25 bp, Probe Sequence
gatattgtgtgtgtgtgtgtgtgtg

SEQ ID NO: 71027 - DNA, 25 bp, Probe Sequence
agtcctcataaaccacagatacaga

SEQ ID NO: 71028 - DNA, 25 bp, Probe Sequence
tagtcctcataaaccacagatacag

SEQ ID NO: 71029 - DNA, 25 bp, Probe Sequence
tataagatgtgagcaagactaacaa

SEQ ID NO: 71030 - DNA, 25 bp, Probe Sequence
tgaccataacttctccaggatattc

SEQ ID NO: 71031 - DNA, 25 bp, Probe Sequence
ccataacttctccaggatattctca

SEQ ID NO: 71032 - DNA, 25 bp, Probe Sequence
accataacttctccaggatattctc

SEQ ID NO: 71033 - DNA, 25 bp, Probe Sequence
gaccataacttctccaggatattct

SEQ ID NO: 71034 - DNA, 25 bp, Probe Sequence
ttgaccataacttctccaggatatt

SEQ ID NO: 71035 - DNA, 25 bp, Probe Sequence
aagacgatgttgaccataacttctc

SEQ ID NO: 71036 - DNA, 25 bp, Probe Sequence
gttgaccataacttctccaggatat

SEQ ID NO: 71037 - DNA, 25 bp, Probe Sequence
tgttgaccataacttctccaggata

SEQ ID NO: 71038 - DNA, 25 bp, Probe Sequence
cataacttctccaggatattctcag

SEQ ID NO: 71039 - DNA, 25 bp, Probe Sequence
atgttgaccataacttctccaggat

SEQ ID NO: 71040 - DNA, 25 bp, Probe Sequence
ataacttctccaggatattctcagt

SEQ ID NO: 71041 - DNA, 25 bp, Probe Sequence
gatgttgaccataacttctccagga

SEQ ID NO: 71042 - DNA, 25 bp, Probe Sequence
agacgatgttgaccataacttctcc

SEQ ID NO: 71043 - DNA, 25 bp, Probe Sequence
ttatggtagcgtctcacatacagaa

SEQ ID NO: 71044 - DNA, 25 bp, Probe Sequence
cctctaagacaagatatgaagtgtt

SEQ ID NO: 71045 - DNA, 25 bp, Probe Sequence
acttctccaggatattctcagttgc

SEQ ID NO: 71046 - DNA, 25 bp, Probe Sequence
acgatgttgaccataacttctccag

SEQ ID NO: 71047 - DNA, 25 bp, Probe Sequence
gacgatgttgaccataacttctcca

SEQ ID NO: 71048 - DNA, 25 bp, Probe Sequence
catctagccagagttccagtcaatt

SEQ ID NO: 71049 - DNA, 25 bp, Probe Sequence
caataaatgtggatagcagcagatt

SEQ ID NO: 71050 - DNA, 25 bp, Probe Sequence
ataaatgtggatagcagcagattca

SEQ ID NO: 71051 - DNA, 25 bp, Probe Sequence
taaatgtggatagcagcagattcaa

SEQ ID NO: 71052 - DNA, 25 bp, Probe Sequence
aataaatgtggatagcagcagattc

SEQ ID NO: 71053 - DNA, 25 bp, Probe Sequence
gaaatggtaagtagccctctaagac

SEQ ID NO: 71054 - DNA, 25 bp, Probe Sequence
atcatttggaagaaagggtatcagt

SEQ ID NO: 71055 - DNA, 25 bp, Probe Sequence
tcatttggaagaaagggtatcagtg

SEQ ID NO: 71056 - DNA, 25 bp, Probe Sequence
catttggaagaaagggtatcagtga

SEQ ID NO: 71057 - DNA, 25 bp, Probe Sequence
tttggaagaaagggtatcagtgatt

SEQ ID NO: 71058 - DNA, 25 bp, Probe Sequence
atttggaagaaagggtatcagtgat

SEQ ID NO: 71059 - DNA, 25 bp, Probe Sequence
ttggaagaaagggtatcagtgattg

SEQ ID NO: 71060 - DNA, 25 bp, Probe Sequence
gatcatttggaagaaagggtatcag

SEQ ID NO: 71061 - DNA, 25 bp, Probe Sequence
aagaaagggtatcagtgattgaaga

SEQ ID NO: 71062 - DNA, 25 bp, Probe Sequence
ggaagaaagggtatcagtgattgaa

SEQ ID NO: 71063 - DNA, 25 bp, Probe Sequence
agaaagggtatcagtgattgaagat

SEQ ID NO: 71064 - DNA, 25 bp, Probe Sequence
gaagaaagggtatcagtgattgaag

SEQ ID NO: 71065 - DNA, 25 bp, Probe Sequence
aatgaaatgaagtgagaagagaact

SEQ ID NO: 71066 - DNA, 25 bp, Probe Sequence
gaaagggtatcagtgattgaagatc

SEQ ID NO: 71067 - DNA, 25 bp, Probe Sequence
tggaagaaagggtatcagtgattga

SEQ ID NO: 71068 - DNA, 25 bp, Probe Sequence
tttaaatgacctgatggagctgaaa

SEQ ID NO: 71069 - DNA, 25 bp, Probe Sequence
ctttaaatgacctgatggagctgaa

SEQ ID NO: 71070 - DNA, 25 bp, Probe Sequence
taatgaaatgaagtgagaagagaac

SEQ ID NO: 71071 - DNA, 25 bp, Probe Sequence
tctttaaatgacctgatggagctga

SEQ ID NO: 71072 - DNA, 25 bp, Probe Sequence
aacaactacgtgatgaatgcacaag

SEQ ID NO: 71073 - DNA, 25 bp, Probe Sequence
gaacaactacgtgatgaatgcacaa

SEQ ID NO: 71074 - DNA, 25 bp, Probe Sequence
agaagtctttaaatgacctgatgga

SEQ ID NO: 71075 - DNA, 25 bp, Probe Sequence
gagaacaactacgtgatgaatgcac

SEQ ID NO: 71076 - DNA, 25 bp, Probe Sequence
gaagtctttaaatgacctgatggag

SEQ ID NO: 71077 - DNA, 25 bp, Probe Sequence
gagaagtctttaaatgacctgatgg

SEQ ID NO: 71078 - DNA, 25 bp, Probe Sequence
tgtcttccagtgaattgctattatt

SEQ ID NO: 71079 - DNA, 25 bp, Probe Sequence
ttgtcttccagtgaattgctattat

SEQ ID NO: 71080 - DNA, 25 bp, Probe Sequence
cttgtgttgagattcagcactctag

SEQ ID NO: 71081 - DNA, 25 bp, Probe Sequence
aacaccagtatagaatagacaggga

SEQ ID NO: 71082 - DNA, 25 bp, Probe Sequence
accagtatagaatagacagggagaa

SEQ ID NO: 71083 - DNA, 25 bp, Probe Sequence
caccagtatagaatagacagggaga

SEQ ID NO: 71084 - DNA, 25 bp, Probe Sequence
ccagtatagaatagacagggagaac

SEQ ID NO: 71085 - DNA, 25 bp, Probe Sequence
aaacaccagtatagaatagacaggg

SEQ ID NO: 71086 - DNA, 25 bp, Probe Sequence
acaccagtatagaatagacagggag

SEQ ID NO: 71087 - DNA, 25 bp, Probe Sequence
gatggagacttactttcaaatgagc

SEQ ID NO: 71088 - DNA, 25 bp, Probe Sequence
ggattgagcccttaaacatacatac

SEQ ID NO: 71089 - DNA, 25 bp, Probe Sequence
tatagaatagacagggagaactcgt

SEQ ID NO: 71090 - DNA, 25 bp, Probe Sequence
gtatagaatagacagggagaactcg

SEQ ID NO: 71091 - DNA, 25 bp, Probe Sequence
atgtgatgatggaggagagaggaag

SEQ ID NO: 71092 - DNA, 25 bp, Probe Sequence
atttgtcttccagtgaattgctatt

SEQ ID NO: 71093 - DNA, 25 bp, Probe Sequence
cagatattcccaaatggcagaaatc

SEQ ID NO: 71094 - DNA, 25 bp, Probe Sequence
gattgagcccttaaacatacatact

SEQ ID NO: 71095 - DNA, 25 bp, Probe Sequence
attcccaaatggcagaaatctaatt

SEQ ID NO: 71096 - DNA, 25 bp, Probe Sequence
tttgtcttccagtgaattgctatta

SEQ ID NO: 71097 - DNA, 25 bp, Probe Sequence
gatattcccaaatggcagaaatcta

SEQ ID NO: 71098 - DNA, 25 bp, Probe Sequence
tgatggagacttactttcaaatgag

SEQ ID NO: 71099 - DNA, 25 bp, Probe Sequence
aatttgtcttccagtgaattgctat

SEQ ID NO: 71100 - DNA, 25 bp, Probe Sequence
cagtatagaatagacagggagaact

SEQ ID NO: 71101 - DNA, 25 bp, Probe Sequence
tattcccaaatggcagaaatctaat

SEQ ID NO: 71102 - DNA, 25 bp, Probe Sequence
tgccagtacatcaagtgtttcatat

SEQ ID NO: 71103 - DNA, 25 bp, Probe Sequence
ttgccagtacatcaagtgtttcata

SEQ ID NO: 71104 - DNA, 25 bp, Probe Sequence
ctcctctcagtctactcaattgtga

SEQ ID NO: 71105 - DNA, 25 bp, Probe Sequence
attgtgactgtccctcctgatgtat

SEQ ID NO: 71106 - DNA, 25 bp, Probe Sequence
cctcctctcagtctactcaattgtg

SEQ ID NO: 71107 - DNA, 25 bp, Probe Sequence
atcaagtgtttcatatgccaagtac

SEQ ID NO: 71108 - DNA, 25 bp, Probe Sequence
tgtgactgtccctcctgatgtattt

SEQ ID NO: 71109 - DNA, 25 bp, Probe Sequence
ttgtgactgtccctcctgatgtatt

SEQ ID NO: 71110 - DNA, 25 bp, Probe Sequence
aattgtgactgtccctcctgatgta

SEQ ID NO: 71111 - DNA, 25 bp, Probe Sequence
catcaagtgtttcatatgccaagta

SEQ ID NO: 71112 - DNA, 25 bp, Probe Sequence
tcctctcagtctactcaattgtgac

SEQ ID NO: 71113 - DNA, 25 bp, Probe Sequence
tcaagtgtttcatatgccaagtacg

SEQ ID NO: 71114 - DNA, 25 bp, Probe Sequence
gtacatcaagtgtttcatatgccaa

SEQ ID NO: 71115 - DNA, 25 bp, Probe Sequence
cagtacatcaagtgtttcatatgcc

SEQ ID NO: 71116 - DNA, 25 bp, Probe Sequence
ccagtacatcaagtgtttcatatgc

SEQ ID NO: 71117 - DNA, 25 bp, Probe Sequence
gccagtacatcaagtgtttcatatg

SEQ ID NO: 71118 - DNA, 25 bp, Probe Sequence
agtacatcaagtgtttcatatgcca

SEQ ID NO: 71119 - DNA, 25 bp, Probe Sequence
acatcaagtgtttcatatgccaagt

SEQ ID NO: 71120 - DNA, 25 bp, Probe Sequence
acgcctcctctcagtctactcaatt

SEQ ID NO: 71121 - DNA, 25 bp, Probe Sequence
gtgactgtccctcctgatgtatttt

SEQ ID NO: 71122 - DNA, 25 bp, Probe Sequence
gcctcctctcagtctactcaattgt

SEQ ID NO: 71123 - DNA, 25 bp, Probe Sequence
caagtgtttcatatgccaagtacgc

SEQ ID NO: 71124 - DNA, 25 bp, Probe Sequence
cttgccagtacatcaagtgtttcat

SEQ ID NO: 71125 - DNA, 25 bp, Probe Sequence
cctctcagtctactcaattgtgact

SEQ ID NO: 71126 - DNA, 25 bp, Probe Sequence
cttgtggaagatattctctgtgtct

SEQ ID NO: 71127 - DNA, 25 bp, Probe Sequence
acttgtggaagatattctctgtgtc

SEQ ID NO: 71128 - DNA, 25 bp, Probe Sequence
tgtggaagatattctctgtgtctaa

SEQ ID NO: 71129 - DNA, 25 bp, Probe Sequence
ttgtggaagatattctctgtgtcta

SEQ ID NO: 71130 - DNA, 25 bp, Probe Sequence
cacttgtggaagatattctctgtgt

SEQ ID NO: 71131 - DNA, 25 bp, Probe Sequence
tatcggcacttgtggaagatattct

SEQ ID NO: 71132 - DNA, 25 bp, Probe Sequence
ttcatatcggcacttgtggaagata

SEQ ID NO: 71133 - DNA, 25 bp, Probe Sequence
gcacttgtggaagatattctctgtg

SEQ ID NO: 71134 - DNA, 25 bp, Probe Sequence
ggcacttgtggaagatattctctgt

SEQ ID NO: 71135 - DNA, 25 bp, Probe Sequence
atcggcacttgtggaagatattctc

SEQ ID NO: 71136 - DNA, 25 bp, Probe Sequence
gttcatatcggcacttgtggaagat

SEQ ID NO: 71137 - DNA, 25 bp, Probe Sequence
tggaagatattctctgtgtctaaac

SEQ ID NO: 71138 - DNA, 25 bp, Probe Sequence
gtggaagatattctctgtgtctaaa

SEQ ID NO: 71139 - DNA, 25 bp, Probe Sequence
taaacacaccgttagagatcactga

SEQ ID NO: 71140 - DNA, 25 bp, Probe Sequence
cggcacttgtggaagatattctctg

SEQ ID NO: 71141 - DNA, 25 bp, Probe Sequence
tcggcacttgtggaagatattctct

SEQ ID NO: 71142 - DNA, 25 bp, Probe Sequence
atatcggcacttgtggaagatattc

SEQ ID NO: 71143 - DNA, 25 bp, Probe Sequence
ggaagatattctctgtgtctaaaca

SEQ ID NO: 71144 - DNA, 25 bp, Probe Sequence
catatcggcacttgtggaagatatt

SEQ ID NO: 71145 - DNA, 25 bp, Probe Sequence
ctaaacacaccgttagagatcactg

SEQ ID NO: 71146 - DNA, 25 bp, Probe Sequence
tcatatcggcacttgtggaagatat

SEQ ID NO: 71147 - DNA, 25 bp, Probe Sequence
cttaacgccactgaactgtatgctg

SEQ ID NO: 71148 - DNA, 25 bp, Probe Sequence
gtgtctctggtgagaagttcatatc

SEQ ID NO: 71149 - DNA, 25 bp, Probe Sequence
aaacacaccgttagagatcactgag

SEQ ID NO: 71150 - DNA, 25 bp, Probe Sequence
tcagtggtcttcatttctttctaca

SEQ ID NO: 71151 - DNA, 25 bp, Probe Sequence
ttgtcatttcagtggtcttcatttc

SEQ ID NO: 71152 - DNA, 25 bp, Probe Sequence
cttgtcatttcagtggtcttcattt

SEQ ID NO: 71153 - DNA, 25 bp, Probe Sequence
gtcatttcagtggtcttcatttctt

SEQ ID NO: 71154 - DNA, 25 bp, Probe Sequence
tgtcatttcagtggtcttcatttct

SEQ ID NO: 71155 - DNA, 25 bp, Probe Sequence
cagtggtcttcatttctttctacaa

SEQ ID NO: 71156 - DNA, 25 bp, Probe Sequence
tcatttcagtggtcttcatttcttt

SEQ ID NO: 71157 - DNA, 25 bp, Probe Sequence
tggtcttcatttctttctacaatcc

SEQ ID NO: 71158 - DNA, 25 bp, Probe Sequence
ttcagtggtcttcatttctttctac

SEQ ID NO: 71159 - DNA, 25 bp, Probe Sequence
catttcagtggtcttcatttctttc

SEQ ID NO: 71160 - DNA, 25 bp, Probe Sequence
aataaccttggcttgtcatttcagt

SEQ ID NO: 71161 - DNA, 25 bp, Probe Sequence
agccaaatatgttctcaaaccaatc

SEQ ID NO: 71162 - DNA, 25 bp, Probe Sequence
gccaaatatgttctcaaaccaatca

SEQ ID NO: 71163 - DNA, 25 bp, Probe Sequence
ggtcttcatttctttctacaatcct

SEQ ID NO: 71164 - DNA, 25 bp, Probe Sequence
atttcagtggtcttcatttctttct

SEQ ID NO: 71165 - DNA, 25 bp, Probe Sequence
ccaaatatgttctcaaaccaatcac

SEQ ID NO: 71166 - DNA, 25 bp, Probe Sequence
agtggtcttcatttctttctacaat

SEQ ID NO: 71167 - DNA, 25 bp, Probe Sequence
tttcagtggtcttcatttctttcta

SEQ ID NO: 71168 - DNA, 25 bp, Probe Sequence
ataaccttggcttgtcatttcagtg

SEQ ID NO: 71169 - DNA, 25 bp, Probe Sequence
gagccaaatatgttctcaaaccaat

SEQ ID NO: 71170 - DNA, 25 bp, Probe Sequence
gtggtcttcatttctttctacaatc

SEQ ID NO: 71171 - DNA, 25 bp, Probe Sequence
aaataaccttggcttgtcatttcag

SEQ ID NO: 71172 - DNA, 25 bp, Probe Sequence
tatgttctcaaaccaatcacacaga

SEQ ID NO: 71173 - DNA, 25 bp, Probe Sequence
atatgttctcaaaccaatcacacag

SEQ ID NO: 71174 - DNA, 25 bp, Probe Sequence
gcttcctgattatgttcactgtaat

SEQ ID NO: 71175 - DNA, 25 bp, Probe Sequence
agcttcctgattatgttcactgtaa

SEQ ID NO: 71176 - DNA, 25 bp, Probe Sequence
gcctcagtgacacaatttatcttta

SEQ ID NO: 71177 - DNA, 25 bp, Probe Sequence
tgcctcagtgacacaatttatcttt

SEQ ID NO: 71178 - DNA, 25 bp, Probe Sequence
acctctattggaaacctttgttcaa

SEQ ID NO: 71179 - DNA, 25 bp, Probe Sequence
gacctctattggaaacctttgttca

SEQ ID NO: 71180 - DNA, 25 bp, Probe Sequence
tgacctctattggaaacctttgttc

SEQ ID NO: 71181 - DNA, 25 bp, Probe Sequence
ttcacttacagtaggagtcaacaaa

SEQ ID NO: 71182 - DNA, 25 bp, Probe Sequence
tttcacttacagtaggagtcaacaa

SEQ ID NO: 71183 - DNA, 25 bp, Probe Sequence
taattcagagatgctacatacttct

SEQ ID NO: 71184 - DNA, 25 bp, Probe Sequence
tcacttacagtaggagtcaacaaat

SEQ ID NO: 71185 - DNA, 25 bp, Probe Sequence
gtgacctctattggaaacctttgtt

SEQ ID NO: 71186 - DNA, 25 bp, Probe Sequence
gtgtgacctctattggaaacctttg

SEQ ID NO: 71187 - DNA, 25 bp, Probe Sequence
agtgtgacctctattggaaaccttt

SEQ ID NO: 71188 - DNA, 25 bp, Probe Sequence
cacttacagtaggagtcaacaaatt

SEQ ID NO: 71189 - DNA, 25 bp, Probe Sequence
cctctattggaaacctttgttcaaa

SEQ ID NO: 71190 - DNA, 25 bp, Probe Sequence
atacttctcgctgaccttctgttga

SEQ ID NO: 71191 - DNA, 25 bp, Probe Sequence
catacttctcgctgaccttctgttg

SEQ ID NO: 71192 - DNA, 25 bp, Probe Sequence
tgtgacctctattggaaacctttgt

SEQ ID NO: 71193 - DNA, 25 bp, Probe Sequence
tgtgtaagactgctgtcatatttga

SEQ ID NO: 71194 - DNA, 25 bp, Probe Sequence
ttgtgtaagactgctgtcatatttg

SEQ ID NO: 71195 - DNA, 25 bp, Probe Sequence
tgacctaagtttgaatgtatttcct

SEQ ID NO: 71196 - DNA, 25 bp, Probe Sequence
tcaataattcagagatgctacatac

SEQ ID NO: 71197 - DNA, 25 bp, Probe Sequence
tttgtgtaagactgctgtcatattt

SEQ ID NO: 71198 - DNA, 25 bp, Probe Sequence
cacaggcttggtattaacagaatca

SEQ ID NO: 71199 - DNA, 25 bp, Probe Sequence
acacaggcttggtattaacagaatc

SEQ ID NO: 71200 - DNA, 25 bp, Probe Sequence
aattcacacaggcttggtattaaca

SEQ ID NO: 71201 - DNA, 25 bp, Probe Sequence
acaggcttggtattaacagaatcaa

SEQ ID NO: 71202 - DNA, 25 bp, Probe Sequence
cacacaggcttggtattaacagaat

SEQ ID NO: 71203 - DNA, 25 bp, Probe Sequence
attcacacaggcttggtattaacag

SEQ ID NO: 71204 - DNA, 25 bp, Probe Sequence
caattcacacaggcttggtattaac

SEQ ID NO: 71205 - DNA, 25 bp, Probe Sequence
tcacacaggcttggtattaacagaa

SEQ ID NO: 71206 - DNA, 25 bp, Probe Sequence
ttcacacaggcttggtattaacaga

SEQ ID NO: 71207 - DNA, 25 bp, Probe Sequence
aatggttggtgattagattgcctct

SEQ ID NO: 71208 - DNA, 25 bp, Probe Sequence
atggttggtgattagattgcctcta

SEQ ID NO: 71209 - DNA, 25 bp, Probe Sequence
gattagattgcctctaccatgtgag

SEQ ID NO: 71210 - DNA, 25 bp, Probe Sequence
gtgattagattgcctctaccatgtg

SEQ ID NO: 71211 - DNA, 25 bp, Probe Sequence
attagattgcctctaccatgtgagt

SEQ ID NO: 71212 - DNA, 25 bp, Probe Sequence
tgattagattgcctctaccatgtga

SEQ ID NO: 71213 - DNA, 25 bp, Probe Sequence
aaatggttggtgattagattgcctc

SEQ ID NO: 71214 - DNA, 25 bp, Probe Sequence
gatcagacctagaatggcacagatg

SEQ ID NO: 71215 - DNA, 25 bp, Probe Sequence
gacctagaatggcacagatgacttc

SEQ ID NO: 71216 - DNA, 25 bp, Probe Sequence
tggttggtgattagattgcctctac

SEQ ID NO: 71217 - DNA, 25 bp, Probe Sequence
ttagattgcctctaccatgtgagtc

SEQ ID NO: 71218 - DNA, 25 bp, Probe Sequence
agacctagaatggcacagatgactt

SEQ ID NO: 71219 - DNA, 25 bp, Probe Sequence
ttctcatccttgtgttgtgaaagac

SEQ ID NO: 71220 - DNA, 25 bp, Probe Sequence
catatttcttgtatttcagggttcc

SEQ ID NO: 71221 - DNA, 25 bp, Probe Sequence
agtcatatttcttgtatttcagggt

SEQ ID NO: 71222 - DNA, 25 bp, Probe Sequence
aggctgaggcaatagaatctcttaa

SEQ ID NO: 71223 - DNA, 25 bp, Probe Sequence
ctctctctctctcgtctctctctct

SEQ ID NO: 71224 - DNA, 25 bp, Probe Sequence
tctctctctctctcgtctctctctc

SEQ ID NO: 71225 - DNA, 25 bp, Probe Sequence
ctctctctctctctcgtctctctct

SEQ ID NO: 71226 - DNA, 25 bp, Probe Sequence
tctctctctctctctcgtctctctc

SEQ ID NO: 71227 - DNA, 25 bp, Probe Sequence
ctctctctctctctctcgtctctct

SEQ ID NO: 71228 - DNA, 25 bp, Probe Sequence
tctctctctctctctctcgtctctc

SEQ ID NO: 71229 - DNA, 25 bp, Probe Sequence
gaggctgaggcaatagaatctctta

SEQ ID NO: 71230 - DNA, 25 bp, Probe Sequence
gtctctctctctctctctcgtctct

SEQ ID NO: 71231 - DNA, 25 bp, Probe Sequence
tctctctctctcgtctctctctctt

SEQ ID NO: 71232 - DNA, 25 bp, Probe Sequence
ctcctcagcctccataattgtatga

SEQ ID NO: 71233 - DNA, 25 bp, Probe Sequence
gagttcaagaccagcctgacaatat

SEQ ID NO: 71234 - DNA, 25 bp, Probe Sequence
gcaatagaatctcttaaacccagga

SEQ ID NO: 71235 - DNA, 25 bp, Probe Sequence
aggcaatagaatctcttaaacccag

SEQ ID NO: 71236 - DNA, 25 bp, Probe Sequence
cagcctcccaaattctctagtttat

SEQ ID NO: 71237 - DNA, 25 bp, Probe Sequence
ggcaatagaatctcttaaacccagg

SEQ ID NO: 71238 - DNA, 25 bp, Probe Sequence
agttcaagaccagcctgacaatatg

SEQ ID NO: 71239 - DNA, 25 bp, Probe Sequence
agcctcccaaattctctagtttata

SEQ ID NO: 71240 - DNA, 25 bp, Probe Sequence
gaggcaatagaatctcttaaaccca

SEQ ID NO: 71241 - DNA, 25 bp, Probe Sequence
tgaggcaatagaatctcttaaaccc

SEQ ID NO: 71242 - DNA, 25 bp, Probe Sequence
gctgaggcaatagaatctcttaaac

SEQ ID NO: 71243 - DNA, 25 bp, Probe Sequence
aatagaatctcttaaacccaggagg

SEQ ID NO: 71244 - DNA, 25 bp, Probe Sequence
ggctgaggcaatagaatctcttaaa

SEQ ID NO: 71245 - DNA, 25 bp, Probe Sequence
gcctcccaaattctctagtttatag

SEQ ID NO: 71246 - DNA, 25 bp, Probe Sequence
ttaaggatgtgattggatggatctc

SEQ ID NO: 71247 - DNA, 25 bp, Probe Sequence
taaggatgtgattggatggatctca

SEQ ID NO: 71248 - DNA, 25 bp, Probe Sequence
aaggatgtgattggatggatctcaa

SEQ ID NO: 71249 - DNA, 25 bp, Probe Sequence
ttcattcaccataaatctttgccag

SEQ ID NO: 71250 - DNA, 25 bp, Probe Sequence
attcattcaccataaatctttgcca

SEQ ID NO: 71251 - DNA, 25 bp, Probe Sequence
gcccatattcattcaccataaatct

SEQ ID NO: 71252 - DNA, 25 bp, Probe Sequence
agcccatattcattcaccataaatc

SEQ ID NO: 71253 - DNA, 25 bp, Probe Sequence
cctaaagcccatattcattcaccat

SEQ ID NO: 71254 - DNA, 25 bp, Probe Sequence
aaagcccatattcattcaccataaa

SEQ ID NO: 71255 - DNA, 25 bp, Probe Sequence
aagcccatattcattcaccataaat

SEQ ID NO: 71256 - DNA, 25 bp, Probe Sequence
attcaccataaatctttgccaggaa

SEQ ID NO: 71257 - DNA, 25 bp, Probe Sequence
ctaaagcccatattcattcaccata

SEQ ID NO: 71258 - DNA, 25 bp, Probe Sequence
gatgtgattggatggatctcaatga

SEQ ID NO: 71259 - DNA, 25 bp, Probe Sequence
gaatgcttaaggatgtgattggatg

SEQ ID NO: 71260 - DNA, 25 bp, Probe Sequence
agaatgcttaaggatgtgattggat

SEQ ID NO: 71261 - DNA, 25 bp, Probe Sequence
cattcaccataaatctttgccagga

SEQ ID NO: 71262 - DNA, 25 bp, Probe Sequence
tcattcaccataaatctttgccagg

SEQ ID NO: 71263 - DNA, 25 bp, Probe Sequence
cttaaggatgtgattggatggatct

SEQ ID NO: 71264 - DNA, 25 bp, Probe Sequence
atgtgattggatggatctcaatgac

SEQ ID NO: 71265 - DNA, 25 bp, Probe Sequence
gaagaatgcttaaggatgtgattgg

SEQ ID NO: 71266 - DNA, 25 bp, Probe Sequence
ggaagaatgcttaaggatgtgattg

SEQ ID NO: 71267 - DNA, 25 bp, Probe Sequence
aggaagaatgcttaaggatgtgatt

SEQ ID NO: 71268 - DNA, 25 bp, Probe Sequence
aagaatgcttaaggatgtgattgga

SEQ ID NO: 71269 - DNA, 25 bp, Probe Sequence
taaagcccatattcattcaccataa

SEQ ID NO: 71270 - DNA, 25 bp, Probe Sequence
tgaccgtttgctaaataaagtgaaa

SEQ ID NO: 71271 - DNA, 25 bp, Probe Sequence
gtgaccgtttgctaaataaagtgaa

SEQ ID NO: 71272 - DNA, 25 bp, Probe Sequence
gagtgtgaccgtttgctaaataaag

SEQ ID NO: 71273 - DNA, 25 bp, Probe Sequence
tgtgaccgtttgctaaataaagtga

SEQ ID NO: 71274 - DNA, 25 bp, Probe Sequence
gtgtgaccgtttgctaaataaagtg

SEQ ID NO: 71275 - DNA, 25 bp, Probe Sequence
agtgtgaccgtttgctaaataaagt

SEQ ID NO: 71276 - DNA, 25 bp, Probe Sequence
gaccgtttgctaaataaagtgaaat

SEQ ID NO: 71277 - DNA, 25 bp, Probe Sequence
cgagtgtgaccgtttgctaaataaa

SEQ ID NO: 71278 - DNA, 25 bp, Probe Sequence
accgtttgctaaataaagtgaaata

SEQ ID NO: 71279 - DNA, 25 bp, Probe Sequence
cgtttgctaaataaagtgaaatacc

SEQ ID NO: 71280 - DNA, 25 bp, Probe Sequence
ccgtttgctaaataaagtgaaatac

SEQ ID NO: 71281 - DNA, 25 bp, Probe Sequence
gtttgctaaataaagtgaaataccc

SEQ ID NO: 71282 - DNA, 25 bp, Probe Sequence
tttgctaaataaagtgaaataccct

SEQ ID NO: 71283 - DNA, 25 bp, Probe Sequence
ccgagtgtgaccgtttgctaaataa

SEQ ID NO: 71284 - DNA, 25 bp, Probe Sequence
ttgctaaataaagtgaaatacccta

SEQ ID NO: 71285 - DNA, 25 bp, Probe Sequence
tgctaaataaagtgaaataccctat

SEQ ID NO: 71286 - DNA, 25 bp, Probe Sequence
ttcctgagacagatgctcaagtgag

SEQ ID NO: 71287 - DNA, 25 bp, Probe Sequence
cttcctgagacagatgctcaagtga

SEQ ID NO: 71288 - DNA, 25 bp, Probe Sequence
tgtacctgtaatctcagctactcag

SEQ ID NO: 71289 - DNA, 25 bp, Probe Sequence
gtgtacctgtaatctcagctactca

SEQ ID NO: 71290 - DNA, 25 bp, Probe Sequence
tgtgtacctgtaatctcagctactc

SEQ ID NO: 71291 - DNA, 25 bp, Probe Sequence
gtgtgtacctgtaatctcagctact

SEQ ID NO: 71292 - DNA, 25 bp, Probe Sequence
tcatggtgtgtacctgtaatctcag

SEQ ID NO: 71293 - DNA, 25 bp, Probe Sequence
gtcatggtgtgtacctgtaatctca

SEQ ID NO: 71294 - DNA, 25 bp, Probe Sequence
ggtcatggtgtgtacctgtaatctc

SEQ ID NO: 71295 - DNA, 25 bp, Probe Sequence
ctggtcatggtgtgtacctgtaatc

SEQ ID NO: 71296 - DNA, 25 bp, Probe Sequence
ggtgtgtacctgtaatctcagctac

SEQ ID NO: 71297 - DNA, 25 bp, Probe Sequence
taatctcagctactcaggaggctaa

SEQ ID NO: 71298 - DNA, 25 bp, Probe Sequence
catggtgtgtacctgtaatctcagc

SEQ ID NO: 71299 - DNA, 25 bp, Probe Sequence
tggtcatggtgtgtacctgtaatct

SEQ ID NO: 71300 - DNA, 25 bp, Probe Sequence
tggtgtgtacctgtaatctcagcta

SEQ ID NO: 71301 - DNA, 25 bp, Probe Sequence
gtaatctcagctactcaggaggcta

SEQ ID NO: 71302 - DNA, 25 bp, Probe Sequence
atggtgtgtacctgtaatctcagct

SEQ ID NO: 71303 - DNA, 25 bp, Probe Sequence
gctaaggcatgaaaatctcttgaac

SEQ ID NO: 71304 - DNA, 25 bp, Probe Sequence
aatctcagctactcaggaggctaag

SEQ ID NO: 71305 - DNA, 25 bp, Probe Sequence
ctgtaatctcagctactcaggaggc

SEQ ID NO: 71306 - DNA, 25 bp, Probe Sequence
aattagctggtcatggtgtgtacct

SEQ ID NO: 71307 - DNA, 25 bp, Probe Sequence
ggctaaggcatgaaaatctcttgaa

SEQ ID NO: 71308 - DNA, 25 bp, Probe Sequence
aaaattagctggtcatggtgtgtac

SEQ ID NO: 71309 - DNA, 25 bp, Probe Sequence
ctactcaggaggctaaggcatgaaa

SEQ ID NO: 71310 - DNA, 25 bp, Probe Sequence
aggctaaggcatgaaaatctcttga

SEQ ID NO: 71311 - DNA, 25 bp, Probe Sequence
gaggctaaggcatgaaaatctcttg

SEQ ID NO: 71312 - DNA, 25 bp, Probe Sequence
gcataagagaagccaatcattaagg

SEQ ID NO: 71313 - DNA, 25 bp, Probe Sequence
cagcataagagaagccaatcattaa

SEQ ID NO: 71314 - DNA, 25 bp, Probe Sequence
agcataagagaagccaatcattaag

SEQ ID NO: 71315 - DNA, 25 bp, Probe Sequence
ataagagaagccaatcattaaggtg

SEQ ID NO: 71316 - DNA, 25 bp, Probe Sequence
cataagagaagccaatcattaaggt

SEQ ID NO: 71317 - DNA, 25 bp, Probe Sequence
gcagcataagagaagccaatcatta

SEQ ID NO: 71318 - DNA, 25 bp, Probe Sequence
taagagaagccaatcattaaggtga

SEQ ID NO: 71319 - DNA, 25 bp, Probe Sequence
aagagaagccaatcattaaggtgac

SEQ ID NO: 71320 - DNA, 25 bp, Probe Sequence
ccaatcattaaggtgacagagtgac

SEQ ID NO: 71321 - DNA, 25 bp, Probe Sequence
gaagccaatcattaaggtgacagag

SEQ ID NO: 71322 - DNA, 25 bp, Probe Sequence
gagaagccaatcattaaggtgacag

SEQ ID NO: 71323 - DNA, 25 bp, Probe Sequence
agaagccaatcattaaggtgacaga

SEQ ID NO: 71324 - DNA, 25 bp, Probe Sequence
agagaagccaatcattaaggtgaca

SEQ ID NO: 71325 - DNA, 25 bp, Probe Sequence
aagccaatcattaaggtgacagagt

SEQ ID NO: 71326 - DNA, 25 bp, Probe Sequence
agcagcataagagaagccaatcatt

SEQ ID NO: 71327 - DNA, 25 bp, Probe Sequence
aagcagcataagagaagccaatcat

SEQ ID NO: 71328 - DNA, 25 bp, Probe Sequence
cccaccctatacacatcataatctc

SEQ ID NO: 71329 - DNA, 25 bp, Probe Sequence
ccgtaggataacatattcaaagtgc

SEQ ID NO: 71330 - DNA, 25 bp, Probe Sequence
gccgtaggataacatattcaaagtg

SEQ ID NO: 71331 - DNA, 25 bp, Probe Sequence
agccgtaggataacatattcaaagt

SEQ ID NO: 71332 - DNA, 25 bp, Probe Sequence
ccaccctatacacatcataatctct

SEQ ID NO: 71333 - DNA, 25 bp, Probe Sequence
caatcattaaggtgacagagtgacc

SEQ ID NO: 71334 - DNA, 25 bp, Probe Sequence
aaagtgctaacagaaaggagacatc

SEQ ID NO: 71335 - DNA, 25 bp, Probe Sequence
attcaaagtgctaacagaaaggaga

SEQ ID NO: 71336 - DNA, 25 bp, Probe Sequence
cccaccttgtctgctaaataaacat

SEQ ID NO: 71337 - DNA, 25 bp, Probe Sequence
ccaccttgtctgctaaataaacatg

SEQ ID NO: 71338 - DNA, 25 bp, Probe Sequence
accttgtctgctaaataaacatgtg

SEQ ID NO: 71339 - DNA, 25 bp, Probe Sequence
caccttgtctgctaaataaacatgt

SEQ ID NO: 71340 - DNA, 25 bp, Probe Sequence
cttgtctgctaaataaacatgtgcc

SEQ ID NO: 71341 - DNA, 25 bp, Probe Sequence
ccttgtctgctaaataaacatgtgc

SEQ ID NO: 71342 - DNA, 25 bp, Probe Sequence
gtctgctaaataaacatgtgccctc

SEQ ID NO: 71343 - DNA, 25 bp, Probe Sequence
ccccaccttgtctgctaaataaaca

SEQ ID NO: 71344 - DNA, 25 bp, Probe Sequence
tctgctaaataaacatgtgccctca

SEQ ID NO: 71345 - DNA, 25 bp, Probe Sequence
ttgtctgctaaataaacatgtgccc

SEQ ID NO: 71346 - DNA, 25 bp, Probe Sequence
ctgctaaataaacatgtgccctcag

SEQ ID NO: 71347 - DNA, 25 bp, Probe Sequence
cagtacatcaatgggcgtggatagg

SEQ ID NO: 71348 - DNA, 25 bp, Probe Sequence
gccccaccttgtctgctaaataaac

SEQ ID NO: 71349 - DNA, 25 bp, Probe Sequence
tgtctgctaaataaacatgtgccct

SEQ ID NO: 71350 - DNA, 25 bp, Probe Sequence
tgctaaataaacatgtgccctcagg

SEQ ID NO: 71351 - DNA, 25 bp, Probe Sequence
agccccaccttgtctgctaaataaa

SEQ ID NO: 71352 - DNA, 25 bp, Probe Sequence
gagccccaccttgtctgctaaataa

SEQ ID NO: 71353 - DNA, 25 bp, Probe Sequence
ctaaataaacatgtgccctcaggcc

SEQ ID NO: 71354 - DNA, 25 bp, Probe Sequence
taaataaacatgtgccctcaggcca

SEQ ID NO: 71355 - DNA, 25 bp, Probe Sequence
gctaaataaacatgtgccctcaggc

SEQ ID NO: 71356 - DNA, 25 bp, Probe Sequence
ctggacaacatagtaataccctctc

SEQ ID NO: 71357 - DNA, 25 bp, Probe Sequence
ggacaacatagtaataccctctctc

SEQ ID NO: 71358 - DNA, 25 bp, Probe Sequence
tggacaacatagtaataccctctct

SEQ ID NO: 71359 - DNA, 25 bp, Probe Sequence
cctggacaacatagtaataccctct

SEQ ID NO: 71360 - DNA, 25 bp, Probe Sequence
gacaacatagtaataccctctctct

SEQ ID NO: 71361 - DNA, 25 bp, Probe Sequence
cactcctgtaatcctagcactttag

SEQ ID NO: 71362 - DNA, 25 bp, Probe Sequence
tcactcctgtaatcctagcacttta

SEQ ID NO: 71363 - DNA, 25 bp, Probe Sequence
ctcactcctgtaatcctagcacttt

SEQ ID NO: 71364 - DNA, 25 bp, Probe Sequence
acaacatagtaataccctctctcta

SEQ ID NO: 71365 - DNA, 25 bp, Probe Sequence
acatagtaataccctctctctacaa

SEQ ID NO: 71366 - DNA, 25 bp, Probe Sequence
aacatagtaataccctctctctaca

SEQ ID NO: 71367 - DNA, 25 bp, Probe Sequence
gcctggacaacatagtaataccctc

SEQ ID NO: 71368 - DNA, 25 bp, Probe Sequence
caacatagtaataccctctctctac

SEQ ID NO: 71369 - DNA, 25 bp, Probe Sequence
gaccagcctggacaacatagtaata

SEQ ID NO: 71370 - DNA, 25 bp, Probe Sequence
agcctggacaacatagtaataccct

SEQ ID NO: 71371 - DNA, 25 bp, Probe Sequence
accagcctggacaacatagtaatac

SEQ ID NO: 71372 - DNA, 25 bp, Probe Sequence
cagcctggacaacatagtaataccc

SEQ ID NO: 71373 - DNA, 25 bp, Probe Sequence
ccagcctggacaacatagtaatacc

SEQ ID NO: 71374 - DNA, 25 bp, Probe Sequence
catagtaataccctctctctacaaa

SEQ ID NO: 71375 - DNA, 25 bp, Probe Sequence
agaccagcctggacaacatagtaat

SEQ ID NO: 71376 - DNA, 25 bp, Probe Sequence
actcctgtaatcctagcactttagg

SEQ ID NO: 71377 - DNA, 25 bp, Probe Sequence
aagaccagcctggacaacatagtaa

SEQ ID NO: 71378 - DNA, 25 bp, Probe Sequence
gctcactcctgtaatcctagcactt

SEQ ID NO: 71379 - DNA, 25 bp, Probe Sequence
caagaccagcctggacaacatagta

SEQ ID NO: 71380 - DNA, 25 bp, Probe Sequence
cattctaactggtgtgagatgatat

SEQ ID NO: 71381 - DNA, 25 bp, Probe Sequence
gttccaagtcttgctattgtgaata

SEQ ID NO: 71382 - DNA, 25 bp, Probe Sequence
ttgatgccaaggacattagtagagg

SEQ ID NO: 71383 - DNA, 25 bp, Probe Sequence
ccattctaactggtgtgagatgata

SEQ ID NO: 71384 - DNA, 25 bp, Probe Sequence
ggttccaagtcttgctattgtgaat

SEQ ID NO: 71385 - DNA, 25 bp, Probe Sequence
ctatcttgtgacatttggttggttc

SEQ ID NO: 71386 - DNA, 25 bp, Probe Sequence
tctatcttgtgacatttggttggtt

SEQ ID NO: 71387 - DNA, 25 bp, Probe Sequence
ttaatgattgccattctaactggtg

SEQ ID NO: 71388 - DNA, 25 bp, Probe Sequence
ttgagaagtgtctgttcatgtcctt

SEQ ID NO: 71389 - DNA, 25 bp, Probe Sequence
taatgattgccattctaactggtgt

SEQ ID NO: 71390 - DNA, 25 bp, Probe Sequence
tagaaagattgcctgtgtgaaagac

SEQ ID NO: 71391 - DNA, 25 bp, Probe Sequence
attagtagagggctagaaagattgc

SEQ ID NO: 71392 - DNA, 25 bp, Probe Sequence
aaggacattagtagagggctagaaa

SEQ ID NO: 71393 - DNA, 25 bp, Probe Sequence
ggacattagtagagggctagaaaga

SEQ ID NO: 71394 - DNA, 25 bp, Probe Sequence
aggacattagtagagggctagaaag

SEQ ID NO: 71395 - DNA, 25 bp, Probe Sequence
gacattagtagagggctagaaagat

SEQ ID NO: 71396 - DNA, 25 bp, Probe Sequence
ctagaaagattgcctgtgtgaaaga

SEQ ID NO: 71397 - DNA, 25 bp, Probe Sequence
caaggacattagtagagggctagaa

SEQ ID NO: 71398 - DNA, 25 bp, Probe Sequence
tatcttgtgacatttggttggttcc

SEQ ID NO: 71399 - DNA, 25 bp, Probe Sequence
acattagtagagggctagaaagatt

SEQ ID NO: 71400 - DNA, 25 bp, Probe Sequence
tggtatttcttagttgctagactcc

SEQ ID NO: 71401 - DNA, 25 bp, Probe Sequence
gcttgggtcaaatggtatttcttag

SEQ ID NO: 71402 - DNA, 25 bp, Probe Sequence
tatttcttagttgctagactccctg

SEQ ID NO: 71403 - DNA, 25 bp, Probe Sequence
gtatttcttagttgctagactccct

SEQ ID NO: 71404 - DNA, 25 bp, Probe Sequence
tgtccttaattgtctccagaatgat

SEQ ID NO: 71405 - DNA, 25 bp, Probe Sequence
atgtccttaattgtctccagaatga

SEQ ID NO: 71406 - DNA, 25 bp, Probe Sequence
aatgtccttaattgtctccagaatg

SEQ ID NO: 71407 - DNA, 25 bp, Probe Sequence
gtccttaattgtctccagaatgata

SEQ ID NO: 71408 - DNA, 25 bp, Probe Sequence
tccttaattgtctccagaatgatat

SEQ ID NO: 71409 - DNA, 25 bp, Probe Sequence
tcaaatgtccttaattgtctccaga

SEQ ID NO: 71410 - DNA, 25 bp, Probe Sequence
gttcaaatgtccttaattgtctcca

SEQ ID NO: 71411 - DNA, 25 bp, Probe Sequence
tgttcaaatgtccttaattgtctcc

SEQ ID NO: 71412 - DNA, 25 bp, Probe Sequence
caaatgtccttaattgtctccagaa

SEQ ID NO: 71413 - DNA, 25 bp, Probe Sequence
ttcaaatgtccttaattgtctccag

SEQ ID NO: 71414 - DNA, 25 bp, Probe Sequence
aaatgtccttaattgtctccagaat

SEQ ID NO: 71415 - DNA, 25 bp, Probe Sequence
tatctagtacccagtccatgttcaa

SEQ ID NO: 71416 - DNA, 25 bp, Probe Sequence
ttatctagtacccagtccatgttca

SEQ ID NO: 71417 - DNA, 25 bp, Probe Sequence
attatctagtacccagtccatgttc

SEQ ID NO: 71418 - DNA, 25 bp, Probe Sequence
cacaccgttgagctaatgttgtatt

SEQ ID NO: 71419 - DNA, 25 bp, Probe Sequence
cagtccatgttcaaatgtccttaat

SEQ ID NO: 71420 - DNA, 25 bp, Probe Sequence
ccttaattgtctccagaatgatatt

SEQ ID NO: 71421 - DNA, 25 bp, Probe Sequence
tctagtacccagtccatgttcaaat

SEQ ID NO: 71422 - DNA, 25 bp, Probe Sequence
atctagtacccagtccatgttcaaa

SEQ ID NO: 71423 - DNA, 25 bp, Probe Sequence
gtattatctagtacccagtccatgt

SEQ ID NO: 71424 - DNA, 25 bp, Probe Sequence
ataatgaccaaccgaaacctctctc

SEQ ID NO: 71425 - DNA, 25 bp, Probe Sequence
gataatgaccaaccgaaacctctct

SEQ ID NO: 71426 - DNA, 25 bp, Probe Sequence
agtccatgttcaaatgtccttaatt

SEQ ID NO: 71427 - DNA, 25 bp, Probe Sequence
ctagtacccagtccatgttcaaatg

SEQ ID NO: 71428 - DNA, 25 bp, Probe Sequence
gtctgtaatctcaacactttgggag

SEQ ID NO: 71429 - DNA, 25 bp, Probe Sequence
tgtctgtaatctcaacactttggga

SEQ ID NO: 71430 - DNA, 25 bp, Probe Sequence
gactgagatgagggaatcacttgag

SEQ ID NO: 71431 - DNA, 25 bp, Probe Sequence
gagactgagatgagggaatcacttg

SEQ ID NO: 71432 - DNA, 25 bp, Probe Sequence
agactgagatgagggaatcacttga

SEQ ID NO: 71433 - DNA, 25 bp, Probe Sequence
ggcaacaaagtgagatcctatctta

SEQ ID NO: 71434 - DNA, 25 bp, Probe Sequence
caacactttgggagactgagatgag

SEQ ID NO: 71435 - DNA, 25 bp, Probe Sequence
gcaacaaagtgagatcctatcttaa

SEQ ID NO: 71436 - DNA, 25 bp, Probe Sequence
ctttgggagactgagatgagggaat

SEQ ID NO: 71437 - DNA, 25 bp, Probe Sequence
ctgggcaacaaagtgagatcctatc

SEQ ID NO: 71438 - DNA, 25 bp, Probe Sequence
agtggctcgtgtctgtaatctcaac

SEQ ID NO: 71439 - DNA, 25 bp, Probe Sequence
tttgggagactgagatgagggaatc

SEQ ID NO: 71440 - DNA, 25 bp, Probe Sequence
ggagactgagatgagggaatcactt

SEQ ID NO: 71441 - DNA, 25 bp, Probe Sequence
tcaacactttgggagactgagatga

SEQ ID NO: 71442 - DNA, 25 bp, Probe Sequence
actgagatgagggaatcacttgagg

SEQ ID NO: 71443 - DNA, 25 bp, Probe Sequence
aacactttgggagactgagatgagg

SEQ ID NO: 71444 - DNA, 25 bp, Probe Sequence
gggcaacaaagtgagatcctatctt

SEQ ID NO: 71445 - DNA, 25 bp, Probe Sequence
cagtggctcgtgtctgtaatctcaa

SEQ ID NO: 71446 - DNA, 25 bp, Probe Sequence
gtggctcgtgtctgtaatctcaaca

SEQ ID NO: 71447 - DNA, 25 bp, Probe Sequence
taatctcaacactttgggagactga

SEQ ID NO: 71448 - DNA, 25 bp, Probe Sequence
gtaatctcaacactttgggagactg

SEQ ID NO: 71449 - DNA, 25 bp, Probe Sequence
ctgtaatctcaacactttgggagac

SEQ ID NO: 71450 - DNA, 25 bp, Probe Sequence
tctgtaatctcaacactttgggaga

SEQ ID NO: 71451 - DNA, 25 bp, Probe Sequence
tgtaatctcaacactttgggagact

SEQ ID NO: 71452 - DNA, 25 bp, Probe Sequence
gtcatcactgaggaagagaagaatt

SEQ ID NO: 71453 - DNA, 25 bp, Probe Sequence
agtcatcactgaggaagagaagaat

SEQ ID NO: 71454 - DNA, 25 bp, Probe Sequence
gagtcatcactgaggaagagaagaa

SEQ ID NO: 71455 - DNA, 25 bp, Probe Sequence
cctggataatgctttactttctgtg

SEQ ID NO: 71456 - DNA, 25 bp, Probe Sequence
ctggataatgctttactttctgtgt

SEQ ID NO: 71457 - DNA, 25 bp, Probe Sequence
ccctggataatgctttactttctgt

SEQ ID NO: 71458 - DNA, 25 bp, Probe Sequence
gttgtttggttagtgactgatgtaa

SEQ ID NO: 71459 - DNA, 25 bp, Probe Sequence
tggataatgctttactttctgtgtt

SEQ ID NO: 71460 - DNA, 25 bp, Probe Sequence
ggttgtttggttagtgactgatgta

SEQ ID NO: 71461 - DNA, 25 bp, Probe Sequence
ggataatgctttactttctgtgttg

SEQ ID NO: 71462 - DNA, 25 bp, Probe Sequence
catcactgaggaagagaagaatttc

SEQ ID NO: 71463 - DNA, 25 bp, Probe Sequence
ttgtttggttagtgactgatgtaaa

SEQ ID NO: 71464 - DNA, 25 bp, Probe Sequence
tcactgaggaagagaagaatttcaa

SEQ ID NO: 71465 - DNA, 25 bp, Probe Sequence
cactgaggaagagaagaatttcaag

SEQ ID NO: 71466 - DNA, 25 bp, Probe Sequence
atcactgaggaagagaagaatttca

SEQ ID NO: 71467 - DNA, 25 bp, Probe Sequence
tcatcactgaggaagagaagaattt

SEQ ID NO: 71468 - DNA, 25 bp, Probe Sequence
ttggttgtttggttagtgactgatg

SEQ ID NO: 71469 - DNA, 25 bp, Probe Sequence
gttggttgtttggttagtgactgat

SEQ ID NO: 71470 - DNA, 25 bp, Probe Sequence
actgaggaagagaagaatttcaagc

SEQ ID NO: 71471 - DNA, 25 bp, Probe Sequence
gccctggataatgctttactttctg

SEQ ID NO: 71472 - DNA, 25 bp, Probe Sequence
gataatgctttactttctgtgttga

SEQ ID NO: 71473 - DNA, 25 bp, Probe Sequence
taatgctttactttctgtgttgaag

SEQ ID NO: 71474 - DNA, 25 bp, Probe Sequence
ctgaggaagagaagaatttcaagcc

SEQ ID NO: 71475 - DNA, 25 bp, Probe Sequence
cgagtcatcactgaggaagagaaga

SEQ ID NO: 71476 - DNA, 25 bp, Probe Sequence
gtcatcactgaggaagagaagaatt

SEQ ID NO: 71477 - DNA, 25 bp, Probe Sequence
agtcatcactgaggaagagaagaat

SEQ ID NO: 71478 - DNA, 25 bp, Probe Sequence
gagtcatcactgaggaagagaagaa

SEQ ID NO: 71479 - DNA, 25 bp, Probe Sequence
cctggataatgctttactttctgtg

SEQ ID NO: 71480 - DNA, 25 bp, Probe Sequence
ctggataatgctttactttctgtgt

SEQ ID NO: 71481 - DNA, 25 bp, Probe Sequence
ccctggataatgctttactttctgt

SEQ ID NO: 71482 - DNA, 25 bp, Probe Sequence
gttgtttggttagtgactgatgtaa

SEQ ID NO: 71483 - DNA, 25 bp, Probe Sequence
tggataatgctttactttctgtgtt

SEQ ID NO: 71484 - DNA, 25 bp, Probe Sequence
ggttgtttggttagtgactgatgta

SEQ ID NO: 71485 - DNA, 25 bp, Probe Sequence
ggataatgctttactttctgtgttg

SEQ ID NO: 71486 - DNA, 25 bp, Probe Sequence
catcactgaggaagagaagaatttc

SEQ ID NO: 71487 - DNA, 25 bp, Probe Sequence
ttgtttggttagtgactgatgtaaa

SEQ ID NO: 71488 - DNA, 25 bp, Probe Sequence
tcactgaggaagagaagaatttcaa

SEQ ID NO: 71489 - DNA, 25 bp, Probe Sequence
cactgaggaagagaagaatttcaag

SEQ ID NO: 71490 - DNA, 25 bp, Probe Sequence
atcactgaggaagagaagaatttca

SEQ ID NO: 71491 - DNA, 25 bp, Probe Sequence
tcatcactgaggaagagaagaattt

SEQ ID NO: 71492 - DNA, 25 bp, Probe Sequence
ttggttgtttggttagtgactgatg

SEQ ID NO: 71493 - DNA, 25 bp, Probe Sequence
gttggttgtttggttagtgactgat

SEQ ID NO: 71494 - DNA, 25 bp, Probe Sequence
actgaggaagagaagaatttcaagc

SEQ ID NO: 71495 - DNA, 25 bp, Probe Sequence
gccctggataatgctttactttctg

SEQ ID NO: 71496 - DNA, 25 bp, Probe Sequence
gataatgctttactttctgtgttga

SEQ ID NO: 71497 - DNA, 25 bp, Probe Sequence
taatgctttactttctgtgttgaag

SEQ ID NO: 71498 - DNA, 25 bp, Probe Sequence
ctgaggaagagaagaatttcaagcc

SEQ ID NO: 71499 - DNA, 25 bp, Probe Sequence
cgagtcatcactgaggaagagaaga

SEQ ID NO: 71500 - DNA, 25 bp, Probe Sequence
cacaatgagacagccaagtataatc

SEQ ID NO: 71501 - DNA, 25 bp, Probe Sequence
acacaatgagacagccaagtataat

SEQ ID NO: 71502 - DNA, 25 bp, Probe Sequence
gacacaatgagacagccaagtataa

SEQ ID NO: 71503 - DNA, 25 bp, Probe Sequence
acaatgagacagccaagtataatcg

SEQ ID NO: 71504 - DNA, 25 bp, Probe Sequence
gataggtctacaagccaagaacttc

SEQ ID NO: 71505 - DNA, 25 bp, Probe Sequence
agacacaatgagacagccaagtata

SEQ ID NO: 71506 - DNA, 25 bp, Probe Sequence
caatgagacagccaagtataatcgg

SEQ ID NO: 71507 - DNA, 25 bp, Probe Sequence
tgataggtctacaagccaagaactt

SEQ ID NO: 71508 - DNA, 25 bp, Probe Sequence
aatgagacagccaagtataatcggt

SEQ ID NO: 71509 - DNA, 25 bp, Probe Sequence
gagtgataggtctacaagccaagaa

SEQ ID NO: 71510 - DNA, 25 bp, Probe Sequence
gtgaaggcagagactagagtgatag

SEQ ID NO: 71511 - DNA, 25 bp, Probe Sequence
ataggtctacaagccaagaacttcc

SEQ ID NO: 71512 - DNA, 25 bp, Probe Sequence
gtgataggtctacaagccaagaact

SEQ ID NO: 71513 - DNA, 25 bp, Probe Sequence
agtgataggtctacaagccaagaac

SEQ ID NO: 71514 - DNA, 25 bp, Probe Sequence
gagacacaatgagacagccaagtat

SEQ ID NO: 71515 - DNA, 25 bp, Probe Sequence
agagtgataggtctacaagccaaga

SEQ ID NO: 71516 - DNA, 25 bp, Probe Sequence
tagagtgataggtctacaagccaag

SEQ ID NO: 71517 - DNA, 25 bp, Probe Sequence
ctagagtgataggtctacaagccaa

SEQ ID NO: 71518 - DNA, 25 bp, Probe Sequence
gagaatggatggagctatgaagttc

SEQ ID NO: 71519 - DNA, 25 bp, Probe Sequence
aattaacctggtcatgtgacaagaa

SEQ ID NO: 71520 - DNA, 25 bp, Probe Sequence
atagagtagttgttccatgcagtat

SEQ ID NO: 71521 - DNA, 25 bp, Probe Sequence
gaaggcagagactagagtgataggt

SEQ ID NO: 71522 - DNA, 25 bp, Probe Sequence
tgaaggcagagactagagtgatagg

SEQ ID NO: 71523 - DNA, 25 bp, Probe Sequence
tagagtagttgttccatgcagtatg

SEQ ID NO: 71524 - DNA, 25 bp, Probe Sequence
ccttagactctccaatgaatgtgtt

SEQ ID NO: 71525 - DNA, 25 bp, Probe Sequence
cttagactctccaatgaatgtgttc

SEQ ID NO: 71526 - DNA, 25 bp, Probe Sequence
tgttaccttgactcatctcagatac

SEQ ID NO: 71527 - DNA, 25 bp, Probe Sequence
gttaccttgactcatctcagatacg

SEQ ID NO: 71528 - DNA, 25 bp, Probe Sequence
gacagacacagacaccatctcttaa

SEQ ID NO: 71529 - DNA, 25 bp, Probe Sequence
ttaccttgactcatctcagatacgg

SEQ ID NO: 71530 - DNA, 25 bp, Probe Sequence
ctgccttagactctccaatgaatgt

SEQ ID NO: 71531 - DNA, 25 bp, Probe Sequence
ctgttaccttgactcatctcagata

SEQ ID NO: 71532 - DNA, 25 bp, Probe Sequence
gccttagactctccaatgaatgtgt

SEQ ID NO: 71533 - DNA, 25 bp, Probe Sequence
tgccttagactctccaatgaatgtg

SEQ ID NO: 71534 - DNA, 25 bp, Probe Sequence
agaagatcggcagacagatgaatac

SEQ ID NO: 71535 - DNA, 25 bp, Probe Sequence
cagaagatcggcagacagatgaata

SEQ ID NO: 71536 - DNA, 25 bp, Probe Sequence
ataaaggacagagagacccatattc

SEQ ID NO: 71537 - DNA, 25 bp, Probe Sequence
gataaaggacagagagacccatatt

SEQ ID NO: 71538 - DNA, 25 bp, Probe Sequence
ggataaaggacagagagacccatat

SEQ ID NO: 71539 - DNA, 25 bp, Probe Sequence
cctctgttaccttgactcatctcag

SEQ ID NO: 71540 - DNA, 25 bp, Probe Sequence
ctgtctgtgtaactggagtgctatg

SEQ ID NO: 71541 - DNA, 25 bp, Probe Sequence
tctgtctgtgtaactggagtgctat

SEQ ID NO: 71542 - DNA, 25 bp, Probe Sequence
atctgtctgtgtaactggagtgcta

SEQ ID NO: 71543 - DNA, 25 bp, Probe Sequence
aggacccttgaaactaattgagaaa

SEQ ID NO: 71544 - DNA, 25 bp, Probe Sequence
caggacccttgaaactaattgagaa

SEQ ID NO: 71545 - DNA, 25 bp, Probe Sequence
aggtttaactatttgctcaatgtca

SEQ ID NO: 71546 - DNA, 25 bp, Probe Sequence
tttagcagaattgtcaaaggaagaa

SEQ ID NO: 71547 - DNA, 25 bp, Probe Sequence
ttaactatttgctcaatgtcaaggc

SEQ ID NO: 71548 - DNA, 25 bp, Probe Sequence
gtattagccattacttgagaggagc

SEQ ID NO: 71549 - DNA, 25 bp, Probe Sequence
gcctgacacatagtaatcactcaat

SEQ ID NO: 71550 - DNA, 25 bp, Probe Sequence
tattagccattacttgagaggagcc

SEQ ID NO: 71551 - DNA, 25 bp, Probe Sequence
tccgtacattcttgaactacatgat

SEQ ID NO: 71552 - DNA, 25 bp, Probe Sequence
ttccgtacattcttgaactacatga

SEQ ID NO: 71553 - DNA, 25 bp, Probe Sequence
agcctgacacatagtaatcactcaa

SEQ ID NO: 71554 - DNA, 25 bp, Probe Sequence
agagcctgacacatagtaatcactc

SEQ ID NO: 71555 - DNA, 25 bp, Probe Sequence
acatgatactcacttacacacatct

SEQ ID NO: 71556 - DNA, 25 bp, Probe Sequence
taacacagagcctgacacatagtaa

SEQ ID NO: 71557 - DNA, 25 bp, Probe Sequence
actacatgatactcacttacacaca

SEQ ID NO: 71558 - DNA, 25 bp, Probe Sequence
gagcctgacacatagtaatcactca

SEQ ID NO: 71559 - DNA, 25 bp, Probe Sequence
ccgtacattcttgaactacatgata

SEQ ID NO: 71560 - DNA, 25 bp, Probe Sequence
cctgacacatagtaatcactcaata

SEQ ID NO: 71561 - DNA, 25 bp, Probe Sequence
ctaacacagagcctgacacatagta

SEQ ID NO: 71562 - DNA, 25 bp, Probe Sequence
tatatcgagcacttcctaacacaga

SEQ ID NO: 71563 - DNA, 25 bp, Probe Sequence
gtatatcgagcacttcctaacacag

SEQ ID NO: 71564 - DNA, 25 bp, Probe Sequence
aacacagagcctgacacatagtaat

SEQ ID NO: 71565 - DNA, 25 bp, Probe Sequence
agtattagccattacttgagaggag

SEQ ID NO: 71566 - DNA, 25 bp, Probe Sequence
cagagcctgacacatagtaatcact

SEQ ID NO: 71567 - DNA, 25 bp, Probe Sequence
tatcctattactcactgcatcaagc

SEQ ID NO: 71568 - DNA, 25 bp, Probe Sequence
aactacatgatactcacttacacac

SEQ ID NO: 71569 - DNA, 25 bp, Probe Sequence
ctatatttctgaggctaaggaccac

SEQ ID NO: 71570 - DNA, 25 bp, Probe Sequence
tctatatttctgaggctaaggacca

SEQ ID NO: 71571 - DNA, 25 bp, Probe Sequence
tgtatcctattactcactgcatcaa

SEQ ID NO: 71572 - DNA, 25 bp, Probe Sequence
ccagacggactatggacttctactg

SEQ ID NO: 71573 - DNA, 25 bp, Probe Sequence
cagacggactatggacttctactgc

SEQ ID NO: 71574 - DNA, 25 bp, Probe Sequence
agacggactatggacttctactgca

SEQ ID NO: 71575 - DNA, 25 bp, Probe Sequence
gcagtacatcaatgggcgtgaatac

SEQ ID NO: 71576 - DNA, 25 bp, Probe Sequence
cccagacggactatggacttctact

SEQ ID NO: 71577 - DNA, 25 bp, Probe Sequence
cagtacatcaatgggcgtgaatacg

SEQ ID NO: 71578 - DNA, 25 bp, Probe Sequence
tgcagtacatcaatgggcgtgaata

SEQ ID NO: 71579 - DNA, 25 bp, Probe Sequence
ttatgcccagacggactatggactt

SEQ ID NO: 71580 - DNA, 25 bp, Probe Sequence
agtacatcaatgggcgtgaatacgg

SEQ ID NO: 71581 - DNA, 25 bp, Probe Sequence
ccagacggactatggacttctactg

SEQ ID NO: 71582 - DNA, 25 bp, Probe Sequence
cagacggactatggacttctactgc

SEQ ID NO: 71583 - DNA, 25 bp, Probe Sequence
agacggactatggacttctactgca

SEQ ID NO: 71584 - DNA, 25 bp, Probe Sequence
gcagtacatcaatgggcgtgaatac

SEQ ID NO: 71585 - DNA, 25 bp, Probe Sequence
cccagacggactatggacttctact

SEQ ID NO: 71586 - DNA, 25 bp, Probe Sequence
cagtacatcaatgggcgtgaatacg

SEQ ID NO: 71587 - DNA, 25 bp, Probe Sequence
tgcagtacatcaatgggcgtgaata

SEQ ID NO: 71588 - DNA, 25 bp, Probe Sequence
ttatgcccagacggactatggactt

SEQ ID NO: 71589 - DNA, 25 bp, Probe Sequence
agtacatcaatgggcgtgaatacgg

SEQ ID NO: 71590 - DNA, 25 bp, Probe Sequence
ttcttgtttgattgattgtttatgc

SEQ ID NO: 71591 - DNA, 25 bp, Probe Sequence
tcttgtttgattgattgtttatgca

SEQ ID NO: 71592 - DNA, 25 bp, Probe Sequence
acacaaaagttaaaagcagagagat

SEQ ID NO: 71593 - DNA, 25 bp, Probe Sequence
tggaaacacaaaagttaaaagcaga

SEQ ID NO: 71594 - DNA, 25 bp, Probe Sequence
acaaaagttaaaagcagagagatga

SEQ ID NO: 71595 - DNA, 25 bp, Probe Sequence
cacaaaagttaaaagcagagagatg

SEQ ID NO: 71596 - DNA, 25 bp, Probe Sequence
ggaaacacaaaagttaaaagcagag

SEQ ID NO: 71597 - DNA, 25 bp, Probe Sequence
aacacaaaagttaaaagcagagaga

SEQ ID NO: 71598 - DNA, 25 bp, Probe Sequence
atggaaacacaaaagttaaaagcag

SEQ ID NO: 71599 - DNA, 25 bp, Probe Sequence
aatggaaacacaaaagttaaaagca

SEQ ID NO: 71600 - DNA, 25 bp, Probe Sequence
aaacacaaaagttaaaagcagagag

SEQ ID NO: 71601 - DNA, 25 bp, Probe Sequence
gaaacacaaaagttaaaagcagaga

SEQ ID NO: 71602 - DNA, 25 bp, Probe Sequence
cttgtttgattgattgtttatgcaa

SEQ ID NO: 71603 - DNA, 25 bp, Probe Sequence
caaaagttaaaagcagagagatgaa

SEQ ID NO: 71604 - DNA, 25 bp, Probe Sequence
tctcttttcttgtttgattgattgt

SEQ ID NO: 71605 - DNA, 25 bp, Probe Sequence
aaatggaaacacaaaagttaaaagc

SEQ ID NO: 71606 - DNA, 25 bp, Probe Sequence
aaaagttaaaagcagagagatgaaa

SEQ ID NO: 71607 - DNA, 25 bp, Probe Sequence
aaagttaaaagcagagagatgaaat

SEQ ID NO: 71608 - DNA, 25 bp, Probe Sequence
aagttaaaagcagagagatgaaatt

SEQ ID NO: 71609 - DNA, 25 bp, Probe Sequence
ctcttttcttgtttgattgattgtt

SEQ ID NO: 71610 - DNA, 25 bp, Probe Sequence
tttcttgtttgattgattgtttatg

SEQ ID NO: 71611 - DNA, 25 bp, Probe Sequence
ttctcttttcttgtttgattgattg

SEQ ID NO: 71612 - DNA, 25 bp, Probe Sequence
tcttttcttgtttgattgattgttt

SEQ ID NO: 71613 - DNA, 25 bp, Probe Sequence
ttgtttgattgattgtttatgcaat

SEQ ID NO: 71614 - DNA, 25 bp, Probe Sequence
gcttcattagatgtctacctagtgt

SEQ ID NO: 71615 - DNA, 25 bp, Probe Sequence
ataggagatcacagtcttacatagc

SEQ ID NO: 71616 - DNA, 25 bp, Probe Sequence
acaataggagatcacagtcttacat

SEQ ID NO: 71617 - DNA, 25 bp, Probe Sequence
tcattagatgtctacctagtgttga

SEQ ID NO: 71618 - DNA, 25 bp, Probe Sequence
ggacaataggagatcacagtcttac

SEQ ID NO: 71619 - DNA, 25 bp, Probe Sequence
gacaataggagatcacagtcttaca

SEQ ID NO: 71620 - DNA, 25 bp, Probe Sequence
ccagcttcattagatgtctacctag

SEQ ID NO: 71621 - DNA, 25 bp, Probe Sequence
cattagatgtctacctagtgttgaa

SEQ ID NO: 71622 - DNA, 25 bp, Probe Sequence
ttcattagatgtctacctagtgttg

SEQ ID NO: 71623 - DNA, 25 bp, Probe Sequence
taggagatcacagtcttacatagct

SEQ ID NO: 71624 - DNA, 25 bp, Probe Sequence
agcttcattagatgtctacctagtg

SEQ ID NO: 71625 - DNA, 25 bp, Probe Sequence
cagcttcattagatgtctacctagt

SEQ ID NO: 71626 - DNA, 25 bp, Probe Sequence
agatcacagtcttacatagctctct

SEQ ID NO: 71627 - DNA, 25 bp, Probe Sequence
ttagatgtctacctagtgttgaatc

SEQ ID NO: 71628 - DNA, 25 bp, Probe Sequence
atctcaacgtctgtaatatcatggt

SEQ ID NO: 71629 - DNA, 25 bp, Probe Sequence
gtttatccaaagacagaagacacag

SEQ ID NO: 71630 - DNA, 25 bp, Probe Sequence
cttcattagatgtctacctagtgtt

SEQ ID NO: 71631 - DNA, 25 bp, Probe Sequence
gacagtacggtataagaccataacc

SEQ ID NO: 71632 - DNA, 25 bp, Probe Sequence
tgacagtacggtataagaccataac

SEQ ID NO: 71633 - DNA, 25 bp, Probe Sequence
aattgacagtacggtataagaccat

SEQ ID NO: 71634 - DNA, 25 bp, Probe Sequence
ctgattctgatgtggttggtctagg

SEQ ID NO: 71635 - DNA, 25 bp, Probe Sequence
cctgattctgatgtggttggtctag

SEQ ID NO: 71636 - DNA, 25 bp, Probe Sequence
tagtgttgaatctttgtagcatccc

SEQ ID NO: 71637 - DNA, 25 bp, Probe Sequence
tcctgattctgatgtggttggtcta

SEQ ID NO: 71638 - DNA, 25 bp, Probe Sequence
gtgaatagactgtacttctggatgg

SEQ ID NO: 71639 - DNA, 25 bp, Probe Sequence
ggtgaatagactgtacttctggatg

SEQ ID NO: 71640 - DNA, 25 bp, Probe Sequence
tggtgaatagactgtacttctggat

SEQ ID NO: 71641 - DNA, 25 bp, Probe Sequence
atggtgaatagactgtacttctgga

SEQ ID NO: 71642 - DNA, 25 bp, Probe Sequence
tatggtgaatagactgtacttctgg

SEQ ID NO: 71643 - DNA, 25 bp, Probe Sequence
gggctcattcaaataaaggtaagtg

SEQ ID NO: 71644 - DNA, 25 bp, Probe Sequence
ggctcattcaaataaaggtaagtgc

SEQ ID NO: 71645 - DNA, 25 bp, Probe Sequence
aggatgggaagaatttgtggatatt

SEQ ID NO: 71646 - DNA, 25 bp, Probe Sequence
aaaggtgtattcatatcaggatggg

SEQ ID NO: 71647 - DNA, 25 bp, Probe Sequence
caggatgggaagaatttgtggatat

SEQ ID NO: 71648 - DNA, 25 bp, Probe Sequence
atatcaggatgggaagaatttgtgg

SEQ ID NO: 71649 - DNA, 25 bp, Probe Sequence
gtgtattcatatcaggatgggaaga

SEQ ID NO: 71650 - DNA, 25 bp, Probe Sequence
atatggtgaatagactgtacttctg

SEQ ID NO: 71651 - DNA, 25 bp, Probe Sequence
ggtgtattcatatcaggatgggaag

SEQ ID NO: 71652 - DNA, 25 bp, Probe Sequence
ggatgggaagaatttgtggatattt

SEQ ID NO: 71653 - DNA, 25 bp, Probe Sequence
aggtgtattcatatcaggatgggaa

SEQ ID NO: 71654 - DNA, 25 bp, Probe Sequence
aaggtgtattcatatcaggatggga

SEQ ID NO: 71655 - DNA, 25 bp, Probe Sequence
catatcaggatgggaagaatttgtg

SEQ ID NO: 71656 - DNA, 25 bp, Probe Sequence
tcatatcaggatgggaagaatttgt

SEQ ID NO: 71657 - DNA, 25 bp, Probe Sequence
tgtattcatatcaggatgggaagaa

SEQ ID NO: 71658 - DNA, 25 bp, Probe Sequence
tcaggatgggaagaatttgtggata

SEQ ID NO: 71659 - DNA, 25 bp, Probe Sequence
tatcaggatgggaagaatttgtgga

SEQ ID NO: 71660 - DNA, 25 bp, Probe Sequence
ttcatatcaggatgggaagaatttg

SEQ ID NO: 71661 - DNA, 25 bp, Probe Sequence
gggctccaaagtttcattataaagg

SEQ ID NO: 71662 - DNA, 25 bp, Probe Sequence
acaattctacatcaacaggaatctg

SEQ ID NO: 71663 - DNA, 25 bp, Probe Sequence
aaataagaaatcagccaggtgtagt

SEQ ID NO: 71664 - DNA, 25 bp, Probe Sequence
gaactgcttactatccatccctaaa

SEQ ID NO: 71665 - DNA, 25 bp, Probe Sequence
caattctacatcaacaggaatctga

SEQ ID NO: 71666 - DNA, 25 bp, Probe Sequence
aataagaaatcagccaggtgtagtg

SEQ ID NO: 71667 - DNA, 25 bp, Probe Sequence
tgaacaattctacatcaacaggaat

SEQ ID NO: 71668 - DNA, 25 bp, Probe Sequence
aactgcttactatccatccctaaag

SEQ ID NO: 71669 - DNA, 25 bp, Probe Sequence
aggaatctgaaatctaccaagacaa

SEQ ID NO: 71670 - DNA, 25 bp, Probe Sequence
tccatccctaaagttctcttctaag

SEQ ID NO: 71671 - DNA, 25 bp, Probe Sequence
aacaattctacatcaacaggaatct

SEQ ID NO: 71672 - DNA, 25 bp, Probe Sequence
ctatccatccctaaagttctcttct

SEQ ID NO: 71673 - DNA, 25 bp, Probe Sequence
aattctacatcaacaggaatctgaa

SEQ ID NO: 71674 - DNA, 25 bp, Probe Sequence
gaacaattctacatcaacaggaatc

SEQ ID NO: 71675 - DNA, 25 bp, Probe Sequence
tgcttactatccatccctaaagttc

SEQ ID NO: 71676 - DNA, 25 bp, Probe Sequence
ctgcttactatccatccctaaagtt

SEQ ID NO: 71677 - DNA, 25 bp, Probe Sequence
gcttactatccatccctaaagttct

SEQ ID NO: 71678 - DNA, 25 bp, Probe Sequence
ctgaaccctaagatttgtactacga

SEQ ID NO: 71679 - DNA, 25 bp, Probe Sequence
actgaaccctaagatttgtactacg

SEQ ID NO: 71680 - DNA, 25 bp, Probe Sequence
ggaatctgaaatctaccaagacaat

SEQ ID NO: 71681 - DNA, 25 bp, Probe Sequence
actatccatccctaaagttctcttc

SEQ ID NO: 71682 - DNA, 25 bp, Probe Sequence
actgcttactatccatccctaaagt

SEQ ID NO: 71683 - DNA, 25 bp, Probe Sequence
ggactgaaccctaagatttgtacta

SEQ ID NO: 71684 - DNA, 25 bp, Probe Sequence
atccatccctaaagttctcttctaa

SEQ ID NO: 71685 - DNA, 25 bp, Probe Sequence
gcactattcgggaaagagaagttaa

SEQ ID NO: 71686 - DNA, 25 bp, Probe Sequence
gacactgtgcattgcattatggaca

SEQ ID NO: 71687 - DNA, 25 bp, Probe Sequence
gcattgcattatggacagcactttg

SEQ ID NO: 71688 - DNA, 25 bp, Probe Sequence
acactgtgcattgcattatggacag

SEQ ID NO: 71689 - DNA, 25 bp, Probe Sequence
tgcattgcattatggacagcacttt

SEQ ID NO: 71690 - DNA, 25 bp, Probe Sequence
cgacactgtgcattgcattatggac

SEQ ID NO: 71691 - DNA, 25 bp, Probe Sequence
cttacacaggaaaggatgtgctgac

SEQ ID NO: 71692 - DNA, 25 bp, Probe Sequence
tacacaggaaaggatgtgctgactt

SEQ ID NO: 71693 - DNA, 25 bp, Probe Sequence
ttacacaggaaaggatgtgctgact

SEQ ID NO: 71694 - DNA, 25 bp, Probe Sequence
ccttacacaggaaaggatgtgctga

SEQ ID NO: 71695 - DNA, 25 bp, Probe Sequence
acacaggaaaggatgtgctgacttt

SEQ ID NO: 71696 - DNA, 25 bp, Probe Sequence
cacaggaaaggatgtgctgactttt

SEQ ID NO: 71697 - DNA, 25 bp, Probe Sequence
ggagccttacacaggaaaggatgtg

SEQ ID NO: 71698 - DNA, 25 bp, Probe Sequence
ttctcctgacactaccaagttactt

SEQ ID NO: 71699 - DNA, 25 bp, Probe Sequence
agggatttggttctcatcaacataa

SEQ ID NO: 71700 - DNA, 25 bp, Probe Sequence
gggatttggttctcatcaacataaa

SEQ ID NO: 71701 - DNA, 25 bp, Probe Sequence
cagggatttggttctcatcaacata

SEQ ID NO: 71702 - DNA, 25 bp, Probe Sequence
tcatctcttgagccagaaatctaag

SEQ ID NO: 71703 - DNA, 25 bp, Probe Sequence
tttctcctgacactaccaagttact

SEQ ID NO: 71704 - DNA, 25 bp, Probe Sequence
catctcttgagccagaaatctaagc

SEQ ID NO: 71705 - DNA, 25 bp, Probe Sequence
aaactcagggatttggttctcatca

SEQ ID NO: 71706 - DNA, 25 bp, Probe Sequence
tcagggatttggttctcatcaacat

SEQ ID NO: 71707 - DNA, 25 bp, Probe Sequence
aactcagggatttggttctcatcaa

SEQ ID NO: 71708 - DNA, 25 bp, Probe Sequence
tactcaagggaaactacagccaaac

SEQ ID NO: 71709 - DNA, 25 bp, Probe Sequence
gaaagctcataaccctcatctcttg

SEQ ID NO: 71710 - DNA, 25 bp, Probe Sequence
acaatcttgggaaacattgaacaaa

SEQ ID NO: 71711 - DNA, 25 bp, Probe Sequence
aacaatcttgggaaacattgaacaa

SEQ ID NO: 71712 - DNA, 25 bp, Probe Sequence
aaacaatcttgggaaacattgaaca

SEQ ID NO: 71713 - DNA, 25 bp, Probe Sequence
ctcagggatttggttctcatcaaca

SEQ ID NO: 71714 - DNA, 25 bp, Probe Sequence
actcagggatttggttctcatcaac

SEQ ID NO: 71715 - DNA, 25 bp, Probe Sequence
gtactcaagggaaactacagccaaa

SEQ ID NO: 71716 - DNA, 25 bp, Probe Sequence
aaagctcataaccctcatctcttga

SEQ ID NO: 71717 - DNA, 25 bp, Probe Sequence
ggaaagctcataaccctcatctctt

SEQ ID NO: 71718 - DNA, 25 bp, Probe Sequence
atcttgggaaacattgaacaaaaca

SEQ ID NO: 71719 - DNA, 25 bp, Probe Sequence
ggaaacattgaacaaaacaacacag

SEQ ID NO: 71720 - DNA, 25 bp, Probe Sequence
cttgggaaacattgaacaaaacaac

SEQ ID NO: 71721 - DNA, 25 bp, Probe Sequence
tcttgggaaacattgaacaaaacaa

SEQ ID NO: 71722 - DNA, 25 bp, Probe Sequence
cttcatcagtgacgaggtatatctt

SEQ ID NO: 71723 - DNA, 25 bp, Probe Sequence
tcttcatcagtgacgaggtatatct

SEQ ID NO: 71724 - DNA, 25 bp, Probe Sequence
atcttcatcagtgacgaggtatatc

SEQ ID NO: 71725 - DNA, 25 bp, Probe Sequence
gtatatcttcatcagtgacgaggta

SEQ ID NO: 71726 - DNA, 25 bp, Probe Sequence
ggtatatcttcatcagtgacgaggt

SEQ ID NO: 71727 - DNA, 25 bp, Probe Sequence
tggtatatcttcatcagtgacgagg

SEQ ID NO: 71728 - DNA, 25 bp, Probe Sequence
ctggtatatcttcatcagtgacgag

SEQ ID NO: 71729 - DNA, 25 bp, Probe Sequence
tatcttcatcagtgacgaggtatat

SEQ ID NO: 71730 - DNA, 25 bp, Probe Sequence
atatcttcatcagtgacgaggtata

SEQ ID NO: 71731 - DNA, 25 bp, Probe Sequence
tatatcttcatcagtgacgaggtat

SEQ ID NO: 71732 - DNA, 25 bp, Probe Sequence
tcagtgactggtatatcttcatcag

SEQ ID NO: 71733 - DNA, 25 bp, Probe Sequence
cacatcagtgactggtatatcttca

SEQ ID NO: 71734 - DNA, 25 bp, Probe Sequence
acatcagtgactggtatatcttcat

SEQ ID NO: 71735 - DNA, 25 bp, Probe Sequence
atcagtgactggtatatcttcatca

SEQ ID NO: 71736 - DNA, 25 bp, Probe Sequence
catcagtgactggtatatcttcatc

SEQ ID NO: 71737 - DNA, 25 bp, Probe Sequence
tcatcagtgacgaggtatatctttc

SEQ ID NO: 71738 - DNA, 25 bp, Probe Sequence
ttcatcagtgacgaggtatatcttt

SEQ ID NO: 71739 - DNA, 25 bp, Probe Sequence
tgactggtatatcttcatcagtgac

SEQ ID NO: 71740 - DNA, 25 bp, Probe Sequence
gtgactggtatatcttcatcagtga

SEQ ID NO: 71741 - DNA, 25 bp, Probe Sequence
agtgactggtatatcttcatcagtg

SEQ ID NO: 71742 - DNA, 25 bp, Probe Sequence
cagtgactggtatatcttcatcagt

SEQ ID NO: 71743 - DNA, 25 bp, Probe Sequence
tcacatcagtgactggtatatcttc

SEQ ID NO: 71744 - DNA, 25 bp, Probe Sequence
gactggtatatcttcatcagtgacg

SEQ ID NO: 71745 - DNA, 25 bp, Probe Sequence
actggtatatcttcatcagtgacga

SEQ ID NO: 71746 - DNA, 25 bp, Probe Sequence
ctaagcagtcataacgaagtgtaac

SEQ ID NO: 71747 - DNA, 25 bp, Probe Sequence
tctaagcagtcataacgaagtgtaa

SEQ ID NO: 71748 - DNA, 25 bp, Probe Sequence
attaccataccatccaacaattcca

SEQ ID NO: 71749 - DNA, 25 bp, Probe Sequence
ttctaagcagtcataacgaagtgta

SEQ ID NO: 71750 - DNA, 25 bp, Probe Sequence
gtgaattaccataccatccaacaat

SEQ ID NO: 71751 - DNA, 25 bp, Probe Sequence
ttaccataccatccaacaattccac

SEQ ID NO: 71752 - DNA, 25 bp, Probe Sequence
aagcagtcataacgaagtgtaacta

SEQ ID NO: 71753 - DNA, 25 bp, Probe Sequence
taagcagtcataacgaagtgtaact

SEQ ID NO: 71754 - DNA, 25 bp, Probe Sequence
agcagtcataacgaagtgtaactac

SEQ ID NO: 71755 - DNA, 25 bp, Probe Sequence
gcaagtgtccattgatagatgaata

SEQ ID NO: 71756 - DNA, 25 bp, Probe Sequence
taccataccatccaacaattccact

SEQ ID NO: 71757 - DNA, 25 bp, Probe Sequence
tgtgaattaccataccatccaacaa

SEQ ID NO: 71758 - DNA, 25 bp, Probe Sequence
cataccatccaacaattccacttcc

SEQ ID NO: 71759 - DNA, 25 bp, Probe Sequence
ccataccatccaacaattccacttc

SEQ ID NO: 71760 - DNA, 25 bp, Probe Sequence
aattaccataccatccaacaattcc

SEQ ID NO: 71761 - DNA, 25 bp, Probe Sequence
ccatgttcatagcagcattattcat

SEQ ID NO: 71762 - DNA, 25 bp, Probe Sequence
gtgtgaattaccataccatccaaca

SEQ ID NO: 71763 - DNA, 25 bp, Probe Sequence
tgaattaccataccatccaacaatt

SEQ ID NO: 71764 - DNA, 25 bp, Probe Sequence
gcagtcataacgaagtgtaactaca

SEQ ID NO: 71765 - DNA, 25 bp, Probe Sequence
cagtcataacgaagtgtaactacaa

SEQ ID NO: 71766 - DNA, 25 bp, Probe Sequence
accataccatccaacaattccactt

SEQ ID NO: 71767 - DNA, 25 bp, Probe Sequence
ttaagtgacttgctgtacgtgatat

SEQ ID NO: 71768 - DNA, 25 bp, Probe Sequence
attaagtgacttgctgtacgtgata

SEQ ID NO: 71769 - DNA, 25 bp, Probe Sequence
agctacattaccacattgaagatgc

SEQ ID NO: 71770 - DNA, 25 bp, Probe Sequence
ctaaagaagtgagatgagaagggaa

SEQ ID NO: 71771 - DNA, 25 bp, Probe Sequence
acagtttaaggaataagggcaagta

SEQ ID NO: 71772 - DNA, 25 bp, Probe Sequence
taaagaagtgagatgagaagggaaa

SEQ ID NO: 71773 - DNA, 25 bp, Probe Sequence
atctcacagtttaaggaataagggc

SEQ ID NO: 71774 - DNA, 25 bp, Probe Sequence
catctcacagtttaaggaataaggg

SEQ ID NO: 71775 - DNA, 25 bp, Probe Sequence
cagtttaaggaataagggcaagtaa

SEQ ID NO: 71776 - DNA, 25 bp, Probe Sequence
tcacagtttaaggaataagggcaag

SEQ ID NO: 71777 - DNA, 25 bp, Probe Sequence
ctcacagtttaaggaataagggcaa

SEQ ID NO: 71778 - DNA, 25 bp, Probe Sequence
cacagtttaaggaataagggcaagt

SEQ ID NO: 71779 - DNA, 25 bp, Probe Sequence
aataagggcaagtaattcacaccag

SEQ ID NO: 71780 - DNA, 25 bp, Probe Sequence
acatctcacagtttaaggaataagg

SEQ ID NO: 71781 - DNA, 25 bp, Probe Sequence
actaaagaagtgagatgagaaggga

SEQ ID NO: 71782 - DNA, 25 bp, Probe Sequence
tctcacagtttaaggaataagggca

SEQ ID NO: 71783 - DNA, 25 bp, Probe Sequence
agtttaaggaataagggcaagtaat

SEQ ID NO: 71784 - DNA, 25 bp, Probe Sequence
acttgaaattggaaatgattgagaa

SEQ ID NO: 71785 - DNA, 25 bp, Probe Sequence
taactaagaatgggcgtccaaatat

SEQ ID NO: 71786 - DNA, 25 bp, Probe Sequence
ttaactaagaatgggcgtccaaata

SEQ ID NO: 71787 - DNA, 25 bp, Probe Sequence
aaggaataagggcaagtaattcaca

SEQ ID NO: 71788 - DNA, 25 bp, Probe Sequence
gtttaaggaataagggcaagtaatt

SEQ ID NO: 71789 - DNA, 25 bp, Probe Sequence
aggaataagggcaagtaattcacac

SEQ ID NO: 71790 - DNA, 25 bp, Probe Sequence
gaatgggcgtccaaatatggttata

SEQ ID NO: 71791 - DNA, 25 bp, Probe Sequence
ataagggcaagtaattcacaccagg

SEQ ID NO: 71792 - DNA, 25 bp, Probe Sequence
taaggaataagggcaagtaattcac

SEQ ID NO: 71793 - DNA, 25 bp, Probe Sequence
gaataagggcaagtaattcacacca

SEQ ID NO: 71794 - DNA, 25 bp, Probe Sequence
gaacaatgttcacacaggaaacagc

SEQ ID NO: 71795 - DNA, 25 bp, Probe Sequence
taatggtctaggttaggatgcttgt

SEQ ID NO: 71796 - DNA, 25 bp, Probe Sequence
ctaatggtctaggttaggatgcttg

SEQ ID NO: 71797 - DNA, 25 bp, Probe Sequence
actaatggtctaggttaggatgctt

SEQ ID NO: 71798 - DNA, 25 bp, Probe Sequence
aactaatggtctaggttaggatgct

SEQ ID NO: 71799 - DNA, 25 bp, Probe Sequence
caactaatggtctaggttaggatgc

SEQ ID NO: 71800 - DNA, 25 bp, Probe Sequence
aatggtctaggttaggatgcttgtc

SEQ ID NO: 71801 - DNA, 25 bp, Probe Sequence
ccaactaatggtctaggttaggatg

SEQ ID NO: 71802 - DNA, 25 bp, Probe Sequence
cagtaagagagagagagaaacagtg

SEQ ID NO: 71803 - DNA, 25 bp, Probe Sequence
ataatggtctcaggcaaactatcac

SEQ ID NO: 71804 - DNA, 25 bp, Probe Sequence
agactgctgggaagattaaataagg

SEQ ID NO: 71805 - DNA, 25 bp, Probe Sequence
cataatggtctcaggcaaactatca

SEQ ID NO: 71806 - DNA, 25 bp, Probe Sequence
acataatggtctcaggcaaactatc

SEQ ID NO: 71807 - DNA, 25 bp, Probe Sequence
agtaagagagagagagaaacagtgt

SEQ ID NO: 71808 - DNA, 25 bp, Probe Sequence
aaaggcagtaagagagagagagaaa

SEQ ID NO: 71809 - DNA, 25 bp, Probe Sequence
atggtctaggttaggatgcttgtct

SEQ ID NO: 71810 - DNA, 25 bp, Probe Sequence
gctgggaagattaaataaggcaata

SEQ ID NO: 71811 - DNA, 25 bp, Probe Sequence
aagactgctgggaagattaaataag

SEQ ID NO: 71812 - DNA, 25 bp, Probe Sequence
tggtctaggttaggatgcttgtctt

SEQ ID NO: 71813 - DNA, 25 bp, Probe Sequence
gcagtaagagagagagagaaacagt

SEQ ID NO: 71814 - DNA, 25 bp, Probe Sequence
aaggcagtaagagagagagagaaac

SEQ ID NO: 71815 - DNA, 25 bp, Probe Sequence
aaagactgctgggaagattaaataa

SEQ ID NO: 71816 - DNA, 25 bp, Probe Sequence
taatggtctcaggcaaactatcaca

SEQ ID NO: 71817 - DNA, 25 bp, Probe Sequence
gactgctgggaagattaaataaggc

SEQ ID NO: 71818 - DNA, 25 bp, Probe Sequence
tgggaagattaaataaggcaataca

SEQ ID NO: 71819 - DNA, 25 bp, Probe Sequence
tccacactaagttagacaccaatat

SEQ ID NO: 71820 - DNA, 25 bp, Probe Sequence
aggaccactcaataagtaatgtaga

SEQ ID NO: 71821 - DNA, 25 bp, Probe Sequence
gtccacactaagttagacaccaata

SEQ ID NO: 71822 - DNA, 25 bp, Probe Sequence
gttagacaccaatatagtgacctca

SEQ ID NO: 71823 - DNA, 25 bp, Probe Sequence
agttagacaccaatatagtgacctc

SEQ ID NO: 71824 - DNA, 25 bp, Probe Sequence
ccacactaagttagacaccaatata

SEQ ID NO: 71825 - DNA, 25 bp, Probe Sequence
ggaccactcaataagtaatgtagaa

SEQ ID NO: 71826 - DNA, 25 bp, Probe Sequence
aagttagacaccaatatagtgacct

SEQ ID NO: 71827 - DNA, 25 bp, Probe Sequence
aaggaccactcaataagtaatgtag

SEQ ID NO: 71828 - DNA, 25 bp, Probe Sequence
ttagacaccaatatagtgacctcat

SEQ ID NO: 71829 - DNA, 25 bp, Probe Sequence
tagacaccaatatagtgacctcatg

SEQ ID NO: 71830 - DNA, 25 bp, Probe Sequence
caccaatatagtgacctcatgtgag

SEQ ID NO: 71831 - DNA, 25 bp, Probe Sequence
gacaccaatatagtgacctcatgtg

SEQ ID NO: 71832 - DNA, 25 bp, Probe Sequence
agacaccaatatagtgacctcatgt

SEQ ID NO: 71833 - DNA, 25 bp, Probe Sequence
ccctgctgattatgagaactgaaat

SEQ ID NO: 71834 - DNA, 25 bp, Probe Sequence
atacttcccaaattatgccacctaa

SEQ ID NO: 71835 - DNA, 25 bp, Probe Sequence
ttatacttcccaaattatgccacct

SEQ ID NO: 71836 - DNA, 25 bp, Probe Sequence
attaggtgtccacactaagttagac

SEQ ID NO: 71837 - DNA, 25 bp, Probe Sequence
acaccaatatagtgacctcatgtga

SEQ ID NO: 71838 - DNA, 25 bp, Probe Sequence
cctgctgattatgagaactgaaatt

SEQ ID NO: 71839 - DNA, 25 bp, Probe Sequence
tttatacttcccaaattatgccacc

SEQ ID NO: 71840 - DNA, 25 bp, Probe Sequence
ataaggaccactcaataagtaatgt

SEQ ID NO: 71841 - DNA, 25 bp, Probe Sequence
caatatagtgacctcatgtgagctg

SEQ ID NO: 71842 - DNA, 25 bp, Probe Sequence
tatacttcccaaattatgccaccta

SEQ ID NO: 71843 - DNA, 25 bp, Probe Sequence
gtagaatgagagaagcaatagaggt

SEQ ID NO: 71844 - DNA, 25 bp, Probe Sequence
tgtagaatgagagaagcaatagagg

SEQ ID NO: 71845 - DNA, 25 bp, Probe Sequence
atgagagaagcaatagaggttaagc

SEQ ID NO: 71846 - DNA, 25 bp, Probe Sequence
agaatgagagaagcaatagaggtta

SEQ ID NO: 71847 - DNA, 25 bp, Probe Sequence
tagaatgagagaagcaatagaggtt

SEQ ID NO: 71848 - DNA, 25 bp, Probe Sequence
aatgagagaagcaatagaggttaag

SEQ ID NO: 71849 - DNA, 25 bp, Probe Sequence
gaatgagagaagcaatagaggttaa

SEQ ID NO: 71850 - DNA, 25 bp, Probe Sequence
atgtagaatgagagaagcaatagag

SEQ ID NO: 71851 - DNA, 25 bp, Probe Sequence
gccatgtagaatgagagaagcaata

SEQ ID NO: 71852 - DNA, 25 bp, Probe Sequence
tatcactgcttatctctgccatgta

SEQ ID NO: 71853 - DNA, 25 bp, Probe Sequence
agttatcactgcttatctctgccat

SEQ ID NO: 71854 - DNA, 25 bp, Probe Sequence
ccatgtagaatgagagaagcaatag

SEQ ID NO: 71855 - DNA, 25 bp, Probe Sequence
ctactgattgctgctattgacagaa

SEQ ID NO: 71856 - DNA, 25 bp, Probe Sequence
gttatcactgcttatctctgccatg

SEQ ID NO: 71857 - DNA, 25 bp, Probe Sequence
ctgcttatctctgccatgtagaatg

SEQ ID NO: 71858 - DNA, 25 bp, Probe Sequence
ttatcactgcttatctctgccatgt

SEQ ID NO: 71859 - DNA, 25 bp, Probe Sequence
gcttatctctgccatgtagaatgag

SEQ ID NO: 71860 - DNA, 25 bp, Probe Sequence
tgcttatctctgccatgtagaatga

SEQ ID NO: 71861 - DNA, 25 bp, Probe Sequence
actgcttatctctgccatgtagaat

SEQ ID NO: 71862 - DNA, 25 bp, Probe Sequence
catgtagaatgagagaagcaataga

SEQ ID NO: 71863 - DNA, 25 bp, Probe Sequence
cgcaggatttctcattactaacaac

SEQ ID NO: 71864 - DNA, 25 bp, Probe Sequence
tcgcaggatttctcattactaacaa

SEQ ID NO: 71865 - DNA, 25 bp, Probe Sequence
ttcgcaggatttctcattactaaca

SEQ ID NO: 71866 - DNA, 25 bp, Probe Sequence
atcactgcttatctctgccatgtag

SEQ ID NO: 71867 - DNA, 25 bp, Probe Sequence
gatgaccttatggactgtctacttg

SEQ ID NO: 71868 - DNA, 25 bp, Probe Sequence
agatgaccttatggactgtctactt

SEQ ID NO: 71869 - DNA, 25 bp, Probe Sequence
tagatgaccttatggactgtctact

SEQ ID NO: 71870 - DNA, 25 bp, Probe Sequence
agtagatgaccttatggactgtcta

SEQ ID NO: 71871 - DNA, 25 bp, Probe Sequence
atgaccttatggactgtctacttgg

SEQ ID NO: 71872 - DNA, 25 bp, Probe Sequence
tgcagtacatcaaggtatcatatcc

SEQ ID NO: 71873 - DNA, 25 bp, Probe Sequence
attatgcccagtagatgaccttatg

SEQ ID NO: 71874 - DNA, 25 bp, Probe Sequence
cattatgcccagtagatgaccttat

SEQ ID NO: 71875 - DNA, 25 bp, Probe Sequence
acatcaaggtatcatatcccaagta

SEQ ID NO: 71876 - DNA, 25 bp, Probe Sequence
tacatcaaggtatcatatcccaagt

SEQ ID NO: 71877 - DNA, 25 bp, Probe Sequence
atcaaggtatcatatcccaagtacg

SEQ ID NO: 71878 - DNA, 25 bp, Probe Sequence
cagtacatcaaggtatcatatccca

SEQ ID NO: 71879 - DNA, 25 bp, Probe Sequence
gcagtacatcaaggtatcatatccc

SEQ ID NO: 71880 - DNA, 25 bp, Probe Sequence
ttgcagtacatcaaggtatcatatc

SEQ ID NO: 71881 - DNA, 25 bp, Probe Sequence
gtgattgacctccatagaagacacc

SEQ ID NO: 71882 - DNA, 25 bp, Probe Sequence
agtacatcaaggtatcatatcccaa

SEQ ID NO: 71883 - DNA, 25 bp, Probe Sequence
catcaaggtatcatatcccaagtac

SEQ ID NO: 71884 - DNA, 25 bp, Probe Sequence
gtacatcaaggtatcatatcccaag

SEQ ID NO: 71885 - DNA, 25 bp, Probe Sequence
ctggtgattgacctccatagaagac

SEQ ID NO: 71886 - DNA, 25 bp, Probe Sequence
ggtgattgacctccatagaagacac

SEQ ID NO: 71887 - DNA, 25 bp, Probe Sequence
ctgtctacttggcagtacatctacg

SEQ ID NO: 71888 - DNA, 25 bp, Probe Sequence
tgattgacctccatagaagacaccg

SEQ ID NO: 71889 - DNA, 25 bp, Probe Sequence
tcaaggtatcatatcccaagtacgc

SEQ ID NO: 71890 - DNA, 25 bp, Probe Sequence
tggtgattgacctccatagaagaca

SEQ ID NO: 71891 - DNA, 25 bp, Probe Sequence
aatcagatgtagagaggatgtgaac

SEQ ID NO: 71892 - DNA, 25 bp, Probe Sequence
atcagatgtagagaggatgtgaaca

SEQ ID NO: 71893 - DNA, 25 bp, Probe Sequence
ataaatgactgaagtaggatgagcc

SEQ ID NO: 71894 - DNA, 25 bp, Probe Sequence
tgaaatcagatgtagagaggatgtg

SEQ ID NO: 71895 - DNA, 25 bp, Probe Sequence
gtgaaatcagatgtagagaggatgt

SEQ ID NO: 71896 - DNA, 25 bp, Probe Sequence
tgtgaaatcagatgtagagaggatg

SEQ ID NO: 71897 - DNA, 25 bp, Probe Sequence
gataaatgactgaagtaggatgagc

SEQ ID NO: 71898 - DNA, 25 bp, Probe Sequence
tgtggtgtagaaagataaatgactg

SEQ ID NO: 71899 - DNA, 25 bp, Probe Sequence
gtggtgtagaaagataaatgactga

SEQ ID NO: 71900 - DNA, 25 bp, Probe Sequence
ttaagcactgaagatcaagcaagga

SEQ ID NO: 71901 - DNA, 25 bp, Probe Sequence
gaaatcagatgtagagaggatgtga

SEQ ID NO: 71902 - DNA, 25 bp, Probe Sequence
aaatcagatgtagagaggatgtgaa

SEQ ID NO: 71903 - DNA, 25 bp, Probe Sequence
taaatgactgaagtaggatgagccc

SEQ ID NO: 71904 - DNA, 25 bp, Probe Sequence
tggtgtagaaagataaatgactgaa

SEQ ID NO: 71905 - DNA, 25 bp, Probe Sequence
atgtggtgtagaaagataaatgact

SEQ ID NO: 71906 - DNA, 25 bp, Probe Sequence
ctgtgaaatcagatgtagagaggat

SEQ ID NO: 71907 - DNA, 25 bp, Probe Sequence
agtgttctctaagcgttctcacaag

SEQ ID NO: 71908 - DNA, 25 bp, Probe Sequence
gtgtgatggagcagtgttctctaag

SEQ ID NO: 71909 - DNA, 25 bp, Probe Sequence
ctgctgtgaaatcagatgtagagag

SEQ ID NO: 71910 - DNA, 25 bp, Probe Sequence
tcagatgtagagaggatgtgaacat

SEQ ID NO: 71911 - DNA, 25 bp, Probe Sequence
taagcactgaagatcaagcaaggac

SEQ ID NO: 71912 - DNA, 25 bp, Probe Sequence
cagtgttctctaagcgttctcacaa

SEQ ID NO: 71913 - DNA, 25 bp, Probe Sequence
agataaatgactgaagtaggatgag

SEQ ID NO: 71914 - DNA, 25 bp, Probe Sequence
ggtgtagaaagataaatgactgaag

SEQ ID NO: 71915 - DNA, 25 bp, Probe Sequence
tataatccagtaggagagacctgtc

SEQ ID NO: 71916 - DNA, 25 bp, Probe Sequence
ttataatccagtaggagagacctgt

SEQ ID NO: 71917 - DNA, 25 bp, Probe Sequence
agaaccatgtattaaccacacttaa

SEQ ID NO: 71918 - DNA, 25 bp, Probe Sequence
aagaaccatgtattaaccacactta

SEQ ID NO: 71919 - DNA, 25 bp, Probe Sequence
ataatccagtaggagagacctgtcc

SEQ ID NO: 71920 - DNA, 25 bp, Probe Sequence
ccaaagaaccatgtattaaccacac

SEQ ID NO: 71921 - DNA, 25 bp, Probe Sequence
caaagaaccatgtattaaccacact

SEQ ID NO: 71922 - DNA, 25 bp, Probe Sequence
tgataaatatatccaggtgtctccc

SEQ ID NO: 71923 - DNA, 25 bp, Probe Sequence
aaagaaccatgtattaaccacactt

SEQ ID NO: 71924 - DNA, 25 bp, Probe Sequence
cccaaagaaccatgtattaaccaca

SEQ ID NO: 71925 - DNA, 25 bp, Probe Sequence
gtgataaatatatccaggtgtctcc

SEQ ID NO: 71926 - DNA, 25 bp, Probe Sequence
ggtgataaatatatccaggtgtctc

SEQ ID NO: 71927 - DNA, 25 bp, Probe Sequence
gtgatactaaagagatattgtggtg

SEQ ID NO: 71928 - DNA, 25 bp, Probe Sequence
accatgtattaaccacacttaaact

SEQ ID NO: 71929 - DNA, 25 bp, Probe Sequence
tgtggtgataaatatatccaggtgt

SEQ ID NO: 71930 - DNA, 25 bp, Probe Sequence
tgatactaaagagatattgtggtga

SEQ ID NO: 71931 - DNA, 25 bp, Probe Sequence
ggcagctctatgatttaagtctgta

SEQ ID NO: 71932 - DNA, 25 bp, Probe Sequence
gtggtgataaatatatccaggtgtc

SEQ ID NO: 71933 - DNA, 25 bp, Probe Sequence
tggtgataaatatatccaggtgtct

SEQ ID NO: 71934 - DNA, 25 bp, Probe Sequence
tttataatccagtaggagagacctg

SEQ ID NO: 71935 - DNA, 25 bp, Probe Sequence
ttgtggtgataaatatatccaggtg

SEQ ID NO: 71936 - DNA, 25 bp, Probe Sequence
gcagctctatgatttaagtctgtaa

SEQ ID NO: 71937 - DNA, 25 bp, Probe Sequence
tgataaaagcctctggtagcaataa

SEQ ID NO: 71938 - DNA, 25 bp, Probe Sequence
atgataaaagcctctggtagcaata

SEQ ID NO: 71939 - DNA, 25 bp, Probe Sequence
tctgagataggatgtaactctggtt

SEQ ID NO: 71940 - DNA, 25 bp, Probe Sequence
ctctgagataggatgtaactctggt

SEQ ID NO: 71941 - DNA, 25 bp, Probe Sequence
catgttgttctctgagataggatgt

SEQ ID NO: 71942 - DNA, 25 bp, Probe Sequence
ccatgttgttctctgagataggatg

SEQ ID NO: 71943 - DNA, 25 bp, Probe Sequence
tgttgttctctgagataggatgtaa

SEQ ID NO: 71944 - DNA, 25 bp, Probe Sequence
tctctgagataggatgtaactctgg

SEQ ID NO: 71945 - DNA, 25 bp, Probe Sequence
ttgttctctgagataggatgtaact

SEQ ID NO: 71946 - DNA, 25 bp, Probe Sequence
gttgttctctgagataggatgtaac

SEQ ID NO: 71947 - DNA, 25 bp, Probe Sequence
atgttgttctctgagataggatgta

SEQ ID NO: 71948 - DNA, 25 bp, Probe Sequence
tgttctctgagataggatgtaactc

SEQ ID NO: 71949 - DNA, 25 bp, Probe Sequence
ttctctgagataggatgtaactctg

SEQ ID NO: 71950 - DNA, 25 bp, Probe Sequence
gttctctgagataggatgtaactct

SEQ ID NO: 71951 - DNA, 25 bp, Probe Sequence
ttaatagcttggagacatgagacaa

SEQ ID NO: 71952 - DNA, 25 bp, Probe Sequence
taatagcttggagacatgagacaat

SEQ ID NO: 71953 - DNA, 25 bp, Probe Sequence
aatagcttggagacatgagacaatc

SEQ ID NO: 71954 - DNA, 25 bp, Probe Sequence
actctggtttcccttatatcttgac

SEQ ID NO: 71955 - DNA, 25 bp, Probe Sequence
gccatgttgttctctgagataggat

SEQ ID NO: 71956 - DNA, 25 bp, Probe Sequence
atagcttggagacatgagacaatct

SEQ ID NO: 71957 - DNA, 25 bp, Probe Sequence
aactctggtttcccttatatcttga

SEQ ID NO: 71958 - DNA, 25 bp, Probe Sequence
tgagataggatgtaactctggtttc

SEQ ID NO: 71959 - DNA, 25 bp, Probe Sequence
ctgagataggatgtaactctggttt

SEQ ID NO: 71960 - DNA, 25 bp, Probe Sequence
tgtaactctggtttcccttatatct

SEQ ID NO: 71961 - DNA, 25 bp, Probe Sequence
aaatcacctaaagcaactggatctc

SEQ ID NO: 71962 - DNA, 25 bp, Probe Sequence
tagcttggagacatgagacaatctg

SEQ ID NO: 71963 - DNA, 25 bp, Probe Sequence
aatgtcatctcaagtcaagtcactg

SEQ ID NO: 71964 - DNA, 25 bp, Probe Sequence
tggatatagtataagcagtgtctgt

SEQ ID NO: 71965 - DNA, 25 bp, Probe Sequence
accatgcttcacaatgtaagttata

SEQ ID NO: 71966 - DNA, 25 bp, Probe Sequence
taccatgcttcacaatgtaagttat

SEQ ID NO: 71967 - DNA, 25 bp, Probe Sequence
ggatatagtataagcagtgtctgtg

SEQ ID NO: 71968 - DNA, 25 bp, Probe Sequence
atgcttcacaatgtaagttatatgg

SEQ ID NO: 71969 - DNA, 25 bp, Probe Sequence
atgtcatctcaagtcaagtcactgg

SEQ ID NO: 71970 - DNA, 25 bp, Probe Sequence
attaccatgcttcacaatgtaagtt

SEQ ID NO: 71971 - DNA, 25 bp, Probe Sequence
aattaccatgcttcacaatgtaagt

SEQ ID NO: 71972 - DNA, 25 bp, Probe Sequence
gtggttcaacaaagaaacaaagatg

SEQ ID NO: 71973 - DNA, 25 bp, Probe Sequence
gatatagtataagcagtgtctgtgt

SEQ ID NO: 71974 - DNA, 25 bp, Probe Sequence
ggtggttcaacaaagaaacaaagat

SEQ ID NO: 71975 - DNA, 25 bp, Probe Sequence
ttggatatagtataagcagtgtctg

SEQ ID NO: 71976 - DNA, 25 bp, Probe Sequence
gcattgtatatgtgaagcaaactct

SEQ ID NO: 71977 - DNA, 25 bp, Probe Sequence
agcattgtatatgtgaagcaaactc

SEQ ID NO: 71978 - DNA, 25 bp, Probe Sequence
cagcattgtatatgtgaagcaaact

SEQ ID NO: 71979 - DNA, 25 bp, Probe Sequence
ttaccatgcttcacaatgtaagtta

SEQ ID NO: 71980 - DNA, 25 bp, Probe Sequence
tgcttcacaatgtaagttatatggg

SEQ ID NO: 71981 - DNA, 25 bp, Probe Sequence
aaatgtcatctcaagtcaagtcact

SEQ ID NO: 71982 - DNA, 25 bp, Probe Sequence
ttagattgctagattgctaaggagc

SEQ ID NO: 71983 - DNA, 25 bp, Probe Sequence
ccatgcttcacaatgtaagttatat

SEQ ID NO: 71984 - DNA, 25 bp, Probe Sequence
aatgtgtttagattgctagattgct

SEQ ID NO: 71985 - DNA, 25 bp, Probe Sequence
ttaaagtctcagtttcttgcttggg

SEQ ID NO: 71986 - DNA, 25 bp, Probe Sequence
catctcaagtcaagtcactggtctg

SEQ ID NO: 71987 - DNA, 25 bp, Probe Sequence
agtgactgattagaatggaagtgaa

SEQ ID NO: 71988 - DNA, 25 bp, Probe Sequence
tgactgattagaatggaagtgaaga

SEQ ID NO: 71989 - DNA, 25 bp, Probe Sequence
gtgactgattagaatggaagtgaag

SEQ ID NO: 71990 - DNA, 25 bp, Probe Sequence
gactgattagaatggaagtgaagaa

SEQ ID NO: 71991 - DNA, 25 bp, Probe Sequence
ggaatgtctgcctgatgtagtctag

SEQ ID NO: 71992 - DNA, 25 bp, Probe Sequence
actgattagaatggaagtgaagaat

SEQ ID NO: 71993 - DNA, 25 bp, Probe Sequence
cagtgactgattagaatggaagtga

SEQ ID NO: 71994 - DNA, 25 bp, Probe Sequence
tatggtgaaactccctctctactaa

SEQ ID NO: 71995 - DNA, 25 bp, Probe Sequence
atatggtgaaactccctctctacta

SEQ ID NO: 71996 - DNA, 25 bp, Probe Sequence
aatatggtgaaactccctctctact

SEQ ID NO: 71997 - DNA, 25 bp, Probe Sequence
caatatggtgaaactccctctctac

SEQ ID NO: 71998 - DNA, 25 bp, Probe Sequence
atggtgaaactccctctctactaaa

SEQ ID NO: 71999 - DNA, 25 bp, Probe Sequence
ctgattagaatggaagtgaagaatt

SEQ ID NO: 72000 - DNA, 25 bp, Probe Sequence
gtggagaagtatatggtcaaacatt

SEQ ID NO: 72001 - DNA, 25 bp, Probe Sequence
ccagtgactgattagaatggaagtg

SEQ ID NO: 72002 - DNA, 25 bp, Probe Sequence
gcaatatggtgaaactccctctcta

SEQ ID NO: 72003 - DNA, 25 bp, Probe Sequence
agtatctgtgtatctgtgataggga

SEQ ID NO: 72004 - DNA, 25 bp, Probe Sequence
tgtggagaagtatatggtcaaacat

SEQ ID NO: 72005 - DNA, 25 bp, Probe Sequence
tgctataacgaatagggttctaaca

SEQ ID NO: 72006 - DNA, 25 bp, Probe Sequence
tggagaagtatatggtcaaacattt

SEQ ID NO: 72007 - DNA, 25 bp, Probe Sequence
tatctgtgtatctgtgatagggaac

SEQ ID NO: 72008 - DNA, 25 bp, Probe Sequence
gtatctgtgtatctgtgatagggaa

SEQ ID NO: 72009 - DNA, 25 bp, Probe Sequence
aagtatctgtgtatctgtgataggg

SEQ ID NO: 72010 - DNA, 25 bp, Probe Sequence
ctgatgtagtctagaatcctgtgaa

SEQ ID NO: 72011 - DNA, 25 bp, Probe Sequence
gaggaagaaggagaggaatactaat

SEQ ID NO: 72012 - DNA, 25 bp, Probe Sequence
aggaagaaggagaggaatactaatt

SEQ ID NO: 72013 - DNA, 25 bp, Probe Sequence
ggaagaaggagaggaatactaatta

SEQ ID NO: 72014 - DNA, 25 bp, Probe Sequence
gaaggagaggaatactaattatcca

SEQ ID NO: 72015 - DNA, 25 bp, Probe Sequence
agaaggagaggaatactaattatcc

SEQ ID NO: 72016 - DNA, 25 bp, Probe Sequence
aggagaggaatactaattatccatt

SEQ ID NO: 72017 - DNA, 25 bp, Probe Sequence
aaggagaggaatactaattatccat

SEQ ID NO: 72018 - DNA, 25 bp, Probe Sequence
ggagaggaatactaattatccattc

SEQ ID NO: 72019 - DNA, 25 bp, Probe Sequence
aagaaggagaggaatactaattatc

SEQ ID NO: 72020 - DNA, 25 bp, Probe Sequence
gaagaaggagaggaatactaattat

SEQ ID NO: 72021 - DNA, 25 bp, Probe Sequence
atactaattatccattccttttggc

SEQ ID NO: 72022 - DNA, 25 bp, Probe Sequence
ctaattatccattccttttggccct

SEQ ID NO: 72023 - DNA, 25 bp, Probe Sequence
taattatccattccttttggccctg

SEQ ID NO: 72024 - DNA, 25 bp, Probe Sequence
actaattatccattccttttggccc

SEQ ID NO: 72025 - DNA, 25 bp, Probe Sequence
tactaattatccattccttttggcc

SEQ ID NO: 72026 - DNA, 25 bp, Probe Sequence
aattatccattccttttggccctgc

SEQ ID NO: 72027 - DNA, 25 bp, Probe Sequence
aatactaattatccattccttttgg

SEQ ID NO: 72028 - DNA, 25 bp, Probe Sequence
attatccattccttttggccctgca

SEQ ID NO: 72029 - DNA, 25 bp, Probe Sequence
tgccttacacattccttaccaatta

SEQ ID NO: 72030 - DNA, 25 bp, Probe Sequence
gccttacacattccttaccaattaa

SEQ ID NO: 72031 - DNA, 25 bp, Probe Sequence
atgccttacacattccttaccaatt

SEQ ID NO: 72032 - DNA, 25 bp, Probe Sequence
cttacacattccttaccaattaacc

SEQ ID NO: 72033 - DNA, 25 bp, Probe Sequence
ccttacacattccttaccaattaac

SEQ ID NO: 72034 - DNA, 25 bp, Probe Sequence
tacacattccttaccaattaaccca

SEQ ID NO: 72035 - DNA, 25 bp, Probe Sequence
aatgccttacacattccttaccaat

SEQ ID NO: 72036 - DNA, 25 bp, Probe Sequence
ttacacattccttaccaattaaccc

SEQ ID NO: 72037 - DNA, 25 bp, Probe Sequence
acacattccttaccaattaacccac

SEQ ID NO: 72038 - DNA, 25 bp, Probe Sequence
agttactgttccacttacccaaatg

SEQ ID NO: 72039 - DNA, 25 bp, Probe Sequence
cacattccttaccaattaacccacc

SEQ ID NO: 72040 - DNA, 25 bp, Probe Sequence
gttactgttccacttacccaaatgc

SEQ ID NO: 72041 - DNA, 25 bp, Probe Sequence
tttagaagccacccaaggaattagg

SEQ ID NO: 72042 - DNA, 25 bp, Probe Sequence
cttaccaattaacccacccacctac

SEQ ID NO: 72043 - DNA, 25 bp, Probe Sequence
attccttaccaattaacccacccac

SEQ ID NO: 72044 - DNA, 25 bp, Probe Sequence
cattccttaccaattaacccaccca

SEQ ID NO: 72045 - DNA, 25 bp, Probe Sequence
acattccttaccaattaacccaccc

SEQ ID NO: 72046 - DNA, 25 bp, Probe Sequence
ctgttccacttacccaaatgcctta

SEQ ID NO: 72047 - DNA, 25 bp, Probe Sequence
aaatgccttacacattccttaccaa

SEQ ID NO: 72048 - DNA, 25 bp, Probe Sequence
ttccacttacccaaatgccttacac

SEQ ID NO: 72049 - DNA, 25 bp, Probe Sequence
gttccacttacccaaatgccttaca

SEQ ID NO: 72050 - DNA, 25 bp, Probe Sequence
tgttccacttacccaaatgccttac

SEQ ID NO: 72051 - DNA, 25 bp, Probe Sequence
ttactgttccacttacccaaatgcc

SEQ ID NO: 72052 - DNA, 25 bp, Probe Sequence
tagaagccacccaaggaattaggaa

SEQ ID NO: 72053 - DNA, 25 bp, Probe Sequence
aagagaccaatgagaaggactatgt

SEQ ID NO: 72054 - DNA, 25 bp, Probe Sequence
tgtgagagagagagagagagagaga

SEQ ID NO: 72055 - DNA, 25 bp, Probe Sequence
gtgtgagagagagagagagagagag

SEQ ID NO: 72056 - DNA, 25 bp, Probe Sequence
gtgagagagagagagagagagagaa

SEQ ID NO: 72057 - DNA, 25 bp, Probe Sequence
agagaccaatgagaaggactatgtg

SEQ ID NO: 72058 - DNA, 25 bp, Probe Sequence
gaagtcagagaagttaagttcagcc

SEQ ID NO: 72059 - DNA, 25 bp, Probe Sequence
cagagaagttaagttcagcctcata

SEQ ID NO: 72060 - DNA, 25 bp, Probe Sequence
gactatgtggcagtgttaatgagaa

SEQ ID NO: 72061 - DNA, 25 bp, Probe Sequence
gaagttaagttcagcctcatattct

SEQ ID NO: 72062 - DNA, 25 bp, Probe Sequence
agaagttaagttcagcctcatattc

SEQ ID NO: 72063 - DNA, 25 bp, Probe Sequence
gtgtgtgagagagagagagagagag

SEQ ID NO: 72064 - DNA, 25 bp, Probe Sequence
agagaagttaagttcagcctcatat

SEQ ID NO: 72065 - DNA, 25 bp, Probe Sequence
aagtcagagaagttaagttcagcct

SEQ ID NO: 72066 - DNA, 25 bp, Probe Sequence
tgtgtgagagagagagagagagaga

SEQ ID NO: 72067 - DNA, 25 bp, Probe Sequence
ttatccttcttattcttcagatgcc

SEQ ID NO: 72068 - DNA, 25 bp, Probe Sequence
agttaagttcagcctcatattctgt

SEQ ID NO: 72069 - DNA, 25 bp, Probe Sequence
agttcagcctcatattctgtattca

SEQ ID NO: 72070 - DNA, 25 bp, Probe Sequence
gagaagttaagttcagcctcatatt

SEQ ID NO: 72071 - DNA, 25 bp, Probe Sequence
tcagagaagttaagttcagcctcat

SEQ ID NO: 72072 - DNA, 25 bp, Probe Sequence
gaaggactatgtggcagtgttaatg

SEQ ID NO: 72073 - DNA, 25 bp, Probe Sequence
agaaggactatgtggcagtgttaat

SEQ ID NO: 72074 - DNA, 25 bp, Probe Sequence
aagttaagttcagcctcatattctg

SEQ ID NO: 72075 - DNA, 25 bp, Probe Sequence
aaggactatgtggcagtgttaatga

SEQ ID NO: 72076 - DNA, 25 bp, Probe Sequence
gttcagcctcatattctgtattcat

SEQ ID NO: 72077 - DNA, 25 bp, Probe Sequence
ttccatcatcctcgctatcatattc

SEQ ID NO: 72078 - DNA, 25 bp, Probe Sequence
cttccatcatcctcgctatcatatt

SEQ ID NO: 72079 - DNA, 25 bp, Probe Sequence
ccatcatcctcgctatcatattcat

SEQ ID NO: 72080 - DNA, 25 bp, Probe Sequence
tcttccatcatcctcgctatcatat

SEQ ID NO: 72081 - DNA, 25 bp, Probe Sequence
tccatcatcctcgctatcatattca

SEQ ID NO: 72082 - DNA, 25 bp, Probe Sequence
catcatcctcgctatcatattcatt

SEQ ID NO: 72083 - DNA, 25 bp, Probe Sequence
gtcttccatcatcctcgctatcata

SEQ ID NO: 72084 - DNA, 25 bp, Probe Sequence
atgaggacttgtaatagttaggagt

SEQ ID NO: 72085 - DNA, 25 bp, Probe Sequence
tcatcctcgctatcatattcattaa

SEQ ID NO: 72086 - DNA, 25 bp, Probe Sequence
tgaggacttgtaatagttaggagta

SEQ ID NO: 72087 - DNA, 25 bp, Probe Sequence
atcatcctcgctatcatattcatta

SEQ ID NO: 72088 - DNA, 25 bp, Probe Sequence
aatgaggacttgtaatagttaggag

SEQ ID NO: 72089 - DNA, 25 bp, Probe Sequence
tgtgagagcaagatgtaaagatagt

SEQ ID NO: 72090 - DNA, 25 bp, Probe Sequence
aggttacaggatagcaaatatggaa

SEQ ID NO: 72091 - DNA, 25 bp, Probe Sequence
ctgtgagagcaagatgtaaagatag

SEQ ID NO: 72092 - DNA, 25 bp, Probe Sequence
caggatagcaaatatggaatgtgat

SEQ ID NO: 72093 - DNA, 25 bp, Probe Sequence
taggttacaggatagcaaatatgga

SEQ ID NO: 72094 - DNA, 25 bp, Probe Sequence
ggttacaggatagcaaatatggaat

SEQ ID NO: 72095 - DNA, 25 bp, Probe Sequence
gtgagagcaagatgtaaagatagtt

SEQ ID NO: 72096 - DNA, 25 bp, Probe Sequence
gcagaaatgaggacttgtaatagtt

SEQ ID NO: 72097 - DNA, 25 bp, Probe Sequence
acaggatagcaaatatggaatgtga

SEQ ID NO: 72098 - DNA, 25 bp, Probe Sequence
ttaggttacaggatagcaaatatgg

SEQ ID NO: 72099 - DNA, 25 bp, Probe Sequence
tagcaaatatggaatgtgatctagc

SEQ ID NO: 72100 - DNA, 25 bp, Probe Sequence
ggatagcaaatatggaatgtgatct

SEQ ID NO: 72101 - DNA, 25 bp, Probe Sequence
ctatccacctggtcttgttcttatg

SEQ ID NO: 72102 - DNA, 25 bp, Probe Sequence
actatccacctggtcttgttcttat

SEQ ID NO: 72103 - DNA, 25 bp, Probe Sequence
cactatccacctggtcttgttctta

SEQ ID NO: 72104 - DNA, 25 bp, Probe Sequence
acctggtcttgttcttatggactac

SEQ ID NO: 72105 - DNA, 25 bp, Probe Sequence
cacctggtcttgttcttatggacta

SEQ ID NO: 72106 - DNA, 25 bp, Probe Sequence
tgtggagaatagaggaaacttatgc

SEQ ID NO: 72107 - DNA, 25 bp, Probe Sequence
gacattcaagcaagatttctaccag

SEQ ID NO: 72108 - DNA, 25 bp, Probe Sequence
gagacattcaagcaagatttctacc

SEQ ID NO: 72109 - DNA, 25 bp, Probe Sequence
ggagacattcaagcaagatttctac

SEQ ID NO: 72110 - DNA, 25 bp, Probe Sequence
agacattcaagcaagatttctacca

SEQ ID NO: 72111 - DNA, 25 bp, Probe Sequence
tatccacctggtcttgttcttatgg

SEQ ID NO: 72112 - DNA, 25 bp, Probe Sequence
gggagacattcaagcaagatttcta

SEQ ID NO: 72113 - DNA, 25 bp, Probe Sequence
ccctttatcacagagtatgctattt

SEQ ID NO: 72114 - DNA, 25 bp, Probe Sequence
aagattcctcctttgtgttgagtaa

SEQ ID NO: 72115 - DNA, 25 bp, Probe Sequence
gaactcaagattcctcctttgtgtt

SEQ ID NO: 72116 - DNA, 25 bp, Probe Sequence
agattcctcctttgtgttgagtaac

SEQ ID NO: 72117 - DNA, 25 bp, Probe Sequence
caagattcctcctttgtgttgagta

SEQ ID NO: 72118 - DNA, 25 bp, Probe Sequence
ccatgtggagaatagaggaaactta

SEQ ID NO: 72119 - DNA, 25 bp, Probe Sequence
acattcaagcaagatttctaccagc

SEQ ID NO: 72120 - DNA, 25 bp, Probe Sequence
atgtggagaatagaggaaacttatg

SEQ ID NO: 72121 - DNA, 25 bp, Probe Sequence
aactcaagattcctcctttgtgttg

SEQ ID NO: 72122 - DNA, 25 bp, Probe Sequence
cctggtcttgttcttatggactacc

SEQ ID NO: 72123 - DNA, 25 bp, Probe Sequence
ttgtgacaggtttgcctattatctt

SEQ ID NO: 72124 - DNA, 25 bp, Probe Sequence
aacttgtgacaggtttgcctattat

SEQ ID NO: 72125 - DNA, 25 bp, Probe Sequence
aacttaacagatactcagatgtgcc

SEQ ID NO: 72126 - DNA, 25 bp, Probe Sequence
acttaacagatactcagatgtgcct

SEQ ID NO: 72127 - DNA, 25 bp, Probe Sequence
cttaacagatactcagatgtgcctg

SEQ ID NO: 72128 - DNA, 25 bp, Probe Sequence
agttatcttccgttcccatttcaaa

SEQ ID NO: 72129 - DNA, 25 bp, Probe Sequence
ttaacagatactcagatgtgcctgg

SEQ ID NO: 72130 - DNA, 25 bp, Probe Sequence
tatcttccgttcccatttcaaacta

SEQ ID NO: 72131 - DNA, 25 bp, Probe Sequence
aagttatcttccgttcccatttcaa

SEQ ID NO: 72132 - DNA, 25 bp, Probe Sequence
aaagttatcttccgttcccatttca

SEQ ID NO: 72133 - DNA, 25 bp, Probe Sequence
atcttccgttcccatttcaaactaa

SEQ ID NO: 72134 - DNA, 25 bp, Probe Sequence
ttatcttccgttcccatttcaaact

SEQ ID NO: 72135 - DNA, 25 bp, Probe Sequence
gttatcttccgttcccatttcaaac

SEQ ID NO: 72136 - DNA, 25 bp, Probe Sequence
tcttccgttcccatttcaaactaac

SEQ ID NO: 72137 - DNA, 25 bp, Probe Sequence
aaacttaacagatactcagatgtgc

SEQ ID NO: 72138 - DNA, 25 bp, Probe Sequence
taacagatactcagatgtgcctggt

SEQ ID NO: 72139 - DNA, 25 bp, Probe Sequence
gcatgaaacttaacagatactcaga

SEQ ID NO: 72140 - DNA, 25 bp, Probe Sequence
tgaaacttaacagatactcagatgt

SEQ ID NO: 72141 - DNA, 25 bp, Probe Sequence
gaaacttaacagatactcagatgtg

SEQ ID NO: 72142 - DNA, 25 bp, Probe Sequence
tgcatgaaacttaacagatactcag

SEQ ID NO: 72143 - DNA, 25 bp, Probe Sequence
cctgcatgaaacttaacagatactc

SEQ ID NO: 72144 - DNA, 25 bp, Probe Sequence
gacatcgcatcatcaaaagttatct

SEQ ID NO: 72145 - DNA, 25 bp, Probe Sequence
agacatcgcatcatcaaaagttatc

SEQ ID NO: 72146 - DNA, 25 bp, Probe Sequence
gagacatcgcatcatcaaaagttat

SEQ ID NO: 72147 - DNA, 25 bp, Probe Sequence
ctgcatgaaacttaacagatactca

SEQ ID NO: 72148 - DNA, 25 bp, Probe Sequence
aaaagttatcttccgttcccatttc

SEQ ID NO: 72149 - DNA, 25 bp, Probe Sequence
tatcacggtctgttaatccattcat

SEQ ID NO: 72150 - DNA, 25 bp, Probe Sequence
gtatcacggtctgttaatccattca

SEQ ID NO: 72151 - DNA, 25 bp, Probe Sequence
tgtatcacggtctgttaatccattc

SEQ ID NO: 72152 - DNA, 25 bp, Probe Sequence
atgtatcacggtctgttaatccatt

SEQ ID NO: 72153 - DNA, 25 bp, Probe Sequence
tactaagtgactaacaggcaggtag

SEQ ID NO: 72154 - DNA, 25 bp, Probe Sequence
ctactaagtgactaacaggcaggta

SEQ ID NO: 72155 - DNA, 25 bp, Probe Sequence
tagtgccatctgaatgattcttctg

SEQ ID NO: 72156 - DNA, 25 bp, Probe Sequence
ctagtgccatctgaatgattcttct

SEQ ID NO: 72157 - DNA, 25 bp, Probe Sequence
atactactaagtgactaacaggctg

SEQ ID NO: 72158 - DNA, 25 bp, Probe Sequence
aagactactaagtgactaacaggca

SEQ ID NO: 72159 - DNA, 25 bp, Probe Sequence
ggtctgttaatccattcatgtgttg

SEQ ID NO: 72160 - DNA, 25 bp, Probe Sequence
atcatgtatcacggtctgttaatcc

SEQ ID NO: 72161 - DNA, 25 bp, Probe Sequence
tactactaagtgactaacaggctgg

SEQ ID NO: 72162 - DNA, 25 bp, Probe Sequence
gtgccatctgaatgattcttctgaa

SEQ ID NO: 72163 - DNA, 25 bp, Probe Sequence
agactactaagtgactaacaggcag

SEQ ID NO: 72164 - DNA, 25 bp, Probe Sequence
aatactactaagtgactaacaggct

SEQ ID NO: 72165 - DNA, 25 bp, Probe Sequence
gaatactactaagtgactaacaggc

SEQ ID NO: 72166 - DNA, 25 bp, Probe Sequence
catgtatcacggtctgttaatccat

SEQ ID NO: 72167 - DNA, 25 bp, Probe Sequence
tgccatctgaatgattcttctgaag

SEQ ID NO: 72168 - DNA, 25 bp, Probe Sequence
atcacggtctgttaatccattcatg

SEQ ID NO: 72169 - DNA, 25 bp, Probe Sequence
aatgtaattgccagataatcacagt

SEQ ID NO: 72170 - DNA, 25 bp, Probe Sequence
ccattatatcatgtatcacggtctg

SEQ ID NO: 72171 - DNA, 25 bp, Probe Sequence
gtctgttaatccattcatgtgttga

SEQ ID NO: 72172 - DNA, 25 bp, Probe Sequence
tccattatatcatgtatcacggtct

SEQ ID NO: 72173 - DNA, 25 bp, Probe Sequence
gtagtacagagatccagataagagt

SEQ ID NO: 72174 - DNA, 25 bp, Probe Sequence
agtacagagatccagataagagtta

SEQ ID NO: 72175 - DNA, 25 bp, Probe Sequence
tagtacagagatccagataagagtt

SEQ ID NO: 72176 - DNA, 25 bp, Probe Sequence
tgtagtacagagatccagataagag

SEQ ID NO: 72177 - DNA, 25 bp, Probe Sequence
acttgtagtacagagatccagataa

SEQ ID NO: 72178 - DNA, 25 bp, Probe Sequence
aacttgtagtacagagatccagata

SEQ ID NO: 72179 - DNA, 25 bp, Probe Sequence
tattggtgaagaacatgaatccaga

SEQ ID NO: 72180 - DNA, 25 bp, Probe Sequence
attggtgaagaacatgaatccagat

SEQ ID NO: 72181 - DNA, 25 bp, Probe Sequence
ttattggtgaagaacatgaatccag

SEQ ID NO: 72182 - DNA, 25 bp, Probe Sequence
ttgtagtacagagatccagataaga

SEQ ID NO: 72183 - DNA, 25 bp, Probe Sequence
cttgtagtacagagatccagataag

SEQ ID NO: 72184 - DNA, 25 bp, Probe Sequence
tgaagaacatgaatccagatggcat

SEQ ID NO: 72185 - DNA, 25 bp, Probe Sequence
ttggtgaagaacatgaatccagatg

SEQ ID NO: 72186 - DNA, 25 bp, Probe Sequence
gtacagagatccagataagagttaa

SEQ ID NO: 72187 - DNA, 25 bp, Probe Sequence
aagcacatccttgtctaatttcaat

SEQ ID NO: 72188 - DNA, 25 bp, Probe Sequence
agcacatccttgtctaatttcaata

SEQ ID NO: 72189 - DNA, 25 bp, Probe Sequence
aaacttgtagtacagagatccagat

SEQ ID NO: 72190 - DNA, 25 bp, Probe Sequence
ctttattggtgaagaacatgaatcc

SEQ ID NO: 72191 - DNA, 25 bp, Probe Sequence
gtgaagaacatgaatccagatggca

SEQ ID NO: 72192 - DNA, 25 bp, Probe Sequence
gcacatccttgtctaatttcaataa

SEQ ID NO: 72193 - DNA, 25 bp, Probe Sequence
tggtgaagaacatgaatccagatgg

SEQ ID NO: 72194 - DNA, 25 bp, Probe Sequence
caaatgggactgatgtcatcttgag

SEQ ID NO: 72195 - DNA, 25 bp, Probe Sequence
ctttaaggatggtttagaaatggat

SEQ ID NO: 72196 - DNA, 25 bp, Probe Sequence
tttattggtgaagaacatgaatcca

SEQ ID NO: 72197 - DNA, 25 bp, Probe Sequence
gtagtacagagatccagataagagt

SEQ ID NO: 72198 - DNA, 25 bp, Probe Sequence
agtacagagatccagataagagtta

SEQ ID NO: 72199 - DNA, 25 bp, Probe Sequence
tagtacagagatccagataagagtt

SEQ ID NO: 72200 - DNA, 25 bp, Probe Sequence
tgtagtacagagatccagataagag

SEQ ID NO: 72201 - DNA, 25 bp, Probe Sequence
acttgtagtacagagatccagataa

SEQ ID NO: 72202 - DNA, 25 bp, Probe Sequence
aacttgtagtacagagatccagata

SEQ ID NO: 72203 - DNA, 25 bp, Probe Sequence
tattggtgaagaacatgaatccaga

SEQ ID NO: 72204 - DNA, 25 bp, Probe Sequence
attggtgaagaacatgaatccagat

SEQ ID NO: 72205 - DNA, 25 bp, Probe Sequence
ttattggtgaagaacatgaatccag

SEQ ID NO: 72206 - DNA, 25 bp, Probe Sequence
ttgtagtacagagatccagataaga

SEQ ID NO: 72207 - DNA, 25 bp, Probe Sequence
cttgtagtacagagatccagataag

SEQ ID NO: 72208 - DNA, 25 bp, Probe Sequence
tgaagaacatgaatccagatggcat

SEQ ID NO: 72209 - DNA, 25 bp, Probe Sequence
ttggtgaagaacatgaatccagatg

SEQ ID NO: 72210 - DNA, 25 bp, Probe Sequence
gtacagagatccagataagagttaa

SEQ ID NO: 72211 - DNA, 25 bp, Probe Sequence
aagcacatccttgtctaatttcaat

SEQ ID NO: 72212 - DNA, 25 bp, Probe Sequence
agcacatccttgtctaatttcaata

SEQ ID NO: 72213 - DNA, 25 bp, Probe Sequence
aaacttgtagtacagagatccagat

SEQ ID NO: 72214 - DNA, 25 bp, Probe Sequence
ctttattggtgaagaacatgaatcc

SEQ ID NO: 72215 - DNA, 25 bp, Probe Sequence
gtgaagaacatgaatccagatggca

SEQ ID NO: 72216 - DNA, 25 bp, Probe Sequence
gcacatccttgtctaatttcaataa

SEQ ID NO: 72217 - DNA, 25 bp, Probe Sequence
tggtgaagaacatgaatccagatgg

SEQ ID NO: 72218 - DNA, 25 bp, Probe Sequence
caaatgggactgatgtcatcttgag

SEQ ID NO: 72219 - DNA, 25 bp, Probe Sequence
ctttaaggatggtttagaaatggat

SEQ ID NO: 72220 - DNA, 25 bp, Probe Sequence
tttattggtgaagaacatgaatcca

SEQ ID NO: 72221 - DNA, 25 bp, Probe Sequence
gctatgctcctaatccaaccttatt

SEQ ID NO: 72222 - DNA, 25 bp, Probe Sequence
gctaacacagaccattctctactaa

SEQ ID NO: 72223 - DNA, 25 bp, Probe Sequence
tgctatgctcctaatccaaccttat

SEQ ID NO: 72224 - DNA, 25 bp, Probe Sequence
atgctatgctcctaatccaacctta

SEQ ID NO: 72225 - DNA, 25 bp, Probe Sequence
ggctaacacagaccattctctacta

SEQ ID NO: 72226 - DNA, 25 bp, Probe Sequence
cttgatgctatgctcctaatccaac

SEQ ID NO: 72227 - DNA, 25 bp, Probe Sequence
gatgctatgctcctaatccaacctt

SEQ ID NO: 72228 - DNA, 25 bp, Probe Sequence
ccttgatgctatgctcctaatccaa

SEQ ID NO: 72229 - DNA, 25 bp, Probe Sequence
tctacaatgcccttatttcactctg

SEQ ID NO: 72230 - DNA, 25 bp, Probe Sequence
gtctacaatgcccttatttcactct

SEQ ID NO: 72231 - DNA, 25 bp, Probe Sequence
tcagtctacaatgcccttatttcac

SEQ ID NO: 72232 - DNA, 25 bp, Probe Sequence
gtcagtctacaatgcccttatttca

SEQ ID NO: 72233 - DNA, 25 bp, Probe Sequence
ttgatgctatgctcctaatccaacc

SEQ ID NO: 72234 - DNA, 25 bp, Probe Sequence
agcatactggaagagggatttaata

SEQ ID NO: 72235 - DNA, 25 bp, Probe Sequence
tagcatactggaagagggatttaat

SEQ ID NO: 72236 - DNA, 25 bp, Probe Sequence
ctagcatactggaagagggatttaa

SEQ ID NO: 72237 - DNA, 25 bp, Probe Sequence
taatccaaccttatttgcctcattg

SEQ ID NO: 72238 - DNA, 25 bp, Probe Sequence
ctaatccaaccttatttgcctcatt

SEQ ID NO: 72239 - DNA, 25 bp, Probe Sequence
cctaatccaaccttatttgcctcat

SEQ ID NO: 72240 - DNA, 25 bp, Probe Sequence
ctatgctcctaatccaaccttattt

SEQ ID NO: 72241 - DNA, 25 bp, Probe Sequence
agtctacaatgcccttatttcactc

SEQ ID NO: 72242 - DNA, 25 bp, Probe Sequence
cagtctacaatgcccttatttcact

SEQ ID NO: 72243 - DNA, 25 bp, Probe Sequence
gcatactggaagagggatttaataa

SEQ ID NO: 72244 - DNA, 25 bp, Probe Sequence
ctcctaatccaaccttatttgcctc

SEQ ID NO: 72245 - DNA, 25 bp, Probe Sequence
atgtgtatgtgtgtactgtatctgc

SEQ ID NO: 72246 - DNA, 25 bp, Probe Sequence
tattggattcagtcttgtctcttgt

SEQ ID NO: 72247 - DNA, 25 bp, Probe Sequence
attggattcagtcttgtctcttgtc

SEQ ID NO: 72248 - DNA, 25 bp, Probe Sequence
tggattcagtcttgtctcttgtcta

SEQ ID NO: 72249 - DNA, 25 bp, Probe Sequence
ttattggattcagtcttgtctcttg

SEQ ID NO: 72250 - DNA, 25 bp, Probe Sequence
gtggataggagcagactgattacta

SEQ ID NO: 72251 - DNA, 25 bp, Probe Sequence
ggattcagtcttgtctcttgtctag

SEQ ID NO: 72252 - DNA, 25 bp, Probe Sequence
ttggattcagtcttgtctcttgtct

SEQ ID NO: 72253 - DNA, 25 bp, Probe Sequence
gcacttctagtcagatacagattca

SEQ ID NO: 72254 - DNA, 25 bp, Probe Sequence
agcacttctagtcagatacagattc

SEQ ID NO: 72255 - DNA, 25 bp, Probe Sequence
gagcacttctagtcagatacagatt

SEQ ID NO: 72256 - DNA, 25 bp, Probe Sequence
tgagcacttctagtcagatacagat

SEQ ID NO: 72257 - DNA, 25 bp, Probe Sequence
ttatgacactgtattccatctgcct

SEQ ID NO: 72258 - DNA, 25 bp, Probe Sequence
ggataggagcagactgattactatg

SEQ ID NO: 72259 - DNA, 25 bp, Probe Sequence
tggataggagcagactgattactat

SEQ ID NO: 72260 - DNA, 25 bp, Probe Sequence
cttagtattgtggttgacagcgata

SEQ ID NO: 72261 - DNA, 25 bp, Probe Sequence
gataggagcagactgattactatgt

SEQ ID NO: 72262 - DNA, 25 bp, Probe Sequence
aatgtgtatgtgtgtactgtatctg

SEQ ID NO: 72263 - DNA, 25 bp, Probe Sequence
ctagtcagatacagattcatcagtg

SEQ ID NO: 72264 - DNA, 25 bp, Probe Sequence
ataggagcagactgattactatgtc

SEQ ID NO: 72265 - DNA, 25 bp, Probe Sequence
tagtcagatacagattcatcagtgt

SEQ ID NO: 72266 - DNA, 25 bp, Probe Sequence
tctagtcagatacagattcatcagt

SEQ ID NO: 72267 - DNA, 25 bp, Probe Sequence
ttagtattgtggttgacagcgatac

SEQ ID NO: 72268 - DNA, 25 bp, Probe Sequence
tatgacactgtattccatctgcctg

SEQ ID NO: 72269 - DNA, 25 bp, Probe Sequence
gtgtctgccaggattctgtaagaga

SEQ ID NO: 72270 - DNA, 25 bp, Probe Sequence
tgtaagagacagtgcggattgagag

SEQ ID NO: 72271 - DNA, 25 bp, Probe Sequence
ccttgtacttaacatcgccgatctg

SEQ ID NO: 72272 - DNA, 25 bp, Probe Sequence
gaacgaaggttgaaggagtggaaga

SEQ ID NO: 72273 - DNA, 25 bp, Probe Sequence
agaacgaaggttgaaggagtggaag

SEQ ID NO: 72274 - DNA, 25 bp, Probe Sequence
gagaacgaaggttgaaggagtggaa

SEQ ID NO: 72275 - DNA, 25 bp, Probe Sequence
aaggagaacgaaggttgaaggagtg

SEQ ID NO: 72276 - DNA, 25 bp, Probe Sequence
caaggagaacgaaggttgaaggagt

SEQ ID NO: 72277 - DNA, 25 bp, Probe Sequence
aggttgaaggagtggaagaccaatt

SEQ ID NO: 72278 - DNA, 25 bp, Probe Sequence
aaggttgaaggagtggaagaccaat

SEQ ID NO: 72279 - DNA, 25 bp, Probe Sequence
caccttgtacttaacatcgccgatc

SEQ ID NO: 72280 - DNA, 25 bp, Probe Sequence
accttgtacttaacatcgccgatct

SEQ ID NO: 72281 - DNA, 25 bp, Probe Sequence
aacgaaggttgaaggagtggaagac

SEQ ID NO: 72282 - DNA, 25 bp, Probe Sequence
cttgtacttaacatcgccgatctgc

SEQ ID NO: 72283 - DNA, 25 bp, Probe Sequence
ttgaaggagtggaagaccaattgaa

SEQ ID NO: 72284 - DNA, 25 bp, Probe Sequence
gaaggttgaaggagtggaagaccaa

SEQ ID NO: 72285 - DNA, 25 bp, Probe Sequence
ccaaggagaacgaaggttgaaggag

SEQ ID NO: 72286 - DNA, 25 bp, Probe Sequence
tacgtgtctgccaggattctgtaag

SEQ ID NO: 72287 - DNA, 25 bp, Probe Sequence
cgtgtctgccaggattctgtaagag

SEQ ID NO: 72288 - DNA, 25 bp, Probe Sequence
tgaaggagtggaagaccaattgaac

SEQ ID NO: 72289 - DNA, 25 bp, Probe Sequence
gttgaaggagtggaagaccaattga
